United States Patent Application Publication US 2014/0004565 A1 - sequence listing, part 30

SEQ ID NO: 647055 - RNA, 19 nt, Artificial Sequence
  Description of Artificial Sequence: Synthetic oligonucleotide
uaauacuaucaagggacuu

SEQ ID NO: 647056 - RNA, 19 nt, Artificial Sequence
  Description of Artificial Sequence: Synthetic oligonucleotide
uccguuuaugaagacgauu

SEQ ID NO: 647057 - RNA, 19 nt, Artificial Sequence
  Description of Artificial Sequence: Synthetic oligonucleotide
uccccguaacuugauguca

SEQ ID NO: 647058 - RNA, 19 nt, Artificial Sequence
  Description of Artificial Sequence: Synthetic oligonucleotide
gcuaucaccggcagcgugg

SEQ ID NO: 647059 - RNA, 19 nt, Artificial Sequence
  Description of Artificial Sequence: Synthetic oligonucleotide
aucuaagaauuugcgugca

SEQ ID NO: 647060 - RNA, 19 nt, Artificial Sequence
  Description of Artificial Sequence: Synthetic oligonucleotide
ucucgggacaguacaugua

SEQ ID NO: 647061 - RNA, 19 nt, Artificial Sequence
  Description of Artificial Sequence: Synthetic oligonucleotide
uccuaguauguuggcauuc

SEQ ID NO: 647062 - RNA, 19 nt, Artificial Sequence
  Description of Artificial Sequence: Synthetic oligonucleotide
cuccccguaacuugauguc

SEQ ID NO: 647063 - RNA, 19 nt, Artificial Sequence
  Description of Artificial Sequence: Synthetic oligonucleotide
gauagcuggugggcgggag

SEQ ID NO: 647064 - RNA, 19 nt, Artificial Sequence
  Description of Artificial Sequence: Synthetic oligonucleotide
ggugccagcccuaaaauaa

SEQ ID NO: 647065 - RNA, 19 nt, Artificial Sequence
  Description of Artificial Sequence: Synthetic oligonucleotide
gguccgagaaugaugucgc

SEQ ID NO: 647066 - RNA, 19 nt, Artificial Sequence
  Description of Artificial Sequence: Synthetic oligonucleotide
acaggauaaccgccuugca

SEQ ID NO: 647067 - RNA, 19 nt, Artificial Sequence
  Description of Artificial Sequence: Synthetic oligonucleotide
guggagcauguagaagagg

SEQ ID NO: 647068 - RNA, 19 nt, Artificial Sequence
  Description of Artificial Sequence: Synthetic oligonucleotide
auucgaugccuugauccgu

SEQ ID NO: 647069 - RNA, 19 nt, Artificial Sequence
  Description of Artificial Sequence: Synthetic oligonucleotide
ugaauugaucgggcuggga

SEQ ID NO: 647070 - RNA, 19 nt, Artificial Sequence
  Description of Artificial Sequence: Synthetic oligonucleotide
acucucgggacaguacaug

SEQ ID NO: 647071 - RNA, 19 nt, Artificial Sequence
  Description of Artificial Sequence: Synthetic oligonucleotide
cuaauacuaucaagggacu

SEQ ID NO: 647072 - RNA, 19 nt, Artificial Sequence
  Description of Artificial Sequence: Synthetic oligonucleotide
gccucgucgaagaacacgc

SEQ ID NO: 647073 - RNA, 19 nt, Artificial Sequence
  Description of Artificial Sequence: Synthetic oligonucleotide
aaugccccggaugaaccuu

SEQ ID NO: 647074 - RNA, 19 nt, Artificial Sequence
  Description of Artificial Sequence: Synthetic oligonucleotide
acguguguguacacgucag

SEQ ID NO: 647075 - RNA, 19 nt, Artificial Sequence
  Description of Artificial Sequence: Synthetic oligonucleotide
cacguguguguacacguca

SEQ ID NO: 647076 - RNA, 19 nt, Artificial Sequence
  Description of Artificial Sequence: Synthetic oligonucleotide
ggagaugauacaacaccac

SEQ ID NO: 647077 - RNA, 19 nt, Artificial Sequence
  Description of Artificial Sequence: Synthetic oligonucleotide
cuuggcggcaucuaagaau

SEQ ID NO: 647078 - RNA, 19 nt, Artificial Sequence
  Description of Artificial Sequence: Synthetic oligonucleotide
uucaaggacugugguggac

SEQ ID NO: 647079 - RNA, 19 nt, Artificial Sequence
  Description of Artificial Sequence: Synthetic oligonucleotide
cuugugcggcaucuccuug

SEQ ID NO: 647080 - RNA, 19 nt, Artificial Sequence
  Description of Artificial Sequence: Synthetic oligonucleotide
cuaucaccggcagcguggc

SEQ ID NO: 647081 - RNA, 19 nt, Artificial Sequence
  Description of Artificial Sequence: Synthetic oligonucleotide
ccucauuagagcuuguucu

SEQ ID NO: 647082 - RNA, 19 nt, Artificial Sequence
  Description of Artificial Sequence: Synthetic oligonucleotide
ccugaugguggacaacuac

SEQ ID NO: 647083 - RNA, 19 nt, Artificial Sequence
  Description of Artificial Sequence: Synthetic oligonucleotide
auccuaguauguuggcauu

SEQ ID NO: 647084 - RNA, 19 nt, Artificial Sequence
  Description of Artificial Sequence: Synthetic oligonucleotide
gccucauuagagcuuguuc

SEQ ID NO: 647085 - RNA, 19 nt, Artificial Sequence
  Description of Artificial Sequence: Synthetic oligonucleotide
cagcacguguguguacacg

SEQ ID NO: 647086 - RNA, 19 nt, Artificial Sequence
  Description of Artificial Sequence: Synthetic oligonucleotide
gguucccucgcaaacgcug

SEQ ID NO: 647087 - RNA, 19 nt, Artificial Sequence
  Description of Artificial Sequence: Synthetic oligonucleotide
gcucgcacugauaaugaug

SEQ ID NO: 647088 - RNA, 19 nt, Artificial Sequence
  Description of Artificial Sequence: Synthetic oligonucleotide
ggcggcaucuaagaauuug

SEQ ID NO: 647089 - RNA, 19 nt, Artificial Sequence
  Description of Artificial Sequence: Synthetic oligonucleotide
ucccguacuauuggagguc

SEQ ID NO: 647090 - RNA, 19 nt, Artificial Sequence
  Description of Artificial Sequence: Synthetic oligonucleotide
gucucguucugaaaggcua

SEQ ID NO: 647091 - RNA, 19 nt, Artificial Sequence
  Description of Artificial Sequence: Synthetic oligonucleotide
ugccccggaugaaccuuag

SEQ ID NO: 647092 - RNA, 19 nt, Artificial Sequence
  Description of Artificial Sequence: Synthetic oligonucleotide
agacuucguuucucaggca

SEQ ID NO: 647093 - RNA, 19 nt, Artificial Sequence
  Description of Artificial Sequence: Synthetic oligonucleotide
uuccacgaauggugacagc

SEQ ID NO: 647094 - RNA, 19 nt, Artificial Sequence
  Description of Artificial Sequence: Synthetic oligonucleotide
ggccucgucgaagaacacg

SEQ ID NO: 647095 - RNA, 19 nt, Artificial Sequence
  Description of Artificial Sequence: Synthetic oligonucleotide
cccuuuaacgaccacucca

SEQ ID NO: 647096 - RNA, 19 nt, Artificial Sequence
  Description of Artificial Sequence: Synthetic oligonucleotide
auuugcgugcagaaauguu

SEQ ID NO: 647097 - RNA, 19 nt, Artificial Sequence
  Description of Artificial Sequence: Synthetic oligonucleotide
caaacgcugguuucgcugu

SEQ ID NO: 647098 - RNA, 19 nt, Artificial Sequence
  Description of Artificial Sequence: Synthetic oligonucleotide
ucgagguccucuggacagc

SEQ ID NO: 647099 - RNA, 19 nt, Artificial Sequence
  Description of Artificial Sequence: Synthetic oligonucleotide
uagcuccacccgaucgaac

SEQ ID NO: 647100 - RNA, 19 nt, Artificial Sequence
  Description of Artificial Sequence: Synthetic oligonucleotide
ggcccuuuaacgaccacuc

SEQ ID NO: 647101 - RNA, 19 nt, Artificial Sequence
  Description of Artificial Sequence: Synthetic oligonucleotide
cacgucagacugguccacc

SEQ ID NO: 647102 - RNA, 19 nt, Artificial Sequence
  Description of Artificial Sequence: Synthetic oligonucleotide
ggaaaguaacagugccauc

SEQ ID NO: 647103 - RNA, 19 nt, Artificial Sequence
  Description of Artificial Sequence: Synthetic oligonucleotide
ggcuaucaccggcagcgug

SEQ ID NO: 647104 - RNA, 19 nt, Artificial Sequence
  Description of Artificial Sequence: Synthetic oligonucleotide
gguuucgcuguucgaagaa

SEQ ID NO: 647105 - RNA, 19 nt, Artificial Sequence
  Description of Artificial Sequence: Synthetic oligonucleotide
gcugguuucgcuguucgaa

SEQ ID NO: 647106 - RNA, 19 nt, Artificial Sequence
  Description of Artificial Sequence: Synthetic oligonucleotide
ucgcacugauaaugauguc

SEQ ID NO: 647107 - RNA, 19 nt, Artificial Sequence
  Description of Artificial Sequence: Synthetic oligonucleotide
cucccguacuauuggaggu

SEQ ID NO: 647108 - RNA, 19 nt, Artificial Sequence
  Description of Artificial Sequence: Synthetic oligonucleotide
cuuuaucuggcaagagauu

SEQ ID NO: 647109 - RNA, 19 nt, Artificial Sequence
  Description of Artificial Sequence: Synthetic oligonucleotide
guugaccggguucgccuuc

SEQ ID NO: 647110 - RNA, 19 nt, Artificial Sequence
  Description of Artificial Sequence: Synthetic oligonucleotide
agcguggcucugucugacu

SEQ ID NO: 647111 - RNA, 19 nt, Artificial Sequence
  Description of Artificial Sequence: Synthetic oligonucleotide
cagcagaauccuaguaugu

SEQ ID NO: 647112 - RNA, 19 nt, Artificial Sequence
  Description of Artificial Sequence: Synthetic oligonucleotide
caguugaccggguucgccu

SEQ ID NO: 647113 - RNA, 19 nt, Artificial Sequence
  Description of Artificial Sequence: Synthetic oligonucleotide
ugcuccggcuuugcccugc

SEQ ID NO: 647114 - RNA, 19 nt, Artificial Sequence
  Description of Artificial Sequence: Synthetic oligonucleotide
gcaccggccgcucgcacag

SEQ ID NO: 647115 - RNA, 19 nt, Artificial Sequence
  Description of Artificial Sequence: Synthetic oligonucleotide
uaucaccggcagcguggcu

SEQ ID NO: 647116 - RNA, 19 nt, Artificial Sequence
  Description of Artificial Sequence: Synthetic oligonucleotide
cccguacuauuggaggucc

SEQ ID NO: 647117 - RNA, 19 nt, Artificial Sequence
  Description of Artificial Sequence: Synthetic oligonucleotide
gcccuuuaacgaccacucc

SEQ ID NO: 647118 - RNA, 19 nt, Artificial Sequence
  Description of Artificial Sequence: Synthetic oligonucleotide
cuuuaacgaccacuccagu

SEQ ID NO: 647119 - RNA, 19 nt, Artificial Sequence
  Description of Artificial Sequence: Synthetic oligonucleotide
ccgugggagaugauacaac

SEQ ID NO: 647120 - RNA, 19 nt, Artificial Sequence
  Description of Artificial Sequence: Synthetic oligonucleotide
guccgagaaugaugucgca

SEQ ID NO: 647121 - RNA, 19 nt, Artificial Sequence
  Description of Artificial Sequence: Synthetic oligonucleotide
cagcguggcucugucugac

SEQ ID NO: 647122 - RNA, 19 nt, Artificial Sequence
  Description of Artificial Sequence: Synthetic oligonucleotide
gcguggcucugucugacuc

SEQ ID NO: 647123 - RNA, 19 nt, Artificial Sequence
  Description of Artificial Sequence: Synthetic oligonucleotide
acccucccgugggagauga

SEQ ID NO: 647124 - RNA, 19 nt, Artificial Sequence
  Description of Artificial Sequence: Synthetic oligonucleotide
gcaguugaccggguucgcc

SEQ ID NO: 647125 - RNA, 19 nt, Artificial Sequence
  Description of Artificial Sequence: Synthetic oligonucleotide
ccguacuauuggagguccg

SEQ ID NO: 647126 - RNA, 19 nt, Artificial Sequence
  Description of Artificial Sequence: Synthetic oligonucleotide
ccucgcaaacgcugguuuc

SEQ ID NO: 647127 - RNA, 19 nt, Artificial Sequence
  Description of Artificial Sequence: Synthetic oligonucleotide
aggcaacaccugguaaaau

SEQ ID NO: 647128 - RNA, 19 nt, Artificial Sequence
  Description of Artificial Sequence: Synthetic oligonucleotide
cguccuauuuaacuucaga

SEQ ID NO: 647129 - RNA, 19 nt, Artificial Sequence
  Description of Artificial Sequence: Synthetic oligonucleotide
ugaccggguucgccuucuc

SEQ ID NO: 647130 - RNA, 19 nt, Artificial Sequence
  Description of Artificial Sequence: Synthetic oligonucleotide
cccguccuauuuaacuuca

SEQ ID NO: 647131 - RNA, 19 nt, Artificial Sequence
  Description of Artificial Sequence: Synthetic oligonucleotide
gguacccuuggcucgcacu

SEQ ID NO: 647132 - RNA, 19 nt, Artificial Sequence
  Description of Artificial Sequence: Synthetic oligonucleotide
caaugccccggaugaaccu

SEQ ID NO: 647133 - RNA, 19 nt, Artificial Sequence
  Description of Artificial Sequence: Synthetic oligonucleotide
ccguccuauuuaacuucag

SEQ ID NO: 647134 - RNA, 19 nt, Artificial Sequence
  Description of Artificial Sequence: Synthetic oligonucleotide
uggcggcaucuaagaauuu

SEQ ID NO: 647135 - RNA, 19 nt, Artificial Sequence
  Description of Artificial Sequence: Synthetic oligonucleotide
accuccgcucccguacuau

SEQ ID NO: 647136 - RNA, 19 nt, Artificial Sequence
  Description of Artificial Sequence: Synthetic oligonucleotide
gccccggaugaaccuuagg

SEQ ID NO: 647137 - RNA, 19 nt, Artificial Sequence
  Description of Artificial Sequence: Synthetic oligonucleotide
uaaccgccuugcacuccuu

SEQ ID NO: 647138 - RNA, 19 nt, Artificial Sequence
  Description of Artificial Sequence: Synthetic oligonucleotide
accggcagcguggcucugu

SEQ ID NO: 647139 - RNA, 19 nt, Artificial Sequence
  Description of Artificial Sequence: Synthetic oligonucleotide
cgagaaugaugucgcagga

SEQ ID NO: 647140 - RNA, 19 nt, Artificial Sequence
  Description of Artificial Sequence: Synthetic oligonucleotide
ccccguaacuugaugucaa

SEQ ID NO: 647141 - RNA, 19 nt, Artificial Sequence
  Description of Artificial Sequence: Synthetic oligonucleotide
gcuguacgguaaucugaaa

SEQ ID NO: 647142 - RNA, 19 nt, Artificial Sequence
  Description of Artificial Sequence: Synthetic oligonucleotide
cacucucgggacaguacau

SEQ ID NO: 647143 - RNA, 19 nt, Artificial Sequence
  Description of Artificial Sequence: Synthetic oligonucleotide
augccccggaugaaccuua

SEQ ID NO: 647144 - RNA, 19 nt, Artificial Sequence
  Description of Artificial Sequence: Synthetic oligonucleotide
gcacguguguguacacguc

SEQ ID NO: 647145 - RNA, 19 nt, Artificial Sequence
  Description of Artificial Sequence: Synthetic oligonucleotide
gucgcaggaagaggacgua

SEQ ID NO: 647146 - RNA, 19 nt, Artificial Sequence
  Description of Artificial Sequence: Synthetic oligonucleotide
cguacuauuggagguccga

SEQ ID NO: 647147 - RNA, 19 nt, Artificial Sequence
  Description of Artificial Sequence: Synthetic oligonucleotide
ccgcacuggccuuuugaga

SEQ ID NO: 647148 - RNA, 19 nt, Artificial Sequence
  Description of Artificial Sequence: Synthetic oligonucleotide
cuguucgaagaagcggaau

SEQ ID NO: 647149 - RNA, 19 nt, Artificial Sequence
  Description of Artificial Sequence: Synthetic oligonucleotide
guauuccagcugagaguua

SEQ ID NO: 647150 - RNA, 19 nt, Artificial Sequence
  Description of Artificial Sequence: Synthetic oligonucleotide
ccuaguauguuggcauucu

SEQ ID NO: 647151 - RNA, 19 nt, Artificial Sequence
  Description of Artificial Sequence: Synthetic oligonucleotide
ccgcucgcacagcuccagg

SEQ ID NO: 647152 - RNA, 19 nt, Artificial Sequence
  Description of Artificial Sequence: Synthetic oligonucleotide
ggacaacuaccagguuguc

SEQ ID NO: 647153 - RNA, 19 nt, Artificial Sequence
  Description of Artificial Sequence: Synthetic oligonucleotide
cacccucccgugggagaug

SEQ ID NO: 647154 - RNA, 19 nt, Artificial Sequence
  Description of Artificial Sequence: Synthetic oligonucleotide
gcuaaguuugguggacuuu

SEQ ID NO: 647155 - RNA, 19 nt, Artificial Sequence
  Description of Artificial Sequence: Synthetic oligonucleotide
cggguucgccuucucgaac

SEQ ID NO: 647156 - RNA, 19 nt, Artificial Sequence
  Description of Artificial Sequence: Synthetic oligonucleotide
ggcucgcacugauaaugau

SEQ ID NO: 647157 - RNA, 19 nt, Artificial Sequence
  Description of Artificial Sequence: Synthetic oligonucleotide
aggccucauuagagcuugu

SEQ ID NO: 647158 - RNA, 19 nt, Artificial Sequence
  Description of Artificial Sequence: Synthetic oligonucleotide
ccggguucgccuucucgaa

SEQ ID NO: 647159 - RNA, 19 nt, Artificial Sequence
  Description of Artificial Sequence: Synthetic oligonucleotide
ccggcagcguggcucuguc

SEQ ID NO: 647160 - RNA, 19 nt, Artificial Sequence
  Description of Artificial Sequence: Synthetic oligonucleotide
ccaaagguuuggagucgcu

SEQ ID NO: 647161 - RNA, 19 nt, Artificial Sequence
  Description of Artificial Sequence: Synthetic oligonucleotide
gguggacaacuaccagguu

SEQ ID NO: 647162 - RNA, 19 nt, Artificial Sequence
  Description of Artificial Sequence: Synthetic oligonucleotide
caccggccgcucgcacagc

SEQ ID NO: 647163 - RNA, 19 nt, Artificial Sequence
  Description of Artificial Sequence: Synthetic oligonucleotide
caccuccgcucccguacua

SEQ ID NO: 647164 - RNA, 19 nt, Artificial Sequence
  Description of Artificial Sequence: Synthetic oligonucleotide
ggccucauuagagcuuguu

SEQ ID NO: 647165 - RNA, 19 nt, Artificial Sequence
  Description of Artificial Sequence: Synthetic oligonucleotide
cgcaguugaccggguucgc

SEQ ID NO: 647166 - RNA, 19 nt, Artificial Sequence
  Description of Artificial Sequence: Synthetic oligonucleotide
cccucgcaaacgcugguuu

SEQ ID NO: 647167 - RNA, 19 nt, Artificial Sequence
  Description of Artificial Sequence: Synthetic oligonucleotide
gcacccucccgugggagau

SEQ ID NO: 647168 - RNA, 19 nt, Artificial Sequence
  Description of Artificial Sequence: Synthetic oligonucleotide
cgguaaucugaaacugguu

SEQ ID NO: 647169 - RNA, 19 nt, Artificial Sequence
  Description of Artificial Sequence: Synthetic oligonucleotide
cgcaaacgcugguuucgcu

SEQ ID NO: 647170 - RNA, 19 nt, Artificial Sequence
  Description of Artificial Sequence: Synthetic oligonucleotide
ccaccuccgcucccguacu

SEQ ID NO: 647171 - RNA, 19 nt, Artificial Sequence
  Description of Artificial Sequence: Synthetic oligonucleotide
ccuccgcucccguacuauu

SEQ ID NO: 647172 - RNA, 19 nt, Artificial Sequence
  Description of Artificial Sequence: Synthetic oligonucleotide
uccucauucacuaauaggc

SEQ ID NO: 647173 - RNA, 19 nt, Artificial Sequence
  Description of Artificial Sequence: Synthetic oligonucleotide
acucuaaccucccacaucc

SEQ ID NO: 647174 - RNA, 19 nt, Artificial Sequence
  Description of Artificial Sequence: Synthetic oligonucleotide
uguuccgccaaucaguugg

SEQ ID NO: 647175 - RNA, 19 nt, Artificial Sequence
  Description of Artificial Sequence: Synthetic oligonucleotide
auuguaaccuuucagcuuc

SEQ ID NO: 647176 - RNA, 19 nt, Artificial Sequence
  Description of Artificial Sequence: Synthetic oligonucleotide
aaggaaaaccgccggaggc

SEQ ID NO: 647177 - RNA, 19 nt, Artificial Sequence
  Description of Artificial Sequence: Synthetic oligonucleotide
auauuuauauuugagacga

SEQ ID NO: 647178 - RNA, 19 nt, Artificial Sequence
  Description of Artificial Sequence: Synthetic oligonucleotide
gauguggcaauccaguaag

SEQ ID NO: 647179 - RNA, 19 nt, Artificial Sequence
  Description of Artificial Sequence: Synthetic oligonucleotide
acuauccacagcuaccacc

SEQ ID NO: 647180 - RNA, 19 nt, Artificial Sequence
  Description of Artificial Sequence: Synthetic oligonucleotide
uccauauaucagcagaaag

SEQ ID NO: 647181 - RNA, 19 nt, Artificial Sequence
  Description of Artificial Sequence: Synthetic oligonucleotide
agaggguagacccaucggc

SEQ ID NO: 647182 - RNA, 19 nt, Artificial Sequence
  Description of Artificial Sequence: Synthetic oligonucleotide
aguuguuacgugcaagugg

SEQ ID NO: 647183 - RNA, 19 nt, Artificial Sequence
  Description of Artificial Sequence: Synthetic oligonucleotide
aucucuacugcccuggaac

SEQ ID NO: 647184 - RNA, 19 nt, Artificial Sequence
  Description of Artificial Sequence: Synthetic oligonucleotide
uugguagucaaaauugucu

SEQ ID NO: 647185 - RNA, 19 nt, Artificial Sequence
  Description of Artificial Sequence: Synthetic oligonucleotide
uuuauauuugagacgacau

SEQ ID NO: 647186 - RNA, 19 nt, Artificial Sequence
  Description of Artificial Sequence: Synthetic oligonucleotide
gaagaguugagcuaccuga

SEQ ID NO: 647187 - RNA, 19 nt, Artificial Sequence
  Description of Artificial Sequence: Synthetic oligonucleotide
caaccaguaacacaccucg

SEQ ID NO: 647188 - RNA, 19 nt, Artificial Sequence
  Description of Artificial Sequence: Synthetic oligonucleotide
uccauauugaucgugaguc

SEQ ID NO: 647189 - RNA, 19 nt, Artificial Sequence
  Description of Artificial Sequence: Synthetic oligonucleotide
aguaacacaccucgggaac

SEQ ID NO: 647190 - RNA, 19 nt, Artificial Sequence
  Description of Artificial Sequence: Synthetic oligonucleotide
guagaaggccaucagaacc

SEQ ID NO: 647191 - RNA, 19 nt, Artificial Sequence
  Description of Artificial Sequence: Synthetic oligonucleotide
cuuuacuguucccugaggg

SEQ ID NO: 647192 - RNA, 19 nt, Artificial Sequence
  Description of Artificial Sequence: Synthetic oligonucleotide
aauguuguaggcauacuug

SEQ ID NO: 647193 - RNA, 19 nt, Artificial Sequence
  Description of Artificial Sequence: Synthetic oligonucleotide
uuugugauccagaagccac

SEQ ID NO: 647194 - RNA, 19 nt, Artificial Sequence
  Description of Artificial Sequence: Synthetic oligonucleotide
uguuaugucgggaaugagu

SEQ ID NO: 647195 - RNA, 19 nt, Artificial Sequence
  Description of Artificial Sequence: Synthetic oligonucleotide
agcaauugcuaccaaugac

SEQ ID NO: 647196 - RNA, 19 nt, Artificial Sequence
  Description of Artificial Sequence: Synthetic oligonucleotide
cucgguagauguuaugucg

SEQ ID NO: 647197 - RNA, 19 nt, Artificial Sequence
  Description of Artificial Sequence: Synthetic oligonucleotide
uucccuagaauuuuguuuc

SEQ ID NO: 647198 - RNA, 19 nt, Artificial Sequence
  Description of Artificial Sequence: Synthetic oligonucleotide
aucccuggccuucaaagcc

SEQ ID NO: 647199 - RNA, 19 nt, Artificial Sequence
  Description of Artificial Sequence: Synthetic oligonucleotide
ucgguagauguuaugucgg

SEQ ID NO: 647200 - RNA, 19 nt, Artificial Sequence
  Description of Artificial Sequence: Synthetic oligonucleotide
uuaguuguuacgugcaagu

SEQ ID NO: 647201 - RNA, 19 nt, Artificial Sequence
  Description of Artificial Sequence: Synthetic oligonucleotide
accaguaacacaccucggg

SEQ ID NO: 647202 - RNA, 19 nt, Artificial Sequence
  Description of Artificial Sequence: Synthetic oligonucleotide
aguuugguagucaaaauug

SEQ ID NO: 647203 - RNA, 19 nt, Artificial Sequence
  Description of Artificial Sequence: Synthetic oligonucleotide
aaggaaaggaaaaccgccg

SEQ ID NO: 647204 - RNA, 19 nt, Artificial Sequence
  Description of Artificial Sequence: Synthetic oligonucleotide
ucacuaauaggccucgaac

SEQ ID NO: 647205 - RNA, 19 nt, Artificial Sequence
  Description of Artificial Sequence: Synthetic oligonucleotide
auguguagguuggagaccc

SEQ ID NO: 647206 - RNA, 19 nt, Artificial Sequence
  Description of Artificial Sequence: Synthetic oligonucleotide
caguaagucauaucgaauc

SEQ ID NO: 647207 - RNA, 19 nt, Artificial Sequence
  Description of Artificial Sequence: Synthetic oligonucleotide
uaaccugugcuccucuagg

SEQ ID NO: 647208 - RNA, 19 nt, Artificial Sequence
  Description of Artificial Sequence: Synthetic oligonucleotide
uauuccuuaguuguuacgu

SEQ ID NO: 647209 - RNA, 19 nt, Artificial Sequence
  Description of Artificial Sequence: Synthetic oligonucleotide
cauauaucagcagaaaguc

SEQ ID NO: 647210 - RNA, 19 nt, Artificial Sequence
  Description of Artificial Sequence: Synthetic oligonucleotide
guuaugucgggaaugagug

SEQ ID NO: 647211 - RNA, 19 nt, Artificial Sequence
  Description of Artificial Sequence: Synthetic oligonucleotide
uauuugugauccagaagcc

SEQ ID NO: 647212 - RNA, 19 nt, Artificial Sequence
  Description of Artificial Sequence: Synthetic oligonucleotide
caagauuguuuccucagcc

SEQ ID NO: 647213 - RNA, 19 nt, Artificial Sequence
  Description of Artificial Sequence: Synthetic oligonucleotide
aucucuuugacugaaccag

SEQ ID NO: 647214 - RNA, 19 nt, Artificial Sequence
  Description of Artificial Sequence: Synthetic oligonucleotide
acgacaucuccauauauca

SEQ ID NO: 647215 - RNA, 19 nt, Artificial Sequence
  Description of Artificial Sequence: Synthetic oligonucleotide
uuccuuaguuguuacgugc

SEQ ID NO: 647216 - RNA, 19 nt, Artificial Sequence
  Description of Artificial Sequence: Synthetic oligonucleotide
caauugcuaccaaugacag

SEQ ID NO: 647217 - RNA, 19 nt, Artificial Sequence
  Description of Artificial Sequence: Synthetic oligonucleotide
auuuauauuugagacgaca

SEQ ID NO: 647218 - RNA, 19 nt, Artificial Sequence
  Description of Artificial Sequence: Synthetic oligonucleotide
uuugguagucaaaauuguc

SEQ ID NO: 647219 - RNA, 19 nt, Artificial Sequence
  Description of Artificial Sequence: Synthetic oligonucleotide
uuaaccugugcuccucuag

SEQ ID NO: 647220 - RNA, 19 nt, Artificial Sequence
  Description of Artificial Sequence: Synthetic oligonucleotide
acuagauugucacaagaaa

SEQ ID NO: 647221 - RNA, 19 nt, Artificial Sequence
  Description of Artificial Sequence: Synthetic oligonucleotide
agcgguuugggucaagcag

SEQ ID NO: 647222 - RNA, 19 nt, Artificial Sequence
  Description of Artificial Sequence: Synthetic oligonucleotide
ugagacgacaucuccauau

SEQ ID NO: 647223 - RNA, 19 nt, Artificial Sequence
  Description of Artificial Sequence: Synthetic oligonucleotide
uguagguuggagacccggg

SEQ ID NO: 647224 - RNA, 19 nt, Artificial Sequence
  Description of Artificial Sequence: Synthetic oligonucleotide
uggaauacuuuaaugucau

SEQ ID NO: 647225 - RNA, 19 nt, Artificial Sequence
  Description of Artificial Sequence: Synthetic oligonucleotide
ugaguacauguguagguug

SEQ ID NO: 647226 - RNA, 19 nt, Artificial Sequence
  Description of Artificial Sequence: Synthetic oligonucleotide
uaggggaugacucuuugaa

SEQ ID NO: 647227 - RNA, 19 nt, Artificial Sequence
  Description of Artificial Sequence: Synthetic oligonucleotide
uuuguggcacuauccacag

SEQ ID NO: 647228 - RNA, 19 nt, Artificial Sequence
  Description of Artificial Sequence: Synthetic oligonucleotide
acuaaacuggccaucaucu

SEQ ID NO: 647229 - RNA, 19 nt, Artificial Sequence
  Description of Artificial Sequence: Synthetic oligonucleotide
ugaagaguugagcuaccug

SEQ ID NO: 647230 - RNA, 19 nt, Artificial Sequence
  Description of Artificial Sequence: Synthetic oligonucleotide
aacgucacggaggacaucu

SEQ ID NO: 647231 - RNA, 19 nt, Artificial Sequence
  Description of Artificial Sequence: Synthetic oligonucleotide
aggguguaaagagaucacc

SEQ ID NO: 647232 - RNA, 19 nt, Artificial Sequence
  Description of Artificial Sequence: Synthetic oligonucleotide
uuugagacgacaucuccau

SEQ ID NO: 647233 - RNA, 19 nt, Artificial Sequence
  Description of Artificial Sequence: Synthetic oligonucleotide
ucauucacuaauaggccuc

SEQ ID NO: 647234 - RNA, 19 nt, Artificial Sequence
  Description of Artificial Sequence: Synthetic oligonucleotide
ucugucuagauuuucccua

SEQ ID NO: 647235 - RNA, 19 nt, Artificial Sequence
  Description of Artificial Sequence: Synthetic oligonucleotide
cuuuaggcuaauguuguag

SEQ ID NO: 647236 - RNA, 19 nt, Artificial Sequence
  Description of Artificial Sequence: Synthetic oligonucleotide
cauauugaucgugaguccc

SEQ ID NO: 647237 - RNA, 19 nt, Artificial Sequence
  Description of Artificial Sequence: Synthetic oligonucleotide
ucuaaccucccacauccca

SEQ ID NO: 647238 - RNA, 19 nt, Artificial Sequence
  Description of Artificial Sequence: Synthetic oligonucleotide
gaguacauguguagguugg

SEQ ID NO: 647239 - RNA, 19 nt, Artificial Sequence
  Description of Artificial Sequence: Synthetic oligonucleotide
caguuagggccaaugacgc

SEQ ID NO: 647240 - RNA, 19 nt, Artificial Sequence
  Description of Artificial Sequence: Synthetic oligonucleotide
uggaacagguucaaaggaa

SEQ ID NO: 647241 - RNA, 19 nt, Artificial Sequence
  Description of Artificial Sequence: Synthetic oligonucleotide
ugacugaaccagcucaaga

SEQ ID NO: 647242 - RNA, 19 nt, Artificial Sequence
  Description of Artificial Sequence: Synthetic oligonucleotide
caaagccuacuucugcugg

SEQ ID NO: 647243 - RNA, 19 nt, Artificial Sequence
  Description of Artificial Sequence: Synthetic oligonucleotide
gaguugagcuaccugagga

SEQ ID NO: 647244 - RNA, 19 nt, Artificial Sequence
  Description of Artificial Sequence: Synthetic oligonucleotide
uccaauugaggggacacug

SEQ ID NO: 647245 - RNA, 19 nt, Artificial Sequence
  Description of Artificial Sequence: Synthetic oligonucleotide
aucaacgucacggaggaca

SEQ ID NO: 647246 - RNA, 19 nt, Artificial Sequence
  Description of Artificial Sequence: Synthetic oligonucleotide
uccuuaguuguuacgugca

SEQ ID NO: 647247 - RNA, 19 nt, Artificial Sequence
  Description of Artificial Sequence: Synthetic oligonucleotide
aaucaguuggguggacaac

SEQ ID NO: 647248 - RNA, 19 nt, Artificial Sequence
  Description of Artificial Sequence: Synthetic oligonucleotide
auucuugcgcaaccgcugg

SEQ ID NO: 647249 - RNA, 19 nt, Artificial Sequence
  Description of Artificial Sequence: Synthetic oligonucleotide
acuucagucaggaugagaa

SEQ ID NO: 647250 - RNA, 19 nt, Artificial Sequence
  Description of Artificial Sequence: Synthetic oligonucleotide
auauugaucgugagucccc

SEQ ID NO: 647251 - RNA, 19 nt, Artificial Sequence
  Description of Artificial Sequence: Synthetic oligonucleotide
ucuacugcccuggaacagg

SEQ ID NO: 647252 - RNA, 19 nt, Artificial Sequence
  Description of Artificial Sequence: Synthetic oligonucleotide
uguccauucuugcgcaacc

SEQ ID NO: 647253 - RNA, 19 nt, Artificial Sequence
  Description of Artificial Sequence: Synthetic oligonucleotide
aggaaaaccgccggaggcc

SEQ ID NO: 647254 - RNA, 19 nt, Artificial Sequence
  Description of Artificial Sequence: Synthetic oligonucleotide
ucucuuugacugaaccagc

SEQ ID NO: 647255 - RNA, 19 nt, Artificial Sequence
  Description of Artificial Sequence: Synthetic oligonucleotide
agaguugagcuaccugagg

SEQ ID NO: 647256 - RNA, 19 nt, Artificial Sequence
  Description of Artificial Sequence: Synthetic oligonucleotide
uuugggucaagcagggaau

SEQ ID NO: 647257 - RNA, 19 nt, Artificial Sequence
  Description of Artificial Sequence: Synthetic oligonucleotide
cacuaauaggccucgaaca

SEQ ID NO: 647258 - RNA, 19 nt, Artificial Sequence
  Description of Artificial Sequence: Synthetic oligonucleotide
auuccuuaguuguuacgug

SEQ ID NO: 647259 - RNA, 19 nt, Artificial Sequence
  Description of Artificial Sequence: Synthetic oligonucleotide
uggccuaccuccaaucugu

SEQ ID NO: 647260 - RNA, 19 nt, Artificial Sequence
  Description of Artificial Sequence: Synthetic oligonucleotide
uucaggguaacucguuccu

SEQ ID NO: 647261 - RNA, 19 nt, Artificial Sequence
  Description of Artificial Sequence: Synthetic oligonucleotide
uucacuaauaggccucgaa

SEQ ID NO: 647262 - RNA, 19 nt, Artificial Sequence
  Description of Artificial Sequence: Synthetic oligonucleotide
uaggcuaauguuguaggca

SEQ ID NO: 647263 - RNA, 19 nt, Artificial Sequence
  Description of Artificial Sequence: Synthetic oligonucleotide
aauugaggggacacugcuc

SEQ ID NO: 647264 - RNA, 19 nt, Artificial Sequence
  Description of Artificial Sequence: Synthetic oligonucleotide
agaauucgguuuguggcac

SEQ ID NO: 647265 - RNA, 19 nt, Artificial Sequence
  Description of Artificial Sequence: Synthetic oligonucleotide
aauugcuaccaaugacagu

SEQ ID NO: 647266 - RNA, 19 nt, Artificial Sequence
  Description of Artificial Sequence: Synthetic oligonucleotide
aucgaaucuccacuccauc

SEQ ID NO: 647267 - RNA, 19 nt, Artificial Sequence
  Description of Artificial Sequence: Synthetic oligonucleotide
guuguuacgugcaagugga

SEQ ID NO: 647268 - RNA, 19 nt, Artificial Sequence
  Description of Artificial Sequence: Synthetic oligonucleotide
aaagccuacuucugcugga

SEQ ID NO: 647269 - RNA, 19 nt, Artificial Sequence
  Description of Artificial Sequence: Synthetic oligonucleotide
uguuucacucuaaccuccc

SEQ ID NO: 647270 - RNA, 19 nt, Artificial Sequence
  Description of Artificial Sequence: Synthetic oligonucleotide
gacgcuguuggugauggag

SEQ ID NO: 647271 - RNA, 19 nt, Artificial Sequence
  Description of Artificial Sequence: Synthetic oligonucleotide
ugguguauuugugauccag

SEQ ID NO: 647272 - RNA, 19 nt, Artificial Sequence
  Description of Artificial Sequence: Synthetic oligonucleotide
uuccgucuuaaccugugcu

SEQ ID NO: 647273 - RNA, 19 nt, Artificial Sequence
  Description of Artificial Sequence: Synthetic oligonucleotide
guuagggccaaugacgcug

SEQ ID NO: 647274 - RNA, 19 nt, Artificial Sequence
  Description of Artificial Sequence: Synthetic oligonucleotide
cuagauuuucccuagaauu

SEQ ID NO: 647275 - RNA, 19 nt, Artificial Sequence
  Description of Artificial Sequence: Synthetic oligonucleotide
auauuugagacgacaucuc

SEQ ID NO: 647276 - RNA, 19 nt, Artificial Sequence
  Description of Artificial Sequence: Synthetic oligonucleotide
cuuaguuguuacgugcaag

SEQ ID NO: 647277 - RNA, 19 nt, Artificial Sequence
  Description of Artificial Sequence: Synthetic oligonucleotide
agaaagucagagcgcacca

SEQ ID NO: 647278 - RNA, 19 nt, Artificial Sequence
  Description of Artificial Sequence: Synthetic oligonucleotide
gagaggguagacccaucgg

SEQ ID NO: 647279 - RNA, 19 nt, Artificial Sequence
  Description of Artificial Sequence: Synthetic oligonucleotide
guagauguuaugucgggaa

SEQ ID NO: 647280 - RNA, 19 nt, Artificial Sequence
  Description of Artificial Sequence: Synthetic oligonucleotide
cugucuagauuuucccuag

SEQ ID NO: 647281 - RNA, 19 nt, Artificial Sequence
  Description of Artificial Sequence: Synthetic oligonucleotide
ucucuacugcccuggaaca

SEQ ID NO: 647282 - RNA, 19 nt, Artificial Sequence
  Description of Artificial Sequence: Synthetic oligonucleotide
aggguagacccaucggcgg

SEQ ID NO: 647283 - RNA, 19 nt, Artificial Sequence
  Description of Artificial Sequence: Synthetic oligonucleotide
acaucccaacuucagucag

SEQ ID NO: 647284 - RNA, 19 nt, Artificial Sequence
  Description of Artificial Sequence: Synthetic oligonucleotide
gguaacucguuccuugacc

SEQ ID NO: 647285 - RNA, 19 nt, Artificial Sequence
  Description of Artificial Sequence: Synthetic oligonucleotide
ucgggaaccagcagucccc

SEQ ID NO: 647286 - RNA, 19 nt, Artificial Sequence
  Description of Artificial Sequence: Synthetic oligonucleotide
agcugaguacauguguagg

SEQ ID NO: 647287 - RNA, 19 nt, Artificial Sequence
  Description of Artificial Sequence: Synthetic oligonucleotide
uauuuauauuugagacgac

SEQ ID NO: 647288 - RNA, 19 nt, Artificial Sequence
  Description of Artificial Sequence: Synthetic oligonucleotide
ucaucacuaaacuggccau

SEQ ID NO: 647289 - RNA, 19 nt, Artificial Sequence
  Description of Artificial Sequence: Synthetic oligonucleotide
guuacgugcaaguggaucu

SEQ ID NO: 647290 - RNA, 19 nt, Artificial Sequence
  Description of Artificial Sequence: Synthetic oligonucleotide
ugugaagaguugagcuacc

SEQ ID NO: 647291 - RNA, 19 nt, Artificial Sequence
  Description of Artificial Sequence: Synthetic oligonucleotide
uguucugugaagucucauu

SEQ ID NO: 647292 - RNA, 19 nt, Artificial Sequence
  Description of Artificial Sequence: Synthetic oligonucleotide
ucgggaaugaguguagcuc

SEQ ID NO: 647293 - RNA, 19 nt, Artificial Sequence
  Description of Artificial Sequence: Synthetic oligonucleotide
ucaguuggguggacaacca

SEQ ID NO: 647294 - RNA, 19 nt, Artificial Sequence
  Description of Artificial Sequence: Synthetic oligonucleotide
gucagagcgcaccaaggcc

SEQ ID NO: 647295 - RNA, 19 nt, Artificial Sequence
  Description of Artificial Sequence: Synthetic oligonucleotide
cacuaaacuggccaucauc

SEQ ID NO: 647296 - RNA, 19 nt, Artificial Sequence
  Description of Artificial Sequence: Synthetic oligonucleotide
ucuggccuaccuccaaucu

SEQ ID NO: 647297 - RNA, 19 nt, Artificial Sequence
  Description of Artificial Sequence: Synthetic oligonucleotide
guaggcccggucuaguacc

SEQ ID NO: 647298 - RNA, 19 nt, Artificial Sequence
  Description of Artificial Sequence: Synthetic oligonucleotide
uccgucuuaaccugugcuc

SEQ ID NO: 647299 - RNA, 19 nt, Artificial Sequence
  Description of Artificial Sequence: Synthetic oligonucleotide
aaguuuacuucuggaguga

SEQ ID NO: 647300 - RNA, 19 nt, Artificial Sequence
  Description of Artificial Sequence: Synthetic oligonucleotide
acaaccaguaacacaccuc

SEQ ID NO: 647301 - RNA, 19 nt, Artificial Sequence
  Description of Artificial Sequence: Synthetic oligonucleotide
uguuacgugcaaguggauc

SEQ ID NO: 647302 - RNA, 19 nt, Artificial Sequence
  Description of Artificial Sequence: Synthetic oligonucleotide
agaucaccgagcccucggg

SEQ ID NO: 647303 - RNA, 19 nt, Artificial Sequence
  Description of Artificial Sequence: Synthetic oligonucleotide
gacgacaucuccauauauc

SEQ ID NO: 647304 - RNA, 19 nt, Artificial Sequence
  Description of Artificial Sequence: Synthetic oligonucleotide
cuagauugucacaagaaau

SEQ ID NO: 647305 - RNA, 19 nt, Artificial Sequence
  Description of Artificial Sequence: Synthetic oligonucleotide
cauucacuaauaggccucg

SEQ ID NO: 647306 - RNA, 19 nt, Artificial Sequence
  Description of Artificial Sequence: Synthetic oligonucleotide
cuucagucaggaugagaag

SEQ ID NO: 647307 - RNA, 19 nt, Artificial Sequence
  Description of Artificial Sequence: Synthetic oligonucleotide
uugagcuaccugaggagaa

SEQ ID NO: 647308 - RNA, 19 nt, Artificial Sequence
  Description of Artificial Sequence: Synthetic oligonucleotide
aucacuaaacuggccauca

SEQ ID NO: 647309 - RNA, 19 nt, Artificial Sequence
  Description of Artificial Sequence: Synthetic oligonucleotide
cuguaguggccgcucaugc

SEQ ID NO: 647310 - RNA, 19 nt, Artificial Sequence
  Description of Artificial Sequence: Synthetic oligonucleotide
uuugccucgcugcaguguu

SEQ ID NO: 647311 - RNA, 19 nt, Artificial Sequence
  Description of Artificial Sequence: Synthetic oligonucleotide
cuaccuccaaucugucuag

SEQ ID NO: 647312 - RNA, 19 nt, Artificial Sequence
  Description of Artificial Sequence: Synthetic oligonucleotide
ucaacgucacggaggacau

SEQ ID NO: 647313 - RNA, 19 nt, Artificial Sequence
  Description of Artificial Sequence: Synthetic oligonucleotide
caucccaacuucagucagg

SEQ ID NO: 647314 - RNA, 19 nt, Artificial Sequence
  Description of Artificial Sequence: Synthetic oligonucleotide
gucauaucgaaucuccacu

SEQ ID NO: 647315 - RNA, 19 nt, Artificial Sequence
  Description of Artificial Sequence: Synthetic oligonucleotide
gacugaaccagcucaagau

SEQ ID NO: 647316 - RNA, 19 nt, Artificial Sequence
  Description of Artificial Sequence: Synthetic oligonucleotide
uaguuguuacgugcaagug

SEQ ID NO: 647317 - RNA, 19 nt, Artificial Sequence
  Description of Artificial Sequence: Synthetic oligonucleotide
cucgggaaccagcaguccc

SEQ ID NO: 647318 - RNA, 19 nt, Artificial Sequence
  Description of Artificial Sequence: Synthetic oligonucleotide
gacuagauugucacaagaa

SEQ ID NO: 647319 - RNA, 19 nt, Artificial Sequence
  Description of Artificial Sequence: Synthetic oligonucleotide
ucucgaguuugguagucaa

SEQ ID NO: 647320 - RNA, 19 nt, Artificial Sequence
  Description of Artificial Sequence: Synthetic oligonucleotide
ucgaacucccugccacagg

SEQ ID NO: 647321 - RNA, 19 nt, Artificial Sequence
  Description of Artificial Sequence: Synthetic oligonucleotide
uauugaucgugagucccca

SEQ ID NO: 647322 - RNA, 19 nt, Artificial Sequence
  Description of Artificial Sequence: Synthetic oligonucleotide
guaacaagaguuucaugcu

SEQ ID NO: 647323 - RNA, 19 nt, Artificial Sequence
  Description of Artificial Sequence: Synthetic oligonucleotide
uuagggccaaugacgcugu

SEQ ID NO: 647324 - RNA, 19 nt, Artificial Sequence
  Description of Artificial Sequence: Synthetic oligonucleotide
cagcgugauaucugggccc

SEQ ID NO: 647325 - RNA, 19 nt, Artificial Sequence
  Description of Artificial Sequence: Synthetic oligonucleotide
uuggucggccccagaauca

SEQ ID NO: 647326 - RNA, 19 nt, Artificial Sequence
  Description of Artificial Sequence: Synthetic oligonucleotide
ugcuggauuguaaccuuuc

SEQ ID NO: 647327 - RNA, 19 nt, Artificial Sequence
  Description of Artificial Sequence: Synthetic oligonucleotide
uguagcucugugcggugcu

SEQ ID NO: 647328 - RNA, 19 nt, Artificial Sequence
  Description of Artificial Sequence: Synthetic oligonucleotide
ucuugcgcaaccgcuggcc

SEQ ID NO: 647329 - RNA, 19 nt, Artificial Sequence
  Description of Artificial Sequence: Synthetic oligonucleotide
gcaauugcuaccaaugaca

SEQ ID NO: 647330 - RNA, 19 nt, Artificial Sequence
  Description of Artificial Sequence: Synthetic oligonucleotide
ucacucuaaccucccacau

SEQ ID NO: 647331 - RNA, 19 nt, Artificial Sequence
  Description of Artificial Sequence: Synthetic oligonucleotide
ugcggugcugucagugaag

SEQ ID NO: 647332 - RNA, 19 nt, Artificial Sequence
  Description of Artificial Sequence: Synthetic oligonucleotide
uggccuuugucaguuauau

SEQ ID NO: 647333 - RNA, 19 nt, Artificial Sequence
  Description of Artificial Sequence: Synthetic oligonucleotide
uaaccucccacaucccaac

SEQ ID NO: 647334 - RNA, 19 nt, Artificial Sequence
  Description of Artificial Sequence: Synthetic oligonucleotide
ccgccaaucaguugggugg

SEQ ID NO: 647335 - RNA, 19 nt, Artificial Sequence
  Description of Artificial Sequence: Synthetic oligonucleotide
auauaucagcagaaaguca

SEQ ID NO: 647336 - RNA, 19 nt, Artificial Sequence
  Description of Artificial Sequence: Synthetic oligonucleotide
uuaugucgggaaugagugu

SEQ ID NO: 647337 - RNA, 19 nt, Artificial Sequence
  Description of Artificial Sequence: Synthetic oligonucleotide
gaguuugguagucaaaauu

SEQ ID NO: 647338 - RNA, 19 nt, Artificial Sequence
  Description of Artificial Sequence: Synthetic oligonucleotide
ugucuagauuuucccuaga

SEQ ID NO: 647339 - RNA, 19 nt, Artificial Sequence
  Description of Artificial Sequence: Synthetic oligonucleotide
aguuuacuucuggagugag

SEQ ID NO: 647340 - RNA, 19 nt, Artificial Sequence
  Description of Artificial Sequence: Synthetic oligonucleotide
cauccaauugaggggacac

SEQ ID NO: 647341 - RNA, 19 nt, Artificial Sequence
  Description of Artificial Sequence: Synthetic oligonucleotide
aagucauaucgaaucucca

SEQ ID NO: 647342 - RNA, 19 nt, Artificial Sequence
  Description of Artificial Sequence: Synthetic oligonucleotide
aucaccgagcccucgggca

SEQ ID NO: 647343 - RNA, 19 nt, Artificial Sequence
  Description of Artificial Sequence: Synthetic oligonucleotide
gaucaccgagcccucgggc

SEQ ID NO: 647344 - RNA, 19 nt, Artificial Sequence
  Description of Artificial Sequence: Synthetic oligonucleotide
aaaaccgccggaggccuug

SEQ ID NO: 647345 - RNA, 19 nt, Artificial Sequence
  Description of Artificial Sequence: Synthetic oligonucleotide
ggaggguguaaagagauca

SEQ ID NO: 647346 - RNA, 19 nt, Artificial Sequence
  Description of Artificial Sequence: Synthetic oligonucleotide
agggaaauauggagcacag

SEQ ID NO: 647347 - RNA, 19 nt, Artificial Sequence
  Description of Artificial Sequence: Synthetic oligonucleotide
ccucauucacuaauaggcc

SEQ ID NO: 647348 - RNA, 19 nt, Artificial Sequence
  Description of Artificial Sequence: Synthetic oligonucleotide
ucgggcagcgugauaucug

SEQ ID NO: 647349 - RNA, 19 nt, Artificial Sequence
  Description of Artificial Sequence: Synthetic oligonucleotide
aacuucagucaggaugaga

SEQ ID NO: 647350 - RNA, 19 nt, Artificial Sequence
  Description of Artificial Sequence: Synthetic oligonucleotide
guaacacaccucgggaacc

SEQ ID NO: 647351 - RNA, 19 nt, Artificial Sequence
  Description of Artificial Sequence: Synthetic oligonucleotide
aggagaacagaugcugaug

SEQ ID NO: 647352 - RNA, 19 nt, Artificial Sequence
  Description of Artificial Sequence: Synthetic oligonucleotide
gaagcacaugguugccagc

SEQ ID NO: 647353 - RNA, 19 nt, Artificial Sequence
  Description of Artificial Sequence: Synthetic oligonucleotide
agcgcaccaaggccuuggc

SEQ ID NO: 647354 - RNA, 19 nt, Artificial Sequence
  Description of Artificial Sequence: Synthetic oligonucleotide
agacgacaucuccauauau

SEQ ID NO: 647355 - RNA, 19 nt, Artificial Sequence
  Description of Artificial Sequence: Synthetic oligonucleotide
gccuacuucugcuggauug

SEQ ID NO: 647356 - RNA, 19 nt, Artificial Sequence
  Description of Artificial Sequence: Synthetic oligonucleotide
ggcagcgugauaucugggc

SEQ ID NO: 647357 - RNA, 19 nt, Artificial Sequence
  Description of Artificial Sequence: Synthetic oligonucleotide
aggguaacucguuccuuga

SEQ ID NO: 647358 - RNA, 19 nt, Artificial Sequence
  Description of Artificial Sequence: Synthetic oligonucleotide
uagcgguuugggucaagca

SEQ ID NO: 647359 - RNA, 19 nt, Artificial Sequence
  Description of Artificial Sequence: Synthetic oligonucleotide
guguaggguggcuagggga

SEQ ID NO: 647360 - RNA, 19 nt, Artificial Sequence
  Description of Artificial Sequence: Synthetic oligonucleotide
ucauccaauugaggggaca

SEQ ID NO: 647361 - RNA, 19 nt, Artificial Sequence
  Description of Artificial Sequence: Synthetic oligonucleotide
gcagggaauccauuuguug

SEQ ID NO: 647362 - RNA, 19 nt, Artificial Sequence
  Description of Artificial Sequence: Synthetic oligonucleotide
uaacacaccucgggaacca

SEQ ID NO: 647363 - RNA, 19 nt, Artificial Sequence
  Description of Artificial Sequence: Synthetic oligonucleotide
gcaccauauuccuuaguug

SEQ ID NO: 647364 - RNA, 19 nt, Artificial Sequence
  Description of Artificial Sequence: Synthetic oligonucleotide
gaguugaucuccaggacua

SEQ ID NO: 647365 - RNA, 19 nt, Artificial Sequence
  Description of Artificial Sequence: Synthetic oligonucleotide
cuccaaucugucuagauuu

SEQ ID NO: 647366 - RNA, 19 nt, Artificial Sequence
  Description of Artificial Sequence: Synthetic oligonucleotide
ggauuguaaccuuucagcu

SEQ ID NO: 647367 - RNA, 19 nt, Artificial Sequence
  Description of Artificial Sequence: Synthetic oligonucleotide
gauuguaaccuuucagcuu

SEQ ID NO: 647368 - RNA, 19 nt, Artificial Sequence
  Description of Artificial Sequence: Synthetic oligonucleotide
acacaccucgggaaccagc

SEQ ID NO: 647369 - RNA, 19 nt, Artificial Sequence
  Description of Artificial Sequence: Synthetic oligonucleotide
gcgguuugggucaagcagg

SEQ ID NO: 647370 - RNA, 19 nt, Artificial Sequence
  Description of Artificial Sequence: Synthetic oligonucleotide
ugagcuaccugaggagaac

SEQ ID NO: 647371 - RNA, 19 nt, Artificial Sequence
  Description of Artificial Sequence: Synthetic oligonucleotide
cucauucacuaauaggccu

SEQ ID NO: 647372 - RNA, 19 nt, Artificial Sequence
  Description of Artificial Sequence: Synthetic oligonucleotide
gauuuccaguugguagaag

SEQ ID NO: 647373 - RNA, 19 nt, Artificial Sequence
  Description of Artificial Sequence: Synthetic oligonucleotide
cuggccuaccuccaaucug

SEQ ID NO: 647374 - RNA, 19 nt, Artificial Sequence
  Description of Artificial Sequence: Synthetic oligonucleotide
guccauucuugcgcaaccg

SEQ ID NO: 647375 - RNA, 19 nt, Artificial Sequence
  Description of Artificial Sequence: Synthetic oligonucleotide
ugucgggaaugaguguagc

SEQ ID NO: 647376 - RNA, 19 nt, Artificial Sequence
  Description of Artificial Sequence: Synthetic oligonucleotide
gguuuguggcacuauccac

SEQ ID NO: 647377 - RNA, 19 nt, Artificial Sequence
  Description of Artificial Sequence: Synthetic oligonucleotide
cagacagcugaguacaugu

SEQ ID NO: 647378 - RNA, 19 nt, Artificial Sequence
  Description of Artificial Sequence: Synthetic oligonucleotide
uucuugcgcaaccgcuggc

SEQ ID NO: 647379 - RNA, 19 nt, Artificial Sequence
  Description of Artificial Sequence: Synthetic oligonucleotide
ucuagggcucugguaauau

SEQ ID NO: 647380 - RNA, 19 nt, Artificial Sequence
  Description of Artificial Sequence: Synthetic oligonucleotide
cuaaccucccacaucccaa

SEQ ID NO: 647381 - RNA, 19 nt, Artificial Sequence
  Description of Artificial Sequence: Synthetic oligonucleotide
ugggucaagcagggaaucc

SEQ ID NO: 647382 - RNA, 19 nt, Artificial Sequence
  Description of Artificial Sequence: Synthetic oligonucleotide
guagcgguuugggucaagc

SEQ ID NO: 647383 - RNA, 19 nt, Artificial Sequence
  Description of Artificial Sequence: Synthetic oligonucleotide
gacccaucggcggaugaug

SEQ ID NO: 647384 - RNA, 19 nt, Artificial Sequence
  Description of Artificial Sequence: Synthetic oligonucleotide
cacaccucgggaaccagca

SEQ ID NO: 647385 - RNA, 19 nt, Artificial Sequence
  Description of Artificial Sequence: Synthetic oligonucleotide
gcuccgcucacuuucaguc

SEQ ID NO: 647386 - RNA, 19 nt, Artificial Sequence
  Description of Artificial Sequence: Synthetic oligonucleotide
ccauauaucagcagaaagu

SEQ ID NO: 647387 - RNA, 19 nt, Artificial Sequence
  Description of Artificial Sequence: Synthetic oligonucleotide
caggacuagauugucacaa

SEQ ID NO: 647388 - RNA, 19 nt, Artificial Sequence
  Description of Artificial Sequence: Synthetic oligonucleotide
ugagggaaauauggagcac

SEQ ID NO: 647389 - RNA, 19 nt, Artificial Sequence
  Description of Artificial Sequence: Synthetic oligonucleotide
ucacuaaacuggccaucau

SEQ ID NO: 647390 - RNA, 19 nt, Artificial Sequence
  Description of Artificial Sequence: Synthetic oligonucleotide
aaccagcaguccccaucag

SEQ ID NO: 647391 - RNA, 19 nt, Artificial Sequence
  Description of Artificial Sequence: Synthetic oligonucleotide
ugccucgcugcaguguucc

SEQ ID NO: 647392 - RNA, 19 nt, Artificial Sequence
  Description of Artificial Sequence: Synthetic oligonucleotide
gcaucaacgucacggagga

SEQ ID NO: 647393 - RNA, 19 nt, Artificial Sequence
  Description of Artificial Sequence: Synthetic oligonucleotide
aacacaccucgggaaccag

SEQ ID NO: 647394 - RNA, 19 nt, Artificial Sequence
  Description of Artificial Sequence: Synthetic oligonucleotide
gagcgcaccaaggccuugg

SEQ ID NO: 647395 - RNA, 19 nt, Artificial Sequence
  Description of Artificial Sequence: Synthetic oligonucleotide
cacucuaaccucccacauc

SEQ ID NO: 647396 - RNA, 19 nt, Artificial Sequence
  Description of Artificial Sequence: Synthetic oligonucleotide
cagcguguaggguggcuag

SEQ ID NO: 647397 - RNA, 19 nt, Artificial Sequence
  Description of Artificial Sequence: Synthetic oligonucleotide
uagacccaucggcggauga

SEQ ID NO: 647398 - RNA, 19 nt, Artificial Sequence
  Description of Artificial Sequence: Synthetic oligonucleotide
ugcuccgcucacuuucagu

SEQ ID NO: 647399 - RNA, 19 nt, Artificial Sequence
  Description of Artificial Sequence: Synthetic oligonucleotide
caguaacacaccucgggaa

SEQ ID NO: 647400 - RNA, 19 nt, Artificial Sequence
  Description of Artificial Sequence: Synthetic oligonucleotide
accucauucuggaauacuu

SEQ ID NO: 647401 - RNA, 19 nt, Artificial Sequence
  Description of Artificial Sequence: Synthetic oligonucleotide
ccauauugaucgugagucc

SEQ ID NO: 647402 - RNA, 19 nt, Artificial Sequence
  Description of Artificial Sequence: Synthetic oligonucleotide
auaucagcagaaagucaga

SEQ ID NO: 647403 - RNA, 19 nt, Artificial Sequence
  Description of Artificial Sequence: Synthetic oligonucleotide
gaucgugaguccccacaga

SEQ ID NO: 647404 - RNA, 19 nt, Artificial Sequence
  Description of Artificial Sequence: Synthetic oligonucleotide
ucauucuguaguggccgcu

SEQ ID NO: 647405 - RNA, 19 nt, Artificial Sequence
  Description of Artificial Sequence: Synthetic oligonucleotide
auguuaugucgggaaugag

SEQ ID NO: 647406 - RNA, 19 nt, Artificial Sequence
  Description of Artificial Sequence: Synthetic oligonucleotide
ccaauugaggggacacugc

SEQ ID NO: 647407 - RNA, 19 nt, Artificial Sequence
  Description of Artificial Sequence: Synthetic oligonucleotide
uuguuccgccaaucaguug

SEQ ID NO: 647408 - RNA, 19 nt, Artificial Sequence
  Description of Artificial Sequence: Synthetic oligonucleotide
aguacauguguagguugga

SEQ ID NO: 647409 - RNA, 19 nt, Artificial Sequence
  Description of Artificial Sequence: Synthetic oligonucleotide
ggcacuauccacagcuacc

SEQ ID NO: 647410 - RNA, 19 nt, Artificial Sequence
  Description of Artificial Sequence: Synthetic oligonucleotide
uugguguauuugugaucca

SEQ ID NO: 647411 - RNA, 19 nt, Artificial Sequence
  Description of Artificial Sequence: Synthetic oligonucleotide
uugagacgacaucuccaua

SEQ ID NO: 647412 - RNA, 19 nt, Artificial Sequence
  Description of Artificial Sequence: Synthetic oligonucleotide
uaguggccgcucaugcuuc

SEQ ID NO: 647413 - RNA, 19 nt, Artificial Sequence
  Description of Artificial Sequence: Synthetic oligonucleotide
cucgaacucccugccacag

SEQ ID NO: 647414 - RNA, 19 nt, Artificial Sequence
  Description of Artificial Sequence: Synthetic oligonucleotide
caucacuaaacuggccauc

SEQ ID NO: 647415 - RNA, 19 nt, Artificial Sequence
  Description of Artificial Sequence: Synthetic oligonucleotide
gagacgacaucuccauaua

SEQ ID NO: 647416 - RNA, 19 nt, Artificial Sequence
  Description of Artificial Sequence: Synthetic oligonucleotide
aauaggccucgaacaaaau

SEQ ID NO: 647417 - RNA, 19 nt, Artificial Sequence
  Description of Artificial Sequence: Synthetic oligonucleotide
uugggucaagcagggaauc

SEQ ID NO: 647418 - RNA, 19 nt, Artificial Sequence
  Description of Artificial Sequence: Synthetic oligonucleotide
aagccuacuucugcuggau

SEQ ID NO: 647419 - RNA, 19 nt, Artificial Sequence
  Description of Artificial Sequence: Synthetic oligonucleotide
agauuuccaguugguagaa

SEQ ID NO: 647420 - RNA, 19 nt, Artificial Sequence
  Description of Artificial Sequence: Synthetic oligonucleotide
cucuaaccucccacauccc

SEQ ID NO: 647421 - RNA, 19 nt, Artificial Sequence
  Description of Artificial Sequence: Synthetic oligonucleotide
gggaauccauuuguuguag

SEQ ID NO: 647422 - RNA, 19 nt, Artificial Sequence
  Description of Artificial Sequence: Synthetic oligonucleotide
cuaggggaugacucuuuga

SEQ ID NO: 647423 - RNA, 19 nt, Artificial Sequence
  Description of Artificial Sequence: Synthetic oligonucleotide
ccggucuaguaccacauug

SEQ ID NO: 647424 - RNA, 19 nt, Artificial Sequence
  Description of Artificial Sequence: Synthetic oligonucleotide
cauucuguaguggccgcuc

SEQ ID NO: 647425 - RNA, 19 nt, Artificial Sequence
  Description of Artificial Sequence: Synthetic oligonucleotide
guuccgccaaucaguuggg

SEQ ID NO: 647426 - RNA, 19 nt, Artificial Sequence
  Description of Artificial Sequence: Synthetic oligonucleotide
agcagagauugguguauuu

SEQ ID NO: 647427 - RNA, 19 nt, Artificial Sequence
  Description of Artificial Sequence: Synthetic oligonucleotide
gguaggcccggucuaguac

SEQ ID NO: 647428 - RNA, 19 nt, Artificial Sequence
  Description of Artificial Sequence: Synthetic oligonucleotide
aaccgccggaggccuuggg

SEQ ID NO: 647429 - RNA, 19 nt, Artificial Sequence
  Description of Artificial Sequence: Synthetic oligonucleotide
cgugaguccccacagacuc

SEQ ID NO: 647430 - RNA, 19 nt, Artificial Sequence
  Description of Artificial Sequence: Synthetic oligonucleotide
caauugaggggacacugcu

SEQ ID NO: 647431 - RNA, 19 nt, Artificial Sequence
  Description of Artificial Sequence: Synthetic oligonucleotide
gguggcuaggggaugacuc

SEQ ID NO: 647432 - RNA, 19 nt, Artificial Sequence
  Description of Artificial Sequence: Synthetic oligonucleotide
cuguccauucuugcgcaac

SEQ ID NO: 647433 - RNA, 19 nt, Artificial Sequence
  Description of Artificial Sequence: Synthetic oligonucleotide
augucgggaaugaguguag

SEQ ID NO: 647434 - RNA, 19 nt, Artificial Sequence
  Description of Artificial Sequence: Synthetic oligonucleotide
gaguguagcucugugcggu

SEQ ID NO: 647435 - RNA, 19 nt, Artificial Sequence
  Description of Artificial Sequence: Synthetic oligonucleotide
agcguguaggguggcuagg

SEQ ID NO: 647436 - RNA, 19 nt, Artificial Sequence
  Description of Artificial Sequence: Synthetic oligonucleotide
aucucgaguuugguaguca

SEQ ID NO: 647437 - RNA, 19 nt, Artificial Sequence
  Description of Artificial Sequence: Synthetic oligonucleotide
gaaagucagagcgcaccaa

SEQ ID NO: 647438 - RNA, 19 nt, Artificial Sequence
  Description of Artificial Sequence: Synthetic oligonucleotide
uuguuacgugcaaguggau

SEQ ID NO: 647439 - RNA, 19 nt, Artificial Sequence
  Description of Artificial Sequence: Synthetic oligonucleotide
ccgucuuaaccugugcucc

SEQ ID NO: 647440 - RNA, 19 nt, Artificial Sequence
  Description of Artificial Sequence: Synthetic oligonucleotide
gcuaggggaugacucuuug

SEQ ID NO: 647441 - RNA, 19 nt, Artificial Sequence
  Description of Artificial Sequence: Synthetic oligonucleotide
ggcggaugaugucagcaca

SEQ ID NO: 647442 - RNA, 19 nt, Artificial Sequence
  Description of Artificial Sequence: Synthetic oligonucleotide
gcuagcuuucuuguuccgc

SEQ ID NO: 647443 - RNA, 19 nt, Artificial Sequence
  Description of Artificial Sequence: Synthetic oligonucleotide
uggagacccgggcaccaua

SEQ ID NO: 647444 - RNA, 19 nt, Artificial Sequence
  Description of Artificial Sequence: Synthetic oligonucleotide
ccgcucaugcuucuguagc

SEQ ID NO: 647445 - RNA, 19 nt, Artificial Sequence
  Description of Artificial Sequence: Synthetic oligonucleotide
augcuccgcucacuuucag

SEQ ID NO: 647446 - RNA, 19 nt, Artificial Sequence
  Description of Artificial Sequence: Synthetic oligonucleotide
gguagauguuaugucggga

SEQ ID NO: 647447 - RNA, 19 nt, Artificial Sequence
  Description of Artificial Sequence: Synthetic oligonucleotide
ucaggguaacucguuccuu

SEQ ID NO: 647448 - RNA, 19 nt, Artificial Sequence
  Description of Artificial Sequence: Synthetic oligonucleotide
cuuguuccgccaaucaguu

SEQ ID NO: 647449 - RNA, 19 nt, Artificial Sequence
  Description of Artificial Sequence: Synthetic oligonucleotide
cucgaguuugguagucaaa

SEQ ID NO: 647450 - RNA, 19 nt, Artificial Sequence
  Description of Artificial Sequence: Synthetic oligonucleotide
uugaggcccucgguagaug

SEQ ID NO: 647451 - RNA, 19 nt, Artificial Sequence
  Description of Artificial Sequence: Synthetic oligonucleotide
ccaguaacacaccucggga

SEQ ID NO: 647452 - RNA, 19 nt, Artificial Sequence
  Description of Artificial Sequence: Synthetic oligonucleotide
ccucgguagauguuauguc

SEQ ID NO: 647453 - RNA, 19 nt, Artificial Sequence
  Description of Artificial Sequence: Synthetic oligonucleotide
ugcgcaaccgcuggccuuu

SEQ ID NO: 647454 - RNA, 19 nt, Artificial Sequence
  Description of Artificial Sequence: Synthetic oligonucleotide
ggaugacucuuugaagauc

SEQ ID NO: 647455 - RNA, 19 nt, Artificial Sequence
  Description of Artificial Sequence: Synthetic oligonucleotide
gucgggaaugaguguagcu

SEQ ID NO: 647456 - RNA, 19 nt, Artificial Sequence
  Description of Artificial Sequence: Synthetic oligonucleotide
gcguguaggguggcuaggg

SEQ ID NO: 647457 - RNA, 19 nt, Artificial Sequence
  Description of Artificial Sequence: Synthetic oligonucleotide
cagcacagacagcugagua

SEQ ID NO: 647458 - RNA, 19 nt, Artificial Sequence
  Description of Artificial Sequence: Synthetic oligonucleotide
uaccuccaaucugucuaga

SEQ ID NO: 647459 - RNA, 19 nt, Artificial Sequence
  Description of Artificial Sequence: Synthetic oligonucleotide
auucacuaauaggccucga

SEQ ID NO: 647460 - RNA, 19 nt, Artificial Sequence
  Description of Artificial Sequence: Synthetic oligonucleotide
agguaggcccggucuagua

SEQ ID NO: 647461 - RNA, 19 nt, Artificial Sequence
  Description of Artificial Sequence: Synthetic oligonucleotide
cgguagauguuaugucggg

SEQ ID NO: 647462 - RNA, 19 nt, Artificial Sequence
  Description of Artificial Sequence: Synthetic oligonucleotide
guaggguggcuaggggaug

SEQ ID NO: 647463 - RNA, 19 nt, Artificial Sequence
  Description of Artificial Sequence: Synthetic oligonucleotide
gaagaacacugaaguugaa

SEQ ID NO: 647464 - RNA, 19 nt, Artificial Sequence
  Description of Artificial Sequence: Synthetic oligonucleotide
agcagggaauccauuuguu

SEQ ID NO: 647465 - RNA, 19 nt, Artificial Sequence
  Description of Artificial Sequence: Synthetic oligonucleotide
uggucggccccagaaucau

SEQ ID NO: 647466 - RNA, 19 nt, Artificial Sequence
  Description of Artificial Sequence: Synthetic oligonucleotide
uugcgcaaccgcuggccuu

SEQ ID NO: 647467 - RNA, 19 nt, Artificial Sequence
  Description of Artificial Sequence: Synthetic oligonucleotide
acccaucggcggaugaugu

SEQ ID NO: 647468 - RNA, 19 nt, Artificial Sequence
  Description of Artificial Sequence: Synthetic oligonucleotide
cacgcuuuauguaguuccu

SEQ ID NO: 647469 - RNA, 19 nt, Artificial Sequence
  Description of Artificial Sequence: Synthetic oligonucleotide
agacccaucggcggaugau

SEQ ID NO: 647470 - RNA, 19 nt, Artificial Sequence
  Description of Artificial Sequence: Synthetic oligonucleotide
uugccucgcugcaguguuc

SEQ ID NO: 647471 - RNA, 19 nt, Artificial Sequence
  Description of Artificial Sequence: Synthetic oligonucleotide
gagguaucccuggccuuca

SEQ ID NO: 647472 - RNA, 19 nt, Artificial Sequence
  Description of Artificial Sequence: Synthetic oligonucleotide
ugacgcuguuggugaugga

SEQ ID NO: 647473 - RNA, 19 nt, Artificial Sequence
  Description of Artificial Sequence: Synthetic oligonucleotide
caacuucagucaggaugag

SEQ ID NO: 647474 - RNA, 19 nt, Artificial Sequence
  Description of Artificial Sequence: Synthetic oligonucleotide
guagacccaucggcggaug

SEQ ID NO: 647475 - RNA, 19 nt, Artificial Sequence
  Description of Artificial Sequence: Synthetic oligonucleotide
acgcuuuauguaguuccua

SEQ ID NO: 647476 - RNA, 19 nt, Artificial Sequence
  Description of Artificial Sequence: Synthetic oligonucleotide
gaccucauucuggaauacu

SEQ ID NO: 647477 - RNA, 19 nt, Artificial Sequence
  Description of Artificial Sequence: Synthetic oligonucleotide
cuggccuuugucaguuaua

SEQ ID NO: 647478 - RNA, 19 nt, Artificial Sequence
  Description of Artificial Sequence: Synthetic oligonucleotide
cguguaggguggcuagggg

SEQ ID NO: 647479 - RNA, 19 nt, Artificial Sequence
  Description of Artificial Sequence: Synthetic oligonucleotide
agcuuccgucuuaaccugu

SEQ ID NO: 647480 - RNA, 19 nt, Artificial Sequence
  Description of Artificial Sequence: Synthetic oligonucleotide
cacuuccuuuaggcuaaug

SEQ ID NO: 647481 - RNA, 19 nt, Artificial Sequence
  Description of Artificial Sequence: Synthetic oligonucleotide
acgucacggaggacaucuc

SEQ ID NO: 647482 - RNA, 19 nt, Artificial Sequence
  Description of Artificial Sequence: Synthetic oligonucleotide
cugaguacauguguagguu

SEQ ID NO: 647483 - RNA, 19 nt, Artificial Sequence
  Description of Artificial Sequence: Synthetic oligonucleotide
cuaauguuguaggcauacu

SEQ ID NO: 647484 - RNA, 19 nt, Artificial Sequence
  Description of Artificial Sequence: Synthetic oligonucleotide
ccaucggcggaugauguca

SEQ ID NO: 647485 - RNA, 19 nt, Artificial Sequence
  Description of Artificial Sequence: Synthetic oligonucleotide
cuugcgcaaccgcuggccu

SEQ ID NO: 647486 - RNA, 19 nt, Artificial Sequence
  Description of Artificial Sequence: Synthetic oligonucleotide
cacuaccaccugggaagug

SEQ ID NO: 647487 - RNA, 19 nt, Artificial Sequence
  Description of Artificial Sequence: Synthetic oligonucleotide
caccgagcccucgggcagc

SEQ ID NO: 647488 - RNA, 19 nt, Artificial Sequence
  Description of Artificial Sequence: Synthetic oligonucleotide
cuacuucugcuggauugua

SEQ ID NO: 647489 - RNA, 19 nt, Artificial Sequence
  Description of Artificial Sequence: Synthetic oligonucleotide
caucaacgucacggaggac

SEQ ID NO: 647490 - RNA, 19 nt, Artificial Sequence
  Description of Artificial Sequence: Synthetic oligonucleotide
ggaaaaccgccggaggccu

SEQ ID NO: 647491 - RNA, 19 nt, Artificial Sequence
  Description of Artificial Sequence: Synthetic oligonucleotide
ccaguaagucauaucgaau

SEQ ID NO: 647492 - RNA, 19 nt, Artificial Sequence
  Description of Artificial Sequence: Synthetic oligonucleotide
ggaaugaguguagcucugu

SEQ ID NO: 647493 - RNA, 19 nt, Artificial Sequence
  Description of Artificial Sequence: Synthetic oligonucleotide
cggcggaugaugucagcac

SEQ ID NO: 647494 - RNA, 19 nt, Artificial Sequence
  Description of Artificial Sequence: Synthetic oligonucleotide
gcccucgguagauguuaug

SEQ ID NO: 647495 - RNA, 19 nt, Artificial Sequence
  Description of Artificial Sequence: Synthetic oligonucleotide
caacgucacggaggacauc

SEQ ID NO: 647496 - RNA, 19 nt, Artificial Sequence
  Description of Artificial Sequence: Synthetic oligonucleotide
cucgggcagcgugauaucu

SEQ ID NO: 647497 - RNA, 19 nt, Artificial Sequence
  Description of Artificial Sequence: Synthetic oligonucleotide
cgagcccucgggcagcgug

SEQ ID NO: 647498 - RNA, 19 nt, Artificial Sequence
  Description of Artificial Sequence: Synthetic oligonucleotide
cccucgguagauguuaugu

SEQ ID NO: 647499 - RNA, 19 nt, Artificial Sequence
  Description of Artificial Sequence: Synthetic oligonucleotide
cccaucggcggaugauguc

SEQ ID NO: 647500 - RNA, 19 nt, Artificial Sequence
  Description of Artificial Sequence: Synthetic oligonucleotide
caaugacgcuguuggugau

SEQ ID NO: 647501 - RNA, 19 nt, Artificial Sequence
  Description of Artificial Sequence: Synthetic oligonucleotide
ggucaagcagggaauccau

SEQ ID NO: 647502 - RNA, 19 nt, Artificial Sequence
  Description of Artificial Sequence: Synthetic oligonucleotide
gccuaccuccaaucugucu

SEQ ID NO: 647503 - RNA, 19 nt, Artificial Sequence
  Description of Artificial Sequence: Synthetic oligonucleotide
cuguucugugaagucucau

SEQ ID NO: 647504 - RNA, 19 nt, Artificial Sequence
  Description of Artificial Sequence: Synthetic oligonucleotide
gccucgcugcaguguuccc

SEQ ID NO: 647505 - RNA, 19 nt, Artificial Sequence
  Description of Artificial Sequence: Synthetic oligonucleotide
ccucgggcagcgugauauc

SEQ ID NO: 647506 - RNA, 19 nt, Artificial Sequence
  Description of Artificial Sequence: Synthetic oligonucleotide
ggagacccgggcaccauau

SEQ ID NO: 647507 - RNA, 19 nt, Artificial Sequence
  Description of Artificial Sequence: Synthetic oligonucleotide
cgaguuugguagucaaaau

SEQ ID NO: 647508 - RNA, 19 nt, Artificial Sequence
  Description of Artificial Sequence: Synthetic oligonucleotide
gaaaaccgccggaggccuu

SEQ ID NO: 647509 - RNA, 19 nt, Artificial Sequence
  Description of Artificial Sequence: Synthetic oligonucleotide
gaggcccucgguagauguu

SEQ ID NO: 647510 - RNA, 19 nt, Artificial Sequence
  Description of Artificial Sequence: Synthetic oligonucleotide
cagguaggcccggucuagu

SEQ ID NO: 647511 - RNA, 19 nt, Artificial Sequence
  Description of Artificial Sequence: Synthetic oligonucleotide
gcccggucuaguaccacau

SEQ ID NO: 647512 - RNA, 19 nt, Artificial Sequence
  Description of Artificial Sequence: Synthetic oligonucleotide
gcgugauaucugggcccac

SEQ ID NO: 647513 - RNA, 19 nt, Artificial Sequence
  Description of Artificial Sequence: Synthetic oligonucleotide
cgugauaucugggcccacu

SEQ ID NO: 647514 - RNA, 19 nt, Artificial Sequence
  Description of Artificial Sequence: Synthetic oligonucleotide
ccguggcccaggcugacuu

SEQ ID NO: 647515 - RNA, 19 nt, Artificial Sequence
  Description of Artificial Sequence: Synthetic oligonucleotide
gcgcaaccgcuggccuuug

SEQ ID NO: 647516 - RNA, 19 nt, Artificial Sequence
  Description of Artificial Sequence: Synthetic oligonucleotide
cccggucuaguaccacauu

SEQ ID NO: 647517 - RNA, 19 nt, Artificial Sequence
  Description of Artificial Sequence: Synthetic oligonucleotide
gccguggcccaggcugacu

SEQ ID NO: 647518 - RNA, 19 nt, Artificial Sequence
  Description of Artificial Sequence: Synthetic oligonucleotide
uauacugccauucacaugu

SEQ ID NO: 647519 - RNA, 19 nt, Artificial Sequence
  Description of Artificial Sequence: Synthetic oligonucleotide
aauagugucuuauuacuuc

SEQ ID NO: 647520 - RNA, 19 nt, Artificial Sequence
  Description of Artificial Sequence: Synthetic oligonucleotide
uguaaugccacuuacaaaa

SEQ ID NO: 647521 - RNA, 19 nt, Artificial Sequence
  Description of Artificial Sequence: Synthetic oligonucleotide
aauagcauaaaacacgaaa

SEQ ID NO: 647522 - RNA, 19 nt, Artificial Sequence
  Description of Artificial Sequence: Synthetic oligonucleotide
aaaucuuccauuuuccaug

SEQ ID NO: 647523 - RNA, 19 nt, Artificial Sequence
  Description of Artificial Sequence: Synthetic oligonucleotide
uuuaaugcgugauaucugg

SEQ ID NO: 647524 - RNA, 19 nt, Artificial Sequence
  Description of Artificial Sequence: Synthetic oligonucleotide
ucuaauuaggccaaaggga

SEQ ID NO: 647525 - RNA, 19 nt, Artificial Sequence
  Description of Artificial Sequence: Synthetic oligonucleotide
uguuguacggaacugguag

SEQ ID NO: 647526 - RNA, 19 nt, Artificial Sequence
  Description of Artificial Sequence: Synthetic oligonucleotide
auacauuugcuuaauagcc

SEQ ID NO: 647527 - RNA, 19 nt, Artificial Sequence
  Description of Artificial Sequence: Synthetic oligonucleotide
aaagagauugauuugggau

SEQ ID NO: 647528 - RNA, 19 nt, Artificial Sequence
  Description of Artificial Sequence: Synthetic oligonucleotide
acuaacaucuguaaggggc

SEQ ID NO: 647529 - RNA, 19 nt, Artificial Sequence
  Description of Artificial Sequence: Synthetic oligonucleotide
auggaauacagauuucacc

SEQ ID NO: 647530 - RNA, 19 nt, Artificial Sequence
  Description of Artificial Sequence: Synthetic oligonucleotide
aauaaggucugcuauggca

SEQ ID NO: 647531 - RNA, 19 nt, Artificial Sequence
  Description of Artificial Sequence: Synthetic oligonucleotide
aagauccaaucugagaucc

SEQ ID NO: 647532 - RNA, 19 nt, Artificial Sequence
  Description of Artificial Sequence: Synthetic oligonucleotide
cauacauuugcuuaauagc

SEQ ID NO: 647533 - RNA, 19 nt, Artificial Sequence
  Description of Artificial Sequence: Synthetic oligonucleotide
uguaguauuggauugcugu

SEQ ID NO: 647534 - RNA, 19 nt, Artificial Sequence
  Description of Artificial Sequence: Synthetic oligonucleotide
acuccuauuuuccacaggg

SEQ ID NO: 647535 - RNA, 19 nt, Artificial Sequence
  Description of Artificial Sequence: Synthetic oligonucleotide
ucuguuuuauugaucauga

SEQ ID NO: 647536 - RNA, 19 nt, Artificial Sequence
  Description of Artificial Sequence: Synthetic oligonucleotide
aacauuugauuuccuguac

SEQ ID NO: 647537 - RNA, 19 nt, Artificial Sequence
  Description of Artificial Sequence: Synthetic oligonucleotide
uguaccaucccucagccug

SEQ ID NO: 647538 - RNA, 19 nt, Artificial Sequence
  Description of Artificial Sequence: Synthetic oligonucleotide
ucucuaauuaggccaaagg

SEQ ID NO: 647539 - RNA, 19 nt, Artificial Sequence
  Description of Artificial Sequence: Synthetic oligonucleotide
aaagauugagagaaugaac

SEQ ID NO: 647540 - RNA, 19 nt, Artificial Sequence
  Description of Artificial Sequence: Synthetic oligonucleotide
uguaaggucggauaacucc

SEQ ID NO: 647541 - RNA, 19 nt, Artificial Sequence
  Description of Artificial Sequence: Synthetic oligonucleotide
ucuguauucuauaaaucug

SEQ ID NO: 647542 - RNA, 19 nt, Artificial Sequence
  Description of Artificial Sequence: Synthetic oligonucleotide
uguuaagcgaaccggaaug

SEQ ID NO: 647543 - RNA, 19 nt, Artificial Sequence
  Description of Artificial Sequence: Synthetic oligonucleotide
ucauccaucgucauggcug

SEQ ID NO: 647544 - RNA, 19 nt, Artificial Sequence
  Description of Artificial Sequence: Synthetic oligonucleotide
gucuuauuacuucagauug

SEQ ID NO: 647545 - RNA, 19 nt, Artificial Sequence
  Description of Artificial Sequence: Synthetic oligonucleotide
gacuuuggagguuuaauag

SEQ ID NO: 647546 - RNA, 19 nt, Artificial Sequence
  Description of Artificial Sequence: Synthetic oligonucleotide
aguauuggauugcugugcc

SEQ ID NO: 647547 - RNA, 19 nt, Artificial Sequence
  Description of Artificial Sequence: Synthetic oligonucleotide
auugugacagacuuuggag

SEQ ID NO: 647548 - RNA, 19 nt, Artificial Sequence
  Description of Artificial Sequence: Synthetic oligonucleotide
ugguaaauucaucaaaagu

SEQ ID NO: 647549 - RNA, 19 nt, Artificial Sequence
  Description of Artificial Sequence: Synthetic oligonucleotide
uugucucccaacaacauca

SEQ ID NO: 647550 - RNA, 19 nt, Artificial Sequence
  Description of Artificial Sequence: Synthetic oligonucleotide
guaacaaucccuguaaugc

SEQ ID NO: 647551 - RNA, 19 nt, Artificial Sequence
  Description of Artificial Sequence: Synthetic oligonucleotide
ugaauagugucuuauuacu

SEQ ID NO: 647552 - RNA, 19 nt, Artificial Sequence
  Description of Artificial Sequence: Synthetic oligonucleotide
ucuaguaguuuaaucacac

SEQ ID NO: 647553 - RNA, 19 nt, Artificial Sequence
  Description of Artificial Sequence: Synthetic oligonucleotide
aauagccuguuuugaauag

SEQ ID NO: 647554 - RNA, 19 nt, Artificial Sequence
  Description of Artificial Sequence: Synthetic oligonucleotide
uguaaugccuauauaggcu

SEQ ID NO: 647555 - RNA, 19 nt, Artificial Sequence
  Description of Artificial Sequence: Synthetic oligonucleotide
uaaggauccaccuagcauc

SEQ ID NO: 647556 - RNA, 19 nt, Artificial Sequence
  Description of Artificial Sequence: Synthetic oligonucleotide
ugaucuacugaugaaacug

SEQ ID NO: 647557 - RNA, 19 nt, Artificial Sequence
  Description of Artificial Sequence: Synthetic oligonucleotide
auagcauaaaacacgaaag

SEQ ID NO: 647558 - RNA, 19 nt, Artificial Sequence
  Description of Artificial Sequence: Synthetic oligonucleotide
gaauuaguccuccacguug

SEQ ID NO: 647559 - RNA, 19 nt, Artificial Sequence
  Description of Artificial Sequence: Synthetic oligonucleotide
uguaacauuugauuuccug

SEQ ID NO: 647560 - RNA, 19 nt, Artificial Sequence
  Description of Artificial Sequence: Synthetic oligonucleotide
ugaauggaccuucuaguag

SEQ ID NO: 647561 - RNA, 19 nt, Artificial Sequence
  Description of Artificial Sequence: Synthetic oligonucleotide
uugaucaugacauggguaa

SEQ ID NO: 647562 - RNA, 19 nt, Artificial Sequence
  Description of Artificial Sequence: Synthetic oligonucleotide
aucucauaacaauacuaac

SEQ ID NO: 647563 - RNA, 19 nt, Artificial Sequence
  Description of Artificial Sequence: Synthetic oligonucleotide
uucccaaaacaucaagucc

SEQ ID NO: 647564 - RNA, 19 nt, Artificial Sequence
  Description of Artificial Sequence: Synthetic oligonucleotide
uguguuauauucuacuuuu

SEQ ID NO: 647565 - RNA, 19 nt, Artificial Sequence
  Description of Artificial Sequence: Synthetic oligonucleotide
aagagauugauuugggauu

SEQ ID NO: 647566 - RNA, 19 nt, Artificial Sequence
  Description of Artificial Sequence: Synthetic oligonucleotide
aaccgaggaggucucagac

SEQ ID NO: 647567 - RNA, 19 nt, Artificial Sequence
  Description of Artificial Sequence: Synthetic oligonucleotide
uauaaaucugaauucucaa

SEQ ID NO: 647568 - RNA, 19 nt, Artificial Sequence
  Description of Artificial Sequence: Synthetic oligonucleotide
uaaagaaccgaggaggucu

SEQ ID NO: 647569 - RNA, 19 nt, Artificial Sequence
  Description of Artificial Sequence: Synthetic oligonucleotide
uucucaaugacgacuggug

SEQ ID NO: 647570 - RNA, 19 nt, Artificial Sequence
  Description of Artificial Sequence: Synthetic oligonucleotide
aacuugauaggagauauau

SEQ ID NO: 647571 - RNA, 19 nt, Artificial Sequence
  Description of Artificial Sequence: Synthetic oligonucleotide
acaggaauuaguccuccac

SEQ ID NO: 647572 - RNA, 19 nt, Artificial Sequence
  Description of Artificial Sequence: Synthetic oligonucleotide
ucuaugaugccaccuguug

SEQ ID NO: 647573 - RNA, 19 nt, Artificial Sequence
  Description of Artificial Sequence: Synthetic oligonucleotide
uccauugugacagacuuug

SEQ ID NO: 647574 - RNA, 19 nt, Artificial Sequence
  Description of Artificial Sequence: Synthetic oligonucleotide
uccuauuuuccacaggggu

SEQ ID NO: 647575 - RNA, 19 nt, Artificial Sequence
  Description of Artificial Sequence: Synthetic oligonucleotide
uaugggaacuguaguauug

SEQ ID NO: 647576 - RNA, 19 nt, Artificial Sequence
  Description of Artificial Sequence: Synthetic oligonucleotide
auugaucuacugaugaaac

SEQ ID NO: 647577 - RNA, 19 nt, Artificial Sequence
  Description of Artificial Sequence: Synthetic oligonucleotide
ucggauaacuccaucuuca

SEQ ID NO: 647578 - RNA, 19 nt, Artificial Sequence
  Description of Artificial Sequence: Synthetic oligonucleotide
cuuguuaucaugaacauau

SEQ ID NO: 647579 - RNA, 19 nt, Artificial Sequence
  Description of Artificial Sequence: Synthetic oligonucleotide
uaacaauacuaacaucugu

SEQ ID NO: 647580 - RNA, 19 nt, Artificial Sequence
  Description of Artificial Sequence: Synthetic oligonucleotide
cuacugaugaaacuguuuc

SEQ ID NO: 647581 - RNA, 19 nt, Artificial Sequence
  Description of Artificial Sequence: Synthetic oligonucleotide
caucuaaaagcauaugcuc

SEQ ID NO: 647582 - RNA, 19 nt, Artificial Sequence
  Description of Artificial Sequence: Synthetic oligonucleotide
uuauucaucgcuucucuuc

SEQ ID NO: 647583 - RNA, 19 nt, Artificial Sequence
  Description of Artificial Sequence: Synthetic oligonucleotide
uauugaucaugacaugggu

SEQ ID NO: 647584 - RNA, 19 nt, Artificial Sequence
  Description of Artificial Sequence: Synthetic oligonucleotide
uuaaugcgugauaucuggg

SEQ ID NO: 647585 - RNA, 19 nt, Artificial Sequence
  Description of Artificial Sequence: Synthetic oligonucleotide
uuggcuaggagaugguucc

SEQ ID NO: 647586 - RNA, 19 nt, Artificial Sequence
  Description of Artificial Sequence: Synthetic oligonucleotide
uuuuauacucauuggcuuc

SEQ ID NO: 647587 - RNA, 19 nt, Artificial Sequence
  Description of Artificial Sequence: Synthetic oligonucleotide
ucggcuuuuggaauaaggu

SEQ ID NO: 647588 - RNA, 19 nt, Artificial Sequence
  Description of Artificial Sequence: Synthetic oligonucleotide
gaagguacaguaugggaac

SEQ ID NO: 647589 - RNA, 19 nt, Artificial Sequence
  Description of Artificial Sequence: Synthetic oligonucleotide
caaugcgcaaucuucuucc

SEQ ID NO: 647590 - RNA, 19 nt, Artificial Sequence
  Description of Artificial Sequence: Synthetic oligonucleotide
ugccacuagguguuaagcg

SEQ ID NO: 647591 - RNA, 19 nt, Artificial Sequence
  Description of Artificial Sequence: Synthetic oligonucleotide
aucgucauggcugcuaccc

SEQ ID NO: 647592 - RNA, 19 nt, Artificial Sequence
  Description of Artificial Sequence: Synthetic oligonucleotide
uugcagaacuuucauguca

SEQ ID NO: 647593 - RNA, 19 nt, Artificial Sequence
  Description of Artificial Sequence: Synthetic oligonucleotide
auuggauugcugugccucc

SEQ ID NO: 647594 - RNA, 19 nt, Artificial Sequence
  Description of Artificial Sequence: Synthetic oligonucleotide
uucuaguaguuuaaucaca

SEQ ID NO: 647595 - RNA, 19 nt, Artificial Sequence
  Description of Artificial Sequence: Synthetic oligonucleotide
auuacuucagauugcaguu

SEQ ID NO: 647596 - RNA, 19 nt, Artificial Sequence
  Description of Artificial Sequence: Synthetic oligonucleotide
auggguaaaauacuuguau

SEQ ID NO: 647597 - RNA, 19 nt, Artificial Sequence
  Description of Artificial Sequence: Synthetic oligonucleotide
uacauuugcuuaauagccu

SEQ ID NO: 647598 - RNA, 19 nt, Artificial Sequence
  Description of Artificial Sequence: Synthetic oligonucleotide
uagguguuaagcgaaccgg

SEQ ID NO: 647599 - RNA, 19 nt, Artificial Sequence
  Description of Artificial Sequence: Synthetic oligonucleotide
aacaauacuaacaucugua

SEQ ID NO: 647600 - RNA, 19 nt, Artificial Sequence
  Description of Artificial Sequence: Synthetic oligonucleotide
cuagguguuaagcgaaccg

SEQ ID NO: 647601 - RNA, 19 nt, Artificial Sequence
  Description of Artificial Sequence: Synthetic oligonucleotide
ucuccguacagcuaucaca

SEQ ID NO: 647602 - RNA, 19 nt, Artificial Sequence
  Description of Artificial Sequence: Synthetic oligonucleotide
cuaugaugccaccuguugg

SEQ ID NO: 647603 - RNA, 19 nt, Artificial Sequence
  Description of Artificial Sequence: Synthetic oligonucleotide
uugagcaccuuuaauuggu

SEQ ID NO: 647604 - RNA, 19 nt, Artificial Sequence
  Description of Artificial Sequence: Synthetic oligonucleotide
aucugaauucucaaugacg

SEQ ID NO: 647605 - RNA, 19 nt, Artificial Sequence
  Description of Artificial Sequence: Synthetic oligonucleotide
ugauuugggauugaucuac

SEQ ID NO: 647606 - RNA, 19 nt, Artificial Sequence
  Description of Artificial Sequence: Synthetic oligonucleotide
uuuuauugaucaugacaug

SEQ ID NO: 647607 - RNA, 19 nt, Artificial Sequence
  Description of Artificial Sequence: Synthetic oligonucleotide
guagucuucauccaucguc

SEQ ID NO: 647608 - RNA, 19 nt, Artificial Sequence
  Description of Artificial Sequence: Synthetic oligonucleotide
uggaauaaggucugcuaug

SEQ ID NO: 647609 - RNA, 19 nt, Artificial Sequence
  Description of Artificial Sequence: Synthetic oligonucleotide
aaaugcaacuugauaggag

SEQ ID NO: 647610 - RNA, 19 nt, Artificial Sequence
  Description of Artificial Sequence: Synthetic oligonucleotide
uaaugcgugauaucuggga

SEQ ID NO: 647611 - RNA, 19 nt, Artificial Sequence
  Description of Artificial Sequence: Synthetic oligonucleotide
ugcgcaaucuucuuccaug

SEQ ID NO: 647612 - RNA, 19 nt, Artificial Sequence
  Description of Artificial Sequence: Synthetic oligonucleotide
uguaaggauccaccuagca

SEQ ID NO: 647613 - RNA, 19 nt, Artificial Sequence
  Description of Artificial Sequence: Synthetic oligonucleotide
acgucuuguuaucaugaac

SEQ ID NO: 647614 - RNA, 19 nt, Artificial Sequence
  Description of Artificial Sequence: Synthetic oligonucleotide
uugcuuaauagccuguuuu

SEQ ID NO: 647615 - RNA, 19 nt, Artificial Sequence
  Description of Artificial Sequence: Synthetic oligonucleotide
ugaccuguaacauuugauu

SEQ ID NO: 647616 - RNA, 19 nt, Artificial Sequence
  Description of Artificial Sequence: Synthetic oligonucleotide
aaguauacugccauucaca

SEQ ID NO: 647617 - RNA, 19 nt, Artificial Sequence
  Description of Artificial Sequence: Synthetic oligonucleotide
aucaaguccaagaauaagu

SEQ ID NO: 647618 - RNA, 19 nt, Artificial Sequence
  Description of Artificial Sequence: Synthetic oligonucleotide
uuauuacuucagauugcag

SEQ ID NO: 647619 - RNA, 19 nt, Artificial Sequence
  Description of Artificial Sequence: Synthetic oligonucleotide
aguauacugccauucacau

SEQ ID NO: 647620 - RNA, 19 nt, Artificial Sequence
  Description of Artificial Sequence: Synthetic oligonucleotide
aauuaggccaaagggauuu

SEQ ID NO: 647621 - RNA, 19 nt, Artificial Sequence
  Description of Artificial Sequence: Synthetic oligonucleotide
gauuaggaaacugaaugga

SEQ ID NO: 647622 - RNA, 19 nt, Artificial Sequence
  Description of Artificial Sequence: Synthetic oligonucleotide
uugauaggagauauaugaa

SEQ ID NO: 647623 - RNA, 19 nt, Artificial Sequence
  Description of Artificial Sequence: Synthetic oligonucleotide
agcauaugcucccugaaau

SEQ ID NO: 647624 - RNA, 19 nt, Artificial Sequence
  Description of Artificial Sequence: Synthetic oligonucleotide
cuguauucuauaaaucuga

SEQ ID NO: 647625 - RNA, 19 nt, Artificial Sequence
  Description of Artificial Sequence: Synthetic oligonucleotide
ucucaaugacgacuggugu

SEQ ID NO: 647626 - RNA, 19 nt, Artificial Sequence
  Description of Artificial Sequence: Synthetic oligonucleotide
aggaauuaguccuccacgu

SEQ ID NO: 647627 - RNA, 19 nt, Artificial Sequence
  Description of Artificial Sequence: Synthetic oligonucleotide
auggacaauaaauggcucu

SEQ ID NO: 647628 - RNA, 19 nt, Artificial Sequence
  Description of Artificial Sequence: Synthetic oligonucleotide
cucggcuuuuggaauaagg

SEQ ID NO: 647629 - RNA, 19 nt, Artificial Sequence
  Description of Artificial Sequence: Synthetic oligonucleotide
ucaauaaccuugucuucca

SEQ ID NO: 647630 - RNA, 19 nt, Artificial Sequence
  Description of Artificial Sequence: Synthetic oligonucleotide
aucaugaacauaucuguuu

SEQ ID NO: 647631 - RNA, 19 nt, Artificial Sequence
  Description of Artificial Sequence: Synthetic oligonucleotide
acuagguguuaagcgaacc

SEQ ID NO: 647632 - RNA, 19 nt, Artificial Sequence
  Description of Artificial Sequence: Synthetic oligonucleotide
caaaaguauacugccauuc

SEQ ID NO: 647633 - RNA, 19 nt, Artificial Sequence
  Description of Artificial Sequence: Synthetic oligonucleotide
uccaagauccaaucugaga

SEQ ID NO: 647634 - RNA, 19 nt, Artificial Sequence
  Description of Artificial Sequence: Synthetic oligonucleotide
guacagcuaucacaugugg

SEQ ID NO: 647635 - RNA, 19 nt, Artificial Sequence
  Description of Artificial Sequence: Synthetic oligonucleotide
gaguaaugccuucucuaag

SEQ ID NO: 647636 - RNA, 19 nt, Artificial Sequence
  Description of Artificial Sequence: Synthetic oligonucleotide
guaguuuaaucacacaacu

SEQ ID NO: 647637 - RNA, 19 nt, Artificial Sequence
  Description of Artificial Sequence: Synthetic oligonucleotide
guaaggguggcaccaauac

SEQ ID NO: 647638 - RNA, 19 nt, Artificial Sequence
  Description of Artificial Sequence: Synthetic oligonucleotide
cuaaaccuuucccaacacc

SEQ ID NO: 647639 - RNA, 19 nt, Artificial Sequence
  Description of Artificial Sequence: Synthetic oligonucleotide
accccuuuagccauagcgc

SEQ ID NO: 647640 - RNA, 19 nt, Artificial Sequence
  Description of Artificial Sequence: Synthetic oligonucleotide
uaaugccuucucuaaggcc

SEQ ID NO: 647641 - RNA, 19 nt, Artificial Sequence
  Description of Artificial Sequence: Synthetic oligonucleotide
augucuaugaugccaccug

SEQ ID NO: 647642 - RNA, 19 nt, Artificial Sequence
  Description of Artificial Sequence: Synthetic oligonucleotide
cucaaugacgacuggugug

SEQ ID NO: 647643 - RNA, 19 nt, Artificial Sequence
  Description of Artificial Sequence: Synthetic oligonucleotide
aaggucggauaacuccauc

SEQ ID NO: 647644 - RNA, 19 nt, Artificial Sequence
  Description of Artificial Sequence: Synthetic oligonucleotide
uugauccccugaaagguac

SEQ ID NO: 647645 - RNA, 19 nt, Artificial Sequence
  Description of Artificial Sequence: Synthetic oligonucleotide
uccaccuagcauccucugg

SEQ ID NO: 647646 - RNA, 19 nt, Artificial Sequence
  Description of Artificial Sequence: Synthetic oligonucleotide
agagauugauuugggauug

SEQ ID NO: 647647 - RNA, 19 nt, Artificial Sequence
  Description of Artificial Sequence: Synthetic oligonucleotide
gauugaucuacugaugaaa

SEQ ID NO: 647648 - RNA, 19 nt, Artificial Sequence
  Description of Artificial Sequence: Synthetic oligonucleotide
uucuacuuuuagugcuugg

SEQ ID NO: 647649 - RNA, 19 nt, Artificial Sequence
  Description of Artificial Sequence: Synthetic oligonucleotide
auugccacuagguguuaag

SEQ ID NO: 647650 - RNA, 19 nt, Artificial Sequence
  Description of Artificial Sequence: Synthetic oligonucleotide
uaagcgaaccggaauguua

SEQ ID NO: 647651 - RNA, 19 nt, Artificial Sequence
  Description of Artificial Sequence: Synthetic oligonucleotide
uucucagucaccucggcuu

SEQ ID NO: 647652 - RNA, 19 nt, Artificial Sequence
  Description of Artificial Sequence: Synthetic oligonucleotide
cuugaaucaacacuuugaa

SEQ ID NO: 647653 - RNA, 19 nt, Artificial Sequence
  Description of Artificial Sequence: Synthetic oligonucleotide
guaaugccuucucuaaggc

SEQ ID NO: 647654 - RNA, 19 nt, Artificial Sequence
  Description of Artificial Sequence: Synthetic oligonucleotide
ugucuaugaugccaccugu

SEQ ID NO: 647655 - RNA, 19 nt, Artificial Sequence
  Description of Artificial Sequence: Synthetic oligonucleotide
augacuccuauuuuccaca

SEQ ID NO: 647656 - RNA, 19 nt, Artificial Sequence
  Description of Artificial Sequence: Synthetic oligonucleotide
ugcugauguguuauauucu

SEQ ID NO: 647657 - RNA, 19 nt, Artificial Sequence
  Description of Artificial Sequence: Synthetic oligonucleotide
auaacaauacuaacaucug

SEQ ID NO: 647658 - RNA, 19 nt, Artificial Sequence
  Description of Artificial Sequence: Synthetic oligonucleotide
gagaugguucccuugcuuc

SEQ ID NO: 647659 - RNA, 19 nt, Artificial Sequence
  Description of Artificial Sequence: Synthetic oligonucleotide
guaauuucuccguacagcu

SEQ ID NO: 647660 - RNA, 19 nt, Artificial Sequence
  Description of Artificial Sequence: Synthetic oligonucleotide
auuuccuguaccaucccuc

SEQ ID NO: 647661 - RNA, 19 nt, Artificial Sequence
  Description of Artificial Sequence: Synthetic oligonucleotide
uaucaugaacauaucuguu

SEQ ID NO: 647662 - RNA, 19 nt, Artificial Sequence
  Description of Artificial Sequence: Synthetic oligonucleotide
ugggauugaucuacugaug

SEQ ID NO: 647663 - RNA, 19 nt, Artificial Sequence
  Description of Artificial Sequence: Synthetic oligonucleotide
gauugcaguucagauguug

SEQ ID NO: 647664 - RNA, 19 nt, Artificial Sequence
  Description of Artificial Sequence: Synthetic oligonucleotide
uuaaagcaucuaaaagcau

SEQ ID NO: 647665 - RNA, 19 nt, Artificial Sequence
  Description of Artificial Sequence: Synthetic oligonucleotide
uacggaacugguaguugag

SEQ ID NO: 647666 - RNA, 19 nt, Artificial Sequence
  Description of Artificial Sequence: Synthetic oligonucleotide
aaugacgacuggugugcug

SEQ ID NO: 647667 - RNA, 19 nt, Artificial Sequence
  Description of Artificial Sequence: Synthetic oligonucleotide
gacauggguaaaauacuug

SEQ ID NO: 647668 - RNA, 19 nt, Artificial Sequence
  Description of Artificial Sequence: Synthetic oligonucleotide
aacuguuugcccaauugau

SEQ ID NO: 647669 - RNA, 19 nt, Artificial Sequence
  Description of Artificial Sequence: Synthetic oligonucleotide
ucucaguguguuuuauacu

SEQ ID NO: 647670 - RNA, 19 nt, Artificial Sequence
  Description of Artificial Sequence: Synthetic oligonucleotide
cuccaacuaaaccuuuccc

SEQ ID NO: 647671 - RNA, 19 nt, Artificial Sequence
  Description of Artificial Sequence: Synthetic oligonucleotide
uucagauguuguacggaac

SEQ ID NO: 647672 - RNA, 19 nt, Artificial Sequence
  Description of Artificial Sequence: Synthetic oligonucleotide
uucaugucauugccacuag

SEQ ID NO: 647673 - RNA, 19 nt, Artificial Sequence
  Description of Artificial Sequence: Synthetic oligonucleotide
uaaggguggcaccaauacu

SEQ ID NO: 647674 - RNA, 19 nt, Artificial Sequence
  Description of Artificial Sequence: Synthetic oligonucleotide
gguaauuucuccguacagc

SEQ ID NO: 647675 - RNA, 19 nt, Artificial Sequence
  Description of Artificial Sequence: Synthetic oligonucleotide
cucauuggcuuccaccuug

SEQ ID NO: 647676 - RNA, 19 nt, Artificial Sequence
  Description of Artificial Sequence: Synthetic oligonucleotide
aaagaaccgaggaggucuc

SEQ ID NO: 647677 - RNA, 19 nt, Artificial Sequence
  Description of Artificial Sequence: Synthetic oligonucleotide
ggcaccaauacucuucagc

SEQ ID NO: 647678 - RNA, 19 nt, Artificial Sequence
  Description of Artificial Sequence: Synthetic oligonucleotide
cuaauuaggccaaagggau

SEQ ID NO: 647679 - RNA, 19 nt, Artificial Sequence
  Description of Artificial Sequence: Synthetic oligonucleotide
aguaugggaacuguaguau

SEQ ID NO: 647680 - RNA, 19 nt, Artificial Sequence
  Description of Artificial Sequence: Synthetic oligonucleotide
ugggagguaauuucuccgu

SEQ ID NO: 647681 - RNA, 19 nt, Artificial Sequence
  Description of Artificial Sequence: Synthetic oligonucleotide
gguuuugucucccaacaac

SEQ ID NO: 647682 - RNA, 19 nt, Artificial Sequence
  Description of Artificial Sequence: Synthetic oligonucleotide
cuccuauuuuccacagggg

SEQ ID NO: 647683 - RNA, 19 nt, Artificial Sequence
  Description of Artificial Sequence: Synthetic oligonucleotide
aacaggaauuaguccucca

SEQ ID NO: 647684 - RNA, 19 nt, Artificial Sequence
  Description of Artificial Sequence: Synthetic oligonucleotide
uuugcuuaauagccuguuu

SEQ ID NO: 647685 - RNA, 19 nt, Artificial Sequence
  Description of Artificial Sequence: Synthetic oligonucleotide
uuugauccccugaaaggua

SEQ ID NO: 647686 - RNA, 19 nt, Artificial Sequence
  Description of Artificial Sequence: Synthetic oligonucleotide
accacgucuuguuaucaug

SEQ ID NO: 647687 - RNA, 19 nt, Artificial Sequence
  Description of Artificial Sequence: Synthetic oligonucleotide
uuuggagguuuaauagcau

SEQ ID NO: 647688 - RNA, 19 nt, Artificial Sequence
  Description of Artificial Sequence: Synthetic oligonucleotide
uguaaggguggcaccaaua

SEQ ID NO: 647689 - RNA, 19 nt, Artificial Sequence
  Description of Artificial Sequence: Synthetic oligonucleotide
uguaaggggcuuuggugcu

SEQ ID NO: 647690 - RNA, 19 nt, Artificial Sequence
  Description of Artificial Sequence: Synthetic oligonucleotide
aaacguuucuacauccuua

SEQ ID NO: 647691 - RNA, 19 nt, Artificial Sequence
  Description of Artificial Sequence: Synthetic oligonucleotide
auaugcucccugaaaugac

SEQ ID NO: 647692 - RNA, 19 nt, Artificial Sequence
  Description of Artificial Sequence: Synthetic oligonucleotide
ucaaaaguauacugccauu

SEQ ID NO: 647693 - RNA, 19 nt, Artificial Sequence
  Description of Artificial Sequence: Synthetic oligonucleotide
ugucucccaacaacaucag

SEQ ID NO: 647694 - RNA, 19 nt, Artificial Sequence
  Description of Artificial Sequence: Synthetic oligonucleotide
gcaaaagauugagagaaug

SEQ ID NO: 647695 - RNA, 19 nt, Artificial Sequence
  Description of Artificial Sequence: Synthetic oligonucleotide
uaauagcauaaaacacgaa

SEQ ID NO: 647696 - RNA, 19 nt, Artificial Sequence
  Description of Artificial Sequence: Synthetic oligonucleotide
agaucucauaacaauacua

SEQ ID NO: 647697 - RNA, 19 nt, Artificial Sequence
  Description of Artificial Sequence: Synthetic oligonucleotide
gaacuuguaaugccuauau

SEQ ID NO: 647698 - RNA, 19 nt, Artificial Sequence
  Description of Artificial Sequence: Synthetic oligonucleotide
auaaggucugcuauggcau

SEQ ID NO: 647699 - RNA, 19 nt, Artificial Sequence
  Description of Artificial Sequence: Synthetic oligonucleotide
aagcgaaccggaauguuau

SEQ ID NO: 647700 - RNA, 19 nt, Artificial Sequence
  Description of Artificial Sequence: Synthetic oligonucleotide
guaaauucaucaaaaguau

SEQ ID NO: 647701 - RNA, 19 nt, Artificial Sequence
  Description of Artificial Sequence: Synthetic oligonucleotide
uguacggaacugguaguug

SEQ ID NO: 647702 - RNA, 19 nt, Artificial Sequence
  Description of Artificial Sequence: Synthetic oligonucleotide
augacauggguaaaauacu

SEQ ID NO: 647703 - RNA, 19 nt, Artificial Sequence
  Description of Artificial Sequence: Synthetic oligonucleotide
gcaccaauacucuucagca

SEQ ID NO: 647704 - RNA, 19 nt, Artificial Sequence
  Description of Artificial Sequence: Synthetic oligonucleotide
caaagagauugauuuggga

SEQ ID NO: 647705 - RNA, 19 nt, Artificial Sequence
  Description of Artificial Sequence: Synthetic oligonucleotide
auggcauacacaaauccaa

SEQ ID NO: 647706 - RNA, 19 nt, Artificial Sequence
  Description of Artificial Sequence: Synthetic oligonucleotide
agagaaugaacaggaauua

SEQ ID NO: 647707 - RNA, 19 nt, Artificial Sequence
  Description of Artificial Sequence: Synthetic oligonucleotide
gggauugaucuacugauga

SEQ ID NO: 647708 - RNA, 19 nt, Artificial Sequence
  Description of Artificial Sequence: Synthetic oligonucleotide
uccuagugccauuccuucc

SEQ ID NO: 647709 - RNA, 19 nt, Artificial Sequence
  Description of Artificial Sequence: Synthetic oligonucleotide
uugagagaaugaacaggaa

SEQ ID NO: 647710 - RNA, 19 nt, Artificial Sequence
  Description of Artificial Sequence: Synthetic oligonucleotide
cauaugcucccugaaauga

SEQ ID NO: 647711 - RNA, 19 nt, Artificial Sequence
  Description of Artificial Sequence: Synthetic oligonucleotide
uacauacauuugcuuaaua

SEQ ID NO: 647712 - RNA, 19 nt, Artificial Sequence
  Description of Artificial Sequence: Synthetic oligonucleotide
ugggaacuguaguauugga

SEQ ID NO: 647713 - RNA, 19 nt, Artificial Sequence
  Description of Artificial Sequence: Synthetic oligonucleotide
guauacugccauucacaug

SEQ ID NO: 647714 - RNA, 19 nt, Artificial Sequence
  Description of Artificial Sequence: Synthetic oligonucleotide
aacucucuaauuaggccaa

SEQ ID NO: 647715 - RNA, 19 nt, Artificial Sequence
  Description of Artificial Sequence: Synthetic oligonucleotide
augacgacuggugugcuga

SEQ ID NO: 647716 - RNA, 19 nt, Artificial Sequence
  Description of Artificial Sequence: Synthetic oligonucleotide
uaauuaggccaaagggauu

SEQ ID NO: 647717 - RNA, 19 nt, Artificial Sequence
  Description of Artificial Sequence: Synthetic oligonucleotide
caacuguuugcccaauuga

SEQ ID NO: 647718 - RNA, 19 nt, Artificial Sequence
  Description of Artificial Sequence: Synthetic oligonucleotide
guauuccuugaauuccuuc

SEQ ID NO: 647719 - RNA, 19 nt, Artificial Sequence
  Description of Artificial Sequence: Synthetic oligonucleotide
guuuuauacucauuggcuu

SEQ ID NO: 647720 - RNA, 19 nt, Artificial Sequence
  Description of Artificial Sequence: Synthetic oligonucleotide
auagcgcuggugauuuugg

SEQ ID NO: 647721 - RNA, 19 nt, Artificial Sequence
  Description of Artificial Sequence: Synthetic oligonucleotide
uucuccguacagcuaucac

SEQ ID NO: 647722 - RNA, 19 nt, Artificial Sequence
  Description of Artificial Sequence: Synthetic oligonucleotide
caucuguaaggguggcacc

SEQ ID NO: 647723 - RNA, 19 nt, Artificial Sequence
  Description of Artificial Sequence: Synthetic oligonucleotide
ugcuuauucaucgcuucuc

SEQ ID NO: 647724 - RNA, 19 nt, Artificial Sequence
  Description of Artificial Sequence: Synthetic oligonucleotide
uggacaauaaauggcucuu

SEQ ID NO: 647725 - RNA, 19 nt, Artificial Sequence
  Description of Artificial Sequence: Synthetic oligonucleotide
cauagcgcuggugauuuug

SEQ ID NO: 647726 - RNA, 19 nt, Artificial Sequence
  Description of Artificial Sequence: Synthetic oligonucleotide
cacagggguuagaagguac

SEQ ID NO: 647727 - RNA, 19 nt, Artificial Sequence
  Description of Artificial Sequence: Synthetic oligonucleotide
gucggauaacuccaucuuc

SEQ ID NO: 647728 - RNA, 19 nt, Artificial Sequence
  Description of Artificial Sequence: Synthetic oligonucleotide
aucuguaaggguggcacca

SEQ ID NO: 647729 - RNA, 19 nt, Artificial Sequence
  Description of Artificial Sequence: Synthetic oligonucleotide
gcugcuaccccuuuagcca

SEQ ID NO: 647730 - RNA, 19 nt, Artificial Sequence
  Description of Artificial Sequence: Synthetic oligonucleotide
gggguuagaagguacagua

SEQ ID NO: 647731 - RNA, 19 nt, Artificial Sequence
  Description of Artificial Sequence: Synthetic oligonucleotide
uccacgaguaaugccuucu

SEQ ID NO: 647732 - RNA, 19 nt, Artificial Sequence
  Description of Artificial Sequence: Synthetic oligonucleotide
gaccuguaacauuugauuu

SEQ ID NO: 647733 - RNA, 19 nt, Artificial Sequence
  Description of Artificial Sequence: Synthetic oligonucleotide
ggagguaauuucuccguac

SEQ ID NO: 647734 - RNA, 19 nt, Artificial Sequence
  Description of Artificial Sequence: Synthetic oligonucleotide
uuucuccguacagcuauca

SEQ ID NO: 647735 - RNA, 19 nt, Artificial Sequence
  Description of Artificial Sequence: Synthetic oligonucleotide
agccuguaaggucggauaa

SEQ ID NO: 647736 - RNA, 19 nt, Artificial Sequence
  Description of Artificial Sequence: Synthetic oligonucleotide
auugaucaugacaugggua

SEQ ID NO: 647737 - RNA, 19 nt, Artificial Sequence
  Description of Artificial Sequence: Synthetic oligonucleotide
uuuagccauagcgcuggug

SEQ ID NO: 647738 - RNA, 19 nt, Artificial Sequence
  Description of Artificial Sequence: Synthetic oligonucleotide
uucaaugcgcaaucuucuu

SEQ ID NO: 647739 - RNA, 19 nt, Artificial Sequence
  Description of Artificial Sequence: Synthetic oligonucleotide
ugcaacuugauaggagaua

SEQ ID NO: 647740 - RNA, 19 nt, Artificial Sequence
  Description of Artificial Sequence: Synthetic oligonucleotide
augcgugauaucugggaau

SEQ ID NO: 647741 - RNA, 19 nt, Artificial Sequence
  Description of Artificial Sequence: Synthetic oligonucleotide
uuugcccaauugauuguuu

SEQ ID NO: 647742 - RNA, 19 nt, Artificial Sequence
  Description of Artificial Sequence: Synthetic oligonucleotide
gcgcaaucuucuuccaugg

SEQ ID NO: 647743 - RNA, 19 nt, Artificial Sequence
  Description of Artificial Sequence: Synthetic oligonucleotide
aauacagauuucacccguu

SEQ ID NO: 647744 - RNA, 19 nt, Artificial Sequence
  Description of Artificial Sequence: Synthetic oligonucleotide
cuguaaggucggauaacuc

SEQ ID NO: 647745 - RNA, 19 nt, Artificial Sequence
  Description of Artificial Sequence: Synthetic oligonucleotide
caugaccuguaacauuuga

SEQ ID NO: 647746 - RNA, 19 nt, Artificial Sequence
  Description of Artificial Sequence: Synthetic oligonucleotide
acgccuucugaaaacucuc

SEQ ID NO: 647747 - RNA, 19 nt, Artificial Sequence
  Description of Artificial Sequence: Synthetic oligonucleotide
cacaccacgucuuguuauc

SEQ ID NO: 647748 - RNA, 19 nt, Artificial Sequence
  Description of Artificial Sequence: Synthetic oligonucleotide
gcauaugcucccugaaaug

SEQ ID NO: 647749 - RNA, 19 nt, Artificial Sequence
  Description of Artificial Sequence: Synthetic oligonucleotide
guccuagugccauuccuuc

SEQ ID NO: 647750 - RNA, 19 nt, Artificial Sequence
  Description of Artificial Sequence: Synthetic oligonucleotide
guaaggauccaccuagcau

SEQ ID NO: 647751 - RNA, 19 nt, Artificial Sequence
  Description of Artificial Sequence: Synthetic oligonucleotide
aaauggcucuuugguaaau

SEQ ID NO: 647752 - RNA, 19 nt, Artificial Sequence
  Description of Artificial Sequence: Synthetic oligonucleotide
gaaccgaggaggucucaga

SEQ ID NO: 647753 - RNA, 19 nt, Artificial Sequence
  Description of Artificial Sequence: Synthetic oligonucleotide
auagccuguuuugaauagu

SEQ ID NO: 647754 - RNA, 19 nt, Artificial Sequence
  Description of Artificial Sequence: Synthetic oligonucleotide
caugaaucugguuuuggau

SEQ ID NO: 647755 - RNA, 19 nt, Artificial Sequence
  Description of Artificial Sequence: Synthetic oligonucleotide
ugauccccugaaagguacu

SEQ ID NO: 647756 - RNA, 19 nt, Artificial Sequence
  Description of Artificial Sequence: Synthetic oligonucleotide
ugagcaccuuuaauugguu

SEQ ID NO: 647757 - RNA, 19 nt, Artificial Sequence
  Description of Artificial Sequence: Synthetic oligonucleotide
cauggguaaaauacuugua

SEQ ID NO: 647758 - RNA, 19 nt, Artificial Sequence
  Description of Artificial Sequence: Synthetic oligonucleotide
gauguuguacggaacuggu

SEQ ID NO: 647759 - RNA, 19 nt, Artificial Sequence
  Description of Artificial Sequence: Synthetic oligonucleotide
auuugcuuaauagccuguu

SEQ ID NO: 647760 - RNA, 19 nt, Artificial Sequence
  Description of Artificial Sequence: Synthetic oligonucleotide
cacuagguguuaagcgaac

SEQ ID NO: 647761 - RNA, 19 nt, Artificial Sequence
  Description of Artificial Sequence: Synthetic oligonucleotide
agaacuuguaaugccuaua

SEQ ID NO: 647762 - RNA, 19 nt, Artificial Sequence
  Description of Artificial Sequence: Synthetic oligonucleotide
uaaggucugcuauggcaua

SEQ ID NO: 647763 - RNA, 19 nt, Artificial Sequence
  Description of Artificial Sequence: Synthetic oligonucleotide
ccuuuagccauagcgcugg

SEQ ID NO: 647764 - RNA, 19 nt, Artificial Sequence
  Description of Artificial Sequence: Synthetic oligonucleotide
agauugauuugggauugau

SEQ ID NO: 647765 - RNA, 19 nt, Artificial Sequence
  Description of Artificial Sequence: Synthetic oligonucleotide
uuguacggaacugguaguu

SEQ ID NO: 647766 - RNA, 19 nt, Artificial Sequence
  Description of Artificial Sequence: Synthetic oligonucleotide
aggcagcaccagcuagccc

SEQ ID NO: 647767 - RNA, 19 nt, Artificial Sequence
  Description of Artificial Sequence: Synthetic oligonucleotide
agggguuagaagguacagu

SEQ ID NO: 647768 - RNA, 19 nt, Artificial Sequence
  Description of Artificial Sequence: Synthetic oligonucleotide
cuugccacugcuccaacua

SEQ ID NO: 647769 - RNA, 19 nt, Artificial Sequence
  Description of Artificial Sequence: Synthetic oligonucleotide
agguacaguaugggaacug

SEQ ID NO: 647770 - RNA, 19 nt, Artificial Sequence
  Description of Artificial Sequence: Synthetic oligonucleotide
cagggguuagaagguacag

SEQ ID NO: 647771 - RNA, 19 nt, Artificial Sequence
  Description of Artificial Sequence: Synthetic oligonucleotide
accggaauguuauguccaa

SEQ ID NO: 647772 - RNA, 19 nt, Artificial Sequence
  Description of Artificial Sequence: Synthetic oligonucleotide
aucccuguaaugccacuua

SEQ ID NO: 647773 - RNA, 19 nt, Artificial Sequence
  Description of Artificial Sequence: Synthetic oligonucleotide
uuaagcgaaccggaauguu

SEQ ID NO: 647774 - RNA, 19 nt, Artificial Sequence
  Description of Artificial Sequence: Synthetic oligonucleotide
agcuagcccaccaacugcu

SEQ ID NO: 647775 - RNA, 19 nt, Artificial Sequence
  Description of Artificial Sequence: Synthetic oligonucleotide
auuucuccguacagcuauc

SEQ ID NO: 647776 - RNA, 19 nt, Artificial Sequence
  Description of Artificial Sequence: Synthetic oligonucleotide
uuagugcuugggagguaau

SEQ ID NO: 647777 - RNA, 19 nt, Artificial Sequence
  Description of Artificial Sequence: Synthetic oligonucleotide
agcgaaccggaauguuaug

SEQ ID NO: 647778 - RNA, 19 nt, Artificial Sequence
  Description of Artificial Sequence: Synthetic oligonucleotide
ggugcugaguccauuguga

SEQ ID NO: 647779 - RNA, 19 nt, Artificial Sequence
  Description of Artificial Sequence: Synthetic oligonucleotide
auccaccuagcauccucug

SEQ ID NO: 647780 - RNA, 19 nt, Artificial Sequence
  Description of Artificial Sequence: Synthetic oligonucleotide
accuguuggucuugccacu

SEQ ID NO: 647781 - RNA, 19 nt, Artificial Sequence
  Description of Artificial Sequence: Synthetic oligonucleotide
caccagcuagcccaccaac

SEQ ID NO: 647782 - RNA, 19 nt, Artificial Sequence
  Description of Artificial Sequence: Synthetic oligonucleotide
cuuccacgccuucugaaaa

SEQ ID NO: 647783 - RNA, 19 nt, Artificial Sequence
  Description of Artificial Sequence: Synthetic oligonucleotide
ucuguaaggguggcaccaa

SEQ ID NO: 647784 - RNA, 19 nt, Artificial Sequence
  Description of Artificial Sequence: Synthetic oligonucleotide
ggauugaucuacugaugaa

SEQ ID NO: 647785 - RNA, 19 nt, Artificial Sequence
  Description of Artificial Sequence: Synthetic oligonucleotide
acugcuccgccaaccagug

SEQ ID NO: 647786 - RNA, 19 nt, Artificial Sequence
  Description of Artificial Sequence: Synthetic oligonucleotide
guuguacggaacugguagu

SEQ ID NO: 647787 - RNA, 19 nt, Artificial Sequence
  Description of Artificial Sequence: Synthetic oligonucleotide
uggcaccaauacucuucag

SEQ ID NO: 647788 - RNA, 19 nt, Artificial Sequence
  Description of Artificial Sequence: Synthetic oligonucleotide
augcgcaaucuucuuccau

SEQ ID NO: 647789 - RNA, 19 nt, Artificial Sequence
  Description of Artificial Sequence: Synthetic oligonucleotide
gcuggccaugucuaugaug

SEQ ID NO: 647790 - RNA, 19 nt, Artificial Sequence
  Description of Artificial Sequence: Synthetic oligonucleotide
ccauggacaauaaauggcu

SEQ ID NO: 647791 - RNA, 19 nt, Artificial Sequence
  Description of Artificial Sequence: Synthetic oligonucleotide
cacgccuucugaaaacucu

SEQ ID NO: 647792 - RNA, 19 nt, Artificial Sequence
  Description of Artificial Sequence: Synthetic oligonucleotide
uccgccaaccagugcuuuc

SEQ ID NO: 647793 - RNA, 19 nt, Artificial Sequence
  Description of Artificial Sequence: Synthetic oligonucleotide
cguacagcuaucacaugug

SEQ ID NO: 647794 - RNA, 19 nt, Artificial Sequence
  Description of Artificial Sequence: Synthetic oligonucleotide
ggucugcuauggcauacac

SEQ ID NO: 647795 - RNA, 19 nt, Artificial Sequence
  Description of Artificial Sequence: Synthetic oligonucleotide
acaccacgucuuguuauca

SEQ ID NO: 647796 - RNA, 19 nt, Artificial Sequence
  Description of Artificial Sequence: Synthetic oligonucleotide
cguuucuacauccuuauua

SEQ ID NO: 647797 - RNA, 19 nt, Artificial Sequence
  Description of Artificial Sequence: Synthetic oligonucleotide
cagaucucauaacaauacu

SEQ ID NO: 647798 - RNA, 19 nt, Artificial Sequence
  Description of Artificial Sequence: Synthetic oligonucleotide
guuaagcgaaccggaaugu

SEQ ID NO: 647799 - RNA, 19 nt, Artificial Sequence
  Description of Artificial Sequence: Synthetic oligonucleotide
caccaauacucuucagcaa

SEQ ID NO: 647800 - RNA, 19 nt, Artificial Sequence
  Description of Artificial Sequence: Synthetic oligonucleotide
gacgacuggugugcugaug

SEQ ID NO: 647801 - RNA, 19 nt, Artificial Sequence
  Description of Artificial Sequence: Synthetic oligonucleotide
aagaaccgaggaggucuca

SEQ ID NO: 647802 - RNA, 19 nt, Artificial Sequence
  Description of Artificial Sequence: Synthetic oligonucleotide
guguuaagcgaaccggaau

SEQ ID NO: 647803 - RNA, 19 nt, Artificial Sequence
  Description of Artificial Sequence: Synthetic oligonucleotide
agcaaaagauugagagaau

SEQ ID NO: 647804 - RNA, 19 nt, Artificial Sequence
  Description of Artificial Sequence: Synthetic oligonucleotide
gcuauggcauacacaaauc

SEQ ID NO: 647805 - RNA, 19 nt, Artificial Sequence
  Description of Artificial Sequence: Synthetic oligonucleotide
cagccuguaaggucggaua

SEQ ID NO: 647806 - RNA, 19 nt, Artificial Sequence
  Description of Artificial Sequence: Synthetic oligonucleotide
ccacgucuuguuaucauga

SEQ ID NO: 647807 - RNA, 19 nt, Artificial Sequence
  Description of Artificial Sequence: Synthetic oligonucleotide
uaacaucuguaaggggcuu

SEQ ID NO: 647808 - RNA, 19 nt, Artificial Sequence
  Description of Artificial Sequence: Synthetic oligonucleotide
cauuugcuuaauagccugu

SEQ ID NO: 647809 - RNA, 19 nt, Artificial Sequence
  Description of Artificial Sequence: Synthetic oligonucleotide
cacgucuuguuaucaugaa

SEQ ID NO: 647810 - RNA, 19 nt, Artificial Sequence
  Description of Artificial Sequence: Synthetic oligonucleotide
gagauugauuugggauuga

SEQ ID NO: 647811 - RNA, 19 nt, Artificial Sequence
  Description of Artificial Sequence: Synthetic oligonucleotide
guaaggggcuuuggugcug

SEQ ID NO: 647812 - RNA, 19 nt, Artificial Sequence
  Description of Artificial Sequence: Synthetic oligonucleotide
cuccacgaguaaugccuuc

SEQ ID NO: 647813 - RNA, 19 nt, Artificial Sequence
  Description of Artificial Sequence: Synthetic oligonucleotide
cauuuuccaugaccuguaa

SEQ ID NO: 647814 - RNA, 19 nt, Artificial Sequence
  Description of Artificial Sequence: Synthetic oligonucleotide
auacugccauucacauguc

SEQ ID NO: 647815 - RNA, 19 nt, Artificial Sequence
  Description of Artificial Sequence: Synthetic oligonucleotide
gucauugccacuagguguu

SEQ ID NO: 647816 - RNA, 19 nt, Artificial Sequence
  Description of Artificial Sequence: Synthetic oligonucleotide
aggucugcuauggcauaca

SEQ ID NO: 647817 - RNA, 19 nt, Artificial Sequence
  Description of Artificial Sequence: Synthetic oligonucleotide
acguuucuacauccuuauu

SEQ ID NO: 647818 - RNA, 19 nt, Artificial Sequence
  Description of Artificial Sequence: Synthetic oligonucleotide
caaacguuucuacauccuu

SEQ ID NO: 647819 - RNA, 19 nt, Artificial Sequence
  Description of Artificial Sequence: Synthetic oligonucleotide
caugucuaugaugccaccu

SEQ ID NO: 647820 - RNA, 19 nt, Artificial Sequence
  Description of Artificial Sequence: Synthetic oligonucleotide
cuuucaugucauugccacu

SEQ ID NO: 647821 - RNA, 19 nt, Artificial Sequence
  Description of Artificial Sequence: Synthetic oligonucleotide
ugacgacuggugugcugau

SEQ ID NO: 647822 - RNA, 19 nt, Artificial Sequence
  Description of Artificial Sequence: Synthetic oligonucleotide
cacgaguaaugccuucucu

SEQ ID NO: 647823 - RNA, 19 nt, Artificial Sequence
  Description of Artificial Sequence: Synthetic oligonucleotide
gguguuaagcgaaccggaa

SEQ ID NO: 647824 - RNA, 19 nt, Artificial Sequence
  Description of Artificial Sequence: Synthetic oligonucleotide
gcuuccacgccuucugaaa

SEQ ID NO: 647825 - RNA, 19 nt, Artificial Sequence
  Description of Artificial Sequence: Synthetic oligonucleotide
caacuugauaggagauaua

SEQ ID NO: 647826 - RNA, 19 nt, Artificial Sequence
  Description of Artificial Sequence: Synthetic oligonucleotide
cucagacuuucuacuucaa

SEQ ID NO: 647827 - RNA, 19 nt, Artificial Sequence
  Description of Artificial Sequence: Synthetic oligonucleotide
auguuguacggaacuggua

SEQ ID NO: 647828 - RNA, 19 nt, Artificial Sequence
  Description of Artificial Sequence: Synthetic oligonucleotide
cacucaaaugcaacuugau

SEQ ID NO: 647829 - RNA, 19 nt, Artificial Sequence
  Description of Artificial Sequence: Synthetic oligonucleotide
cccuuuagccauagcgcug

SEQ ID NO: 647830 - RNA, 19 nt, Artificial Sequence
  Description of Artificial Sequence: Synthetic oligonucleotide
guauuggauugcugugccu

SEQ ID NO: 647831 - RNA, 19 nt, Artificial Sequence
  Description of Artificial Sequence: Synthetic oligonucleotide
guacugcuggccaugucua

SEQ ID NO: 647832 - RNA, 19 nt, Artificial Sequence
  Description of Artificial Sequence: Synthetic oligonucleotide
gguacaguaugggaacugu

SEQ ID NO: 647833 - RNA, 19 nt, Artificial Sequence
  Description of Artificial Sequence: Synthetic oligonucleotide
cacguuguccugaaucuuu

SEQ ID NO: 647834 - RNA, 19 nt, Artificial Sequence
  Description of Artificial Sequence: Synthetic oligonucleotide
ugcuaccccuuuagccaua

SEQ ID NO: 647835 - RNA, 19 nt, Artificial Sequence
  Description of Artificial Sequence: Synthetic oligonucleotide
acguuguccugaaucuuua

SEQ ID NO: 647836 - RNA, 19 nt, Artificial Sequence
  Description of Artificial Sequence: Synthetic oligonucleotide
ccaauacucuucagcaaaa

SEQ ID NO: 647837 - RNA, 19 nt, Artificial Sequence
  Description of Artificial Sequence: Synthetic oligonucleotide
gcuaccccuuuagccauag

SEQ ID NO: 647838 - RNA, 19 nt, Artificial Sequence
  Description of Artificial Sequence: Synthetic oligonucleotide
ggaccuucuaguaguuuaa

SEQ ID NO: 647839 - RNA, 19 nt, Artificial Sequence
  Description of Artificial Sequence: Synthetic oligonucleotide
auguuauguccaacucaau

SEQ ID NO: 647840 - RNA, 19 nt, Artificial Sequence
  Description of Artificial Sequence: Synthetic oligonucleotide
cagcugguugcuuauucau

SEQ ID NO: 647841 - RNA, 19 nt, Artificial Sequence
  Description of Artificial Sequence: Synthetic oligonucleotide
caacaacaucagaacuugu

SEQ ID NO: 647842 - RNA, 19 nt, Artificial Sequence
  Description of Artificial Sequence: Synthetic oligonucleotide
ccguacagcuaucacaugu

SEQ ID NO: 647843 - RNA, 19 nt, Artificial Sequence
  Description of Artificial Sequence: Synthetic oligonucleotide
gggagguaauuucuccgua

SEQ ID NO: 647844 - RNA, 19 nt, Artificial Sequence
  Description of Artificial Sequence: Synthetic oligonucleotide
guuugcccaauugauuguu

SEQ ID NO: 647845 - RNA, 19 nt, Artificial Sequence
  Description of Artificial Sequence: Synthetic oligonucleotide
ucauugccacuagguguua

SEQ ID NO: 647846 - RNA, 19 nt, Artificial Sequence
  Description of Artificial Sequence: Synthetic oligonucleotide
ggucggauaacuccaucuu

SEQ ID NO: 647847 - RNA, 19 nt, Artificial Sequence
  Description of Artificial Sequence: Synthetic oligonucleotide
cugcuccgccaaccagugc

SEQ ID NO: 647848 - RNA, 19 nt, Artificial Sequence
  Description of Artificial Sequence: Synthetic oligonucleotide
acacaacuguuugcccaau

SEQ ID NO: 647849 - RNA, 19 nt, Artificial Sequence
  Description of Artificial Sequence: Synthetic oligonucleotide
gaccuucuaguaguuuaau

SEQ ID NO: 647850 - RNA, 19 nt, Artificial Sequence
  Description of Artificial Sequence: Synthetic oligonucleotide
ccuauuuuccacagggguu

SEQ ID NO: 647851 - RNA, 19 nt, Artificial Sequence
  Description of Artificial Sequence: Synthetic oligonucleotide
ccacgaguaaugccuucuc

SEQ ID NO: 647852 - RNA, 19 nt, Artificial Sequence
  Description of Artificial Sequence: Synthetic oligonucleotide
ggaauuaguccuccacguu

SEQ ID NO: 647853 - RNA, 19 nt, Artificial Sequence
  Description of Artificial Sequence: Synthetic oligonucleotide
ggcauggaauacagauuuc

SEQ ID NO: 647854 - RNA, 19 nt, Artificial Sequence
  Description of Artificial Sequence: Synthetic oligonucleotide
cauugccacuagguguuaa

SEQ ID NO: 647855 - RNA, 19 nt, Artificial Sequence
  Description of Artificial Sequence: Synthetic oligonucleotide
gccuguaaggucggauaac

SEQ ID NO: 647856 - RNA, 19 nt, Artificial Sequence
  Description of Artificial Sequence: Synthetic oligonucleotide
gcuuucaguccuagugcca

SEQ ID NO: 647857 - RNA, 19 nt, Artificial Sequence
  Description of Artificial Sequence: Synthetic oligonucleotide
gcgaaccggaauguuaugu

SEQ ID NO: 647858 - RNA, 19 nt, Artificial Sequence
  Description of Artificial Sequence: Synthetic oligonucleotide
ccuguaaggucggauaacu

SEQ ID NO: 647859 - RNA, 19 nt, Artificial Sequence
  Description of Artificial Sequence: Synthetic oligonucleotide
cugcuaccccuuuagccau

SEQ ID NO: 647860 - RNA, 19 nt, Artificial Sequence
  Description of Artificial Sequence: Synthetic oligonucleotide
ccccuuuagccauagcgcu

SEQ ID NO: 647861 - RNA, 19 nt, Artificial Sequence
  Description of Artificial Sequence: Synthetic oligonucleotide
gcucccugaaaugacuccu

SEQ ID NO: 647862 - RNA, 19 nt, Artificial Sequence
  Description of Artificial Sequence: Synthetic oligonucleotide
guaccaucccucagccugu

SEQ ID NO: 647863 - RNA, 19 nt, Artificial Sequence
  Description of Artificial Sequence: Synthetic oligonucleotide
caccuuuaauugguuuugu

SEQ ID NO: 647864 - RNA, 19 nt, Artificial Sequence
  Description of Artificial Sequence: Synthetic oligonucleotide
uaccaucccucagccugua

SEQ ID NO: 647865 - RNA, 19 nt, Artificial Sequence
  Description of Artificial Sequence: Synthetic oligonucleotide
ccggaauguuauguccaac

SEQ ID NO: 647866 - RNA, 19 nt, Artificial Sequence
  Description of Artificial Sequence: Synthetic oligonucleotide
caccacgucuuguuaucau

SEQ ID NO: 647867 - RNA, 19 nt, Artificial Sequence
  Description of Artificial Sequence: Synthetic oligonucleotide
cuguaaggguggcaccaau

SEQ ID NO: 647868 - RNA, 19 nt, Artificial Sequence
  Description of Artificial Sequence: Synthetic oligonucleotide
auccaucgucauggcugcu

SEQ ID NO: 647869 - RNA, 19 nt, Artificial Sequence
  Description of Artificial Sequence: Synthetic oligonucleotide
ggguuagaagguacaguau

SEQ ID NO: 647870 - RNA, 19 nt, Artificial Sequence
  Description of Artificial Sequence: Synthetic oligonucleotide
gccauagcgcuggugauuu

SEQ ID NO: 647871 - RNA, 19 nt, Artificial Sequence
  Description of Artificial Sequence: Synthetic oligonucleotide
cuaaggccagcugguugcu

SEQ ID NO: 647872 - RNA, 19 nt, Artificial Sequence
  Description of Artificial Sequence: Synthetic oligonucleotide
cuuuagccauagcgcuggu

SEQ ID NO: 647873 - RNA, 19 nt, Artificial Sequence
  Description of Artificial Sequence: Synthetic oligonucleotide
cuuuggugcugaguccauu

SEQ ID NO: 647874 - RNA, 19 nt, Artificial Sequence
  Description of Artificial Sequence: Synthetic oligonucleotide
cuccgccaaccagugcuuu

SEQ ID NO: 647875 - RNA, 19 nt, Artificial Sequence
  Description of Artificial Sequence: Synthetic oligonucleotide
ccacguuguccugaaucuu

SEQ ID NO: 647876 - RNA, 19 nt, Artificial Sequence
  Description of Artificial Sequence: Synthetic oligonucleotide
ccauagcgcuggugauuuu

SEQ ID NO: 647877 - RNA, 19 nt, Artificial Sequence
  Description of Artificial Sequence: Synthetic oligonucleotide
aguacugugcgucauagcc

SEQ ID NO: 647878 - RNA, 19 nt, Artificial Sequence
  Description of Artificial Sequence: Synthetic oligonucleotide
uaggcuaaggcacaggcgg

SEQ ID NO: 647879 - RNA, 19 nt, Artificial Sequence
  Description of Artificial Sequence: Synthetic oligonucleotide
gaagucacgcuccacaugg

SEQ ID NO: 647880 - RNA, 19 nt, Artificial Sequence
  Description of Artificial Sequence: Synthetic oligonucleotide
uucuugauacccuugaucu

SEQ ID NO: 647881 - RNA, 19 nt, Artificial Sequence
  Description of Artificial Sequence: Synthetic oligonucleotide
acaaggaugagaaacugcc

SEQ ID NO: 647882 - RNA, 19 nt, Artificial Sequence
  Description of Artificial Sequence: Synthetic oligonucleotide
auggaguauaccucgcucc

SEQ ID NO: 647883 - RNA, 19 nt, Artificial Sequence
  Description of Artificial Sequence: Synthetic oligonucleotide
uacaggucgagguagaacu

SEQ ID NO: 647884 - RNA, 19 nt, Artificial Sequence
  Description of Artificial Sequence: Synthetic oligonucleotide
uauaccucgcuccacaggu

SEQ ID NO: 647885 - RNA, 19 nt, Artificial Sequence
  Description of Artificial Sequence: Synthetic oligonucleotide
uggaacauguccauggagu

SEQ ID NO: 647886 - RNA, 19 nt, Artificial Sequence
  Description of Artificial Sequence: Synthetic oligonucleotide
agugccuucaaguguacuc

SEQ ID NO: 647887 - RNA, 19 nt, Artificial Sequence
  Description of Artificial Sequence: Synthetic oligonucleotide
agacaugcgcaccagcggc

SEQ ID NO: 647888 - RNA, 19 nt, Artificial Sequence
  Description of Artificial Sequence: Synthetic oligonucleotide
ucaaguguacucucauagg

SEQ ID NO: 647889 - RNA, 19 nt, Artificial Sequence
  Description of Artificial Sequence: Synthetic oligonucleotide
guagucagcauguguaggg

SEQ ID NO: 647890 - RNA, 19 nt, Artificial Sequence
  Description of Artificial Sequence: Synthetic oligonucleotide
uuggcuaggacgaucugcc

SEQ ID NO: 647891 - RNA, 19 nt, Artificial Sequence
  Description of Artificial Sequence: Synthetic oligonucleotide
uacacguccugccucaugc

SEQ ID NO: 647892 - RNA, 19 nt, Artificial Sequence
  Description of Artificial Sequence: Synthetic oligonucleotide
aaguguacucucauaggac

SEQ ID NO: 647893 - RNA, 19 nt, Artificial Sequence
  Description of Artificial Sequence: Synthetic oligonucleotide
aguagcgcaugucccacgc

SEQ ID NO: 647894 - RNA, 19 nt, Artificial Sequence
  Description of Artificial Sequence: Synthetic oligonucleotide
aacauggcgaacucugccu

SEQ ID NO: 647895 - RNA, 19 nt, Artificial Sequence
  Description of Artificial Sequence: Synthetic oligonucleotide
cuuggacggagacacaugc

SEQ ID NO: 647896 - RNA, 19 nt, Artificial Sequence
  Description of Artificial Sequence: Synthetic oligonucleotide
auggccauacuucccuucc

SEQ ID NO: 647897 - RNA, 19 nt, Artificial Sequence
  Description of Artificial Sequence: Synthetic oligonucleotide
ucgagguagaacuugccga

SEQ ID NO: 647898 - RNA, 19 nt, Artificial Sequence
  Description of Artificial Sequence: Synthetic oligonucleotide
uccucuagugugaauguca

SEQ ID NO: 647899 - RNA, 19 nt, Artificial Sequence
  Description of Artificial Sequence: Synthetic oligonucleotide
gaagguugaagagaccugc

SEQ ID NO: 647900 - RNA, 19 nt, Artificial Sequence
  Description of Artificial Sequence: Synthetic oligonucleotide
acauccucgugccaggcgg

SEQ ID NO: 647901 - RNA, 19 nt, Artificial Sequence
  Description of Artificial Sequence: Synthetic oligonucleotide
ucguacacacacuuggucu

SEQ ID NO: 647902 - RNA, 19 nt, Artificial Sequence
  Description of Artificial Sequence: Synthetic oligonucleotide
ugugcuagcugcacggaug

SEQ ID NO: 647903 - RNA, 19 nt, Artificial Sequence
  Description of Artificial Sequence: Synthetic oligonucleotide
guaagucuccacuucauca

SEQ ID NO: 647904 - RNA, 19 nt, Artificial Sequence
  Description of Artificial Sequence: Synthetic oligonucleotide
auagccgccagccaaguga

SEQ ID NO: 647905 - RNA, 19 nt, Artificial Sequence
  Description of Artificial Sequence: Synthetic oligonucleotide
uacugugcgucauagccgc

SEQ ID NO: 647906 - RNA, 19 nt, Artificial Sequence
  Description of Artificial Sequence: Synthetic oligonucleotide
uccacagguagccauagua

SEQ ID NO: 647907 - RNA, 19 nt, Artificial Sequence
  Description of Artificial Sequence: Synthetic oligonucleotide
ugcauugggaaguacuccu

SEQ ID NO: 647908 - RNA, 19 nt, Artificial Sequence
  Description of Artificial Sequence: Synthetic oligonucleotide
uccaugccgaccuuggggc

SEQ ID NO: 647909 - RNA, 19 nt, Artificial Sequence
  Description of Artificial Sequence: Synthetic oligonucleotide
aaggaaggugcgucaggcg

SEQ ID NO: 647910 - RNA, 19 nt, Artificial Sequence
  Description of Artificial Sequence: Synthetic oligonucleotide
aaacguguguggaacaugu

SEQ ID NO: 647911 - RNA, 19 nt, Artificial Sequence
  Description of Artificial Sequence: Synthetic oligonucleotide
agcagugggaaguaaugug

SEQ ID NO: 647912 - RNA, 19 nt, Artificial Sequence
  Description of Artificial Sequence: Synthetic oligonucleotide
ucacgcuccacaugggucc

SEQ ID NO: 647913 - RNA, 19 nt, Artificial Sequence
  Description of Artificial Sequence: Synthetic oligonucleotide
ucuucuaccaggcgccgug

SEQ ID NO: 647914 - RNA, 19 nt, Artificial Sequence
  Description of Artificial Sequence: Synthetic oligonucleotide
gguccgguaauccaugccg

SEQ ID NO: 647915 - RNA, 19 nt, Artificial Sequence
  Description of Artificial Sequence: Synthetic oligonucleotide
ugccgaagguugaagagac

SEQ ID NO: 647916 - RNA, 19 nt, Artificial Sequence
  Description of Artificial Sequence: Synthetic oligonucleotide
agccauaguacugugcguc

SEQ ID NO: 647917 - RNA, 19 nt, Artificial Sequence
  Description of Artificial Sequence: Synthetic oligonucleotide
uaagucuccacuucaucau

SEQ ID NO: 647918 - RNA, 19 nt, Artificial Sequence
  Description of Artificial Sequence: Synthetic oligonucleotide
cuagugugaaugucagccc

SEQ ID NO: 647919 - RNA, 19 nt, Artificial Sequence
  Description of Artificial Sequence: Synthetic oligonucleotide
cuaggcuaaggcacaggcg

SEQ ID NO: 647920 - RNA, 19 nt, Artificial Sequence
  Description of Artificial Sequence: Synthetic oligonucleotide
caaguguacucucauagga

SEQ ID NO: 647921 - RNA, 19 nt, Artificial Sequence
  Description of Artificial Sequence: Synthetic oligonucleotide
auaguacugugcgucauag

SEQ ID NO: 647922 - RNA, 19 nt, Artificial Sequence
  Description of Artificial Sequence: Synthetic oligonucleotide
agugaccaaagguggcugg

SEQ ID NO: 647923 - RNA, 19 nt, Artificial Sequence
  Description of Artificial Sequence: Synthetic oligonucleotide
uaggacgaucugccgaagg

SEQ ID NO: 647924 - RNA, 19 nt, Artificial Sequence
  Description of Artificial Sequence: Synthetic oligonucleotide
uagaacuugccgaucuccu

SEQ ID NO: 647925 - RNA, 19 nt, Artificial Sequence
  Description of Artificial Sequence: Synthetic oligonucleotide
uugaaccggggcaugacaa

SEQ ID NO: 647926 - RNA, 19 nt, Artificial Sequence
  Description of Artificial Sequence: Synthetic oligonucleotide
caaggaugagaaacugccc

SEQ ID NO: 647927 - RNA, 19 nt, Artificial Sequence
  Description of Artificial Sequence: Synthetic oligonucleotide
auguguagggaaccccagg

SEQ ID NO: 647928 - RNA, 19 nt, Artificial Sequence
  Description of Artificial Sequence: Synthetic oligonucleotide
cuuugggacuuucuccugc

SEQ ID NO: 647929 - RNA, 19 nt, Artificial Sequence
  Description of Artificial Sequence: Synthetic oligonucleotide
cugucggcuaccauccugc

SEQ ID NO: 647930 - RNA, 19 nt, Artificial Sequence
  Description of Artificial Sequence: Synthetic oligonucleotide
cacaucaaacucugagagc

SEQ ID NO: 647931 - RNA, 19 nt, Artificial Sequence
  Description of Artificial Sequence: Synthetic oligonucleotide
gaugcugguccgguaaucc

SEQ ID NO: 647932 - RNA, 19 nt, Artificial Sequence
  Description of Artificial Sequence: Synthetic oligonucleotide
gaaccggggcaugacaagg

SEQ ID NO: 647933 - RNA, 19 nt, Artificial Sequence
  Description of Artificial Sequence: Synthetic oligonucleotide
ugcugagacaugcgcacca

SEQ ID NO: 647934 - RNA, 19 nt, Artificial Sequence
  Description of Artificial Sequence: Synthetic oligonucleotide
uggugcaugacauggccaa

SEQ ID NO: 647935 - RNA, 19 nt, Artificial Sequence
  Description of Artificial Sequence: Synthetic oligonucleotide
acguagucagcauguguag

SEQ ID NO: 647936 - RNA, 19 nt, Artificial Sequence
  Description of Artificial Sequence: Synthetic oligonucleotide
ugugagcacagcuggugca

SEQ ID NO: 647937 - RNA, 19 nt, Artificial Sequence
  Description of Artificial Sequence: Synthetic oligonucleotide
cacggauguccuuggacgg

SEQ ID NO: 647938 - RNA, 19 nt, Artificial Sequence
  Description of Artificial Sequence: Synthetic oligonucleotide
uuugggacuuucuccugca

SEQ ID NO: 647939 - RNA, 19 nt, Artificial Sequence
  Description of Artificial Sequence: Synthetic oligonucleotide
guaggucaccuccacauca

SEQ ID NO: 647940 - RNA, 19 nt, Artificial Sequence
  Description of Artificial Sequence: Synthetic oligonucleotide
cuugcguguccugagguag

SEQ ID NO: 647941 - RNA, 19 nt, Artificial Sequence
  Description of Artificial Sequence: Synthetic oligonucleotide
ugccucaugcucaucucca

SEQ ID NO: 647942 - RNA, 19 nt, Artificial Sequence
  Description of Artificial Sequence: Synthetic oligonucleotide
gaguauaccucgcuccaca

SEQ ID NO: 647943 - RNA, 19 nt, Artificial Sequence
  Description of Artificial Sequence: Synthetic oligonucleotide
ugaaccggggcaugacaag

SEQ ID NO: 647944 - RNA, 19 nt, Artificial Sequence
  Description of Artificial Sequence: Synthetic oligonucleotide
uguacucucauaggacaca

SEQ ID NO: 647945 - RNA, 19 nt, Artificial Sequence
  Description of Artificial Sequence: Synthetic oligonucleotide
guacugugcgucauagccg

SEQ ID NO: 647946 - RNA, 19 nt, Artificial Sequence
  Description of Artificial Sequence: Synthetic oligonucleotide
accgaguacaacugcacau

SEQ ID NO: 647947 - RNA, 19 nt, Artificial Sequence
  Description of Artificial Sequence: Synthetic oligonucleotide
agugucgcgcaccgaguac

SEQ ID NO: 647948 - RNA, 19 nt, Artificial Sequence
  Description of Artificial Sequence: Synthetic oligonucleotide
cauggaguauaccucgcuc

SEQ ID NO: 647949 - RNA, 19 nt, Artificial Sequence
  Description of Artificial Sequence: Synthetic oligonucleotide
aggacgaucugccgaaggu

SEQ ID NO: 647950 - RNA, 19 nt, Artificial Sequence
  Description of Artificial Sequence: Synthetic oligonucleotide
ugugcgucauagccgccag

SEQ ID NO: 647951 - RNA, 19 nt, Artificial Sequence
  Description of Artificial Sequence: Synthetic oligonucleotide
cuugcagcggcaguugaag

SEQ ID NO: 647952 - RNA, 19 nt, Artificial Sequence
  Description of Artificial Sequence: Synthetic oligonucleotide
agccacacgacccucuggu

SEQ ID NO: 647953 - RNA, 19 nt, Artificial Sequence
  Description of Artificial Sequence: Synthetic oligonucleotide
acuugcauugggaaguacu

SEQ ID NO: 647954 - RNA, 19 nt, Artificial Sequence
  Description of Artificial Sequence: Synthetic oligonucleotide
uugccgaucuccucuccag

SEQ ID NO: 647955 - RNA, 19 nt, Artificial Sequence
  Description of Artificial Sequence: Synthetic oligonucleotide
uggcgugacuugauaagcu

SEQ ID NO: 647956 - RNA, 19 nt, Artificial Sequence
  Description of Artificial Sequence: Synthetic oligonucleotide
gagaccugcauuggccugg

SEQ ID NO: 647957 - RNA, 19 nt, Artificial Sequence
  Description of Artificial Sequence: Synthetic oligonucleotide
gacguagucagcaugugua

SEQ ID NO: 647958 - RNA, 19 nt, Artificial Sequence
  Description of Artificial Sequence: Synthetic oligonucleotide
uccucuguacuguguaggu

SEQ ID NO: 647959 - RNA, 19 nt, Artificial Sequence
  Description of Artificial Sequence: Synthetic oligonucleotide
gcuaggcuaaggcacaggc

SEQ ID NO: 647960 - RNA, 19 nt, Artificial Sequence
  Description of Artificial Sequence: Synthetic oligonucleotide
cuaccauccugccguaggc

SEQ ID NO: 647961 - RNA, 19 nt, Artificial Sequence
  Description of Artificial Sequence: Synthetic oligonucleotide
cauguguagggaaccccag

SEQ ID NO: 647962 - RNA, 19 nt, Artificial Sequence
  Description of Artificial Sequence: Synthetic oligonucleotide
aaguacuccuucaguaggu

SEQ ID NO: 647963 - RNA, 19 nt, Artificial Sequence
  Description of Artificial Sequence: Synthetic oligonucleotide
gaaacguguguggaacaug

SEQ ID NO: 647964 - RNA, 19 nt, Artificial Sequence
  Description of Artificial Sequence: Synthetic oligonucleotide
cuccacgaagucacgcucc

SEQ ID NO: 647965 - RNA, 19 nt, Artificial Sequence
  Description of Artificial Sequence: Synthetic oligonucleotide
ugauggcgccuccacgaag

SEQ ID NO: 647966 - RNA, 19 nt, Artificial Sequence
  Description of Artificial Sequence: Synthetic oligonucleotide
cuggcgugacuugauaagc

SEQ ID NO: 647967 - RNA, 19 nt, Artificial Sequence
  Description of Artificial Sequence: Synthetic oligonucleotide
agguagguggagcccguuc

SEQ ID NO: 647968 - RNA, 19 nt, Artificial Sequence
  Description of Artificial Sequence: Synthetic oligonucleotide
gaaggugcgucaggcgugg

SEQ ID NO: 647969 - RNA, 19 nt, Artificial Sequence
  Description of Artificial Sequence: Synthetic oligonucleotide
cacacgguagcgugucucc

SEQ ID NO: 647970 - RNA, 19 nt, Artificial Sequence
  Description of Artificial Sequence: Synthetic oligonucleotide
ugguacacguccugccuca

SEQ ID NO: 647971 - RNA, 19 nt, Artificial Sequence
  Description of Artificial Sequence: Synthetic oligonucleotide
ugguccgguaauccaugcc

SEQ ID NO: 647972 - RNA, 19 nt, Artificial Sequence
  Description of Artificial Sequence: Synthetic oligonucleotide
ugugcccgcaaggacacca

SEQ ID NO: 647973 - RNA, 19 nt, Artificial Sequence
  Description of Artificial Sequence: Synthetic oligonucleotide
uccacgaagucacgcucca

SEQ ID NO: 647974 - RNA, 19 nt, Artificial Sequence
  Description of Artificial Sequence: Synthetic oligonucleotide
ugaaacguguguggaacau

SEQ ID NO: 647975 - RNA, 19 nt, Artificial Sequence
  Description of Artificial Sequence: Synthetic oligonucleotide
agucacgcuccacaugggu

SEQ ID NO: 647976 - RNA, 19 nt, Artificial Sequence
  Description of Artificial Sequence: Synthetic oligonucleotide
gugaccuucagcuuuccgu

SEQ ID NO: 647977 - RNA, 19 nt, Artificial Sequence
  Description of Artificial Sequence: Synthetic oligonucleotide
ggcagugucgcgcaccgag

SEQ ID NO: 647978 - RNA, 19 nt, Artificial Sequence
  Description of Artificial Sequence: Synthetic oligonucleotide
uuggacggagacacaugcu

SEQ ID NO: 647979 - RNA, 19 nt, Artificial Sequence
  Description of Artificial Sequence: Synthetic oligonucleotide
guuugaaacguguguggaa

SEQ ID NO: 647980 - RNA, 19 nt, Artificial Sequence
  Description of Artificial Sequence: Synthetic oligonucleotide
agcgagcugccucuggcug

SEQ ID NO: 647981 - RNA, 19 nt, Artificial Sequence
  Description of Artificial Sequence: Synthetic oligonucleotide
uaguacugugcgucauagc

SEQ ID NO: 647982 - RNA, 19 nt, Artificial Sequence
  Description of Artificial Sequence: Synthetic oligonucleotide
ucauguaguagcgcauguc

SEQ ID NO: 647983 - RNA, 19 nt, Artificial Sequence
  Description of Artificial Sequence: Synthetic oligonucleotide
aacguguguggaacauguc

SEQ ID NO: 647984 - RNA, 19 nt, Artificial Sequence
  Description of Artificial Sequence: Synthetic oligonucleotide
agagaccugcauuggccug

SEQ ID NO: 647985 - RNA, 19 nt, Artificial Sequence
  Description of Artificial Sequence: Synthetic oligonucleotide
uagucagcauguguaggga

SEQ ID NO: 647986 - RNA, 19 nt, Artificial Sequence
  Description of Artificial Sequence: Synthetic oligonucleotide
ucggccucugugcuagcug

SEQ ID NO: 647987 - RNA, 19 nt, Artificial Sequence
  Description of Artificial Sequence: Synthetic oligonucleotide
ucuugauacccuugaucuu

SEQ ID NO: 647988 - RNA, 19 nt, Artificial Sequence
  Description of Artificial Sequence: Synthetic oligonucleotide
aggcauccugcuugggguc

SEQ ID NO: 647989 - RNA, 19 nt, Artificial Sequence
  Description of Artificial Sequence: Synthetic oligonucleotide
uggccauacuucccuuccc

SEQ ID NO: 647990 - RNA, 19 nt, Artificial Sequence
  Description of Artificial Sequence: Synthetic oligonucleotide
agucagcauguguagggaa

SEQ ID NO: 647991 - RNA, 19 nt, Artificial Sequence
  Description of Artificial Sequence: Synthetic oligonucleotide
gucggcuaccauccugccg

SEQ ID NO: 647992 - RNA, 19 nt, Artificial Sequence
  Description of Artificial Sequence: Synthetic oligonucleotide
cuuggaaguccugggugcc

SEQ ID NO: 647993 - RNA, 19 nt, Artificial Sequence
  Description of Artificial Sequence: Synthetic oligonucleotide
ugcgcugccugugcgguag

SEQ ID NO: 647994 - RNA, 19 nt, Artificial Sequence
  Description of Artificial Sequence: Synthetic oligonucleotide
cauccugccguaggcagcc

SEQ ID NO: 647995 - RNA, 19 nt, Artificial Sequence
  Description of Artificial Sequence: Synthetic oligonucleotide
uccugccguaggcagccag

SEQ ID NO: 647996 - RNA, 19 nt, Artificial Sequence
  Description of Artificial Sequence: Synthetic oligonucleotide
ucccacgcguggaugugcc

SEQ ID NO: 647997 - RNA, 19 nt, Artificial Sequence
  Description of Artificial Sequence: Synthetic oligonucleotide
gucacgacccaggaacugc

SEQ ID NO: 647998 - RNA, 19 nt, Artificial Sequence
  Description of Artificial Sequence: Synthetic oligonucleotide
acugaacauggcgaacucu

SEQ ID NO: 647999 - RNA, 19 nt, Artificial Sequence
  Description of Artificial Sequence: Synthetic oligonucleotide
uccgguaauccaugccgac

SEQ ID NO: 648000 - RNA, 19 nt, Artificial Sequence
  Description of Artificial Sequence: Synthetic oligonucleotide
agcugcacggauguccuug

SEQ ID NO: 648001 - RNA, 19 nt, Artificial Sequence
  Description of Artificial Sequence: Synthetic oligonucleotide
aggaucacugcacgcuccu

SEQ ID NO: 648002 - RNA, 19 nt, Artificial Sequence
  Description of Artificial Sequence: Synthetic oligonucleotide
acauguccauggaguauac

SEQ ID NO: 648003 - RNA, 19 nt, Artificial Sequence
  Description of Artificial Sequence: Synthetic oligonucleotide
cauggccauacuucccuuc

SEQ ID NO: 648004 - RNA, 19 nt, Artificial Sequence
  Description of Artificial Sequence: Synthetic oligonucleotide
caggcggcgagcugguuug

SEQ ID NO: 648005 - RNA, 19 nt, Artificial Sequence
  Description of Artificial Sequence: Synthetic oligonucleotide
gucuggcuaggcuaaggca

SEQ ID NO: 648006 - RNA, 19 nt, Artificial Sequence
  Description of Artificial Sequence: Synthetic oligonucleotide
acggagacacaugcugggg

SEQ ID NO: 648007 - RNA, 19 nt, Artificial Sequence
  Description of Artificial Sequence: Synthetic oligonucleotide
gugguguccucauuuaggu

SEQ ID NO: 648008 - RNA, 19 nt, Artificial Sequence
  Description of Artificial Sequence: Synthetic oligonucleotide
aagucacgcuccacauggg

SEQ ID NO: 648009 - RNA, 19 nt, Artificial Sequence
  Description of Artificial Sequence: Synthetic oligonucleotide
gggaaguacuccuucagua

SEQ ID NO: 648010 - RNA, 19 nt, Artificial Sequence
  Description of Artificial Sequence: Synthetic oligonucleotide
ccagcugucggcuaccauc

SEQ ID NO: 648011 - RNA, 19 nt, Artificial Sequence
  Description of Artificial Sequence: Synthetic oligonucleotide
cuugaaccggggcaugaca

SEQ ID NO: 648012 - RNA, 19 nt, Artificial Sequence
  Description of Artificial Sequence: Synthetic oligonucleotide
augcugguccgguaaucca

SEQ ID NO: 648013 - RNA, 19 nt, Artificial Sequence
  Description of Artificial Sequence: Synthetic oligonucleotide
cugugccagcucaucuagg

SEQ ID NO: 648014 - RNA, 19 nt, Artificial Sequence
  Description of Artificial Sequence: Synthetic oligonucleotide
ggcauguuggucccuggug

SEQ ID NO: 648015 - RNA, 19 nt, Artificial Sequence
  Description of Artificial Sequence: Synthetic oligonucleotide
guagcgcaugucccacgcg

SEQ ID NO: 648016 - RNA, 19 nt, Artificial Sequence
  Description of Artificial Sequence: Synthetic oligonucleotide
uaccaggcgccgugucucg

SEQ ID NO: 648017 - RNA, 19 nt, Artificial Sequence
  Description of Artificial Sequence: Synthetic oligonucleotide
uacucucauaggacacauc

SEQ ID NO: 648018 - RNA, 19 nt, Artificial Sequence
  Description of Artificial Sequence: Synthetic oligonucleotide
caggcuguaggccgaagca

SEQ ID NO: 648019 - RNA, 19 nt, Artificial Sequence
  Description of Artificial Sequence: Synthetic oligonucleotide
ugguaccccaaggaucucu

SEQ ID NO: 648020 - RNA, 19 nt, Artificial Sequence
  Description of Artificial Sequence: Synthetic oligonucleotide
ccuggcgugacuugauaag

SEQ ID NO: 648021 - RNA, 19 nt, Artificial Sequence
  Description of Artificial Sequence: Synthetic oligonucleotide
cacacgacccucugguaca

SEQ ID NO: 648022 - RNA, 19 nt, Artificial Sequence
  Description of Artificial Sequence: Synthetic oligonucleotide
guacaggucgagguagaac

SEQ ID NO: 648023 - RNA, 19 nt, Artificial Sequence
  Description of Artificial Sequence: Synthetic oligonucleotide
guaguagcgcaugucccac

SEQ ID NO: 648024 - RNA, 19 nt, Artificial Sequence
  Description of Artificial Sequence: Synthetic oligonucleotide
agaccugcauuggccuggc

SEQ ID NO: 648025 - RNA, 19 nt, Artificial Sequence
  Description of Artificial Sequence: Synthetic oligonucleotide
cacugcacgcuccugcuca

SEQ ID NO: 648026 - RNA, 19 nt, Artificial Sequence
  Description of Artificial Sequence: Synthetic oligonucleotide
gcucucuaccugcaggccc

SEQ ID NO: 648027 - RNA, 19 nt, Artificial Sequence
  Description of Artificial Sequence: Synthetic oligonucleotide
ugcccacacggucguacac

SEQ ID NO: 648028 - RNA, 19 nt, Artificial Sequence
  Description of Artificial Sequence: Synthetic oligonucleotide
cauccucgugccaggcggc

SEQ ID NO: 648029 - RNA, 19 nt, Artificial Sequence
  Description of Artificial Sequence: Synthetic oligonucleotide
acuguguaggucaccucca

SEQ ID NO: 648030 - RNA, 19 nt, Artificial Sequence
  Description of Artificial Sequence: Synthetic oligonucleotide
cuaccaggcgccgugucuc

SEQ ID NO: 648031 - RNA, 19 nt, Artificial Sequence
  Description of Artificial Sequence: Synthetic oligonucleotide
caccugguucauguaguag

SEQ ID NO: 648032 - RNA, 19 nt, Artificial Sequence
  Description of Artificial Sequence: Synthetic oligonucleotide
ucgcuccacagguagccau

SEQ ID NO: 648033 - RNA, 19 nt, Artificial Sequence
  Description of Artificial Sequence: Synthetic oligonucleotide
uggcgaacucugccuguga

SEQ ID NO: 648034 - RNA, 19 nt, Artificial Sequence
  Description of Artificial Sequence: Synthetic oligonucleotide
cuggcuaggcuaaggcaca

SEQ ID NO: 648035 - RNA, 19 nt, Artificial Sequence
  Description of Artificial Sequence: Synthetic oligonucleotide
cuggugcaugacauggcca

SEQ ID NO: 648036 - RNA, 19 nt, Artificial Sequence
  Description of Artificial Sequence: Synthetic oligonucleotide
gccuagcuugaucagccgc

SEQ ID NO: 648037 - RNA, 19 nt, Artificial Sequence
  Description of Artificial Sequence: Synthetic oligonucleotide
cacguccugccucaugcuc

SEQ ID NO: 648038 - RNA, 19 nt, Artificial Sequence
  Description of Artificial Sequence: Synthetic oligonucleotide
ugucgcgcaccgaguacaa

SEQ ID NO: 648039 - RNA, 19 nt, Artificial Sequence
  Description of Artificial Sequence: Synthetic oligonucleotide
gcugcacggauguccuugg

SEQ ID NO: 648040 - RNA, 19 nt, Artificial Sequence
  Description of Artificial Sequence: Synthetic oligonucleotide
gauggcgccuccacgaagu

SEQ ID NO: 648041 - RNA, 19 nt, Artificial Sequence
  Description of Artificial Sequence: Synthetic oligonucleotide
caucaugcugcagcaagga

SEQ ID NO: 648042 - RNA, 19 nt, Artificial Sequence
  Description of Artificial Sequence: Synthetic oligonucleotide
auggcgccuccacgaaguc

SEQ ID NO: 648043 - RNA, 19 nt, Artificial Sequence
  Description of Artificial Sequence: Synthetic oligonucleotide
cagcgaguucaggaagucc

SEQ ID NO: 648044 - RNA, 19 nt, Artificial Sequence
  Description of Artificial Sequence: Synthetic oligonucleotide
ggcuaggacgaucugccga

SEQ ID NO: 648045 - RNA, 19 nt, Artificial Sequence
  Description of Artificial Sequence: Synthetic oligonucleotide
agguggcuacuguuuggcu

SEQ ID NO: 648046 - RNA, 19 nt, Artificial Sequence
  Description of Artificial Sequence: Synthetic oligonucleotide
acgcgugaccacuugcauu

SEQ ID NO: 648047 - RNA, 19 nt, Artificial Sequence
  Description of Artificial Sequence: Synthetic oligonucleotide
caccgaguacaacugcaca

SEQ ID NO: 648048 - RNA, 19 nt, Artificial Sequence
  Description of Artificial Sequence: Synthetic oligonucleotide
cuugccgaucuccucucca

SEQ ID NO: 648049 - RNA, 19 nt, Artificial Sequence
  Description of Artificial Sequence: Synthetic oligonucleotide
aggugcgucaggcgugggu

SEQ ID NO: 648050 - RNA, 19 nt, Artificial Sequence
  Description of Artificial Sequence: Synthetic oligonucleotide
uggcuaggcuaaggcacag

SEQ ID NO: 648051 - RNA, 19 nt, Artificial Sequence
  Description of Artificial Sequence: Synthetic oligonucleotide
guacacguccugccucaug

SEQ ID NO: 648052 - RNA, 19 nt, Artificial Sequence
  Description of Artificial Sequence: Synthetic oligonucleotide
gguagcgugucuccuccac

SEQ ID NO: 648053 - RNA, 19 nt, Artificial Sequence
  Description of Artificial Sequence: Synthetic oligonucleotide
ugcccgcaaggacaccagu

SEQ ID NO: 648054 - RNA, 19 nt, Artificial Sequence
  Description of Artificial Sequence: Synthetic oligonucleotide
ucauagccgccagccaagu

SEQ ID NO: 648055 - RNA, 19 nt, Artificial Sequence
  Description of Artificial Sequence: Synthetic oligonucleotide
guaggccgaagcaggcugc

SEQ ID NO: 648056 - RNA, 19 nt, Artificial Sequence
  Description of Artificial Sequence: Synthetic oligonucleotide
gcuaggacgaucugccgaa

SEQ ID NO: 648057 - RNA, 19 nt, Artificial Sequence
  Description of Artificial Sequence: Synthetic oligonucleotide
cauagccgccagccaagug

SEQ ID NO: 648058 - RNA, 19 nt, Artificial Sequence
  Description of Artificial Sequence: Synthetic oligonucleotide
gcugucggcuaccauccug

SEQ ID NO: 648059 - RNA, 19 nt, Artificial Sequence
  Description of Artificial Sequence: Synthetic oligonucleotide
ugucccacgcguggaugug

SEQ ID NO: 648060 - RNA, 19 nt, Artificial Sequence
  Description of Artificial Sequence: Synthetic oligonucleotide
aggacguagucagcaugug

SEQ ID NO: 648061 - RNA, 19 nt, Artificial Sequence
  Description of Artificial Sequence: Synthetic oligonucleotide
cauaguacugugcgucaua

SEQ ID NO: 648062 - RNA, 19 nt, Artificial Sequence
  Description of Artificial Sequence: Synthetic oligonucleotide
ggacuucugugcccgcaag

SEQ ID NO: 648063 - RNA, 19 nt, Artificial Sequence
  Description of Artificial Sequence: Synthetic oligonucleotide
ccgcaaggacaccaguucc

SEQ ID NO: 648064 - RNA, 19 nt, Artificial Sequence
  Description of Artificial Sequence: Synthetic oligonucleotide
gugucgcgcaccgaguaca

SEQ ID NO: 648065 - RNA, 19 nt, Artificial Sequence
  Description of Artificial Sequence: Synthetic oligonucleotide
auccucgugccaggcggcg

SEQ ID NO: 648066 - RNA, 19 nt, Artificial Sequence
  Description of Artificial Sequence: Synthetic oligonucleotide
ggccuagcuugaucagccg

SEQ ID NO: 648067 - RNA, 19 nt, Artificial Sequence
  Description of Artificial Sequence: Synthetic oligonucleotide
cuaggacgaucugccgaag

SEQ ID NO: 648068 - RNA, 19 nt, Artificial Sequence
  Description of Artificial Sequence: Synthetic oligonucleotide
acggucguacacacacuug

SEQ ID NO: 648069 - RNA, 19 nt, Artificial Sequence
  Description of Artificial Sequence: Synthetic oligonucleotide
uggcgccuccacgaaguca

SEQ ID NO: 648070 - RNA, 19 nt, Artificial Sequence
  Description of Artificial Sequence: Synthetic oligonucleotide
guccgguaauccaugccga

SEQ ID NO: 648071 - RNA, 19 nt, Artificial Sequence
  Description of Artificial Sequence: Synthetic oligonucleotide
cucucuaccugcaggcccu

SEQ ID NO: 648072 - RNA, 19 nt, Artificial Sequence
  Description of Artificial Sequence: Synthetic oligonucleotide
cccgcaaggacaccaguuc

SEQ ID NO: 648073 - RNA, 19 nt, Artificial Sequence
  Description of Artificial Sequence: Synthetic oligonucleotide
caggcgccgugucucgggc

SEQ ID NO: 648074 - RNA, 19 nt, Artificial Sequence
  Description of Artificial Sequence: Synthetic oligonucleotide
caugccgaccuuggggcuc

SEQ ID NO: 648075 - RNA, 19 nt, Artificial Sequence
  Description of Artificial Sequence: Synthetic oligonucleotide
aaggugcgucaggcguggg

SEQ ID NO: 648076 - RNA, 19 nt, Artificial Sequence
  Description of Artificial Sequence: Synthetic oligonucleotide
agcgcaugucccacgcgug

SEQ ID NO: 648077 - RNA, 19 nt, Artificial Sequence
  Description of Artificial Sequence: Synthetic oligonucleotide
cguagucagcauguguagg

SEQ ID NO: 648078 - RNA, 19 nt, Artificial Sequence
  Description of Artificial Sequence: Synthetic oligonucleotide
cgaagguugaagagaccug

SEQ ID NO: 648079 - RNA, 19 nt, Artificial Sequence
  Description of Artificial Sequence: Synthetic oligonucleotide
uuggcuggucuuggccaug

SEQ ID NO: 648080 - RNA, 19 nt, Artificial Sequence
  Description of Artificial Sequence: Synthetic oligonucleotide
uuccuccggccuagcuuga

SEQ ID NO: 648081 - RNA, 19 nt, Artificial Sequence
  Description of Artificial Sequence: Synthetic oligonucleotide
ccgaguacaacugcacauc

SEQ ID NO: 648082 - RNA, 19 nt, Artificial Sequence
  Description of Artificial Sequence: Synthetic oligonucleotide
cugugcgucauagccgcca

SEQ ID NO: 648083 - RNA, 19 nt, Artificial Sequence
  Description of Artificial Sequence: Synthetic oligonucleotide
ccgguaauccaugccgacc

SEQ ID NO: 648084 - RNA, 19 nt, Artificial Sequence
  Description of Artificial Sequence: Synthetic oligonucleotide
gucccacgcguggaugugc

SEQ ID NO: 648085 - RNA, 19 nt, Artificial Sequence
  Description of Artificial Sequence: Synthetic oligonucleotide
cacgcuccacauggguccc

SEQ ID NO: 648086 - RNA, 19 nt, Artificial Sequence
  Description of Artificial Sequence: Synthetic oligonucleotide
ggaguauaccucgcuccac

SEQ ID NO: 648087 - RNA, 19 nt, Artificial Sequence
  Description of Artificial Sequence: Synthetic oligonucleotide
ccgaccuuggggcucagca

SEQ ID NO: 648088 - RNA, 19 nt, Artificial Sequence
  Description of Artificial Sequence: Synthetic oligonucleotide
cacuugcauugggaaguac

SEQ ID NO: 648089 - RNA, 19 nt, Artificial Sequence
  Description of Artificial Sequence: Synthetic oligonucleotide
cgaacucugccugugagca

SEQ ID NO: 648090 - RNA, 19 nt, Artificial Sequence
  Description of Artificial Sequence: Synthetic oligonucleotide
ggcuaggcuaaggcacagg

SEQ ID NO: 648091 - RNA, 19 nt, Artificial Sequence
  Description of Artificial Sequence: Synthetic oligonucleotide
ggucacgacccaggaacug

SEQ ID NO: 648092 - RNA, 19 nt, Artificial Sequence
  Description of Artificial Sequence: Synthetic oligonucleotide
agcugucggcuaccauccu

SEQ ID NO: 648093 - RNA, 19 nt, Artificial Sequence
  Description of Artificial Sequence: Synthetic oligonucleotide
ggacguagucagcaugugu

SEQ ID NO: 648094 - RNA, 19 nt, Artificial Sequence
  Description of Artificial Sequence: Synthetic oligonucleotide
gcaccgaguacaacugcac

SEQ ID NO: 648095 - RNA, 19 nt, Artificial Sequence
  Description of Artificial Sequence: Synthetic oligonucleotide
acaggucgagguagaacuu

SEQ ID NO: 648096 - RNA, 19 nt, Artificial Sequence
  Description of Artificial Sequence: Synthetic oligonucleotide
gugcccgcaaggacaccag

SEQ ID NO: 648097 - RNA, 19 nt, Artificial Sequence
  Description of Artificial Sequence: Synthetic oligonucleotide
gccuggcgugacuugauaa

SEQ ID NO: 648098 - RNA, 19 nt, Artificial Sequence
  Description of Artificial Sequence: Synthetic oligonucleotide
ccggggcaugacaaggaug

SEQ ID NO: 648099 - RNA, 19 nt, Artificial Sequence
  Description of Artificial Sequence: Synthetic oligonucleotide
ucucgggcacauggcacuu

SEQ ID NO: 648100 - RNA, 19 nt, Artificial Sequence
  Description of Artificial Sequence: Synthetic oligonucleotide
cacggucguacacacacuu

SEQ ID NO: 648101 - RNA, 19 nt, Artificial Sequence
  Description of Artificial Sequence: Synthetic oligonucleotide
cagcggcuccuucucccac

SEQ ID NO: 648102 - RNA, 19 nt, Artificial Sequence
  Description of Artificial Sequence: Synthetic oligonucleotide
cccacgcgugaccacuugc

SEQ ID NO: 648103 - RNA, 19 nt, Artificial Sequence
  Description of Artificial Sequence: Synthetic oligonucleotide
ggggcugcgcugccugugc

SEQ ID NO: 648104 - RNA, 19 nt, Artificial Sequence
  Description of Artificial Sequence: Synthetic oligonucleotide
gccugugcgguagugcuga

SEQ ID NO: 648105 - RNA, 19 nt, Artificial Sequence
  Description of Artificial Sequence: Synthetic oligonucleotide
gcgcaccgaguacaacugc

SEQ ID NO: 648106 - RNA, 19 nt, Artificial Sequence
  Description of Artificial Sequence: Synthetic oligonucleotide
ccgaagguugaagagaccu

SEQ ID NO: 648107 - RNA, 19 nt, Artificial Sequence
  Description of Artificial Sequence: Synthetic oligonucleotide
aggcgccgugucucgggca

SEQ ID NO: 648108 - RNA, 19 nt, Artificial Sequence
  Description of Artificial Sequence: Synthetic oligonucleotide
cgcgcaccgaguacaacug

SEQ ID NO: 648109 - RNA, 19 nt, Artificial Sequence
  Description of Artificial Sequence: Synthetic oligonucleotide
ccacgcgugaccacuugca

SEQ ID NO: 648110 - RNA, 19 nt, Artificial Sequence
  Description of Artificial Sequence: Synthetic oligonucleotide
cgaagucacgcuccacaug

SEQ ID NO: 648111 - RNA, 19 nt, Artificial Sequence
  Description of Artificial Sequence: Synthetic oligonucleotide
cugcauuggccuggcguga

SEQ ID NO: 648112 - RNA, 19 nt, Artificial Sequence
  Description of Artificial Sequence: Synthetic oligonucleotide
gcggcgcccuccucuagug

SEQ ID NO: 648113 - RNA, 19 nt, Artificial Sequence
  Description of Artificial Sequence: Synthetic oligonucleotide
ccuugaaccggggcaugac

SEQ ID NO: 648114 - RNA, 19 nt, Artificial Sequence
  Description of Artificial Sequence: Synthetic oligonucleotide
cugugcgguagugcugaga

SEQ ID NO: 648115 - RNA, 19 nt, Artificial Sequence
  Description of Artificial Sequence: Synthetic oligonucleotide
ggcgugacuugauaagcuu

SEQ ID NO: 648116 - RNA, 19 nt, Artificial Sequence
  Description of Artificial Sequence: Synthetic oligonucleotide
cgcaccgaguacaacugca

SEQ ID NO: 648117 - RNA, 19 nt, Artificial Sequence
  Description of Artificial Sequence: Synthetic oligonucleotide
ccacacgguagcgugucuc

SEQ ID NO: 648118 - RNA, 19 nt, Artificial Sequence
  Description of Artificial Sequence: Synthetic oligonucleotide
cucgggcacauggcacuuc

SEQ ID NO: 648119 - RNA, 19 nt, Artificial Sequence
  Description of Artificial Sequence: Synthetic oligonucleotide
cucgcuccacagguagcca

SEQ ID NO: 648120 - RNA, 19 nt, Artificial Sequence
  Description of Artificial Sequence: Synthetic oligonucleotide
gucgcgcaccgaguacaac

SEQ ID NO: 648121 - RNA, 19 nt, Artificial Sequence
  Description of Artificial Sequence: Synthetic oligonucleotide
gcgaguucaggaaguccuc

SEQ ID NO: 648122 - RNA, 19 nt, Artificial Sequence
  Description of Artificial Sequence: Synthetic oligonucleotide
caauggccagcugucggcu

SEQ ID NO: 648123 - RNA, 19 nt, Artificial Sequence
  Description of Artificial Sequence: Synthetic oligonucleotide
gcuaaggcacaggcggcga

SEQ ID NO: 648124 - RNA, 19 nt, Artificial Sequence
  Description of Artificial Sequence: Synthetic oligonucleotide
gcccacacggucguacaca

SEQ ID NO: 648125 - RNA, 19 nt, Artificial Sequence
  Description of Artificial Sequence: Synthetic oligonucleotide
gccgaagguugaagagacc

SEQ ID NO: 648126 - RNA, 19 nt, Artificial Sequence
  Description of Artificial Sequence: Synthetic oligonucleotide
ccagcgaguucaggaaguc

SEQ ID NO: 648127 - RNA, 19 nt, Artificial Sequence
  Description of Artificial Sequence: Synthetic oligonucleotide
cacgcgugaccacuugcau

SEQ ID NO: 648128 - RNA, 19 nt, Artificial Sequence
  Description of Artificial Sequence: Synthetic oligonucleotide
ggugcgucaggcguggguu

SEQ ID NO: 648129 - RNA, 19 nt, Artificial Sequence
  Description of Artificial Sequence: Synthetic oligonucleotide
ggugcaugacauggccaaa

SEQ ID NO: 648130 - RNA, 19 nt, Artificial Sequence
  Description of Artificial Sequence: Synthetic oligonucleotide
gggaaguaauguggguacu

SEQ ID NO: 648131 - RNA, 19 nt, Artificial Sequence
  Description of Artificial Sequence: Synthetic oligonucleotide
cugguaccccaaggaucuc

SEQ ID NO: 648132 - RNA, 19 nt, Artificial Sequence
  Description of Artificial Sequence: Synthetic oligonucleotide
cugugcccgcaaggacacc

SEQ ID NO: 648133 - RNA, 19 nt, Artificial Sequence
  Description of Artificial Sequence: Synthetic oligonucleotide
ccacgcguggaugugccca

SEQ ID NO: 648134 - RNA, 19 nt, Artificial Sequence
  Description of Artificial Sequence: Synthetic oligonucleotide
cuguaggccgaagcaggcu

SEQ ID NO: 648135 - RNA, 19 nt, Artificial Sequence
  Description of Artificial Sequence: Synthetic oligonucleotide
gcguggaugugcccaucaa

SEQ ID NO: 648136 - RNA, 19 nt, Artificial Sequence
  Description of Artificial Sequence: Synthetic oligonucleotide
gcccacgcgugaccacuug

SEQ ID NO: 648137 - RNA, 19 nt, Artificial Sequence
  Description of Artificial Sequence: Synthetic oligonucleotide
cugguccacacgguagcgu

SEQ ID NO: 648138 - RNA, 19 nt, Artificial Sequence
  Description of Artificial Sequence: Synthetic oligonucleotide
cccacgcguggaugugccc

SEQ ID NO: 648139 - RNA, 19 nt, Artificial Sequence
  Description of Artificial Sequence: Synthetic oligonucleotide
ccuuuaggauggcacaguu

SEQ ID NO: 648140 - RNA, 19 nt, Artificial Sequence
  Description of Artificial Sequence: Synthetic oligonucleotide
ggcggcgagcugguuugug

SEQ ID NO: 648141 - RNA, 19 nt, Artificial Sequence
  Description of Artificial Sequence: Synthetic oligonucleotide
gucggccucugugcuagcu

SEQ ID NO: 648142 - RNA, 19 nt, Artificial Sequence
  Description of Artificial Sequence: Synthetic oligonucleotide
gcguguccugagguaggug

SEQ ID NO: 648143 - RNA, 19 nt, Artificial Sequence
  Description of Artificial Sequence: Synthetic oligonucleotide
ccauggaguauaccucgcu

SEQ ID NO: 648144 - RNA, 19 nt, Artificial Sequence
  Description of Artificial Sequence: Synthetic oligonucleotide
caggcugcauggccauacu

SEQ ID NO: 648145 - RNA, 19 nt, Artificial Sequence
  Description of Artificial Sequence: Synthetic oligonucleotide
ggccuggcgugacuugaua

SEQ ID NO: 648146 - RNA, 19 nt, Artificial Sequence
  Description of Artificial Sequence: Synthetic oligonucleotide
cagcccacgcgugaccacu

SEQ ID NO: 648147 - RNA, 19 nt, Artificial Sequence
  Description of Artificial Sequence: Synthetic oligonucleotide
acgcuccacauggguccca

SEQ ID NO: 648148 - RNA, 19 nt, Artificial Sequence
  Description of Artificial Sequence: Synthetic oligonucleotide
cgacccucugguacacguc

SEQ ID NO: 648149 - RNA, 19 nt, Artificial Sequence
  Description of Artificial Sequence: Synthetic oligonucleotide
cgccuccacgaagucacgc

SEQ ID NO: 648150 - RNA, 19 nt, Artificial Sequence
  Description of Artificial Sequence: Synthetic oligonucleotide
ggcguggguuuggugaagu

SEQ ID NO: 648151 - RNA, 19 nt, Artificial Sequence
  Description of Artificial Sequence: Synthetic oligonucleotide
auccugccguaggcagcca

SEQ ID NO: 648152 - RNA, 19 nt, Artificial Sequence
  Description of Artificial Sequence: Synthetic oligonucleotide
agcccacgcgugaccacuu

SEQ ID NO: 648153 - RNA, 19 nt, Artificial Sequence
  Description of Artificial Sequence: Synthetic oligonucleotide
aggcggcgagcugguuugu

SEQ ID NO: 648154 - RNA, 19 nt, Artificial Sequence
  Description of Artificial Sequence: Synthetic oligonucleotide
gggucacgacccaggaacu

SEQ ID NO: 648155 - RNA, 19 nt, Artificial Sequence
  Description of Artificial Sequence: Synthetic oligonucleotide
gcaugucccacgcguggau

SEQ ID NO: 648156 - RNA, 19 nt, Artificial Sequence
  Description of Artificial Sequence: Synthetic oligonucleotide
ggcggcgcccuccucuagu

SEQ ID NO: 648157 - RNA, 19 nt, Artificial Sequence
  Description of Artificial Sequence: Synthetic oligonucleotide
gcugcgcugccugugcggu

SEQ ID NO: 648158 - RNA, 19 nt, Artificial Sequence
  Description of Artificial Sequence: Synthetic oligonucleotide
cccugggguacaggucgag

SEQ ID NO: 648159 - RNA, 19 nt, Artificial Sequence
  Description of Artificial Sequence: Synthetic oligonucleotide
gagguagguggagcccguu

SEQ ID NO: 648160 - RNA, 19 nt, Artificial Sequence
  Description of Artificial Sequence: Synthetic oligonucleotide
cugcgcugccugugcggua

SEQ ID NO: 648161 - RNA, 19 nt, Artificial Sequence
  Description of Artificial Sequence: Synthetic oligonucleotide
gcccgcaaggacaccaguu

SEQ ID NO: 648162 - RNA, 19 nt, Artificial Sequence
  Description of Artificial Sequence: Synthetic oligonucleotide
ccacuugcauugggaagua

SEQ ID NO: 648163 - RNA, 19 nt, Artificial Sequence
  Description of Artificial Sequence: Synthetic oligonucleotide
cgcaugucccacgcgugga

SEQ ID NO: 648164 - RNA, 19 nt, Artificial Sequence
  Description of Artificial Sequence: Synthetic oligonucleotide
ccaugccgaccuuggggcu

SEQ ID NO: 648165 - RNA, 19 nt, Artificial Sequence
  Description of Artificial Sequence: Synthetic oligonucleotide
gcguggguuuggugaaguu

SEQ ID NO: 648166 - RNA, 19 nt, Artificial Sequence
  Description of Artificial Sequence: Synthetic oligonucleotide
gguacacguccugccucau

SEQ ID NO: 648167 - RNA, 19 nt, Artificial Sequence
  Description of Artificial Sequence: Synthetic oligonucleotide
ccggccucaggaugcuggu

SEQ ID NO: 648168 - RNA, 19 nt, Artificial Sequence
  Description of Artificial Sequence: Synthetic oligonucleotide
cgguagcgugucuccucca

SEQ ID NO: 648169 - RNA, 19 nt, Artificial Sequence
  Description of Artificial Sequence: Synthetic oligonucleotide
gcgccgugucucgggcaca

SEQ ID NO: 648170 - RNA, 19 nt, Artificial Sequence
  Description of Artificial Sequence: Synthetic oligonucleotide
ccgcuccagguagcgagcu

SEQ ID NO: 648171 - RNA, 19 nt, Artificial Sequence
  Description of Artificial Sequence: Synthetic oligonucleotide
cgucaggcguggguuuggu

SEQ ID NO: 648172 - RNA, 19 nt, Artificial Sequence
  Description of Artificial Sequence: Synthetic oligonucleotide
cggcaguugaaggccucuu

SEQ ID NO: 648173 - RNA, 19 nt, Artificial Sequence
  Description of Artificial Sequence: Synthetic oligonucleotide
uauacauccauccagacga

SEQ ID NO: 648174 - RNA, 19 nt, Artificial Sequence
  Description of Artificial Sequence: Synthetic oligonucleotide
uuuaaugcuaacacugucg

SEQ ID NO: 648175 - RNA, 19 nt, Artificial Sequence
  Description of Artificial Sequence: Synthetic oligonucleotide
aauaauuuccuuugcaccu

SEQ ID NO: 648176 - RNA, 19 nt, Artificial Sequence
  Description of Artificial Sequence: Synthetic oligonucleotide
aacaaacuaaagcaguguc

SEQ ID NO: 648177 - RNA, 19 nt, Artificial Sequence
  Description of Artificial Sequence: Synthetic oligonucleotide
aguagauugaaauuuaaaa

SEQ ID NO: 648178 - RNA, 19 nt, Artificial Sequence
  Description of Artificial Sequence: Synthetic oligonucleotide
ugcaauagaagaaagacuu

SEQ ID NO: 648179 - RNA, 19 nt, Artificial Sequence
  Description of Artificial Sequence: Synthetic oligonucleotide
auguccgaaaaucaaauuc

SEQ ID NO: 648180 - RNA, 19 nt, Artificial Sequence
  Description of Artificial Sequence: Synthetic oligonucleotide
uaagacaacuccuacaaac

SEQ ID NO: 648181 - RNA, 19 nt, Artificial Sequence
  Description of Artificial Sequence: Synthetic oligonucleotide
uugaauaucuuuagaguag

SEQ ID NO: 648182 - RNA, 19 nt, Artificial Sequence
  Description of Artificial Sequence: Synthetic oligonucleotide
gaaauuucagauauaagac

SEQ ID NO: 648183 - RNA, 19 nt, Artificial Sequence
  Description of Artificial Sequence: Synthetic oligonucleotide
gauggacgaauauucaagg

SEQ ID NO: 648184 - RNA, 19 nt, Artificial Sequence
  Description of Artificial Sequence: Synthetic oligonucleotide
uaaucuaugcugaaccgag

SEQ ID NO: 648185 - RNA, 19 nt, Artificial Sequence
  Description of Artificial Sequence: Synthetic oligonucleotide
ugucauuuauagcaaguag

SEQ ID NO: 648186 - RNA, 19 nt, Artificial Sequence
  Description of Artificial Sequence: Synthetic oligonucleotide
uaauugacacacaauugag

SEQ ID NO: 648187 - RNA, 19 nt, Artificial Sequence
  Description of Artificial Sequence: Synthetic oligonucleotide
uuaaucgguuuaaugagug

SEQ ID NO: 648188 - RNA, 19 nt, Artificial Sequence
  Description of Artificial Sequence: Synthetic oligonucleotide
aacuccuacaaacugcuca

SEQ ID NO: 648189 - RNA, 19 nt, Artificial Sequence
  Description of Artificial Sequence: Synthetic oligonucleotide
ugagggaucauaucuguag

SEQ ID NO: 648190 - RNA, 19 nt, Artificial Sequence
  Description of Artificial Sequence: Synthetic oligonucleotide
guuaauaacauugccuccg

SEQ ID NO: 648191 - RNA, 19 nt, Artificial Sequence
  Description of Artificial Sequence: Synthetic oligonucleotide
ucgaugagggaucauaucu

SEQ ID NO: 648192 - RNA, 19 nt, Artificial Sequence
  Description of Artificial Sequence: Synthetic oligonucleotide
accauuguuaauaacauug

SEQ ID NO: 648193 - RNA, 19 nt, Artificial Sequence
  Description of Artificial Sequence: Synthetic oligonucleotide
ucauuauguuuagaaaugg

SEQ ID NO: 648194 - RNA, 19 nt, Artificial Sequence
  Description of Artificial Sequence: Synthetic oligonucleotide
uuuaaugagugcacuuucc

SEQ ID NO: 648195 - RNA, 19 nt, Artificial Sequence
  Description of Artificial Sequence: Synthetic oligonucleotide
auggcauaggaucacauug

SEQ ID NO: 648196 - RNA, 19 nt, Artificial Sequence
  Description of Artificial Sequence: Synthetic oligonucleotide
acauuagacguucuucugg

SEQ ID NO: 648197 - RNA, 19 nt, Artificial Sequence
  Description of Artificial Sequence: Synthetic oligonucleotide
aaaguauauuuuggugucc

SEQ ID NO: 648198 - RNA, 19 nt, Artificial Sequence
  Description of Artificial Sequence: Synthetic oligonucleotide
uuaauaacauugccuccgg

SEQ ID NO: 648199 - RNA, 19 nt, Artificial Sequence
  Description of Artificial Sequence: Synthetic oligonucleotide
gaaagcauagcaaagccac

SEQ ID NO: 648200 - RNA, 19 nt, Artificial Sequence
  Description of Artificial Sequence: Synthetic oligonucleotide
ugcaaaguauauuuuggug

SEQ ID NO: 648201 - RNA, 19 nt, Artificial Sequence
  Description of Artificial Sequence: Synthetic oligonucleotide
uccacggauaccauguucc

SEQ ID NO: 648202 - RNA, 19 nt, Artificial Sequence
  Description of Artificial Sequence: Synthetic oligonucleotide
cauugcauggcauaggauc

SEQ ID NO: 648203 - RNA, 19 nt, Artificial Sequence
  Description of Artificial Sequence: Synthetic oligonucleotide
aaacgugguuuauauaaca

SEQ ID NO: 648204 - RNA, 19 nt, Artificial Sequence
  Description of Artificial Sequence: Synthetic oligonucleotide
cuuugcaagacuucgauga

SEQ ID NO: 648205 - RNA, 19 nt, Artificial Sequence
  Description of Artificial Sequence: Synthetic oligonucleotide
aaagcuccuuguuucauca

SEQ ID NO: 648206 - RNA, 19 nt, Artificial Sequence
  Description of Artificial Sequence: Synthetic oligonucleotide
uuaaugagugcacuuucca

SEQ ID NO: 648207 - RNA, 19 nt, Artificial Sequence
  Description of Artificial Sequence: Synthetic oligonucleotide
aguggauggacgaauauuc

SEQ ID NO: 648208 - RNA, 19 nt, Artificial Sequence
  Description of Artificial Sequence: Synthetic oligonucleotide
aaaacgugguuuauauaac

SEQ ID NO: 648209 - RNA, 19 nt, Artificial Sequence
  Description of Artificial Sequence: Synthetic oligonucleotide
uuucagauauaagacaacu

SEQ ID NO: 648210 - RNA, 19 nt, Artificial Sequence
  Description of Artificial Sequence: Synthetic oligonucleotide
uucauugcauggcauagga

SEQ ID NO: 648211 - RNA, 19 nt, Artificial Sequence
  Description of Artificial Sequence: Synthetic oligonucleotide
aaucgguuuaaugagugca

SEQ ID NO: 648212 - RNA, 19 nt, Artificial Sequence
  Description of Artificial Sequence: Synthetic oligonucleotide
agggaucauaucuguagcc

SEQ ID NO: 648213 - RNA, 19 nt, Artificial Sequence
  Description of Artificial Sequence: Synthetic oligonucleotide
aaauacguaucacuuuuau

SEQ ID NO: 648214 - RNA, 19 nt, Artificial Sequence
  Description of Artificial Sequence: Synthetic oligonucleotide
uggcauaggaucacauugg

SEQ ID NO: 648215 - RNA, 19 nt, Artificial Sequence
  Description of Artificial Sequence: Synthetic oligonucleotide
uggacgaauauucaagguc

SEQ ID NO: 648216 - RNA, 19 nt, Artificial Sequence
  Description of Artificial Sequence: Synthetic oligonucleotide
ucuuaacugaaggacauga

SEQ ID NO: 648217 - RNA, 19 nt, Artificial Sequence
  Description of Artificial Sequence: Synthetic oligonucleotide
agcucagauacccaucuuc

SEQ ID NO: 648218 - RNA, 19 nt, Artificial Sequence
  Description of Artificial Sequence: Synthetic oligonucleotide
uaaagaggcucccaaauuu

SEQ ID NO: 648219 - RNA, 19 nt, Artificial Sequence
  Description of Artificial Sequence: Synthetic oligonucleotide
auuguaaucuaugcugaac

SEQ ID NO: 648220 - RNA, 19 nt, Artificial Sequence
  Description of Artificial Sequence: Synthetic oligonucleotide
cauaggaucacauuggucu

SEQ ID NO: 648221 - RNA, 19 nt, Artificial Sequence
  Description of Artificial Sequence: Synthetic oligonucleotide
caauugagcacacauguuc

SEQ ID NO: 648222 - RNA, 19 nt, Artificial Sequence
  Description of Artificial Sequence: Synthetic oligonucleotide
ucuggcaaacgaaauuuca

SEQ ID NO: 648223 - RNA, 19 nt, Artificial Sequence
  Description of Artificial Sequence: Synthetic oligonucleotide
caagagauucugcauacag

SEQ ID NO: 648224 - RNA, 19 nt, Artificial Sequence
  Description of Artificial Sequence: Synthetic oligonucleotide
uuuacaucaaacuggcauu

SEQ ID NO: 648225 - RNA, 19 nt, Artificial Sequence
  Description of Artificial Sequence: Synthetic oligonucleotide
aauacccucacaacucuuc

SEQ ID NO: 648226 - RNA, 19 nt, Artificial Sequence
  Description of Artificial Sequence: Synthetic oligonucleotide
gguuaaucgguuuaaugag

SEQ ID NO: 648227 - RNA, 19 nt, Artificial Sequence
  Description of Artificial Sequence: Synthetic oligonucleotide
ucaaggucacauuuauuug

SEQ ID NO: 648228 - RNA, 19 nt, Artificial Sequence
  Description of Artificial Sequence: Synthetic oligonucleotide
uucaucaaguuccagccuc

SEQ ID NO: 648229 - RNA, 19 nt, Artificial Sequence
  Description of Artificial Sequence: Synthetic oligonucleotide
cucguauacauccauccag

SEQ ID NO: 648230 - RNA, 19 nt, Artificial Sequence
  Description of Artificial Sequence: Synthetic oligonucleotide
ucagccaaguacaauaauu

SEQ ID NO: 648231 - RNA, 19 nt, Artificial Sequence
  Description of Artificial Sequence: Synthetic oligonucleotide
ugcugaaccgagcaauucc

SEQ ID NO: 648232 - RNA, 19 nt, Artificial Sequence
  Description of Artificial Sequence: Synthetic oligonucleotide
ucauauguccgaaaaucaa

SEQ ID NO: 648233 - RNA, 19 nt, Artificial Sequence
  Description of Artificial Sequence: Synthetic oligonucleotide
ugagugaucaagagauucu

SEQ ID NO: 648234 - RNA, 19 nt, Artificial Sequence
  Description of Artificial Sequence: Synthetic oligonucleotide
uuuagcuauuuuaaugcua

SEQ ID NO: 648235 - RNA, 19 nt, Artificial Sequence
  Description of Artificial Sequence: Synthetic oligonucleotide
uggcaaacgaaauuucaga

SEQ ID NO: 648236 - RNA, 19 nt, Artificial Sequence
  Description of Artificial Sequence: Synthetic oligonucleotide
uauuuauauucaucacagc

SEQ ID NO: 648237 - RNA, 19 nt, Artificial Sequence
  Description of Artificial Sequence: Synthetic oligonucleotide
guucucagagcauucgucc

SEQ ID NO: 648238 - RNA, 19 nt, Artificial Sequence
  Description of Artificial Sequence: Synthetic oligonucleotide
auagcucuaggccaugucu

SEQ ID NO: 648239 - RNA, 19 nt, Artificial Sequence
  Description of Artificial Sequence: Synthetic oligonucleotide
aauugagcacacauguucu

SEQ ID NO: 648240 - RNA, 19 nt, Artificial Sequence
  Description of Artificial Sequence: Synthetic oligonucleotide
aaggaaaggggcauuauaa

SEQ ID NO: 648241 - RNA, 19 nt, Artificial Sequence
  Description of Artificial Sequence: Synthetic oligonucleotide
uguuaacauuacauuucag

SEQ ID NO: 648242 - RNA, 19 nt, Artificial Sequence
  Description of Artificial Sequence: Synthetic oligonucleotide
ugaauaucuuuagaguaga

SEQ ID NO: 648243 - RNA, 19 nt, Artificial Sequence
  Description of Artificial Sequence: Synthetic oligonucleotide
ucuaauucuuccacggaua

SEQ ID NO: 648244 - RNA, 19 nt, Artificial Sequence
  Description of Artificial Sequence: Synthetic oligonucleotide
aaauucagcugaaaaucug

SEQ ID NO: 648245 - RNA, 19 nt, Artificial Sequence
  Description of Artificial Sequence: Synthetic oligonucleotide
gacagcaacaagaugucug

SEQ ID NO: 648246 - RNA, 19 nt, Artificial Sequence
  Description of Artificial Sequence: Synthetic oligonucleotide
aggaaaggggcauuauaag

SEQ ID NO: 648247 - RNA, 19 nt, Artificial Sequence
  Description of Artificial Sequence: Synthetic oligonucleotide
uccagaaccaggguaguag

SEQ ID NO: 648248 - RNA, 19 nt, Artificial Sequence
  Description of Artificial Sequence: Synthetic oligonucleotide
agauaaguggccacguuuc

SEQ ID NO: 648249 - RNA, 19 nt, Artificial Sequence
  Description of Artificial Sequence: Synthetic oligonucleotide
cagccaaguacaauaauuc

SEQ ID NO: 648250 - RNA, 19 nt, Artificial Sequence
  Description of Artificial Sequence: Synthetic oligonucleotide
aaucuaugcugaaccgagc

SEQ ID NO: 648251 - RNA, 19 nt, Artificial Sequence
  Description of Artificial Sequence: Synthetic oligonucleotide
ggguuaaucgguuuaauga

SEQ ID NO: 648252 - RNA, 19 nt, Artificial Sequence
  Description of Artificial Sequence: Synthetic oligonucleotide
uaucucagacagcaacaag

SEQ ID NO: 648253 - RNA, 19 nt, Artificial Sequence
  Description of Artificial Sequence: Synthetic oligonucleotide
aggguuaaucgguuuaaug

SEQ ID NO: 648254 - RNA, 19 nt, Artificial Sequence
  Description of Artificial Sequence: Synthetic oligonucleotide
gagggaucauaucuguagc

SEQ ID NO: 648255 - RNA, 19 nt, Artificial Sequence
  Description of Artificial Sequence: Synthetic oligonucleotide
uacauuuaagggaucuuua

SEQ ID NO: 648256 - RNA, 19 nt, Artificial Sequence
  Description of Artificial Sequence: Synthetic oligonucleotide
acagcaacaagaugucuga

SEQ ID NO: 648257 - RNA, 19 nt, Artificial Sequence
  Description of Artificial Sequence: Synthetic oligonucleotide
uggguugaaaacucauucu

SEQ ID NO: 648258 - RNA, 19 nt, Artificial Sequence
  Description of Artificial Sequence: Synthetic oligonucleotide
uguuccauuuaccauuguu

SEQ ID NO: 648259 - RNA, 19 nt, Artificial Sequence
  Description of Artificial Sequence: Synthetic oligonucleotide
guaguaggagcccuucucc

SEQ ID NO: 648260 - RNA, 19 nt, Artificial Sequence
  Description of Artificial Sequence: Synthetic oligonucleotide
gacauuagacguucuucug

SEQ ID NO: 648261 - RNA, 19 nt, Artificial Sequence
  Description of Artificial Sequence: Synthetic oligonucleotide
ucuuugcaagacuucgaug

SEQ ID NO: 648262 - RNA, 19 nt, Artificial Sequence
  Description of Artificial Sequence: Synthetic oligonucleotide
uuagacguucuucuggauu

SEQ ID NO: 648263 - RNA, 19 nt, Artificial Sequence
  Description of Artificial Sequence: Synthetic oligonucleotide
agauugaaauuuaaaauuu

SEQ ID NO: 648264 - RNA, 19 nt, Artificial Sequence
  Description of Artificial Sequence: Synthetic oligonucleotide
acaguaacaagaguagccu

SEQ ID NO: 648265 - RNA, 19 nt, Artificial Sequence
  Description of Artificial Sequence: Synthetic oligonucleotide
agcauaauuccagugccag

SEQ ID NO: 648266 - RNA, 19 nt, Artificial Sequence
  Description of Artificial Sequence: Synthetic oligonucleotide
uaaucgguuuaaugagugc

SEQ ID NO: 648267 - RNA, 19 nt, Artificial Sequence
  Description of Artificial Sequence: Synthetic oligonucleotide
accaugaggaagcaaugcu

SEQ ID NO: 648268 - RNA, 19 nt, Artificial Sequence
  Description of Artificial Sequence: Synthetic oligonucleotide
uagacguucuucuggauuu

SEQ ID NO: 648269 - RNA, 19 nt, Artificial Sequence
  Description of Artificial Sequence: Synthetic oligonucleotide
caaacgaaauuucagauau

SEQ ID NO: 648270 - RNA, 19 nt, Artificial Sequence
  Description of Artificial Sequence: Synthetic oligonucleotide
uaauuccagugccagugga

SEQ ID NO: 648271 - RNA, 19 nt, Artificial Sequence
  Description of Artificial Sequence: Synthetic oligonucleotide
auaggaucacauuggucug

SEQ ID NO: 648272 - RNA, 19 nt, Artificial Sequence
  Description of Artificial Sequence: Synthetic oligonucleotide
uagaguagaugacaucuuu

SEQ ID NO: 648273 - RNA, 19 nt, Artificial Sequence
  Description of Artificial Sequence: Synthetic oligonucleotide
uguucacuuccaugcagcc

SEQ ID NO: 648274 - RNA, 19 nt, Artificial Sequence
  Description of Artificial Sequence: Synthetic oligonucleotide
auaccauguuccauuuacc

SEQ ID NO: 648275 - RNA, 19 nt, Artificial Sequence
  Description of Artificial Sequence: Synthetic oligonucleotide
ugaaccgagcaauuccaga

SEQ ID NO: 648276 - RNA, 19 nt, Artificial Sequence
  Description of Artificial Sequence: Synthetic oligonucleotide
ugcaccuaaagcuccuugu

SEQ ID NO: 648277 - RNA, 19 nt, Artificial Sequence
  Description of Artificial Sequence: Synthetic oligonucleotide
aaagccacuucugcaggag

SEQ ID NO: 648278 - RNA, 19 nt, Artificial Sequence
  Description of Artificial Sequence: Synthetic oligonucleotide
uggauggacgaauauucaa

SEQ ID NO: 648279 - RNA, 19 nt, Artificial Sequence
  Description of Artificial Sequence: Synthetic oligonucleotide
gagugaucaagagauucug

SEQ ID NO: 648280 - RNA, 19 nt, Artificial Sequence
  Description of Artificial Sequence: Synthetic oligonucleotide
aaaacagacauuagacguu

SEQ ID NO: 648281 - RNA, 19 nt, Artificial Sequence
  Description of Artificial Sequence: Synthetic oligonucleotide
uugacacacaauugagcac

SEQ ID NO: 648282 - RNA, 19 nt, Artificial Sequence
  Description of Artificial Sequence: Synthetic oligonucleotide
aucgguuuaaugagugcac

SEQ ID NO: 648283 - RNA, 19 nt, Artificial Sequence
  Description of Artificial Sequence: Synthetic oligonucleotide
cauauguccgaaaaucaaa

SEQ ID NO: 648284 - RNA, 19 nt, Artificial Sequence
  Description of Artificial Sequence: Synthetic oligonucleotide
gagccaauuugagugauca

SEQ ID NO: 648285 - RNA, 19 nt, Artificial Sequence
  Description of Artificial Sequence: Synthetic oligonucleotide
uaacauugccuccgguugu

SEQ ID NO: 648286 - RNA, 19 nt, Artificial Sequence
  Description of Artificial Sequence: Synthetic oligonucleotide
acaaacuaaagcaguguca

SEQ ID NO: 648287 - RNA, 19 nt, Artificial Sequence
  Description of Artificial Sequence: Synthetic oligonucleotide
cuacccgagguaauccugc

SEQ ID NO: 648288 - RNA, 19 nt, Artificial Sequence
  Description of Artificial Sequence: Synthetic oligonucleotide
auggacgaauauucaaggu

SEQ ID NO: 648289 - RNA, 19 nt, Artificial Sequence
  Description of Artificial Sequence: Synthetic oligonucleotide
auugcauggcauaggauca

SEQ ID NO: 648290 - RNA, 19 nt, Artificial Sequence
  Description of Artificial Sequence: Synthetic oligonucleotide
ugccacccagauaaguggc

SEQ ID NO: 648291 - RNA, 19 nt, Artificial Sequence
  Description of Artificial Sequence: Synthetic oligonucleotide
aacgugguuuauauaacaa

SEQ ID NO: 648292 - RNA, 19 nt, Artificial Sequence
  Description of Artificial Sequence: Synthetic oligonucleotide
cauuagacguucuucugga

SEQ ID NO: 648293 - RNA, 19 nt, Artificial Sequence
  Description of Artificial Sequence: Synthetic oligonucleotide
cuagacugcaauagaagaa

SEQ ID NO: 648294 - RNA, 19 nt, Artificial Sequence
  Description of Artificial Sequence: Synthetic oligonucleotide
ggauggacgaauauucaag

SEQ ID NO: 648295 - RNA, 19 nt, Artificial Sequence
  Description of Artificial Sequence: Synthetic oligonucleotide
acggauaccauguuccauu

SEQ ID NO: 648296 - RNA, 19 nt, Artificial Sequence
  Description of Artificial Sequence: Synthetic oligonucleotide
uugcaccuaaagcuccuug

SEQ ID NO: 648297 - RNA, 19 nt, Artificial Sequence
  Description of Artificial Sequence: Synthetic oligonucleotide
auauguccgaaaaucaaau

SEQ ID NO: 648298 - RNA, 19 nt, Artificial Sequence
  Description of Artificial Sequence: Synthetic oligonucleotide
ucuaggccaugucuguuaa

SEQ ID NO: 648299 - RNA, 19 nt, Artificial Sequence
  Description of Artificial Sequence: Synthetic oligonucleotide
cgugagcauaauuacaagg

SEQ ID NO: 648300 - RNA, 19 nt, Artificial Sequence
  Description of Artificial Sequence: Synthetic oligonucleotide
gguuacauuauuguaaucu

SEQ ID NO: 648301 - RNA, 19 nt, Artificial Sequence
  Description of Artificial Sequence: Synthetic oligonucleotide
uggauucagggacaacaaa

SEQ ID NO: 648302 - RNA, 19 nt, Artificial Sequence
  Description of Artificial Sequence: Synthetic oligonucleotide
acaacuccuacaaacugcu

SEQ ID NO: 648303 - RNA, 19 nt, Artificial Sequence
  Description of Artificial Sequence: Synthetic oligonucleotide
uauguccgaaaaucaaauu

SEQ ID NO: 648304 - RNA, 19 nt, Artificial Sequence
  Description of Artificial Sequence: Synthetic oligonucleotide
auuccagugccaguggaug

SEQ ID NO: 648305 - RNA, 19 nt, Artificial Sequence
  Description of Artificial Sequence: Synthetic oligonucleotide
cacgaagugcaaucaggag

SEQ ID NO: 648306 - RNA, 19 nt, Artificial Sequence
  Description of Artificial Sequence: Synthetic oligonucleotide
agcaacaagaugucugaua

SEQ ID NO: 648307 - RNA, 19 nt, Artificial Sequence
  Description of Artificial Sequence: Synthetic oligonucleotide
uuuccacuacccgagguaa

SEQ ID NO: 648308 - RNA, 19 nt, Artificial Sequence
  Description of Artificial Sequence: Synthetic oligonucleotide
caucacgaagugcaaucag

SEQ ID NO: 648309 - RNA, 19 nt, Artificial Sequence
  Description of Artificial Sequence: Synthetic oligonucleotide
cagacauuagacguucuuc

SEQ ID NO: 648310 - RNA, 19 nt, Artificial Sequence
  Description of Artificial Sequence: Synthetic oligonucleotide
uccgguugugauuuggguu

SEQ ID NO: 648311 - RNA, 19 nt, Artificial Sequence
  Description of Artificial Sequence: Synthetic oligonucleotide
ggugauaggggcgugagca

SEQ ID NO: 648312 - RNA, 19 nt, Artificial Sequence
  Description of Artificial Sequence: Synthetic oligonucleotide
guccgaaaaucaaauucag

SEQ ID NO: 648313 - RNA, 19 nt, Artificial Sequence
  Description of Artificial Sequence: Synthetic oligonucleotide
auacccucacaacucuucu

SEQ ID NO: 648314 - RNA, 19 nt, Artificial Sequence
  Description of Artificial Sequence: Synthetic oligonucleotide
cuucauugcauggcauagg

SEQ ID NO: 648315 - RNA, 19 nt, Artificial Sequence
  Description of Artificial Sequence: Synthetic oligonucleotide
ggacgaauauucaagguca

SEQ ID NO: 648316 - RNA, 19 nt, Artificial Sequence
  Description of Artificial Sequence: Synthetic oligonucleotide
gaugagggaucauaucugu

SEQ ID NO: 648317 - RNA, 19 nt, Artificial Sequence
  Description of Artificial Sequence: Synthetic oligonucleotide
uacauccauccagacgagg

SEQ ID NO: 648318 - RNA, 19 nt, Artificial Sequence
  Description of Artificial Sequence: Synthetic oligonucleotide
acgaaauuucagauauaag

SEQ ID NO: 648319 - RNA, 19 nt, Artificial Sequence
  Description of Artificial Sequence: Synthetic oligonucleotide
aaacuaaagcagugucauu

SEQ ID NO: 648320 - RNA, 19 nt, Artificial Sequence
  Description of Artificial Sequence: Synthetic oligonucleotide
ucgguuuaaugagugcacu

SEQ ID NO: 648321 - RNA, 19 nt, Artificial Sequence
  Description of Artificial Sequence: Synthetic oligonucleotide
aaagcauagcaaagccacu

SEQ ID NO: 648322 - RNA, 19 nt, Artificial Sequence
  Description of Artificial Sequence: Synthetic oligonucleotide
cccucugaaucauaugucc

SEQ ID NO: 648323 - RNA, 19 nt, Artificial Sequence
  Description of Artificial Sequence: Synthetic oligonucleotide
gccucguauacauccaucc

SEQ ID NO: 648324 - RNA, 19 nt, Artificial Sequence
  Description of Artificial Sequence: Synthetic oligonucleotide
uuccuuucauugcuuuguc

SEQ ID NO: 648325 - RNA, 19 nt, Artificial Sequence
  Description of Artificial Sequence: Synthetic oligonucleotide
cauugguuacauuauugua

SEQ ID NO: 648326 - RNA, 19 nt, Artificial Sequence
  Description of Artificial Sequence: Synthetic oligonucleotide
cacucauagucuccuggag

SEQ ID NO: 648327 - RNA, 19 nt, Artificial Sequence
  Description of Artificial Sequence: Synthetic oligonucleotide
uucgagccaccacugaauu

SEQ ID NO: 648328 - RNA, 19 nt, Artificial Sequence
  Description of Artificial Sequence: Synthetic oligonucleotide
ccucugaaucauauguccg

SEQ ID NO: 648329 - RNA, 19 nt, Artificial Sequence
  Description of Artificial Sequence: Synthetic oligonucleotide
auaagacaacuccuacaaa

SEQ ID NO: 648330 - RNA, 19 nt, Artificial Sequence
  Description of Artificial Sequence: Synthetic oligonucleotide
ugcaaucaggagccaauuu

SEQ ID NO: 648331 - RNA, 19 nt, Artificial Sequence
  Description of Artificial Sequence: Synthetic oligonucleotide
acagacauuagacguucuu

SEQ ID NO: 648332 - RNA, 19 nt, Artificial Sequence
  Description of Artificial Sequence: Synthetic oligonucleotide
cugaaccgagcaauuccag

SEQ ID NO: 648333 - RNA, 19 nt, Artificial Sequence
  Description of Artificial Sequence: Synthetic oligonucleotide
cauuacauuucaguuggga

SEQ ID NO: 648334 - RNA, 19 nt, Artificial Sequence
  Description of Artificial Sequence: Synthetic oligonucleotide
ucauugcauggcauaggau

SEQ ID NO: 648335 - RNA, 19 nt, Artificial Sequence
  Description of Artificial Sequence: Synthetic oligonucleotide
acuuccaugcagccacugu

SEQ ID NO: 648336 - RNA, 19 nt, Artificial Sequence
  Description of Artificial Sequence: Synthetic oligonucleotide
aaguaccacaucauuucaa

SEQ ID NO: 648337 - RNA, 19 nt, Artificial Sequence
  Description of Artificial Sequence: Synthetic oligonucleotide
cuggaauacccucacaacu

SEQ ID NO: 648338 - RNA, 19 nt, Artificial Sequence
  Description of Artificial Sequence: Synthetic oligonucleotide
uuuguccaagacugcuagu

SEQ ID NO: 648339 - RNA, 19 nt, Artificial Sequence
  Description of Artificial Sequence: Synthetic oligonucleotide
gaggcucccaaauuuauuu

SEQ ID NO: 648340 - RNA, 19 nt, Artificial Sequence
  Description of Artificial Sequence: Synthetic oligonucleotide
gagcagugguaacuuccag

SEQ ID NO: 648341 - RNA, 19 nt, Artificial Sequence
  Description of Artificial Sequence: Synthetic oligonucleotide
ccgguugugauuuggguug

SEQ ID NO: 648342 - RNA, 19 nt, Artificial Sequence
  Description of Artificial Sequence: Synthetic oligonucleotide
gacgaauauucaaggucac

SEQ ID NO: 648343 - RNA, 19 nt, Artificial Sequence
  Description of Artificial Sequence: Synthetic oligonucleotide
ggguaauugacacacaauu

SEQ ID NO: 648344 - RNA, 19 nt, Artificial Sequence
  Description of Artificial Sequence: Synthetic oligonucleotide
uguuuagaaauggcuucau

SEQ ID NO: 648345 - RNA, 19 nt, Artificial Sequence
  Description of Artificial Sequence: Synthetic oligonucleotide
uccacuacccgagguaauc

SEQ ID NO: 648346 - RNA, 19 nt, Artificial Sequence
  Description of Artificial Sequence: Synthetic oligonucleotide
auagagcauucauccacau

SEQ ID NO: 648347 - RNA, 19 nt, Artificial Sequence
  Description of Artificial Sequence: Synthetic oligonucleotide
auugccuccgguugugauu

SEQ ID NO: 648348 - RNA, 19 nt, Artificial Sequence
  Description of Artificial Sequence: Synthetic oligonucleotide
acguaucacuuuuauuauu

SEQ ID NO: 648349 - RNA, 19 nt, Artificial Sequence
  Description of Artificial Sequence: Synthetic oligonucleotide
ugagugcacuuuccacuac

SEQ ID NO: 648350 - RNA, 19 nt, Artificial Sequence
  Description of Artificial Sequence: Synthetic oligonucleotide
acgaggguuaaucgguuua

SEQ ID NO: 648351 - RNA, 19 nt, Artificial Sequence
  Description of Artificial Sequence: Synthetic oligonucleotide
ggcauuauaagcacagaaa

SEQ ID NO: 648352 - RNA, 19 nt, Artificial Sequence
  Description of Artificial Sequence: Synthetic oligonucleotide
gcaugugaaagcagcuugg

SEQ ID NO: 648353 - RNA, 19 nt, Artificial Sequence
  Description of Artificial Sequence: Synthetic oligonucleotide
gggcauuauaagcacagaa

SEQ ID NO: 648354 - RNA, 19 nt, Artificial Sequence
  Description of Artificial Sequence: Synthetic oligonucleotide
auuagacguucuucuggau

SEQ ID NO: 648355 - RNA, 19 nt, Artificial Sequence
  Description of Artificial Sequence: Synthetic oligonucleotide
uucuugcacacagcugagc

SEQ ID NO: 648356 - RNA, 19 nt, Artificial Sequence
  Description of Artificial Sequence: Synthetic oligonucleotide
auauucaaggucacauuua

SEQ ID NO: 648357 - RNA, 19 nt, Artificial Sequence
  Description of Artificial Sequence: Synthetic oligonucleotide
aggggcgugagcauaauua

SEQ ID NO: 648358 - RNA, 19 nt, Artificial Sequence
  Description of Artificial Sequence: Synthetic oligonucleotide
agugcaaucaggagccaau

SEQ ID NO: 648359 - RNA, 19 nt, Artificial Sequence
  Description of Artificial Sequence: Synthetic oligonucleotide
cuuccaugcagccacugua

SEQ ID NO: 648360 - RNA, 19 nt, Artificial Sequence
  Description of Artificial Sequence: Synthetic oligonucleotide
aggguaguaggagcccuuc

SEQ ID NO: 648361 - RNA, 19 nt, Artificial Sequence
  Description of Artificial Sequence: Synthetic oligonucleotide
ugcauggcauaggaucaca

SEQ ID NO: 648362 - RNA, 19 nt, Artificial Sequence
  Description of Artificial Sequence: Synthetic oligonucleotide
acgaauauucaaggucaca

SEQ ID NO: 648363 - RNA, 19 nt, Artificial Sequence
  Description of Artificial Sequence: Synthetic oligonucleotide
uugccuccgguugugauuu

SEQ ID NO: 648364 - RNA, 19 nt, Artificial Sequence
  Description of Artificial Sequence: Synthetic oligonucleotide
ucauagucuccuggagugu

SEQ ID NO: 648365 - RNA, 19 nt, Artificial Sequence
  Description of Artificial Sequence: Synthetic oligonucleotide
ggggcgugagcauaauuac

SEQ ID NO: 648366 - RNA, 19 nt, Artificial Sequence
  Description of Artificial Sequence: Synthetic oligonucleotide
acuacccgagguaauccug

SEQ ID NO: 648367 - RNA, 19 nt, Artificial Sequence
  Description of Artificial Sequence: Synthetic oligonucleotide
guuaaucgguuuaaugagu

SEQ ID NO: 648368 - RNA, 19 nt, Artificial Sequence
  Description of Artificial Sequence: Synthetic oligonucleotide
cauucgagccaccacugaa

SEQ ID NO: 648369 - RNA, 19 nt, Artificial Sequence
  Description of Artificial Sequence: Synthetic oligonucleotide
ugauaggggcgugagcaua

SEQ ID NO: 648370 - RNA, 19 nt, Artificial Sequence
  Description of Artificial Sequence: Synthetic oligonucleotide
aacagacauuagacguucu

SEQ ID NO: 648371 - RNA, 19 nt, Artificial Sequence
  Description of Artificial Sequence: Synthetic oligonucleotide
agccucguauacauccauc

SEQ ID NO: 648372 - RNA, 19 nt, Artificial Sequence
  Description of Artificial Sequence: Synthetic oligonucleotide
gcacuuuccacuacccgag

SEQ ID NO: 648373 - RNA, 19 nt, Artificial Sequence
  Description of Artificial Sequence: Synthetic oligonucleotide
auucgagccaccacugaau

SEQ ID NO: 648374 - RNA, 19 nt, Artificial Sequence
  Description of Artificial Sequence: Synthetic oligonucleotide
auggauucagggacaacaa

SEQ ID NO: 648375 - RNA, 19 nt, Artificial Sequence
  Description of Artificial Sequence: Synthetic oligonucleotide
aacuggcauuugucccuug

SEQ ID NO: 648376 - RNA, 19 nt, Artificial Sequence
  Description of Artificial Sequence: Synthetic oligonucleotide
gauaggggcgugagcauaa

SEQ ID NO: 648377 - RNA, 19 nt, Artificial Sequence
  Description of Artificial Sequence: Synthetic oligonucleotide
cacccagauaaguggccac

SEQ ID NO: 648378 - RNA, 19 nt, Artificial Sequence
  Description of Artificial Sequence: Synthetic oligonucleotide
cagacgaggguuaaucggu

SEQ ID NO: 648379 - RNA, 19 nt, Artificial Sequence
  Description of Artificial Sequence: Synthetic oligonucleotide
ggcgugagcauaauuacaa

SEQ ID NO: 648380 - RNA, 19 nt, Artificial Sequence
  Description of Artificial Sequence: Synthetic oligonucleotide
aaacgaaauuucagauaua

SEQ ID NO: 648381 - RNA, 19 nt, Artificial Sequence
  Description of Artificial Sequence: Synthetic oligonucleotide
ggcaaacgaaauuucagau

SEQ ID NO: 648382 - RNA, 19 nt, Artificial Sequence
  Description of Artificial Sequence: Synthetic oligonucleotide
acauuacauuucaguuggg

SEQ ID NO: 648383 - RNA, 19 nt, Artificial Sequence
  Description of Artificial Sequence: Synthetic oligonucleotide
cuccauucgagccaccacu

SEQ ID NO: 648384 - RNA, 19 nt, Artificial Sequence
  Description of Artificial Sequence: Synthetic oligonucleotide
aucaaguuccagccucgua

SEQ ID NO: 648385 - RNA, 19 nt, Artificial Sequence
  Description of Artificial Sequence: Synthetic oligonucleotide
uugcauggcauaggaucac

SEQ ID NO: 648386 - RNA, 19 nt, Artificial Sequence
  Description of Artificial Sequence: Synthetic oligonucleotide
ugcuaacacugucgucuaa

SEQ ID NO: 648387 - RNA, 19 nt, Artificial Sequence
  Description of Artificial Sequence: Synthetic oligonucleotide
agcugaaaaucugguaauu

SEQ ID NO: 648388 - RNA, 19 nt, Artificial Sequence
  Description of Artificial Sequence: Synthetic oligonucleotide
gcgugagcauaauuacaag

SEQ ID NO: 648389 - RNA, 19 nt, Artificial Sequence
  Description of Artificial Sequence: Synthetic oligonucleotide
aggguaauugacacacaau

SEQ ID NO: 648390 - RNA, 19 nt, Artificial Sequence
  Description of Artificial Sequence: Synthetic oligonucleotide
cugaaucauauguccgaaa

SEQ ID NO: 648391 - RNA, 19 nt, Artificial Sequence
  Description of Artificial Sequence: Synthetic oligonucleotide
guggauggacgaauauuca

SEQ ID NO: 648392 - RNA, 19 nt, Artificial Sequence
  Description of Artificial Sequence: Synthetic oligonucleotide
ccuugaauaucuuuagagu

SEQ ID NO: 648393 - RNA, 19 nt, Artificial Sequence
  Description of Artificial Sequence: Synthetic oligonucleotide
gaugcccucugaaucauau

SEQ ID NO: 648394 - RNA, 19 nt, Artificial Sequence
  Description of Artificial Sequence: Synthetic oligonucleotide
cuucgaugagggaucauau

SEQ ID NO: 648395 - RNA, 19 nt, Artificial Sequence
  Description of Artificial Sequence: Synthetic oligonucleotide
augcuaacacugucgucua

SEQ ID NO: 648396 - RNA, 19 nt, Artificial Sequence
  Description of Artificial Sequence: Synthetic oligonucleotide
gcucagauacccaucuuca

SEQ ID NO: 648397 - RNA, 19 nt, Artificial Sequence
  Description of Artificial Sequence: Synthetic oligonucleotide
cuaggccaugucuguuaac

SEQ ID NO: 648398 - RNA, 19 nt, Artificial Sequence
  Description of Artificial Sequence: Synthetic oligonucleotide
caagacugcuaguuguccu

SEQ ID NO: 648399 - RNA, 19 nt, Artificial Sequence
  Description of Artificial Sequence: Synthetic oligonucleotide
auacauccauccagacgag

SEQ ID NO: 648400 - RNA, 19 nt, Artificial Sequence
  Description of Artificial Sequence: Synthetic oligonucleotide
acaauugagcacacauguu

SEQ ID NO: 648401 - RNA, 19 nt, Artificial Sequence
  Description of Artificial Sequence: Synthetic oligonucleotide
agauccaacugcaccccgu

SEQ ID NO: 648402 - RNA, 19 nt, Artificial Sequence
  Description of Artificial Sequence: Synthetic oligonucleotide
agacuucgaugagggauca

SEQ ID NO: 648403 - RNA, 19 nt, Artificial Sequence
  Description of Artificial Sequence: Synthetic oligonucleotide
cgaugagggaucauaucug

SEQ ID NO: 648404 - RNA, 19 nt, Artificial Sequence
  Description of Artificial Sequence: Synthetic oligonucleotide
ccuccgguugugauuuggg

SEQ ID NO: 648405 - RNA, 19 nt, Artificial Sequence
  Description of Artificial Sequence: Synthetic oligonucleotide
gcauucacuggcguggcac

SEQ ID NO: 648406 - RNA, 19 nt, Artificial Sequence
  Description of Artificial Sequence: Synthetic oligonucleotide
caacuccuacaaacugcuc

SEQ ID NO: 648407 - RNA, 19 nt, Artificial Sequence
  Description of Artificial Sequence: Synthetic oligonucleotide
gcugaaccgagcaauucca

SEQ ID NO: 648408 - RNA, 19 nt, Artificial Sequence
  Description of Artificial Sequence: Synthetic oligonucleotide
ugaugcccucugaaucaua

SEQ ID NO: 648409 - RNA, 19 nt, Artificial Sequence
  Description of Artificial Sequence: Synthetic oligonucleotide
cagauaaguggccacguuu

SEQ ID NO: 648410 - RNA, 19 nt, Artificial Sequence
  Description of Artificial Sequence: Synthetic oligonucleotide
uuugcaccuaaagcuccuu

SEQ ID NO: 648411 - RNA, 19 nt, Artificial Sequence
  Description of Artificial Sequence: Synthetic oligonucleotide
cuggcguggcacugaagga

SEQ ID NO: 648412 - RNA, 19 nt, Artificial Sequence
  Description of Artificial Sequence: Synthetic oligonucleotide
cucagagcauucguccaca

SEQ ID NO: 648413 - RNA, 19 nt, Artificial Sequence
  Description of Artificial Sequence: Synthetic oligonucleotide
agugagcucugaugucauu

SEQ ID NO: 648414 - RNA, 19 nt, Artificial Sequence
  Description of Artificial Sequence: Synthetic oligonucleotide
ccaccaugaggaagcaaug

SEQ ID NO: 648415 - RNA, 19 nt, Artificial Sequence
  Description of Artificial Sequence: Synthetic oligonucleotide
acauugcacuucacaggug

SEQ ID NO: 648416 - RNA, 19 nt, Artificial Sequence
  Description of Artificial Sequence: Synthetic oligonucleotide
gaauaucuuuagaguagau

SEQ ID NO: 648417 - RNA, 19 nt, Artificial Sequence
  Description of Artificial Sequence: Synthetic oligonucleotide
cauccauccagacgagggu

SEQ ID NO: 648418 - RNA, 19 nt, Artificial Sequence
  Description of Artificial Sequence: Synthetic oligonucleotide
gguuuaaugagugcacuuu

SEQ ID NO: 648419 - RNA, 19 nt, Artificial Sequence
  Description of Artificial Sequence: Synthetic oligonucleotide
cauggcauaggaucacauu

SEQ ID NO: 648420 - RNA, 19 nt, Artificial Sequence
  Description of Artificial Sequence: Synthetic oligonucleotide
ggcauaggaucacauuggu

SEQ ID NO: 648421 - RNA, 19 nt, Artificial Sequence
  Description of Artificial Sequence: Synthetic oligonucleotide
ccauguuccauuuaccauu

SEQ ID NO: 648422 - RNA, 19 nt, Artificial Sequence
  Description of Artificial Sequence: Synthetic oligonucleotide
augagggaucauaucugua

SEQ ID NO: 648423 - RNA, 19 nt, Artificial Sequence
  Description of Artificial Sequence: Synthetic oligonucleotide
ccacuacccgagguaaucc

SEQ ID NO: 648424 - RNA, 19 nt, Artificial Sequence
  Description of Artificial Sequence: Synthetic oligonucleotide
cauucacuggcguggcacu

SEQ ID NO: 648425 - RNA, 19 nt, Artificial Sequence
  Description of Artificial Sequence: Synthetic oligonucleotide
guaauccugcaaaguauau

SEQ ID NO: 648426 - RNA, 19 nt, Artificial Sequence
  Description of Artificial Sequence: Synthetic oligonucleotide
gcauaggaucacauugguc

SEQ ID NO: 648427 - RNA, 19 nt, Artificial Sequence
  Description of Artificial Sequence: Synthetic oligonucleotide
cacuacccgagguaauccu

SEQ ID NO: 648428 - RNA, 19 nt, Artificial Sequence
  Description of Artificial Sequence: Synthetic oligonucleotide
cuccgguugugauuugggu

SEQ ID NO: 648429 - RNA, 19 nt, Artificial Sequence
  Description of Artificial Sequence: Synthetic oligonucleotide
gacgaggguuaaucgguuu

SEQ ID NO: 648430 - RNA, 19 nt, Artificial Sequence
  Description of Artificial Sequence: Synthetic oligonucleotide
agacgaggguuaaucgguu

SEQ ID NO: 648431 - RNA, 19 nt, Artificial Sequence
  Description of Artificial Sequence: Synthetic oligonucleotide
gccuccgguugugauuugg

SEQ ID NO: 648432 - RNA, 19 nt, Artificial Sequence
  Description of Artificial Sequence: Synthetic oligonucleotide
ccucguauacauccaucca

SEQ ID NO: 648433 - RNA, 19 nt, Artificial Sequence
  Description of Artificial Sequence: Synthetic oligonucleotide
gguaacuuccaggaguguu

SEQ ID NO: 648434 - RNA, 19 nt, Artificial Sequence
  Description of Artificial Sequence: Synthetic oligonucleotide
cagagcuggagcccaccaa

SEQ ID NO: 648435 - RNA, 19 nt, Artificial Sequence
  Description of Artificial Sequence: Synthetic oligonucleotide
cuggaaugccacccagaua

SEQ ID NO: 648436 - RNA, 19 nt, Artificial Sequence
  Description of Artificial Sequence: Synthetic oligonucleotide
ccuccauucgagccaccac

SEQ ID NO: 648437 - RNA, 19 nt, Artificial Sequence
  Description of Artificial Sequence: Synthetic oligonucleotide
gaggguuaaucgguuuaau

SEQ ID NO: 648438 - RNA, 19 nt, Artificial Sequence
  Description of Artificial Sequence: Synthetic oligonucleotide
gggcgugagcauaauuaca

SEQ ID NO: 648439 - RNA, 19 nt, Artificial Sequence
  Description of Artificial Sequence: Synthetic oligonucleotide
cauuucaguugggauugcu

SEQ ID NO: 648440 - RNA, 19 nt, Artificial Sequence
  Description of Artificial Sequence: Synthetic oligonucleotide
gccacccagauaaguggcc

SEQ ID NO: 648441 - RNA, 19 nt, Artificial Sequence
  Description of Artificial Sequence: Synthetic oligonucleotide
auaggggcgugagcauaau

SEQ ID NO: 648442 - RNA, 19 nt, Artificial Sequence
  Description of Artificial Sequence: Synthetic oligonucleotide
ugccuccgguugugauuug

SEQ ID NO: 648443 - RNA, 19 nt, Artificial Sequence
  Description of Artificial Sequence: Synthetic oligonucleotide
gaauacccucacaacucuu

SEQ ID NO: 648444 - RNA, 19 nt, Artificial Sequence
  Description of Artificial Sequence: Synthetic oligonucleotide
gugauaggggcgugagcau

SEQ ID NO: 648445 - RNA, 19 nt, Artificial Sequence
  Description of Artificial Sequence: Synthetic oligonucleotide
gcaccuaaagcuccuuguu

SEQ ID NO: 648446 - RNA, 19 nt, Artificial Sequence
  Description of Artificial Sequence: Synthetic oligonucleotide
ccacggauaccauguucca

SEQ ID NO: 648447 - RNA, 19 nt, Artificial Sequence
  Description of Artificial Sequence: Synthetic oligonucleotide
ccacccagauaaguggcca

SEQ ID NO: 648448 - RNA, 19 nt, Artificial Sequence
  Description of Artificial Sequence: Synthetic oligonucleotide
ccccguugauguucacuuc

SEQ ID NO: 648449 - RNA, 19 nt, Artificial Sequence
  Description of Artificial Sequence: Synthetic oligonucleotide
cgucuaauucuuccacgga

SEQ ID NO: 648450 - RNA, 19 nt, Artificial Sequence
  Description of Artificial Sequence: Synthetic oligonucleotide
cacauuggucuggccggga

SEQ ID NO: 648451 - RNA, 19 nt, Artificial Sequence
  Description of Artificial Sequence: Synthetic oligonucleotide
ccacaauauccugagaauu

SEQ ID NO: 648452 - RNA, 19 nt, Artificial Sequence
  Description of Artificial Sequence: Synthetic oligonucleotide
gcaauagaagaaagacuuu

SEQ ID NO: 648453 - RNA, 19 nt, Artificial Sequence
  Description of Artificial Sequence: Synthetic oligonucleotide
cacggauaccauguuccau

SEQ ID NO: 648454 - RNA, 19 nt, Artificial Sequence
  Description of Artificial Sequence: Synthetic oligonucleotide
cagccucguauacauccau

SEQ ID NO: 648455 - RNA, 19 nt, Artificial Sequence
  Description of Artificial Sequence: Synthetic oligonucleotide
gcauggcauaggaucacau

SEQ ID NO: 648456 - RNA, 19 nt, Artificial Sequence
  Description of Artificial Sequence: Synthetic oligonucleotide
cagcaacaagaugucugau

SEQ ID NO: 648457 - RNA, 19 nt, Artificial Sequence
  Description of Artificial Sequence: Synthetic oligonucleotide
cgaggguuaaucgguuuaa

SEQ ID NO: 648458 - RNA, 19 nt, Artificial Sequence
  Description of Artificial Sequence: Synthetic oligonucleotide
gacuucgaugagggaucau

SEQ ID NO: 648459 - RNA, 19 nt, Artificial Sequence
  Description of Artificial Sequence: Synthetic oligonucleotide
cgguuuaaugagugcacuu

SEQ ID NO: 648460 - RNA, 19 nt, Artificial Sequence
  Description of Artificial Sequence: Synthetic oligonucleotide
gcaccccguugauguucac

SEQ ID NO: 648461 - RNA, 19 nt, Artificial Sequence
  Description of Artificial Sequence: Synthetic oligonucleotide
ccagauaaguggccacguu

SEQ ID NO: 648462 - RNA, 19 nt, Artificial Sequence
  Description of Artificial Sequence: Synthetic oligonucleotide
caccugccagcuggugaua

SEQ ID NO: 648463 - RNA, 19 nt, Artificial Sequence
  Description of Artificial Sequence: Synthetic oligonucleotide
cgguugugauuuggguuga

SEQ ID NO: 648464 - RNA, 19 nt, Artificial Sequence
  Description of Artificial Sequence: Synthetic oligonucleotide
aaagguuacauuuagaagc

SEQ ID NO: 648465 - RNA, 19 nt, Artificial Sequence
  Description of Artificial Sequence: Synthetic oligonucleotide
auaaugguuaauuaaaagc

SEQ ID NO: 648466 - RNA, 19 nt, Artificial Sequence
  Description of Artificial Sequence: Synthetic oligonucleotide
aacaauacuauucuaugac

SEQ ID NO: 648467 - RNA, 19 nt, Artificial Sequence
  Description of Artificial Sequence: Synthetic oligonucleotide
agguaagcaacuuagaagc

SEQ ID NO: 648468 - RNA, 19 nt, Artificial Sequence
  Description of Artificial Sequence: Synthetic oligonucleotide
ugauauaauaauuugaagu

SEQ ID NO: 648469 - RNA, 19 nt, Artificial Sequence
  Description of Artificial Sequence: Synthetic oligonucleotide
uaaugguuaauuaaaagcc

SEQ ID NO: 648470 - RNA, 19 nt, Artificial Sequence
  Description of Artificial Sequence: Synthetic oligonucleotide
ucuacuuaaaguuuuaacu

SEQ ID NO: 648471 - RNA, 19 nt, Artificial Sequence
  Description of Artificial Sequence: Synthetic oligonucleotide
uuaaacaccaacaaguggu

SEQ ID NO: 648472 - RNA, 19 nt, Artificial Sequence
  Description of Artificial Sequence: Synthetic oligonucleotide
agaugcaauauauacacgg

SEQ ID NO: 648473 - RNA, 19 nt, Artificial Sequence
  Description of Artificial Sequence: Synthetic oligonucleotide
cuuuccaugacuuaaaauc

SEQ ID NO: 648474 - RNA, 19 nt, Artificial Sequence
  Description of Artificial Sequence: Synthetic oligonucleotide
aaggguaccguaucaauac

SEQ ID NO: 648475 - RNA, 19 nt, Artificial Sequence
  Description of Artificial Sequence: Synthetic oligonucleotide
aaaagaagaucuguguuac

SEQ ID NO: 648476 - RNA, 19 nt, Artificial Sequence
  Description of Artificial Sequence: Synthetic oligonucleotide
acuaaaguaauacaguaca

SEQ ID NO: 648477 - RNA, 19 nt, Artificial Sequence
  Description of Artificial Sequence: Synthetic oligonucleotide
acaauuaacacuuuauagu

SEQ ID NO: 648478 - RNA, 19 nt, Artificial Sequence
  Description of Artificial Sequence: Synthetic oligonucleotide
uagucuauuauuucaacag

SEQ ID NO: 648479 - RNA, 19 nt, Artificial Sequence
  Description of Artificial Sequence: Synthetic oligonucleotide
accaaguacauccugcugc

SEQ ID NO: 648480 - RNA, 19 nt, Artificial Sequence
  Description of Artificial Sequence: Synthetic oligonucleotide
aauaucuuggcagauaaca

SEQ ID NO: 648481 - RNA, 19 nt, Artificial Sequence
  Description of Artificial Sequence: Synthetic oligonucleotide
ucuuaaucgccguagagcc

SEQ ID NO: 648482 - RNA, 19 nt, Artificial Sequence
  Description of Artificial Sequence: Synthetic oligonucleotide
ucaguaaacaaagcuaugg

SEQ ID NO: 648483 - RNA, 19 nt, Artificial Sequence
  Description of Artificial Sequence: Synthetic oligonucleotide
aguaauacaguacaagggu

SEQ ID NO: 648484 - RNA, 19 nt, Artificial Sequence
  Description of Artificial Sequence: Synthetic oligonucleotide
uuugcaugcgagaauauca

SEQ ID NO: 648485 - RNA, 19 nt, Artificial Sequence
  Description of Artificial Sequence: Synthetic oligonucleotide
gaacgcauaacacucaagc

SEQ ID NO: 648486 - RNA, 19 nt, Artificial Sequence
  Description of Artificial Sequence: Synthetic oligonucleotide
agucuauuauuucaacagc

SEQ ID NO: 648487 - RNA, 19 nt, Artificial Sequence
  Description of Artificial Sequence: Synthetic oligonucleotide
gagaauaucaacuagucua

SEQ ID NO: 648488 - RNA, 19 nt, Artificial Sequence
  Description of Artificial Sequence: Synthetic oligonucleotide
aauggagauucauuauuuc

SEQ ID NO: 648489 - RNA, 19 nt, Artificial Sequence
  Description of Artificial Sequence: Synthetic oligonucleotide
aucuacuuaaaguuuuaac

SEQ ID NO: 648490 - RNA, 19 nt, Artificial Sequence
  Description of Artificial Sequence: Synthetic oligonucleotide
uuucaguaaacaaagcuau

SEQ ID NO: 648491 - RNA, 19 nt, Artificial Sequence
  Description of Artificial Sequence: Synthetic oligonucleotide
auauacacggaucaccauc

SEQ ID NO: 648492 - RNA, 19 nt, Artificial Sequence
  Description of Artificial Sequence: Synthetic oligonucleotide
aacuaaaguaauacaguac

SEQ ID NO: 648493 - RNA, 19 nt, Artificial Sequence
  Description of Artificial Sequence: Synthetic oligonucleotide
aaugaaagcaugccaguga

SEQ ID NO: 648494 - RNA, 19 nt, Artificial Sequence
  Description of Artificial Sequence: Synthetic oligonucleotide
uuuuacugagguaagcaac

SEQ ID NO: 648495 - RNA, 19 nt, Artificial Sequence
  Description of Artificial Sequence: Synthetic oligonucleotide
aguaaacaaagcuauggcu

SEQ ID NO: 648496 - RNA, 19 nt, Artificial Sequence
  Description of Artificial Sequence: Synthetic oligonucleotide
aauuuuacugagguaagca

SEQ ID NO: 648497 - RNA, 19 nt, Artificial Sequence
  Description of Artificial Sequence: Synthetic oligonucleotide
aacagcuuagccuauuuau

SEQ ID NO: 648498 - RNA, 19 nt, Artificial Sequence
  Description of Artificial Sequence: Synthetic oligonucleotide
aaggauucaugaugaacuc

SEQ ID NO: 648499 - RNA, 19 nt, Artificial Sequence
  Description of Artificial Sequence: Synthetic oligonucleotide
acuauucuaugacaucuac

SEQ ID NO: 648500 - RNA, 19 nt, Artificial Sequence
  Description of Artificial Sequence: Synthetic oligonucleotide
uuaauuaugcuuguuugca

SEQ ID NO: 648501 - RNA, 19 nt, Artificial Sequence
  Description of Artificial Sequence: Synthetic oligonucleotide
uugugagcaacaaggauca

SEQ ID NO: 648502 - RNA, 19 nt, Artificial Sequence
  Description of Artificial Sequence: Synthetic oligonucleotide
uuuacuuagucuuuuccaa

SEQ ID NO: 648503 - RNA, 19 nt, Artificial Sequence
  Description of Artificial Sequence: Synthetic oligonucleotide
ucucgggcuucaaagaagg

SEQ ID NO: 648504 - RNA, 19 nt, Artificial Sequence
  Description of Artificial Sequence: Synthetic oligonucleotide
uaagcaacuuagaagcaug

SEQ ID NO: 648505 - RNA, 19 nt, Artificial Sequence
  Description of Artificial Sequence: Synthetic oligonucleotide
aacuuagaagcaugaucac

SEQ ID NO: 648506 - RNA, 19 nt, Artificial Sequence
  Description of Artificial Sequence: Synthetic oligonucleotide
uauauuaaagcaggagaag

SEQ ID NO: 648507 - RNA, 19 nt, Artificial Sequence
  Description of Artificial Sequence: Synthetic oligonucleotide
guuuucucgggcuucaaag

SEQ ID NO: 648508 - RNA, 19 nt, Artificial Sequence
  Description of Artificial Sequence: Synthetic oligonucleotide
uauggcuucauuauaugau

SEQ ID NO: 648509 - RNA, 19 nt, Artificial Sequence
  Description of Artificial Sequence: Synthetic oligonucleotide
ugcaauauauacacggauc

SEQ ID NO: 648510 - RNA, 19 nt, Artificial Sequence
  Description of Artificial Sequence: Synthetic oligonucleotide
acuagucuauuauuucaac

SEQ ID NO: 648511 - RNA, 19 nt, Artificial Sequence
  Description of Artificial Sequence: Synthetic oligonucleotide
aguacaaggguaccguauc

SEQ ID NO: 648512 - RNA, 19 nt, Artificial Sequence
  Description of Artificial Sequence: Synthetic oligonucleotide
aaaucaccaaauugccaag

SEQ ID NO: 648513 - RNA, 19 nt, Artificial Sequence
  Description of Artificial Sequence: Synthetic oligonucleotide
uguguuacauagacaagga

SEQ ID NO: 648514 - RNA, 19 nt, Artificial Sequence
  Description of Artificial Sequence: Synthetic oligonucleotide
aagcaauggagauucauua

SEQ ID NO: 648515 - RNA, 19 nt, Artificial Sequence
  Description of Artificial Sequence: Synthetic oligonucleotide
ucagcuaucaagaggcagu

SEQ ID NO: 648516 - RNA, 19 nt, Artificial Sequence
  Description of Artificial Sequence: Synthetic oligonucleotide
guuacauagacaaggauuc

SEQ ID NO: 648517 - RNA, 19 nt, Artificial Sequence
  Description of Artificial Sequence: Synthetic oligonucleotide
aacgcauaacacucaagcu

SEQ ID NO: 648518 - RNA, 19 nt, Artificial Sequence
  Description of Artificial Sequence: Synthetic oligonucleotide
auuugggucaugucuaucu

SEQ ID NO: 648519 - RNA, 19 nt, Artificial Sequence
  Description of Artificial Sequence: Synthetic oligonucleotide
ugcgagaauaucaacuagu

SEQ ID NO: 648520 - RNA, 19 nt, Artificial Sequence
  Description of Artificial Sequence: Synthetic oligonucleotide
agcauaagaauuucauucu

SEQ ID NO: 648521 - RNA, 19 nt, Artificial Sequence
  Description of Artificial Sequence: Synthetic oligonucleotide
ucugccuaaacugaaacaa

SEQ ID NO: 648522 - RNA, 19 nt, Artificial Sequence
  Description of Artificial Sequence: Synthetic oligonucleotide
aacaccaacaagugguuaa

SEQ ID NO: 648523 - RNA, 19 nt, Artificial Sequence
  Description of Artificial Sequence: Synthetic oligonucleotide
uuuaacuucaucucucauu

SEQ ID NO: 648524 - RNA, 19 nt, Artificial Sequence
  Description of Artificial Sequence: Synthetic oligonucleotide
ucauuuucucacuaccaug

SEQ ID NO: 648525 - RNA, 19 nt, Artificial Sequence
  Description of Artificial Sequence: Synthetic oligonucleotide
auaacacucaagcuugcug

SEQ ID NO: 648526 - RNA, 19 nt, Artificial Sequence
  Description of Artificial Sequence: Synthetic oligonucleotide
cugauuucgccuaacuccc

SEQ ID NO: 648527 - RNA, 19 nt, Artificial Sequence
  Description of Artificial Sequence: Synthetic oligonucleotide
aggaagaacgcauaacacu

SEQ ID NO: 648528 - RNA, 19 nt, Artificial Sequence
  Description of Artificial Sequence: Synthetic oligonucleotide
uaccguaucaauaccuucu

SEQ ID NO: 648529 - RNA, 19 nt, Artificial Sequence
  Description of Artificial Sequence: Synthetic oligonucleotide
cuauauuaaagcaggagaa

SEQ ID NO: 648530 - RNA, 19 nt, Artificial Sequence
  Description of Artificial Sequence: Synthetic oligonucleotide
aauccaugugaauucugca

SEQ ID NO: 648531 - RNA, 19 nt, Artificial Sequence
  Description of Artificial Sequence: Synthetic oligonucleotide
auacuauucuaugacaucu

SEQ ID NO: 648532 - RNA, 19 nt, Artificial Sequence
  Description of Artificial Sequence: Synthetic oligonucleotide
uuaaucgccguagagccag

SEQ ID NO: 648533 - RNA, 19 nt, Artificial Sequence
  Description of Artificial Sequence: Synthetic oligonucleotide
acucccuguauuuacuuag

SEQ ID NO: 648534 - RNA, 19 nt, Artificial Sequence
  Description of Artificial Sequence: Synthetic oligonucleotide
aaggcagccacuaagacuu

SEQ ID NO: 648535 - RNA, 19 nt, Artificial Sequence
  Description of Artificial Sequence: Synthetic oligonucleotide
aagaagaucuguguuacau

SEQ ID NO: 648536 - RNA, 19 nt, Artificial Sequence
  Description of Artificial Sequence: Synthetic oligonucleotide
auaugauauaauaauuuga

SEQ ID NO: 648537 - RNA, 19 nt, Artificial Sequence
  Description of Artificial Sequence: Synthetic oligonucleotide
aaucugauuucgccuaacu

SEQ ID NO: 648538 - RNA, 19 nt, Artificial Sequence
  Description of Artificial Sequence: Synthetic oligonucleotide
uuagucuuuuccaaucaaa

SEQ ID NO: 648539 - RNA, 19 nt, Artificial Sequence
  Description of Artificial Sequence: Synthetic oligonucleotide
gaaaagaagaucuguguua

SEQ ID NO: 648540 - RNA, 19 nt, Artificial Sequence
  Description of Artificial Sequence: Synthetic oligonucleotide
ccagcuauauuaaagcagg

SEQ ID NO: 648541 - RNA, 19 nt, Artificial Sequence
  Description of Artificial Sequence: Synthetic oligonucleotide
ucaacuagucuauuauuuc

SEQ ID NO: 648542 - RNA, 19 nt, Artificial Sequence
  Description of Artificial Sequence: Synthetic oligonucleotide
ucauucugcaggcacguac

SEQ ID NO: 648543 - RNA, 19 nt, Artificial Sequence
  Description of Artificial Sequence: Synthetic oligonucleotide
ucccauaauuuuacugagg

SEQ ID NO: 648544 - RNA, 19 nt, Artificial Sequence
  Description of Artificial Sequence: Synthetic oligonucleotide
uucauuauaugaugaaauu

SEQ ID NO: 648545 - RNA, 19 nt, Artificial Sequence
  Description of Artificial Sequence: Synthetic oligonucleotide
caagauauuauauaauggu

SEQ ID NO: 648546 - RNA, 19 nt, Artificial Sequence
  Description of Artificial Sequence: Synthetic oligonucleotide
uuacauuuagaagccagga

SEQ ID NO: 648547 - RNA, 19 nt, Artificial Sequence
  Description of Artificial Sequence: Synthetic oligonucleotide
aaauaugcugaacguaaua

SEQ ID NO: 648548 - RNA, 19 nt, Artificial Sequence
  Description of Artificial Sequence: Synthetic oligonucleotide
ucuauuauuucaacagcuu

SEQ ID NO: 648549 - RNA, 19 nt, Artificial Sequence
  Description of Artificial Sequence: Synthetic oligonucleotide
ugccuaaacugaaacaaaa

SEQ ID NO: 648550 - RNA, 19 nt, Artificial Sequence
  Description of Artificial Sequence: Synthetic oligonucleotide
ucauuauaugaugaaauuu

SEQ ID NO: 648551 - RNA, 19 nt, Artificial Sequence
  Description of Artificial Sequence: Synthetic oligonucleotide
uuaagcuacacaguaguau

SEQ ID NO: 648552 - RNA, 19 nt, Artificial Sequence
  Description of Artificial Sequence: Synthetic oligonucleotide
uccgauucucuucauuagc

SEQ ID NO: 648553 - RNA, 19 nt, Artificial Sequence
  Description of Artificial Sequence: Synthetic oligonucleotide
cuuuauaguguuuuguaaa

SEQ ID NO: 648554 - RNA, 19 nt, Artificial Sequence
  Description of Artificial Sequence: Synthetic oligonucleotide
uccuuaagcuacacaguag

SEQ ID NO: 648555 - RNA, 19 nt, Artificial Sequence
  Description of Artificial Sequence: Synthetic oligonucleotide
agaguacaguuuugcaaac

SEQ ID NO: 648556 - RNA, 19 nt, Artificial Sequence
  Description of Artificial Sequence: Synthetic oligonucleotide
ugauucuuucuacuuggac

SEQ ID NO: 648557 - RNA, 19 nt, Artificial Sequence
  Description of Artificial Sequence: Synthetic oligonucleotide
auuaaagcaggagaaggca

SEQ ID NO: 648558 - RNA, 19 nt, Artificial Sequence
  Description of Artificial Sequence: Synthetic oligonucleotide
uacauuuagaagccaggaa

SEQ ID NO: 648559 - RNA, 19 nt, Artificial Sequence
  Description of Artificial Sequence: Synthetic oligonucleotide
gaucacugaaugugcaaug

SEQ ID NO: 648560 - RNA, 19 nt, Artificial Sequence
  Description of Artificial Sequence: Synthetic oligonucleotide
uuuagaagccaggaaacuc

SEQ ID NO: 648561 - RNA, 19 nt, Artificial Sequence
  Description of Artificial Sequence: Synthetic oligonucleotide
acacaaauaugcugaacgu

SEQ ID NO: 648562 - RNA, 19 nt, Artificial Sequence
  Description of Artificial Sequence: Synthetic oligonucleotide
ugaaguaaagggugauugu

SEQ ID NO: 648563 - RNA, 19 nt, Artificial Sequence
  Description of Artificial Sequence: Synthetic oligonucleotide
caaggauucaugaugaacu

SEQ ID NO: 648564 - RNA, 19 nt, Artificial Sequence
  Description of Artificial Sequence: Synthetic oligonucleotide
agcuauauuaaagcaggag

SEQ ID NO: 648565 - RNA, 19 nt, Artificial Sequence
  Description of Artificial Sequence: Synthetic oligonucleotide
uuugcagaguacaguuuug

SEQ ID NO: 648566 - RNA, 19 nt, Artificial Sequence
  Description of Artificial Sequence: Synthetic oligonucleotide
gcuaucaagaggcaguggc

SEQ ID NO: 648567 - RNA, 19 nt, Artificial Sequence
  Description of Artificial Sequence: Synthetic oligonucleotide
uggucgacugucuucaggu

SEQ ID NO: 648568 - RNA, 19 nt, Artificial Sequence
  Description of Artificial Sequence: Synthetic oligonucleotide
cuuuacucaccuaugcuca

SEQ ID NO: 648569 - RNA, 19 nt, Artificial Sequence
  Description of Artificial Sequence: Synthetic oligonucleotide
aaguaaauugugagcaaca

SEQ ID NO: 648570 - RNA, 19 nt, Artificial Sequence
  Description of Artificial Sequence: Synthetic oligonucleotide
aaaucugauuucgccuaac

SEQ ID NO: 648571 - RNA, 19 nt, Artificial Sequence
  Description of Artificial Sequence: Synthetic oligonucleotide
uacuuagucuuuuccaauc

SEQ ID NO: 648572 - RNA, 19 nt, Artificial Sequence
  Description of Artificial Sequence: Synthetic oligonucleotide
ccaaucaaaacaaucuuug

SEQ ID NO: 648573 - RNA, 19 nt, Artificial Sequence
  Description of Artificial Sequence: Synthetic oligonucleotide
aagggcgaauuuaaaauga

SEQ ID NO: 648574 - RNA, 19 nt, Artificial Sequence
  Description of Artificial Sequence: Synthetic oligonucleotide
aggaucaagauauuauaua

SEQ ID NO: 648575 - RNA, 19 nt, Artificial Sequence
  Description of Artificial Sequence: Synthetic oligonucleotide
aggguaccguaucaauacc

SEQ ID NO: 648576 - RNA, 19 nt, Artificial Sequence
  Description of Artificial Sequence: Synthetic oligonucleotide
uuucucgggcuucaaagaa

SEQ ID NO: 648577 - RNA, 19 nt, Artificial Sequence
  Description of Artificial Sequence: Synthetic oligonucleotide
ugcugaacguaauaugaaa

SEQ ID NO: 648578 - RNA, 19 nt, Artificial Sequence
  Description of Artificial Sequence: Synthetic oligonucleotide
uucucaagaugcugaagga

SEQ ID NO: 648579 - RNA, 19 nt, Artificial Sequence
  Description of Artificial Sequence: Synthetic oligonucleotide
aggcaaaugagcuccacaa

SEQ ID NO: 648580 - RNA, 19 nt, Artificial Sequence
  Description of Artificial Sequence: Synthetic oligonucleotide
aagaugcaauauauacacg

SEQ ID NO: 648581 - RNA, 19 nt, Artificial Sequence
  Description of Artificial Sequence: Synthetic oligonucleotide
aggaaacucucucucucuc

SEQ ID NO: 648582 - RNA, 19 nt, Artificial Sequence
  Description of Artificial Sequence: Synthetic oligonucleotide
cauagacaaggauucauga

SEQ ID NO: 648583 - RNA, 19 nt, Artificial Sequence
  Description of Artificial Sequence: Synthetic oligonucleotide
gcaauauauacacggauca

SEQ ID NO: 648584 - RNA, 19 nt, Artificial Sequence
  Description of Artificial Sequence: Synthetic oligonucleotide
aaggcauaaacugcauugu

SEQ ID NO: 648585 - RNA, 19 nt, Artificial Sequence
  Description of Artificial Sequence: Synthetic oligonucleotide
uguuuacauuuaucaauac

SEQ ID NO: 648586 - RNA, 19 nt, Artificial Sequence
  Description of Artificial Sequence: Synthetic oligonucleotide
auagacaaggauucaugau

SEQ ID NO: 648587 - RNA, 19 nt, Artificial Sequence
  Description of Artificial Sequence: Synthetic oligonucleotide
gaaacucucucucucucuc

SEQ ID NO: 648588 - RNA, 19 nt, Artificial Sequence
  Description of Artificial Sequence: Synthetic oligonucleotide
ucgacugucuucagguaca

SEQ ID NO: 648589 - RNA, 19 nt, Artificial Sequence
  Description of Artificial Sequence: Synthetic oligonucleotide
augcaauauauacacggau

SEQ ID NO: 648590 - RNA, 19 nt, Artificial Sequence
  Description of Artificial Sequence: Synthetic oligonucleotide
auacaguacaaggguaccg

SEQ ID NO: 648591 - RNA, 19 nt, Artificial Sequence
  Description of Artificial Sequence: Synthetic oligonucleotide
ugguugagugauuuggguc

SEQ ID NO: 648592 - RNA, 19 nt, Artificial Sequence
  Description of Artificial Sequence: Synthetic oligonucleotide
uuuacucaccuaugcucag

SEQ ID NO: 648593 - RNA, 19 nt, Artificial Sequence
  Description of Artificial Sequence: Synthetic oligonucleotide
ucuuuguuucaaaauucuu

SEQ ID NO: 648594 - RNA, 19 nt, Artificial Sequence
  Description of Artificial Sequence: Synthetic oligonucleotide
uugcaugcgagaauaucaa

SEQ ID NO: 648595 - RNA, 19 nt, Artificial Sequence
  Description of Artificial Sequence: Synthetic oligonucleotide
ugacaucuacuuaaaguuu

SEQ ID NO: 648596 - RNA, 19 nt, Artificial Sequence
  Description of Artificial Sequence: Synthetic oligonucleotide
gcagauaacaauacuauuc

SEQ ID NO: 648597 - RNA, 19 nt, Artificial Sequence
  Description of Artificial Sequence: Synthetic oligonucleotide
cucucucucucuuuuguug

SEQ ID NO: 648598 - RNA, 19 nt, Artificial Sequence
  Description of Artificial Sequence: Synthetic oligonucleotide
uuagccuauuuauuuugaa

SEQ ID NO: 648599 - RNA, 19 nt, Artificial Sequence
  Description of Artificial Sequence: Synthetic oligonucleotide
aacaaggaucaagauauua

SEQ ID NO: 648600 - RNA, 19 nt, Artificial Sequence
  Description of Artificial Sequence: Synthetic oligonucleotide
uaucaacuagucuauuauu

SEQ ID NO: 648601 - RNA, 19 nt, Artificial Sequence
  Description of Artificial Sequence: Synthetic oligonucleotide
augcgagaauaucaacuag

SEQ ID NO: 648602 - RNA, 19 nt, Artificial Sequence
  Description of Artificial Sequence: Synthetic oligonucleotide
uccacuuccgauucucuuc

SEQ ID NO: 648603 - RNA, 19 nt, Artificial Sequence
  Description of Artificial Sequence: Synthetic oligonucleotide
gauuucgccuaacucccug

SEQ ID NO: 648604 - RNA, 19 nt, Artificial Sequence
  Description of Artificial Sequence: Synthetic oligonucleotide
ugagugauuugggucaugu

SEQ ID NO: 648605 - RNA, 19 nt, Artificial Sequence
  Description of Artificial Sequence: Synthetic oligonucleotide
uacucaccuaugcucaggu

SEQ ID NO: 648606 - RNA, 19 nt, Artificial Sequence
  Description of Artificial Sequence: Synthetic oligonucleotide
acaaggaucaagauauuau

SEQ ID NO: 648607 - RNA, 19 nt, Artificial Sequence
  Description of Artificial Sequence: Synthetic oligonucleotide
ugcagcaacgcuggaacag

SEQ ID NO: 648608 - RNA, 19 nt, Artificial Sequence
  Description of Artificial Sequence: Synthetic oligonucleotide
auccaugugaauucugcau

SEQ ID NO: 648609 - RNA, 19 nt, Artificial Sequence
  Description of Artificial Sequence: Synthetic oligonucleotide
ugaaggaagaacgcauaac

SEQ ID NO: 648610 - RNA, 19 nt, Artificial Sequence
  Description of Artificial Sequence: Synthetic oligonucleotide
uguauuuacuuagucuuuu

SEQ ID NO: 648611 - RNA, 19 nt, Artificial Sequence
  Description of Artificial Sequence: Synthetic oligonucleotide
agacaaggauucaugauga

SEQ ID NO: 648612 - RNA, 19 nt, Artificial Sequence
  Description of Artificial Sequence: Synthetic oligonucleotide
gguugagugauuuggguca

SEQ ID NO: 648613 - RNA, 19 nt, Artificial Sequence
  Description of Artificial Sequence: Synthetic oligonucleotide
agcagauaugauauaauaa

SEQ ID NO: 648614 - RNA, 19 nt, Artificial Sequence
  Description of Artificial Sequence: Synthetic oligonucleotide
uaaaauaucuuggcagaua

SEQ ID NO: 648615 - RNA, 19 nt, Artificial Sequence
  Description of Artificial Sequence: Synthetic oligonucleotide
aaacucucucucucucucu

SEQ ID NO: 648616 - RNA, 19 nt, Artificial Sequence
  Description of Artificial Sequence: Synthetic oligonucleotide
acauagacaaggauucaug

SEQ ID NO: 648617 - RNA, 19 nt, Artificial Sequence
  Description of Artificial Sequence: Synthetic oligonucleotide
aagggugauuguuuucaaa

SEQ ID NO: 648618 - RNA, 19 nt, Artificial Sequence
  Description of Artificial Sequence: Synthetic oligonucleotide
gaaaguaaauugugagcaa

SEQ ID NO: 648619 - RNA, 19 nt, Artificial Sequence
  Description of Artificial Sequence: Synthetic oligonucleotide
ugaucacugaaugugcaau

SEQ ID NO: 648620 - RNA, 19 nt, Artificial Sequence
  Description of Artificial Sequence: Synthetic oligonucleotide
cagugauucuuucuacuug

SEQ ID NO: 648621 - RNA, 19 nt, Artificial Sequence
  Description of Artificial Sequence: Synthetic oligonucleotide
ggauucaugaugaacucug

SEQ ID NO: 648622 - RNA, 19 nt, Artificial Sequence
  Description of Artificial Sequence: Synthetic oligonucleotide
acaccaacaagugguuaac

SEQ ID NO: 648623 - RNA, 19 nt, Artificial Sequence
  Description of Artificial Sequence: Synthetic oligonucleotide
aguaaauugugagcaacaa

SEQ ID NO: 648624 - RNA, 19 nt, Artificial Sequence
  Description of Artificial Sequence: Synthetic oligonucleotide
accguaucaauaccuucug

SEQ ID NO: 648625 - RNA, 19 nt, Artificial Sequence
  Description of Artificial Sequence: Synthetic oligonucleotide
aucaacuagucuauuauuu

SEQ ID NO: 648626 - RNA, 19 nt, Artificial Sequence
  Description of Artificial Sequence: Synthetic oligonucleotide
ggaagaacgcauaacacuc

SEQ ID NO: 648627 - RNA, 19 nt, Artificial Sequence
  Description of Artificial Sequence: Synthetic oligonucleotide
uuacucaccuaugcucagg

SEQ ID NO: 648628 - RNA, 19 nt, Artificial Sequence
  Description of Artificial Sequence: Synthetic oligonucleotide
caaagcuauggcuucauua

SEQ ID NO: 648629 - RNA, 19 nt, Artificial Sequence
  Description of Artificial Sequence: Synthetic oligonucleotide
uaucaagaggcaguggcau

SEQ ID NO: 648630 - RNA, 19 nt, Artificial Sequence
  Description of Artificial Sequence: Synthetic oligonucleotide
ucucaagaugcugaaggaa

SEQ ID NO: 648631 - RNA, 19 nt, Artificial Sequence
  Description of Artificial Sequence: Synthetic oligonucleotide
cuacuuaaaguuuuaacuu

SEQ ID NO: 648632 - RNA, 19 nt, Artificial Sequence
  Description of Artificial Sequence: Synthetic oligonucleotide
cagauaacaauacuauucu

SEQ ID NO: 648633 - RNA, 19 nt, Artificial Sequence
  Description of Artificial Sequence: Synthetic oligonucleotide
cuucauuagcugcaauauc

SEQ ID NO: 648634 - RNA, 19 nt, Artificial Sequence
  Description of Artificial Sequence: Synthetic oligonucleotide
uccuuuccaugacuuaaaa

SEQ ID NO: 648635 - RNA, 19 nt, Artificial Sequence
  Description of Artificial Sequence: Synthetic oligonucleotide
caucaaaucaaguuugaau

SEQ ID NO: 648636 - RNA, 19 nt, Artificial Sequence
  Description of Artificial Sequence: Synthetic oligonucleotide
guauuuacuuagucuuuuc

SEQ ID NO: 648637 - RNA, 19 nt, Artificial Sequence
  Description of Artificial Sequence: Synthetic oligonucleotide
aaugugcaaugaaagguua

SEQ ID NO: 648638 - RNA, 19 nt, Artificial Sequence
  Description of Artificial Sequence: Synthetic oligonucleotide
augugcaaugaaagguuac

SEQ ID NO: 648639 - RNA, 19 nt, Artificial Sequence
  Description of Artificial Sequence: Synthetic oligonucleotide
aacucucucucucucucuu

SEQ ID NO: 648640 - RNA, 19 nt, Artificial Sequence
  Description of Artificial Sequence: Synthetic oligonucleotide
gcaacaaggaucaagauau

SEQ ID NO: 648641 - RNA, 19 nt, Artificial Sequence
  Description of Artificial Sequence: Synthetic oligonucleotide
gcgaauuuaaaaugaauua

SEQ ID NO: 648642 - RNA, 19 nt, Artificial Sequence
  Description of Artificial Sequence: Synthetic oligonucleotide
cguaauaugaaaagcauaa

SEQ ID NO: 648643 - RNA, 19 nt, Artificial Sequence
  Description of Artificial Sequence: Synthetic oligonucleotide
aagcuacacaguaguauca

SEQ ID NO: 648644 - RNA, 19 nt, Artificial Sequence
  Description of Artificial Sequence: Synthetic oligonucleotide
gacugauauguugacacaa

SEQ ID NO: 648645 - RNA, 19 nt, Artificial Sequence
  Description of Artificial Sequence: Synthetic oligonucleotide
acaaggguaccguaucaau

SEQ ID NO: 648646 - RNA, 19 nt, Artificial Sequence
  Description of Artificial Sequence: Synthetic oligonucleotide
cuuagccuauuuauuuuga

SEQ ID NO: 648647 - RNA, 19 nt, Artificial Sequence
  Description of Artificial Sequence: Synthetic oligonucleotide
caugcgagaauaucaacua

SEQ ID NO: 648648 - RNA, 19 nt, Artificial Sequence
  Description of Artificial Sequence: Synthetic oligonucleotide
aucacugaaugugcaauga

SEQ ID NO: 648649 - RNA, 19 nt, Artificial Sequence
  Description of Artificial Sequence: Synthetic oligonucleotide
ucgccuaacucccuguauu

SEQ ID NO: 648650 - RNA, 19 nt, Artificial Sequence
  Description of Artificial Sequence: Synthetic oligonucleotide
ugcaugcgagaauaucaac

SEQ ID NO: 648651 - RNA, 19 nt, Artificial Sequence
  Description of Artificial Sequence: Synthetic oligonucleotide
aagauauccuuaagcuaca

SEQ ID NO: 648652 - RNA, 19 nt, Artificial Sequence
  Description of Artificial Sequence: Synthetic oligonucleotide
gguacccuguggcuggucg

SEQ ID NO: 648653 - RNA, 19 nt, Artificial Sequence
  Description of Artificial Sequence: Synthetic oligonucleotide
cuaucaagaggcaguggca

SEQ ID NO: 648654 - RNA, 19 nt, Artificial Sequence
  Description of Artificial Sequence: Synthetic oligonucleotide
ggauucauugaaaaucuga

SEQ ID NO: 648655 - RNA, 19 nt, Artificial Sequence
  Description of Artificial Sequence: Synthetic oligonucleotide
ucucucucucucucuuuug

SEQ ID NO: 648656 - RNA, 19 nt, Artificial Sequence
  Description of Artificial Sequence: Synthetic oligonucleotide
gucuauuauuucaacagcu

SEQ ID NO: 648657 - RNA, 19 nt, Artificial Sequence
  Description of Artificial Sequence: Synthetic oligonucleotide
auaucuuggcagauaacaa

SEQ ID NO: 648658 - RNA, 19 nt, Artificial Sequence
  Description of Artificial Sequence: Synthetic oligonucleotide
agcaacgcuggaacagagc

SEQ ID NO: 648659 - RNA, 19 nt, Artificial Sequence
  Description of Artificial Sequence: Synthetic oligonucleotide
agcuauggcuucauuauau

SEQ ID NO: 648660 - RNA, 19 nt, Artificial Sequence
  Description of Artificial Sequence: Synthetic oligonucleotide
ucgcuggaguguugaaaag

SEQ ID NO: 648661 - RNA, 19 nt, Artificial Sequence
  Description of Artificial Sequence: Synthetic oligonucleotide
guaccguaucaauaccuuc

SEQ ID NO: 648662 - RNA, 19 nt, Artificial Sequence
  Description of Artificial Sequence: Synthetic oligonucleotide
aucgccguagagccagaag

SEQ ID NO: 648663 - RNA, 19 nt, Artificial Sequence
  Description of Artificial Sequence: Synthetic oligonucleotide
gaagaacgcauaacacuca

SEQ ID NO: 648664 - RNA, 19 nt, Artificial Sequence
  Description of Artificial Sequence: Synthetic oligonucleotide
aggauucaugaugaacucu

SEQ ID NO: 648665 - RNA, 19 nt, Artificial Sequence
  Description of Artificial Sequence: Synthetic oligonucleotide
uaacucccuguauuuacuu

SEQ ID NO: 648666 - RNA, 19 nt, Artificial Sequence
  Description of Artificial Sequence: Synthetic oligonucleotide
ccuaacucccuguauuuac

SEQ ID NO: 648667 - RNA, 19 nt, Artificial Sequence
  Description of Artificial Sequence: Synthetic oligonucleotide
guuugcaugcgagaauauc

SEQ ID NO: 648668 - RNA, 19 nt, Artificial Sequence
  Description of Artificial Sequence: Synthetic oligonucleotide
uuucgccuaacucccugua

SEQ ID NO: 648669 - RNA, 19 nt, Artificial Sequence
  Description of Artificial Sequence: Synthetic oligonucleotide
acguaauaugaaaagcaua

SEQ ID NO: 648670 - RNA, 19 nt, Artificial Sequence
  Description of Artificial Sequence: Synthetic oligonucleotide
cuuagucuuuuccaaucaa

SEQ ID NO: 648671 - RNA, 19 nt, Artificial Sequence
  Description of Artificial Sequence: Synthetic oligonucleotide
ucuuucuacuuggacugau

SEQ ID NO: 648672 - RNA, 19 nt, Artificial Sequence
  Description of Artificial Sequence: Synthetic oligonucleotide
cuuugaaccagguggugcu

SEQ ID NO: 648673 - RNA, 19 nt, Artificial Sequence
  Description of Artificial Sequence: Synthetic oligonucleotide
gaaguaaagggugauuguu

SEQ ID NO: 648674 - RNA, 19 nt, Artificial Sequence
  Description of Artificial Sequence: Synthetic oligonucleotide
gagugauuugggucauguc

SEQ ID NO: 648675 - RNA, 19 nt, Artificial Sequence
  Description of Artificial Sequence: Synthetic oligonucleotide
caaggguaccguaucaaua

SEQ ID NO: 648676 - RNA, 19 nt, Artificial Sequence
  Description of Artificial Sequence: Synthetic oligonucleotide
ugauuucgccuaacucccu

SEQ ID NO: 648677 - RNA, 19 nt, Artificial Sequence
  Description of Artificial Sequence: Synthetic oligonucleotide
augaaagguuacauuuaga

SEQ ID NO: 648678 - RNA, 19 nt, Artificial Sequence
  Description of Artificial Sequence: Synthetic oligonucleotide
augaugaacucuguauauu

SEQ ID NO: 648679 - RNA, 19 nt, Artificial Sequence
  Description of Artificial Sequence: Synthetic oligonucleotide
cagcaacgcuggaacagag

SEQ ID NO: 648680 - RNA, 19 nt, Artificial Sequence
  Description of Artificial Sequence: Synthetic oligonucleotide
ucucucucucucuuuuguu

SEQ ID NO: 648681 - RNA, 19 nt, Artificial Sequence
  Description of Artificial Sequence: Synthetic oligonucleotide
cuuaagcuacacaguagua

SEQ ID NO: 648682 - RNA, 19 nt, Artificial Sequence
  Description of Artificial Sequence: Synthetic oligonucleotide
cugaaggaagaacgcauaa

SEQ ID NO: 648683 - RNA, 19 nt, Artificial Sequence
  Description of Artificial Sequence: Synthetic oligonucleotide
acaguacaaggguaccgua

SEQ ID NO: 648684 - RNA, 19 nt, Artificial Sequence
  Description of Artificial Sequence: Synthetic oligonucleotide
cugagguaagcaacuuaga

SEQ ID NO: 648685 - RNA, 19 nt, Artificial Sequence
  Description of Artificial Sequence: Synthetic oligonucleotide
agcuacacaguaguaucaa

SEQ ID NO: 648686 - RNA, 19 nt, Artificial Sequence
  Description of Artificial Sequence: Synthetic oligonucleotide
caauggagauucauuauuu

SEQ ID NO: 648687 - RNA, 19 nt, Artificial Sequence
  Description of Artificial Sequence: Synthetic oligonucleotide
ggcgaauuuaaaaugaauu

SEQ ID NO: 648688 - RNA, 19 nt, Artificial Sequence
  Description of Artificial Sequence: Synthetic oligonucleotide
ucggucgcuggaguguuga

SEQ ID NO: 648689 - RNA, 19 nt, Artificial Sequence
  Description of Artificial Sequence: Synthetic oligonucleotide
caaucugccuaaacugaaa

SEQ ID NO: 648690 - RNA, 19 nt, Artificial Sequence
  Description of Artificial Sequence: Synthetic oligonucleotide
cuuaaucgccguagagcca

SEQ ID NO: 648691 - RNA, 19 nt, Artificial Sequence
  Description of Artificial Sequence: Synthetic oligonucleotide
cucgggcuucaaagaaggc

SEQ ID NO: 648692 - RNA, 19 nt, Artificial Sequence
  Description of Artificial Sequence: Synthetic oligonucleotide
cugccuaaacugaaacaaa

SEQ ID NO: 648693 - RNA, 19 nt, Artificial Sequence
  Description of Artificial Sequence: Synthetic oligonucleotide
cuaacucccuguauuuacu

SEQ ID NO: 648694 - RNA, 19 nt, Artificial Sequence
  Description of Artificial Sequence: Synthetic oligonucleotide
cuuggcagauaacaauacu

SEQ ID NO: 648695 - RNA, 19 nt, Artificial Sequence
  Description of Artificial Sequence: Synthetic oligonucleotide
gcauucaugaucaccagcu

SEQ ID NO: 648696 - RNA, 19 nt, Artificial Sequence
  Description of Artificial Sequence: Synthetic oligonucleotide
guggucggucgcuggagug

SEQ ID NO: 648697 - RNA, 19 nt, Artificial Sequence
  Description of Artificial Sequence: Synthetic oligonucleotide
gccagaagaagaugcaaua

SEQ ID NO: 648698 - RNA, 19 nt, Artificial Sequence
  Description of Artificial Sequence: Synthetic oligonucleotide
ccguaucaauaccuucugg

SEQ ID NO: 648699 - RNA, 19 nt, Artificial Sequence
  Description of Artificial Sequence: Synthetic oligonucleotide
cugguugagugauuugggu

SEQ ID NO: 648700 - RNA, 19 nt, Artificial Sequence
  Description of Artificial Sequence: Synthetic oligonucleotide
uugagugauuugggucaug

SEQ ID NO: 648701 - RNA, 19 nt, Artificial Sequence
  Description of Artificial Sequence: Synthetic oligonucleotide
aaucgccguagagccagaa

SEQ ID NO: 648702 - RNA, 19 nt, Artificial Sequence
  Description of Artificial Sequence: Synthetic oligonucleotide
gcuuguuugcaugcgagaa

SEQ ID NO: 648703 - RNA, 19 nt, Artificial Sequence
  Description of Artificial Sequence: Synthetic oligonucleotide
gcaugcgagaauaucaacu

SEQ ID NO: 648704 - RNA, 19 nt, Artificial Sequence
  Description of Artificial Sequence: Synthetic oligonucleotide
ccuuaagcuacacaguagu

SEQ ID NO: 648705 - RNA, 19 nt, Artificial Sequence
  Description of Artificial Sequence: Synthetic oligonucleotide
acucucucucucucucuuu

SEQ ID NO: 648706 - RNA, 19 nt, Artificial Sequence
  Description of Artificial Sequence: Synthetic oligonucleotide
gcaauggagauucauuauu

SEQ ID NO: 648707 - RNA, 19 nt, Artificial Sequence
  Description of Artificial Sequence: Synthetic oligonucleotide
acggaucaccauccuggaa

SEQ ID NO: 648708 - RNA, 19 nt, Artificial Sequence
  Description of Artificial Sequence: Synthetic oligonucleotide
guacccuguggcuggucga

SEQ ID NO: 648709 - RNA, 19 nt, Artificial Sequence
  Description of Artificial Sequence: Synthetic oligonucleotide
cguaucaauaccuucuggu

SEQ ID NO: 648710 - RNA, 19 nt, Artificial Sequence
  Description of Artificial Sequence: Synthetic oligonucleotide
cucucucucucucuuuugu

SEQ ID NO: 648711 - RNA, 19 nt, Artificial Sequence
  Description of Artificial Sequence: Synthetic oligonucleotide
cuuguuugcaugcgagaau

SEQ ID NO: 648712 - RNA, 19 nt, Artificial Sequence
  Description of Artificial Sequence: Synthetic oligonucleotide
gaucaccauccuggaaaca

SEQ ID NO: 648713 - RNA, 19 nt, Artificial Sequence
  Description of Artificial Sequence: Synthetic oligonucleotide
acucaccuaugcucagguu

SEQ ID NO: 648714 - RNA, 19 nt, Artificial Sequence
  Description of Artificial Sequence: Synthetic oligonucleotide
gcacguacuguggaguuuc

SEQ ID NO: 648715 - RNA, 19 nt, Artificial Sequence
  Description of Artificial Sequence: Synthetic oligonucleotide
caggaaacucucucucucu

SEQ ID NO: 648716 - RNA, 19 nt, Artificial Sequence
  Description of Artificial Sequence: Synthetic oligonucleotide
caguacaaggguaccguau

SEQ ID NO: 648717 - RNA, 19 nt, Artificial Sequence
  Description of Artificial Sequence: Synthetic oligonucleotide
gguggugcugucaagccua

SEQ ID NO: 648718 - RNA, 19 nt, Artificial Sequence
  Description of Artificial Sequence: Synthetic oligonucleotide
guacugggauucauugaaa

SEQ ID NO: 648719 - RNA, 19 nt, Artificial Sequence
  Description of Artificial Sequence: Synthetic oligonucleotide
acgcuggaacagagcaagg

SEQ ID NO: 648720 - RNA, 19 nt, Artificial Sequence
  Description of Artificial Sequence: Synthetic oligonucleotide
ggaaacucucucucucucu

SEQ ID NO: 648721 - RNA, 19 nt, Artificial Sequence
  Description of Artificial Sequence: Synthetic oligonucleotide
cccuguauuuacuuagucu

SEQ ID NO: 648722 - RNA, 19 nt, Artificial Sequence
  Description of Artificial Sequence: Synthetic oligonucleotide
cuuuguaagaagggcgaau

SEQ ID NO: 648723 - RNA, 19 nt, Artificial Sequence
  Description of Artificial Sequence: Synthetic oligonucleotide
uucauucugcaggcacgua

SEQ ID NO: 648724 - RNA, 19 nt, Artificial Sequence
  Description of Artificial Sequence: Synthetic oligonucleotide
ggcagauaacaauacuauu

SEQ ID NO: 648725 - RNA, 19 nt, Artificial Sequence
  Description of Artificial Sequence: Synthetic oligonucleotide
ccgauucucuucauuagcu

SEQ ID NO: 648726 - RNA, 19 nt, Artificial Sequence
  Description of Artificial Sequence: Synthetic oligonucleotide
acacucaagcuugcugcuu

SEQ ID NO: 648727 - RNA, 19 nt, Artificial Sequence
  Description of Artificial Sequence: Synthetic oligonucleotide
ccaaauugccaagucugga

SEQ ID NO: 648728 - RNA, 19 nt, Artificial Sequence
  Description of Artificial Sequence: Synthetic oligonucleotide
gcagcaacgcuggaacaga

SEQ ID NO: 648729 - RNA, 19 nt, Artificial Sequence
  Description of Artificial Sequence: Synthetic oligonucleotide
gccugagcucuuuguaaga

SEQ ID NO: 648730 - RNA, 19 nt, Artificial Sequence
  Description of Artificial Sequence: Synthetic oligonucleotide
agcaugccagugauucuuu

SEQ ID NO: 648731 - RNA, 19 nt, Artificial Sequence
  Description of Artificial Sequence: Synthetic oligonucleotide
ggguaccguaucaauaccu

SEQ ID NO: 648732 - RNA, 19 nt, Artificial Sequence
  Description of Artificial Sequence: Synthetic oligonucleotide
acguacuguggaguuucuu

SEQ ID NO: 648733 - RNA, 19 nt, Artificial Sequence
  Description of Artificial Sequence: Synthetic oligonucleotide
ggcaaaugagcuccacaau

SEQ ID NO: 648734 - RNA, 19 nt, Artificial Sequence
  Description of Artificial Sequence: Synthetic oligonucleotide
cucucucucucucucuuuu

SEQ ID NO: 648735 - RNA, 19 nt, Artificial Sequence
  Description of Artificial Sequence: Synthetic oligonucleotide
gagcuuguggucggucgcu

SEQ ID NO: 648736 - RNA, 19 nt, Artificial Sequence
  Description of Artificial Sequence: Synthetic oligonucleotide
cuacuuggacugauauguu

SEQ ID NO: 648737 - RNA, 19 nt, Artificial Sequence
  Description of Artificial Sequence: Synthetic oligonucleotide
gguaccguaucaauaccuu

SEQ ID NO: 648738 - RNA, 19 nt, Artificial Sequence
  Description of Artificial Sequence: Synthetic oligonucleotide
ggucgacugucuucaggua

SEQ ID NO: 648739 - RNA, 19 nt, Artificial Sequence
  Description of Artificial Sequence: Synthetic oligonucleotide
gggcgaauuuaaaaugaau

SEQ ID NO: 648740 - RNA, 19 nt, Artificial Sequence
  Description of Artificial Sequence: Synthetic oligonucleotide
ccuuuccaugacuuaaaau

SEQ ID NO: 648741 - RNA, 19 nt, Artificial Sequence
  Description of Artificial Sequence: Synthetic oligonucleotide
ccccacgguacugggauuc

SEQ ID NO: 648742 - RNA, 19 nt, Artificial Sequence
  Description of Artificial Sequence: Synthetic oligonucleotide
cacguacuguggaguuucu

SEQ ID NO: 648743 - RNA, 19 nt, Artificial Sequence
  Description of Artificial Sequence: Synthetic oligonucleotide
gccuaacucccuguauuua

SEQ ID NO: 648744 - RNA, 19 nt, Artificial Sequence
  Description of Artificial Sequence: Synthetic oligonucleotide
ggucggucgcuggaguguu

SEQ ID NO: 648745 - RNA, 19 nt, Artificial Sequence
  Description of Artificial Sequence: Synthetic oligonucleotide
cccacgguacugggauuca

SEQ ID NO: 648746 - RNA, 19 nt, Artificial Sequence
  Description of Artificial Sequence: Synthetic oligonucleotide
ggguacccuguggcugguc

SEQ ID NO: 648747 - RNA, 19 nt, Artificial Sequence
  Description of Artificial Sequence: Synthetic oligonucleotide
cgccuaacucccuguauuu

SEQ ID NO: 648748 - RNA, 19 nt, Artificial Sequence
  Description of Artificial Sequence: Synthetic oligonucleotide
aaugcuagcacuguguagc

SEQ ID NO: 648749 - RNA, 19 nt, Artificial Sequence
  Description of Artificial Sequence: Synthetic oligonucleotide
uuugggaccgaccaaaucc

SEQ ID NO: 648750 - RNA, 19 nt, Artificial Sequence
  Description of Artificial Sequence: Synthetic oligonucleotide
aaugucuuaaaguucuuca

SEQ ID NO: 648751 - RNA, 19 nt, Artificial Sequence
  Description of Artificial Sequence: Synthetic oligonucleotide
uuggagaucgagcagauca

SEQ ID NO: 648752 - RNA, 19 nt, Artificial Sequence
  Description of Artificial Sequence: Synthetic oligonucleotide
uuuauagggugacaguucc

SEQ ID NO: 648753 - RNA, 19 nt, Artificial Sequence
  Description of Artificial Sequence: Synthetic oligonucleotide
cuagcucagaccaucaucc

SEQ ID NO: 648754 - RNA, 19 nt, Artificial Sequence
  Description of Artificial Sequence: Synthetic oligonucleotide
aggcauagggccuacagac

SEQ ID NO: 648755 - RNA, 19 nt, Artificial Sequence
  Description of Artificial Sequence: Synthetic oligonucleotide
agacaggggacacacaugg

SEQ ID NO: 648756 - RNA, 19 nt, Artificial Sequence
  Description of Artificial Sequence: Synthetic oligonucleotide
agugacuucaccucaaagu

SEQ ID NO: 648757 - RNA, 19 nt, Artificial Sequence
  Description of Artificial Sequence: Synthetic oligonucleotide
guagguaccacucugguca

SEQ ID NO: 648758 - RNA, 19 nt, Artificial Sequence
  Description of Artificial Sequence: Synthetic oligonucleotide
uacaauaagaccagccugu

SEQ ID NO: 648759 - RNA, 19 nt, Artificial Sequence
  Description of Artificial Sequence: Synthetic oligonucleotide
ucgaacaaccuguacacag

SEQ ID NO: 648760 - RNA, 19 nt, Artificial Sequence
  Description of Artificial Sequence: Synthetic oligonucleotide
cugugcacagguaagagag

SEQ ID NO: 648761 - RNA, 19 nt, Artificial Sequence
  Description of Artificial Sequence: Synthetic oligonucleotide
uugcguaagucccagagcu

SEQ ID NO: 648762 - RNA, 19 nt, Artificial Sequence
  Description of Artificial Sequence: Synthetic oligonucleotide
aucguguugguacagagca

SEQ ID NO: 648763 - RNA, 19 nt, Artificial Sequence
  Description of Artificial Sequence: Synthetic oligonucleotide
cuugacugaagagucaucg

SEQ ID NO: 648764 - RNA, 19 nt, Artificial Sequence
  Description of Artificial Sequence: Synthetic oligonucleotide
agagcugaaacagagcagg

SEQ ID NO: 648765 - RNA, 19 nt, Artificial Sequence
  Description of Artificial Sequence: Synthetic oligonucleotide
cucaguacucuuaucaaag

SEQ ID NO: 648766 - RNA, 19 nt, Artificial Sequence
  Description of Artificial Sequence: Synthetic oligonucleotide
aauugggugagcaacuuug

SEQ ID NO: 648767 - RNA, 19 nt, Artificial Sequence
  Description of Artificial Sequence: Synthetic oligonucleotide
aauuugaggcuccugucca

SEQ ID NO: 648768 - RNA, 19 nt, Artificial Sequence
  Description of Artificial Sequence: Synthetic oligonucleotide
aacucuaacccacuacuga

SEQ ID NO: 648769 - RNA, 19 nt, Artificial Sequence
  Description of Artificial Sequence: Synthetic oligonucleotide
uuuaagaguggccaggauu

SEQ ID NO: 648770 - RNA, 19 nt, Artificial Sequence
  Description of Artificial Sequence: Synthetic oligonucleotide
acgugaaugccccugcccc

SEQ ID NO: 648771 - RNA, 19 nt, Artificial Sequence
  Description of Artificial Sequence: Synthetic oligonucleotide
uuauccagcugcaaugucu

SEQ ID NO: 648772 - RNA, 19 nt, Artificial Sequence
  Description of Artificial Sequence: Synthetic oligonucleotide
aaggcgauacugguaaugg

SEQ ID NO: 648773 - RNA, 19 nt, Artificial Sequence
  Description of Artificial Sequence: Synthetic oligonucleotide
ucggacgcggguuagacag

SEQ ID NO: 648774 - RNA, 19 nt, Artificial Sequence
  Description of Artificial Sequence: Synthetic oligonucleotide
uuguuauccagcugcaaug

SEQ ID NO: 648775 - RNA, 19 nt, Artificial Sequence
  Description of Artificial Sequence: Synthetic oligonucleotide
gaugagcccaucaggaugg

SEQ ID NO: 648776 - RNA, 19 nt, Artificial Sequence
  Description of Artificial Sequence: Synthetic oligonucleotide
caacucugagcauuuauag

SEQ ID NO: 648777 - RNA, 19 nt, Artificial Sequence
  Description of Artificial Sequence: Synthetic oligonucleotide
gaagcgaugaacuuggcgu

SEQ ID NO: 648778 - RNA, 19 nt, Artificial Sequence
  Description of Artificial Sequence: Synthetic oligonucleotide
agcauuuauagggugacag

SEQ ID NO: 648779 - RNA, 19 nt, Artificial Sequence
  Description of Artificial Sequence: Synthetic oligonucleotide
acucuaacccacuacugag

SEQ ID NO: 648780 - RNA, 19 nt, Artificial Sequence
  Description of Artificial Sequence: Synthetic oligonucleotide
auugguacgcuccuucaag

SEQ ID NO: 648781 - RNA, 19 nt, Artificial Sequence
  Description of Artificial Sequence: Synthetic oligonucleotide
ugauagucgcaucugggga

SEQ ID NO: 648782 - RNA, 19 nt, Artificial Sequence
  Description of Artificial Sequence: Synthetic oligonucleotide
guacaauaagaccagccug

SEQ ID NO: 648783 - RNA, 19 nt, Artificial Sequence
  Description of Artificial Sequence: Synthetic oligonucleotide
gaacucaggagauagucuc

SEQ ID NO: 648784 - RNA, 19 nt, Artificial Sequence
  Description of Artificial Sequence: Synthetic oligonucleotide
auaaucucaggggucauuc

SEQ ID NO: 648785 - RNA, 19 nt, Artificial Sequence
  Description of Artificial Sequence: Synthetic oligonucleotide
aauugugagaaggcauagg

SEQ ID NO: 648786 - RNA, 19 nt, Artificial Sequence
  Description of Artificial Sequence: Synthetic oligonucleotide
cugauagucgcaucugggg

SEQ ID NO: 648787 - RNA, 19 nt, Artificial Sequence
  Description of Artificial Sequence: Synthetic oligonucleotide
ugggugagcaacuuugaug

SEQ ID NO: 648788 - RNA, 19 nt, Artificial Sequence
  Description of Artificial Sequence: Synthetic oligonucleotide
gaucgagcagaucagggac

SEQ ID NO: 648789 - RNA, 19 nt, Artificial Sequence
  Description of Artificial Sequence: Synthetic oligonucleotide
uggggaugcagaaaacacc

SEQ ID NO: 648790 - RNA, 19 nt, Artificial Sequence
  Description of Artificial Sequence: Synthetic oligonucleotide
uccugauagucgcaucugg

SEQ ID NO: 648791 - RNA, 19 nt, Artificial Sequence
  Description of Artificial Sequence: Synthetic oligonucleotide
auagggugacaguuccucc

SEQ ID NO: 648792 - RNA, 19 nt, Artificial Sequence
  Description of Artificial Sequence: Synthetic oligonucleotide
agagcuugacugaagaguc

SEQ ID NO: 648793 - RNA, 19 nt, Artificial Sequence
  Description of Artificial Sequence: Synthetic oligonucleotide
aacuagaucacugcuuaca

SEQ ID NO: 648794 - RNA, 19 nt, Artificial Sequence
  Description of Artificial Sequence: Synthetic oligonucleotide
acgcggguuagacagcugc

SEQ ID NO: 648795 - RNA, 19 nt, Artificial Sequence
  Description of Artificial Sequence: Synthetic oligonucleotide
agguacaauaagaccagcc

SEQ ID NO: 648796 - RNA, 19 nt, Artificial Sequence
  Description of Artificial Sequence: Synthetic oligonucleotide
ugagcaacuuugaugucga

SEQ ID NO: 648797 - RNA, 19 nt, Artificial Sequence
  Description of Artificial Sequence: Synthetic oligonucleotide
uuagagacaggggacacac

SEQ ID NO: 648798 - RNA, 19 nt, Artificial Sequence
  Description of Artificial Sequence: Synthetic oligonucleotide
cucguacacaugauuagag

SEQ ID NO: 648799 - RNA, 19 nt, Artificial Sequence
  Description of Artificial Sequence: Synthetic oligonucleotide
gcaacuuugaugucgauga

SEQ ID NO: 648800 - RNA, 19 nt, Artificial Sequence
  Description of Artificial Sequence: Synthetic oligonucleotide
acuucguuggagaucgagc

SEQ ID NO: 648801 - RNA, 19 nt, Artificial Sequence
  Description of Artificial Sequence: Synthetic oligonucleotide
aaugacgugaaugccccug

SEQ ID NO: 648802 - RNA, 19 nt, Artificial Sequence
  Description of Artificial Sequence: Synthetic oligonucleotide
aggaugaaacaccacgcug

SEQ ID NO: 648803 - RNA, 19 nt, Artificial Sequence
  Description of Artificial Sequence: Synthetic oligonucleotide
auuuauagggugacaguuc

SEQ ID NO: 648804 - RNA, 19 nt, Artificial Sequence
  Description of Artificial Sequence: Synthetic oligonucleotide
aguugaagcgaugaacuug

SEQ ID NO: 648805 - RNA, 19 nt, Artificial Sequence
  Description of Artificial Sequence: Synthetic oligonucleotide
aacaccacgcuggugaccu

SEQ ID NO: 648806 - RNA, 19 nt, Artificial Sequence
  Description of Artificial Sequence: Synthetic oligonucleotide
uggagaucgagcagaucag

SEQ ID NO: 648807 - RNA, 19 nt, Artificial Sequence
  Description of Artificial Sequence: Synthetic oligonucleotide
aguggucaggccacuaugc

SEQ ID NO: 648808 - RNA, 19 nt, Artificial Sequence
  Description of Artificial Sequence: Synthetic oligonucleotide
gaaugcuagcacuguguag

SEQ ID NO: 648809 - RNA, 19 nt, Artificial Sequence
  Description of Artificial Sequence: Synthetic oligonucleotide
gagacgggcaaugacucgg

SEQ ID NO: 648810 - RNA, 19 nt, Artificial Sequence
  Description of Artificial Sequence: Synthetic oligonucleotide
gguauggccuuuaagagug

SEQ ID NO: 648811 - RNA, 19 nt, Artificial Sequence
  Description of Artificial Sequence: Synthetic oligonucleotide
gauaggaucugugccauuc

SEQ ID NO: 648812 - RNA, 19 nt, Artificial Sequence
  Description of Artificial Sequence: Synthetic oligonucleotide
ucguacacaugauuagaga

SEQ ID NO: 648813 - RNA, 19 nt, Artificial Sequence
  Description of Artificial Sequence: Synthetic oligonucleotide
aucaaagacaacaacguuu

SEQ ID NO: 648814 - RNA, 19 nt, Artificial Sequence
  Description of Artificial Sequence: Synthetic oligonucleotide
ugguauggccuuuaagagu

SEQ ID NO: 648815 - RNA, 19 nt, Artificial Sequence
  Description of Artificial Sequence: Synthetic oligonucleotide
gguaauggggccagaaugg

SEQ ID NO: 648816 - RNA, 19 nt, Artificial Sequence
  Description of Artificial Sequence: Synthetic oligonucleotide
cuucguuggagaucgagca

SEQ ID NO: 648817 - RNA, 19 nt, Artificial Sequence
  Description of Artificial Sequence: Synthetic oligonucleotide
acuagaucacugcuuacaa

SEQ ID NO: 648818 - RNA, 19 nt, Artificial Sequence
  Description of Artificial Sequence: Synthetic oligonucleotide
ugcaguugcuggcgaaggg

SEQ ID NO: 648819 - RNA, 19 nt, Artificial Sequence
  Description of Artificial Sequence: Synthetic oligonucleotide
aggagauagucuccaguag

SEQ ID NO: 648820 - RNA, 19 nt, Artificial Sequence
  Description of Artificial Sequence: Synthetic oligonucleotide
uggcguggugaccaaaggc

SEQ ID NO: 648821 - RNA, 19 nt, Artificial Sequence
  Description of Artificial Sequence: Synthetic oligonucleotide
uguugguacagagcauggg

SEQ ID NO: 648822 - RNA, 19 nt, Artificial Sequence
  Description of Artificial Sequence: Synthetic oligonucleotide
ucggcaggcagcaucgugu

SEQ ID NO: 648823 - RNA, 19 nt, Artificial Sequence
  Description of Artificial Sequence: Synthetic oligonucleotide
ugagcauuuauagggugac

SEQ ID NO: 648824 - RNA, 19 nt, Artificial Sequence
  Description of Artificial Sequence: Synthetic oligonucleotide
gaacaaccuguacacagga

SEQ ID NO: 648825 - RNA, 19 nt, Artificial Sequence
  Description of Artificial Sequence: Synthetic oligonucleotide
cuuggcguggugaccaaag

SEQ ID NO: 648826 - RNA, 19 nt, Artificial Sequence
  Description of Artificial Sequence: Synthetic oligonucleotide
agaccagaaugaaaugacg

SEQ ID NO: 648827 - RNA, 19 nt, Artificial Sequence
  Description of Artificial Sequence: Synthetic oligonucleotide
uucucgagcagcagugacu

SEQ ID NO: 648828 - RNA, 19 nt, Artificial Sequence
  Description of Artificial Sequence: Synthetic oligonucleotide
uguuauccagcugcaaugu

SEQ ID NO: 648829 - RNA, 19 nt, Artificial Sequence
  Description of Artificial Sequence: Synthetic oligonucleotide
ggcgauacugguaaugggg

SEQ ID NO: 648830 - RNA, 19 nt, Artificial Sequence
  Description of Artificial Sequence: Synthetic oligonucleotide
guugguguccgaaggacag

SEQ ID NO: 648831 - RNA, 19 nt, Artificial Sequence
  Description of Artificial Sequence: Synthetic oligonucleotide
cuugcguaagucccagagc

SEQ ID NO: 648832 - RNA, 19 nt, Artificial Sequence
  Description of Artificial Sequence: Synthetic oligonucleotide
caugggaugccaccugccg

SEQ ID NO: 648833 - RNA, 19 nt, Artificial Sequence
  Description of Artificial Sequence: Synthetic oligonucleotide
agggccuacagacuguaga

SEQ ID NO: 648834 - RNA, 19 nt, Artificial Sequence
  Description of Artificial Sequence: Synthetic oligonucleotide
gaucagugacuucaccuca

SEQ ID NO: 648835 - RNA, 19 nt, Artificial Sequence
  Description of Artificial Sequence: Synthetic oligonucleotide
ugagacgggcaaugacucg

SEQ ID NO: 648836 - RNA, 19 nt, Artificial Sequence
  Description of Artificial Sequence: Synthetic oligonucleotide
gagucaucggcugcugugg

SEQ ID NO: 648837 - RNA, 19 nt, Artificial Sequence
  Description of Artificial Sequence: Synthetic oligonucleotide
accuuggugagcacgcgcc

SEQ ID NO: 648838 - RNA, 19 nt, Artificial Sequence
  Description of Artificial Sequence: Synthetic oligonucleotide
gccacuaugcucuguaaag

SEQ ID NO: 648839 - RNA, 19 nt, Artificial Sequence
  Description of Artificial Sequence: Synthetic oligonucleotide
gauacugguaauggggcca

SEQ ID NO: 648840 - RNA, 19 nt, Artificial Sequence
  Description of Artificial Sequence: Synthetic oligonucleotide
caucguguugguacagagc

SEQ ID NO: 648841 - RNA, 19 nt, Artificial Sequence
  Description of Artificial Sequence: Synthetic oligonucleotide
agcaacuuugaugucgaug

SEQ ID NO: 648842 - RNA, 19 nt, Artificial Sequence
  Description of Artificial Sequence: Synthetic oligonucleotide
agauauagaucuggacauc

SEQ ID NO: 648843 - RNA, 19 nt, Artificial Sequence
  Description of Artificial Sequence: Synthetic oligonucleotide
uggcgaagggugaagcugu

SEQ ID NO: 648844 - RNA, 19 nt, Artificial Sequence
  Description of Artificial Sequence: Synthetic oligonucleotide
ugaagagucaucggcugcu

SEQ ID NO: 648845 - RNA, 19 nt, Artificial Sequence
  Description of Artificial Sequence: Synthetic oligonucleotide
gacgugaaugccccugccc

SEQ ID NO: 648846 - RNA, 19 nt, Artificial Sequence
  Description of Artificial Sequence: Synthetic oligonucleotide
agaccucuccuccuaaggu

SEQ ID NO: 648847 - RNA, 19 nt, Artificial Sequence
  Description of Artificial Sequence: Synthetic oligonucleotide
ugagccgccgcucguacac

SEQ ID NO: 648848 - RNA, 19 nt, Artificial Sequence
  Description of Artificial Sequence: Synthetic oligonucleotide
uugguacgcuccuucaagu

SEQ ID NO: 648849 - RNA, 19 nt, Artificial Sequence
  Description of Artificial Sequence: Synthetic oligonucleotide
aggcgauacugguaauggg

SEQ ID NO: 648850 - RNA, 19 nt, Artificial Sequence
  Description of Artificial Sequence: Synthetic oligonucleotide
ucuuacgcuccgugguuag

SEQ ID NO: 648851 - RNA, 19 nt, Artificial Sequence
  Description of Artificial Sequence: Synthetic oligonucleotide
gacucggcaggcagcaucg

SEQ ID NO: 648852 - RNA, 19 nt, Artificial Sequence
  Description of Artificial Sequence: Synthetic oligonucleotide
auggccuuuaagaguggcc

SEQ ID NO: 648853 - RNA, 19 nt, Artificial Sequence
  Description of Artificial Sequence: Synthetic oligonucleotide
cagaccucuccuccuaagg

SEQ ID NO: 648854 - RNA, 19 nt, Artificial Sequence
  Description of Artificial Sequence: Synthetic oligonucleotide
gaucccaggaaugcuagca

SEQ ID NO: 648855 - RNA, 19 nt, Artificial Sequence
  Description of Artificial Sequence: Synthetic oligonucleotide
caacucuaacccacuacug

SEQ ID NO: 648856 - RNA, 19 nt, Artificial Sequence
  Description of Artificial Sequence: Synthetic oligonucleotide
ugcauggauagcaguguuc

SEQ ID NO: 648857 - RNA, 19 nt, Artificial Sequence
  Description of Artificial Sequence: Synthetic oligonucleotide
acgggcaaugacucggcag

SEQ ID NO: 648858 - RNA, 19 nt, Artificial Sequence
  Description of Artificial Sequence: Synthetic oligonucleotide
gguacgcuccuucaagucc

SEQ ID NO: 648859 - RNA, 19 nt, Artificial Sequence
  Description of Artificial Sequence: Synthetic oligonucleotide
gauauagaucuggacaucu

SEQ ID NO: 648860 - RNA, 19 nt, Artificial Sequence
  Description of Artificial Sequence: Synthetic oligonucleotide
cguacacaugauuagagac

SEQ ID NO: 648861 - RNA, 19 nt, Artificial Sequence
  Description of Artificial Sequence: Synthetic oligonucleotide
uacagagcaugggacagcu

SEQ ID NO: 648862 - RNA, 19 nt, Artificial Sequence
  Description of Artificial Sequence: Synthetic oligonucleotide
uuauagggugacaguuccu

SEQ ID NO: 648863 - RNA, 19 nt, Artificial Sequence
  Description of Artificial Sequence: Synthetic oligonucleotide
ggaagucucaucugucacc

SEQ ID NO: 648864 - RNA, 19 nt, Artificial Sequence
  Description of Artificial Sequence: Synthetic oligonucleotide
gauuagagacaggggacac

SEQ ID NO: 648865 - RNA, 19 nt, Artificial Sequence
  Description of Artificial Sequence: Synthetic oligonucleotide
uccuucgugagacgggcaa

SEQ ID NO: 648866 - RNA, 19 nt, Artificial Sequence
  Description of Artificial Sequence: Synthetic oligonucleotide
gaccucuccuccuaagguc

SEQ ID NO: 648867 - RNA, 19 nt, Artificial Sequence
  Description of Artificial Sequence: Synthetic oligonucleotide
agaguagccagagcuucuc

SEQ ID NO: 648868 - RNA, 19 nt, Artificial Sequence
  Description of Artificial Sequence: Synthetic oligonucleotide
ggcucgaacaaccuguaca

SEQ ID NO: 648869 - RNA, 19 nt, Artificial Sequence
  Description of Artificial Sequence: Synthetic oligonucleotide
gcauagggccuacagacug

SEQ ID NO: 648870 - RNA, 19 nt, Artificial Sequence
  Description of Artificial Sequence: Synthetic oligonucleotide
cagaaugaaaugacgugaa

SEQ ID NO: 648871 - RNA, 19 nt, Artificial Sequence
  Description of Artificial Sequence: Synthetic oligonucleotide
ccugauagucgcaucuggg

SEQ ID NO: 648872 - RNA, 19 nt, Artificial Sequence
  Description of Artificial Sequence: Synthetic oligonucleotide
uuugcucaguacucuuauc

SEQ ID NO: 648873 - RNA, 19 nt, Artificial Sequence
  Description of Artificial Sequence: Synthetic oligonucleotide
aggcccaguacugaucauc

SEQ ID NO: 648874 - RNA, 19 nt, Artificial Sequence
  Description of Artificial Sequence: Synthetic oligonucleotide
ggcguggugaccaaaggcc

SEQ ID NO: 648875 - RNA, 19 nt, Artificial Sequence
  Description of Artificial Sequence: Synthetic oligonucleotide
agguagguaccacucuggu

SEQ ID NO: 648876 - RNA, 19 nt, Artificial Sequence
  Description of Artificial Sequence: Synthetic oligonucleotide
cuucucgagcagcagugac

SEQ ID NO: 648877 - RNA, 19 nt, Artificial Sequence
  Description of Artificial Sequence: Synthetic oligonucleotide
acaugggaugccaccugcc

SEQ ID NO: 648878 - RNA, 19 nt, Artificial Sequence
  Description of Artificial Sequence: Synthetic oligonucleotide
auauagaucuggacaucug

SEQ ID NO: 648879 - RNA, 19 nt, Artificial Sequence
  Description of Artificial Sequence: Synthetic oligonucleotide
cugccagucgccucacagc

SEQ ID NO: 648880 - RNA, 19 nt, Artificial Sequence
  Description of Artificial Sequence: Synthetic oligonucleotide
uguuugggaccgaccaaau

SEQ ID NO: 648881 - RNA, 19 nt, Artificial Sequence
  Description of Artificial Sequence: Synthetic oligonucleotide
uuacgcuccgugguuagaa

SEQ ID NO: 648882 - RNA, 19 nt, Artificial Sequence
  Description of Artificial Sequence: Synthetic oligonucleotide
acaacucugagcauuuaua

SEQ ID NO: 648883 - RNA, 19 nt, Artificial Sequence
  Description of Artificial Sequence: Synthetic oligonucleotide
gcuugggccgaauugggug

SEQ ID NO: 648884 - RNA, 19 nt, Artificial Sequence
  Description of Artificial Sequence: Synthetic oligonucleotide
ugguacgcuccuucaaguc

SEQ ID NO: 648885 - RNA, 19 nt, Artificial Sequence
  Description of Artificial Sequence: Synthetic oligonucleotide
cauguccguucccuggggc

SEQ ID NO: 648886 - RNA, 19 nt, Artificial Sequence
  Description of Artificial Sequence: Synthetic oligonucleotide
auacugguaauggggccag

SEQ ID NO: 648887 - RNA, 19 nt, Artificial Sequence
  Description of Artificial Sequence: Synthetic oligonucleotide
gauagcaguguuccaugua

SEQ ID NO: 648888 - RNA, 19 nt, Artificial Sequence
  Description of Artificial Sequence: Synthetic oligonucleotide
acgcuccgugguuagaaca

SEQ ID NO: 648889 - RNA, 19 nt, Artificial Sequence
  Description of Artificial Sequence: Synthetic oligonucleotide
gcaucguguugguacagag

SEQ ID NO: 648890 - RNA, 19 nt, Artificial Sequence
  Description of Artificial Sequence: Synthetic oligonucleotide
cuaacccacuacugagaug

SEQ ID NO: 648891 - RNA, 19 nt, Artificial Sequence
  Description of Artificial Sequence: Synthetic oligonucleotide
caacuuugaugucgaugag

SEQ ID NO: 648892 - RNA, 19 nt, Artificial Sequence
  Description of Artificial Sequence: Synthetic oligonucleotide
gaugaaacaccacgcuggu

SEQ ID NO: 648893 - RNA, 19 nt, Artificial Sequence
  Description of Artificial Sequence: Synthetic oligonucleotide
ggguuagacagcugcccgg

SEQ ID NO: 648894 - RNA, 19 nt, Artificial Sequence
  Description of Artificial Sequence: Synthetic oligonucleotide
ggggaugcagaaaacacca

SEQ ID NO: 648895 - RNA, 19 nt, Artificial Sequence
  Description of Artificial Sequence: Synthetic oligonucleotide
cuugggccgaauuggguga

SEQ ID NO: 648896 - RNA, 19 nt, Artificial Sequence
  Description of Artificial Sequence: Synthetic oligonucleotide
cagcaugacugcaucccac

SEQ ID NO: 648897 - RNA, 19 nt, Artificial Sequence
  Description of Artificial Sequence: Synthetic oligonucleotide
aggaucccaggaaugcuag

SEQ ID NO: 648898 - RNA, 19 nt, Artificial Sequence
  Description of Artificial Sequence: Synthetic oligonucleotide
gagguacaauaagaccagc

SEQ ID NO: 648899 - RNA, 19 nt, Artificial Sequence
  Description of Artificial Sequence: Synthetic oligonucleotide
ugcuggcgaagggugaagc

SEQ ID NO: 648900 - RNA, 19 nt, Artificial Sequence
  Description of Artificial Sequence: Synthetic oligonucleotide
ugggaccgaccaaauccug

SEQ ID NO: 648901 - RNA, 19 nt, Artificial Sequence
  Description of Artificial Sequence: Synthetic oligonucleotide
agcuugacugaagagucau

SEQ ID NO: 648902 - RNA, 19 nt, Artificial Sequence
  Description of Artificial Sequence: Synthetic oligonucleotide
cacuucguuggagaucgag

SEQ ID NO: 648903 - RNA, 19 nt, Artificial Sequence
  Description of Artificial Sequence: Synthetic oligonucleotide
ggagaucgagcagaucagg

SEQ ID NO: 648904 - RNA, 19 nt, Artificial Sequence
  Description of Artificial Sequence: Synthetic oligonucleotide
cugugagcuuggcacggcc

SEQ ID NO: 648905 - RNA, 19 nt, Artificial Sequence
  Description of Artificial Sequence: Synthetic oligonucleotide
agacgggcaaugacucggc

SEQ ID NO: 648906 - RNA, 19 nt, Artificial Sequence
  Description of Artificial Sequence: Synthetic oligonucleotide
uaagaguggccaggauuug

SEQ ID NO: 648907 - RNA, 19 nt, Artificial Sequence
  Description of Artificial Sequence: Synthetic oligonucleotide
cgugguuagaacaguggcc

SEQ ID NO: 648908 - RNA, 19 nt, Artificial Sequence
  Description of Artificial Sequence: Synthetic oligonucleotide
uuggcacggccugagguac

SEQ ID NO: 648909 - RNA, 19 nt, Artificial Sequence
  Description of Artificial Sequence: Synthetic oligonucleotide
caugccaguugaagcgaug

SEQ ID NO: 648910 - RNA, 19 nt, Artificial Sequence
  Description of Artificial Sequence: Synthetic oligonucleotide
guuugggaccgaccaaauc

SEQ ID NO: 648911 - RNA, 19 nt, Artificial Sequence
  Description of Artificial Sequence: Synthetic oligonucleotide
cuagaucacugcuuacaaa

SEQ ID NO: 648912 - RNA, 19 nt, Artificial Sequence
  Description of Artificial Sequence: Synthetic oligonucleotide
uacccuagcucagaccauc

SEQ ID NO: 648913 - RNA, 19 nt, Artificial Sequence
  Description of Artificial Sequence: Synthetic oligonucleotide
uacgcuccgugguuagaac

SEQ ID NO: 648914 - RNA, 19 nt, Artificial Sequence
  Description of Artificial Sequence: Synthetic oligonucleotide
guuauccagcugcaauguc

SEQ ID NO: 648915 - RNA, 19 nt, Artificial Sequence
  Description of Artificial Sequence: Synthetic oligonucleotide
caccuuggugagcacgcgc

SEQ ID NO: 648916 - RNA, 19 nt, Artificial Sequence
  Description of Artificial Sequence: Synthetic oligonucleotide
gaagagucaucggcugcug

SEQ ID NO: 648917 - RNA, 19 nt, Artificial Sequence
  Description of Artificial Sequence: Synthetic oligonucleotide
auugggugagcaacuuuga

SEQ ID NO: 648918 - RNA, 19 nt, Artificial Sequence
  Description of Artificial Sequence: Synthetic oligonucleotide
ccggacuacaacucugagc

SEQ ID NO: 648919 - RNA, 19 nt, Artificial Sequence
  Description of Artificial Sequence: Synthetic oligonucleotide
gagguguuugggaccgacc

SEQ ID NO: 648920 - RNA, 19 nt, Artificial Sequence
  Description of Artificial Sequence: Synthetic oligonucleotide
cauuuauagggugacaguu

SEQ ID NO: 648921 - RNA, 19 nt, Artificial Sequence
  Description of Artificial Sequence: Synthetic oligonucleotide
gcgauacugguaauggggc

SEQ ID NO: 648922 - RNA, 19 nt, Artificial Sequence
  Description of Artificial Sequence: Synthetic oligonucleotide
auccugauagucgcaucug

SEQ ID NO: 648923 - RNA, 19 nt, Artificial Sequence
  Description of Artificial Sequence: Synthetic oligonucleotide
cucggacaacugcuucacg

SEQ ID NO: 648924 - RNA, 19 nt, Artificial Sequence
  Description of Artificial Sequence: Synthetic oligonucleotide
cuuggcgaugcucggacaa

SEQ ID NO: 648925 - RNA, 19 nt, Artificial Sequence
  Description of Artificial Sequence: Synthetic oligonucleotide
ucgagcagaucagggacau

SEQ ID NO: 648926 - RNA, 19 nt, Artificial Sequence
  Description of Artificial Sequence: Synthetic oligonucleotide
gccgaauugggugagcaac

SEQ ID NO: 648927 - RNA, 19 nt, Artificial Sequence
  Description of Artificial Sequence: Synthetic oligonucleotide
cgggcaaugacucggcagg

SEQ ID NO: 648928 - RNA, 19 nt, Artificial Sequence
  Description of Artificial Sequence: Synthetic oligonucleotide
aucucaggggucauuccca

SEQ ID NO: 648929 - RNA, 19 nt, Artificial Sequence
  Description of Artificial Sequence: Synthetic oligonucleotide
uggcgaugcucggacaacu

SEQ ID NO: 648930 - RNA, 19 nt, Artificial Sequence
  Description of Artificial Sequence: Synthetic oligonucleotide
ggaggugccggacuacaac

SEQ ID NO: 648931 - RNA, 19 nt, Artificial Sequence
  Description of Artificial Sequence: Synthetic oligonucleotide
ccuagcucagaccaucauc

SEQ ID NO: 648932 - RNA, 19 nt, Artificial Sequence
  Description of Artificial Sequence: Synthetic oligonucleotide
ucguguugguacagagcau

SEQ ID NO: 648933 - RNA, 19 nt, Artificial Sequence
  Description of Artificial Sequence: Synthetic oligonucleotide
guagccccacaugggaugc

SEQ ID NO: 648934 - RNA, 19 nt, Artificial Sequence
  Description of Artificial Sequence: Synthetic oligonucleotide
uucuuacgcuccgugguua

SEQ ID NO: 648935 - RNA, 19 nt, Artificial Sequence
  Description of Artificial Sequence: Synthetic oligonucleotide
gguuagacagcugcccggc

SEQ ID NO: 648936 - RNA, 19 nt, Artificial Sequence
  Description of Artificial Sequence: Synthetic oligonucleotide
acugaucaucagaggaacu

SEQ ID NO: 648937 - RNA, 19 nt, Artificial Sequence
  Description of Artificial Sequence: Synthetic oligonucleotide
gcguaagucccagagcuug

SEQ ID NO: 648938 - RNA, 19 nt, Artificial Sequence
  Description of Artificial Sequence: Synthetic oligonucleotide
ggccuuuaagaguggccag

SEQ ID NO: 648939 - RNA, 19 nt, Artificial Sequence
  Description of Artificial Sequence: Synthetic oligonucleotide
cuccuccuaaggucccacc

SEQ ID NO: 648940 - RNA, 19 nt, Artificial Sequence
  Description of Artificial Sequence: Synthetic oligonucleotide
agaccaucauccagaccag

SEQ ID NO: 648941 - RNA, 19 nt, Artificial Sequence
  Description of Artificial Sequence: Synthetic oligonucleotide
ugcguaagucccagagcuu

SEQ ID NO: 648942 - RNA, 19 nt, Artificial Sequence
  Description of Artificial Sequence: Synthetic oligonucleotide
gagcaaggaucccaggaau

SEQ ID NO: 648943 - RNA, 19 nt, Artificial Sequence
  Description of Artificial Sequence: Synthetic oligonucleotide
cucggcaggcagcaucgug

SEQ ID NO: 648944 - RNA, 19 nt, Artificial Sequence
  Description of Artificial Sequence: Synthetic oligonucleotide
uugggccgaauugggugag

SEQ ID NO: 648945 - RNA, 19 nt, Artificial Sequence
  Description of Artificial Sequence: Synthetic oligonucleotide
ggaaugcuagcacugugua

SEQ ID NO: 648946 - RNA, 19 nt, Artificial Sequence
  Description of Artificial Sequence: Synthetic oligonucleotide
aucgagcagaucagggaca

SEQ ID NO: 648947 - RNA, 19 nt, Artificial Sequence
  Description of Artificial Sequence: Synthetic oligonucleotide
gcgaugcucggacaacugc

SEQ ID NO: 648948 - RNA, 19 nt, Artificial Sequence
  Description of Artificial Sequence: Synthetic oligonucleotide
uagguaccacucuggucaa

SEQ ID NO: 648949 - RNA, 19 nt, Artificial Sequence
  Description of Artificial Sequence: Synthetic oligonucleotide
cuuggcacggccugaggua

SEQ ID NO: 648950 - RNA, 19 nt, Artificial Sequence
  Description of Artificial Sequence: Synthetic oligonucleotide
cccaccagaccucuccucc

SEQ ID NO: 648951 - RNA, 19 nt, Artificial Sequence
  Description of Artificial Sequence: Synthetic oligonucleotide
caacacugggcugugagcu

SEQ ID NO: 648952 - RNA, 19 nt, Artificial Sequence
  Description of Artificial Sequence: Synthetic oligonucleotide
ggugaccaaaggccacucc

SEQ ID NO: 648953 - RNA, 19 nt, Artificial Sequence
  Description of Artificial Sequence: Synthetic oligonucleotide
acagcgggcucccggacua

SEQ ID NO: 648954 - RNA, 19 nt, Artificial Sequence
  Description of Artificial Sequence: Synthetic oligonucleotide
cacggccugagguacaaua

SEQ ID NO: 648955 - RNA, 19 nt, Artificial Sequence
  Description of Artificial Sequence: Synthetic oligonucleotide
uuggcgaugcucggacaac

SEQ ID NO: 648956 - RNA, 19 nt, Artificial Sequence
  Description of Artificial Sequence: Synthetic oligonucleotide
ccuccuaaggucccacccc

SEQ ID NO: 648957 - RNA, 19 nt, Artificial Sequence
  Description of Artificial Sequence: Synthetic oligonucleotide
aguuguuauccagcugcaa

SEQ ID NO: 648958 - RNA, 19 nt, Artificial Sequence
  Description of Artificial Sequence: Synthetic oligonucleotide
cauugguacgcuccuucaa

SEQ ID NO: 648959 - RNA, 19 nt, Artificial Sequence
  Description of Artificial Sequence: Synthetic oligonucleotide
gcagccggaagucucaucu

SEQ ID NO: 648960 - RNA, 19 nt, Artificial Sequence
  Description of Artificial Sequence: Synthetic oligonucleotide
cacucucaugggcucgaac

SEQ ID NO: 648961 - RNA, 19 nt, Artificial Sequence
  Description of Artificial Sequence: Synthetic oligonucleotide
gagaaggcccaguacugau

SEQ ID NO: 648962 - RNA, 19 nt, Artificial Sequence
  Description of Artificial Sequence: Synthetic oligonucleotide
agcgggcucccggacuagc

SEQ ID NO: 648963 - RNA, 19 nt, Artificial Sequence
  Description of Artificial Sequence: Synthetic oligonucleotide
gagcauuuauagggugaca

SEQ ID NO: 648964 - RNA, 19 nt, Artificial Sequence
  Description of Artificial Sequence: Synthetic oligonucleotide
cacgcgcccugucuggaug

SEQ ID NO: 648965 - RNA, 19 nt, Artificial Sequence
  Description of Artificial Sequence: Synthetic oligonucleotide
cauggcgccgucgcagcgc

SEQ ID NO: 648966 - RNA, 19 nt, Artificial Sequence
  Description of Artificial Sequence: Synthetic oligonucleotide
auggcgccgucgcagcgcu

SEQ ID NO: 648967 - RNA, 19 nt, Artificial Sequence
  Description of Artificial Sequence: Synthetic oligonucleotide
gagcuugacugaagaguca

SEQ ID NO: 648968 - RNA, 19 nt, Artificial Sequence
  Description of Artificial Sequence: Synthetic oligonucleotide
cuucggguuucaccagcuc

SEQ ID NO: 648969 - RNA, 19 nt, Artificial Sequence
  Description of Artificial Sequence: Synthetic oligonucleotide
cguguugguacagagcaug

SEQ ID NO: 648970 - RNA, 19 nt, Artificial Sequence
  Description of Artificial Sequence: Synthetic oligonucleotide
gacgggcaaugacucggca

SEQ ID NO: 648971 - RNA, 19 nt, Artificial Sequence
  Description of Artificial Sequence: Synthetic oligonucleotide
gugccggacuacaacucug

SEQ ID NO: 648972 - RNA, 19 nt, Artificial Sequence
  Description of Artificial Sequence: Synthetic oligonucleotide
cagcuugcguaagucccag

SEQ ID NO: 648973 - RNA, 19 nt, Artificial Sequence
  Description of Artificial Sequence: Synthetic oligonucleotide
ccggacuagcucugcagcc

SEQ ID NO: 648974 - RNA, 19 nt, Artificial Sequence
  Description of Artificial Sequence: Synthetic oligonucleotide
accagaccucuccuccuaa

SEQ ID NO: 648975 - RNA, 19 nt, Artificial Sequence
  Description of Artificial Sequence: Synthetic oligonucleotide
cccggacuagcucugcagc

SEQ ID NO: 648976 - RNA, 19 nt, Artificial Sequence
  Description of Artificial Sequence: Synthetic oligonucleotide
acggccugagguacaauaa

SEQ ID NO: 648977 - RNA, 19 nt, Artificial Sequence
  Description of Artificial Sequence: Synthetic oligonucleotide
uggugaccaaaggccacuc

SEQ ID NO: 648978 - RNA, 19 nt, Artificial Sequence
  Description of Artificial Sequence: Synthetic oligonucleotide
augagccgccgcucguaca

SEQ ID NO: 648979 - RNA, 19 nt, Artificial Sequence
  Description of Artificial Sequence: Synthetic oligonucleotide
ugauaggaucugugccauu

SEQ ID NO: 648980 - RNA, 19 nt, Artificial Sequence
  Description of Artificial Sequence: Synthetic oligonucleotide
acgcgcccugucuggaugu

SEQ ID NO: 648981 - RNA, 19 nt, Artificial Sequence
  Description of Artificial Sequence: Synthetic oligonucleotide
gcucguacacaugauuaga

SEQ ID NO: 648982 - RNA, 19 nt, Artificial Sequence
  Description of Artificial Sequence: Synthetic oligonucleotide
cgcucguacacaugauuag

SEQ ID NO: 648983 - RNA, 19 nt, Artificial Sequence
  Description of Artificial Sequence: Synthetic oligonucleotide
ggccagggaaauuggccac

SEQ ID NO: 648984 - RNA, 19 nt, Artificial Sequence
  Description of Artificial Sequence: Synthetic oligonucleotide
ggccacuaugcucuguaaa

SEQ ID NO: 648985 - RNA, 19 nt, Artificial Sequence
  Description of Artificial Sequence: Synthetic oligonucleotide
aguuccugagaaggaugaa

SEQ ID NO: 648986 - RNA, 19 nt, Artificial Sequence
  Description of Artificial Sequence: Synthetic oligonucleotide
ggaucccaggaaugcuagc

SEQ ID NO: 648987 - RNA, 19 nt, Artificial Sequence
  Description of Artificial Sequence: Synthetic oligonucleotide
gcauuuauagggugacagu

SEQ ID NO: 648988 - RNA, 19 nt, Artificial Sequence
  Description of Artificial Sequence: Synthetic oligonucleotide
gagaaggcauagggccuac

SEQ ID NO: 648989 - RNA, 19 nt, Artificial Sequence
  Description of Artificial Sequence: Synthetic oligonucleotide
ggcccaguacugaucauca

SEQ ID NO: 648990 - RNA, 19 nt, Artificial Sequence
  Description of Artificial Sequence: Synthetic oligonucleotide
gguguccgaaggacagagg

SEQ ID NO: 648991 - RNA, 19 nt, Artificial Sequence
  Description of Artificial Sequence: Synthetic oligonucleotide
cggguuagacagcugcccg

SEQ ID NO: 648992 - RNA, 19 nt, Artificial Sequence
  Description of Artificial Sequence: Synthetic oligonucleotide
gcggguuagacagcugccc

SEQ ID NO: 648993 - RNA, 19 nt, Artificial Sequence
  Description of Artificial Sequence: Synthetic oligonucleotide
caccugccgguacuugcug

SEQ ID NO: 648994 - RNA, 19 nt, Artificial Sequence
  Description of Artificial Sequence: Synthetic oligonucleotide
agccccacaugggaugcca

SEQ ID NO: 648995 - RNA, 19 nt, Artificial Sequence
  Description of Artificial Sequence: Synthetic oligonucleotide
gccgucgcagcgcugccag

SEQ ID NO: 648996 - RNA, 19 nt, Artificial Sequence
  Description of Artificial Sequence: Synthetic oligonucleotide
agcuugcguaagucccaga

SEQ ID NO: 648997 - RNA, 19 nt, Artificial Sequence
  Description of Artificial Sequence: Synthetic oligonucleotide
cugccgguacuugcugagc

SEQ ID NO: 648998 - RNA, 19 nt, Artificial Sequence
  Description of Artificial Sequence: Synthetic oligonucleotide
gcucuucggguuucaccag

SEQ ID NO: 648999 - RNA, 19 nt, Artificial Sequence
  Description of Artificial Sequence: Synthetic oligonucleotide
gccggacuacaacucugag

SEQ ID NO: 649000 - RNA, 19 nt, Artificial Sequence
  Description of Artificial Sequence: Synthetic oligonucleotide
cagcaucguguugguacag

SEQ ID NO: 649001 - RNA, 19 nt, Artificial Sequence
  Description of Artificial Sequence: Synthetic oligonucleotide
cucaggcacagucuuuccu

SEQ ID NO: 649002 - RNA, 19 nt, Artificial Sequence
  Description of Artificial Sequence: Synthetic oligonucleotide
cucggacgcggguuagaca

SEQ ID NO: 649003 - RNA, 19 nt, Artificial Sequence
  Description of Artificial Sequence: Synthetic oligonucleotide
ggagguguuugggaccgac

SEQ ID NO: 649004 - RNA, 19 nt, Artificial Sequence
  Description of Artificial Sequence: Synthetic oligonucleotide
caucccacucauccugcaa

SEQ ID NO: 649005 - RNA, 19 nt, Artificial Sequence
  Description of Artificial Sequence: Synthetic oligonucleotide
gugagcacgcgcccugucu

SEQ ID NO: 649006 - RNA, 19 nt, Artificial Sequence
  Description of Artificial Sequence: Synthetic oligonucleotide
ggauagcaguguuccaugu

SEQ ID NO: 649007 - RNA, 19 nt, Artificial Sequence
  Description of Artificial Sequence: Synthetic oligonucleotide
ccggaagucucaucuguca

SEQ ID NO: 649008 - RNA, 19 nt, Artificial Sequence
  Description of Artificial Sequence: Synthetic oligonucleotide
ccuuggugagcacgcgccc

SEQ ID NO: 649009 - RNA, 19 nt, Artificial Sequence
  Description of Artificial Sequence: Synthetic oligonucleotide
cggaagucucaucugucac

SEQ ID NO: 649010 - RNA, 19 nt, Artificial Sequence
  Description of Artificial Sequence: Synthetic oligonucleotide
ugggccgaauugggugagc

SEQ ID NO: 649011 - RNA, 19 nt, Artificial Sequence
  Description of Artificial Sequence: Synthetic oligonucleotide
gucgccucacagcgggcuc

SEQ ID NO: 649012 - RNA, 19 nt, Artificial Sequence
  Description of Artificial Sequence: Synthetic oligonucleotide
gccgcuuccggggcgcucg

SEQ ID NO: 649013 - RNA, 19 nt, Artificial Sequence
  Description of Artificial Sequence: Synthetic oligonucleotide
ccauguccguucccugggg

SEQ ID NO: 649014 - RNA, 19 nt, Artificial Sequence
  Description of Artificial Sequence: Synthetic oligonucleotide
uacugguaauggggccaga

SEQ ID NO: 649015 - RNA, 19 nt, Artificial Sequence
  Description of Artificial Sequence: Synthetic oligonucleotide
ggcggguugucugcaguug

SEQ ID NO: 649016 - RNA, 19 nt, Artificial Sequence
  Description of Artificial Sequence: Synthetic oligonucleotide
gacgcggguuagacagcug

SEQ ID NO: 649017 - RNA, 19 nt, Artificial Sequence
  Description of Artificial Sequence: Synthetic oligonucleotide
cagaguagccagagcuucu

SEQ ID NO: 649018 - RNA, 19 nt, Artificial Sequence
  Description of Artificial Sequence: Synthetic oligonucleotide
cggccugagguacaauaag

SEQ ID NO: 649019 - RNA, 19 nt, Artificial Sequence
  Description of Artificial Sequence: Synthetic oligonucleotide
ccuuuaagaguggccagga

SEQ ID NO: 649020 - RNA, 19 nt, Artificial Sequence
  Description of Artificial Sequence: Synthetic oligonucleotide
ggcgaugcucggacaacug

SEQ ID NO: 649021 - RNA, 19 nt, Artificial Sequence
  Description of Artificial Sequence: Synthetic oligonucleotide
cuuuaagaguggccaggau

SEQ ID NO: 649022 - RNA, 19 nt, Artificial Sequence
  Description of Artificial Sequence: Synthetic oligonucleotide
ccgcucguacacaugauua

SEQ ID NO: 649023 - RNA, 19 nt, Artificial Sequence
  Description of Artificial Sequence: Synthetic oligonucleotide
gguuguugauaggaucugu

SEQ ID NO: 649024 - RNA, 19 nt, Artificial Sequence
  Description of Artificial Sequence: Synthetic oligonucleotide
cguggugaccaaaggccac

SEQ ID NO: 649025 - RNA, 19 nt, Artificial Sequence
  Description of Artificial Sequence: Synthetic oligonucleotide
ggguuucaccagcuccuca

SEQ ID NO: 649026 - RNA, 19 nt, Artificial Sequence
  Description of Artificial Sequence: Synthetic oligonucleotide
cuuacgcuccgugguuaga

SEQ ID NO: 649027 - RNA, 19 nt, Artificial Sequence
  Description of Artificial Sequence: Synthetic oligonucleotide
cucccggacuagcucugca

SEQ ID NO: 649028 - RNA, 19 nt, Artificial Sequence
  Description of Artificial Sequence: Synthetic oligonucleotide
cuucuuacgcuccgugguu

SEQ ID NO: 649029 - RNA, 19 nt, Artificial Sequence
  Description of Artificial Sequence: Synthetic oligonucleotide
cgcggguuagacagcugcc

SEQ ID NO: 649030 - RNA, 19 nt, Artificial Sequence
  Description of Artificial Sequence: Synthetic oligonucleotide
gcucggacgcggguuagac

SEQ ID NO: 649031 - RNA, 19 nt, Artificial Sequence
  Description of Artificial Sequence: Synthetic oligonucleotide
gcgaagggugaagcugugc

SEQ ID NO: 649032 - RNA, 19 nt, Artificial Sequence
  Description of Artificial Sequence: Synthetic oligonucleotide
cuuggugagcacgcgcccu

SEQ ID NO: 649033 - RNA, 19 nt, Artificial Sequence
  Description of Artificial Sequence: Synthetic oligonucleotide
ccuacagacuguagaauuu

SEQ ID NO: 649034 - RNA, 19 nt, Artificial Sequence
  Description of Artificial Sequence: Synthetic oligonucleotide
gcuugacugaagagucauc

SEQ ID NO: 649035 - RNA, 19 nt, Artificial Sequence
  Description of Artificial Sequence: Synthetic oligonucleotide
ccgaaggacagagguccag

SEQ ID NO: 649036 - RNA, 19 nt, Artificial Sequence
  Description of Artificial Sequence: Synthetic oligonucleotide
caccagaccucuccuccua

SEQ ID NO: 649037 - RNA, 19 nt, Artificial Sequence
  Description of Artificial Sequence: Synthetic oligonucleotide
cugcauggauagcaguguu

SEQ ID NO: 649038 - RNA, 19 nt, Artificial Sequence
  Description of Artificial Sequence: Synthetic oligonucleotide
ccaguagcauggaggcuga

SEQ ID NO: 649039 - RNA, 19 nt, Artificial Sequence
  Description of Artificial Sequence: Synthetic oligonucleotide
gccggaagucucaucuguc

SEQ ID NO: 649040 - RNA, 19 nt, Artificial Sequence
  Description of Artificial Sequence: Synthetic oligonucleotide
ggccgaauugggugagcaa

SEQ ID NO: 649041 - RNA, 19 nt, Artificial Sequence
  Description of Artificial Sequence: Synthetic oligonucleotide
ggugagcacgcgcccuguc

SEQ ID NO: 649042 - RNA, 19 nt, Artificial Sequence
  Description of Artificial Sequence: Synthetic oligonucleotide
gcuuggcgaugcucggaca

SEQ ID NO: 649043 - RNA, 19 nt, Artificial Sequence
  Description of Artificial Sequence: Synthetic oligonucleotide
uccguucccuggggccuga

SEQ ID NO: 649044 - RNA, 19 nt, Artificial Sequence
  Description of Artificial Sequence: Synthetic oligonucleotide
ccgaauugggugagcaacu

SEQ ID NO: 649045 - RNA, 19 nt, Artificial Sequence
  Description of Artificial Sequence: Synthetic oligonucleotide
ggcgaagggugaagcugug

SEQ ID NO: 649046 - RNA, 19 nt, Artificial Sequence
  Description of Artificial Sequence: Synthetic oligonucleotide
acucggcaggcagcaucgu

SEQ ID NO: 649047 - RNA, 19 nt, Artificial Sequence
  Description of Artificial Sequence: Synthetic oligonucleotide
cgaugcucggacaacugcu

SEQ ID NO: 649048 - RNA, 19 nt, Artificial Sequence
  Description of Artificial Sequence: Synthetic oligonucleotide
ccgcgggccacuuccgguc

SEQ ID NO: 649049 - RNA, 19 nt, Artificial Sequence
  Description of Artificial Sequence: Synthetic oligonucleotide
cacagcgggcucccggacu

SEQ ID NO: 649050 - RNA, 19 nt, Artificial Sequence
  Description of Artificial Sequence: Synthetic oligonucleotide
gagccgccgcucguacaca

SEQ ID NO: 649051 - RNA, 19 nt, Artificial Sequence
  Description of Artificial Sequence: Synthetic oligonucleotide
ggcauagggccuacagacu

SEQ ID NO: 649052 - RNA, 19 nt, Artificial Sequence
  Description of Artificial Sequence: Synthetic oligonucleotide
ggacgcggguuagacagcu

SEQ ID NO: 649053 - RNA, 19 nt, Artificial Sequence
  Description of Artificial Sequence: Synthetic oligonucleotide
uggcgccgucgcagcgcug

SEQ ID NO: 649054 - RNA, 19 nt, Artificial Sequence
  Description of Artificial Sequence: Synthetic oligonucleotide
caccagugagaaucuuguu

SEQ ID NO: 649055 - RNA, 19 nt, Artificial Sequence
  Description of Artificial Sequence: Synthetic oligonucleotide
ggcgcucggacgcggguua

SEQ ID NO: 649056 - RNA, 19 nt, Artificial Sequence
  Description of Artificial Sequence: Synthetic oligonucleotide
gccgcucguacacaugauu

SEQ ID NO: 649057 - RNA, 19 nt, Artificial Sequence
  Description of Artificial Sequence: Synthetic oligonucleotide
gcccugucuggaugucaga

SEQ ID NO: 649058 - RNA, 19 nt, Artificial Sequence
  Description of Artificial Sequence: Synthetic oligonucleotide
ggcacggccugagguacaa

SEQ ID NO: 649059 - RNA, 19 nt, Artificial Sequence
  Description of Artificial Sequence: Synthetic oligonucleotide
ggggacacacaugggugcu

SEQ ID NO: 649060 - RNA, 19 nt, Artificial Sequence
  Description of Artificial Sequence: Synthetic oligonucleotide
guacccuagcucagaccau

SEQ ID NO: 649061 - RNA, 19 nt, Artificial Sequence
  Description of Artificial Sequence: Synthetic oligonucleotide
cggacgcggguuagacagc

SEQ ID NO: 649062 - RNA, 19 nt, Artificial Sequence
  Description of Artificial Sequence: Synthetic oligonucleotide
ggcuugggccgaauugggu

SEQ ID NO: 649063 - RNA, 19 nt, Artificial Sequence
  Description of Artificial Sequence: Synthetic oligonucleotide
gcuccgugguuagaacagu

SEQ ID NO: 649064 - RNA, 19 nt, Artificial Sequence
  Description of Artificial Sequence: Synthetic oligonucleotide
gcgcucggacgcggguuag

SEQ ID NO: 649065 - RNA, 19 nt, Artificial Sequence
  Description of Artificial Sequence: Synthetic oligonucleotide
gcgcccugucuggauguca

SEQ ID NO: 649066 - RNA, 19 nt, Artificial Sequence
  Description of Artificial Sequence: Synthetic oligonucleotide
gcgccgucgcagcgcugcc

SEQ ID NO: 649067 - RNA, 19 nt, Artificial Sequence
  Description of Artificial Sequence: Synthetic oligonucleotide
cguuggagaucgagcagau

SEQ ID NO: 649068 - RNA, 19 nt, Artificial Sequence
  Description of Artificial Sequence: Synthetic oligonucleotide
cggggcgcucggacgcggg

SEQ ID NO: 649069 - RNA, 19 nt, Artificial Sequence
  Description of Artificial Sequence: Synthetic oligonucleotide
cgagcagaucagggacaug

SEQ ID NO: 649070 - RNA, 19 nt, Artificial Sequence
  Description of Artificial Sequence: Synthetic oligonucleotide
ggggcgcucggacgcgggu

SEQ ID NO: 649071 - RNA, 19 nt, Artificial Sequence
  Description of Artificial Sequence: Synthetic oligonucleotide
cccuagcucagaccaucau

SEQ ID NO: 649072 - RNA, 19 nt, Artificial Sequence
  Description of Artificial Sequence: Synthetic oligonucleotide
gcgggcucccggacuagcu

SEQ ID NO: 649073 - RNA, 19 nt, Artificial Sequence
  Description of Artificial Sequence: Synthetic oligonucleotide
gcacuucguuggagaucga

SEQ ID NO: 649074 - RNA, 19 nt, Artificial Sequence
  Description of Artificial Sequence: Synthetic oligonucleotide
cgaauugggugagcaacuu

SEQ ID NO: 649075 - RNA, 19 nt, Artificial Sequence
  Description of Artificial Sequence: Synthetic oligonucleotide
cgcgcccugucuggauguc

SEQ ID NO: 649076 - RNA, 19 nt, Artificial Sequence
  Description of Artificial Sequence: Synthetic oligonucleotide
cgccgucgcagcgcugcca

SEQ ID NO: 649077 - RNA, 19 nt, Artificial Sequence
  Description of Artificial Sequence: Synthetic oligonucleotide
cgccgcucguacacaugau

SEQ ID NO: 649078 - RNA, 19 nt, Artificial Sequence
  Description of Artificial Sequence: Synthetic oligonucleotide
ccgucgcagcgcugccagu

SEQ ID NO: 649079 - RNA, 19 nt, Artificial Sequence
  Description of Artificial Sequence: Synthetic oligonucleotide
ccccaccagugagaaucuu

SEQ ID NO: 649080 - RNA, 19 nt, Artificial Sequence
  Description of Artificial Sequence: Synthetic oligonucleotide
ccgccgcuuccggggcgcu

SEQ ID NO: 649081 - RNA, 19 nt, Artificial Sequence
  Description of Artificial Sequence: Synthetic oligonucleotide
aaugcuucgguguaggugc

SEQ ID NO: 649082 - RNA, 19 nt, Artificial Sequence
  Description of Artificial Sequence: Synthetic oligonucleotide
uguauaacacaaaauaccg

SEQ ID NO: 649083 - RNA, 19 nt, Artificial Sequence
  Description of Artificial Sequence: Synthetic oligonucleotide
gaugucuucagcuauaggg

SEQ ID NO: 649084 - RNA, 19 nt, Artificial Sequence
  Description of Artificial Sequence: Synthetic oligonucleotide
agaaacuuuauucacgggc

SEQ ID NO: 649085 - RNA, 19 nt, Artificial Sequence
  Description of Artificial Sequence: Synthetic oligonucleotide
aaggucagaaacuuuauuc

SEQ ID NO: 649086 - RNA, 19 nt, Artificial Sequence
  Description of Artificial Sequence: Synthetic oligonucleotide
ugugacuucauuauuagca

SEQ ID NO: 649087 - RNA, 19 nt, Artificial Sequence
  Description of Artificial Sequence: Synthetic oligonucleotide
ucagcuauagggaagaaug

SEQ ID NO: 649088 - RNA, 19 nt, Artificial Sequence
  Description of Artificial Sequence: Synthetic oligonucleotide
gaugaaaugguccagcuug

SEQ ID NO: 649089 - RNA, 19 nt, Artificial Sequence
  Description of Artificial Sequence: Synthetic oligonucleotide
aaacuuucgggguacauag

SEQ ID NO: 649090 - RNA, 19 nt, Artificial Sequence
  Description of Artificial Sequence: Synthetic oligonucleotide
aauaaggacaccuugguuu

SEQ ID NO: 649091 - RNA, 19 nt, Artificial Sequence
  Description of Artificial Sequence: Synthetic oligonucleotide
gauguuauugaucaccugc

SEQ ID NO: 649092 - RNA, 19 nt, Artificial Sequence
  Description of Artificial Sequence: Synthetic oligonucleotide
uuuguguucuauaggaagg

SEQ ID NO: 649093 - RNA, 19 nt, Artificial Sequence
  Description of Artificial Sequence: Synthetic oligonucleotide
ucagaaacuuuauucacgg

SEQ ID NO: 649094 - RNA, 19 nt, Artificial Sequence
  Description of Artificial Sequence: Synthetic oligonucleotide
aauauacaggucuccugcc

SEQ ID NO: 649095 - RNA, 19 nt, Artificial Sequence
  Description of Artificial Sequence: Synthetic oligonucleotide
agaggauuucuccaaauac

SEQ ID NO: 649096 - RNA, 19 nt, Artificial Sequence
  Description of Artificial Sequence: Synthetic oligonucleotide
uuuaucgugaggcaaggcc

SEQ ID NO: 649097 - RNA, 19 nt, Artificial Sequence
  Description of Artificial Sequence: Synthetic oligonucleotide
caaaauaaggacaccuugg

SEQ ID NO: 649098 - RNA, 19 nt, Artificial Sequence
  Description of Artificial Sequence: Synthetic oligonucleotide
cuugcugcacaaaauaagg

SEQ ID NO: 649099 - RNA, 19 nt, Artificial Sequence
  Description of Artificial Sequence: Synthetic oligonucleotide
aucaaauucaucauucugg

SEQ ID NO: 649100 - RNA, 19 nt, Artificial Sequence
  Description of Artificial Sequence: Synthetic oligonucleotide
ucauuauuagcauccuugg

SEQ ID NO: 649101 - RNA, 19 nt, Artificial Sequence
  Description of Artificial Sequence: Synthetic oligonucleotide
aagccuugaauguugucac

SEQ ID NO: 649102 - RNA, 19 nt, Artificial Sequence
  Description of Artificial Sequence: Synthetic oligonucleotide
auagucaucaaccugguau

SEQ ID NO: 649103 - RNA, 19 nt, Artificial Sequence
  Description of Artificial Sequence: Synthetic oligonucleotide
uaugaguggacauucgaag

SEQ ID NO: 649104 - RNA, 19 nt, Artificial Sequence
  Description of Artificial Sequence: Synthetic oligonucleotide
cuggaagacguuaugacgg

SEQ ID NO: 649105 - RNA, 19 nt, Artificial Sequence
  Description of Artificial Sequence: Synthetic oligonucleotide
uuauuagcauccuuggccc

SEQ ID NO: 649106 - RNA, 19 nt, Artificial Sequence
  Description of Artificial Sequence: Synthetic oligonucleotide
auaugugucaucauacucg

SEQ ID NO: 649107 - RNA, 19 nt, Artificial Sequence
  Description of Artificial Sequence: Synthetic oligonucleotide
ucuugcugcacaaaauaag

SEQ ID NO: 649108 - RNA, 19 nt, Artificial Sequence
  Description of Artificial Sequence: Synthetic oligonucleotide
acaaaauaaggacaccuug

SEQ ID NO: 649109 - RNA, 19 nt, Artificial Sequence
  Description of Artificial Sequence: Synthetic oligonucleotide
ucggcuuugcccaugaccc

SEQ ID NO: 649110 - RNA, 19 nt, Artificial Sequence
  Description of Artificial Sequence: Synthetic oligonucleotide
uaacacaaaauaccggucu

SEQ ID NO: 649111 - RNA, 19 nt, Artificial Sequence
  Description of Artificial Sequence: Synthetic oligonucleotide
acuuucgggguacauagcg

SEQ ID NO: 649112 - RNA, 19 nt, Artificial Sequence
  Description of Artificial Sequence: Synthetic oligonucleotide
uuauugaucaccugcucug

SEQ ID NO: 649113 - RNA, 19 nt, Artificial Sequence
  Description of Artificial Sequence: Synthetic oligonucleotide
aaaacaaccuggcaccaga

SEQ ID NO: 649114 - RNA, 19 nt, Artificial Sequence
  Description of Artificial Sequence: Synthetic oligonucleotide
uccaaauacagauggagaa

SEQ ID NO: 649115 - RNA, 19 nt, Artificial Sequence
  Description of Artificial Sequence: Synthetic oligonucleotide
aggaaguuauuguagagga

SEQ ID NO: 649116 - RNA, 19 nt, Artificial Sequence
  Description of Artificial Sequence: Synthetic oligonucleotide
ugagucuaguuccacacca

SEQ ID NO: 649117 - RNA, 19 nt, Artificial Sequence
  Description of Artificial Sequence: Synthetic oligonucleotide
aucauuggcgcccaccugg

SEQ ID NO: 649118 - RNA, 19 nt, Artificial Sequence
  Description of Artificial Sequence: Synthetic oligonucleotide
gacggcauuucacugauug

SEQ ID NO: 649119 - RNA, 19 nt, Artificial Sequence
  Description of Artificial Sequence: Synthetic oligonucleotide
uguucuauaggaaggcgcu

SEQ ID NO: 649120 - RNA, 19 nt, Artificial Sequence
  Description of Artificial Sequence: Synthetic oligonucleotide
augaguggacauucgaagg

SEQ ID NO: 649121 - RNA, 19 nt, Artificial Sequence
  Description of Artificial Sequence: Synthetic oligonucleotide
ucuaguuccacaccacaca

SEQ ID NO: 649122 - RNA, 19 nt, Artificial Sequence
  Description of Artificial Sequence: Synthetic oligonucleotide
gaaugagucauagucccgg

SEQ ID NO: 649123 - RNA, 19 nt, Artificial Sequence
  Description of Artificial Sequence: Synthetic oligonucleotide
aauuuaucgugaggcaagg

SEQ ID NO: 649124 - RNA, 19 nt, Artificial Sequence
  Description of Artificial Sequence: Synthetic oligonucleotide
ugcugcacaaaauaaggac

SEQ ID NO: 649125 - RNA, 19 nt, Artificial Sequence
  Description of Artificial Sequence: Synthetic oligonucleotide
uuauucacgggccuuuugu

SEQ ID NO: 649126 - RNA, 19 nt, Artificial Sequence
  Description of Artificial Sequence: Synthetic oligonucleotide
ugaauauacaggucuccug

SEQ ID NO: 649127 - RNA, 19 nt, Artificial Sequence
  Description of Artificial Sequence: Synthetic oligonucleotide
gaauuuaucgugaggcaag

SEQ ID NO: 649128 - RNA, 19 nt, Artificial Sequence
  Description of Artificial Sequence: Synthetic oligonucleotide
guaggauguaggcaguccg

SEQ ID NO: 649129 - RNA, 19 nt, Artificial Sequence
  Description of Artificial Sequence: Synthetic oligonucleotide
ugaguggacauucgaagga

SEQ ID NO: 649130 - RNA, 19 nt, Artificial Sequence
  Description of Artificial Sequence: Synthetic oligonucleotide
uuaugaguggacauucgaa

SEQ ID NO: 649131 - RNA, 19 nt, Artificial Sequence
  Description of Artificial Sequence: Synthetic oligonucleotide
uucacuugucuuucuaggc

SEQ ID NO: 649132 - RNA, 19 nt, Artificial Sequence
  Description of Artificial Sequence: Synthetic oligonucleotide
gaaaaugcuucgguguagg

SEQ ID NO: 649133 - RNA, 19 nt, Artificial Sequence
  Description of Artificial Sequence: Synthetic oligonucleotide
aaaugcuucgguguaggug

SEQ ID NO: 649134 - RNA, 19 nt, Artificial Sequence
  Description of Artificial Sequence: Synthetic oligonucleotide
ugucauugugacuucauua

SEQ ID NO: 649135 - RNA, 19 nt, Artificial Sequence
  Description of Artificial Sequence: Synthetic oligonucleotide
auagcguagguaggaaucc

SEQ ID NO: 649136 - RNA, 19 nt, Artificial Sequence
  Description of Artificial Sequence: Synthetic oligonucleotide
auaggaaggcgcucauggc

SEQ ID NO: 649137 - RNA, 19 nt, Artificial Sequence
  Description of Artificial Sequence: Synthetic oligonucleotide
uuauuguagaggauuucuc

SEQ ID NO: 649138 - RNA, 19 nt, Artificial Sequence
  Description of Artificial Sequence: Synthetic oligonucleotide
agggauaaggcacuuugug

SEQ ID NO: 649139 - RNA, 19 nt, Artificial Sequence
  Description of Artificial Sequence: Synthetic oligonucleotide
guauaacacaaaauaccgg

SEQ ID NO: 649140 - RNA, 19 nt, Artificial Sequence
  Description of Artificial Sequence: Synthetic oligonucleotide
uguugcuucugaauauaca

SEQ ID NO: 649141 - RNA, 19 nt, Artificial Sequence
  Description of Artificial Sequence: Synthetic oligonucleotide
uccuauucauuuucuggag

SEQ ID NO: 649142 - RNA, 19 nt, Artificial Sequence
  Description of Artificial Sequence: Synthetic oligonucleotide
guagcgaugccacugugcc

SEQ ID NO: 649143 - RNA, 19 nt, Artificial Sequence
  Description of Artificial Sequence: Synthetic oligonucleotide
aagacguuaugacgggaug

SEQ ID NO: 649144 - RNA, 19 nt, Artificial Sequence
  Description of Artificial Sequence: Synthetic oligonucleotide
uaggauguaggcaguccgg

SEQ ID NO: 649145 - RNA, 19 nt, Artificial Sequence
  Description of Artificial Sequence: Synthetic oligonucleotide
cugcacaaaauaaggacac

SEQ ID NO: 649146 - RNA, 19 nt, Artificial Sequence
  Description of Artificial Sequence: Synthetic oligonucleotide
ugaucaccugcucugaauc

SEQ ID NO: 649147 - RNA, 19 nt, Artificial Sequence
  Description of Artificial Sequence: Synthetic oligonucleotide
aaacuuuauucacgggccu

SEQ ID NO: 649148 - RNA, 19 nt, Artificial Sequence
  Description of Artificial Sequence: Synthetic oligonucleotide
aaggucuuaugucuuguau

SEQ ID NO: 649149 - RNA, 19 nt, Artificial Sequence
  Description of Artificial Sequence: Synthetic oligonucleotide
agcgaugccacugugccac

SEQ ID NO: 649150 - RNA, 19 nt, Artificial Sequence
  Description of Artificial Sequence: Synthetic oligonucleotide
uucucuuccggucagccau

SEQ ID NO: 649151 - RNA, 19 nt, Artificial Sequence
  Description of Artificial Sequence: Synthetic oligonucleotide
ugaucuuuggauuccuuau

SEQ ID NO: 649152 - RNA, 19 nt, Artificial Sequence
  Description of Artificial Sequence: Synthetic oligonucleotide
cauagcguagguaggaauc

SEQ ID NO: 649153 - RNA, 19 nt, Artificial Sequence
  Description of Artificial Sequence: Synthetic oligonucleotide
uucggugucauugugacuu

SEQ ID NO: 649154 - RNA, 19 nt, Artificial Sequence
  Description of Artificial Sequence: Synthetic oligonucleotide
aaauaaggacaccuugguu

SEQ ID NO: 649155 - RNA, 19 nt, Artificial Sequence
  Description of Artificial Sequence: Synthetic oligonucleotide
uguguucuauaggaaggcg

SEQ ID NO: 649156 - RNA, 19 nt, Artificial Sequence
  Description of Artificial Sequence: Synthetic oligonucleotide
augacgggaugucagcagg

SEQ ID NO: 649157 - RNA, 19 nt, Artificial Sequence
  Description of Artificial Sequence: Synthetic oligonucleotide
cacuuuguguucuauagga

SEQ ID NO: 649158 - RNA, 19 nt, Artificial Sequence
  Description of Artificial Sequence: Synthetic oligonucleotide
caugguucuacgguugugg

SEQ ID NO: 649159 - RNA, 19 nt, Artificial Sequence
  Description of Artificial Sequence: Synthetic oligonucleotide
agucuuugggaugucaaag

SEQ ID NO: 649160 - RNA, 19 nt, Artificial Sequence
  Description of Artificial Sequence: Synthetic oligonucleotide
cacacuguacugcugguag

SEQ ID NO: 649161 - RNA, 19 nt, Artificial Sequence
  Description of Artificial Sequence: Synthetic oligonucleotide
cugguugccaucauaugug

SEQ ID NO: 649162 - RNA, 19 nt, Artificial Sequence
  Description of Artificial Sequence: Synthetic oligonucleotide
ugauguguauguuuccuau

SEQ ID NO: 649163 - RNA, 19 nt, Artificial Sequence
  Description of Artificial Sequence: Synthetic oligonucleotide
ggcacuuuguguucuauag

SEQ ID NO: 649164 - RNA, 19 nt, Artificial Sequence
  Description of Artificial Sequence: Synthetic oligonucleotide
ccagaauuuaucgugaggc

SEQ ID NO: 649165 - RNA, 19 nt, Artificial Sequence
  Description of Artificial Sequence: Synthetic oligonucleotide
uaugacgggaugucagcag

SEQ ID NO: 649166 - RNA, 19 nt, Artificial Sequence
  Description of Artificial Sequence: Synthetic oligonucleotide
ucauuuucuggagcagugg

SEQ ID NO: 649167 - RNA, 19 nt, Artificial Sequence
  Description of Artificial Sequence: Synthetic oligonucleotide
ugugacgacggcauuucac

SEQ ID NO: 649168 - RNA, 19 nt, Artificial Sequence
  Description of Artificial Sequence: Synthetic oligonucleotide
uguuuccuauucauuuucu

SEQ ID NO: 649169 - RNA, 19 nt, Artificial Sequence
  Description of Artificial Sequence: Synthetic oligonucleotide
uggaagacguuaugacggg

SEQ ID NO: 649170 - RNA, 19 nt, Artificial Sequence
  Description of Artificial Sequence: Synthetic oligonucleotide
uuuauucacgggccuuuug

SEQ ID NO: 649171 - RNA, 19 nt, Artificial Sequence
  Description of Artificial Sequence: Synthetic oligonucleotide
acuuccgugaggugguguc

SEQ ID NO: 649172 - RNA, 19 nt, Artificial Sequence
  Description of Artificial Sequence: Synthetic oligonucleotide
gaugaagccugcuguagca

SEQ ID NO: 649173 - RNA, 19 nt, Artificial Sequence
  Description of Artificial Sequence: Synthetic oligonucleotide
auuucacugauuggcuucg

SEQ ID NO: 649174 - RNA, 19 nt, Artificial Sequence
  Description of Artificial Sequence: Synthetic oligonucleotide
cugaaucauagcuguagug

SEQ ID NO: 649175 - RNA, 19 nt, Artificial Sequence
  Description of Artificial Sequence: Synthetic oligonucleotide
agcuauagggaagaaugag

SEQ ID NO: 649176 - RNA, 19 nt, Artificial Sequence
  Description of Artificial Sequence: Synthetic oligonucleotide
uguaggugcuucugcaugu

SEQ ID NO: 649177 - RNA, 19 nt, Artificial Sequence
  Description of Artificial Sequence: Synthetic oligonucleotide
aggugaggaaaaugcuucg

SEQ ID NO: 649178 - RNA, 19 nt, Artificial Sequence
  Description of Artificial Sequence: Synthetic oligonucleotide
aaugagucauagucccgga

SEQ ID NO: 649179 - RNA, 19 nt, Artificial Sequence
  Description of Artificial Sequence: Synthetic oligonucleotide
uucuauaggaaggcgcuca

SEQ ID NO: 649180 - RNA, 19 nt, Artificial Sequence
  Description of Artificial Sequence: Synthetic oligonucleotide
acugcugcggaguucucag

SEQ ID NO: 649181 - RNA, 19 nt, Artificial Sequence
  Description of Artificial Sequence: Synthetic oligonucleotide
caggucuuucacuugggag

SEQ ID NO: 649182 - RNA, 19 nt, Artificial Sequence
  Description of Artificial Sequence: Synthetic oligonucleotide
cuaguuccacaccacacac

SEQ ID NO: 649183 - RNA, 19 nt, Artificial Sequence
  Description of Artificial Sequence: Synthetic oligonucleotide
cucaggaugggaucaugcc

SEQ ID NO: 649184 - RNA, 19 nt, Artificial Sequence
  Description of Artificial Sequence: Synthetic oligonucleotide
aggcguuuugguucucagc

SEQ ID NO: 649185 - RNA, 19 nt, Artificial Sequence
  Description of Artificial Sequence: Synthetic oligonucleotide
caugcacuccucauccucc

SEQ ID NO: 649186 - RNA, 19 nt, Artificial Sequence
  Description of Artificial Sequence: Synthetic oligonucleotide
uuguguucuauaggaaggc

SEQ ID NO: 649187 - RNA, 19 nt, Artificial Sequence
  Description of Artificial Sequence: Synthetic oligonucleotide
uguuauugaucaccugcuc

SEQ ID NO: 649188 - RNA, 19 nt, Artificial Sequence
  Description of Artificial Sequence: Synthetic oligonucleotide
gguucuacgguugugguug

SEQ ID NO: 649189 - RNA, 19 nt, Artificial Sequence
  Description of Artificial Sequence: Synthetic oligonucleotide
ugacgggaugucagcaggg

SEQ ID NO: 649190 - RNA, 19 nt, Artificial Sequence
  Description of Artificial Sequence: Synthetic oligonucleotide
aaaaugcuucgguguaggu

SEQ ID NO: 649191 - RNA, 19 nt, Artificial Sequence
  Description of Artificial Sequence: Synthetic oligonucleotide
agaauuuaucgugaggcaa

SEQ ID NO: 649192 - RNA, 19 nt, Artificial Sequence
  Description of Artificial Sequence: Synthetic oligonucleotide
cauacucguccucauaguc

SEQ ID NO: 649193 - RNA, 19 nt, Artificial Sequence
  Description of Artificial Sequence: Synthetic oligonucleotide
cacaaaauaccggucugcc

SEQ ID NO: 649194 - RNA, 19 nt, Artificial Sequence
  Description of Artificial Sequence: Synthetic oligonucleotide
gauuccuuaugaguggaca

SEQ ID NO: 649195 - RNA, 19 nt, Artificial Sequence
  Description of Artificial Sequence: Synthetic oligonucleotide
auuuaucgugaggcaaggc

SEQ ID NO: 649196 - RNA, 19 nt, Artificial Sequence
  Description of Artificial Sequence: Synthetic oligonucleotide
cauuaccacacuguacugc

SEQ ID NO: 649197 - RNA, 19 nt, Artificial Sequence
  Description of Artificial Sequence: Synthetic oligonucleotide
cacagucgggcccagggcg

SEQ ID NO: 649198 - RNA, 19 nt, Artificial Sequence
  Description of Artificial Sequence: Synthetic oligonucleotide
auauacaggucuccugcca

SEQ ID NO: 649199 - RNA, 19 nt, Artificial Sequence
  Description of Artificial Sequence: Synthetic oligonucleotide
uccacuaggggcgggaaug

SEQ ID NO: 649200 - RNA, 19 nt, Artificial Sequence
  Description of Artificial Sequence: Synthetic oligonucleotide
uuccggucagccaugguuc

SEQ ID NO: 649201 - RNA, 19 nt, Artificial Sequence
  Description of Artificial Sequence: Synthetic oligonucleotide
uuucgggguacauagcgua

SEQ ID NO: 649202 - RNA, 19 nt, Artificial Sequence
  Description of Artificial Sequence: Synthetic oligonucleotide
acacagucgggcccagggc

SEQ ID NO: 649203 - RNA, 19 nt, Artificial Sequence
  Description of Artificial Sequence: Synthetic oligonucleotide
uguaggauguaggcagucc

SEQ ID NO: 649204 - RNA, 19 nt, Artificial Sequence
  Description of Artificial Sequence: Synthetic oligonucleotide
cacacagucgggcccaggg

SEQ ID NO: 649205 - RNA, 19 nt, Artificial Sequence
  Description of Artificial Sequence: Synthetic oligonucleotide
gacauucgaaggaagguga

SEQ ID NO: 649206 - RNA, 19 nt, Artificial Sequence
  Description of Artificial Sequence: Synthetic oligonucleotide
caucaaccugguauucucc

SEQ ID NO: 649207 - RNA, 19 nt, Artificial Sequence
  Description of Artificial Sequence: Synthetic oligonucleotide
uuaugacgggaugucagca

SEQ ID NO: 649208 - RNA, 19 nt, Artificial Sequence
  Description of Artificial Sequence: Synthetic oligonucleotide
uggcuaugaagguggcgcg

SEQ ID NO: 649209 - RNA, 19 nt, Artificial Sequence
  Description of Artificial Sequence: Synthetic oligonucleotide
aucaaccugguauucuccu

SEQ ID NO: 649210 - RNA, 19 nt, Artificial Sequence
  Description of Artificial Sequence: Synthetic oligonucleotide
caugcgccuggcuucagcc

SEQ ID NO: 649211 - RNA, 19 nt, Artificial Sequence
  Description of Artificial Sequence: Synthetic oligonucleotide
uucgggguacauagcguag

SEQ ID NO: 649212 - RNA, 19 nt, Artificial Sequence
  Description of Artificial Sequence: Synthetic oligonucleotide
gcuguagugcuccaggcag

SEQ ID NO: 649213 - RNA, 19 nt, Artificial Sequence
  Description of Artificial Sequence: Synthetic oligonucleotide
agucuaguuccacaccaca

SEQ ID NO: 649214 - RNA, 19 nt, Artificial Sequence
  Description of Artificial Sequence: Synthetic oligonucleotide
cagcaggucuuucacuugg

SEQ ID NO: 649215 - RNA, 19 nt, Artificial Sequence
  Description of Artificial Sequence: Synthetic oligonucleotide
acggcauuucacugauugg

SEQ ID NO: 649216 - RNA, 19 nt, Artificial Sequence
  Description of Artificial Sequence: Synthetic oligonucleotide
aacuuucgggguacauagc

SEQ ID NO: 649217 - RNA, 19 nt, Artificial Sequence
  Description of Artificial Sequence: Synthetic oligonucleotide
guguucuauaggaaggcgc

SEQ ID NO: 649218 - RNA, 19 nt, Artificial Sequence
  Description of Artificial Sequence: Synthetic oligonucleotide
ggcguuuugguucucagca

SEQ ID NO: 649219 - RNA, 19 nt, Artificial Sequence
  Description of Artificial Sequence: Synthetic oligonucleotide
ugaaaugguccagcuuggg

SEQ ID NO: 649220 - RNA, 19 nt, Artificial Sequence
  Description of Artificial Sequence: Synthetic oligonucleotide
aggucuuaugucuuguauu

SEQ ID NO: 649221 - RNA, 19 nt, Artificial Sequence
  Description of Artificial Sequence: Synthetic oligonucleotide
uaugaagguggcgcguucc

SEQ ID NO: 649222 - RNA, 19 nt, Artificial Sequence
  Description of Artificial Sequence: Synthetic oligonucleotide
augagucauagucccggag

SEQ ID NO: 649223 - RNA, 19 nt, Artificial Sequence
  Description of Artificial Sequence: Synthetic oligonucleotide
uccuuaugaguggacauuc

SEQ ID NO: 649224 - RNA, 19 nt, Artificial Sequence
  Description of Artificial Sequence: Synthetic oligonucleotide
ucauagucccggaggaauc

SEQ ID NO: 649225 - RNA, 19 nt, Artificial Sequence
  Description of Artificial Sequence: Synthetic oligonucleotide
guuauugaucaccugcucu

SEQ ID NO: 649226 - RNA, 19 nt, Artificial Sequence
  Description of Artificial Sequence: Synthetic oligonucleotide
aaguuauuguagaggauuu

SEQ ID NO: 649227 - RNA, 19 nt, Artificial Sequence
  Description of Artificial Sequence: Synthetic oligonucleotide
ucauacucguccucauagu

SEQ ID NO: 649228 - RNA, 19 nt, Artificial Sequence
  Description of Artificial Sequence: Synthetic oligonucleotide
uguaggguccggcuucacu

SEQ ID NO: 649229 - RNA, 19 nt, Artificial Sequence
  Description of Artificial Sequence: Synthetic oligonucleotide
ugcggaguucucaggccgg

SEQ ID NO: 649230 - RNA, 19 nt, Artificial Sequence
  Description of Artificial Sequence: Synthetic oligonucleotide
guguaggugcuucugcaug

SEQ ID NO: 649231 - RNA, 19 nt, Artificial Sequence
  Description of Artificial Sequence: Synthetic oligonucleotide
agugggaccuccuccauua

SEQ ID NO: 649232 - RNA, 19 nt, Artificial Sequence
  Description of Artificial Sequence: Synthetic oligonucleotide
ucgggguacauagcguagg

SEQ ID NO: 649233 - RNA, 19 nt, Artificial Sequence
  Description of Artificial Sequence: Synthetic oligonucleotide
ggucagaaacuuuauucac

SEQ ID NO: 649234 - RNA, 19 nt, Artificial Sequence
  Description of Artificial Sequence: Synthetic oligonucleotide
agccagucgaggucauugg

SEQ ID NO: 649235 - RNA, 19 nt, Artificial Sequence
  Description of Artificial Sequence: Synthetic oligonucleotide
auguuauugaucaccugcu

SEQ ID NO: 649236 - RNA, 19 nt, Artificial Sequence
  Description of Artificial Sequence: Synthetic oligonucleotide
ugacgacggcauuucacug

SEQ ID NO: 649237 - RNA, 19 nt, Artificial Sequence
  Description of Artificial Sequence: Synthetic oligonucleotide
uugugcacucggcucaggu

SEQ ID NO: 649238 - RNA, 19 nt, Artificial Sequence
  Description of Artificial Sequence: Synthetic oligonucleotide
cagccgauccuccaggaug

SEQ ID NO: 649239 - RNA, 19 nt, Artificial Sequence
  Description of Artificial Sequence: Synthetic oligonucleotide
gaguucucaggccgguacc

SEQ ID NO: 649240 - RNA, 19 nt, Artificial Sequence
  Description of Artificial Sequence: Synthetic oligonucleotide
cuuuggauuccuuaugagu

SEQ ID NO: 649241 - RNA, 19 nt, Artificial Sequence
  Description of Artificial Sequence: Synthetic oligonucleotide
uacgguugugguuggcucu

SEQ ID NO: 649242 - RNA, 19 nt, Artificial Sequence
  Description of Artificial Sequence: Synthetic oligonucleotide
ucuacgguugugguuggcu

SEQ ID NO: 649243 - RNA, 19 nt, Artificial Sequence
  Description of Artificial Sequence: Synthetic oligonucleotide
guuauuguagaggauuucu

SEQ ID NO: 649244 - RNA, 19 nt, Artificial Sequence
  Description of Artificial Sequence: Synthetic oligonucleotide
uuggcuucggugucauugu

SEQ ID NO: 649245 - RNA, 19 nt, Artificial Sequence
  Description of Artificial Sequence: Synthetic oligonucleotide
aggaaucucuuuuccugca

SEQ ID NO: 649246 - RNA, 19 nt, Artificial Sequence
  Description of Artificial Sequence: Synthetic oligonucleotide
ugaaggucuuaugucuugu

SEQ ID NO: 649247 - RNA, 19 nt, Artificial Sequence
  Description of Artificial Sequence: Synthetic oligonucleotide
gacgacggcauuucacuga

SEQ ID NO: 649248 - RNA, 19 nt, Artificial Sequence
  Description of Artificial Sequence: Synthetic oligonucleotide
ucuauaggaaggcgcucau

SEQ ID NO: 649249 - RNA, 19 nt, Artificial Sequence
  Description of Artificial Sequence: Synthetic oligonucleotide
gcucugguugccuucuugg

SEQ ID NO: 649250 - RNA, 19 nt, Artificial Sequence
  Description of Artificial Sequence: Synthetic oligonucleotide
acauagcguagguaggaau

SEQ ID NO: 649251 - RNA, 19 nt, Artificial Sequence
  Description of Artificial Sequence: Synthetic oligonucleotide
gugaggcaaggccaggagc

SEQ ID NO: 649252 - RNA, 19 nt, Artificial Sequence
  Description of Artificial Sequence: Synthetic oligonucleotide
ugguugccaucauaugugu

SEQ ID NO: 649253 - RNA, 19 nt, Artificial Sequence
  Description of Artificial Sequence: Synthetic oligonucleotide
caccagaauuuaucgugag

SEQ ID NO: 649254 - RNA, 19 nt, Artificial Sequence
  Description of Artificial Sequence: Synthetic oligonucleotide
aagggauaaggcacuuugu

SEQ ID NO: 649255 - RNA, 19 nt, Artificial Sequence
  Description of Artificial Sequence: Synthetic oligonucleotide
gcacuuuguguucuauagg

SEQ ID NO: 649256 - RNA, 19 nt, Artificial Sequence
  Description of Artificial Sequence: Synthetic oligonucleotide
ugccuguuacugcugcgga

SEQ ID NO: 649257 - RNA, 19 nt, Artificial Sequence
  Description of Artificial Sequence: Synthetic oligonucleotide
gagugagucuaguuccaca

SEQ ID NO: 649258 - RNA, 19 nt, Artificial Sequence
  Description of Artificial Sequence: Synthetic oligonucleotide
agacguuaugacgggaugu

SEQ ID NO: 649259 - RNA, 19 nt, Artificial Sequence
  Description of Artificial Sequence: Synthetic oligonucleotide
gacgggaugucagcagggg

SEQ ID NO: 649260 - RNA, 19 nt, Artificial Sequence
  Description of Artificial Sequence: Synthetic oligonucleotide
uauucacgggccuuuuguu

SEQ ID NO: 649261 - RNA, 19 nt, Artificial Sequence
  Description of Artificial Sequence: Synthetic oligonucleotide
uucagcuauagggaagaau

SEQ ID NO: 649262 - RNA, 19 nt, Artificial Sequence
  Description of Artificial Sequence: Synthetic oligonucleotide
cagaauuuaucgugaggca

SEQ ID NO: 649263 - RNA, 19 nt, Artificial Sequence
  Description of Artificial Sequence: Synthetic oligonucleotide
augguucuacgguuguggu

SEQ ID NO: 649264 - RNA, 19 nt, Artificial Sequence
  Description of Artificial Sequence: Synthetic oligonucleotide
gugagucuaguuccacacc

SEQ ID NO: 649265 - RNA, 19 nt, Artificial Sequence
  Description of Artificial Sequence: Synthetic oligonucleotide
cuacgguugugguuggcuc

SEQ ID NO: 649266 - RNA, 19 nt, Artificial Sequence
  Description of Artificial Sequence: Synthetic oligonucleotide
ugugcacucggcucagguc

SEQ ID NO: 649267 - RNA, 19 nt, Artificial Sequence
  Description of Artificial Sequence: Synthetic oligonucleotide
augauguguauguuuccua

SEQ ID NO: 649268 - RNA, 19 nt, Artificial Sequence
  Description of Artificial Sequence: Synthetic oligonucleotide
gacguuaugacgggauguc

SEQ ID NO: 649269 - RNA, 19 nt, Artificial Sequence
  Description of Artificial Sequence: Synthetic oligonucleotide
auacucguccucauaguca

SEQ ID NO: 649270 - RNA, 19 nt, Artificial Sequence
  Description of Artificial Sequence: Synthetic oligonucleotide
uagucccggaggaaucucu

SEQ ID NO: 649271 - RNA, 19 nt, Artificial Sequence
  Description of Artificial Sequence: Synthetic oligonucleotide
agcucgcuugucauucacc

SEQ ID NO: 649272 - RNA, 19 nt, Artificial Sequence
  Description of Artificial Sequence: Synthetic oligonucleotide
aacuuuauucacgggccuu

SEQ ID NO: 649273 - RNA, 19 nt, Artificial Sequence
  Description of Artificial Sequence: Synthetic oligonucleotide
caucaaacuuucgggguac

SEQ ID NO: 649274 - RNA, 19 nt, Artificial Sequence
  Description of Artificial Sequence: Synthetic oligonucleotide
gagucuuugggaugucaaa

SEQ ID NO: 649275 - RNA, 19 nt, Artificial Sequence
  Description of Artificial Sequence: Synthetic oligonucleotide
gugaucuuuggauuccuua

SEQ ID NO: 649276 - RNA, 19 nt, Artificial Sequence
  Description of Artificial Sequence: Synthetic oligonucleotide
uaggguccggcuucacuug

SEQ ID NO: 649277 - RNA, 19 nt, Artificial Sequence
  Description of Artificial Sequence: Synthetic oligonucleotide
ugacguucuccuccuuccu

SEQ ID NO: 649278 - RNA, 19 nt, Artificial Sequence
  Description of Artificial Sequence: Synthetic oligonucleotide
cuucgggucuuugugggug

SEQ ID NO: 649279 - RNA, 19 nt, Artificial Sequence
  Description of Artificial Sequence: Synthetic oligonucleotide
acuaggggcgggaauguug

SEQ ID NO: 649280 - RNA, 19 nt, Artificial Sequence
  Description of Artificial Sequence: Synthetic oligonucleotide
gucuaguuccacaccacac

SEQ ID NO: 649281 - RNA, 19 nt, Artificial Sequence
  Description of Artificial Sequence: Synthetic oligonucleotide
uaccggucugccuucugcu

SEQ ID NO: 649282 - RNA, 19 nt, Artificial Sequence
  Description of Artificial Sequence: Synthetic oligonucleotide
guacauagcguagguagga

SEQ ID NO: 649283 - RNA, 19 nt, Artificial Sequence
  Description of Artificial Sequence: Synthetic oligonucleotide
cucgcuugucauucaccag

SEQ ID NO: 649284 - RNA, 19 nt, Artificial Sequence
  Description of Artificial Sequence: Synthetic oligonucleotide
ucauuggcgcccaccuggu

SEQ ID NO: 649285 - RNA, 19 nt, Artificial Sequence
  Description of Artificial Sequence: Synthetic oligonucleotide
guacugcugguagcgaugc

SEQ ID NO: 649286 - RNA, 19 nt, Artificial Sequence
  Description of Artificial Sequence: Synthetic oligonucleotide
cacagcucgcuugucauuc

SEQ ID NO: 649287 - RNA, 19 nt, Artificial Sequence
  Description of Artificial Sequence: Synthetic oligonucleotide
ucuaggcuucgguccagcu

SEQ ID NO: 649288 - RNA, 19 nt, Artificial Sequence
  Description of Artificial Sequence: Synthetic oligonucleotide
uuucacugauuggcuucgg

SEQ ID NO: 649289 - RNA, 19 nt, Artificial Sequence
  Description of Artificial Sequence: Synthetic oligonucleotide
ggaugauguguauguuucc

SEQ ID NO: 649290 - RNA, 19 nt, Artificial Sequence
  Description of Artificial Sequence: Synthetic oligonucleotide
cauccaggacuuccgugag

SEQ ID NO: 649291 - RNA, 19 nt, Artificial Sequence
  Description of Artificial Sequence: Synthetic oligonucleotide
accugguugccaucauaug

SEQ ID NO: 649292 - RNA, 19 nt, Artificial Sequence
  Description of Artificial Sequence: Synthetic oligonucleotide
ggcacuggguuccugcacc

SEQ ID NO: 649293 - RNA, 19 nt, Artificial Sequence
  Description of Artificial Sequence: Synthetic oligonucleotide
acgacggcauuucacugau

SEQ ID NO: 649294 - RNA, 19 nt, Artificial Sequence
  Description of Artificial Sequence: Synthetic oligonucleotide
aggggucggggccacccac

SEQ ID NO: 649295 - RNA, 19 nt, Artificial Sequence
  Description of Artificial Sequence: Synthetic oligonucleotide
uacauagcguagguaggaa

SEQ ID NO: 649296 - RNA, 19 nt, Artificial Sequence
  Description of Artificial Sequence: Synthetic oligonucleotide
agcguagguaggaauccag

SEQ ID NO: 649297 - RNA, 19 nt, Artificial Sequence
  Description of Artificial Sequence: Synthetic oligonucleotide
guucuacgguugugguugg

SEQ ID NO: 649298 - RNA, 19 nt, Artificial Sequence
  Description of Artificial Sequence: Synthetic oligonucleotide
uuccuuaugaguggacauu

SEQ ID NO: 649299 - RNA, 19 nt, Artificial Sequence
  Description of Artificial Sequence: Synthetic oligonucleotide
gugacgacggcauuucacu

SEQ ID NO: 649300 - RNA, 19 nt, Artificial Sequence
  Description of Artificial Sequence: Synthetic oligonucleotide
caggcguuuugguucucag

SEQ ID NO: 649301 - RNA, 19 nt, Artificial Sequence
  Description of Artificial Sequence: Synthetic oligonucleotide
ugagugagucuaguuccac

SEQ ID NO: 649302 - RNA, 19 nt, Artificial Sequence
  Description of Artificial Sequence: Synthetic oligonucleotide
cguagguaggaauccaggc

SEQ ID NO: 649303 - RNA, 19 nt, Artificial Sequence
  Description of Artificial Sequence: Synthetic oligonucleotide
cagcuauagggaagaauga

SEQ ID NO: 649304 - RNA, 19 nt, Artificial Sequence
  Description of Artificial Sequence: Synthetic oligonucleotide
auagucccggaggaaucuc

SEQ ID NO: 649305 - RNA, 19 nt, Artificial Sequence
  Description of Artificial Sequence: Synthetic oligonucleotide
aaacaaccuggcaccagaa

SEQ ID NO: 649306 - RNA, 19 nt, Artificial Sequence
  Description of Artificial Sequence: Synthetic oligonucleotide
uccugcaccaagggauaag

SEQ ID NO: 649307 - RNA, 19 nt, Artificial Sequence
  Description of Artificial Sequence: Synthetic oligonucleotide
gaaggucuuaugucuugua

SEQ ID NO: 649308 - RNA, 19 nt, Artificial Sequence
  Description of Artificial Sequence: Synthetic oligonucleotide
ugcgccuggcuucagccuu

SEQ ID NO: 649309 - RNA, 19 nt, Artificial Sequence
  Description of Artificial Sequence: Synthetic oligonucleotide
ucuucgggucuuugugggu

SEQ ID NO: 649310 - RNA, 19 nt, Artificial Sequence
  Description of Artificial Sequence: Synthetic oligonucleotide
gcucgcuugucauucacca

SEQ ID NO: 649311 - RNA, 19 nt, Artificial Sequence
  Description of Artificial Sequence: Synthetic oligonucleotide
ggauaaggcacuuuguguu

SEQ ID NO: 649312 - RNA, 19 nt, Artificial Sequence
  Description of Artificial Sequence: Synthetic oligonucleotide
aaauaccggucugccuucu

SEQ ID NO: 649313 - RNA, 19 nt, Artificial Sequence
  Description of Artificial Sequence: Synthetic oligonucleotide
ugcacucggcucaggucca

SEQ ID NO: 649314 - RNA, 19 nt, Artificial Sequence
  Description of Artificial Sequence: Synthetic oligonucleotide
ggcgguuuguauaacacaa

SEQ ID NO: 649315 - RNA, 19 nt, Artificial Sequence
  Description of Artificial Sequence: Synthetic oligonucleotide
gagucuaguuccacaccac

SEQ ID NO: 649316 - RNA, 19 nt, Artificial Sequence
  Description of Artificial Sequence: Synthetic oligonucleotide
agagguccaggagucuuug

SEQ ID NO: 649317 - RNA, 19 nt, Artificial Sequence
  Description of Artificial Sequence: Synthetic oligonucleotide
uagcguagguaggaaucca

SEQ ID NO: 649318 - RNA, 19 nt, Artificial Sequence
  Description of Artificial Sequence: Synthetic oligonucleotide
ggauguuauugaucaccug

SEQ ID NO: 649319 - RNA, 19 nt, Artificial Sequence
  Description of Artificial Sequence: Synthetic oligonucleotide
ugguucuacgguugugguu

SEQ ID NO: 649320 - RNA, 19 nt, Artificial Sequence
  Description of Artificial Sequence: Synthetic oligonucleotide
uugggaugucaaagaggaa

SEQ ID NO: 649321 - RNA, 19 nt, Artificial Sequence
  Description of Artificial Sequence: Synthetic oligonucleotide
aggucuccugccauccagg

SEQ ID NO: 649322 - RNA, 19 nt, Artificial Sequence
  Description of Artificial Sequence: Synthetic oligonucleotide
caaauucaucauucuggaa

SEQ ID NO: 649323 - RNA, 19 nt, Artificial Sequence
  Description of Artificial Sequence: Synthetic oligonucleotide
aaggcacuuuguguucuau

SEQ ID NO: 649324 - RNA, 19 nt, Artificial Sequence
  Description of Artificial Sequence: Synthetic oligonucleotide
aggggcgggaauguugucu

SEQ ID NO: 649325 - RNA, 19 nt, Artificial Sequence
  Description of Artificial Sequence: Synthetic oligonucleotide
cuaugaagguggcgcguuc

SEQ ID NO: 649326 - RNA, 19 nt, Artificial Sequence
  Description of Artificial Sequence: Synthetic oligonucleotide
uccggucagccaugguucu

SEQ ID NO: 649327 - RNA, 19 nt, Artificial Sequence
  Description of Artificial Sequence: Synthetic oligonucleotide
caaggagcugaagaucuga

SEQ ID NO: 649328 - RNA, 19 nt, Artificial Sequence
  Description of Artificial Sequence: Synthetic oligonucleotide
cugcagagucucaucaaaa

SEQ ID NO: 649329 - RNA, 19 nt, Artificial Sequence
  Description of Artificial Sequence: Synthetic oligonucleotide
uccgugagguggugucuug

SEQ ID NO: 649330 - RNA, 19 nt, Artificial Sequence
  Description of Artificial Sequence: Synthetic oligonucleotide
gaagacguuaugacgggau

SEQ ID NO: 649331 - RNA, 19 nt, Artificial Sequence
  Description of Artificial Sequence: Synthetic oligonucleotide
aggccgguaccccuuccug

SEQ ID NO: 649332 - RNA, 19 nt, Artificial Sequence
  Description of Artificial Sequence: Synthetic oligonucleotide
gguagcgaugccacugugc

SEQ ID NO: 649333 - RNA, 19 nt, Artificial Sequence
  Description of Artificial Sequence: Synthetic oligonucleotide
caucauuggcgcccaccug

SEQ ID NO: 649334 - RNA, 19 nt, Artificial Sequence
  Description of Artificial Sequence: Synthetic oligonucleotide
gcuucgguccagcuggcug

SEQ ID NO: 649335 - RNA, 19 nt, Artificial Sequence
  Description of Artificial Sequence: Synthetic oligonucleotide
acguuaugacgggauguca

SEQ ID NO: 649336 - RNA, 19 nt, Artificial Sequence
  Description of Artificial Sequence: Synthetic oligonucleotide
ggccgguaccccuuccugg

SEQ ID NO: 649337 - RNA, 19 nt, Artificial Sequence
  Description of Artificial Sequence: Synthetic oligonucleotide
agccgauccuccaggaugu

SEQ ID NO: 649338 - RNA, 19 nt, Artificial Sequence
  Description of Artificial Sequence: Synthetic oligonucleotide
guaggguccggcuucacuu

SEQ ID NO: 649339 - RNA, 19 nt, Artificial Sequence
  Description of Artificial Sequence: Synthetic oligonucleotide
gggauaaggcacuuugugu

SEQ ID NO: 649340 - RNA, 19 nt, Artificial Sequence
  Description of Artificial Sequence: Synthetic oligonucleotide
gcguagguaggaauccagg

SEQ ID NO: 649341 - RNA, 19 nt, Artificial Sequence
  Description of Artificial Sequence: Synthetic oligonucleotide
ucacgggccuuuuguugcu

SEQ ID NO: 649342 - RNA, 19 nt, Artificial Sequence
  Description of Artificial Sequence: Synthetic oligonucleotide
gauguguauguuuccuauu

SEQ ID NO: 649343 - RNA, 19 nt, Artificial Sequence
  Description of Artificial Sequence: Synthetic oligonucleotide
cggcauuucacugauuggc

SEQ ID NO: 649344 - RNA, 19 nt, Artificial Sequence
  Description of Artificial Sequence: Synthetic oligonucleotide
ggugagguguggugguggc

SEQ ID NO: 649345 - RNA, 19 nt, Artificial Sequence
  Description of Artificial Sequence: Synthetic oligonucleotide
augagugagucuaguucca

SEQ ID NO: 649346 - RNA, 19 nt, Artificial Sequence
  Description of Artificial Sequence: Synthetic oligonucleotide
cacaaaauaaggacaccuu

SEQ ID NO: 649347 - RNA, 19 nt, Artificial Sequence
  Description of Artificial Sequence: Synthetic oligonucleotide
agucgaggucauuggcuau

SEQ ID NO: 649348 - RNA, 19 nt, Artificial Sequence
  Description of Artificial Sequence: Synthetic oligonucleotide
acagcucgcuugucauuca

SEQ ID NO: 649349 - RNA, 19 nt, Artificial Sequence
  Description of Artificial Sequence: Synthetic oligonucleotide
cuaggggcgggaauguugu

SEQ ID NO: 649350 - RNA, 19 nt, Artificial Sequence
  Description of Artificial Sequence: Synthetic oligonucleotide
agcaaccucaggggucggg

SEQ ID NO: 649351 - RNA, 19 nt, Artificial Sequence
  Description of Artificial Sequence: Synthetic oligonucleotide
gggaccuccuccauuacca

SEQ ID NO: 649352 - RNA, 19 nt, Artificial Sequence
  Description of Artificial Sequence: Synthetic oligonucleotide
ugauuggcuucggugucau

SEQ ID NO: 649353 - RNA, 19 nt, Artificial Sequence
  Description of Artificial Sequence: Synthetic oligonucleotide
uaccccuuccuggcaagga

SEQ ID NO: 649354 - RNA, 19 nt, Artificial Sequence
  Description of Artificial Sequence: Synthetic oligonucleotide
cuuguauuuucuguaggau

SEQ ID NO: 649355 - RNA, 19 nt, Artificial Sequence
  Description of Artificial Sequence: Synthetic oligonucleotide
gguuccugcaccaagggau

SEQ ID NO: 649356 - RNA, 19 nt, Artificial Sequence
  Description of Artificial Sequence: Synthetic oligonucleotide
ugcugguagcgaugccacu

SEQ ID NO: 649357 - RNA, 19 nt, Artificial Sequence
  Description of Artificial Sequence: Synthetic oligonucleotide
guucuauaggaaggcgcuc

SEQ ID NO: 649358 - RNA, 19 nt, Artificial Sequence
  Description of Artificial Sequence: Synthetic oligonucleotide
aggguccggcuucacuugu

SEQ ID NO: 649359 - RNA, 19 nt, Artificial Sequence
  Description of Artificial Sequence: Synthetic oligonucleotide
guaccccuuccuggcaagg

SEQ ID NO: 649360 - RNA, 19 nt, Artificial Sequence
  Description of Artificial Sequence: Synthetic oligonucleotide
gccagucgaggucauuggc

SEQ ID NO: 649361 - RNA, 19 nt, Artificial Sequence
  Description of Artificial Sequence: Synthetic oligonucleotide
gcuauagggaagaaugagu

SEQ ID NO: 649362 - RNA, 19 nt, Artificial Sequence
  Description of Artificial Sequence: Synthetic oligonucleotide
augcgccuggcuucagccu

SEQ ID NO: 649363 - RNA, 19 nt, Artificial Sequence
  Description of Artificial Sequence: Synthetic oligonucleotide
cuguaggauguaggcaguc

SEQ ID NO: 649364 - RNA, 19 nt, Artificial Sequence
  Description of Artificial Sequence: Synthetic oligonucleotide
caaggaaagccaugcgccu

SEQ ID NO: 649365 - RNA, 19 nt, Artificial Sequence
  Description of Artificial Sequence: Synthetic oligonucleotide
gccuguuacugcugcggag

SEQ ID NO: 649366 - RNA, 19 nt, Artificial Sequence
  Description of Artificial Sequence: Synthetic oligonucleotide
cuuucgggguacauagcgu

SEQ ID NO: 649367 - RNA, 19 nt, Artificial Sequence
  Description of Artificial Sequence: Synthetic oligonucleotide
gccgguaccccuuccuggc

SEQ ID NO: 649368 - RNA, 19 nt, Artificial Sequence
  Description of Artificial Sequence: Synthetic oligonucleotide
cuggaugaagccugcugua

SEQ ID NO: 649369 - RNA, 19 nt, Artificial Sequence
  Description of Artificial Sequence: Synthetic oligonucleotide
uccuccacuaggggcggga

SEQ ID NO: 649370 - RNA, 19 nt, Artificial Sequence
  Description of Artificial Sequence: Synthetic oligonucleotide
gggcgguuuguauaacaca

SEQ ID NO: 649371 - RNA, 19 nt, Artificial Sequence
  Description of Artificial Sequence: Synthetic oligonucleotide
aucaaacuuucgggguaca

SEQ ID NO: 649372 - RNA, 19 nt, Artificial Sequence
  Description of Artificial Sequence: Synthetic oligonucleotide
ugguugccuucuuggcuuc

SEQ ID NO: 649373 - RNA, 19 nt, Artificial Sequence
  Description of Artificial Sequence: Synthetic oligonucleotide
ggggcgguuuguauaacac

SEQ ID NO: 649374 - RNA, 19 nt, Artificial Sequence
  Description of Artificial Sequence: Synthetic oligonucleotide
gucauagucccggaggaau

SEQ ID NO: 649375 - RNA, 19 nt, Artificial Sequence
  Description of Artificial Sequence: Synthetic oligonucleotide
uucuacgguugugguuggc

SEQ ID NO: 649376 - RNA, 19 nt, Artificial Sequence
  Description of Artificial Sequence: Synthetic oligonucleotide
aguccgggucucauccaag

SEQ ID NO: 649377 - RNA, 19 nt, Artificial Sequence
  Description of Artificial Sequence: Synthetic oligonucleotide
guggugucuugcugcacaa

SEQ ID NO: 649378 - RNA, 19 nt, Artificial Sequence
  Description of Artificial Sequence: Synthetic oligonucleotide
cugguugccuucuuggcuu

SEQ ID NO: 649379 - RNA, 19 nt, Artificial Sequence
  Description of Artificial Sequence: Synthetic oligonucleotide
ccugguugccaucauaugu

SEQ ID NO: 649380 - RNA, 19 nt, Artificial Sequence
  Description of Artificial Sequence: Synthetic oligonucleotide
ccaugcacuccucauccuc

SEQ ID NO: 649381 - RNA, 19 nt, Artificial Sequence
  Description of Artificial Sequence: Synthetic oligonucleotide
gcaccagaauuuaucguga

SEQ ID NO: 649382 - RNA, 19 nt, Artificial Sequence
  Description of Artificial Sequence: Synthetic oligonucleotide
uuccugcaccaagggauaa

SEQ ID NO: 649383 - RNA, 19 nt, Artificial Sequence
  Description of Artificial Sequence: Synthetic oligonucleotide
cuugugcacucggcucagg

SEQ ID NO: 649384 - RNA, 19 nt, Artificial Sequence
  Description of Artificial Sequence: Synthetic oligonucleotide
gcguuuugguucucagcac

SEQ ID NO: 649385 - RNA, 19 nt, Artificial Sequence
  Description of Artificial Sequence: Synthetic oligonucleotide
ggagucuuugggaugucaa

SEQ ID NO: 649386 - RNA, 19 nt, Artificial Sequence
  Description of Artificial Sequence: Synthetic oligonucleotide
uguaggcaguccgggucuc

SEQ ID NO: 649387 - RNA, 19 nt, Artificial Sequence
  Description of Artificial Sequence: Synthetic oligonucleotide
uuacugcugcggaguucuc

SEQ ID NO: 649388 - RNA, 19 nt, Artificial Sequence
  Description of Artificial Sequence: Synthetic oligonucleotide
uggugucuugcugcacaaa

SEQ ID NO: 649389 - RNA, 19 nt, Artificial Sequence
  Description of Artificial Sequence: Synthetic oligonucleotide
gucggggccacccacucau

SEQ ID NO: 649390 - RNA, 19 nt, Artificial Sequence
  Description of Artificial Sequence: Synthetic oligonucleotide
cgguuuguauaacacaaaa

SEQ ID NO: 649391 - RNA, 19 nt, Artificial Sequence
  Description of Artificial Sequence: Synthetic oligonucleotide
ggucuccugccauccagga

SEQ ID NO: 649392 - RNA, 19 nt, Artificial Sequence
  Description of Artificial Sequence: Synthetic oligonucleotide
caccaagggauaaggcacu

SEQ ID NO: 649393 - RNA, 19 nt, Artificial Sequence
  Description of Artificial Sequence: Synthetic oligonucleotide
gcuagaaggucagaaacuu

SEQ ID NO: 649394 - RNA, 19 nt, Artificial Sequence
  Description of Artificial Sequence: Synthetic oligonucleotide
aggcuucgguccagcuggc

SEQ ID NO: 649395 - RNA, 19 nt, Artificial Sequence
  Description of Artificial Sequence: Synthetic oligonucleotide
cauagucaucaaccuggua

SEQ ID NO: 649396 - RNA, 19 nt, Artificial Sequence
  Description of Artificial Sequence: Synthetic oligonucleotide
ggaucaugccuuugcuucu

SEQ ID NO: 649397 - RNA, 19 nt, Artificial Sequence
  Description of Artificial Sequence: Synthetic oligonucleotide
cauagucccggaggaaucu

SEQ ID NO: 649398 - RNA, 19 nt, Artificial Sequence
  Description of Artificial Sequence: Synthetic oligonucleotide
ggauuccuuaugaguggac

SEQ ID NO: 649399 - RNA, 19 nt, Artificial Sequence
  Description of Artificial Sequence: Synthetic oligonucleotide
caggugaggugugguggug

SEQ ID NO: 649400 - RNA, 19 nt, Artificial Sequence
  Description of Artificial Sequence: Synthetic oligonucleotide
ggcauuucacugauuggcu

SEQ ID NO: 649401 - RNA, 19 nt, Artificial Sequence
  Description of Artificial Sequence: Synthetic oligonucleotide
ggaagacguuaugacggga

SEQ ID NO: 649402 - RNA, 19 nt, Artificial Sequence
  Description of Artificial Sequence: Synthetic oligonucleotide
ggcuucggugucauuguga

SEQ ID NO: 649403 - RNA, 19 nt, Artificial Sequence
  Description of Artificial Sequence: Synthetic oligonucleotide
ccugcggcugaugaguuca

SEQ ID NO: 649404 - RNA, 19 nt, Artificial Sequence
  Description of Artificial Sequence: Synthetic oligonucleotide
gugucuugcugcacaaaau

SEQ ID NO: 649405 - RNA, 19 nt, Artificial Sequence
  Description of Artificial Sequence: Synthetic oligonucleotide
cccuugugcacucggcuca

SEQ ID NO: 649406 - RNA, 19 nt, Artificial Sequence
  Description of Artificial Sequence: Synthetic oligonucleotide
ggaugaaaugguccagcuu

SEQ ID NO: 649407 - RNA, 19 nt, Artificial Sequence
  Description of Artificial Sequence: Synthetic oligonucleotide
cuucgguguaggugcuucu

SEQ ID NO: 649408 - RNA, 19 nt, Artificial Sequence
  Description of Artificial Sequence: Synthetic oligonucleotide
ggccacccacucaucaaac

SEQ ID NO: 649409 - RNA, 19 nt, Artificial Sequence
  Description of Artificial Sequence: Synthetic oligonucleotide
gguccggcuucacuugucu

SEQ ID NO: 649410 - RNA, 19 nt, Artificial Sequence
  Description of Artificial Sequence: Synthetic oligonucleotide
cagccaugguucuacgguu

SEQ ID NO: 649411 - RNA, 19 nt, Artificial Sequence
  Description of Artificial Sequence: Synthetic oligonucleotide
ccggcuucacuugucuuuc

SEQ ID NO: 649412 - RNA, 19 nt, Artificial Sequence
  Description of Artificial Sequence: Synthetic oligonucleotide
cuucggugucauugugacu

SEQ ID NO: 649413 - RNA, 19 nt, Artificial Sequence
  Description of Artificial Sequence: Synthetic oligonucleotide
augcuucgguguaggugcu

SEQ ID NO: 649414 - RNA, 19 nt, Artificial Sequence
  Description of Artificial Sequence: Synthetic oligonucleotide
gguucaggaugauguguau

SEQ ID NO: 649415 - RNA, 19 nt, Artificial Sequence
  Description of Artificial Sequence: Synthetic oligonucleotide
cuucagcuauagggaagaa

SEQ ID NO: 649416 - RNA, 19 nt, Artificial Sequence
  Description of Artificial Sequence: Synthetic oligonucleotide
ggcuccugacguucuccuc

SEQ ID NO: 649417 - RNA, 19 nt, Artificial Sequence
  Description of Artificial Sequence: Synthetic oligonucleotide
gucuuaugucuuguauuuu

SEQ ID NO: 649418 - RNA, 19 nt, Artificial Sequence
  Description of Artificial Sequence: Synthetic oligonucleotide
ggcgggaauguugucuuua

SEQ ID NO: 649419 - RNA, 19 nt, Artificial Sequence
  Description of Artificial Sequence: Synthetic oligonucleotide
ggaaguuauuguagaggau

SEQ ID NO: 649420 - RNA, 19 nt, Artificial Sequence
  Description of Artificial Sequence: Synthetic oligonucleotide
ggggccacccacucaucaa

SEQ ID NO: 649421 - RNA, 19 nt, Artificial Sequence
  Description of Artificial Sequence: Synthetic oligonucleotide
agguggcgcguuccaggua

SEQ ID NO: 649422 - RNA, 19 nt, Artificial Sequence
  Description of Artificial Sequence: Synthetic oligonucleotide
ccgugagguggugucuugc

SEQ ID NO: 649423 - RNA, 19 nt, Artificial Sequence
  Description of Artificial Sequence: Synthetic oligonucleotide
ugcuucgguguaggugcuu

SEQ ID NO: 649424 - RNA, 19 nt, Artificial Sequence
  Description of Artificial Sequence: Synthetic oligonucleotide
guccucggcuuuccugucu

SEQ ID NO: 649425 - RNA, 19 nt, Artificial Sequence
  Description of Artificial Sequence: Synthetic oligonucleotide
ccaugguucuacgguugug

SEQ ID NO: 649426 - RNA, 19 nt, Artificial Sequence
  Description of Artificial Sequence: Synthetic oligonucleotide
ggaaggaggcagaucuggu

SEQ ID NO: 649427 - RNA, 19 nt, Artificial Sequence
  Description of Artificial Sequence: Synthetic oligonucleotide
cgguguaggugcuucugca

SEQ ID NO: 649428 - RNA, 19 nt, Artificial Sequence
  Description of Artificial Sequence: Synthetic oligonucleotide
ccgggucucauccaaggcu

SEQ ID NO: 649429 - RNA, 19 nt, Artificial Sequence
  Description of Artificial Sequence: Synthetic oligonucleotide
gccagccgauccuccagga

SEQ ID NO: 649430 - RNA, 19 nt, Artificial Sequence
  Description of Artificial Sequence: Synthetic oligonucleotide
ccuugugcacucggcucag

SEQ ID NO: 649431 - RNA, 19 nt, Artificial Sequence
  Description of Artificial Sequence: Synthetic oligonucleotide
gggucggggccacccacuc

SEQ ID NO: 649432 - RNA, 19 nt, Artificial Sequence
  Description of Artificial Sequence: Synthetic oligonucleotide
cagagguccaggagucuuu

SEQ ID NO: 649433 - RNA, 19 nt, Artificial Sequence
  Description of Artificial Sequence: Synthetic oligonucleotide
cagcaaccucaggggucgg

SEQ ID NO: 649434 - RNA, 19 nt, Artificial Sequence
  Description of Artificial Sequence: Synthetic oligonucleotide
gcaguccgggucucaucca

SEQ ID NO: 649435 - RNA, 19 nt, Artificial Sequence
  Description of Artificial Sequence: Synthetic oligonucleotide
caggagucuuugggauguc

SEQ ID NO: 649436 - RNA, 19 nt, Artificial Sequence
  Description of Artificial Sequence: Synthetic oligonucleotide
ggugucauugugacuucau

SEQ ID NO: 649437 - RNA, 19 nt, Artificial Sequence
  Description of Artificial Sequence: Synthetic oligonucleotide
cuuccgugagguggugucu

SEQ ID NO: 649438 - RNA, 19 nt, Artificial Sequence
  Description of Artificial Sequence: Synthetic oligonucleotide
gccaugguucuacgguugu

SEQ ID NO: 649439 - RNA, 19 nt, Artificial Sequence
  Description of Artificial Sequence: Synthetic oligonucleotide
ggggcgggaauguugucuu

SEQ ID NO: 649440 - RNA, 19 nt, Artificial Sequence
  Description of Artificial Sequence: Synthetic oligonucleotide
ggucggggccacccacuca

SEQ ID NO: 649441 - RNA, 19 nt, Artificial Sequence
  Description of Artificial Sequence: Synthetic oligonucleotide
caggccgguaccccuuccu

SEQ ID NO: 649442 - RNA, 19 nt, Artificial Sequence
  Description of Artificial Sequence: Synthetic oligonucleotide
ggacuuccgugagguggug

SEQ ID NO: 649443 - RNA, 19 nt, Artificial Sequence
  Description of Artificial Sequence: Synthetic oligonucleotide
gcgaugccacugugccacc

SEQ ID NO: 649444 - RNA, 19 nt, Artificial Sequence
  Description of Artificial Sequence: Synthetic oligonucleotide
gccugcggcugaugaguuc

SEQ ID NO: 649445 - RNA, 19 nt, Artificial Sequence
  Description of Artificial Sequence: Synthetic oligonucleotide
gauuggcuucggugucauu

SEQ ID NO: 649446 - RNA, 19 nt, Artificial Sequence
  Description of Artificial Sequence: Synthetic oligonucleotide
ggcuaugaagguggcgcgu

SEQ ID NO: 649447 - RNA, 19 nt, Artificial Sequence
  Description of Artificial Sequence: Synthetic oligonucleotide
ccacugaaucccugcugaa

SEQ ID NO: 649448 - RNA, 19 nt, Artificial Sequence
  Description of Artificial Sequence: Synthetic oligonucleotide
gcuaugaagguggcgcguu

SEQ ID NO: 649449 - RNA, 19 nt, Artificial Sequence
  Description of Artificial Sequence: Synthetic oligonucleotide
ggguccggcuucacuuguc

SEQ ID NO: 649450 - RNA, 19 nt, Artificial Sequence
  Description of Artificial Sequence: Synthetic oligonucleotide
cugcaggauccuggaugaa

SEQ ID NO: 649451 - RNA, 19 nt, Artificial Sequence
  Description of Artificial Sequence: Synthetic oligonucleotide
ccgguaccccuuccuggca

SEQ ID NO: 649452 - RNA, 19 nt, Artificial Sequence
  Description of Artificial Sequence: Synthetic oligonucleotide
cggcugaugaguucaucau

SEQ ID NO: 649453 - RNA, 19 nt, Artificial Sequence
  Description of Artificial Sequence: Synthetic oligonucleotide
gcacucggcucagguccac

SEQ ID NO: 649454 - RNA, 19 nt, Artificial Sequence
  Description of Artificial Sequence: Synthetic oligonucleotide
cacucggcucagguccacu

SEQ ID NO: 649455 - RNA, 19 nt, Artificial Sequence
  Description of Artificial Sequence: Synthetic oligonucleotide
cauuggcgcccaccugguu

SEQ ID NO: 649456 - RNA, 19 nt, Artificial Sequence
  Description of Artificial Sequence: Synthetic oligonucleotide
ccgauccuccaggauguua

SEQ ID NO: 649457 - RNA, 19 nt, Artificial Sequence
  Description of Artificial Sequence: Synthetic oligonucleotide
cgguaccccuuccuggcaa

SEQ ID NO: 649458 - RNA, 19 nt, Artificial Sequence
  Description of Artificial Sequence: Synthetic oligonucleotide
cacuaggggcgggaauguu

SEQ ID NO: 649459 - RNA, 19 nt, Artificial Sequence
  Description of Artificial Sequence: Synthetic oligonucleotide
gcggaguucucaggccggu

SEQ ID NO: 649460 - RNA, 19 nt, Artificial Sequence
  Description of Artificial Sequence: Synthetic oligonucleotide
ccacuaggggcgggaaugu

SEQ ID NO: 649461 - RNA, 19 nt, Artificial Sequence
  Description of Artificial Sequence: Synthetic oligonucleotide
cgggccuuuuguugcuucu

SEQ ID NO: 649462 - RNA, 19 nt, Artificial Sequence
  Description of Artificial Sequence: Synthetic oligonucleotide
gggcgggaauguugucuuu

SEQ ID NO: 649463 - RNA, 19 nt, Artificial Sequence
  Description of Artificial Sequence: Synthetic oligonucleotide
cacgggccuuuuguugcuu

SEQ ID NO: 649464 - RNA, 19 nt, Artificial Sequence
  Description of Artificial Sequence: Synthetic oligonucleotide
ggccugcggcugaugaguu

SEQ ID NO: 649465 - RNA, 19 nt, Artificial Sequence
  Description of Artificial Sequence: Synthetic oligonucleotide
ccggucagccaugguucua

SEQ ID NO: 649466 - RNA, 19 nt, Artificial Sequence
  Description of Artificial Sequence: Synthetic oligonucleotide
cggcuucacuugucuuucu

SEQ ID NO: 649467 - RNA, 19 nt, Artificial Sequence
  Description of Artificial Sequence: Synthetic oligonucleotide
gcgccuggcuucagccuuu

SEQ ID NO: 649468 - RNA, 19 nt, Artificial Sequence
  Description of Artificial Sequence: Synthetic oligonucleotide
gccgauccuccaggauguu

SEQ ID NO: 649469 - RNA, 19 nt, Artificial Sequence
  Description of Artificial Sequence: Synthetic oligonucleotide
cgacggcauuucacugauu

SEQ ID NO: 649470 - RNA, 19 nt, Artificial Sequence
  Description of Artificial Sequence: Synthetic oligonucleotide
aauauauauauauauauca

SEQ ID NO: 649471 - RNA, 19 nt, Artificial Sequence
  Description of Artificial Sequence: Synthetic oligonucleotide
ucuuugauaauauaaaugc

SEQ ID NO: 649472 - RNA, 19 nt, Artificial Sequence
  Description of Artificial Sequence: Synthetic oligonucleotide
auauauaucaaacuauugg

SEQ ID NO: 649473 - RNA, 19 nt, Artificial Sequence
  Description of Artificial Sequence: Synthetic oligonucleotide
aauguaauaucacaaacug

SEQ ID NO: 649474 - RNA, 19 nt, Artificial Sequence
  Description of Artificial Sequence: Synthetic oligonucleotide
uuuaaccucauuuaaaucc

SEQ ID NO: 649475 - RNA, 19 nt, Artificial Sequence
  Description of Artificial Sequence: Synthetic oligonucleotide
cuuauaaucauaacaaugc

SEQ ID NO: 649476 - RNA, 19 nt, Artificial Sequence
  Description of Artificial Sequence: Synthetic oligonucleotide
uuagguaugaaacaaagcu

SEQ ID NO: 649477 - RNA, 19 nt, Artificial Sequence
  Description of Artificial Sequence: Synthetic oligonucleotide
aaagaauauauauauauau

SEQ ID NO: 649478 - RNA, 19 nt, Artificial Sequence
  Description of Artificial Sequence: Synthetic oligonucleotide
aauagcaaaaguuaaugca

SEQ ID NO: 649479 - RNA, 19 nt, Artificial Sequence
  Description of Artificial Sequence: Synthetic oligonucleotide
auaaaauggaccuauaaca

SEQ ID NO: 649480 - RNA, 19 nt, Artificial Sequence
  Description of Artificial Sequence: Synthetic oligonucleotide
uuugauaauauaaaugcac

SEQ ID NO: 649481 - RNA, 19 nt, Artificial Sequence
  Description of Artificial Sequence: Synthetic oligonucleotide
aaaugcaccaaccacuggg

SEQ ID NO: 649482 - RNA, 19 nt, Artificial Sequence
  Description of Artificial Sequence: Synthetic oligonucleotide
aaaucaguacucuugccac

SEQ ID NO: 649483 - RNA, 19 nt, Artificial Sequence
  Description of Artificial Sequence: Synthetic oligonucleotide
auaacaaugccuuagaaaa

SEQ ID NO: 649484 - RNA, 19 nt, Artificial Sequence
  Description of Artificial Sequence: Synthetic oligonucleotide
uauauaucaaacuauugga

SEQ ID NO: 649485 - RNA, 19 nt, Artificial Sequence
  Description of Artificial Sequence: Synthetic oligonucleotide
uugaauuaaaaucggauga

SEQ ID NO: 649486 - RNA, 19 nt, Artificial Sequence
  Description of Artificial Sequence: Synthetic oligonucleotide
auauauauauauaucaaac

SEQ ID NO: 649487 - RNA, 19 nt, Artificial Sequence
  Description of Artificial Sequence: Synthetic oligonucleotide
uuauauaucuuaugggagg

SEQ ID NO: 649488 - RNA, 19 nt, Artificial Sequence
  Description of Artificial Sequence: Synthetic oligonucleotide
aaugccuuagaaaagcagc

SEQ ID NO: 649489 - RNA, 19 nt, Artificial Sequence
  Description of Artificial Sequence: Synthetic oligonucleotide
auaauauaaaugcaccaac

SEQ ID NO: 649490 - RNA, 19 nt, Artificial Sequence
  Description of Artificial Sequence: Synthetic oligonucleotide
uguauuaccaaacaguaau

SEQ ID NO: 649491 - RNA, 19 nt, Artificial Sequence
  Description of Artificial Sequence: Synthetic oligonucleotide
aagcuauagaacuugagca

SEQ ID NO: 649492 - RNA, 19 nt, Artificial Sequence
  Description of Artificial Sequence: Synthetic oligonucleotide
aauauaaaugcaccaacca

SEQ ID NO: 649493 - RNA, 19 nt, Artificial Sequence
  Description of Artificial Sequence: Synthetic oligonucleotide
uguguagugacaaagaaua

SEQ ID NO: 649494 - RNA, 19 nt, Artificial Sequence
  Description of Artificial Sequence: Synthetic oligonucleotide
ucaaguuaagucuagucag

SEQ ID NO: 649495 - RNA, 19 nt, Artificial Sequence
  Description of Artificial Sequence: Synthetic oligonucleotide
aauaacuuaguguccauca

SEQ ID NO: 649496 - RNA, 19 nt, Artificial Sequence
  Description of Artificial Sequence: Synthetic oligonucleotide
agaauauauauauauauau

SEQ ID NO: 649497 - RNA, 19 nt, Artificial Sequence
  Description of Artificial Sequence: Synthetic oligonucleotide
aaucuaaugagcacaaggg

SEQ ID NO: 649498 - RNA, 19 nt, Artificial Sequence
  Description of Artificial Sequence: Synthetic oligonucleotide
ucuuaggucauccaggccc

SEQ ID NO: 649499 - RNA, 19 nt, Artificial Sequence
  Description of Artificial Sequence: Synthetic oligonucleotide
uugauaauauaaaugcacc

SEQ ID NO: 649500 - RNA, 19 nt, Artificial Sequence
  Description of Artificial Sequence: Synthetic oligonucleotide
auauaaaugcaccaaccac

SEQ ID NO: 649501 - RNA, 19 nt, Artificial Sequence
  Description of Artificial Sequence: Synthetic oligonucleotide
acaaagaauauauauauau

SEQ ID NO: 649502 - RNA, 19 nt, Artificial Sequence
  Description of Artificial Sequence: Synthetic oligonucleotide
uauauauauauaucaaacu

SEQ ID NO: 649503 - RNA, 19 nt, Artificial Sequence
  Description of Artificial Sequence: Synthetic oligonucleotide
uguaaaagaggacucgucc

SEQ ID NO: 649504 - RNA, 19 nt, Artificial Sequence
  Description of Artificial Sequence: Synthetic oligonucleotide
aaucauuuguaaaagagga

SEQ ID NO: 649505 - RNA, 19 nt, Artificial Sequence
  Description of Artificial Sequence: Synthetic oligonucleotide
ugaucuuucaaguaucagc

SEQ ID NO: 649506 - RNA, 19 nt, Artificial Sequence
  Description of Artificial Sequence: Synthetic oligonucleotide
acaaaacugauuuaaccuc

SEQ ID NO: 649507 - RNA, 19 nt, Artificial Sequence
  Description of Artificial Sequence: Synthetic oligonucleotide
gauaauuucgccugcgaag

SEQ ID NO: 649508 - RNA, 19 nt, Artificial Sequence
  Description of Artificial Sequence: Synthetic oligonucleotide
uguaugcuggcuuaaaacc

SEQ ID NO: 649509 - RNA, 19 nt, Artificial Sequence
  Description of Artificial Sequence: Synthetic oligonucleotide
aauaugauuaccaaggauu

SEQ ID NO: 649510 - RNA, 19 nt, Artificial Sequence
  Description of Artificial Sequence: Synthetic oligonucleotide
uauauauauauauaucaaa

SEQ ID NO: 649511 - RNA, 19 nt, Artificial Sequence
  Description of Artificial Sequence: Synthetic oligonucleotide
acuaucacugcucucaguc

SEQ ID NO: 649512 - RNA, 19 nt, Artificial Sequence
  Description of Artificial Sequence: Synthetic oligonucleotide
uugagauugaucuuucaag

SEQ ID NO: 649513 - RNA, 19 nt, Artificial Sequence
  Description of Artificial Sequence: Synthetic oligonucleotide
auauauauauaucaaacua

SEQ ID NO: 649514 - RNA, 19 nt, Artificial Sequence
  Description of Artificial Sequence: Synthetic oligonucleotide
aguaucagcaauauuaguc

SEQ ID NO: 649515 - RNA, 19 nt, Artificial Sequence
  Description of Artificial Sequence: Synthetic oligonucleotide
uuauaaucauaacaaugcc

SEQ ID NO: 649516 - RNA, 19 nt, Artificial Sequence
  Description of Artificial Sequence: Synthetic oligonucleotide
ucugagucaaaucaguacu

SEQ ID NO: 649517 - RNA, 19 nt, Artificial Sequence
  Description of Artificial Sequence: Synthetic oligonucleotide
aauuagguaugaaacaaag

SEQ ID NO: 649518 - RNA, 19 nt, Artificial Sequence
  Description of Artificial Sequence: Synthetic oligonucleotide
guugaauuaaaaucggaug

SEQ ID NO: 649519 - RNA, 19 nt, Artificial Sequence
  Description of Artificial Sequence: Synthetic oligonucleotide
uauaacauguagcaauucu

SEQ ID NO: 649520 - RNA, 19 nt, Artificial Sequence
  Description of Artificial Sequence: Synthetic oligonucleotide
ucaaauguggcauucuaug

SEQ ID NO: 649521 - RNA, 19 nt, Artificial Sequence
  Description of Artificial Sequence: Synthetic oligonucleotide
cuuauauaucuuaugggag

SEQ ID NO: 649522 - RNA, 19 nt, Artificial Sequence
  Description of Artificial Sequence: Synthetic oligonucleotide
accuaguugagauugaucu

SEQ ID NO: 649523 - RNA, 19 nt, Artificial Sequence
  Description of Artificial Sequence: Synthetic oligonucleotide
caaaaguuaaugcaccagg

SEQ ID NO: 649524 - RNA, 19 nt, Artificial Sequence
  Description of Artificial Sequence: Synthetic oligonucleotide
gauauccucacuuaaagaa

SEQ ID NO: 649525 - RNA, 19 nt, Artificial Sequence
  Description of Artificial Sequence: Synthetic oligonucleotide
aaucauaacaaugccuuag

SEQ ID NO: 649526 - RNA, 19 nt, Artificial Sequence
  Description of Artificial Sequence: Synthetic oligonucleotide
uucuuuagucauaucaccc

SEQ ID NO: 649527 - RNA, 19 nt, Artificial Sequence
  Description of Artificial Sequence: Synthetic oligonucleotide
cucacuuaaagaaauauga

SEQ ID NO: 649528 - RNA, 19 nt, Artificial Sequence
  Description of Artificial Sequence: Synthetic oligonucleotide
aucaaguuaagucuaguca

SEQ ID NO: 649529 - RNA, 19 nt, Artificial Sequence
  Description of Artificial Sequence: Synthetic oligonucleotide
uccaucaucaaguuaaguc

SEQ ID NO: 649530 - RNA, 19 nt, Artificial Sequence
  Description of Artificial Sequence: Synthetic oligonucleotide
cagcuuauauaucuuaugg

SEQ ID NO: 649531 - RNA, 19 nt, Artificial Sequence
  Description of Artificial Sequence: Synthetic oligonucleotide
aaugcaccaggagacaucg

SEQ ID NO: 649532 - RNA, 19 nt, Artificial Sequence
  Description of Artificial Sequence: Synthetic oligonucleotide
aaucggaugaauucucugu

SEQ ID NO: 649533 - RNA, 19 nt, Artificial Sequence
  Description of Artificial Sequence: Synthetic oligonucleotide
ucuuaugggaggaaaucag

SEQ ID NO: 649534 - RNA, 19 nt, Artificial Sequence
  Description of Artificial Sequence: Synthetic oligonucleotide
aguuaaugcaccaggagac

SEQ ID NO: 649535 - RNA, 19 nt, Artificial Sequence
  Description of Artificial Sequence: Synthetic oligonucleotide
uuaaccucauuuaaaucca

SEQ ID NO: 649536 - RNA, 19 nt, Artificial Sequence
  Description of Artificial Sequence: Synthetic oligonucleotide
uuaccaaggauuaagugua

SEQ ID NO: 649537 - RNA, 19 nt, Artificial Sequence
  Description of Artificial Sequence: Synthetic oligonucleotide
acauacacuaggucuauuc

SEQ ID NO: 649538 - RNA, 19 nt, Artificial Sequence
  Description of Artificial Sequence: Synthetic oligonucleotide
agucuuaccauuaacagcu

SEQ ID NO: 649539 - RNA, 19 nt, Artificial Sequence
  Description of Artificial Sequence: Synthetic oligonucleotide
uccauuucauuucuuaggu

SEQ ID NO: 649540 - RNA, 19 nt, Artificial Sequence
  Description of Artificial Sequence: Synthetic oligonucleotide
uauaauagcaaaaguuaau

SEQ ID NO: 649541 - RNA, 19 nt, Artificial Sequence
  Description of Artificial Sequence: Synthetic oligonucleotide
aaauaugauuaccaaggau

SEQ ID NO: 649542 - RNA, 19 nt, Artificial Sequence
  Description of Artificial Sequence: Synthetic oligonucleotide
ugcaaugauaauuucgccu

SEQ ID NO: 649543 - RNA, 19 nt, Artificial Sequence
  Description of Artificial Sequence: Synthetic oligonucleotide
agcaucauuucauugguug

SEQ ID NO: 649544 - RNA, 19 nt, Artificial Sequence
  Description of Artificial Sequence: Synthetic oligonucleotide
uggaccuauaacauguagc

SEQ ID NO: 649545 - RNA, 19 nt, Artificial Sequence
  Description of Artificial Sequence: Synthetic oligonucleotide
aaucacaguauacuucacu

SEQ ID NO: 649546 - RNA, 19 nt, Artificial Sequence
  Description of Artificial Sequence: Synthetic oligonucleotide
caaguaucagcaauauuag

SEQ ID NO: 649547 - RNA, 19 nt, Artificial Sequence
  Description of Artificial Sequence: Synthetic oligonucleotide
aauauguuuucauuuuauu

SEQ ID NO: 649548 - RNA, 19 nt, Artificial Sequence
  Description of Artificial Sequence: Synthetic oligonucleotide
caguuuaugaagucucugg

SEQ ID NO: 649549 - RNA, 19 nt, Artificial Sequence
  Description of Artificial Sequence: Synthetic oligonucleotide
gaauauauauauauauauc

SEQ ID NO: 649550 - RNA, 19 nt, Artificial Sequence
  Description of Artificial Sequence: Synthetic oligonucleotide
auuagguaugaaacaaagc

SEQ ID NO: 649551 - RNA, 19 nt, Artificial Sequence
  Description of Artificial Sequence: Synthetic oligonucleotide
gauuaccaaggauuaagug

SEQ ID NO: 649552 - RNA, 19 nt, Artificial Sequence
  Description of Artificial Sequence: Synthetic oligonucleotide
cuuaccauuaacagcuuug

SEQ ID NO: 649553 - RNA, 19 nt, Artificial Sequence
  Description of Artificial Sequence: Synthetic oligonucleotide
guaugaaacaaagcuaucc

SEQ ID NO: 649554 - RNA, 19 nt, Artificial Sequence
  Description of Artificial Sequence: Synthetic oligonucleotide
aaugcaccaaccacugggc

SEQ ID NO: 649555 - RNA, 19 nt, Artificial Sequence
  Description of Artificial Sequence: Synthetic oligonucleotide
accacugggcgauaaaagg

SEQ ID NO: 649556 - RNA, 19 nt, Artificial Sequence
  Description of Artificial Sequence: Synthetic oligonucleotide
auauuaguccuuaaaaugu

SEQ ID NO: 649557 - RNA, 19 nt, Artificial Sequence
  Description of Artificial Sequence: Synthetic oligonucleotide
auaucaaacuauuggacaa

SEQ ID NO: 649558 - RNA, 19 nt, Artificial Sequence
  Description of Artificial Sequence: Synthetic oligonucleotide
uuauaucuuccaauggggu

SEQ ID NO: 649559 - RNA, 19 nt, Artificial Sequence
  Description of Artificial Sequence: Synthetic oligonucleotide
gacugcaaugauaauuucg

SEQ ID NO: 649560 - RNA, 19 nt, Artificial Sequence
  Description of Artificial Sequence: Synthetic oligonucleotide
aaaucagguaaauguauua

SEQ ID NO: 649561 - RNA, 19 nt, Artificial Sequence
  Description of Artificial Sequence: Synthetic oligonucleotide
aggucuugaaagcuuacag

SEQ ID NO: 649562 - RNA, 19 nt, Artificial Sequence
  Description of Artificial Sequence: Synthetic oligonucleotide
agauugaucuuucaaguau

SEQ ID NO: 649563 - RNA, 19 nt, Artificial Sequence
  Description of Artificial Sequence: Synthetic oligonucleotide
aaggauuaaguguaugguu

SEQ ID NO: 649564 - RNA, 19 nt, Artificial Sequence
  Description of Artificial Sequence: Synthetic oligonucleotide
augauuaccaaggauuaag

SEQ ID NO: 649565 - RNA, 19 nt, Artificial Sequence
  Description of Artificial Sequence: Synthetic oligonucleotide
auaaaucuuauaaucauaa

SEQ ID NO: 649566 - RNA, 19 nt, Artificial Sequence
  Description of Artificial Sequence: Synthetic oligonucleotide
ugauuaccaaggauuaagu

SEQ ID NO: 649567 - RNA, 19 nt, Artificial Sequence
  Description of Artificial Sequence: Synthetic oligonucleotide
auaggcauaguuucaagaa

SEQ ID NO: 649568 - RNA, 19 nt, Artificial Sequence
  Description of Artificial Sequence: Synthetic oligonucleotide
uagaaucacaguauacuuc

SEQ ID NO: 649569 - RNA, 19 nt, Artificial Sequence
  Description of Artificial Sequence: Synthetic oligonucleotide
aguccuuaaaauguuacca

SEQ ID NO: 649570 - RNA, 19 nt, Artificial Sequence
  Description of Artificial Sequence: Synthetic oligonucleotide
ugagcaucauuucauuggu

SEQ ID NO: 649571 - RNA, 19 nt, Artificial Sequence
  Description of Artificial Sequence: Synthetic oligonucleotide
aaguguaugguugaauuaa

SEQ ID NO: 649572 - RNA, 19 nt, Artificial Sequence
  Description of Artificial Sequence: Synthetic oligonucleotide
acauuagagaaguccucac

SEQ ID NO: 649573 - RNA, 19 nt, Artificial Sequence
  Description of Artificial Sequence: Synthetic oligonucleotide
aagaauauauauauauaua

SEQ ID NO: 649574 - RNA, 19 nt, Artificial Sequence
  Description of Artificial Sequence: Synthetic oligonucleotide
uaccauuuuguguagugac

SEQ ID NO: 649575 - RNA, 19 nt, Artificial Sequence
  Description of Artificial Sequence: Synthetic oligonucleotide
cauuugaagagaucagaac

SEQ ID NO: 649576 - RNA, 19 nt, Artificial Sequence
  Description of Artificial Sequence: Synthetic oligonucleotide
uauauaucuuaugggagga

SEQ ID NO: 649577 - RNA, 19 nt, Artificial Sequence
  Description of Artificial Sequence: Synthetic oligonucleotide
uauccucacuuaaagaaau

SEQ ID NO: 649578 - RNA, 19 nt, Artificial Sequence
  Description of Artificial Sequence: Synthetic oligonucleotide
guaagucuauguaugcugg

SEQ ID NO: 649579 - RNA, 19 nt, Artificial Sequence
  Description of Artificial Sequence: Synthetic oligonucleotide
uaaaucuuauaaucauaac

SEQ ID NO: 649580 - RNA, 19 nt, Artificial Sequence
  Description of Artificial Sequence: Synthetic oligonucleotide
ugauaauuucgccugcgaa

SEQ ID NO: 649581 - RNA, 19 nt, Artificial Sequence
  Description of Artificial Sequence: Synthetic oligonucleotide
uugaaagcuuacagggucc

SEQ ID NO: 649582 - RNA, 19 nt, Artificial Sequence
  Description of Artificial Sequence: Synthetic oligonucleotide
cagaacauugccaagaucu

SEQ ID NO: 649583 - RNA, 19 nt, Artificial Sequence
  Description of Artificial Sequence: Synthetic oligonucleotide
aucgcaaagggccaccaag

SEQ ID NO: 649584 - RNA, 19 nt, Artificial Sequence
  Description of Artificial Sequence: Synthetic oligonucleotide
cauuuguaaaagaggacuc

SEQ ID NO: 649585 - RNA, 19 nt, Artificial Sequence
  Description of Artificial Sequence: Synthetic oligonucleotide
acgacuaccauuuucccaa

SEQ ID NO: 649586 - RNA, 19 nt, Artificial Sequence
  Description of Artificial Sequence: Synthetic oligonucleotide
auagaaucacaguauacuu

SEQ ID NO: 649587 - RNA, 19 nt, Artificial Sequence
  Description of Artificial Sequence: Synthetic oligonucleotide
ucuucguugcuucugccac

SEQ ID NO: 649588 - RNA, 19 nt, Artificial Sequence
  Description of Artificial Sequence: Synthetic oligonucleotide
ucggggaggaauuagguau

SEQ ID NO: 649589 - RNA, 19 nt, Artificial Sequence
  Description of Artificial Sequence: Synthetic oligonucleotide
gcuuauauaucuuauggga

SEQ ID NO: 649590 - RNA, 19 nt, Artificial Sequence
  Description of Artificial Sequence: Synthetic oligonucleotide
uuuacuucaccaccuuuuc

SEQ ID NO: 649591 - RNA, 19 nt, Artificial Sequence
  Description of Artificial Sequence: Synthetic oligonucleotide
uacacuaggucuauucauc

SEQ ID NO: 649592 - RNA, 19 nt, Artificial Sequence
  Description of Artificial Sequence: Synthetic oligonucleotide
ugaacacagacaacagugu

SEQ ID NO: 649593 - RNA, 19 nt, Artificial Sequence
  Description of Artificial Sequence: Synthetic oligonucleotide
gaaauaugauuaccaagga

SEQ ID NO: 649594 - RNA, 19 nt, Artificial Sequence
  Description of Artificial Sequence: Synthetic oligonucleotide
uauugcaaagcacccuaug

SEQ ID NO: 649595 - RNA, 19 nt, Artificial Sequence
  Description of Artificial Sequence: Synthetic oligonucleotide
cagucuuaccauuaacagc

SEQ ID NO: 649596 - RNA, 19 nt, Artificial Sequence
  Description of Artificial Sequence: Synthetic oligonucleotide
agggcugauuacuugacug

SEQ ID NO: 649597 - RNA, 19 nt, Artificial Sequence
  Description of Artificial Sequence: Synthetic oligonucleotide
uacacauacacuaggucua

SEQ ID NO: 649598 - RNA, 19 nt, Artificial Sequence
  Description of Artificial Sequence: Synthetic oligonucleotide
agguaaauguauuaccaaa

SEQ ID NO: 649599 - RNA, 19 nt, Artificial Sequence
  Description of Artificial Sequence: Synthetic oligonucleotide
aaguaucagcaauauuagu

SEQ ID NO: 649600 - RNA, 19 nt, Artificial Sequence
  Description of Artificial Sequence: Synthetic oligonucleotide
uaaaagaggacucguccau

SEQ ID NO: 649601 - RNA, 19 nt, Artificial Sequence
  Description of Artificial Sequence: Synthetic oligonucleotide
uuuguaaaagaggacucgu

SEQ ID NO: 649602 - RNA, 19 nt, Artificial Sequence
  Description of Artificial Sequence: Synthetic oligonucleotide
agcaauauuaguccuuaaa

SEQ ID NO: 649603 - RNA, 19 nt, Artificial Sequence
  Description of Artificial Sequence: Synthetic oligonucleotide
aauuucgccugcgaagcag

SEQ ID NO: 649604 - RNA, 19 nt, Artificial Sequence
  Description of Artificial Sequence: Synthetic oligonucleotide
auauauauauauauaucaa

SEQ ID NO: 649605 - RNA, 19 nt, Artificial Sequence
  Description of Artificial Sequence: Synthetic oligonucleotide
ugaauuaaaaucggaugaa

SEQ ID NO: 649606 - RNA, 19 nt, Artificial Sequence
  Description of Artificial Sequence: Synthetic oligonucleotide
aggcauaguuucaagaauc

SEQ ID NO: 649607 - RNA, 19 nt, Artificial Sequence
  Description of Artificial Sequence: Synthetic oligonucleotide
ucacccaaugaacuccaag

SEQ ID NO: 649608 - RNA, 19 nt, Artificial Sequence
  Description of Artificial Sequence: Synthetic oligonucleotide
uauaucuuaugggaggaaa

SEQ ID NO: 649609 - RNA, 19 nt, Artificial Sequence
  Description of Artificial Sequence: Synthetic oligonucleotide
cacaguauacuucacuauc

SEQ ID NO: 649610 - RNA, 19 nt, Artificial Sequence
  Description of Artificial Sequence: Synthetic oligonucleotide
ugauuacuugacugcaaug

SEQ ID NO: 649611 - RNA, 19 nt, Artificial Sequence
  Description of Artificial Sequence: Synthetic oligonucleotide
gagauuuucuugugaaauc

SEQ ID NO: 649612 - RNA, 19 nt, Artificial Sequence
  Description of Artificial Sequence: Synthetic oligonucleotide
agucaaaucaguacucuug

SEQ ID NO: 649613 - RNA, 19 nt, Artificial Sequence
  Description of Artificial Sequence: Synthetic oligonucleotide
cacugggcgauaaaaggcc

SEQ ID NO: 649614 - RNA, 19 nt, Artificial Sequence
  Description of Artificial Sequence: Synthetic oligonucleotide
cuuaaaaccuaguugagau

SEQ ID NO: 649615 - RNA, 19 nt, Artificial Sequence
  Description of Artificial Sequence: Synthetic oligonucleotide
aucauuuguaaaagaggac

SEQ ID NO: 649616 - RNA, 19 nt, Artificial Sequence
  Description of Artificial Sequence: Synthetic oligonucleotide
ucgccugcgaagcagucag

SEQ ID NO: 649617 - RNA, 19 nt, Artificial Sequence
  Description of Artificial Sequence: Synthetic oligonucleotide
ugguugaauuaaaaucgga

SEQ ID NO: 649618 - RNA, 19 nt, Artificial Sequence
  Description of Artificial Sequence: Synthetic oligonucleotide
uagucauaucacccaauga

SEQ ID NO: 649619 - RNA, 19 nt, Artificial Sequence
  Description of Artificial Sequence: Synthetic oligonucleotide
auucuaugcccucucccuc

SEQ ID NO: 649620 - RNA, 19 nt, Artificial Sequence
  Description of Artificial Sequence: Synthetic oligonucleotide
caaugccuuagaaaagcag

SEQ ID NO: 649621 - RNA, 19 nt, Artificial Sequence
  Description of Artificial Sequence: Synthetic oligonucleotide
guaaaagaggacucgucca

SEQ ID NO: 649622 - RNA, 19 nt, Artificial Sequence
  Description of Artificial Sequence: Synthetic oligonucleotide
aaucaguacucuugccacu

SEQ ID NO: 649623 - RNA, 19 nt, Artificial Sequence
  Description of Artificial Sequence: Synthetic oligonucleotide
ccaaggauuaaguguaugg

SEQ ID NO: 649624 - RNA, 19 nt, Artificial Sequence
  Description of Artificial Sequence: Synthetic oligonucleotide
agugacugauacaaaacug

SEQ ID NO: 649625 - RNA, 19 nt, Artificial Sequence
  Description of Artificial Sequence: Synthetic oligonucleotide
uugcuccauagaaucacag

SEQ ID NO: 649626 - RNA, 19 nt, Artificial Sequence
  Description of Artificial Sequence: Synthetic oligonucleotide
ggaccuauaacauguagca

SEQ ID NO: 649627 - RNA, 19 nt, Artificial Sequence
  Description of Artificial Sequence: Synthetic oligonucleotide
auuggauauccucacuuaa

SEQ ID NO: 649628 - RNA, 19 nt, Artificial Sequence
  Description of Artificial Sequence: Synthetic oligonucleotide
uuucggcaaacucuggauc

SEQ ID NO: 649629 - RNA, 19 nt, Artificial Sequence
  Description of Artificial Sequence: Synthetic oligonucleotide
uuuccaagcgcugacugga

SEQ ID NO: 649630 - RNA, 19 nt, Artificial Sequence
  Description of Artificial Sequence: Synthetic oligonucleotide
gguuccuucacucaaaugu

SEQ ID NO: 649631 - RNA, 19 nt, Artificial Sequence
  Description of Artificial Sequence: Synthetic oligonucleotide
uuguaaaagaggacucguc

SEQ ID NO: 649632 - RNA, 19 nt, Artificial Sequence
  Description of Artificial Sequence: Synthetic oligonucleotide
auggaccuauaacauguag

SEQ ID NO: 649633 - RNA, 19 nt, Artificial Sequence
  Description of Artificial Sequence: Synthetic oligonucleotide
agguaugaaacaaagcuau

SEQ ID NO: 649634 - RNA, 19 nt, Artificial Sequence
  Description of Artificial Sequence: Synthetic oligonucleotide
ucugaaucacuugucaaau

SEQ ID NO: 649635 - RNA, 19 nt, Artificial Sequence
  Description of Artificial Sequence: Synthetic oligonucleotide
uuuucggcaaacucuggau

SEQ ID NO: 649636 - RNA, 19 nt, Artificial Sequence
  Description of Artificial Sequence: Synthetic oligonucleotide
gauugaucuuucaaguauc

SEQ ID NO: 649637 - RNA, 19 nt, Artificial Sequence
  Description of Artificial Sequence: Synthetic oligonucleotide
auuacuugacugcaaugau

SEQ ID NO: 649638 - RNA, 19 nt, Artificial Sequence
  Description of Artificial Sequence: Synthetic oligonucleotide
aagucuauguaugcuggcu

SEQ ID NO: 649639 - RNA, 19 nt, Artificial Sequence
  Description of Artificial Sequence: Synthetic oligonucleotide
uccuccgugcuuuacuuca

SEQ ID NO: 649640 - RNA, 19 nt, Artificial Sequence
  Description of Artificial Sequence: Synthetic oligonucleotide
aagcuuacaggguccuuca

SEQ ID NO: 649641 - RNA, 19 nt, Artificial Sequence
  Description of Artificial Sequence: Synthetic oligonucleotide
caaagaauauauauauaua

SEQ ID NO: 649642 - RNA, 19 nt, Artificial Sequence
  Description of Artificial Sequence: Synthetic oligonucleotide
acauuggauauccucacuu

SEQ ID NO: 649643 - RNA, 19 nt, Artificial Sequence
  Description of Artificial Sequence: Synthetic oligonucleotide
aaccuaguugagauugauc

SEQ ID NO: 649644 - RNA, 19 nt, Artificial Sequence
  Description of Artificial Sequence: Synthetic oligonucleotide
accaaacaguaauuaauaa

SEQ ID NO: 649645 - RNA, 19 nt, Artificial Sequence
  Description of Artificial Sequence: Synthetic oligonucleotide
uaugcuggcuuaaaaccua

SEQ ID NO: 649646 - RNA, 19 nt, Artificial Sequence
  Description of Artificial Sequence: Synthetic oligonucleotide
gcaauauuaguccuuaaaa

SEQ ID NO: 649647 - RNA, 19 nt, Artificial Sequence
  Description of Artificial Sequence: Synthetic oligonucleotide
ucgcaaagggccaccaaga

SEQ ID NO: 649648 - RNA, 19 nt, Artificial Sequence
  Description of Artificial Sequence: Synthetic oligonucleotide
aaccacugggcgauaaaag

SEQ ID NO: 649649 - RNA, 19 nt, Artificial Sequence
  Description of Artificial Sequence: Synthetic oligonucleotide
guugagauugaucuuucaa

SEQ ID NO: 649650 - RNA, 19 nt, Artificial Sequence
  Description of Artificial Sequence: Synthetic oligonucleotide
acacuaggucuauucauca

SEQ ID NO: 649651 - RNA, 19 nt, Artificial Sequence
  Description of Artificial Sequence: Synthetic oligonucleotide
cauaggcauaguuucaaga

SEQ ID NO: 649652 - RNA, 19 nt, Artificial Sequence
  Description of Artificial Sequence: Synthetic oligonucleotide
uggaggacauucugcaugu

SEQ ID NO: 649653 - RNA, 19 nt, Artificial Sequence
  Description of Artificial Sequence: Synthetic oligonucleotide
caaugaacuccaagcauuc

SEQ ID NO: 649654 - RNA, 19 nt, Artificial Sequence
  Description of Artificial Sequence: Synthetic oligonucleotide
acauaugcaaucauggcuu

SEQ ID NO: 649655 - RNA, 19 nt, Artificial Sequence
  Description of Artificial Sequence: Synthetic oligonucleotide
uggaaucaccaccuaagua

SEQ ID NO: 649656 - RNA, 19 nt, Artificial Sequence
  Description of Artificial Sequence: Synthetic oligonucleotide
aucuuaugggaggaaauca

SEQ ID NO: 649657 - RNA, 19 nt, Artificial Sequence
  Description of Artificial Sequence: Synthetic oligonucleotide
cuaucugaaucacuuguca

SEQ ID NO: 649658 - RNA, 19 nt, Artificial Sequence
  Description of Artificial Sequence: Synthetic oligonucleotide
cuaaugagcacaagggcaa

SEQ ID NO: 649659 - RNA, 19 nt, Artificial Sequence
  Description of Artificial Sequence: Synthetic oligonucleotide
aaauugcuccauagaauca

SEQ ID NO: 649660 - RNA, 19 nt, Artificial Sequence
  Description of Artificial Sequence: Synthetic oligonucleotide
cugcaaugauaauuucgcc

SEQ ID NO: 649661 - RNA, 19 nt, Artificial Sequence
  Description of Artificial Sequence: Synthetic oligonucleotide
acuuaguguccaucaagcu

SEQ ID NO: 649662 - RNA, 19 nt, Artificial Sequence
  Description of Artificial Sequence: Synthetic oligonucleotide
ugcuccauagaaucacagu

SEQ ID NO: 649663 - RNA, 19 nt, Artificial Sequence
  Description of Artificial Sequence: Synthetic oligonucleotide
auaacuuaguguccaucaa

SEQ ID NO: 649664 - RNA, 19 nt, Artificial Sequence
  Description of Artificial Sequence: Synthetic oligonucleotide
acaguauacuucacuaucu

SEQ ID NO: 649665 - RNA, 19 nt, Artificial Sequence
  Description of Artificial Sequence: Synthetic oligonucleotide
caauuuccagcuaccuggc

SEQ ID NO: 649666 - RNA, 19 nt, Artificial Sequence
  Description of Artificial Sequence: Synthetic oligonucleotide
uuaaaaccuaguugagauu

SEQ ID NO: 649667 - RNA, 19 nt, Artificial Sequence
  Description of Artificial Sequence: Synthetic oligonucleotide
ccucuugcaaucuaaugag

SEQ ID NO: 649668 - RNA, 19 nt, Artificial Sequence
  Description of Artificial Sequence: Synthetic oligonucleotide
cugagucaaaucaguacuc

SEQ ID NO: 649669 - RNA, 19 nt, Artificial Sequence
  Description of Artificial Sequence: Synthetic oligonucleotide
augauaauuucgccugcga

SEQ ID NO: 649670 - RNA, 19 nt, Artificial Sequence
  Description of Artificial Sequence: Synthetic oligonucleotide
cacucggggaggaauuagg

SEQ ID NO: 649671 - RNA, 19 nt, Artificial Sequence
  Description of Artificial Sequence: Synthetic oligonucleotide
ucggaugaauucucugugu

SEQ ID NO: 649672 - RNA, 19 nt, Artificial Sequence
  Description of Artificial Sequence: Synthetic oligonucleotide
gcgauaaaaggccauauaa

SEQ ID NO: 649673 - RNA, 19 nt, Artificial Sequence
  Description of Artificial Sequence: Synthetic oligonucleotide
cuuaguguccaucaagcua

SEQ ID NO: 649674 - RNA, 19 nt, Artificial Sequence
  Description of Artificial Sequence: Synthetic oligonucleotide
gagaaguccucacuuucuc

SEQ ID NO: 649675 - RNA, 19 nt, Artificial Sequence
  Description of Artificial Sequence: Synthetic oligonucleotide
cauagaaucacaguauacu

SEQ ID NO: 649676 - RNA, 19 nt, Artificial Sequence
  Description of Artificial Sequence: Synthetic oligonucleotide
auaugauuaccaaggauua

SEQ ID NO: 649677 - RNA, 19 nt, Artificial Sequence
  Description of Artificial Sequence: Synthetic oligonucleotide
ugugaucuacagguuuugc

SEQ ID NO: 649678 - RNA, 19 nt, Artificial Sequence
  Description of Artificial Sequence: Synthetic oligonucleotide
uucuuaggucauccaggcc

SEQ ID NO: 649679 - RNA, 19 nt, Artificial Sequence
  Description of Artificial Sequence: Synthetic oligonucleotide
uuccacgacuaccauuuuc

SEQ ID NO: 649680 - RNA, 19 nt, Artificial Sequence
  Description of Artificial Sequence: Synthetic oligonucleotide
caagcauucccauuuauau

SEQ ID NO: 649681 - RNA, 19 nt, Artificial Sequence
  Description of Artificial Sequence: Synthetic oligonucleotide
aaaccuaguugagauugau

SEQ ID NO: 649682 - RNA, 19 nt, Artificial Sequence
  Description of Artificial Sequence: Synthetic oligonucleotide
augcaccaaccacugggcg

SEQ ID NO: 649683 - RNA, 19 nt, Artificial Sequence
  Description of Artificial Sequence: Synthetic oligonucleotide
gaagcagucaggguuucca

SEQ ID NO: 649684 - RNA, 19 nt, Artificial Sequence
  Description of Artificial Sequence: Synthetic oligonucleotide
agucuauguaugcuggcuu

SEQ ID NO: 649685 - RNA, 19 nt, Artificial Sequence
  Description of Artificial Sequence: Synthetic oligonucleotide
ugugucagcuuggaaaaua

SEQ ID NO: 649686 - RNA, 19 nt, Artificial Sequence
  Description of Artificial Sequence: Synthetic oligonucleotide
ggaauuagguaugaaacaa

SEQ ID NO: 649687 - RNA, 19 nt, Artificial Sequence
  Description of Artificial Sequence: Synthetic oligonucleotide
aguugagauugaucuuuca

SEQ ID NO: 649688 - RNA, 19 nt, Artificial Sequence
  Description of Artificial Sequence: Synthetic oligonucleotide
aagcuauccuuaaagccau

SEQ ID NO: 649689 - RNA, 19 nt, Artificial Sequence
  Description of Artificial Sequence: Synthetic oligonucleotide
uaauuucgccugcgaagca

SEQ ID NO: 649690 - RNA, 19 nt, Artificial Sequence
  Description of Artificial Sequence: Synthetic oligonucleotide
gcagcuuauauaucuuaug

SEQ ID NO: 649691 - RNA, 19 nt, Artificial Sequence
  Description of Artificial Sequence: Synthetic oligonucleotide
ucauuacugucacucuguu

SEQ ID NO: 649692 - RNA, 19 nt, Artificial Sequence
  Description of Artificial Sequence: Synthetic oligonucleotide
cuuggugaacacagacaac

SEQ ID NO: 649693 - RNA, 19 nt, Artificial Sequence
  Description of Artificial Sequence: Synthetic oligonucleotide
aucaucaaguuaagucuag

SEQ ID NO: 649694 - RNA, 19 nt, Artificial Sequence
  Description of Artificial Sequence: Synthetic oligonucleotide
auauccucacuuaaagaaa

SEQ ID NO: 649695 - RNA, 19 nt, Artificial Sequence
  Description of Artificial Sequence: Synthetic oligonucleotide
cacccuaugaagcagacau

SEQ ID NO: 649696 - RNA, 19 nt, Artificial Sequence
  Description of Artificial Sequence: Synthetic oligonucleotide
aaaggccauauaauagcaa

SEQ ID NO: 649697 - RNA, 19 nt, Artificial Sequence
  Description of Artificial Sequence: Synthetic oligonucleotide
augccuuagaaaagcagcu

SEQ ID NO: 649698 - RNA, 19 nt, Artificial Sequence
  Description of Artificial Sequence: Synthetic oligonucleotide
uugccaagaucugagucaa

SEQ ID NO: 649699 - RNA, 19 nt, Artificial Sequence
  Description of Artificial Sequence: Synthetic oligonucleotide
agaacauugccaagaucug

SEQ ID NO: 649700 - RNA, 19 nt, Artificial Sequence
  Description of Artificial Sequence: Synthetic oligonucleotide
auagaacuugagcaucauu

SEQ ID NO: 649701 - RNA, 19 nt, Artificial Sequence
  Description of Artificial Sequence: Synthetic oligonucleotide
auaucuuaugggaggaaau

SEQ ID NO: 649702 - RNA, 19 nt, Artificial Sequence
  Description of Artificial Sequence: Synthetic oligonucleotide
cauaugcaaucauggcuuc

SEQ ID NO: 649703 - RNA, 19 nt, Artificial Sequence
  Description of Artificial Sequence: Synthetic oligonucleotide
uccaagcauucccauuuau

SEQ ID NO: 649704 - RNA, 19 nt, Artificial Sequence
  Description of Artificial Sequence: Synthetic oligonucleotide
accaccuaaguaauacucu

SEQ ID NO: 649705 - RNA, 19 nt, Artificial Sequence
  Description of Artificial Sequence: Synthetic oligonucleotide
cuucuucguugcuucugcc

SEQ ID NO: 649706 - RNA, 19 nt, Artificial Sequence
  Description of Artificial Sequence: Synthetic oligonucleotide
gcaaagcacccuaugaagc

SEQ ID NO: 649707 - RNA, 19 nt, Artificial Sequence
  Description of Artificial Sequence: Synthetic oligonucleotide
gcaaaaguuaaugcaccag

SEQ ID NO: 649708 - RNA, 19 nt, Artificial Sequence
  Description of Artificial Sequence: Synthetic oligonucleotide
uucacucaaauguggcauu

SEQ ID NO: 649709 - RNA, 19 nt, Artificial Sequence
  Description of Artificial Sequence: Synthetic oligonucleotide
aagaggacucguccaucaa

SEQ ID NO: 649710 - RNA, 19 nt, Artificial Sequence
  Description of Artificial Sequence: Synthetic oligonucleotide
ccaagauggucucugugag

SEQ ID NO: 649711 - RNA, 19 nt, Artificial Sequence
  Description of Artificial Sequence: Synthetic oligonucleotide
ggauauccucacuuaaaga

SEQ ID NO: 649712 - RNA, 19 nt, Artificial Sequence
  Description of Artificial Sequence: Synthetic oligonucleotide
gugucagcuuggaaaauac

SEQ ID NO: 649713 - RNA, 19 nt, Artificial Sequence
  Description of Artificial Sequence: Synthetic oligonucleotide
uaggucuauucaucauuuc

SEQ ID NO: 649714 - RNA, 19 nt, Artificial Sequence
  Description of Artificial Sequence: Synthetic oligonucleotide
agacaucgcaaagggccac

SEQ ID NO: 649715 - RNA, 19 nt, Artificial Sequence
  Description of Artificial Sequence: Synthetic oligonucleotide
ccauagaaucacaguauac

SEQ ID NO: 649716 - RNA, 19 nt, Artificial Sequence
  Description of Artificial Sequence: Synthetic oligonucleotide
accaaggauuaaguguaug

SEQ ID NO: 649717 - RNA, 19 nt, Artificial Sequence
  Description of Artificial Sequence: Synthetic oligonucleotide
cauugguuggcuggaauga

SEQ ID NO: 649718 - RNA, 19 nt, Artificial Sequence
  Description of Artificial Sequence: Synthetic oligonucleotide
gcauucuaugcccucuccc

SEQ ID NO: 649719 - RNA, 19 nt, Artificial Sequence
  Description of Artificial Sequence: Synthetic oligonucleotide
cacgacuaccauuuuccca

SEQ ID NO: 649720 - RNA, 19 nt, Artificial Sequence
  Description of Artificial Sequence: Synthetic oligonucleotide
auuaguccuuaaaauguua

SEQ ID NO: 649721 - RNA, 19 nt, Artificial Sequence
  Description of Artificial Sequence: Synthetic oligonucleotide
ccaauggggucccagaauc

SEQ ID NO: 649722 - RNA, 19 nt, Artificial Sequence
  Description of Artificial Sequence: Synthetic oligonucleotide
gaucugagucaaaucagua

SEQ ID NO: 649723 - RNA, 19 nt, Artificial Sequence
  Description of Artificial Sequence: Synthetic oligonucleotide
cauuggauauccucacuua

SEQ ID NO: 649724 - RNA, 19 nt, Artificial Sequence
  Description of Artificial Sequence: Synthetic oligonucleotide
cuucugacauuagagaagu

SEQ ID NO: 649725 - RNA, 19 nt, Artificial Sequence
  Description of Artificial Sequence: Synthetic oligonucleotide
caccaagauggucucugug

SEQ ID NO: 649726 - RNA, 19 nt, Artificial Sequence
  Description of Artificial Sequence: Synthetic oligonucleotide
cuugccgacccuggguucc

SEQ ID NO: 649727 - RNA, 19 nt, Artificial Sequence
  Description of Artificial Sequence: Synthetic oligonucleotide
gagacaucgcaaagggcca

SEQ ID NO: 649728 - RNA, 19 nt, Artificial Sequence
  Description of Artificial Sequence: Synthetic oligonucleotide
cuugacugcaaugauaauu

SEQ ID NO: 649729 - RNA, 19 nt, Artificial Sequence
  Description of Artificial Sequence: Synthetic oligonucleotide
cuuccaauggggucccaga

SEQ ID NO: 649730 - RNA, 19 nt, Artificial Sequence
  Description of Artificial Sequence: Synthetic oligonucleotide
uccaagcgcugacuggaau

SEQ ID NO: 649731 - RNA, 19 nt, Artificial Sequence
  Description of Artificial Sequence: Synthetic oligonucleotide
cuccgugcuuuacuucacc

SEQ ID NO: 649732 - RNA, 19 nt, Artificial Sequence
  Description of Artificial Sequence: Synthetic oligonucleotide
uucguugcuucugccacuc

SEQ ID NO: 649733 - RNA, 19 nt, Artificial Sequence
  Description of Artificial Sequence: Synthetic oligonucleotide
guccuuaaaauguuaccau

SEQ ID NO: 649734 - RNA, 19 nt, Artificial Sequence
  Description of Artificial Sequence: Synthetic oligonucleotide
caaggauuaaguguauggu

SEQ ID NO: 649735 - RNA, 19 nt, Artificial Sequence
  Description of Artificial Sequence: Synthetic oligonucleotide
ucguugcuucugccacucg

SEQ ID NO: 649736 - RNA, 19 nt, Artificial Sequence
  Description of Artificial Sequence: Synthetic oligonucleotide
gguugaauuaaaaucggau

SEQ ID NO: 649737 - RNA, 19 nt, Artificial Sequence
  Description of Artificial Sequence: Synthetic oligonucleotide
aauggaccuauaacaugua

SEQ ID NO: 649738 - RNA, 19 nt, Artificial Sequence
  Description of Artificial Sequence: Synthetic oligonucleotide
uucgccugcgaagcaguca

SEQ ID NO: 649739 - RNA, 19 nt, Artificial Sequence
  Description of Artificial Sequence: Synthetic oligonucleotide
ggacucguccaucaauuuc

SEQ ID NO: 649740 - RNA, 19 nt, Artificial Sequence
  Description of Artificial Sequence: Synthetic oligonucleotide
caaguuaagucuagucagu

SEQ ID NO: 649741 - RNA, 19 nt, Artificial Sequence
  Description of Artificial Sequence: Synthetic oligonucleotide
cacagacaacaguguuucc

SEQ ID NO: 649742 - RNA, 19 nt, Artificial Sequence
  Description of Artificial Sequence: Synthetic oligonucleotide
uuucgccugcgaagcaguc

SEQ ID NO: 649743 - RNA, 19 nt, Artificial Sequence
  Description of Artificial Sequence: Synthetic oligonucleotide
cuaggucuauucaucauuu

SEQ ID NO: 649744 - RNA, 19 nt, Artificial Sequence
  Description of Artificial Sequence: Synthetic oligonucleotide
agcuaccuggcugacaguu

SEQ ID NO: 649745 - RNA, 19 nt, Artificial Sequence
  Description of Artificial Sequence: Synthetic oligonucleotide
cuucucacgguguggagcu

SEQ ID NO: 649746 - RNA, 19 nt, Artificial Sequence
  Description of Artificial Sequence: Synthetic oligonucleotide
aucugcucauugaggcugg

SEQ ID NO: 649747 - RNA, 19 nt, Artificial Sequence
  Description of Artificial Sequence: Synthetic oligonucleotide
uucugacauuagagaaguc

SEQ ID NO: 649748 - RNA, 19 nt, Artificial Sequence
  Description of Artificial Sequence: Synthetic oligonucleotide
auauaucuuaugggaggaa

SEQ ID NO: 649749 - RNA, 19 nt, Artificial Sequence
  Description of Artificial Sequence: Synthetic oligonucleotide
ucggcaaacucuggaucac

SEQ ID NO: 649750 - RNA, 19 nt, Artificial Sequence
  Description of Artificial Sequence: Synthetic oligonucleotide
gaccuauaacauguagcaa

SEQ ID NO: 649751 - RNA, 19 nt, Artificial Sequence
  Description of Artificial Sequence: Synthetic oligonucleotide
ugggcgauaaaaggccaua

SEQ ID NO: 649752 - RNA, 19 nt, Artificial Sequence
  Description of Artificial Sequence: Synthetic oligonucleotide
cccggucugaaccccagcg

SEQ ID NO: 649753 - RNA, 19 nt, Artificial Sequence
  Description of Artificial Sequence: Synthetic oligonucleotide
uaaugagcacaagggcaau

SEQ ID NO: 649754 - RNA, 19 nt, Artificial Sequence
  Description of Artificial Sequence: Synthetic oligonucleotide
ggcauucuaugcccucucc

SEQ ID NO: 649755 - RNA, 19 nt, Artificial Sequence
  Description of Artificial Sequence: Synthetic oligonucleotide
gccugcgaagcagucaggg

SEQ ID NO: 649756 - RNA, 19 nt, Artificial Sequence
  Description of Artificial Sequence: Synthetic oligonucleotide
cuucacucaaauguggcau

SEQ ID NO: 649757 - RNA, 19 nt, Artificial Sequence
  Description of Artificial Sequence: Synthetic oligonucleotide
cugauuacuugacugcaau

SEQ ID NO: 649758 - RNA, 19 nt, Artificial Sequence
  Description of Artificial Sequence: Synthetic oligonucleotide
ucuaugcccucucccucuu

SEQ ID NO: 649759 - RNA, 19 nt, Artificial Sequence
  Description of Artificial Sequence: Synthetic oligonucleotide
acugggcgauaaaaggcca

SEQ ID NO: 649760 - RNA, 19 nt, Artificial Sequence
  Description of Artificial Sequence: Synthetic oligonucleotide
ugacuggaaucaccaccua

SEQ ID NO: 649761 - RNA, 19 nt, Artificial Sequence
  Description of Artificial Sequence: Synthetic oligonucleotide
gagucaaaucaguacucuu

SEQ ID NO: 649762 - RNA, 19 nt, Artificial Sequence
  Description of Artificial Sequence: Synthetic oligonucleotide
ccaagcgcugacuggaauc

SEQ ID NO: 649763 - RNA, 19 nt, Artificial Sequence
  Description of Artificial Sequence: Synthetic oligonucleotide
acacauacacuaggucuau

SEQ ID NO: 649764 - RNA, 19 nt, Artificial Sequence
  Description of Artificial Sequence: Synthetic oligonucleotide
caccaggagacaucgcaaa

SEQ ID NO: 649765 - RNA, 19 nt, Artificial Sequence
  Description of Artificial Sequence: Synthetic oligonucleotide
gguaugaaacaaagcuauc

SEQ ID NO: 649766 - RNA, 19 nt, Artificial Sequence
  Description of Artificial Sequence: Synthetic oligonucleotide
ccauuucauuucuuagguc

SEQ ID NO: 649767 - RNA, 19 nt, Artificial Sequence
  Description of Artificial Sequence: Synthetic oligonucleotide
cuggaaucaccaccuaagu

SEQ ID NO: 649768 - RNA, 19 nt, Artificial Sequence
  Description of Artificial Sequence: Synthetic oligonucleotide
ggcugauuacuugacugca

SEQ ID NO: 649769 - RNA, 19 nt, Artificial Sequence
  Description of Artificial Sequence: Synthetic oligonucleotide
accuggcugacaguucagu

SEQ ID NO: 649770 - RNA, 19 nt, Artificial Sequence
  Description of Artificial Sequence: Synthetic oligonucleotide
uccagcuaccuggcugaca

SEQ ID NO: 649771 - RNA, 19 nt, Artificial Sequence
  Description of Artificial Sequence: Synthetic oligonucleotide
acucguccaucaauuucca

SEQ ID NO: 649772 - RNA, 19 nt, Artificial Sequence
  Description of Artificial Sequence: Synthetic oligonucleotide
ggcgauaaaaggccauaua

SEQ ID NO: 649773 - RNA, 19 nt, Artificial Sequence
  Description of Artificial Sequence: Synthetic oligonucleotide
gcaaucuaaugagcacaag

SEQ ID NO: 649774 - RNA, 19 nt, Artificial Sequence
  Description of Artificial Sequence: Synthetic oligonucleotide
cuauguaugcuggcuuaaa

SEQ ID NO: 649775 - RNA, 19 nt, Artificial Sequence
  Description of Artificial Sequence: Synthetic oligonucleotide
guauuaccaaacaguaauu

SEQ ID NO: 649776 - RNA, 19 nt, Artificial Sequence
  Description of Artificial Sequence: Synthetic oligonucleotide
cuccacuaucacugcucuc

SEQ ID NO: 649777 - RNA, 19 nt, Artificial Sequence
  Description of Artificial Sequence: Synthetic oligonucleotide
ugccaagaucugagucaaa

SEQ ID NO: 649778 - RNA, 19 nt, Artificial Sequence
  Description of Artificial Sequence: Synthetic oligonucleotide
gugcuuuacuucaccaccu

SEQ ID NO: 649779 - RNA, 19 nt, Artificial Sequence
  Description of Artificial Sequence: Synthetic oligonucleotide
auccucacuuaaagaaaua

SEQ ID NO: 649780 - RNA, 19 nt, Artificial Sequence
  Description of Artificial Sequence: Synthetic oligonucleotide
caguugccuguuuguagaa

SEQ ID NO: 649781 - RNA, 19 nt, Artificial Sequence
  Description of Artificial Sequence: Synthetic oligonucleotide
aguguccaucaagcuacaa

SEQ ID NO: 649782 - RNA, 19 nt, Artificial Sequence
  Description of Artificial Sequence: Synthetic oligonucleotide
ggagcuccacugcuacuuc

SEQ ID NO: 649783 - RNA, 19 nt, Artificial Sequence
  Description of Artificial Sequence: Synthetic oligonucleotide
ccuauaacauguagcaauu

SEQ ID NO: 649784 - RNA, 19 nt, Artificial Sequence
  Description of Artificial Sequence: Synthetic oligonucleotide
cacuucccacuugccgacc

SEQ ID NO: 649785 - RNA, 19 nt, Artificial Sequence
  Description of Artificial Sequence: Synthetic oligonucleotide
cgauaaaaggccauauaau

SEQ ID NO: 649786 - RNA, 19 nt, Artificial Sequence
  Description of Artificial Sequence: Synthetic oligonucleotide
cacuaggucuauucaucau

SEQ ID NO: 649787 - RNA, 19 nt, Artificial Sequence
  Description of Artificial Sequence: Synthetic oligonucleotide
gcacaagggcaaucugcuc

SEQ ID NO: 649788 - RNA, 19 nt, Artificial Sequence
  Description of Artificial Sequence: Synthetic oligonucleotide
ggggaggaauuagguauga

SEQ ID NO: 649789 - RNA, 19 nt, Artificial Sequence
  Description of Artificial Sequence: Synthetic oligonucleotide
ccuccgugcuuuacuucac

SEQ ID NO: 649790 - RNA, 19 nt, Artificial Sequence
  Description of Artificial Sequence: Synthetic oligonucleotide
ccuuaaagccauugguaau

SEQ ID NO: 649791 - RNA, 19 nt, Artificial Sequence
  Description of Artificial Sequence: Synthetic oligonucleotide
cugggcgauaaaaggccau

SEQ ID NO: 649792 - RNA, 19 nt, Artificial Sequence
  Description of Artificial Sequence: Synthetic oligonucleotide
ccacucggggaggaauuag

SEQ ID NO: 649793 - RNA, 19 nt, Artificial Sequence
  Description of Artificial Sequence: Synthetic oligonucleotide
aucacccaaugaacuccaa

SEQ ID NO: 649794 - RNA, 19 nt, Artificial Sequence
  Description of Artificial Sequence: Synthetic oligonucleotide
ccaccuaaguaauacucuu

SEQ ID NO: 649795 - RNA, 19 nt, Artificial Sequence
  Description of Artificial Sequence: Synthetic oligonucleotide
gagcaucauuucauugguu

SEQ ID NO: 649796 - RNA, 19 nt, Artificial Sequence
  Description of Artificial Sequence: Synthetic oligonucleotide
gaaagcuuacaggguccuu

SEQ ID NO: 649797 - RNA, 19 nt, Artificial Sequence
  Description of Artificial Sequence: Synthetic oligonucleotide
cgacuaccauuuucccaag

SEQ ID NO: 649798 - RNA, 19 nt, Artificial Sequence
  Description of Artificial Sequence: Synthetic oligonucleotide
cuuguccaaauugcuccau

SEQ ID NO: 649799 - RNA, 19 nt, Artificial Sequence
  Description of Artificial Sequence: Synthetic oligonucleotide
gaaccccagcguucuccau

SEQ ID NO: 649800 - RNA, 19 nt, Artificial Sequence
  Description of Artificial Sequence: Synthetic oligonucleotide
gcacccuaugaagcagaca

SEQ ID NO: 649801 - RNA, 19 nt, Artificial Sequence
  Description of Artificial Sequence: Synthetic oligonucleotide
ccuaguugagauugaucuu

SEQ ID NO: 649802 - RNA, 19 nt, Artificial Sequence
  Description of Artificial Sequence: Synthetic oligonucleotide
ccgacccuggguuccuuca

SEQ ID NO: 649803 - RNA, 19 nt, Artificial Sequence
  Description of Artificial Sequence: Synthetic oligonucleotide
aucuuccaaugggguccca

SEQ ID NO: 649804 - RNA, 19 nt, Artificial Sequence
  Description of Artificial Sequence: Synthetic oligonucleotide
gggcgauaaaaggccauau

SEQ ID NO: 649805 - RNA, 19 nt, Artificial Sequence
  Description of Artificial Sequence: Synthetic oligonucleotide
ccccggucugaaccccagc

SEQ ID NO: 649806 - RNA, 19 nt, Artificial Sequence
  Description of Artificial Sequence: Synthetic oligonucleotide
cgccugcgaagcagucagg

SEQ ID NO: 649807 - RNA, 19 nt, Artificial Sequence
  Description of Artificial Sequence: Synthetic oligonucleotide
ugccgacccuggguuccuu

SEQ ID NO: 649808 - RNA, 19 nt, Artificial Sequence
  Description of Artificial Sequence: Synthetic oligonucleotide
cuuccacgacuaccauuuu

SEQ ID NO: 649809 - RNA, 19 nt, Artificial Sequence
  Description of Artificial Sequence: Synthetic oligonucleotide
cacauacacuaggucuauu

SEQ ID NO: 649810 - RNA, 19 nt, Artificial Sequence
  Description of Artificial Sequence: Synthetic oligonucleotide
aauuguuagucccaucggc

SEQ ID NO: 649811 - RNA, 19 nt, Artificial Sequence
  Description of Artificial Sequence: Synthetic oligonucleotide
auaauuguuagucccaucg

SEQ ID NO: 649812 - RNA, 19 nt, Artificial Sequence
  Description of Artificial Sequence: Synthetic oligonucleotide
auuaucucgggauaaagac

SEQ ID NO: 649813 - RNA, 19 nt, Artificial Sequence
  Description of Artificial Sequence: Synthetic oligonucleotide
ugcacaaaccaacagaagc

SEQ ID NO: 649814 - RNA, 19 nt, Artificial Sequence
  Description of Artificial Sequence: Synthetic oligonucleotide
aaagucguugcccauguuc

SEQ ID NO: 649815 - RNA, 19 nt, Artificial Sequence
  Description of Artificial Sequence: Synthetic oligonucleotide
aagaagucgacucucaccu

SEQ ID NO: 649816 - RNA, 19 nt, Artificial Sequence
  Description of Artificial Sequence: Synthetic oligonucleotide
auagccuggcucuaggucc

SEQ ID NO: 649817 - RNA, 19 nt, Artificial Sequence
  Description of Artificial Sequence: Synthetic oligonucleotide
uaucucgggauaaagacca

SEQ ID NO: 649818 - RNA, 19 nt, Artificial Sequence
  Description of Artificial Sequence: Synthetic oligonucleotide
uuaugaguaguucuggaac

SEQ ID NO: 649819 - RNA, 19 nt, Artificial Sequence
  Description of Artificial Sequence: Synthetic oligonucleotide
aaagcggaaaguguuaaag

SEQ ID NO: 649820 - RNA, 19 nt, Artificial Sequence
  Description of Artificial Sequence: Synthetic oligonucleotide
gaagcauaggaccaggcug

SEQ ID NO: 649821 - RNA, 19 nt, Artificial Sequence
  Description of Artificial Sequence: Synthetic oligonucleotide
aaacacaaagggugcgucg

SEQ ID NO: 649822 - RNA, 19 nt, Artificial Sequence
  Description of Artificial Sequence: Synthetic oligonucleotide
uucgggauucuccagguag

SEQ ID NO: 649823 - RNA, 19 nt, Artificial Sequence
  Description of Artificial Sequence: Synthetic oligonucleotide
ucacgugugcuucaaaagc

SEQ ID NO: 649824 - RNA, 19 nt, Artificial Sequence
  Description of Artificial Sequence: Synthetic oligonucleotide
gauuucgggauucuccagg

SEQ ID NO: 649825 - RNA, 19 nt, Artificial Sequence
  Description of Artificial Sequence: Synthetic oligonucleotide
uagaccuuuauuucagugc

SEQ ID NO: 649826 - RNA, 19 nt, Artificial Sequence
  Description of Artificial Sequence: Synthetic oligonucleotide
aaagcaugccuacugccug

SEQ ID NO: 649827 - RNA, 19 nt, Artificial Sequence
  Description of Artificial Sequence: Synthetic oligonucleotide
ucuugucacccagagaacg

SEQ ID NO: 649828 - RNA, 19 nt, Artificial Sequence
  Description of Artificial Sequence: Synthetic oligonucleotide
caucaaacauuccucacag

SEQ ID NO: 649829 - RNA, 19 nt, Artificial Sequence
  Description of Artificial Sequence: Synthetic oligonucleotide
gaagaagucgacucucacc

SEQ ID NO: 649830 - RNA, 19 nt, Artificial Sequence
  Description of Artificial Sequence: Synthetic oligonucleotide
agacacauggcuacggugc

SEQ ID NO: 649831 - RNA, 19 nt, Artificial Sequence
  Description of Artificial Sequence: Synthetic oligonucleotide
uaugaguaguucuggaacu

SEQ ID NO: 649832 - RNA, 19 nt, Artificial Sequence
  Description of Artificial Sequence: Synthetic oligonucleotide
agaccuuuauuucagugcu

SEQ ID NO: 649833 - RNA, 19 nt, Artificial Sequence
  Description of Artificial Sequence: Synthetic oligonucleotide
gauccucugaucuugucac

SEQ ID NO: 649834 - RNA, 19 nt, Artificial Sequence
  Description of Artificial Sequence: Synthetic oligonucleotide
uuacggaaguacucgauga

SEQ ID NO: 649835 - RNA, 19 nt, Artificial Sequence
  Description of Artificial Sequence: Synthetic oligonucleotide
uugauuucgggauucucca

SEQ ID NO: 649836 - RNA, 19 nt, Artificial Sequence
  Description of Artificial Sequence: Synthetic oligonucleotide
auuacggaaguacucgaug

SEQ ID NO: 649837 - RNA, 19 nt, Artificial Sequence
  Description of Artificial Sequence: Synthetic oligonucleotide
aagcaugccuacugccugc

SEQ ID NO: 649838 - RNA, 19 nt, Artificial Sequence
  Description of Artificial Sequence: Synthetic oligonucleotide
cucauuacggaaguacucg

SEQ ID NO: 649839 - RNA, 19 nt, Artificial Sequence
  Description of Artificial Sequence: Synthetic oligonucleotide
aacuagaccagaggaacag

SEQ ID NO: 649840 - RNA, 19 nt, Artificial Sequence
  Description of Artificial Sequence: Synthetic oligonucleotide
gagaguggauuccucagag

SEQ ID NO: 649841 - RNA, 19 nt, Artificial Sequence
  Description of Artificial Sequence: Synthetic oligonucleotide
ucguagaggaugcgaaggg

SEQ ID NO: 649842 - RNA, 19 nt, Artificial Sequence
  Description of Artificial Sequence: Synthetic oligonucleotide
auuucagucgggaagaagu

SEQ ID NO: 649843 - RNA, 19 nt, Artificial Sequence
  Description of Artificial Sequence: Synthetic oligonucleotide
uucucagugccacacucag

SEQ ID NO: 649844 - RNA, 19 nt, Artificial Sequence
  Description of Artificial Sequence: Synthetic oligonucleotide
augaugacguuccgguagc

SEQ ID NO: 649845 - RNA, 19 nt, Artificial Sequence
  Description of Artificial Sequence: Synthetic oligonucleotide
ucagucgggaagaagucga

SEQ ID NO: 649846 - RNA, 19 nt, Artificial Sequence
  Description of Artificial Sequence: Synthetic oligonucleotide
uuggcaucaaacauuccuc

SEQ ID NO: 649847 - RNA, 19 nt, Artificial Sequence
  Description of Artificial Sequence: Synthetic oligonucleotide
gaagucgacucucaccuug

SEQ ID NO: 649848 - RNA, 19 nt, Artificial Sequence
  Description of Artificial Sequence: Synthetic oligonucleotide
ugcgguguggggucaaugg

SEQ ID NO: 649849 - RNA, 19 nt, Artificial Sequence
  Description of Artificial Sequence: Synthetic oligonucleotide
ucucagaggugucauugcc

SEQ ID NO: 649850 - RNA, 19 nt, Artificial Sequence
  Description of Artificial Sequence: Synthetic oligonucleotide
uuaggcuggcccaaugaug

SEQ ID NO: 649851 - RNA, 19 nt, Artificial Sequence
  Description of Artificial Sequence: Synthetic oligonucleotide
agcaguaugucccuucgcu

SEQ ID NO: 649852 - RNA, 19 nt, Artificial Sequence
  Description of Artificial Sequence: Synthetic oligonucleotide
ugcaauucucuguguaaag

SEQ ID NO: 649853 - RNA, 19 nt, Artificial Sequence
  Description of Artificial Sequence: Synthetic oligonucleotide
cuugcacaaaccaacagaa

SEQ ID NO: 649854 - RNA, 19 nt, Artificial Sequence
  Description of Artificial Sequence: Synthetic oligonucleotide
acggaaguacucgaugagc

SEQ ID NO: 649855 - RNA, 19 nt, Artificial Sequence
  Description of Artificial Sequence: Synthetic oligonucleotide
aauuucagucgggaagaag

SEQ ID NO: 649856 - RNA, 19 nt, Artificial Sequence
  Description of Artificial Sequence: Synthetic oligonucleotide
uuccgguagcccuuuacag

SEQ ID NO: 649857 - RNA, 19 nt, Artificial Sequence
  Description of Artificial Sequence: Synthetic oligonucleotide
auggcuacggugcaauucu

SEQ ID NO: 649858 - RNA, 19 nt, Artificial Sequence
  Description of Artificial Sequence: Synthetic oligonucleotide
guggaggccaauuucaguc

SEQ ID NO: 649859 - RNA, 19 nt, Artificial Sequence
  Description of Artificial Sequence: Synthetic oligonucleotide
agaagcauaggaccaggcu

SEQ ID NO: 649860 - RNA, 19 nt, Artificial Sequence
  Description of Artificial Sequence: Synthetic oligonucleotide
uugacuugcugacagccau

SEQ ID NO: 649861 - RNA, 19 nt, Artificial Sequence
  Description of Artificial Sequence: Synthetic oligonucleotide
ucacggcccacacucuucg

SEQ ID NO: 649862 - RNA, 19 nt, Artificial Sequence
  Description of Artificial Sequence: Synthetic oligonucleotide
ucguugcccauguucaugc

SEQ ID NO: 649863 - RNA, 19 nt, Artificial Sequence
  Description of Artificial Sequence: Synthetic oligonucleotide
uucucguagaggaugcgaa

SEQ ID NO: 649864 - RNA, 19 nt, Artificial Sequence
  Description of Artificial Sequence: Synthetic oligonucleotide
uguaguuggucaccacucu

SEQ ID NO: 649865 - RNA, 19 nt, Artificial Sequence
  Description of Artificial Sequence: Synthetic oligonucleotide
aacacaaagggugcgucgu

SEQ ID NO: 649866 - RNA, 19 nt, Artificial Sequence
  Description of Artificial Sequence: Synthetic oligonucleotide
ugacggugcgggcacagag

SEQ ID NO: 649867 - RNA, 19 nt, Artificial Sequence
  Description of Artificial Sequence: Synthetic oligonucleotide
ucauuacggaaguacucga

SEQ ID NO: 649868 - RNA, 19 nt, Artificial Sequence
  Description of Artificial Sequence: Synthetic oligonucleotide
agaugcagucauucagggg

SEQ ID NO: 649869 - RNA, 19 nt, Artificial Sequence
  Description of Artificial Sequence: Synthetic oligonucleotide
cuuggaacccaaagcuugc

SEQ ID NO: 649870 - RNA, 19 nt, Artificial Sequence
  Description of Artificial Sequence: Synthetic oligonucleotide
aagucgacucucaccuugc

SEQ ID NO: 649871 - RNA, 19 nt, Artificial Sequence
  Description of Artificial Sequence: Synthetic oligonucleotide
cauuaucucgggauaaaga

SEQ ID NO: 649872 - RNA, 19 nt, Artificial Sequence
  Description of Artificial Sequence: Synthetic oligonucleotide
uccccauaauuguuagucc

SEQ ID NO: 649873 - RNA, 19 nt, Artificial Sequence
  Description of Artificial Sequence: Synthetic oligonucleotide
cuucgugcugaucuucugc

SEQ ID NO: 649874 - RNA, 19 nt, Artificial Sequence
  Description of Artificial Sequence: Synthetic oligonucleotide
augacguuccgguagcccu

SEQ ID NO: 649875 - RNA, 19 nt, Artificial Sequence
  Description of Artificial Sequence: Synthetic oligonucleotide
gacucuacccagcagugga

SEQ ID NO: 649876 - RNA, 19 nt, Artificial Sequence
  Description of Artificial Sequence: Synthetic oligonucleotide
ucucgggauaaagaccagg

SEQ ID NO: 649877 - RNA, 19 nt, Artificial Sequence
  Description of Artificial Sequence: Synthetic oligonucleotide
aaagggugcgucguacuug

SEQ ID NO: 649878 - RNA, 19 nt, Artificial Sequence
  Description of Artificial Sequence: Synthetic oligonucleotide
uggcucgacaaggagaccc

SEQ ID NO: 649879 - RNA, 19 nt, Artificial Sequence
  Description of Artificial Sequence: Synthetic oligonucleotide
uccgguagcccuuuacaga

SEQ ID NO: 649880 - RNA, 19 nt, Artificial Sequence
  Description of Artificial Sequence: Synthetic oligonucleotide
agcuuaugaguaguucugg

SEQ ID NO: 649881 - RNA, 19 nt, Artificial Sequence
  Description of Artificial Sequence: Synthetic oligonucleotide
accuuuauuucagugcuca

SEQ ID NO: 649882 - RNA, 19 nt, Artificial Sequence
  Description of Artificial Sequence: Synthetic oligonucleotide
cuccccgaacucauuacgg

SEQ ID NO: 649883 - RNA, 19 nt, Artificial Sequence
  Description of Artificial Sequence: Synthetic oligonucleotide
ccuugaugagguuugauuc

SEQ ID NO: 649884 - RNA, 19 nt, Artificial Sequence
  Description of Artificial Sequence: Synthetic oligonucleotide
ugaguuguaguuggucacc

SEQ ID NO: 649885 - RNA, 19 nt, Artificial Sequence
  Description of Artificial Sequence: Synthetic oligonucleotide
gagcuuaugaguaguucug

SEQ ID NO: 649886 - RNA, 19 nt, Artificial Sequence
  Description of Artificial Sequence: Synthetic oligonucleotide
gccaguagguaacuguugg

SEQ ID NO: 649887 - RNA, 19 nt, Artificial Sequence
  Description of Artificial Sequence: Synthetic oligonucleotide
ugauuucgggauucuccag

SEQ ID NO: 649888 - RNA, 19 nt, Artificial Sequence
  Description of Artificial Sequence: Synthetic oligonucleotide
auuucgggauucuccaggu

SEQ ID NO: 649889 - RNA, 19 nt, Artificial Sequence
  Description of Artificial Sequence: Synthetic oligonucleotide
ggugcgucguacuuggugc

SEQ ID NO: 649890 - RNA, 19 nt, Artificial Sequence
  Description of Artificial Sequence: Synthetic oligonucleotide
uagcccuuuacagacuuca

SEQ ID NO: 649891 - RNA, 19 nt, Artificial Sequence
  Description of Artificial Sequence: Synthetic oligonucleotide
cuuaugaguaguucuggaa

SEQ ID NO: 649892 - RNA, 19 nt, Artificial Sequence
  Description of Artificial Sequence: Synthetic oligonucleotide
cacgcugccaauccaggcc

SEQ ID NO: 649893 - RNA, 19 nt, Artificial Sequence
  Description of Artificial Sequence: Synthetic oligonucleotide
auccucugaucuugucacc

SEQ ID NO: 649894 - RNA, 19 nt, Artificial Sequence
  Description of Artificial Sequence: Synthetic oligonucleotide
gugagaagcaggacggucc

SEQ ID NO: 649895 - RNA, 19 nt, Artificial Sequence
  Description of Artificial Sequence: Synthetic oligonucleotide
aaguacucgaugagcaggu

SEQ ID NO: 649896 - RNA, 19 nt, Artificial Sequence
  Description of Artificial Sequence: Synthetic oligonucleotide
agucgacucucaccuugcc

SEQ ID NO: 649897 - RNA, 19 nt, Artificial Sequence
  Description of Artificial Sequence: Synthetic oligonucleotide
accucggcaaacacaaagg

SEQ ID NO: 649898 - RNA, 19 nt, Artificial Sequence
  Description of Artificial Sequence: Synthetic oligonucleotide
aggagcuuaugaguaguuc

SEQ ID NO: 649899 - RNA, 19 nt, Artificial Sequence
  Description of Artificial Sequence: Synthetic oligonucleotide
ugccaguagguaacuguug

SEQ ID NO: 649900 - RNA, 19 nt, Artificial Sequence
  Description of Artificial Sequence: Synthetic oligonucleotide
ugcucauuaucucgggaua

SEQ ID NO: 649901 - RNA, 19 nt, Artificial Sequence
  Description of Artificial Sequence: Synthetic oligonucleotide
ucgggauucuccagguaga

SEQ ID NO: 649902 - RNA, 19 nt, Artificial Sequence
  Description of Artificial Sequence: Synthetic oligonucleotide
gcuaaggggacagaugggg

SEQ ID NO: 649903 - RNA, 19 nt, Artificial Sequence
  Description of Artificial Sequence: Synthetic oligonucleotide
cucucgcccacacggaucc

SEQ ID NO: 649904 - RNA, 19 nt, Artificial Sequence
  Description of Artificial Sequence: Synthetic oligonucleotide
uggaacccaaagcuugcac

SEQ ID NO: 649905 - RNA, 19 nt, Artificial Sequence
  Description of Artificial Sequence: Synthetic oligonucleotide
auggauuugugaacugauc

SEQ ID NO: 649906 - RNA, 19 nt, Artificial Sequence
  Description of Artificial Sequence: Synthetic oligonucleotide
aguuccagaucaucucgcu

SEQ ID NO: 649907 - RNA, 19 nt, Artificial Sequence
  Description of Artificial Sequence: Synthetic oligonucleotide
gaggugacaaucacggcuc

SEQ ID NO: 649908 - RNA, 19 nt, Artificial Sequence
  Description of Artificial Sequence: Synthetic oligonucleotide
cauagccuggcucuagguc

SEQ ID NO: 649909 - RNA, 19 nt, Artificial Sequence
  Description of Artificial Sequence: Synthetic oligonucleotide
cagacacauggcuacggug

SEQ ID NO: 649910 - RNA, 19 nt, Artificial Sequence
  Description of Artificial Sequence: Synthetic oligonucleotide
cuagaccagaggaacagaa

SEQ ID NO: 649911 - RNA, 19 nt, Artificial Sequence
  Description of Artificial Sequence: Synthetic oligonucleotide
auggcccgcacugagacug

SEQ ID NO: 649912 - RNA, 19 nt, Artificial Sequence
  Description of Artificial Sequence: Synthetic oligonucleotide
uccccgaacucauuacgga

SEQ ID NO: 649913 - RNA, 19 nt, Artificial Sequence
  Description of Artificial Sequence: Synthetic oligonucleotide
cucucagaggugucauugc

SEQ ID NO: 649914 - RNA, 19 nt, Artificial Sequence
  Description of Artificial Sequence: Synthetic oligonucleotide
gaugacguuccgguagccc

SEQ ID NO: 649915 - RNA, 19 nt, Artificial Sequence
  Description of Artificial Sequence: Synthetic oligonucleotide
ucaaccugaaggggugaag

SEQ ID NO: 649916 - RNA, 19 nt, Artificial Sequence
  Description of Artificial Sequence: Synthetic oligonucleotide
gguaggagcuuaugaguag

SEQ ID NO: 649917 - RNA, 19 nt, Artificial Sequence
  Description of Artificial Sequence: Synthetic oligonucleotide
gguugauggauuugugaac

SEQ ID NO: 649918 - RNA, 19 nt, Artificial Sequence
  Description of Artificial Sequence: Synthetic oligonucleotide
uugcccguauuugacuugc

SEQ ID NO: 649919 - RNA, 19 nt, Artificial Sequence
  Description of Artificial Sequence: Synthetic oligonucleotide
ucuucgugcugaucuucug

SEQ ID NO: 649920 - RNA, 19 nt, Artificial Sequence
  Description of Artificial Sequence: Synthetic oligonucleotide
cuuccaccgccucaggaug

SEQ ID NO: 649921 - RNA, 19 nt, Artificial Sequence
  Description of Artificial Sequence: Synthetic oligonucleotide
ugguaauggggcagacaca

SEQ ID NO: 649922 - RNA, 19 nt, Artificial Sequence
  Description of Artificial Sequence: Synthetic oligonucleotide
aaggggugaaguugcucau

SEQ ID NO: 649923 - RNA, 19 nt, Artificial Sequence
  Description of Artificial Sequence: Synthetic oligonucleotide
augaguaguucuggaacug

SEQ ID NO: 649924 - RNA, 19 nt, Artificial Sequence
  Description of Artificial Sequence: Synthetic oligonucleotide
auugccgaugugggcaaac

SEQ ID NO: 649925 - RNA, 19 nt, Artificial Sequence
  Description of Artificial Sequence: Synthetic oligonucleotide
guuccgguagcccuuuaca

SEQ ID NO: 649926 - RNA, 19 nt, Artificial Sequence
  Description of Artificial Sequence: Synthetic oligonucleotide
acggugcgggcacagagca

SEQ ID NO: 649927 - RNA, 19 nt, Artificial Sequence
  Description of Artificial Sequence: Synthetic oligonucleotide
cgggauaaagaccagguug

SEQ ID NO: 649928 - RNA, 19 nt, Artificial Sequence
  Description of Artificial Sequence: Synthetic oligonucleotide
agcguugaccucggcaaac

SEQ ID NO: 649929 - RNA, 19 nt, Artificial Sequence
  Description of Artificial Sequence: Synthetic oligonucleotide
aauggacaggaagugcauu

SEQ ID NO: 649930 - RNA, 19 nt, Artificial Sequence
  Description of Artificial Sequence: Synthetic oligonucleotide
uaacuguuggaagcuggcu

SEQ ID NO: 649931 - RNA, 19 nt, Artificial Sequence
  Description of Artificial Sequence: Synthetic oligonucleotide
ugugguaauggggcagaca

SEQ ID NO: 649932 - RNA, 19 nt, Artificial Sequence
  Description of Artificial Sequence: Synthetic oligonucleotide
gcaucaaacauuccucaca

SEQ ID NO: 649933 - RNA, 19 nt, Artificial Sequence
  Description of Artificial Sequence: Synthetic oligonucleotide
ucgggauaaagaccagguu

SEQ ID NO: 649934 - RNA, 19 nt, Artificial Sequence
  Description of Artificial Sequence: Synthetic oligonucleotide
caaucacggcucucagagg

SEQ ID NO: 649935 - RNA, 19 nt, Artificial Sequence
  Description of Artificial Sequence: Synthetic oligonucleotide
gggauaaagaccagguuga

SEQ ID NO: 649936 - RNA, 19 nt, Artificial Sequence
  Description of Artificial Sequence: Synthetic oligonucleotide
gguagggaugccaaggcac

SEQ ID NO: 649937 - RNA, 19 nt, Artificial Sequence
  Description of Artificial Sequence: Synthetic oligonucleotide
gauuugugaacugauccau

SEQ ID NO: 649938 - RNA, 19 nt, Artificial Sequence
  Description of Artificial Sequence: Synthetic oligonucleotide
cauggcuacggugcaauuc

SEQ ID NO: 649939 - RNA, 19 nt, Artificial Sequence
  Description of Artificial Sequence: Synthetic oligonucleotide
acgcugccaauccaggcca

SEQ ID NO: 649940 - RNA, 19 nt, Artificial Sequence
  Description of Artificial Sequence: Synthetic oligonucleotide
ggaggugacaaucacggcu

SEQ ID NO: 649941 - RNA, 19 nt, Artificial Sequence
  Description of Artificial Sequence: Synthetic oligonucleotide
uccggugacccuucugggu

SEQ ID NO: 649942 - RNA, 19 nt, Artificial Sequence
  Description of Artificial Sequence: Synthetic oligonucleotide
gucacacuggaaguucacc

SEQ ID NO: 649943 - RNA, 19 nt, Artificial Sequence
  Description of Artificial Sequence: Synthetic oligonucleotide
gcuacggugcaauucucug

SEQ ID NO: 649944 - RNA, 19 nt, Artificial Sequence
  Description of Artificial Sequence: Synthetic oligonucleotide
acggcccacacucuucgug

SEQ ID NO: 649945 - RNA, 19 nt, Artificial Sequence
  Description of Artificial Sequence: Synthetic oligonucleotide
aagaccagguugaguugag

SEQ ID NO: 649946 - RNA, 19 nt, Artificial Sequence
  Description of Artificial Sequence: Synthetic oligonucleotide
cuugaugagguuugauucu

SEQ ID NO: 649947 - RNA, 19 nt, Artificial Sequence
  Description of Artificial Sequence: Synthetic oligonucleotide
ccguauuugacuugcugac

SEQ ID NO: 649948 - RNA, 19 nt, Artificial Sequence
  Description of Artificial Sequence: Synthetic oligonucleotide
ccuccggugacccuucugg

SEQ ID NO: 649949 - RNA, 19 nt, Artificial Sequence
  Description of Artificial Sequence: Synthetic oligonucleotide
cuggucgugggcugaguug

SEQ ID NO: 649950 - RNA, 19 nt, Artificial Sequence
  Description of Artificial Sequence: Synthetic oligonucleotide
cuaaggggacagaugggga

SEQ ID NO: 649951 - RNA, 19 nt, Artificial Sequence
  Description of Artificial Sequence: Synthetic oligonucleotide
uggcccaaugaugacguuc

SEQ ID NO: 649952 - RNA, 19 nt, Artificial Sequence
  Description of Artificial Sequence: Synthetic oligonucleotide
ucgugggcugaguuguagu

SEQ ID NO: 649953 - RNA, 19 nt, Artificial Sequence
  Description of Artificial Sequence: Synthetic oligonucleotide
gcuccccgaacucauuacg

SEQ ID NO: 649954 - RNA, 19 nt, Artificial Sequence
  Description of Artificial Sequence: Synthetic oligonucleotide
ucgcucuucuccugcggug

SEQ ID NO: 649955 - RNA, 19 nt, Artificial Sequence
  Description of Artificial Sequence: Synthetic oligonucleotide
cacaaucaaggagcgguug

SEQ ID NO: 649956 - RNA, 19 nt, Artificial Sequence
  Description of Artificial Sequence: Synthetic oligonucleotide
cccgaacucauuacggaag

SEQ ID NO: 649957 - RNA, 19 nt, Artificial Sequence
  Description of Artificial Sequence: Synthetic oligonucleotide
cacaaagggugcgucguac

SEQ ID NO: 649958 - RNA, 19 nt, Artificial Sequence
  Description of Artificial Sequence: Synthetic oligonucleotide
gauccaucuuccugccgga

SEQ ID NO: 649959 - RNA, 19 nt, Artificial Sequence
  Description of Artificial Sequence: Synthetic oligonucleotide
ccgguagcccuuuacagac

SEQ ID NO: 649960 - RNA, 19 nt, Artificial Sequence
  Description of Artificial Sequence: Synthetic oligonucleotide
cugugugguaauggggcag

SEQ ID NO: 649961 - RNA, 19 nt, Artificial Sequence
  Description of Artificial Sequence: Synthetic oligonucleotide
gauguccacgcugccaauc

SEQ ID NO: 649962 - RNA, 19 nt, Artificial Sequence
  Description of Artificial Sequence: Synthetic oligonucleotide
caucggcccagaaguacac

SEQ ID NO: 649963 - RNA, 19 nt, Artificial Sequence
  Description of Artificial Sequence: Synthetic oligonucleotide
cucgggauaaagaccaggu

SEQ ID NO: 649964 - RNA, 19 nt, Artificial Sequence
  Description of Artificial Sequence: Synthetic oligonucleotide
uagcugacggugcgggcac

SEQ ID NO: 649965 - RNA, 19 nt, Artificial Sequence
  Description of Artificial Sequence: Synthetic oligonucleotide
gagaagggauccaggguca

SEQ ID NO: 649966 - RNA, 19 nt, Artificial Sequence
  Description of Artificial Sequence: Synthetic oligonucleotide
caguagguaacuguuggaa

SEQ ID NO: 649967 - RNA, 19 nt, Artificial Sequence
  Description of Artificial Sequence: Synthetic oligonucleotide
guagcugacggugcgggca

SEQ ID NO: 649968 - RNA, 19 nt, Artificial Sequence
  Description of Artificial Sequence: Synthetic oligonucleotide
ccagagaacgcuccccugc

SEQ ID NO: 649969 - RNA, 19 nt, Artificial Sequence
  Description of Artificial Sequence: Synthetic oligonucleotide
ggugcaauucucuguguaa

SEQ ID NO: 649970 - RNA, 19 nt, Artificial Sequence
  Description of Artificial Sequence: Synthetic oligonucleotide
cagcauugcccguauuuga

SEQ ID NO: 649971 - RNA, 19 nt, Artificial Sequence
  Description of Artificial Sequence: Synthetic oligonucleotide
acuagaccagaggaacaga

SEQ ID NO: 649972 - RNA, 19 nt, Artificial Sequence
  Description of Artificial Sequence: Synthetic oligonucleotide
gcuggcucgacaaggagac

SEQ ID NO: 649973 - RNA, 19 nt, Artificial Sequence
  Description of Artificial Sequence: Synthetic oligonucleotide
gcuuaugaguaguucugga

SEQ ID NO: 649974 - RNA, 19 nt, Artificial Sequence
  Description of Artificial Sequence: Synthetic oligonucleotide
aucacggcccacacucuuc

SEQ ID NO: 649975 - RNA, 19 nt, Artificial Sequence
  Description of Artificial Sequence: Synthetic oligonucleotide
uuucgggauucuccaggua

SEQ ID NO: 649976 - RNA, 19 nt, Artificial Sequence
  Description of Artificial Sequence: Synthetic oligonucleotide
caguaugucccuucgcucu

SEQ ID NO: 649977 - RNA, 19 nt, Artificial Sequence
  Description of Artificial Sequence: Synthetic oligonucleotide
ugucaaccugaagggguga

SEQ ID NO: 649978 - RNA, 19 nt, Artificial Sequence
  Description of Artificial Sequence: Synthetic oligonucleotide
gacccuucuggguacuugu

SEQ ID NO: 649979 - RNA, 19 nt, Artificial Sequence
  Description of Artificial Sequence: Synthetic oligonucleotide
agucgggaagaagucgacu

SEQ ID NO: 649980 - RNA, 19 nt, Artificial Sequence
  Description of Artificial Sequence: Synthetic oligonucleotide
ugacguuccgguagcccuu

SEQ ID NO: 649981 - RNA, 19 nt, Artificial Sequence
  Description of Artificial Sequence: Synthetic oligonucleotide
ugaugacguuccgguagcc

SEQ ID NO: 649982 - RNA, 19 nt, Artificial Sequence
  Description of Artificial Sequence: Synthetic oligonucleotide
gguuugauucugucaggca

SEQ ID NO: 649983 - RNA, 19 nt, Artificial Sequence
  Description of Artificial Sequence: Synthetic oligonucleotide
aucccuuugcccacugugu

SEQ ID NO: 649984 - RNA, 19 nt, Artificial Sequence
  Description of Artificial Sequence: Synthetic oligonucleotide
cauugagccagagggcuca

SEQ ID NO: 649985 - RNA, 19 nt, Artificial Sequence
  Description of Artificial Sequence: Synthetic oligonucleotide
gggugcgucguacuuggug

SEQ ID NO: 649986 - RNA, 19 nt, Artificial Sequence
  Description of Artificial Sequence: Synthetic oligonucleotide
cagucgggaagaagucgac

SEQ ID NO: 649987 - RNA, 19 nt, Artificial Sequence
  Description of Artificial Sequence: Synthetic oligonucleotide
acucucaccuugcccacuu

SEQ ID NO: 649988 - RNA, 19 nt, Artificial Sequence
  Description of Artificial Sequence: Synthetic oligonucleotide
cacugggucugggacuucc

SEQ ID NO: 649989 - RNA, 19 nt, Artificial Sequence
  Description of Artificial Sequence: Synthetic oligonucleotide
cagcaguaugucccuucgc

SEQ ID NO: 649990 - RNA, 19 nt, Artificial Sequence
  Description of Artificial Sequence: Synthetic oligonucleotide
aggagcgguugauggauuu

SEQ ID NO: 649991 - RNA, 19 nt, Artificial Sequence
  Description of Artificial Sequence: Synthetic oligonucleotide
agucguugcccauguucau

SEQ ID NO: 649992 - RNA, 19 nt, Artificial Sequence
  Description of Artificial Sequence: Synthetic oligonucleotide
gcauaggugagaagcagga

SEQ ID NO: 649993 - RNA, 19 nt, Artificial Sequence
  Description of Artificial Sequence: Synthetic oligonucleotide
ggcagacacauggcuacgg

SEQ ID NO: 649994 - RNA, 19 nt, Artificial Sequence
  Description of Artificial Sequence: Synthetic oligonucleotide
gucgugggcugaguuguag

SEQ ID NO: 649995 - RNA, 19 nt, Artificial Sequence
  Description of Artificial Sequence: Synthetic oligonucleotide
aggugacaaucacggcucu

SEQ ID NO: 649996 - RNA, 19 nt, Artificial Sequence
  Description of Artificial Sequence: Synthetic oligonucleotide
gcgguugauggauuuguga

SEQ ID NO: 649997 - RNA, 19 nt, Artificial Sequence
  Description of Artificial Sequence: Synthetic oligonucleotide
gguaauggggcagacacau

SEQ ID NO: 649998 - RNA, 19 nt, Artificial Sequence
  Description of Artificial Sequence: Synthetic oligonucleotide
aggcaccggagcacugugc

SEQ ID NO: 649999 - RNA, 19 nt, Artificial Sequence
  Description of Artificial Sequence: Synthetic oligonucleotide
gcaguaugucccuucgcuc

SEQ ID NO: 650000 - RNA, 19 nt, Artificial Sequence
  Description of Artificial Sequence: Synthetic oligonucleotide
auugagccagagggcucac

SEQ ID NO: 650001 - RNA, 19 nt, Artificial Sequence
  Description of Artificial Sequence: Synthetic oligonucleotide
cacccagagaacgcucccc

SEQ ID NO: 650002 - RNA, 19 nt, Artificial Sequence
  Description of Artificial Sequence: Synthetic oligonucleotide
ccaaugaugacguuccggu

SEQ ID NO: 650003 - RNA, 19 nt, Artificial Sequence
  Description of Artificial Sequence: Synthetic oligonucleotide
gucguacuuggugcucagg

SEQ ID NO: 650004 - RNA, 19 nt, Artificial Sequence
  Description of Artificial Sequence: Synthetic oligonucleotide
guguaaagcggaaaguguu

SEQ ID NO: 650005 - RNA, 19 nt, Artificial Sequence
  Description of Artificial Sequence: Synthetic oligonucleotide
ggucaauggccugccaccc

SEQ ID NO: 650006 - RNA, 19 nt, Artificial Sequence
  Description of Artificial Sequence: Synthetic oligonucleotide
cagauccucugaucuuguc

SEQ ID NO: 650007 - RNA, 19 nt, Artificial Sequence
  Description of Artificial Sequence: Synthetic oligonucleotide
acggugcaauucucugugu

SEQ ID NO: 650008 - RNA, 19 nt, Artificial Sequence
  Description of Artificial Sequence: Synthetic oligonucleotide
ggugugggugauguccucc

SEQ ID NO: 650009 - RNA, 19 nt, Artificial Sequence
  Description of Artificial Sequence: Synthetic oligonucleotide
uggcuacggugcaauucuc

SEQ ID NO: 650010 - RNA, 19 nt, Artificial Sequence
  Description of Artificial Sequence: Synthetic oligonucleotide
ccaugucaaccugaagggg

SEQ ID NO: 650011 - RNA, 19 nt, Artificial Sequence
  Description of Artificial Sequence: Synthetic oligonucleotide
ugcucacgugugcuucaaa

SEQ ID NO: 650012 - RNA, 19 nt, Artificial Sequence
  Description of Artificial Sequence: Synthetic oligonucleotide
guaggagcuuaugaguagu

SEQ ID NO: 650013 - RNA, 19 nt, Artificial Sequence
  Description of Artificial Sequence: Synthetic oligonucleotide
gcgguguggggucaauggc

SEQ ID NO: 650014 - RNA, 19 nt, Artificial Sequence
  Description of Artificial Sequence: Synthetic oligonucleotide
ggacucuacccagcagugg

SEQ ID NO: 650015 - RNA, 19 nt, Artificial Sequence
  Description of Artificial Sequence: Synthetic oligonucleotide
acacaaagggugcgucgua

SEQ ID NO: 650016 - RNA, 19 nt, Artificial Sequence
  Description of Artificial Sequence: Synthetic oligonucleotide
cuacggugcaauucucugu

SEQ ID NO: 650017 - RNA, 19 nt, Artificial Sequence
  Description of Artificial Sequence: Synthetic oligonucleotide
ugcgggcacagagcaggag

SEQ ID NO: 650018 - RNA, 19 nt, Artificial Sequence
  Description of Artificial Sequence: Synthetic oligonucleotide
caaugaugacguuccggua

SEQ ID NO: 650019 - RNA, 19 nt, Artificial Sequence
  Description of Artificial Sequence: Synthetic oligonucleotide
cccauaauuguuaguccca

SEQ ID NO: 650020 - RNA, 19 nt, Artificial Sequence
  Description of Artificial Sequence: Synthetic oligonucleotide
guaauggggcagacacaug

SEQ ID NO: 650021 - RNA, 19 nt, Artificial Sequence
  Description of Artificial Sequence: Synthetic oligonucleotide
ugcccguauuugacuugcu

SEQ ID NO: 650022 - RNA, 19 nt, Artificial Sequence
  Description of Artificial Sequence: Synthetic oligonucleotide
cacccuccuugauggcccg

SEQ ID NO: 650023 - RNA, 19 nt, Artificial Sequence
  Description of Artificial Sequence: Synthetic oligonucleotide
cuuaggcuggcccaaugau

SEQ ID NO: 650024 - RNA, 19 nt, Artificial Sequence
  Description of Artificial Sequence: Synthetic oligonucleotide
guuugagggcccagccaug

SEQ ID NO: 650025 - RNA, 19 nt, Artificial Sequence
  Description of Artificial Sequence: Synthetic oligonucleotide
cagcgugcccuggaccugg

SEQ ID NO: 650026 - RNA, 19 nt, Artificial Sequence
  Description of Artificial Sequence: Synthetic oligonucleotide
cauuacggaaguacucgau

SEQ ID NO: 650027 - RNA, 19 nt, Artificial Sequence
  Description of Artificial Sequence: Synthetic oligonucleotide
agggagucccagauccucu

SEQ ID NO: 650028 - RNA, 19 nt, Artificial Sequence
  Description of Artificial Sequence: Synthetic oligonucleotide
caaccugaaggggugaagu

SEQ ID NO: 650029 - RNA, 19 nt, Artificial Sequence
  Description of Artificial Sequence: Synthetic oligonucleotide
ucccaucggcccagaagua

SEQ ID NO: 650030 - RNA, 19 nt, Artificial Sequence
  Description of Artificial Sequence: Synthetic oligonucleotide
uccucccgcucaucacggc

SEQ ID NO: 650031 - RNA, 19 nt, Artificial Sequence
  Description of Artificial Sequence: Synthetic oligonucleotide
cccagauccucugaucuug

SEQ ID NO: 650032 - RNA, 19 nt, Artificial Sequence
  Description of Artificial Sequence: Synthetic oligonucleotide
ccuuuauuucagugcucac

SEQ ID NO: 650033 - RNA, 19 nt, Artificial Sequence
  Description of Artificial Sequence: Synthetic oligonucleotide
acucgaugagcagguugcu

SEQ ID NO: 650034 - RNA, 19 nt, Artificial Sequence
  Description of Artificial Sequence: Synthetic oligonucleotide
caggggcucagagagugga

SEQ ID NO: 650035 - RNA, 19 nt, Artificial Sequence
  Description of Artificial Sequence: Synthetic oligonucleotide
gggaacuagaccagaggaa

SEQ ID NO: 650036 - RNA, 19 nt, Artificial Sequence
  Description of Artificial Sequence: Synthetic oligonucleotide
ugcgucguacuuggugcuc

SEQ ID NO: 650037 - RNA, 19 nt, Artificial Sequence
  Description of Artificial Sequence: Synthetic oligonucleotide
aucucgggauaaagaccag

SEQ ID NO: 650038 - RNA, 19 nt, Artificial Sequence
  Description of Artificial Sequence: Synthetic oligonucleotide
cucgcccacacggauccuc

SEQ ID NO: 650039 - RNA, 19 nt, Artificial Sequence
  Description of Artificial Sequence: Synthetic oligonucleotide
gcucgacaaggagaccccg

SEQ ID NO: 650040 - RNA, 19 nt, Artificial Sequence
  Description of Artificial Sequence: Synthetic oligonucleotide
guuccuuaggcuggcccaa

SEQ ID NO: 650041 - RNA, 19 nt, Artificial Sequence
  Description of Artificial Sequence: Synthetic oligonucleotide
cugccaguagguaacuguu

SEQ ID NO: 650042 - RNA, 19 nt, Artificial Sequence
  Description of Artificial Sequence: Synthetic oligonucleotide
gcucauuaucucgggauaa

SEQ ID NO: 650043 - RNA, 19 nt, Artificial Sequence
  Description of Artificial Sequence: Synthetic oligonucleotide
ggcucgacaaggagacccc

SEQ ID NO: 650044 - RNA, 19 nt, Artificial Sequence
  Description of Artificial Sequence: Synthetic oligonucleotide
ccggaucuugauuucggga

SEQ ID NO: 650045 - RNA, 19 nt, Artificial Sequence
  Description of Artificial Sequence: Synthetic oligonucleotide
cacucacuguacuucucgu

SEQ ID NO: 650046 - RNA, 19 nt, Artificial Sequence
  Description of Artificial Sequence: Synthetic oligonucleotide
cugcgguguggggucaaug

SEQ ID NO: 650047 - RNA, 19 nt, Artificial Sequence
  Description of Artificial Sequence: Synthetic oligonucleotide
ccuuaggcuggcccaauga

SEQ ID NO: 650048 - RNA, 19 nt, Artificial Sequence
  Description of Artificial Sequence: Synthetic oligonucleotide
ccaucggcccagaaguaca

SEQ ID NO: 650049 - RNA, 19 nt, Artificial Sequence
  Description of Artificial Sequence: Synthetic oligonucleotide
caucagcguugaccucggc

SEQ ID NO: 650050 - RNA, 19 nt, Artificial Sequence
  Description of Artificial Sequence: Synthetic oligonucleotide
gugugguaauggggcagac

SEQ ID NO: 650051 - RNA, 19 nt, Artificial Sequence
  Description of Artificial Sequence: Synthetic oligonucleotide
aguacucgaugagcagguu

SEQ ID NO: 650052 - RNA, 19 nt, Artificial Sequence
  Description of Artificial Sequence: Synthetic oligonucleotide
ggccaauuucagucgggaa

SEQ ID NO: 650053 - RNA, 19 nt, Artificial Sequence
  Description of Artificial Sequence: Synthetic oligonucleotide
cccuucgcucuucuccugc

SEQ ID NO: 650054 - RNA, 19 nt, Artificial Sequence
  Description of Artificial Sequence: Synthetic oligonucleotide
cugggacuuccacagacuu

SEQ ID NO: 650055 - RNA, 19 nt, Artificial Sequence
  Description of Artificial Sequence: Synthetic oligonucleotide
aggccuggugcuacugccu

SEQ ID NO: 650056 - RNA, 19 nt, Artificial Sequence
  Description of Artificial Sequence: Synthetic oligonucleotide
cuggcucuagguccggccu

SEQ ID NO: 650057 - RNA, 19 nt, Artificial Sequence
  Description of Artificial Sequence: Synthetic oligonucleotide
cuggcucgacaaggagacc

SEQ ID NO: 650058 - RNA, 19 nt, Artificial Sequence
  Description of Artificial Sequence: Synthetic oligonucleotide
cagagaacgcuccccugcu

SEQ ID NO: 650059 - RNA, 19 nt, Artificial Sequence
  Description of Artificial Sequence: Synthetic oligonucleotide
gcauugcccguauuugacu

SEQ ID NO: 650060 - RNA, 19 nt, Artificial Sequence
  Description of Artificial Sequence: Synthetic oligonucleotide
caaucaaggagcgguugau

SEQ ID NO: 650061 - RNA, 19 nt, Artificial Sequence
  Description of Artificial Sequence: Synthetic oligonucleotide
cccaucggcccagaaguac

SEQ ID NO: 650062 - RNA, 19 nt, Artificial Sequence
  Description of Artificial Sequence: Synthetic oligonucleotide
ccgaugugggcaaacacau

SEQ ID NO: 650063 - RNA, 19 nt, Artificial Sequence
  Description of Artificial Sequence: Synthetic oligonucleotide
cuagguccggccuggucau

SEQ ID NO: 650064 - RNA, 19 nt, Artificial Sequence
  Description of Artificial Sequence: Synthetic oligonucleotide
gugcgucguacuuggugcu

SEQ ID NO: 650065 - RNA, 19 nt, Artificial Sequence
  Description of Artificial Sequence: Synthetic oligonucleotide
gcagacacauggcuacggu

SEQ ID NO: 650066 - RNA, 19 nt, Artificial Sequence
  Description of Artificial Sequence: Synthetic oligonucleotide
gcugacggugcgggcacag

SEQ ID NO: 650067 - RNA, 19 nt, Artificial Sequence
  Description of Artificial Sequence: Synthetic oligonucleotide
gcuccccugcucugaaguc

SEQ ID NO: 650068 - RNA, 19 nt, Artificial Sequence
  Description of Artificial Sequence: Synthetic oligonucleotide
cuacccagcaguggaaguu

SEQ ID NO: 650069 - RNA, 19 nt, Artificial Sequence
  Description of Artificial Sequence: Synthetic oligonucleotide
ccccgaacucauuacggaa

SEQ ID NO: 650070 - RNA, 19 nt, Artificial Sequence
  Description of Artificial Sequence: Synthetic oligonucleotide
cguuccgguagcccuuuac

SEQ ID NO: 650071 - RNA, 19 nt, Artificial Sequence
  Description of Artificial Sequence: Synthetic oligonucleotide
cguugaccucggcaaacac

SEQ ID NO: 650072 - RNA, 19 nt, Artificial Sequence
  Description of Artificial Sequence: Synthetic oligonucleotide
cagcguugaccucggcaaa

SEQ ID NO: 650073 - RNA, 19 nt, Artificial Sequence
  Description of Artificial Sequence: Synthetic oligonucleotide
gcugaucuucugccccaca

SEQ ID NO: 650074 - RNA, 19 nt, Artificial Sequence
  Description of Artificial Sequence: Synthetic oligonucleotide
caaggcaccggagcacugu

SEQ ID NO: 650075 - RNA, 19 nt, Artificial Sequence
  Description of Artificial Sequence: Synthetic oligonucleotide
gcgucguacuuggugcuca

SEQ ID NO: 650076 - RNA, 19 nt, Artificial Sequence
  Description of Artificial Sequence: Synthetic oligonucleotide
gcguugaccucggcaaaca

SEQ ID NO: 650077 - RNA, 19 nt, Artificial Sequence
  Description of Artificial Sequence: Synthetic oligonucleotide
caggacgguccagguccag

SEQ ID NO: 650078 - RNA, 19 nt, Artificial Sequence
  Description of Artificial Sequence: Synthetic oligonucleotide
ccgaacucauuacggaagu

SEQ ID NO: 650079 - RNA, 19 nt, Artificial Sequence
  Description of Artificial Sequence: Synthetic oligonucleotide
ccggugacccuucugggua

SEQ ID NO: 650080 - RNA, 19 nt, Artificial Sequence
  Description of Artificial Sequence: Synthetic oligonucleotide
cgucguacuuggugcucag

SEQ ID NO: 650081 - RNA, 19 nt, Artificial Sequence
  Description of Artificial Sequence: Synthetic oligonucleotide
ucucgcccacacggauccu

SEQ ID NO: 650082 - RNA, 19 nt, Artificial Sequence
  Description of Artificial Sequence: Synthetic oligonucleotide
ggcuacggugcaauucucu

SEQ ID NO: 650083 - RNA, 19 nt, Artificial Sequence
  Description of Artificial Sequence: Synthetic oligonucleotide
caucacggcccacacucuu

SEQ ID NO: 650084 - RNA, 19 nt, Artificial Sequence
  Description of Artificial Sequence: Synthetic oligonucleotide
acccagcauugcccguauu

SEQ ID NO: 650085 - RNA, 19 nt, Artificial Sequence
  Description of Artificial Sequence: Synthetic oligonucleotide
gguccggccuggucaucca

SEQ ID NO: 650086 - RNA, 19 nt, Artificial Sequence
  Description of Artificial Sequence: Synthetic oligonucleotide
gugcucacgugugcuucaa

SEQ ID NO: 650087 - RNA, 19 nt, Artificial Sequence
  Description of Artificial Sequence: Synthetic oligonucleotide
cugacggugcgggcacaga

SEQ ID NO: 650088 - RNA, 19 nt, Artificial Sequence
  Description of Artificial Sequence: Synthetic oligonucleotide
gugcgggcacagagcagga

SEQ ID NO: 650089 - RNA, 19 nt, Artificial Sequence
  Description of Artificial Sequence: Synthetic oligonucleotide
cagaggugucauugccgau

SEQ ID NO: 650090 - RNA, 19 nt, Artificial Sequence
  Description of Artificial Sequence: Synthetic oligonucleotide
gccaaggcaccggagcacu

SEQ ID NO: 650091 - RNA, 19 nt, Artificial Sequence
  Description of Artificial Sequence: Synthetic oligonucleotide
cggugcaauucucugugua

SEQ ID NO: 650092 - RNA, 19 nt, Artificial Sequence
  Description of Artificial Sequence: Synthetic oligonucleotide
agggugcgucguacuuggu

SEQ ID NO: 650093 - RNA, 19 nt, Artificial Sequence
  Description of Artificial Sequence: Synthetic oligonucleotide
ccacaaucaaggagcgguu

SEQ ID NO: 650094 - RNA, 19 nt, Artificial Sequence
  Description of Artificial Sequence: Synthetic oligonucleotide
cacggcccacacucuucgu

SEQ ID NO: 650095 - RNA, 19 nt, Artificial Sequence
  Description of Artificial Sequence: Synthetic oligonucleotide
cgaacucauuacggaagua

SEQ ID NO: 650096 - RNA, 19 nt, Artificial Sequence
  Description of Artificial Sequence: Synthetic oligonucleotide
cuggcccaaugaugacguu

SEQ ID NO: 650097 - RNA, 19 nt, Artificial Sequence
  Description of Artificial Sequence: Synthetic oligonucleotide
ggucgugggcugaguugua

SEQ ID NO: 650098 - RNA, 19 nt, Artificial Sequence
  Description of Artificial Sequence: Synthetic oligonucleotide
cuggugcuacugccuccuu

SEQ ID NO: 650099 - RNA, 19 nt, Artificial Sequence
  Description of Artificial Sequence: Synthetic oligonucleotide
gcaugccuacugccugcuu

SEQ ID NO: 650100 - RNA, 19 nt, Artificial Sequence
  Description of Artificial Sequence: Synthetic oligonucleotide
ccugcgguguggggucaau

SEQ ID NO: 650101 - RNA, 19 nt, Artificial Sequence
  Description of Artificial Sequence: Synthetic oligonucleotide
ucuuuauugcgucuaaucg

SEQ ID NO: 650102 - RNA, 19 nt, Artificial Sequence
  Description of Artificial Sequence: Synthetic oligonucleotide
aagucaaucagcuugggca

SEQ ID NO: 650103 - RNA, 19 nt, Artificial Sequence
  Description of Artificial Sequence: Synthetic oligonucleotide
uguucgauaaagcagugag

SEQ ID NO: 650104 - RNA, 19 nt, Artificial Sequence
  Description of Artificial Sequence: Synthetic oligonucleotide
ugaauaaccuaccucaccc

SEQ ID NO: 650105 - RNA, 19 nt, Artificial Sequence
  Description of Artificial Sequence: Synthetic oligonucleotide
ucauaaaguuuaauguucg

SEQ ID NO: 650106 - RNA, 19 nt, Artificial Sequence
  Description of Artificial Sequence: Synthetic oligonucleotide
aaagaguacugguuggugg

SEQ ID NO: 650107 - RNA, 19 nt, Artificial Sequence
  Description of Artificial Sequence: Synthetic oligonucleotide
uuuagaucaggcugaaugg

SEQ ID NO: 650108 - RNA, 19 nt, Artificial Sequence
  Description of Artificial Sequence: Synthetic oligonucleotide
aaggcugugacgcaaggac

SEQ ID NO: 650109 - RNA, 19 nt, Artificial Sequence
  Description of Artificial Sequence: Synthetic oligonucleotide
guuuagaucaggcugaaug

SEQ ID NO: 650110 - RNA, 19 nt, Artificial Sequence
  Description of Artificial Sequence: Synthetic oligonucleotide
cuucaguuacauuugaugc

SEQ ID NO: 650111 - RNA, 19 nt, Artificial Sequence
  Description of Artificial Sequence: Synthetic oligonucleotide
uugccuacgaauuucauug

SEQ ID NO: 650112 - RNA, 19 nt, Artificial Sequence
  Description of Artificial Sequence: Synthetic oligonucleotide
aacauccuuuaauugcugc

SEQ ID NO: 650113 - RNA, 19 nt, Artificial Sequence
  Description of Artificial Sequence: Synthetic oligonucleotide
cugaaugagaccuuugacg

SEQ ID NO: 650114 - RNA, 19 nt, Artificial Sequence
  Description of Artificial Sequence: Synthetic oligonucleotide
guuaaaagaguacugguug

SEQ ID NO: 650115 - RNA, 19 nt, Artificial Sequence
  Description of Artificial Sequence: Synthetic oligonucleotide
aauaaccuaccucacccgg

SEQ ID NO: 650116 - RNA, 19 nt, Artificial Sequence
  Description of Artificial Sequence: Synthetic oligonucleotide
ugaguuauuagaccaucgg

SEQ ID NO: 650117 - RNA, 19 nt, Artificial Sequence
  Description of Artificial Sequence: Synthetic oligonucleotide
uuuacugaugaauugauuu

SEQ ID NO: 650118 - RNA, 19 nt, Artificial Sequence
  Description of Artificial Sequence: Synthetic oligonucleotide
ugaaugagaccuuugacga

SEQ ID NO: 650119 - RNA, 19 nt, Artificial Sequence
  Description of Artificial Sequence: Synthetic oligonucleotide
uccaguugaacuuccaggg

SEQ ID NO: 650120 - RNA, 19 nt, Artificial Sequence
  Description of Artificial Sequence: Synthetic oligonucleotide
agaaugagaggguuguggc

SEQ ID NO: 650121 - RNA, 19 nt, Artificial Sequence
  Description of Artificial Sequence: Synthetic oligonucleotide
uauguuuccuccaugugug

SEQ ID NO: 650122 - RNA, 19 nt, Artificial Sequence
  Description of Artificial Sequence: Synthetic oligonucleotide
acuagugugaguuauuaga

SEQ ID NO: 650123 - RNA, 19 nt, Artificial Sequence
  Description of Artificial Sequence: Synthetic oligonucleotide
cauaauacugucuuuguuc

SEQ ID NO: 650124 - RNA, 19 nt, Artificial Sequence
  Description of Artificial Sequence: Synthetic oligonucleotide
uaucuagggaugaugaucu

SEQ ID NO: 650125 - RNA, 19 nt, Artificial Sequence
  Description of Artificial Sequence: Synthetic oligonucleotide
uuagugugaucacugcugg

SEQ ID NO: 650126 - RNA, 19 nt, Artificial Sequence
  Description of Artificial Sequence: Synthetic oligonucleotide
caaaauuugguuguucugg

SEQ ID NO: 650127 - RNA, 19 nt, Artificial Sequence
  Description of Artificial Sequence: Synthetic oligonucleotide
ugaacuacuguacccaucu

SEQ ID NO: 650128 - RNA, 19 nt, Artificial Sequence
  Description of Artificial Sequence: Synthetic oligonucleotide
uucaaucuggccagaacgg

SEQ ID NO: 650129 - RNA, 19 nt, Artificial Sequence
  Description of Artificial Sequence: Synthetic oligonucleotide
uacagggcaaaacagaauc

SEQ ID NO: 650130 - RNA, 19 nt, Artificial Sequence
  Description of Artificial Sequence: Synthetic oligonucleotide
aauguuuggguuuccaaau

SEQ ID NO: 650131 - RNA, 19 nt, Artificial Sequence
  Description of Artificial Sequence: Synthetic oligonucleotide
agugugaguuauuagacca

SEQ ID NO: 650132 - RNA, 19 nt, Artificial Sequence
  Description of Artificial Sequence: Synthetic oligonucleotide
aauucacuauucaaucugg

SEQ ID NO: 650133 - RNA, 19 nt, Artificial Sequence
  Description of Artificial Sequence: Synthetic oligonucleotide
gaaucgaaggcugugacgc

SEQ ID NO: 650134 - RNA, 19 nt, Artificial Sequence
  Description of Artificial Sequence: Synthetic oligonucleotide
uguuuggguuuccaaauag

SEQ ID NO: 650135 - RNA, 19 nt, Artificial Sequence
  Description of Artificial Sequence: Synthetic oligonucleotide
uauuagaccaucggcaucc

SEQ ID NO: 650136 - RNA, 19 nt, Artificial Sequence
  Description of Artificial Sequence: Synthetic oligonucleotide
auguuucucggcuucaccg

SEQ ID NO: 650137 - RNA, 19 nt, Artificial Sequence
  Description of Artificial Sequence: Synthetic oligonucleotide
uuuauugcgucuaaucgau

SEQ ID NO: 650138 - RNA, 19 nt, Artificial Sequence
  Description of Artificial Sequence: Synthetic oligonucleotide
aaaacacccgucuucugug

SEQ ID NO: 650139 - RNA, 19 nt, Artificial Sequence
  Description of Artificial Sequence: Synthetic oligonucleotide
gaguuauuagaccaucggc

SEQ ID NO: 650140 - RNA, 19 nt, Artificial Sequence
  Description of Artificial Sequence: Synthetic oligonucleotide
cuaaucgaugccuggauag

SEQ ID NO: 650141 - RNA, 19 nt, Artificial Sequence
  Description of Artificial Sequence: Synthetic oligonucleotide
ugauuuacauaauacuguc

SEQ ID NO: 650142 - RNA, 19 nt, Artificial Sequence
  Description of Artificial Sequence: Synthetic oligonucleotide
auugcgucuaaucgaugcc

SEQ ID NO: 650143 - RNA, 19 nt, Artificial Sequence
  Description of Artificial Sequence: Synthetic oligonucleotide
auaucuagggaugaugauc

SEQ ID NO: 650144 - RNA, 19 nt, Artificial Sequence
  Description of Artificial Sequence: Synthetic oligonucleotide
uccgaagagagguugcggg

SEQ ID NO: 650145 - RNA, 19 nt, Artificial Sequence
  Description of Artificial Sequence: Synthetic oligonucleotide
auccuuuaauugcugcugc

SEQ ID NO: 650146 - RNA, 19 nt, Artificial Sequence
  Description of Artificial Sequence: Synthetic oligonucleotide
cuacgaauuucauuggcag

SEQ ID NO: 650147 - RNA, 19 nt, Artificial Sequence
  Description of Artificial Sequence: Synthetic oligonucleotide
guccgauucauaucuaggg

SEQ ID NO: 650148 - RNA, 19 nt, Artificial Sequence
  Description of Artificial Sequence: Synthetic oligonucleotide
ugcaauucacuauucaauc

SEQ ID NO: 650149 - RNA, 19 nt, Artificial Sequence
  Description of Artificial Sequence: Synthetic oligonucleotide
aguuacguugcucccaauc

SEQ ID NO: 650150 - RNA, 19 nt, Artificial Sequence
  Description of Artificial Sequence: Synthetic oligonucleotide
ugacgaguuacguugcucc

SEQ ID NO: 650151 - RNA, 19 nt, Artificial Sequence
  Description of Artificial Sequence: Synthetic oligonucleotide
uucauuggcaguuguagcu

SEQ ID NO: 650152 - RNA, 19 nt, Artificial Sequence
  Description of Artificial Sequence: Synthetic oligonucleotide
ugugguaacugcaaagguc

SEQ ID NO: 650153 - RNA, 19 nt, Artificial Sequence
  Description of Artificial Sequence: Synthetic oligonucleotide
aucgaagucugagagcucc

SEQ ID NO: 650154 - RNA, 19 nt, Artificial Sequence
  Description of Artificial Sequence: Synthetic oligonucleotide
acggcaauuggcuuagagg

SEQ ID NO: 650155 - RNA, 19 nt, Artificial Sequence
  Description of Artificial Sequence: Synthetic oligonucleotide
uucaguuacauuugaugca

SEQ ID NO: 650156 - RNA, 19 nt, Artificial Sequence
  Description of Artificial Sequence: Synthetic oligonucleotide
auccguuuagaucaggcug

SEQ ID NO: 650157 - RNA, 19 nt, Artificial Sequence
  Description of Artificial Sequence: Synthetic oligonucleotide
gaauggucggaguuguucc

SEQ ID NO: 650158 - RNA, 19 nt, Artificial Sequence
  Description of Artificial Sequence: Synthetic oligonucleotide
agccauucuuucuagcaac

SEQ ID NO: 650159 - RNA, 19 nt, Artificial Sequence
  Description of Artificial Sequence: Synthetic oligonucleotide
caauucacuauucaaucug

SEQ ID NO: 650160 - RNA, 19 nt, Artificial Sequence
  Description of Artificial Sequence: Synthetic oligonucleotide
uacuguacccaucugcuac

SEQ ID NO: 650161 - RNA, 19 nt, Artificial Sequence
  Description of Artificial Sequence: Synthetic oligonucleotide
aguuauuagaccaucggca

SEQ ID NO: 650162 - RNA, 19 nt, Artificial Sequence
  Description of Artificial Sequence: Synthetic oligonucleotide
uuuaucgaagucugagagc

SEQ ID NO: 650163 - RNA, 19 nt, Artificial Sequence
  Description of Artificial Sequence: Synthetic oligonucleotide
aagaguacugguuggugga

SEQ ID NO: 650164 - RNA, 19 nt, Artificial Sequence
  Description of Artificial Sequence: Synthetic oligonucleotide
gaauaaccuaccucacccg

SEQ ID NO: 650165 - RNA, 19 nt, Artificial Sequence
  Description of Artificial Sequence: Synthetic oligonucleotide
guuuucacaaguaacggac

SEQ ID NO: 650166 - RNA, 19 nt, Artificial Sequence
  Description of Artificial Sequence: Synthetic oligonucleotide
aacggcaauuggcuuagag

SEQ ID NO: 650167 - RNA, 19 nt, Artificial Sequence
  Description of Artificial Sequence: Synthetic oligonucleotide
uguggauuuugcuuggagu

SEQ ID NO: 650168 - RNA, 19 nt, Artificial Sequence
  Description of Artificial Sequence: Synthetic oligonucleotide
auaacuacuggauugccua

SEQ ID NO: 650169 - RNA, 19 nt, Artificial Sequence
  Description of Artificial Sequence: Synthetic oligonucleotide
gaccucaggauguuucucg

SEQ ID NO: 650170 - RNA, 19 nt, Artificial Sequence
  Description of Artificial Sequence: Synthetic oligonucleotide
gcaacuaccagaugaaaag

SEQ ID NO: 650171 - RNA, 19 nt, Artificial Sequence
  Description of Artificial Sequence: Synthetic oligonucleotide
uguuaucgggugauguucc

SEQ ID NO: 650172 - RNA, 19 nt, Artificial Sequence
  Description of Artificial Sequence: Synthetic oligonucleotide
ucuagaaugagaggguugu

SEQ ID NO: 650173 - RNA, 19 nt, Artificial Sequence
  Description of Artificial Sequence: Synthetic oligonucleotide
ugcgaaugggaacuggaug

SEQ ID NO: 650174 - RNA, 19 nt, Artificial Sequence
  Description of Artificial Sequence: Synthetic oligonucleotide
uccguuuagaucaggcuga

SEQ ID NO: 650175 - RNA, 19 nt, Artificial Sequence
  Description of Artificial Sequence: Synthetic oligonucleotide
caugguuaaaagaguacug

SEQ ID NO: 650176 - RNA, 19 nt, Artificial Sequence
  Description of Artificial Sequence: Synthetic oligonucleotide
ucggaguuguuccaguuga

SEQ ID NO: 650177 - RNA, 19 nt, Artificial Sequence
  Description of Artificial Sequence: Synthetic oligonucleotide
aucgauggcgacuugcuug

SEQ ID NO: 650178 - RNA, 19 nt, Artificial Sequence
  Description of Artificial Sequence: Synthetic oligonucleotide
ggaugcaugguuaaaagag

SEQ ID NO: 650179 - RNA, 19 nt, Artificial Sequence
  Description of Artificial Sequence: Synthetic oligonucleotide
ugagguacuagugugaguu

SEQ ID NO: 650180 - RNA, 19 nt, Artificial Sequence
  Description of Artificial Sequence: Synthetic oligonucleotide
ugaggugagguacuagugu

SEQ ID NO: 650181 - RNA, 19 nt, Artificial Sequence
  Description of Artificial Sequence: Synthetic oligonucleotide
uccgauucauaucuaggga

SEQ ID NO: 650182 - RNA, 19 nt, Artificial Sequence
  Description of Artificial Sequence: Synthetic oligonucleotide
auggcgacuugcuuggagg

SEQ ID NO: 650183 - RNA, 19 nt, Artificial Sequence
  Description of Artificial Sequence: Synthetic oligonucleotide
ucgauggcgacuugcuugg

SEQ ID NO: 650184 - RNA, 19 nt, Artificial Sequence
  Description of Artificial Sequence: Synthetic oligonucleotide
uacguugcucccaaucugc

SEQ ID NO: 650185 - RNA, 19 nt, Artificial Sequence
  Description of Artificial Sequence: Synthetic oligonucleotide
gcgaaugggaacuggaugg

SEQ ID NO: 650186 - RNA, 19 nt, Artificial Sequence
  Description of Artificial Sequence: Synthetic oligonucleotide
aauccgaagagagguugcg

SEQ ID NO: 650187 - RNA, 19 nt, Artificial Sequence
  Description of Artificial Sequence: Synthetic oligonucleotide
uagugugaguuauuagacc

SEQ ID NO: 650188 - RNA, 19 nt, Artificial Sequence
  Description of Artificial Sequence: Synthetic oligonucleotide
uuacguugcucccaaucug

SEQ ID NO: 650189 - RNA, 19 nt, Artificial Sequence
  Description of Artificial Sequence: Synthetic oligonucleotide
auuagugugaucacugcug

SEQ ID NO: 650190 - RNA, 19 nt, Artificial Sequence
  Description of Artificial Sequence: Synthetic oligonucleotide
uucauaucuagggaugaug

SEQ ID NO: 650191 - RNA, 19 nt, Artificial Sequence
  Description of Artificial Sequence: Synthetic oligonucleotide
ccaaauaggcuccaaaccc

SEQ ID NO: 650192 - RNA, 19 nt, Artificial Sequence
  Description of Artificial Sequence: Synthetic oligonucleotide
gaaagagucugaacuacug

SEQ ID NO: 650193 - RNA, 19 nt, Artificial Sequence
  Description of Artificial Sequence: Synthetic oligonucleotide
ucgucuucugacuucaguc

SEQ ID NO: 650194 - RNA, 19 nt, Artificial Sequence
  Description of Artificial Sequence: Synthetic oligonucleotide
aggcuuaggugguggagcc

SEQ ID NO: 650195 - RNA, 19 nt, Artificial Sequence
  Description of Artificial Sequence: Synthetic oligonucleotide
ucagauguuuucacaagua

SEQ ID NO: 650196 - RNA, 19 nt, Artificial Sequence
  Description of Artificial Sequence: Synthetic oligonucleotide
ugcaugguuaaaagaguac

SEQ ID NO: 650197 - RNA, 19 nt, Artificial Sequence
  Description of Artificial Sequence: Synthetic oligonucleotide
uccagggaucaucauaacu

SEQ ID NO: 650198 - RNA, 19 nt, Artificial Sequence
  Description of Artificial Sequence: Synthetic oligonucleotide
uacuggauugccuacgaau

SEQ ID NO: 650199 - RNA, 19 nt, Artificial Sequence
  Description of Artificial Sequence: Synthetic oligonucleotide
gaggugagagaauggucgg

SEQ ID NO: 650200 - RNA, 19 nt, Artificial Sequence
  Description of Artificial Sequence: Synthetic oligonucleotide
ugugacgcaaggacagcag

SEQ ID NO: 650201 - RNA, 19 nt, Artificial Sequence
  Description of Artificial Sequence: Synthetic oligonucleotide
aacgguguugguuucuuua

SEQ ID NO: 650202 - RNA, 19 nt, Artificial Sequence
  Description of Artificial Sequence: Synthetic oligonucleotide
ugcaagaggucucucacua

SEQ ID NO: 650203 - RNA, 19 nt, Artificial Sequence
  Description of Artificial Sequence: Synthetic oligonucleotide
aguucguacuguugucugg

SEQ ID NO: 650204 - RNA, 19 nt, Artificial Sequence
  Description of Artificial Sequence: Synthetic oligonucleotide
ucguacuguugucuggucc

SEQ ID NO: 650205 - RNA, 19 nt, Artificial Sequence
  Description of Artificial Sequence: Synthetic oligonucleotide
uuaacggcaauuggcuuag

SEQ ID NO: 650206 - RNA, 19 nt, Artificial Sequence
  Description of Artificial Sequence: Synthetic oligonucleotide
aaugggcauguucacaguu

SEQ ID NO: 650207 - RNA, 19 nt, Artificial Sequence
  Description of Artificial Sequence: Synthetic oligonucleotide
ugagagaauggucggaguu

SEQ ID NO: 650208 - RNA, 19 nt, Artificial Sequence
  Description of Artificial Sequence: Synthetic oligonucleotide
gagaccuuugacgaguuac

SEQ ID NO: 650209 - RNA, 19 nt, Artificial Sequence
  Description of Artificial Sequence: Synthetic oligonucleotide
uuccagaaaaguccuccug

SEQ ID NO: 650210 - RNA, 19 nt, Artificial Sequence
  Description of Artificial Sequence: Synthetic oligonucleotide
ucacaaguaacggacuugu

SEQ ID NO: 650211 - RNA, 19 nt, Artificial Sequence
  Description of Artificial Sequence: Synthetic oligonucleotide
cugaauaaccuaccucacc

SEQ ID NO: 650212 - RNA, 19 nt, Artificial Sequence
  Description of Artificial Sequence: Synthetic oligonucleotide
auggcgguuauguuuccuc

SEQ ID NO: 650213 - RNA, 19 nt, Artificial Sequence
  Description of Artificial Sequence: Synthetic oligonucleotide
ccuuugacgaguuacguug

SEQ ID NO: 650214 - RNA, 19 nt, Artificial Sequence
  Description of Artificial Sequence: Synthetic oligonucleotide
uuuacauaauacugucuuu

SEQ ID NO: 650215 - RNA, 19 nt, Artificial Sequence
  Description of Artificial Sequence: Synthetic oligonucleotide
guuuggguuuccaaauagg

SEQ ID NO: 650216 - RNA, 19 nt, Artificial Sequence
  Description of Artificial Sequence: Synthetic oligonucleotide
aaguaacggacuuguggga

SEQ ID NO: 650217 - RNA, 19 nt, Artificial Sequence
  Description of Artificial Sequence: Synthetic oligonucleotide
acuaccagaugaaaagcag

SEQ ID NO: 650218 - RNA, 19 nt, Artificial Sequence
  Description of Artificial Sequence: Synthetic oligonucleotide
gaaugagaccuuugacgag

SEQ ID NO: 650219 - RNA, 19 nt, Artificial Sequence
  Description of Artificial Sequence: Synthetic oligonucleotide
accacaccgcaucaccagc

SEQ ID NO: 650220 - RNA, 19 nt, Artificial Sequence
  Description of Artificial Sequence: Synthetic oligonucleotide
uuuuacugaugaauugauu

SEQ ID NO: 650221 - RNA, 19 nt, Artificial Sequence
  Description of Artificial Sequence: Synthetic oligonucleotide
gugaaacuacuggagaugc

SEQ ID NO: 650222 - RNA, 19 nt, Artificial Sequence
  Description of Artificial Sequence: Synthetic oligonucleotide
ucuaaucgaugccuggaua

SEQ ID NO: 650223 - RNA, 19 nt, Artificial Sequence
  Description of Artificial Sequence: Synthetic oligonucleotide
uuagaucaggcugaauggu

SEQ ID NO: 650224 - RNA, 19 nt, Artificial Sequence
  Description of Artificial Sequence: Synthetic oligonucleotide
aggaugcaugguuaaaaga

SEQ ID NO: 650225 - RNA, 19 nt, Artificial Sequence
  Description of Artificial Sequence: Synthetic oligonucleotide
agucaugcgaaugggaacu

SEQ ID NO: 650226 - RNA, 19 nt, Artificial Sequence
  Description of Artificial Sequence: Synthetic oligonucleotide
uaaaagaguacugguuggu

SEQ ID NO: 650227 - RNA, 19 nt, Artificial Sequence
  Description of Artificial Sequence: Synthetic oligonucleotide
ugauugugugucaccaaaa

SEQ ID NO: 650228 - RNA, 19 nt, Artificial Sequence
  Description of Artificial Sequence: Synthetic oligonucleotide
cuagggaugaugaucuaga

SEQ ID NO: 650229 - RNA, 19 nt, Artificial Sequence
  Description of Artificial Sequence: Synthetic oligonucleotide
uacgaauuucauuggcagu

SEQ ID NO: 650230 - RNA, 19 nt, Artificial Sequence
  Description of Artificial Sequence: Synthetic oligonucleotide
auuggcaggaacacuagca

SEQ ID NO: 650231 - RNA, 19 nt, Artificial Sequence
  Description of Artificial Sequence: Synthetic oligonucleotide
cuuugacgaguuacguugc

SEQ ID NO: 650232 - RNA, 19 nt, Artificial Sequence
  Description of Artificial Sequence: Synthetic oligonucleotide
gauguuccugaaugagacc

SEQ ID NO: 650233 - RNA, 19 nt, Artificial Sequence
  Description of Artificial Sequence: Synthetic oligonucleotide
cagggaucaucauaacuac

SEQ ID NO: 650234 - RNA, 19 nt, Artificial Sequence
  Description of Artificial Sequence: Synthetic oligonucleotide
aaucuggccagaacggugu

SEQ ID NO: 650235 - RNA, 19 nt, Artificial Sequence
  Description of Artificial Sequence: Synthetic oligonucleotide
ugcaaaacugacccaguuu

SEQ ID NO: 650236 - RNA, 19 nt, Artificial Sequence
  Description of Artificial Sequence: Synthetic oligonucleotide
cugauuuacauaauacugu

SEQ ID NO: 650237 - RNA, 19 nt, Artificial Sequence
  Description of Artificial Sequence: Synthetic oligonucleotide
agguccgauucauaucuag

SEQ ID NO: 650238 - RNA, 19 nt, Artificial Sequence
  Description of Artificial Sequence: Synthetic oligonucleotide
auugccuacgaauuucauu

SEQ ID NO: 650239 - RNA, 19 nt, Artificial Sequence
  Description of Artificial Sequence: Synthetic oligonucleotide
ugccuacgaauuucauugg

SEQ ID NO: 650240 - RNA, 19 nt, Artificial Sequence
  Description of Artificial Sequence: Synthetic oligonucleotide
caacuaccagaugaaaagc

SEQ ID NO: 650241 - RNA, 19 nt, Artificial Sequence
  Description of Artificial Sequence: Synthetic oligonucleotide
uguuucucggcuucaccgu

SEQ ID NO: 650242 - RNA, 19 nt, Artificial Sequence
  Description of Artificial Sequence: Synthetic oligonucleotide
uacuggagaugcagguucc

SEQ ID NO: 650243 - RNA, 19 nt, Artificial Sequence
  Description of Artificial Sequence: Synthetic oligonucleotide
agaccuuugacgaguuacg

SEQ ID NO: 650244 - RNA, 19 nt, Artificial Sequence
  Description of Artificial Sequence: Synthetic oligonucleotide
uggacgaggcugaacggca

SEQ ID NO: 650245 - RNA, 19 nt, Artificial Sequence
  Description of Artificial Sequence: Synthetic oligonucleotide
ugugaguuauuagaccauc

SEQ ID NO: 650246 - RNA, 19 nt, Artificial Sequence
  Description of Artificial Sequence: Synthetic oligonucleotide
agccugauugugugucacc

SEQ ID NO: 650247 - RNA, 19 nt, Artificial Sequence
  Description of Artificial Sequence: Synthetic oligonucleotide
gagucaugcgaaugggaac

SEQ ID NO: 650248 - RNA, 19 nt, Artificial Sequence
  Description of Artificial Sequence: Synthetic oligonucleotide
uucaguuggcaagaccuca

SEQ ID NO: 650249 - RNA, 19 nt, Artificial Sequence
  Description of Artificial Sequence: Synthetic oligonucleotide
cauagccauucuuucuagc

SEQ ID NO: 650250 - RNA, 19 nt, Artificial Sequence
  Description of Artificial Sequence: Synthetic oligonucleotide
ucugcaaaacugacccagu

SEQ ID NO: 650251 - RNA, 19 nt, Artificial Sequence
  Description of Artificial Sequence: Synthetic oligonucleotide
aacacccgucuucugugug

SEQ ID NO: 650252 - RNA, 19 nt, Artificial Sequence
  Description of Artificial Sequence: Synthetic oligonucleotide
uaaauccguuuagaucagg

SEQ ID NO: 650253 - RNA, 19 nt, Artificial Sequence
  Description of Artificial Sequence: Synthetic oligonucleotide
aacucgucuucugacuuca

SEQ ID NO: 650254 - RNA, 19 nt, Artificial Sequence
  Description of Artificial Sequence: Synthetic oligonucleotide
caauccgaagagagguugc

SEQ ID NO: 650255 - RNA, 19 nt, Artificial Sequence
  Description of Artificial Sequence: Synthetic oligonucleotide
caaucuggccagaacggug

SEQ ID NO: 650256 - RNA, 19 nt, Artificial Sequence
  Description of Artificial Sequence: Synthetic oligonucleotide
uggugcaguguuaucgggu

SEQ ID NO: 650257 - RNA, 19 nt, Artificial Sequence
  Description of Artificial Sequence: Synthetic oligonucleotide
acgaauuucauuggcaguu

SEQ ID NO: 650258 - RNA, 19 nt, Artificial Sequence
  Description of Artificial Sequence: Synthetic oligonucleotide
uggcgguuauguuuccucc

SEQ ID NO: 650259 - RNA, 19 nt, Artificial Sequence
  Description of Artificial Sequence: Synthetic oligonucleotide
gaccacaccgcaucaccag

SEQ ID NO: 650260 - RNA, 19 nt, Artificial Sequence
  Description of Artificial Sequence: Synthetic oligonucleotide
acuacuggauugccuacga

SEQ ID NO: 650261 - RNA, 19 nt, Artificial Sequence
  Description of Artificial Sequence: Synthetic oligonucleotide
gguggugcaguguuaucgg

SEQ ID NO: 650262 - RNA, 19 nt, Artificial Sequence
  Description of Artificial Sequence: Synthetic oligonucleotide
ucauaacuacuggauugcc

SEQ ID NO: 650263 - RNA, 19 nt, Artificial Sequence
  Description of Artificial Sequence: Synthetic oligonucleotide
guuaacggcaauuggcuua

SEQ ID NO: 650264 - RNA, 19 nt, Artificial Sequence
  Description of Artificial Sequence: Synthetic oligonucleotide
aaacacccgucuucugugu

SEQ ID NO: 650265 - RNA, 19 nt, Artificial Sequence
  Description of Artificial Sequence: Synthetic oligonucleotide
uuugacgaguuacguugcu

SEQ ID NO: 650266 - RNA, 19 nt, Artificial Sequence
  Description of Artificial Sequence: Synthetic oligonucleotide
gauuagugugaucacugcu

SEQ ID NO: 650267 - RNA, 19 nt, Artificial Sequence
  Description of Artificial Sequence: Synthetic oligonucleotide
gacgaguuacguugcuccc

SEQ ID NO: 650268 - RNA, 19 nt, Artificial Sequence
  Description of Artificial Sequence: Synthetic oligonucleotide
ucaugcgaaugggaacugg

SEQ ID NO: 650269 - RNA, 19 nt, Artificial Sequence
  Description of Artificial Sequence: Synthetic oligonucleotide
ucgaacaggcuuagguggu

SEQ ID NO: 650270 - RNA, 19 nt, Artificial Sequence
  Description of Artificial Sequence: Synthetic oligonucleotide
auuuuacugaugaauugau

SEQ ID NO: 650271 - RNA, 19 nt, Artificial Sequence
  Description of Artificial Sequence: Synthetic oligonucleotide
ucgaaggcugugacgcaag

SEQ ID NO: 650272 - RNA, 19 nt, Artificial Sequence
  Description of Artificial Sequence: Synthetic oligonucleotide
uggugaacauacagggcaa

SEQ ID NO: 650273 - RNA, 19 nt, Artificial Sequence
  Description of Artificial Sequence: Synthetic oligonucleotide
aguguuaucgggugauguu

SEQ ID NO: 650274 - RNA, 19 nt, Artificial Sequence
  Description of Artificial Sequence: Synthetic oligonucleotide
aguucaagaauaggaaguu

SEQ ID NO: 650275 - RNA, 19 nt, Artificial Sequence
  Description of Artificial Sequence: Synthetic oligonucleotide
aaucgaaggcugugacgca

SEQ ID NO: 650276 - RNA, 19 nt, Artificial Sequence
  Description of Artificial Sequence: Synthetic oligonucleotide
uaacuacuggauugccuac

SEQ ID NO: 650277 - RNA, 19 nt, Artificial Sequence
  Description of Artificial Sequence: Synthetic oligonucleotide
cacauuggcaggaacacua

SEQ ID NO: 650278 - RNA, 19 nt, Artificial Sequence
  Description of Artificial Sequence: Synthetic oligonucleotide
agagaauggucggaguugu

SEQ ID NO: 650279 - RNA, 19 nt, Artificial Sequence
  Description of Artificial Sequence: Synthetic oligonucleotide
ucugaacuacuguacccau

SEQ ID NO: 650280 - RNA, 19 nt, Artificial Sequence
  Description of Artificial Sequence: Synthetic oligonucleotide
uggauugccuacgaauuuc

SEQ ID NO: 650281 - RNA, 19 nt, Artificial Sequence
  Description of Artificial Sequence: Synthetic oligonucleotide
guucgauaaagcagugagc

SEQ ID NO: 650282 - RNA, 19 nt, Artificial Sequence
  Description of Artificial Sequence: Synthetic oligonucleotide
cauuggcaggaacacuagc

SEQ ID NO: 650283 - RNA, 19 nt, Artificial Sequence
  Description of Artificial Sequence: Synthetic oligonucleotide
gcaaaauuugguuguucug

SEQ ID NO: 650284 - RNA, 19 nt, Artificial Sequence
  Description of Artificial Sequence: Synthetic oligonucleotide
guuacguugcucccaaucu

SEQ ID NO: 650285 - RNA, 19 nt, Artificial Sequence
  Description of Artificial Sequence: Synthetic oligonucleotide
aaauaggcuccaaacccaa

SEQ ID NO: 650286 - RNA, 19 nt, Artificial Sequence
  Description of Artificial Sequence: Synthetic oligonucleotide
ucaaucuggccagaacggu

SEQ ID NO: 650287 - RNA, 19 nt, Artificial Sequence
  Description of Artificial Sequence: Synthetic oligonucleotide
uccuggaauaaauccguuu

SEQ ID NO: 650288 - RNA, 19 nt, Artificial Sequence
  Description of Artificial Sequence: Synthetic oligonucleotide
guuauuagaccaucggcau

SEQ ID NO: 650289 - RNA, 19 nt, Artificial Sequence
  Description of Artificial Sequence: Synthetic oligonucleotide
gugacgcaaggacagcagc

SEQ ID NO: 650290 - RNA, 19 nt, Artificial Sequence
  Description of Artificial Sequence: Synthetic oligonucleotide
gguguggugccuuugcuca

SEQ ID NO: 650291 - RNA, 19 nt, Artificial Sequence
  Description of Artificial Sequence: Synthetic oligonucleotide
caguucguacuguugucug

SEQ ID NO: 650292 - RNA, 19 nt, Artificial Sequence
  Description of Artificial Sequence: Synthetic oligonucleotide
guggugcaguguuaucggg

SEQ ID NO: 650293 - RNA, 19 nt, Artificial Sequence
  Description of Artificial Sequence: Synthetic oligonucleotide
uuaucgggugauguuccug

SEQ ID NO: 650294 - RNA, 19 nt, Artificial Sequence
  Description of Artificial Sequence: Synthetic oligonucleotide
cauguguguggagaaguug

SEQ ID NO: 650295 - RNA, 19 nt, Artificial Sequence
  Description of Artificial Sequence: Synthetic oligonucleotide
ggauuagugugaucacugc

SEQ ID NO: 650296 - RNA, 19 nt, Artificial Sequence
  Description of Artificial Sequence: Synthetic oligonucleotide
acuggauugccuacgaauu

SEQ ID NO: 650297 - RNA, 19 nt, Artificial Sequence
  Description of Artificial Sequence: Synthetic oligonucleotide
caguuggcaagaccucagg

SEQ ID NO: 650298 - RNA, 19 nt, Artificial Sequence
  Description of Artificial Sequence: Synthetic oligonucleotide
ggugaaacuacuggagaug

SEQ ID NO: 650299 - RNA, 19 nt, Artificial Sequence
  Description of Artificial Sequence: Synthetic oligonucleotide
ugggaaucgaaggcuguga

SEQ ID NO: 650300 - RNA, 19 nt, Artificial Sequence
  Description of Artificial Sequence: Synthetic oligonucleotide
guguuaucgggugauguuc

SEQ ID NO: 650301 - RNA, 19 nt, Artificial Sequence
  Description of Artificial Sequence: Synthetic oligonucleotide
guuguagcugaggcuacag

SEQ ID NO: 650302 - RNA, 19 nt, Artificial Sequence
  Description of Artificial Sequence: Synthetic oligonucleotide
aguaacggacuugugggau

SEQ ID NO: 650303 - RNA, 19 nt, Artificial Sequence
  Description of Artificial Sequence: Synthetic oligonucleotide
gguccgauucauaucuagg

SEQ ID NO: 650304 - RNA, 19 nt, Artificial Sequence
  Description of Artificial Sequence: Synthetic oligonucleotide
caguugaacuuccagggaa

SEQ ID NO: 650305 - RNA, 19 nt, Artificial Sequence
  Description of Artificial Sequence: Synthetic oligonucleotide
ucaggccacgucugguuca

SEQ ID NO: 650306 - RNA, 19 nt, Artificial Sequence
  Description of Artificial Sequence: Synthetic oligonucleotide
uaacucgucuucugacuuc

SEQ ID NO: 650307 - RNA, 19 nt, Artificial Sequence
  Description of Artificial Sequence: Synthetic oligonucleotide
cugauugugugucaccaaa

SEQ ID NO: 650308 - RNA, 19 nt, Artificial Sequence
  Description of Artificial Sequence: Synthetic oligonucleotide
aucuagaaugagaggguug

SEQ ID NO: 650309 - RNA, 19 nt, Artificial Sequence
  Description of Artificial Sequence: Synthetic oligonucleotide
gaugcaugguuaaaagagu

SEQ ID NO: 650310 - RNA, 19 nt, Artificial Sequence
  Description of Artificial Sequence: Synthetic oligonucleotide
aauuggcuuagaggugaga

SEQ ID NO: 650311 - RNA, 19 nt, Artificial Sequence
  Description of Artificial Sequence: Synthetic oligonucleotide
gauuuacauaauacugucu

SEQ ID NO: 650312 - RNA, 19 nt, Artificial Sequence
  Description of Artificial Sequence: Synthetic oligonucleotide
gugugaucacugcugguuc

SEQ ID NO: 650313 - RNA, 19 nt, Artificial Sequence
  Description of Artificial Sequence: Synthetic oligonucleotide
gaacuacuguacccaucug

SEQ ID NO: 650314 - RNA, 19 nt, Artificial Sequence
  Description of Artificial Sequence: Synthetic oligonucleotide
cugaacuacuguacccauc

SEQ ID NO: 650315 - RNA, 19 nt, Artificial Sequence
  Description of Artificial Sequence: Synthetic oligonucleotide
ggaauaaauccguuuagau

SEQ ID NO: 650316 - RNA, 19 nt, Artificial Sequence
  Description of Artificial Sequence: Synthetic oligonucleotide
gguuauguuuccuccaugu

SEQ ID NO: 650317 - RNA, 19 nt, Artificial Sequence
  Description of Artificial Sequence: Synthetic oligonucleotide
gcugcaauucacuauucaa

SEQ ID NO: 650318 - RNA, 19 nt, Artificial Sequence
  Description of Artificial Sequence: Synthetic oligonucleotide
accuuugacgaguuacguu

SEQ ID NO: 650319 - RNA, 19 nt, Artificial Sequence
  Description of Artificial Sequence: Synthetic oligonucleotide
caauuggcuuagaggugag

SEQ ID NO: 650320 - RNA, 19 nt, Artificial Sequence
  Description of Artificial Sequence: Synthetic oligonucleotide
cuggccguaacucgucuuc

SEQ ID NO: 650321 - RNA, 19 nt, Artificial Sequence
  Description of Artificial Sequence: Synthetic oligonucleotide
cugcaauucacuauucaau

SEQ ID NO: 650322 - RNA, 19 nt, Artificial Sequence
  Description of Artificial Sequence: Synthetic oligonucleotide
agguacuagugugaguuau

SEQ ID NO: 650323 - RNA, 19 nt, Artificial Sequence
  Description of Artificial Sequence: Synthetic oligonucleotide
ccagggaucaucauaacua

SEQ ID NO: 650324 - RNA, 19 nt, Artificial Sequence
  Description of Artificial Sequence: Synthetic oligonucleotide
uugacgaguuacguugcuc

SEQ ID NO: 650325 - RNA, 19 nt, Artificial Sequence
  Description of Artificial Sequence: Synthetic oligonucleotide
guuggcaagaccucaggau

SEQ ID NO: 650326 - RNA, 19 nt, Artificial Sequence
  Description of Artificial Sequence: Synthetic oligonucleotide
aaccuaccucacccggcug

SEQ ID NO: 650327 - RNA, 19 nt, Artificial Sequence
  Description of Artificial Sequence: Synthetic oligonucleotide
caucggcauccacuggccg

SEQ ID NO: 650328 - RNA, 19 nt, Artificial Sequence
  Description of Artificial Sequence: Synthetic oligonucleotide
caccgcaucaccagcagaa

SEQ ID NO: 650329 - RNA, 19 nt, Artificial Sequence
  Description of Artificial Sequence: Synthetic oligonucleotide
cauaacuacuggauugccu

SEQ ID NO: 650330 - RNA, 19 nt, Artificial Sequence
  Description of Artificial Sequence: Synthetic oligonucleotide
acauuggcaggaacacuag

SEQ ID NO: 650331 - RNA, 19 nt, Artificial Sequence
  Description of Artificial Sequence: Synthetic oligonucleotide
agagguugcggggucagaa

SEQ ID NO: 650332 - RNA, 19 nt, Artificial Sequence
  Description of Artificial Sequence: Synthetic oligonucleotide
ggcugugacgcaaggacag

SEQ ID NO: 650333 - RNA, 19 nt, Artificial Sequence
  Description of Artificial Sequence: Synthetic oligonucleotide
caaauacuucaaauuggcu

SEQ ID NO: 650334 - RNA, 19 nt, Artificial Sequence
  Description of Artificial Sequence: Synthetic oligonucleotide
aguugaacuuccagggaaa

SEQ ID NO: 650335 - RNA, 19 nt, Artificial Sequence
  Description of Artificial Sequence: Synthetic oligonucleotide
gcaauccgaagagagguug

SEQ ID NO: 650336 - RNA, 19 nt, Artificial Sequence
  Description of Artificial Sequence: Synthetic oligonucleotide
gcaauuggcuuagagguga

SEQ ID NO: 650337 - RNA, 19 nt, Artificial Sequence
  Description of Artificial Sequence: Synthetic oligonucleotide
uaacggacuugugggauua

SEQ ID NO: 650338 - RNA, 19 nt, Artificial Sequence
  Description of Artificial Sequence: Synthetic oligonucleotide
auggucggaguuguuccag

SEQ ID NO: 650339 - RNA, 19 nt, Artificial Sequence
  Description of Artificial Sequence: Synthetic oligonucleotide
gccuacgaauuucauuggc

SEQ ID NO: 650340 - RNA, 19 nt, Artificial Sequence
  Description of Artificial Sequence: Synthetic oligonucleotide
uaucgaagucugagagcuc

SEQ ID NO: 650341 - RNA, 19 nt, Artificial Sequence
  Description of Artificial Sequence: Synthetic oligonucleotide
auucauaucuagggaugau

SEQ ID NO: 650342 - RNA, 19 nt, Artificial Sequence
  Description of Artificial Sequence: Synthetic oligonucleotide
ugcggggucagaagcuuuu

SEQ ID NO: 650343 - RNA, 19 nt, Artificial Sequence
  Description of Artificial Sequence: Synthetic oligonucleotide
gaaggcugugacgcaagga

SEQ ID NO: 650344 - RNA, 19 nt, Artificial Sequence
  Description of Artificial Sequence: Synthetic oligonucleotide
gguggaguaucugcaaaac

SEQ ID NO: 650345 - RNA, 19 nt, Artificial Sequence
  Description of Artificial Sequence: Synthetic oligonucleotide
ccuacgaauuucauuggca

SEQ ID NO: 650346 - RNA, 19 nt, Artificial Sequence
  Description of Artificial Sequence: Synthetic oligonucleotide
uggucggaguuguuccagu

SEQ ID NO: 650347 - RNA, 19 nt, Artificial Sequence
  Description of Artificial Sequence: Synthetic oligonucleotide
gcagugagcugaauguuug

SEQ ID NO: 650348 - RNA, 19 nt, Artificial Sequence
  Description of Artificial Sequence: Synthetic oligonucleotide
uucguacuguugucugguc

SEQ ID NO: 650349 - RNA, 19 nt, Artificial Sequence
  Description of Artificial Sequence: Synthetic oligonucleotide
cucaggccacgucugguuc

SEQ ID NO: 650350 - RNA, 19 nt, Artificial Sequence
  Description of Artificial Sequence: Synthetic oligonucleotide
uuccagggaucaucauaac

SEQ ID NO: 650351 - RNA, 19 nt, Artificial Sequence
  Description of Artificial Sequence: Synthetic oligonucleotide
ccugaauaaccuaccucac

SEQ ID NO: 650352 - RNA, 19 nt, Artificial Sequence
  Description of Artificial Sequence: Synthetic oligonucleotide
aucgaugccuggauagccu

SEQ ID NO: 650353 - RNA, 19 nt, Artificial Sequence
  Description of Artificial Sequence: Synthetic oligonucleotide
cuagaaugagaggguugug

SEQ ID NO: 650354 - RNA, 19 nt, Artificial Sequence
  Description of Artificial Sequence: Synthetic oligonucleotide
gagccugauugugugucac

SEQ ID NO: 650355 - RNA, 19 nt, Artificial Sequence
  Description of Artificial Sequence: Synthetic oligonucleotide
gugucaaugcuccaucuuu

SEQ ID NO: 650356 - RNA, 19 nt, Artificial Sequence
  Description of Artificial Sequence: Synthetic oligonucleotide
aacggacuugugggauuag

SEQ ID NO: 650357 - RNA, 19 nt, Artificial Sequence
  Description of Artificial Sequence: Synthetic oligonucleotide
caucuggccguaacucguc

SEQ ID NO: 650358 - RNA, 19 nt, Artificial Sequence
  Description of Artificial Sequence: Synthetic oligonucleotide
acuacuggagaugcagguu

SEQ ID NO: 650359 - RNA, 19 nt, Artificial Sequence
  Description of Artificial Sequence: Synthetic oligonucleotide
uacuguugucugguccuga

SEQ ID NO: 650360 - RNA, 19 nt, Artificial Sequence
  Description of Artificial Sequence: Synthetic oligonucleotide
gacgaggcugaacggcauc

SEQ ID NO: 650361 - RNA, 19 nt, Artificial Sequence
  Description of Artificial Sequence: Synthetic oligonucleotide
gcaguuguagcugaggcua

SEQ ID NO: 650362 - RNA, 19 nt, Artificial Sequence
  Description of Artificial Sequence: Synthetic oligonucleotide
gcuggacgaggcugaacgg

SEQ ID NO: 650363 - RNA, 19 nt, Artificial Sequence
  Description of Artificial Sequence: Synthetic oligonucleotide
ggccgaugcacugagggac

SEQ ID NO: 650364 - RNA, 19 nt, Artificial Sequence
  Description of Artificial Sequence: Synthetic oligonucleotide
ugagaccuuugacgaguua

SEQ ID NO: 650365 - RNA, 19 nt, Artificial Sequence
  Description of Artificial Sequence: Synthetic oligonucleotide
guaacucgucuucugacuu

SEQ ID NO: 650366 - RNA, 19 nt, Artificial Sequence
  Description of Artificial Sequence: Synthetic oligonucleotide
auacaauggugaacauaca

SEQ ID NO: 650367 - RNA, 19 nt, Artificial Sequence
  Description of Artificial Sequence: Synthetic oligonucleotide
agggaucaucauaacuacu

SEQ ID NO: 650368 - RNA, 19 nt, Artificial Sequence
  Description of Artificial Sequence: Synthetic oligonucleotide
ugaccagaauggccccggu

SEQ ID NO: 650369 - RNA, 19 nt, Artificial Sequence
  Description of Artificial Sequence: Synthetic oligonucleotide
ugcuuggagucaugcgaau

SEQ ID NO: 650370 - RNA, 19 nt, Artificial Sequence
  Description of Artificial Sequence: Synthetic oligonucleotide
cacgucugguucagugaug

SEQ ID NO: 650371 - RNA, 19 nt, Artificial Sequence
  Description of Artificial Sequence: Synthetic oligonucleotide
acuauucaaucuggccaga

SEQ ID NO: 650372 - RNA, 19 nt, Artificial Sequence
  Description of Artificial Sequence: Synthetic oligonucleotide
gcucacauuggcaggaaca

SEQ ID NO: 650373 - RNA, 19 nt, Artificial Sequence
  Description of Artificial Sequence: Synthetic oligonucleotide
gggauggcgguuauguuuc

SEQ ID NO: 650374 - RNA, 19 nt, Artificial Sequence
  Description of Artificial Sequence: Synthetic oligonucleotide
gcaugguuaaaagaguacu

SEQ ID NO: 650375 - RNA, 19 nt, Artificial Sequence
  Description of Artificial Sequence: Synthetic oligonucleotide
gacgcaaggacagcagcua

SEQ ID NO: 650376 - RNA, 19 nt, Artificial Sequence
  Description of Artificial Sequence: Synthetic oligonucleotide
uaacugcaaagguccgauu

SEQ ID NO: 650377 - RNA, 19 nt, Artificial Sequence
  Description of Artificial Sequence: Synthetic oligonucleotide
gaucuagaaugagaggguu

SEQ ID NO: 650378 - RNA, 19 nt, Artificial Sequence
  Description of Artificial Sequence: Synthetic oligonucleotide
ggcaucgauggcgacuugc

SEQ ID NO: 650379 - RNA, 19 nt, Artificial Sequence
  Description of Artificial Sequence: Synthetic oligonucleotide
acggacuugugggauuagu

SEQ ID NO: 650380 - RNA, 19 nt, Artificial Sequence
  Description of Artificial Sequence: Synthetic oligonucleotide
uggccguaacucgucuucu

SEQ ID NO: 650381 - RNA, 19 nt, Artificial Sequence
  Description of Artificial Sequence: Synthetic oligonucleotide
uucucggcuucaccgucuu

SEQ ID NO: 650382 - RNA, 19 nt, Artificial Sequence
  Description of Artificial Sequence: Synthetic oligonucleotide
cugugacgcaaggacagca

SEQ ID NO: 650383 - RNA, 19 nt, Artificial Sequence
  Description of Artificial Sequence: Synthetic oligonucleotide
cauaucuagggaugaugau

SEQ ID NO: 650384 - RNA, 19 nt, Artificial Sequence
  Description of Artificial Sequence: Synthetic oligonucleotide
gucaugcgaaugggaacug

SEQ ID NO: 650385 - RNA, 19 nt, Artificial Sequence
  Description of Artificial Sequence: Synthetic oligonucleotide
gaccuuugacgaguuacgu

SEQ ID NO: 650386 - RNA, 19 nt, Artificial Sequence
  Description of Artificial Sequence: Synthetic oligonucleotide
gucuaaucgaugccuggau

SEQ ID NO: 650387 - RNA, 19 nt, Artificial Sequence
  Description of Artificial Sequence: Synthetic oligonucleotide
cugugguaacugcaaaggu

SEQ ID NO: 650388 - RNA, 19 nt, Artificial Sequence
  Description of Artificial Sequence: Synthetic oligonucleotide
uugugggauuagugugauc

SEQ ID NO: 650389 - RNA, 19 nt, Artificial Sequence
  Description of Artificial Sequence: Synthetic oligonucleotide
ggauugccuacgaauuuca

SEQ ID NO: 650390 - RNA, 19 nt, Artificial Sequence
  Description of Artificial Sequence: Synthetic oligonucleotide
ggcgguuauguuuccucca

SEQ ID NO: 650391 - RNA, 19 nt, Artificial Sequence
  Description of Artificial Sequence: Synthetic oligonucleotide
auuagaccaucggcaucca

SEQ ID NO: 650392 - RNA, 19 nt, Artificial Sequence
  Description of Artificial Sequence: Synthetic oligonucleotide
guccugugguaacugcaaa

SEQ ID NO: 650393 - RNA, 19 nt, Artificial Sequence
  Description of Artificial Sequence: Synthetic oligonucleotide
gggugaaacuacuggagau

SEQ ID NO: 650394 - RNA, 19 nt, Artificial Sequence
  Description of Artificial Sequence: Synthetic oligonucleotide
gugagagaauggucggagu

SEQ ID NO: 650395 - RNA, 19 nt, Artificial Sequence
  Description of Artificial Sequence: Synthetic oligonucleotide
guuaucgggugauguuccu

SEQ ID NO: 650396 - RNA, 19 nt, Artificial Sequence
  Description of Artificial Sequence: Synthetic oligonucleotide
caggccacgucugguucag

SEQ ID NO: 650397 - RNA, 19 nt, Artificial Sequence
  Description of Artificial Sequence: Synthetic oligonucleotide
gccacgucugguucaguga

SEQ ID NO: 650398 - RNA, 19 nt, Artificial Sequence
  Description of Artificial Sequence: Synthetic oligonucleotide
acguugcucccaaucugcu

SEQ ID NO: 650399 - RNA, 19 nt, Artificial Sequence
  Description of Artificial Sequence: Synthetic oligonucleotide
gccagaacgguguugguuu

SEQ ID NO: 650400 - RNA, 19 nt, Artificial Sequence
  Description of Artificial Sequence: Synthetic oligonucleotide
uggccagaacgguguuggu

SEQ ID NO: 650401 - RNA, 19 nt, Artificial Sequence
  Description of Artificial Sequence: Synthetic oligonucleotide
uggcaucgauggcgacuug

SEQ ID NO: 650402 - RNA, 19 nt, Artificial Sequence
  Description of Artificial Sequence: Synthetic oligonucleotide
caguguuaucgggugaugu

SEQ ID NO: 650403 - RNA, 19 nt, Artificial Sequence
  Description of Artificial Sequence: Synthetic oligonucleotide
aucaggcuuucagggaguu

SEQ ID NO: 650404 - RNA, 19 nt, Artificial Sequence
  Description of Artificial Sequence: Synthetic oligonucleotide
guaacggacuugugggauu

SEQ ID NO: 650405 - RNA, 19 nt, Artificial Sequence
  Description of Artificial Sequence: Synthetic oligonucleotide
gauggcgguuauguuuccu

SEQ ID NO: 650406 - RNA, 19 nt, Artificial Sequence
  Description of Artificial Sequence: Synthetic oligonucleotide
ggaaagagucugaacuacu

SEQ ID NO: 650407 - RNA, 19 nt, Artificial Sequence
  Description of Artificial Sequence: Synthetic oligonucleotide
ccgauucauaucuagggau

SEQ ID NO: 650408 - RNA, 19 nt, Artificial Sequence
  Description of Artificial Sequence: Synthetic oligonucleotide
gauugccuacgaauuucau

SEQ ID NO: 650409 - RNA, 19 nt, Artificial Sequence
  Description of Artificial Sequence: Synthetic oligonucleotide
gugagguacuagugugagu

SEQ ID NO: 650410 - RNA, 19 nt, Artificial Sequence
  Description of Artificial Sequence: Synthetic oligonucleotide
cuggauugccuacgaauuu

SEQ ID NO: 650411 - RNA, 19 nt, Artificial Sequence
  Description of Artificial Sequence: Synthetic oligonucleotide
ccaguugaacuuccaggga

SEQ ID NO: 650412 - RNA, 19 nt, Artificial Sequence
  Description of Artificial Sequence: Synthetic oligonucleotide
cgaauuucauuggcaguug

SEQ ID NO: 650413 - RNA, 19 nt, Artificial Sequence
  Description of Artificial Sequence: Synthetic oligonucleotide
ggugaacauacagggcaaa

SEQ ID NO: 650414 - RNA, 19 nt, Artificial Sequence
  Description of Artificial Sequence: Synthetic oligonucleotide
gcaguguuaucgggugaug

SEQ ID NO: 650415 - RNA, 19 nt, Artificial Sequence
  Description of Artificial Sequence: Synthetic oligonucleotide
ccagaacgguguugguuuc

SEQ ID NO: 650416 - RNA, 19 nt, Artificial Sequence
  Description of Artificial Sequence: Synthetic oligonucleotide
ggaacacuagcagcugucu

SEQ ID NO: 650417 - RNA, 19 nt, Artificial Sequence
  Description of Artificial Sequence: Synthetic oligonucleotide
gugugaguuauuagaccau

SEQ ID NO: 650418 - RNA, 19 nt, Artificial Sequence
  Description of Artificial Sequence: Synthetic oligonucleotide
cguacuguugucugguccu

SEQ ID NO: 650419 - RNA, 19 nt, Artificial Sequence
  Description of Artificial Sequence: Synthetic oligonucleotide
cugcaaagguccgauucau

SEQ ID NO: 650420 - RNA, 19 nt, Artificial Sequence
  Description of Artificial Sequence: Synthetic oligonucleotide
cuaccucacccggcugguc

SEQ ID NO: 650421 - RNA, 19 nt, Artificial Sequence
  Description of Artificial Sequence: Synthetic oligonucleotide
cgguuauguuuccuccaug

SEQ ID NO: 650422 - RNA, 19 nt, Artificial Sequence
  Description of Artificial Sequence: Synthetic oligonucleotide
cguaacucgucuucugacu

SEQ ID NO: 650423 - RNA, 19 nt, Artificial Sequence
  Description of Artificial Sequence: Synthetic oligonucleotide
guugcggggucagaagcuu

SEQ ID NO: 650424 - RNA, 19 nt, Artificial Sequence
  Description of Artificial Sequence: Synthetic oligonucleotide
cgaguuacguugcucccaa

SEQ ID NO: 650425 - RNA, 19 nt, Artificial Sequence
  Description of Artificial Sequence: Synthetic oligonucleotide
gaguuacguugcucccaau

SEQ ID NO: 650426 - RNA, 19 nt, Artificial Sequence
  Description of Artificial Sequence: Synthetic oligonucleotide
ggucggaguuguuccaguu

SEQ ID NO: 650427 - RNA, 19 nt, Artificial Sequence
  Description of Artificial Sequence: Synthetic oligonucleotide
ccccgguccugcaagaggu

SEQ ID NO: 650428 - RNA, 19 nt, Artificial Sequence
  Description of Artificial Sequence: Synthetic oligonucleotide
gguacuagugugaguuauu

SEQ ID NO: 650429 - RNA, 19 nt, Artificial Sequence
  Description of Artificial Sequence: Synthetic oligonucleotide
cccagaccacaccgcauca

SEQ ID NO: 650430 - RNA, 19 nt, Artificial Sequence
  Description of Artificial Sequence: Synthetic oligonucleotide
ccacgucugguucagugau

SEQ ID NO: 650431 - RNA, 19 nt, Artificial Sequence
  Description of Artificial Sequence: Synthetic oligonucleotide
ggcuuaggugguggagcca

SEQ ID NO: 650432 - RNA, 19 nt, Artificial Sequence
  Description of Artificial Sequence: Synthetic oligonucleotide
gagaauggucggaguuguu

SEQ ID NO: 650433 - RNA, 19 nt, Artificial Sequence
  Description of Artificial Sequence: Synthetic oligonucleotide
cccgguccugcaagagguc

SEQ ID NO: 650434 - RNA, 19 nt, Artificial Sequence
  Description of Artificial Sequence: Synthetic oligonucleotide
ggccagaacgguguugguu

SEQ ID NO: 650435 - RNA, 19 nt, Artificial Sequence
  Description of Artificial Sequence: Synthetic oligonucleotide
ggcaauccgaagagagguu

SEQ ID NO: 650436 - RNA, 19 nt, Artificial Sequence
  Description of Artificial Sequence: Synthetic oligonucleotide
ccucacccggcuggucccc

SEQ ID NO: 650437 - RNA, 19 nt, Artificial Sequence
  Description of Artificial Sequence: Synthetic oligonucleotide
cggaguuguuccaguugaa

SEQ ID NO: 650438 - RNA, 19 nt, Artificial Sequence
  Description of Artificial Sequence: Synthetic oligonucleotide
ccguuuagaucaggcugaa

SEQ ID NO: 650439 - RNA, 19 nt, Artificial Sequence
  Description of Artificial Sequence: Synthetic oligonucleotide
ggacgaggcugaacggcau

SEQ ID NO: 650440 - RNA, 19 nt, Artificial Sequence
  Description of Artificial Sequence: Synthetic oligonucleotide
gcaagaccucaggauguuu

SEQ ID NO: 650441 - RNA, 19 nt, Artificial Sequence
  Description of Artificial Sequence: Synthetic oligonucleotide
ccgguccugcaagaggucu

SEQ ID NO: 650442 - RNA, 19 nt, Artificial Sequence
  Description of Artificial Sequence: Synthetic oligonucleotide
ccuaccucacccggcuggu

SEQ ID NO: 650443 - RNA, 19 nt, Artificial Sequence
  Description of Artificial Sequence: Synthetic oligonucleotide
cguuuagaucaggcugaau

SEQ ID NO: 650444 - RNA, 19 nt, Artificial Sequence
  Description of Artificial Sequence: Synthetic oligonucleotide
aaauauucagcauggcucc

SEQ ID NO: 650445 - RNA, 19 nt, Artificial Sequence
  Description of Artificial Sequence: Synthetic oligonucleotide
aacaccuugaaagugagcc

SEQ ID NO: 650446 - RNA, 19 nt, Artificial Sequence
  Description of Artificial Sequence: Synthetic oligonucleotide
gaaggauacagcuacagcc

SEQ ID NO: 650447 - RNA, 19 nt, Artificial Sequence
  Description of Artificial Sequence: Synthetic oligonucleotide
uguguaaauauucagcaug

SEQ ID NO: 650448 - RNA, 19 nt, Artificial Sequence
  Description of Artificial Sequence: Synthetic oligonucleotide
aagccaauccaccaggcgc

SEQ ID NO: 650449 - RNA, 19 nt, Artificial Sequence
  Description of Artificial Sequence: Synthetic oligonucleotide
acgacaauccauuggaugc

SEQ ID NO: 650450 - RNA, 19 nt, Artificial Sequence
  Description of Artificial Sequence: Synthetic oligonucleotide
aacaauguagcgcugggag

SEQ ID NO: 650451 - RNA, 19 nt, Artificial Sequence
  Description of Artificial Sequence: Synthetic oligonucleotide
uguguggcaccucagaugg

SEQ ID NO: 650452 - RNA, 19 nt, Artificial Sequence
  Description of Artificial Sequence: Synthetic oligonucleotide
agugcaagguuuuacaagg

SEQ ID NO: 650453 - RNA, 19 nt, Artificial Sequence
  Description of Artificial Sequence: Synthetic oligonucleotide
ucagacgugagucacauga

SEQ ID NO: 650454 - RNA, 19 nt, Artificial Sequence
  Description of Artificial Sequence: Synthetic oligonucleotide
aagaacuugggaccaaagg

SEQ ID NO: 650455 - RNA, 19 nt, Artificial Sequence
  Description of Artificial Sequence: Synthetic oligonucleotide
aagauaauuacaacgaaca

SEQ ID NO: 650456 - RNA, 19 nt, Artificial Sequence
  Description of Artificial Sequence: Synthetic oligonucleotide
aaccugaugaucccagagc

SEQ ID NO: 650457 - RNA, 19 nt, Artificial Sequence
  Description of Artificial Sequence: Synthetic oligonucleotide
uaacguucgauucaaguug

SEQ ID NO: 650458 - RNA, 19 nt, Artificial Sequence
  Description of Artificial Sequence: Synthetic oligonucleotide
uacaaaacuaauuccauaa

SEQ ID NO: 650459 - RNA, 19 nt, Artificial Sequence
  Description of Artificial Sequence: Synthetic oligonucleotide
aguaaauggcguugcaagc

SEQ ID NO: 650460 - RNA, 19 nt, Artificial Sequence
  Description of Artificial Sequence: Synthetic oligonucleotide
aaaagauggcgauauagau

SEQ ID NO: 650461 - RNA, 19 nt, Artificial Sequence
  Description of Artificial Sequence: Synthetic oligonucleotide
uauccaaacaauguggcag

SEQ ID NO: 650462 - RNA, 19 nt, Artificial Sequence
  Description of Artificial Sequence: Synthetic oligonucleotide
uaaaagauggcgauauaga

SEQ ID NO: 650463 - RNA, 19 nt, Artificial Sequence
  Description of Artificial Sequence: Synthetic oligonucleotide
aacauagaaacacguuguc

SEQ ID NO: 650464 - RNA, 19 nt, Artificial Sequence
  Description of Artificial Sequence: Synthetic oligonucleotide
ugugggguuucuuaggagg

SEQ ID NO: 650465 - RNA, 19 nt, Artificial Sequence
  Description of Artificial Sequence: Synthetic oligonucleotide
agauaauuacaacgaacac

SEQ ID NO: 650466 - RNA, 19 nt, Artificial Sequence
  Description of Artificial Sequence: Synthetic oligonucleotide
uuccgguacacaaagcagg

SEQ ID NO: 650467 - RNA, 19 nt, Artificial Sequence
  Description of Artificial Sequence: Synthetic oligonucleotide
auuaugaacacacucuuaa

SEQ ID NO: 650468 - RNA, 19 nt, Artificial Sequence
  Description of Artificial Sequence: Synthetic oligonucleotide
agaacuugggaccaaaggu

SEQ ID NO: 650469 - RNA, 19 nt, Artificial Sequence
  Description of Artificial Sequence: Synthetic oligonucleotide
aaagcaucaaguagcuggc

SEQ ID NO: 650470 - RNA, 19 nt, Artificial Sequence
  Description of Artificial Sequence: Synthetic oligonucleotide
uguaguggugccuaggaga

SEQ ID NO: 650471 - RNA, 19 nt, Artificial Sequence
  Description of Artificial Sequence: Synthetic oligonucleotide
gauauagaugggugaauag

SEQ ID NO: 650472 - RNA, 19 nt, Artificial Sequence
  Description of Artificial Sequence: Synthetic oligonucleotide
uaaauggcguugcaagccg

SEQ ID NO: 650473 - RNA, 19 nt, Artificial Sequence
  Description of Artificial Sequence: Synthetic oligonucleotide
ucaaucacccagccaaagg

SEQ ID NO: 650474 - RNA, 19 nt, Artificial Sequence
  Description of Artificial Sequence: Synthetic oligonucleotide
agacagaaccugaugaucc

SEQ ID NO: 650475 - RNA, 19 nt, Artificial Sequence
  Description of Artificial Sequence: Synthetic oligonucleotide
aucgcaagaccccagaaug

SEQ ID NO: 650476 - RNA, 19 nt, Artificial Sequence
  Description of Artificial Sequence: Synthetic oligonucleotide
caagcaaagcaucaaguag

SEQ ID NO: 650477 - RNA, 19 nt, Artificial Sequence
  Description of Artificial Sequence: Synthetic oligonucleotide
aacguagcuaguugucacg

SEQ ID NO: 650478 - RNA, 19 nt, Artificial Sequence
  Description of Artificial Sequence: Synthetic oligonucleotide
acauagaaacacguugucc

SEQ ID NO: 650479 - RNA, 19 nt, Artificial Sequence
  Description of Artificial Sequence: Synthetic oligonucleotide
aguguucucacgacaaucc

SEQ ID NO: 650480 - RNA, 19 nt, Artificial Sequence
  Description of Artificial Sequence: Synthetic oligonucleotide
aaacauagaaacacguugu

SEQ ID NO: 650481 - RNA, 19 nt, Artificial Sequence
  Description of Artificial Sequence: Synthetic oligonucleotide
uucguuccgguacacaaag

SEQ ID NO: 650482 - RNA, 19 nt, Artificial Sequence
  Description of Artificial Sequence: Synthetic oligonucleotide
aacguucgauucaaguugc

SEQ ID NO: 650483 - RNA, 19 nt, Artificial Sequence
  Description of Artificial Sequence: Synthetic oligonucleotide
aguguugccgcccugugag

SEQ ID NO: 650484 - RNA, 19 nt, Artificial Sequence
  Description of Artificial Sequence: Synthetic oligonucleotide
uucagugcaaaauguaagu

SEQ ID NO: 650485 - RNA, 19 nt, Artificial Sequence
  Description of Artificial Sequence: Synthetic oligonucleotide
uuuacaagguccucagugu

SEQ ID NO: 650486 - RNA, 19 nt, Artificial Sequence
  Description of Artificial Sequence: Synthetic oligonucleotide
uacaacgaacacgagagcc

SEQ ID NO: 650487 - RNA, 19 nt, Artificial Sequence
  Description of Artificial Sequence: Synthetic oligonucleotide
acagccucgguauaucuuc

SEQ ID NO: 650488 - RNA, 19 nt, Artificial Sequence
  Description of Artificial Sequence: Synthetic oligonucleotide
ugggaucacacccucacug

SEQ ID NO: 650489 - RNA, 19 nt, Artificial Sequence
  Description of Artificial Sequence: Synthetic oligonucleotide
ugaucagguacaaaacuaa

SEQ ID NO: 650490 - RNA, 19 nt, Artificial Sequence
  Description of Artificial Sequence: Synthetic oligonucleotide
acugauggagacuuguaca

SEQ ID NO: 650491 - RNA, 19 nt, Artificial Sequence
  Description of Artificial Sequence: Synthetic oligonucleotide
guaggugacaccaagugug

SEQ ID NO: 650492 - RNA, 19 nt, Artificial Sequence
  Description of Artificial Sequence: Synthetic oligonucleotide
aggaucaugccacccaggg

SEQ ID NO: 650493 - RNA, 19 nt, Artificial Sequence
  Description of Artificial Sequence: Synthetic oligonucleotide
ugggugaauaguuugacuu

SEQ ID NO: 650494 - RNA, 19 nt, Artificial Sequence
  Description of Artificial Sequence: Synthetic oligonucleotide
auaacguucgauucaaguu

SEQ ID NO: 650495 - RNA, 19 nt, Artificial Sequence
  Description of Artificial Sequence: Synthetic oligonucleotide
aguuugacuugacauucuc

SEQ ID NO: 650496 - RNA, 19 nt, Artificial Sequence
  Description of Artificial Sequence: Synthetic oligonucleotide
aaaggaccuuugcugauca

SEQ ID NO: 650497 - RNA, 19 nt, Artificial Sequence
  Description of Artificial Sequence: Synthetic oligonucleotide
cucgguauaucuucuggcc

SEQ ID NO: 650498 - RNA, 19 nt, Artificial Sequence
  Description of Artificial Sequence: Synthetic oligonucleotide
ucucugacagucuugccga

SEQ ID NO: 650499 - RNA, 19 nt, Artificial Sequence
  Description of Artificial Sequence: Synthetic oligonucleotide
acgaaaucuguguggcacc

SEQ ID NO: 650500 - RNA, 19 nt, Artificial Sequence
  Description of Artificial Sequence: Synthetic oligonucleotide
ucgcauaacaauguagcgc

SEQ ID NO: 650501 - RNA, 19 nt, Artificial Sequence
  Description of Artificial Sequence: Synthetic oligonucleotide
gaaccugaugaucccagag

SEQ ID NO: 650502 - RNA, 19 nt, Artificial Sequence
  Description of Artificial Sequence: Synthetic oligonucleotide
cagccaaaggcaaugggcc

SEQ ID NO: 650503 - RNA, 19 nt, Artificial Sequence
  Description of Artificial Sequence: Synthetic oligonucleotide
aaagccggauugcucacug

SEQ ID NO: 650504 - RNA, 19 nt, Artificial Sequence
  Description of Artificial Sequence: Synthetic oligonucleotide
agguauccaaacaaugugg

SEQ ID NO: 650505 - RNA, 19 nt, Artificial Sequence
  Description of Artificial Sequence: Synthetic oligonucleotide
agcgcugggagccugguag

SEQ ID NO: 650506 - RNA, 19 nt, Artificial Sequence
  Description of Artificial Sequence: Synthetic oligonucleotide
gugaguaguacaugguacc

SEQ ID NO: 650507 - RNA, 19 nt, Artificial Sequence
  Description of Artificial Sequence: Synthetic oligonucleotide
cauaacaauguagcgcugg

SEQ ID NO: 650508 - RNA, 19 nt, Artificial Sequence
  Description of Artificial Sequence: Synthetic oligonucleotide
auuccgugcaauguagugg

SEQ ID NO: 650509 - RNA, 19 nt, Artificial Sequence
  Description of Artificial Sequence: Synthetic oligonucleotide
cucgcauaacaauguagcg

SEQ ID NO: 650510 - RNA, 19 nt, Artificial Sequence
  Description of Artificial Sequence: Synthetic oligonucleotide
gaugggaucacacccucac

SEQ ID NO: 650511 - RNA, 19 nt, Artificial Sequence
  Description of Artificial Sequence: Synthetic oligonucleotide
cuugccgaaagccggauug

SEQ ID NO: 650512 - RNA, 19 nt, Artificial Sequence
  Description of Artificial Sequence: Synthetic oligonucleotide
auauagaugggugaauagu

SEQ ID NO: 650513 - RNA, 19 nt, Artificial Sequence
  Description of Artificial Sequence: Synthetic oligonucleotide
ugggguuaggguauccgag

SEQ ID NO: 650514 - RNA, 19 nt, Artificial Sequence
  Description of Artificial Sequence: Synthetic oligonucleotide
gaugaucccagagccacgg

SEQ ID NO: 650515 - RNA, 19 nt, Artificial Sequence
  Description of Artificial Sequence: Synthetic oligonucleotide
agacgugagucacaugauc

SEQ ID NO: 650516 - RNA, 19 nt, Artificial Sequence
  Description of Artificial Sequence: Synthetic oligonucleotide
cagacauaacguucgauuc

SEQ ID NO: 650517 - RNA, 19 nt, Artificial Sequence
  Description of Artificial Sequence: Synthetic oligonucleotide
aaucagguagccugcugca

SEQ ID NO: 650518 - RNA, 19 nt, Artificial Sequence
  Description of Artificial Sequence: Synthetic oligonucleotide
acaugaucagguacaaaac

SEQ ID NO: 650519 - RNA, 19 nt, Artificial Sequence
  Description of Artificial Sequence: Synthetic oligonucleotide
gaagccaauccaccaggcg

SEQ ID NO: 650520 - RNA, 19 nt, Artificial Sequence
  Description of Artificial Sequence: Synthetic oligonucleotide
aaugagcauguagcgacuc

SEQ ID NO: 650521 - RNA, 19 nt, Artificial Sequence
  Description of Artificial Sequence: Synthetic oligonucleotide
ugcagugcaagguuuuaca

SEQ ID NO: 650522 - RNA, 19 nt, Artificial Sequence
  Description of Artificial Sequence: Synthetic oligonucleotide
aggguauccgagaacagac

SEQ ID NO: 650523 - RNA, 19 nt, Artificial Sequence
  Description of Artificial Sequence: Synthetic oligonucleotide
uucgauucaaguugcuccu

SEQ ID NO: 650524 - RNA, 19 nt, Artificial Sequence
  Description of Artificial Sequence: Synthetic oligonucleotide
agugcaaaauguaagucca

SEQ ID NO: 650525 - RNA, 19 nt, Artificial Sequence
  Description of Artificial Sequence: Synthetic oligonucleotide
agaaggaggggcuuucucu

SEQ ID NO: 650526 - RNA, 19 nt, Artificial Sequence
  Description of Artificial Sequence: Synthetic oligonucleotide
ucgguauaucuucuggcca

SEQ ID NO: 650527 - RNA, 19 nt, Artificial Sequence
  Description of Artificial Sequence: Synthetic oligonucleotide
cucagaggcacucaagcug

SEQ ID NO: 650528 - RNA, 19 nt, Artificial Sequence
  Description of Artificial Sequence: Synthetic oligonucleotide
uaguacaugguaccaucug

SEQ ID NO: 650529 - RNA, 19 nt, Artificial Sequence
  Description of Artificial Sequence: Synthetic oligonucleotide
uuccgugcaauguaguggu

SEQ ID NO: 650530 - RNA, 19 nt, Artificial Sequence
  Description of Artificial Sequence: Synthetic oligonucleotide
aauggcguugcaagccgcc

SEQ ID NO: 650531 - RNA, 19 nt, Artificial Sequence
  Description of Artificial Sequence: Synthetic oligonucleotide
gaccaggugacauuccgug

SEQ ID NO: 650532 - RNA, 19 nt, Artificial Sequence
  Description of Artificial Sequence: Synthetic oligonucleotide
aguccagacauaacguucg

SEQ ID NO: 650533 - RNA, 19 nt, Artificial Sequence
  Description of Artificial Sequence: Synthetic oligonucleotide
guaaauggcguugcaagcc

SEQ ID NO: 650534 - RNA, 19 nt, Artificial Sequence
  Description of Artificial Sequence: Synthetic oligonucleotide
agaaacacguuguccacga

SEQ ID NO: 650535 - RNA, 19 nt, Artificial Sequence
  Description of Artificial Sequence: Synthetic oligonucleotide
ucagaugggaucacacccu

SEQ ID NO: 650536 - RNA, 19 nt, Artificial Sequence
  Description of Artificial Sequence: Synthetic oligonucleotide
cacgagagccagaaggagg

SEQ ID NO: 650537 - RNA, 19 nt, Artificial Sequence
  Description of Artificial Sequence: Synthetic oligonucleotide
ugccuaggagacucuaggg

SEQ ID NO: 650538 - RNA, 19 nt, Artificial Sequence
  Description of Artificial Sequence: Synthetic oligonucleotide
ugcaaaauguaaguccaga

SEQ ID NO: 650539 - RNA, 19 nt, Artificial Sequence
  Description of Artificial Sequence: Synthetic oligonucleotide
agacauaacguucgauuca

SEQ ID NO: 650540 - RNA, 19 nt, Artificial Sequence
  Description of Artificial Sequence: Synthetic oligonucleotide
aagugagcccugcaaugag

SEQ ID NO: 650541 - RNA, 19 nt, Artificial Sequence
  Description of Artificial Sequence: Synthetic oligonucleotide
aaguguguagagaggagug

SEQ ID NO: 650542 - RNA, 19 nt, Artificial Sequence
  Description of Artificial Sequence: Synthetic oligonucleotide
aagugcacuucccugcggu

SEQ ID NO: 650543 - RNA, 19 nt, Artificial Sequence
  Description of Artificial Sequence: Synthetic oligonucleotide
ugcgugaggaagacaaaga

SEQ ID NO: 650544 - RNA, 19 nt, Artificial Sequence
  Description of Artificial Sequence: Synthetic oligonucleotide
uguguagagaggaguggca

SEQ ID NO: 650545 - RNA, 19 nt, Artificial Sequence
  Description of Artificial Sequence: Synthetic oligonucleotide
gagucacaugaucagguac

SEQ ID NO: 650546 - RNA, 19 nt, Artificial Sequence
  Description of Artificial Sequence: Synthetic oligonucleotide
gugccuaggagacucuagg

SEQ ID NO: 650547 - RNA, 19 nt, Artificial Sequence
  Description of Artificial Sequence: Synthetic oligonucleotide
ugcaagguuuuacaagguc

SEQ ID NO: 650548 - RNA, 19 nt, Artificial Sequence
  Description of Artificial Sequence: Synthetic oligonucleotide
cacgacaauccauuggaug

SEQ ID NO: 650549 - RNA, 19 nt, Artificial Sequence
  Description of Artificial Sequence: Synthetic oligonucleotide
aacacguuguccacgaaau

SEQ ID NO: 650550 - RNA, 19 nt, Artificial Sequence
  Description of Artificial Sequence: Synthetic oligonucleotide
guugucacgccugccaugg

SEQ ID NO: 650551 - RNA, 19 nt, Artificial Sequence
  Description of Artificial Sequence: Synthetic oligonucleotide
uguucucacgacaauccau

SEQ ID NO: 650552 - RNA, 19 nt, Artificial Sequence
  Description of Artificial Sequence: Synthetic oligonucleotide
acguagcuaguugucacgc

SEQ ID NO: 650553 - RNA, 19 nt, Artificial Sequence
  Description of Artificial Sequence: Synthetic oligonucleotide
uguagugcucuuccuggca

SEQ ID NO: 650554 - RNA, 19 nt, Artificial Sequence
  Description of Artificial Sequence: Synthetic oligonucleotide
aaauggcguugcaagccgc

SEQ ID NO: 650555 - RNA, 19 nt, Artificial Sequence
  Description of Artificial Sequence: Synthetic oligonucleotide
gcaaugagcauguagcgac

SEQ ID NO: 650556 - RNA, 19 nt, Artificial Sequence
  Description of Artificial Sequence: Synthetic oligonucleotide
aggauacagcuacagccuc

SEQ ID NO: 650557 - RNA, 19 nt, Artificial Sequence
  Description of Artificial Sequence: Synthetic oligonucleotide
ugucacgccugccaugggc

SEQ ID NO: 650558 - RNA, 19 nt, Artificial Sequence
  Description of Artificial Sequence: Synthetic oligonucleotide
uccgguacacaaagcagga

SEQ ID NO: 650559 - RNA, 19 nt, Artificial Sequence
  Description of Artificial Sequence: Synthetic oligonucleotide
cagaccucagaaagugugg

SEQ ID NO: 650560 - RNA, 19 nt, Artificial Sequence
  Description of Artificial Sequence: Synthetic oligonucleotide
ccuggcaacaguaaauggc

SEQ ID NO: 650561 - RNA, 19 nt, Artificial Sequence
  Description of Artificial Sequence: Synthetic oligonucleotide
gaagucaggaccaggugac

SEQ ID NO: 650562 - RNA, 19 nt, Artificial Sequence
  Description of Artificial Sequence: Synthetic oligonucleotide
acgugagucacaugaucag

SEQ ID NO: 650563 - RNA, 19 nt, Artificial Sequence
  Description of Artificial Sequence: Synthetic oligonucleotide
ugaugaucccagagccacg

SEQ ID NO: 650564 - RNA, 19 nt, Artificial Sequence
  Description of Artificial Sequence: Synthetic oligonucleotide
agccaauccaccaggcgcc

SEQ ID NO: 650565 - RNA, 19 nt, Artificial Sequence
  Description of Artificial Sequence: Synthetic oligonucleotide
cacgaaaucuguguggcac

SEQ ID NO: 650566 - RNA, 19 nt, Artificial Sequence
  Description of Artificial Sequence: Synthetic oligonucleotide
uggaaugcugcugaggaau

SEQ ID NO: 650567 - RNA, 19 nt, Artificial Sequence
  Description of Artificial Sequence: Synthetic oligonucleotide
gcuguagugcucuuccugg

SEQ ID NO: 650568 - RNA, 19 nt, Artificial Sequence
  Description of Artificial Sequence: Synthetic oligonucleotide
ugugcucagacgugaguca

SEQ ID NO: 650569 - RNA, 19 nt, Artificial Sequence
  Description of Artificial Sequence: Synthetic oligonucleotide
gacgugagucacaugauca

SEQ ID NO: 650570 - RNA, 19 nt, Artificial Sequence
  Description of Artificial Sequence: Synthetic oligonucleotide
agacacaccguaggguagc

SEQ ID NO: 650571 - RNA, 19 nt, Artificial Sequence
  Description of Artificial Sequence: Synthetic oligonucleotide
gguagcauugcccaagcca

SEQ ID NO: 650572 - RNA, 19 nt, Artificial Sequence
  Description of Artificial Sequence: Synthetic oligonucleotide
caacguagcuaguugucac

SEQ ID NO: 650573 - RNA, 19 nt, Artificial Sequence
  Description of Artificial Sequence: Synthetic oligonucleotide
uuacaagguccucaguguu

SEQ ID NO: 650574 - RNA, 19 nt, Artificial Sequence
  Description of Artificial Sequence: Synthetic oligonucleotide
caugaagaccagccgguag

SEQ ID NO: 650575 - RNA, 19 nt, Artificial Sequence
  Description of Artificial Sequence: Synthetic oligonucleotide
gaugggugaauaguuugac

SEQ ID NO: 650576 - RNA, 19 nt, Artificial Sequence
  Description of Artificial Sequence: Synthetic oligonucleotide
uuaggaggagccagaugga

SEQ ID NO: 650577 - RNA, 19 nt, Artificial Sequence
  Description of Artificial Sequence: Synthetic oligonucleotide
gugacuggggcaucgcaag

SEQ ID NO: 650578 - RNA, 19 nt, Artificial Sequence
  Description of Artificial Sequence: Synthetic oligonucleotide
uaggguauccgagaacaga

SEQ ID NO: 650579 - RNA, 19 nt, Artificial Sequence
  Description of Artificial Sequence: Synthetic oligonucleotide
aaggaccuuugcugaucac

SEQ ID NO: 650580 - RNA, 19 nt, Artificial Sequence
  Description of Artificial Sequence: Synthetic oligonucleotide
cugaaggauacagcuacag

SEQ ID NO: 650581 - RNA, 19 nt, Artificial Sequence
  Description of Artificial Sequence: Synthetic oligonucleotide
gcaaaauguaaguccagac

SEQ ID NO: 650582 - RNA, 19 nt, Artificial Sequence
  Description of Artificial Sequence: Synthetic oligonucleotide
uggcgauauagauggguga

SEQ ID NO: 650583 - RNA, 19 nt, Artificial Sequence
  Description of Artificial Sequence: Synthetic oligonucleotide
ccuccaaucagguagccug

SEQ ID NO: 650584 - RNA, 19 nt, Artificial Sequence
  Description of Artificial Sequence: Synthetic oligonucleotide
ucccaacguagcuaguugu

SEQ ID NO: 650585 - RNA, 19 nt, Artificial Sequence
  Description of Artificial Sequence: Synthetic oligonucleotide
gaucccagagccacggagc

SEQ ID NO: 650586 - RNA, 19 nt, Artificial Sequence
  Description of Artificial Sequence: Synthetic oligonucleotide
ggucagauccguccguugg

SEQ ID NO: 650587 - RNA, 19 nt, Artificial Sequence
  Description of Artificial Sequence: Synthetic oligonucleotide
uacacaaagcaggaacccu

SEQ ID NO: 650588 - RNA, 19 nt, Artificial Sequence
  Description of Artificial Sequence: Synthetic oligonucleotide
guacacaaagcaggaaccc

SEQ ID NO: 650589 - RNA, 19 nt, Artificial Sequence
  Description of Artificial Sequence: Synthetic oligonucleotide
uucucacgacaauccauug

SEQ ID NO: 650590 - RNA, 19 nt, Artificial Sequence
  Description of Artificial Sequence: Synthetic oligonucleotide
gcucgcauaacaauguagc

SEQ ID NO: 650591 - RNA, 19 nt, Artificial Sequence
  Description of Artificial Sequence: Synthetic oligonucleotide
ugggcccuggaauacugcc

SEQ ID NO: 650592 - RNA, 19 nt, Artificial Sequence
  Description of Artificial Sequence: Synthetic oligonucleotide
aaguugcuccugccuggcg

SEQ ID NO: 650593 - RNA, 19 nt, Artificial Sequence
  Description of Artificial Sequence: Synthetic oligonucleotide
guuccgguacacaaagcag

SEQ ID NO: 650594 - RNA, 19 nt, Artificial Sequence
  Description of Artificial Sequence: Synthetic oligonucleotide
ugcagguccaaggauggcu

SEQ ID NO: 650595 - RNA, 19 nt, Artificial Sequence
  Description of Artificial Sequence: Synthetic oligonucleotide
gaucacacccucacugcag

SEQ ID NO: 650596 - RNA, 19 nt, Artificial Sequence
  Description of Artificial Sequence: Synthetic oligonucleotide
agauucaagcaaagcauca

SEQ ID NO: 650597 - RNA, 19 nt, Artificial Sequence
  Description of Artificial Sequence: Synthetic oligonucleotide
ggcgccaacccacaguggg

SEQ ID NO: 650598 - RNA, 19 nt, Artificial Sequence
  Description of Artificial Sequence: Synthetic oligonucleotide
uccuaugugacuggggcau

SEQ ID NO: 650599 - RNA, 19 nt, Artificial Sequence
  Description of Artificial Sequence: Synthetic oligonucleotide
auggcgauauagaugggug

SEQ ID NO: 650600 - RNA, 19 nt, Artificial Sequence
  Description of Artificial Sequence: Synthetic oligonucleotide
cuaccagguauccaaacaa

SEQ ID NO: 650601 - RNA, 19 nt, Artificial Sequence
  Description of Artificial Sequence: Synthetic oligonucleotide
augggguuaggguauccga

SEQ ID NO: 650602 - RNA, 19 nt, Artificial Sequence
  Description of Artificial Sequence: Synthetic oligonucleotide
cagugcgugaggaagacaa

SEQ ID NO: 650603 - RNA, 19 nt, Artificial Sequence
  Description of Artificial Sequence: Synthetic oligonucleotide
caacaguaaauggcguugc

SEQ ID NO: 650604 - RNA, 19 nt, Artificial Sequence
  Description of Artificial Sequence: Synthetic oligonucleotide
caggcgccaacccacagug

SEQ ID NO: 650605 - RNA, 19 nt, Artificial Sequence
  Description of Artificial Sequence: Synthetic oligonucleotide
uguguaaaagauggcgaua

SEQ ID NO: 650606 - RNA, 19 nt, Artificial Sequence
  Description of Artificial Sequence: Synthetic oligonucleotide
cauaacguucgauucaagu

SEQ ID NO: 650607 - RNA, 19 nt, Artificial Sequence
  Description of Artificial Sequence: Synthetic oligonucleotide
guaguggugccuaggagac

SEQ ID NO: 650608 - RNA, 19 nt, Artificial Sequence
  Description of Artificial Sequence: Synthetic oligonucleotide
gacauaacguucgauucaa

SEQ ID NO: 650609 - RNA, 19 nt, Artificial Sequence
  Description of Artificial Sequence: Synthetic oligonucleotide
gggauagccaaggaugggg

SEQ ID NO: 650610 - RNA, 19 nt, Artificial Sequence
  Description of Artificial Sequence: Synthetic oligonucleotide
ccucgaagaacuugggacc

SEQ ID NO: 650611 - RNA, 19 nt, Artificial Sequence
  Description of Artificial Sequence: Synthetic oligonucleotide
aucacacccucacugcagu

SEQ ID NO: 650612 - RNA, 19 nt, Artificial Sequence
  Description of Artificial Sequence: Synthetic oligonucleotide
guauccaaacaauguggca

SEQ ID NO: 650613 - RNA, 19 nt, Artificial Sequence
  Description of Artificial Sequence: Synthetic oligonucleotide
ugagcauguagcgacucau

SEQ ID NO: 650614 - RNA, 19 nt, Artificial Sequence
  Description of Artificial Sequence: Synthetic oligonucleotide
ugcacggggcuuuucagua

SEQ ID NO: 650615 - RNA, 19 nt, Artificial Sequence
  Description of Artificial Sequence: Synthetic oligonucleotide
caacgaacacgagagccag

SEQ ID NO: 650616 - RNA, 19 nt, Artificial Sequence
  Description of Artificial Sequence: Synthetic oligonucleotide
aggaccuuugcugaucaca

SEQ ID NO: 650617 - RNA, 19 nt, Artificial Sequence
  Description of Artificial Sequence: Synthetic oligonucleotide
augugggguuucuuaggag

SEQ ID NO: 650618 - RNA, 19 nt, Artificial Sequence
  Description of Artificial Sequence: Synthetic oligonucleotide
gauucaagcaaagcaucaa

SEQ ID NO: 650619 - RNA, 19 nt, Artificial Sequence
  Description of Artificial Sequence: Synthetic oligonucleotide
aaauguaaguccagacaua

SEQ ID NO: 650620 - RNA, 19 nt, Artificial Sequence
  Description of Artificial Sequence: Synthetic oligonucleotide
ucaguguugccgcccugug

SEQ ID NO: 650621 - RNA, 19 nt, Artificial Sequence
  Description of Artificial Sequence: Synthetic oligonucleotide
ggugaguaguacaugguac

SEQ ID NO: 650622 - RNA, 19 nt, Artificial Sequence
  Description of Artificial Sequence: Synthetic oligonucleotide
agcugcucgcauaacaaug

SEQ ID NO: 650623 - RNA, 19 nt, Artificial Sequence
  Description of Artificial Sequence: Synthetic oligonucleotide
ugucaaggugcagaacaga

SEQ ID NO: 650624 - RNA, 19 nt, Artificial Sequence
  Description of Artificial Sequence: Synthetic oligonucleotide
uaguugucacgccugccau

SEQ ID NO: 650625 - RNA, 19 nt, Artificial Sequence
  Description of Artificial Sequence: Synthetic oligonucleotide
acaacgaacacgagagcca

SEQ ID NO: 650626 - RNA, 19 nt, Artificial Sequence
  Description of Artificial Sequence: Synthetic oligonucleotide
ugcccaagccagaggaaac

SEQ ID NO: 650627 - RNA, 19 nt, Artificial Sequence
  Description of Artificial Sequence: Synthetic oligonucleotide
acggagcuugaaucuguuc

SEQ ID NO: 650628 - RNA, 19 nt, Artificial Sequence
  Description of Artificial Sequence: Synthetic oligonucleotide
gagacucuagggcuuggga

SEQ ID NO: 650629 - RNA, 19 nt, Artificial Sequence
  Description of Artificial Sequence: Synthetic oligonucleotide
ugguuccuaugugacuggg

SEQ ID NO: 650630 - RNA, 19 nt, Artificial Sequence
  Description of Artificial Sequence: Synthetic oligonucleotide
ugucaaucacccagccaaa

SEQ ID NO: 650631 - RNA, 19 nt, Artificial Sequence
  Description of Artificial Sequence: Synthetic oligonucleotide
aguugucacgccugccaug

SEQ ID NO: 650632 - RNA, 19 nt, Artificial Sequence
  Description of Artificial Sequence: Synthetic oligonucleotide
agaaccugaugaucccaga

SEQ ID NO: 650633 - RNA, 19 nt, Artificial Sequence
  Description of Artificial Sequence: Synthetic oligonucleotide
auguaaguccagacauaac

SEQ ID NO: 650634 - RNA, 19 nt, Artificial Sequence
  Description of Artificial Sequence: Synthetic oligonucleotide
aaguaggcggugacaaaga

SEQ ID NO: 650635 - RNA, 19 nt, Artificial Sequence
  Description of Artificial Sequence: Synthetic oligonucleotide
agaugggugaauaguuuga

SEQ ID NO: 650636 - RNA, 19 nt, Artificial Sequence
  Description of Artificial Sequence: Synthetic oligonucleotide
cucccaacguagcuaguug

SEQ ID NO: 650637 - RNA, 19 nt, Artificial Sequence
  Description of Artificial Sequence: Synthetic oligonucleotide
gccuaggagacucuagggc

SEQ ID NO: 650638 - RNA, 19 nt, Artificial Sequence
  Description of Artificial Sequence: Synthetic oligonucleotide
gcaacaguaaauggcguug

SEQ ID NO: 650639 - RNA, 19 nt, Artificial Sequence
  Description of Artificial Sequence: Synthetic oligonucleotide
acgaacacgagagccagaa

SEQ ID NO: 650640 - RNA, 19 nt, Artificial Sequence
  Description of Artificial Sequence: Synthetic oligonucleotide
ucacgacaauccauuggau

SEQ ID NO: 650641 - RNA, 19 nt, Artificial Sequence
  Description of Artificial Sequence: Synthetic oligonucleotide
cagggcaaaggaccuuugc

SEQ ID NO: 650642 - RNA, 19 nt, Artificial Sequence
  Description of Artificial Sequence: Synthetic oligonucleotide
ugggguuucuuaggaggag

SEQ ID NO: 650643 - RNA, 19 nt, Artificial Sequence
  Description of Artificial Sequence: Synthetic oligonucleotide
uugcccaagccagaggaaa

SEQ ID NO: 650644 - RNA, 19 nt, Artificial Sequence
  Description of Artificial Sequence: Synthetic oligonucleotide
acaccguaggguagcaguc

SEQ ID NO: 650645 - RNA, 19 nt, Artificial Sequence
  Description of Artificial Sequence: Synthetic oligonucleotide
ugacuggggcaucgcaaga

SEQ ID NO: 650646 - RNA, 19 nt, Artificial Sequence
  Description of Artificial Sequence: Synthetic oligonucleotide
ugcucagacgugagucaca

SEQ ID NO: 650647 - RNA, 19 nt, Artificial Sequence
  Description of Artificial Sequence: Synthetic oligonucleotide
gucaaucacccagccaaag

SEQ ID NO: 650648 - RNA, 19 nt, Artificial Sequence
  Description of Artificial Sequence: Synthetic oligonucleotide
gccucgguauaucuucugg

SEQ ID NO: 650649 - RNA, 19 nt, Artificial Sequence
  Description of Artificial Sequence: Synthetic oligonucleotide
guagcgacucauggcuucg

SEQ ID NO: 650650 - RNA, 19 nt, Artificial Sequence
  Description of Artificial Sequence: Synthetic oligonucleotide
aaugcagugcaagguuuua

SEQ ID NO: 650651 - RNA, 19 nt, Artificial Sequence
  Description of Artificial Sequence: Synthetic oligonucleotide
ucguuccgguacacaaagc

SEQ ID NO: 650652 - RNA, 19 nt, Artificial Sequence
  Description of Artificial Sequence: Synthetic oligonucleotide
guaggguagcagucagggc

SEQ ID NO: 650653 - RNA, 19 nt, Artificial Sequence
  Description of Artificial Sequence: Synthetic oligonucleotide
ucucggcacccgcagggca

SEQ ID NO: 650654 - RNA, 19 nt, Artificial Sequence
  Description of Artificial Sequence: Synthetic oligonucleotide
uaugugacuggggcaucgc

SEQ ID NO: 650655 - RNA, 19 nt, Artificial Sequence
  Description of Artificial Sequence: Synthetic oligonucleotide
ugccuaguguucucacgac

SEQ ID NO: 650656 - RNA, 19 nt, Artificial Sequence
  Description of Artificial Sequence: Synthetic oligonucleotide
auagaugggugaauaguuu

SEQ ID NO: 650657 - RNA, 19 nt, Artificial Sequence
  Description of Artificial Sequence: Synthetic oligonucleotide
uagcauugcccaagccaga

SEQ ID NO: 650658 - RNA, 19 nt, Artificial Sequence
  Description of Artificial Sequence: Synthetic oligonucleotide
uggucagauccguccguug

SEQ ID NO: 650659 - RNA, 19 nt, Artificial Sequence
  Description of Artificial Sequence: Synthetic oligonucleotide
cauuggaugcccagggcaa

SEQ ID NO: 650660 - RNA, 19 nt, Artificial Sequence
  Description of Artificial Sequence: Synthetic oligonucleotide
agccggauugcucacuguu

SEQ ID NO: 650661 - RNA, 19 nt, Artificial Sequence
  Description of Artificial Sequence: Synthetic oligonucleotide
gguugucggaggcugagga

SEQ ID NO: 650662 - RNA, 19 nt, Artificial Sequence
  Description of Artificial Sequence: Synthetic oligonucleotide
guugucggaggcugaggac

SEQ ID NO: 650663 - RNA, 19 nt, Artificial Sequence
  Description of Artificial Sequence: Synthetic oligonucleotide
gagcauguagcgacucaug

SEQ ID NO: 650664 - RNA, 19 nt, Artificial Sequence
  Description of Artificial Sequence: Synthetic oligonucleotide
gacagugcgugaggaagac

SEQ ID NO: 650665 - RNA, 19 nt, Artificial Sequence
  Description of Artificial Sequence: Synthetic oligonucleotide
uugccgaaagccggauugc

SEQ ID NO: 650666 - RNA, 19 nt, Artificial Sequence
  Description of Artificial Sequence: Synthetic oligonucleotide
caaaggaccuuugcugauc

SEQ ID NO: 650667 - RNA, 19 nt, Artificial Sequence
  Description of Artificial Sequence: Synthetic oligonucleotide
cguaggguagcagucaggg

SEQ ID NO: 650668 - RNA, 19 nt, Artificial Sequence
  Description of Artificial Sequence: Synthetic oligonucleotide
cucggcacccgcagggcag

SEQ ID NO: 650669 - RNA, 19 nt, Artificial Sequence
  Description of Artificial Sequence: Synthetic oligonucleotide
aagccggauugcucacugu

SEQ ID NO: 650670 - RNA, 19 nt, Artificial Sequence
  Description of Artificial Sequence: Synthetic oligonucleotide
uucuuaggaggagccagau

SEQ ID NO: 650671 - RNA, 19 nt, Artificial Sequence
  Description of Artificial Sequence: Synthetic oligonucleotide
gguauccgagaacagaccu

SEQ ID NO: 650672 - RNA, 19 nt, Artificial Sequence
  Description of Artificial Sequence: Synthetic oligonucleotide
ucgauucaaguugcuccug

SEQ ID NO: 650673 - RNA, 19 nt, Artificial Sequence
  Description of Artificial Sequence: Synthetic oligonucleotide
augggaucacacccucacu

SEQ ID NO: 650674 - RNA, 19 nt, Artificial Sequence
  Description of Artificial Sequence: Synthetic oligonucleotide
cagaugggaucacacccuc

SEQ ID NO: 650675 - RNA, 19 nt, Artificial Sequence
  Description of Artificial Sequence: Synthetic oligonucleotide
aagcaucaaguagcuggcu

SEQ ID NO: 650676 - RNA, 19 nt, Artificial Sequence
  Description of Artificial Sequence: Synthetic oligonucleotide
gcaagccgccuucaggucc

SEQ ID NO: 650677 - RNA, 19 nt, Artificial Sequence
  Description of Artificial Sequence: Synthetic oligonucleotide
uugucacgccugccauggg

SEQ ID NO: 650678 - RNA, 19 nt, Artificial Sequence
  Description of Artificial Sequence: Synthetic oligonucleotide
ugguagcugccggggauag

SEQ ID NO: 650679 - RNA, 19 nt, Artificial Sequence
  Description of Artificial Sequence: Synthetic oligonucleotide
gggcucccaacguagcuag

SEQ ID NO: 650680 - RNA, 19 nt, Artificial Sequence
  Description of Artificial Sequence: Synthetic oligonucleotide
uccagacauaacguucgau

SEQ ID NO: 650681 - RNA, 19 nt, Artificial Sequence
  Description of Artificial Sequence: Synthetic oligonucleotide
ccuggaauacugccuagug

SEQ ID NO: 650682 - RNA, 19 nt, Artificial Sequence
  Description of Artificial Sequence: Synthetic oligonucleotide
agccucgguauaucuucug

SEQ ID NO: 650683 - RNA, 19 nt, Artificial Sequence
  Description of Artificial Sequence: Synthetic oligonucleotide
cagaaggaggggcuuucuc

SEQ ID NO: 650684 - RNA, 19 nt, Artificial Sequence
  Description of Artificial Sequence: Synthetic oligonucleotide
ccaagaacaggcagcaaga

SEQ ID NO: 650685 - RNA, 19 nt, Artificial Sequence
  Description of Artificial Sequence: Synthetic oligonucleotide
acaauguggcagccucaga

SEQ ID NO: 650686 - RNA, 19 nt, Artificial Sequence
  Description of Artificial Sequence: Synthetic oligonucleotide
auacugccuaguguucuca

SEQ ID NO: 650687 - RNA, 19 nt, Artificial Sequence
  Description of Artificial Sequence: Synthetic oligonucleotide
uggcucacuucuguguaaa

SEQ ID NO: 650688 - RNA, 19 nt, Artificial Sequence
  Description of Artificial Sequence: Synthetic oligonucleotide
gguuccuaugugacugggg

SEQ ID NO: 650689 - RNA, 19 nt, Artificial Sequence
  Description of Artificial Sequence: Synthetic oligonucleotide
ugccgaaagccggauugcu

SEQ ID NO: 650690 - RNA, 19 nt, Artificial Sequence
  Description of Artificial Sequence: Synthetic oligonucleotide
ccagccgguagcuggacag

SEQ ID NO: 650691 - RNA, 19 nt, Artificial Sequence
  Description of Artificial Sequence: Synthetic oligonucleotide
ucuugccgaaagccggauu

SEQ ID NO: 650692 - RNA, 19 nt, Artificial Sequence
  Description of Artificial Sequence: Synthetic oligonucleotide
gggauggcgaugaggaaug

SEQ ID NO: 650693 - RNA, 19 nt, Artificial Sequence
  Description of Artificial Sequence: Synthetic oligonucleotide
cucgaagaacuugggacca

SEQ ID NO: 650694 - RNA, 19 nt, Artificial Sequence
  Description of Artificial Sequence: Synthetic oligonucleotide
agcccugcaaugagcaugu

SEQ ID NO: 650695 - RNA, 19 nt, Artificial Sequence
  Description of Artificial Sequence: Synthetic oligonucleotide
gguuaggguauccgagaac

SEQ ID NO: 650696 - RNA, 19 nt, Artificial Sequence
  Description of Artificial Sequence: Synthetic oligonucleotide
cuucguuccgguacacaaa

SEQ ID NO: 650697 - RNA, 19 nt, Artificial Sequence
  Description of Artificial Sequence: Synthetic oligonucleotide
aggguagcagucagggcug

SEQ ID NO: 650698 - RNA, 19 nt, Artificial Sequence
  Description of Artificial Sequence: Synthetic oligonucleotide
ucggaggcugaggacuggc

SEQ ID NO: 650699 - RNA, 19 nt, Artificial Sequence
  Description of Artificial Sequence: Synthetic oligonucleotide
acauaacguucgauucaag

SEQ ID NO: 650700 - RNA, 19 nt, Artificial Sequence
  Description of Artificial Sequence: Synthetic oligonucleotide
caaguguguagagaggagu

SEQ ID NO: 650701 - RNA, 19 nt, Artificial Sequence
  Description of Artificial Sequence: Synthetic oligonucleotide
ccugcgguagcauugccca

SEQ ID NO: 650702 - RNA, 19 nt, Artificial Sequence
  Description of Artificial Sequence: Synthetic oligonucleotide
ccuaguguucucacgacaa

SEQ ID NO: 650703 - RNA, 19 nt, Artificial Sequence
  Description of Artificial Sequence: Synthetic oligonucleotide
guguugccgcccugugagg

SEQ ID NO: 650704 - RNA, 19 nt, Artificial Sequence
  Description of Artificial Sequence: Synthetic oligonucleotide
gagugugucugguuccuau

SEQ ID NO: 650705 - RNA, 19 nt, Artificial Sequence
  Description of Artificial Sequence: Synthetic oligonucleotide
agggugaguaguacauggu

SEQ ID NO: 650706 - RNA, 19 nt, Artificial Sequence
  Description of Artificial Sequence: Synthetic oligonucleotide
augccggcgaugagugugg

SEQ ID NO: 650707 - RNA, 19 nt, Artificial Sequence
  Description of Artificial Sequence: Synthetic oligonucleotide
gggguuaggguauccgaga

SEQ ID NO: 650708 - RNA, 19 nt, Artificial Sequence
  Description of Artificial Sequence: Synthetic oligonucleotide
cucccgcuggcacuaccag

SEQ ID NO: 650709 - RNA, 19 nt, Artificial Sequence
  Description of Artificial Sequence: Synthetic oligonucleotide
gugcucagacgugagucac

SEQ ID NO: 650710 - RNA, 19 nt, Artificial Sequence
  Description of Artificial Sequence: Synthetic oligonucleotide
ggagacucuagggcuuggg

SEQ ID NO: 650711 - RNA, 19 nt, Artificial Sequence
  Description of Artificial Sequence: Synthetic oligonucleotide
gggugaguaguacauggua

SEQ ID NO: 650712 - RNA, 19 nt, Artificial Sequence
  Description of Artificial Sequence: Synthetic oligonucleotide
gauccguccguuggcucac

SEQ ID NO: 650713 - RNA, 19 nt, Artificial Sequence
  Description of Artificial Sequence: Synthetic oligonucleotide
caagccgccuucaggucca

SEQ ID NO: 650714 - RNA, 19 nt, Artificial Sequence
  Description of Artificial Sequence: Synthetic oligonucleotide
ccauuggaugcccagggca

SEQ ID NO: 650715 - RNA, 19 nt, Artificial Sequence
  Description of Artificial Sequence: Synthetic oligonucleotide
gucacgccugccaugggca

SEQ ID NO: 650716 - RNA, 19 nt, Artificial Sequence
  Description of Artificial Sequence: Synthetic oligonucleotide
agucuugccgaaagccgga

SEQ ID NO: 650717 - RNA, 19 nt, Artificial Sequence
  Description of Artificial Sequence: Synthetic oligonucleotide
ggcgauauagaugggugaa

SEQ ID NO: 650718 - RNA, 19 nt, Artificial Sequence
  Description of Artificial Sequence: Synthetic oligonucleotide
gcagguccaaggauggcug

SEQ ID NO: 650719 - RNA, 19 nt, Artificial Sequence
  Description of Artificial Sequence: Synthetic oligonucleotide
acaauccauuggaugccca

SEQ ID NO: 650720 - RNA, 19 nt, Artificial Sequence
  Description of Artificial Sequence: Synthetic oligonucleotide
guucucacgacaauccauu

SEQ ID NO: 650721 - RNA, 19 nt, Artificial Sequence
  Description of Artificial Sequence: Synthetic oligonucleotide
ggggcuuucucugacaggu

SEQ ID NO: 650722 - RNA, 19 nt, Artificial Sequence
  Description of Artificial Sequence: Synthetic oligonucleotide
cguuccgguacacaaagca

SEQ ID NO: 650723 - RNA, 19 nt, Artificial Sequence
  Description of Artificial Sequence: Synthetic oligonucleotide
cgcauaacaauguagcgcu

SEQ ID NO: 650724 - RNA, 19 nt, Artificial Sequence
  Description of Artificial Sequence: Synthetic oligonucleotide
ccuaggagacucuagggcu

SEQ ID NO: 650725 - RNA, 19 nt, Artificial Sequence
  Description of Artificial Sequence: Synthetic oligonucleotide
acgccugccaugggcaugu

SEQ ID NO: 650726 - RNA, 19 nt, Artificial Sequence
  Description of Artificial Sequence: Synthetic oligonucleotide
agauggcgauauagauggg

SEQ ID NO: 650727 - RNA, 19 nt, Artificial Sequence
  Description of Artificial Sequence: Synthetic oligonucleotide
ucgaagaacuugggaccaa

SEQ ID NO: 650728 - RNA, 19 nt, Artificial Sequence
  Description of Artificial Sequence: Synthetic oligonucleotide
cucagacgugagucacaug

SEQ ID NO: 650729 - RNA, 19 nt, Artificial Sequence
  Description of Artificial Sequence: Synthetic oligonucleotide
gcgacucauggcuucguuc

SEQ ID NO: 650730 - RNA, 19 nt, Artificial Sequence
  Description of Artificial Sequence: Synthetic oligonucleotide
ggggauagccaaggauggg

SEQ ID NO: 650731 - RNA, 19 nt, Artificial Sequence
  Description of Artificial Sequence: Synthetic oligonucleotide
ggguuaggguauccgagaa

SEQ ID NO: 650732 - RNA, 19 nt, Artificial Sequence
  Description of Artificial Sequence: Synthetic oligonucleotide
cagaaugcagugcaagguu

SEQ ID NO: 650733 - RNA, 19 nt, Artificial Sequence
  Description of Artificial Sequence: Synthetic oligonucleotide
cccaacguagcuaguuguc

SEQ ID NO: 650734 - RNA, 19 nt, Artificial Sequence
  Description of Artificial Sequence: Synthetic oligonucleotide
gccuaguguucucacgaca

SEQ ID NO: 650735 - RNA, 19 nt, Artificial Sequence
  Description of Artificial Sequence: Synthetic oligonucleotide
ggcguugcaagccgccuuc

SEQ ID NO: 650736 - RNA, 19 nt, Artificial Sequence
  Description of Artificial Sequence: Synthetic oligonucleotide
cagccgguagcuggacagg

SEQ ID NO: 650737 - RNA, 19 nt, Artificial Sequence
  Description of Artificial Sequence: Synthetic oligonucleotide
agaugggaucacacccuca

SEQ ID NO: 650738 - RNA, 19 nt, Artificial Sequence
  Description of Artificial Sequence: Synthetic oligonucleotide
auggcguugcaagccgccu

SEQ ID NO: 650739 - RNA, 19 nt, Artificial Sequence
  Description of Artificial Sequence: Synthetic oligonucleotide
acagugcgugaggaagaca

SEQ ID NO: 650740 - RNA, 19 nt, Artificial Sequence
  Description of Artificial Sequence: Synthetic oligonucleotide
caucgcaagaccccagaau

SEQ ID NO: 650741 - RNA, 19 nt, Artificial Sequence
  Description of Artificial Sequence: Synthetic oligonucleotide
ggcaucgcaagaccccaga

SEQ ID NO: 650742 - RNA, 19 nt, Artificial Sequence
  Description of Artificial Sequence: Synthetic oligonucleotide
ccagacauaacguucgauu

SEQ ID NO: 650743 - RNA, 19 nt, Artificial Sequence
  Description of Artificial Sequence: Synthetic oligonucleotide
auugcccaagccagaggaa

SEQ ID NO: 650744 - RNA, 19 nt, Artificial Sequence
  Description of Artificial Sequence: Synthetic oligonucleotide
ggugcagaacagacagaac

SEQ ID NO: 650745 - RNA, 19 nt, Artificial Sequence
  Description of Artificial Sequence: Synthetic oligonucleotide
cguagcuaguugucacgcc

SEQ ID NO: 650746 - RNA, 19 nt, Artificial Sequence
  Description of Artificial Sequence: Synthetic oligonucleotide
cuaggagacucuagggcuu

SEQ ID NO: 650747 - RNA, 19 nt, Artificial Sequence
  Description of Artificial Sequence: Synthetic oligonucleotide
cgugcaauagcuggcccag

SEQ ID NO: 650748 - RNA, 19 nt, Artificial Sequence
  Description of Artificial Sequence: Synthetic oligonucleotide
gcaggaacccugguggcca

SEQ ID NO: 650749 - RNA, 19 nt, Artificial Sequence
  Description of Artificial Sequence: Synthetic oligonucleotide
ggacagugcgugaggaaga

SEQ ID NO: 650750 - RNA, 19 nt, Artificial Sequence
  Description of Artificial Sequence: Synthetic oligonucleotide
ccguaggguagcagucagg

SEQ ID NO: 650751 - RNA, 19 nt, Artificial Sequence
  Description of Artificial Sequence: Synthetic oligonucleotide
cgacaauccauuggaugcc

SEQ ID NO: 650752 - RNA, 19 nt, Artificial Sequence
  Description of Artificial Sequence: Synthetic oligonucleotide
gaaagccggauugcucacu

SEQ ID NO: 650753 - RNA, 19 nt, Artificial Sequence
  Description of Artificial Sequence: Synthetic oligonucleotide
gggguugucggaggcugag

SEQ ID NO: 650754 - RNA, 19 nt, Artificial Sequence
  Description of Artificial Sequence: Synthetic oligonucleotide
caccguaggguagcaguca

SEQ ID NO: 650755 - RNA, 19 nt, Artificial Sequence
  Description of Artificial Sequence: Synthetic oligonucleotide
gccacggagcuugaaucug

SEQ ID NO: 650756 - RNA, 19 nt, Artificial Sequence
  Description of Artificial Sequence: Synthetic oligonucleotide
gucucggcacccgcagggc

SEQ ID NO: 650757 - RNA, 19 nt, Artificial Sequence
  Description of Artificial Sequence: Synthetic oligonucleotide
ggguugucggaggcugagg

SEQ ID NO: 650758 - RNA, 19 nt, Artificial Sequence
  Description of Artificial Sequence: Synthetic oligonucleotide
ccaacguagcuaguuguca

SEQ ID NO: 650759 - RNA, 19 nt, Artificial Sequence
  Description of Artificial Sequence: Synthetic oligonucleotide
caaggauggggauggcgau

SEQ ID NO: 650760 - RNA, 19 nt, Artificial Sequence
  Description of Artificial Sequence: Synthetic oligonucleotide
cuggcgcagaggccaucug

SEQ ID NO: 650761 - RNA, 19 nt, Artificial Sequence
  Description of Artificial Sequence: Synthetic oligonucleotide
gcauaacaauguagcgcug

SEQ ID NO: 650762 - RNA, 19 nt, Artificial Sequence
  Description of Artificial Sequence: Synthetic oligonucleotide
acguucgauucaaguugcu

SEQ ID NO: 650763 - RNA, 19 nt, Artificial Sequence
  Description of Artificial Sequence: Synthetic oligonucleotide
aggcgccaacccacagugg

SEQ ID NO: 650764 - RNA, 19 nt, Artificial Sequence
  Description of Artificial Sequence: Synthetic oligonucleotide
ggacaugccggcgaugagu

SEQ ID NO: 650765 - RNA, 19 nt, Artificial Sequence
  Description of Artificial Sequence: Synthetic oligonucleotide
ugccggcgaugaguguggc

SEQ ID NO: 650766 - RNA, 19 nt, Artificial Sequence
  Description of Artificial Sequence: Synthetic oligonucleotide
gcccgcauagcagggugag

SEQ ID NO: 650767 - RNA, 19 nt, Artificial Sequence
  Description of Artificial Sequence: Synthetic oligonucleotide
gcaucgcaagaccccagaa

SEQ ID NO: 650768 - RNA, 19 nt, Artificial Sequence
  Description of Artificial Sequence: Synthetic oligonucleotide
cguucgauucaaguugcuc

SEQ ID NO: 650769 - RNA, 19 nt, Artificial Sequence
  Description of Artificial Sequence: Synthetic oligonucleotide
ugccuggcgcagaggccau

SEQ ID NO: 650770 - RNA, 19 nt, Artificial Sequence
  Description of Artificial Sequence: Synthetic oligonucleotide
ccgugcaauagcuggccca

SEQ ID NO: 650771 - RNA, 19 nt, Artificial Sequence
  Description of Artificial Sequence: Synthetic oligonucleotide
ggggauggcgaugaggaau

SEQ ID NO: 650772 - RNA, 19 nt, Artificial Sequence
  Description of Artificial Sequence: Synthetic oligonucleotide
cagacgugagucacaugau

SEQ ID NO: 650773 - RNA, 19 nt, Artificial Sequence
  Description of Artificial Sequence: Synthetic oligonucleotide
gccggauugcucacuguuc

SEQ ID NO: 650774 - RNA, 19 nt, Artificial Sequence
  Description of Artificial Sequence: Synthetic oligonucleotide
caccucagaugggaucaca

SEQ ID NO: 650775 - RNA, 19 nt, Artificial Sequence
  Description of Artificial Sequence: Synthetic oligonucleotide
ggggcaucgcaagacccca

SEQ ID NO: 650776 - RNA, 19 nt, Artificial Sequence
  Description of Artificial Sequence: Synthetic oligonucleotide
cgaaagccggauugcucac

SEQ ID NO: 650777 - RNA, 19 nt, Artificial Sequence
  Description of Artificial Sequence: Synthetic oligonucleotide
ccgcauagcagggugagua

SEQ ID NO: 650778 - RNA, 19 nt, Artificial Sequence
  Description of Artificial Sequence: Synthetic oligonucleotide
ccggauugcucacuguucu

SEQ ID NO: 650779 - RNA, 19 nt, Artificial Sequence
  Description of Artificial Sequence: Synthetic oligonucleotide
ggcgaugaguguggcuuca

SEQ ID NO: 650780 - RNA, 19 nt, Artificial Sequence
  Description of Artificial Sequence: Synthetic oligonucleotide
gcgccaacccacagugggc

SEQ ID NO: 650781 - RNA, 19 nt, Artificial Sequence
  Description of Artificial Sequence: Synthetic oligonucleotide
gggcaucgcaagaccccag

SEQ ID NO: 650782 - RNA, 19 nt, Artificial Sequence
  Description of Artificial Sequence: Synthetic oligonucleotide
ccacgccgugcaauagcug

SEQ ID NO: 650783 - RNA, 19 nt, Artificial Sequence
  Description of Artificial Sequence: Synthetic oligonucleotide
gcucagacgugagucacau

SEQ ID NO: 650784 - RNA, 19 nt, Artificial Sequence
  Description of Artificial Sequence: Synthetic oligonucleotide
gccggggauagccaaggau

SEQ ID NO: 650785 - RNA, 19 nt, Artificial Sequence
  Description of Artificial Sequence: Synthetic oligonucleotide
ccgcccugugaggaugggg

SEQ ID NO: 650786 - RNA, 19 nt, Artificial Sequence
  Description of Artificial Sequence: Synthetic oligonucleotide
ggaccaggugacauuccgu

SEQ ID NO: 650787 - RNA, 19 nt, Artificial Sequence
  Description of Artificial Sequence: Synthetic oligonucleotide
cgccgugcaauagcuggcc

SEQ ID NO: 650788 - RNA, 19 nt, Artificial Sequence
  Description of Artificial Sequence: Synthetic oligonucleotide
guggucagauccguccguu

SEQ ID NO: 650789 - RNA, 19 nt, Artificial Sequence
  Description of Artificial Sequence: Synthetic oligonucleotide
cccacgccgugcaauagcu

SEQ ID NO: 650790 - RNA, 19 nt, Artificial Sequence
  Description of Artificial Sequence: Synthetic oligonucleotide
gcaugaagaccagccggua

SEQ ID NO: 650791 - RNA, 19 nt, Artificial Sequence
  Description of Artificial Sequence: Synthetic oligonucleotide
auccguccguuggcucacu

SEQ ID NO: 650792 - RNA, 19 nt, Artificial Sequence
  Description of Artificial Sequence: Synthetic oligonucleotide
aagccgccuucagguccaa

SEQ ID NO: 650793 - RNA, 19 nt, Artificial Sequence
  Description of Artificial Sequence: Synthetic oligonucleotide
gcgauauagaugggugaau

SEQ ID NO: 650794 - RNA, 19 nt, Artificial Sequence
  Description of Artificial Sequence: Synthetic oligonucleotide
gcucccaacguagcuaguu

SEQ ID NO: 650795 - RNA, 19 nt, Artificial Sequence
  Description of Artificial Sequence: Synthetic oligonucleotide
gucuugccgaaagccggau

SEQ ID NO: 650796 - RNA, 19 nt, Artificial Sequence
  Description of Artificial Sequence: Synthetic oligonucleotide
cguuguccacgaaaucugu

SEQ ID NO: 650797 - RNA, 19 nt, Artificial Sequence
  Description of Artificial Sequence: Synthetic oligonucleotide
ccggcgaugaguguggcuu

SEQ ID NO: 650798 - RNA, 19 nt, Artificial Sequence
  Description of Artificial Sequence: Synthetic oligonucleotide
gccaauccaccaggcgcca

SEQ ID NO: 650799 - RNA, 19 nt, Artificial Sequence
  Description of Artificial Sequence: Synthetic oligonucleotide
guggugccuaggagacucu

SEQ ID NO: 650800 - RNA, 19 nt, Artificial Sequence
  Description of Artificial Sequence: Synthetic oligonucleotide
gcguugcaagccgccuuca

SEQ ID NO: 650801 - RNA, 19 nt, Artificial Sequence
  Description of Artificial Sequence: Synthetic oligonucleotide
ccgguacacaaagcaggaa

SEQ ID NO: 650802 - RNA, 19 nt, Artificial Sequence
  Description of Artificial Sequence: Synthetic oligonucleotide
gccggcgaugaguguggcu

SEQ ID NO: 650803 - RNA, 19 nt, Artificial Sequence
  Description of Artificial Sequence: Synthetic oligonucleotide
cgccaacccacagugggcu

SEQ ID NO: 650804 - RNA, 19 nt, Artificial Sequence
  Description of Artificial Sequence: Synthetic oligonucleotide
ggcucccaacguagcuagu

SEQ ID NO: 650805 - RNA, 19 nt, Artificial Sequence
  Description of Artificial Sequence: Synthetic oligonucleotide
cccgcauagcagggugagu

SEQ ID NO: 650806 - RNA, 19 nt, Artificial Sequence
  Description of Artificial Sequence: Synthetic oligonucleotide
cgcugggagccugguagcu

SEQ ID NO: 650807 - RNA, 19 nt, Artificial Sequence
  Description of Artificial Sequence: Synthetic oligonucleotide
gcccugcaaugagcaugua

SEQ ID NO: 650808 - RNA, 19 nt, Artificial Sequence
  Description of Artificial Sequence: Synthetic oligonucleotide
aaauuauguuaccagagcc

SEQ ID NO: 650809 - RNA, 19 nt, Artificial Sequence
  Description of Artificial Sequence: Synthetic oligonucleotide
aaagauacgacaaaauagc

SEQ ID NO: 650810 - RNA, 19 nt, Artificial Sequence
  Description of Artificial Sequence: Synthetic oligonucleotide
aaguugauacauuugugcc

SEQ ID NO: 650811 - RNA, 19 nt, Artificial Sequence
  Description of Artificial Sequence: Synthetic oligonucleotide
aauauauauauauauguau

SEQ ID NO: 650812 - RNA, 19 nt, Artificial Sequence
  Description of Artificial Sequence: Synthetic oligonucleotide
gauacgacaaaauagcagc

SEQ ID NO: 650813 - RNA, 19 nt, Artificial Sequence
  Description of Artificial Sequence: Synthetic oligonucleotide
uauauauauauguauaugu

SEQ ID NO: 650814 - RNA, 19 nt, Artificial Sequence
  Description of Artificial Sequence: Synthetic oligonucleotide
aaaagauacgacaaaauag

SEQ ID NO: 650815 - RNA, 19 nt, Artificial Sequence
  Description of Artificial Sequence: Synthetic oligonucleotide
aagauaaagacagcuaccc

SEQ ID NO: 650816 - RNA, 19 nt, Artificial Sequence
  Description of Artificial Sequence: Synthetic oligonucleotide
auuuaggugaggcauaggg

SEQ ID NO: 650817 - RNA, 19 nt, Artificial Sequence
  Description of Artificial Sequence: Synthetic oligonucleotide
aggacuaaaugucucaggc

SEQ ID NO: 650818 - RNA, 19 nt, Artificial Sequence
  Description of Artificial Sequence: Synthetic oligonucleotide
uccaugcucacuaacaagg

SEQ ID NO: 650819 - RNA, 19 nt, Artificial Sequence
  Description of Artificial Sequence: Synthetic oligonucleotide
aagaaguugauacauuugu

SEQ ID NO: 650820 - RNA, 19 nt, Artificial Sequence
  Description of Artificial Sequence: Synthetic oligonucleotide
aagaccuuugugcucaugg

SEQ ID NO: 650821 - RNA, 19 nt, Artificial Sequence
  Description of Artificial Sequence: Synthetic oligonucleotide
acaucaugcaagcaugucc

SEQ ID NO: 650822 - RNA, 19 nt, Artificial Sequence
  Description of Artificial Sequence: Synthetic oligonucleotide
guaacaaagggucaggacc

SEQ ID NO: 650823 - RNA, 19 nt, Artificial Sequence
  Description of Artificial Sequence: Synthetic oligonucleotide
uuguccucaagauaaagag

SEQ ID NO: 650824 - RNA, 19 nt, Artificial Sequence
  Description of Artificial Sequence: Synthetic oligonucleotide
uguagcgggaacaucaugc

SEQ ID NO: 650825 - RNA, 19 nt, Artificial Sequence
  Description of Artificial Sequence: Synthetic oligonucleotide
aauuauguuaccagagccg

SEQ ID NO: 650826 - RNA, 19 nt, Artificial Sequence
  Description of Artificial Sequence: Synthetic oligonucleotide
accaaauauauauauauau

SEQ ID NO: 650827 - RNA, 19 nt, Artificial Sequence
  Description of Artificial Sequence: Synthetic oligonucleotide
uauauauauauauguauau

SEQ ID NO: 650828 - RNA, 19 nt, Artificial Sequence
  Description of Artificial Sequence: Synthetic oligonucleotide
auuauguuaccagagccgc

SEQ ID NO: 650829 - RNA, 19 nt, Artificial Sequence
  Description of Artificial Sequence: Synthetic oligonucleotide
caacguaagaccuuugugc

SEQ ID NO: 650830 - RNA, 19 nt, Artificial Sequence
  Description of Artificial Sequence: Synthetic oligonucleotide
aguugauacauuugugccg

SEQ ID NO: 650831 - RNA, 19 nt, Artificial Sequence
  Description of Artificial Sequence: Synthetic oligonucleotide
aaggggucagaguagauca

SEQ ID NO: 650832 - RNA, 19 nt, Artificial Sequence
  Description of Artificial Sequence: Synthetic oligonucleotide
aucggaaaaguccaccucg

SEQ ID NO: 650833 - RNA, 19 nt, Artificial Sequence
  Description of Artificial Sequence: Synthetic oligonucleotide
aacguaagaccuuugugcu

SEQ ID NO: 650834 - RNA, 19 nt, Artificial Sequence
  Description of Artificial Sequence: Synthetic oligonucleotide
agauaaagacagcuacccc

SEQ ID NO: 650835 - RNA, 19 nt, Artificial Sequence
  Description of Artificial Sequence: Synthetic oligonucleotide
aaugggccgaaauccaguc

SEQ ID NO: 650836 - RNA, 19 nt, Artificial Sequence
  Description of Artificial Sequence: Synthetic oligonucleotide
caucaugcaagcauguccc

SEQ ID NO: 650837 - RNA, 19 nt, Artificial Sequence
  Description of Artificial Sequence: Synthetic oligonucleotide
gaagcuaagacuagguagc

SEQ ID NO: 650838 - RNA, 19 nt, Artificial Sequence
  Description of Artificial Sequence: Synthetic oligonucleotide
caaauauauauauauaugu

SEQ ID NO: 650839 - RNA, 19 nt, Artificial Sequence
  Description of Artificial Sequence: Synthetic oligonucleotide
aaauugcggagguauuuag

SEQ ID NO: 650840 - RNA, 19 nt, Artificial Sequence
  Description of Artificial Sequence: Synthetic oligonucleotide
acgacaaaauagcagccac

SEQ ID NO: 650841 - RNA, 19 nt, Artificial Sequence
  Description of Artificial Sequence: Synthetic oligonucleotide
uacgguagcagucugugac

SEQ ID NO: 650842 - RNA, 19 nt, Artificial Sequence
  Description of Artificial Sequence: Synthetic oligonucleotide
aaauauauauauauaugua

SEQ ID NO: 650843 - RNA, 19 nt, Artificial Sequence
  Description of Artificial Sequence: Synthetic oligonucleotide
auauauauauauguauaug

SEQ ID NO: 650844 - RNA, 19 nt, Artificial Sequence
  Description of Artificial Sequence: Synthetic oligonucleotide
auugucgggaugcccaccc

SEQ ID NO: 650845 - RNA, 19 nt, Artificial Sequence
  Description of Artificial Sequence: Synthetic oligonucleotide
ugugcccuguguuaggagg

SEQ ID NO: 650846 - RNA, 19 nt, Artificial Sequence
  Description of Artificial Sequence: Synthetic oligonucleotide
gauaaagacagcuaccccu

SEQ ID NO: 650847 - RNA, 19 nt, Artificial Sequence
  Description of Artificial Sequence: Synthetic oligonucleotide
gaaaaguccaccucgacgu

SEQ ID NO: 650848 - RNA, 19 nt, Artificial Sequence
  Description of Artificial Sequence: Synthetic oligonucleotide
uugaccaggauugugggcc

SEQ ID NO: 650849 - RNA, 19 nt, Artificial Sequence
  Description of Artificial Sequence: Synthetic oligonucleotide
uacaagaggggcauauagc

SEQ ID NO: 650850 - RNA, 19 nt, Artificial Sequence
  Description of Artificial Sequence: Synthetic oligonucleotide
aguaaaauugcggagguau

SEQ ID NO: 650851 - RNA, 19 nt, Artificial Sequence
  Description of Artificial Sequence: Synthetic oligonucleotide
acaaauuauguuaccagag

SEQ ID NO: 650852 - RNA, 19 nt, Artificial Sequence
  Description of Artificial Sequence: Synthetic oligonucleotide
ugcggagguauuuagguga

SEQ ID NO: 650853 - RNA, 19 nt, Artificial Sequence
  Description of Artificial Sequence: Synthetic oligonucleotide
auugcggagguauuuaggu

SEQ ID NO: 650854 - RNA, 19 nt, Artificial Sequence
  Description of Artificial Sequence: Synthetic oligonucleotide
guacaagaggggcauauag

SEQ ID NO: 650855 - RNA, 19 nt, Artificial Sequence
  Description of Artificial Sequence: Synthetic oligonucleotide
guaagguucgagaagacac

SEQ ID NO: 650856 - RNA, 19 nt, Artificial Sequence
  Description of Artificial Sequence: Synthetic oligonucleotide
gguuugaaagggcagacag

SEQ ID NO: 650857 - RNA, 19 nt, Artificial Sequence
  Description of Artificial Sequence: Synthetic oligonucleotide
cagaguaaaauugcggagg

SEQ ID NO: 650858 - RNA, 19 nt, Artificial Sequence
  Description of Artificial Sequence: Synthetic oligonucleotide
uaagguucgagaagacacc

SEQ ID NO: 650859 - RNA, 19 nt, Artificial Sequence
  Description of Artificial Sequence: Synthetic oligonucleotide
aaugacaguccacguaaca

SEQ ID NO: 650860 - RNA, 19 nt, Artificial Sequence
  Description of Artificial Sequence: Synthetic oligonucleotide
ugggccgaaauccaguccc

SEQ ID NO: 650861 - RNA, 19 nt, Artificial Sequence
  Description of Artificial Sequence: Synthetic oligonucleotide
uagccguacaccuugacaa

SEQ ID NO: 650862 - RNA, 19 nt, Artificial Sequence
  Description of Artificial Sequence: Synthetic oligonucleotide
ugcucaugguuugaaaggg

SEQ ID NO: 650863 - RNA, 19 nt, Artificial Sequence
  Description of Artificial Sequence: Synthetic oligonucleotide
aggagaucuugccuaggcc

SEQ ID NO: 650864 - RNA, 19 nt, Artificial Sequence
  Description of Artificial Sequence: Synthetic oligonucleotide
uguccaacugcuuucucug

SEQ ID NO: 650865 - RNA, 19 nt, Artificial Sequence
  Description of Artificial Sequence: Synthetic oligonucleotide
uugccaaggacuaaauguc

SEQ ID NO: 650866 - RNA, 19 nt, Artificial Sequence
  Description of Artificial Sequence: Synthetic oligonucleotide
caguccacguaacaaaggg

SEQ ID NO: 650867 - RNA, 19 nt, Artificial Sequence
  Description of Artificial Sequence: Synthetic oligonucleotide
uguguucacuaucagucac

SEQ ID NO: 650868 - RNA, 19 nt, Artificial Sequence
  Description of Artificial Sequence: Synthetic oligonucleotide
ucagauagggaugaggcuc

SEQ ID NO: 650869 - RNA, 19 nt, Artificial Sequence
  Description of Artificial Sequence: Synthetic oligonucleotide
gcuaggguccuucagauag

SEQ ID NO: 650870 - RNA, 19 nt, Artificial Sequence
  Description of Artificial Sequence: Synthetic oligonucleotide
ggaaaaguccaccucgacg

SEQ ID NO: 650871 - RNA, 19 nt, Artificial Sequence
  Description of Artificial Sequence: Synthetic oligonucleotide
ucuugccuaggccaagucc

SEQ ID NO: 650872 - RNA, 19 nt, Artificial Sequence
  Description of Artificial Sequence: Synthetic oligonucleotide
aacaccugggaaccuuggg

SEQ ID NO: 650873 - RNA, 19 nt, Artificial Sequence
  Description of Artificial Sequence: Synthetic oligonucleotide
accacuaccuuguucaggu

SEQ ID NO: 650874 - RNA, 19 nt, Artificial Sequence
  Description of Artificial Sequence: Synthetic oligonucleotide
auauguguucacuaucagu

SEQ ID NO: 650875 - RNA, 19 nt, Artificial Sequence
  Description of Artificial Sequence: Synthetic oligonucleotide
aauacauagccagguaggu

SEQ ID NO: 650876 - RNA, 19 nt, Artificial Sequence
  Description of Artificial Sequence: Synthetic oligonucleotide
aauugcggagguauuuagg

SEQ ID NO: 650877 - RNA, 19 nt, Artificial Sequence
  Description of Artificial Sequence: Synthetic oligonucleotide
uccugcuuauuucuguagc

SEQ ID NO: 650878 - RNA, 19 nt, Artificial Sequence
  Description of Artificial Sequence: Synthetic oligonucleotide
aacccaaaagacaagcagu

SEQ ID NO: 650879 - RNA, 19 nt, Artificial Sequence
  Description of Artificial Sequence: Synthetic oligonucleotide
auauauauauauauguaua

SEQ ID NO: 650880 - RNA, 19 nt, Artificial Sequence
  Description of Artificial Sequence: Synthetic oligonucleotide
guugccaaggacuaaaugu

SEQ ID NO: 650881 - RNA, 19 nt, Artificial Sequence
  Description of Artificial Sequence: Synthetic oligonucleotide
auuugugccgcucauggaa

SEQ ID NO: 650882 - RNA, 19 nt, Artificial Sequence
  Description of Artificial Sequence: Synthetic oligonucleotide
aaguccauccugcuuauuu

SEQ ID NO: 650883 - RNA, 19 nt, Artificial Sequence
  Description of Artificial Sequence: Synthetic oligonucleotide
gugcucaugguuugaaagg

SEQ ID NO: 650884 - RNA, 19 nt, Artificial Sequence
  Description of Artificial Sequence: Synthetic oligonucleotide
uuugugccgcucauggaag

SEQ ID NO: 650885 - RNA, 19 nt, Artificial Sequence
  Description of Artificial Sequence: Synthetic oligonucleotide
ccaaauauauauauauaug

SEQ ID NO: 650886 - RNA, 19 nt, Artificial Sequence
  Description of Artificial Sequence: Synthetic oligonucleotide
agauacgacaaaauagcag

SEQ ID NO: 650887 - RNA, 19 nt, Artificial Sequence
  Description of Artificial Sequence: Synthetic oligonucleotide
agaguaaaauugcggaggu

SEQ ID NO: 650888 - RNA, 19 nt, Artificial Sequence
  Description of Artificial Sequence: Synthetic oligonucleotide
agucuguugaccaggauug

SEQ ID NO: 650889 - RNA, 19 nt, Artificial Sequence
  Description of Artificial Sequence: Synthetic oligonucleotide
auacgacaaaauagcagcc

SEQ ID NO: 650890 - RNA, 19 nt, Artificial Sequence
  Description of Artificial Sequence: Synthetic oligonucleotide
gacccucuccacuaaauac

SEQ ID NO: 650891 - RNA, 19 nt, Artificial Sequence
  Description of Artificial Sequence: Synthetic oligonucleotide
gagauuggcagaaauuuca

SEQ ID NO: 650892 - RNA, 19 nt, Artificial Sequence
  Description of Artificial Sequence: Synthetic oligonucleotide
ccagauaggagcauuguag

SEQ ID NO: 650893 - RNA, 19 nt, Artificial Sequence
  Description of Artificial Sequence: Synthetic oligonucleotide
uccaacguaagaccuuugu

SEQ ID NO: 650894 - RNA, 19 nt, Artificial Sequence
  Description of Artificial Sequence: Synthetic oligonucleotide
aguagaucaggagaucuug

SEQ ID NO: 650895 - RNA, 19 nt, Artificial Sequence
  Description of Artificial Sequence: Synthetic oligonucleotide
ccacuaaauacauagccag

SEQ ID NO: 650896 - RNA, 19 nt, Artificial Sequence
  Description of Artificial Sequence: Synthetic oligonucleotide
agugagagucaucauggga

SEQ ID NO: 650897 - RNA, 19 nt, Artificial Sequence
  Description of Artificial Sequence: Synthetic oligonucleotide
ggagcgacuacucugacuc

SEQ ID NO: 650898 - RNA, 19 nt, Artificial Sequence
  Description of Artificial Sequence: Synthetic oligonucleotide
aagauacgacaaaauagca

SEQ ID NO: 650899 - RNA, 19 nt, Artificial Sequence
  Description of Artificial Sequence: Synthetic oligonucleotide
cuugccuaggccaagucca

SEQ ID NO: 650900 - RNA, 19 nt, Artificial Sequence
  Description of Artificial Sequence: Synthetic oligonucleotide
gacgucacgggagaguucc

SEQ ID NO: 650901 - RNA, 19 nt, Artificial Sequence
  Description of Artificial Sequence: Synthetic oligonucleotide
aaaugacaguccacguaac

SEQ ID NO: 650902 - RNA, 19 nt, Artificial Sequence
  Description of Artificial Sequence: Synthetic oligonucleotide
uguaagguucgagaagaca

SEQ ID NO: 650903 - RNA, 19 nt, Artificial Sequence
  Description of Artificial Sequence: Synthetic oligonucleotide
aucaugcaagcaugucccc

SEQ ID NO: 650904 - RNA, 19 nt, Artificial Sequence
  Description of Artificial Sequence: Synthetic oligonucleotide
uccacguaacaaaggguca

SEQ ID NO: 650905 - RNA, 19 nt, Artificial Sequence
  Description of Artificial Sequence: Synthetic oligonucleotide
uuauguuaccagagccgcc

SEQ ID NO: 650906 - RNA, 19 nt, Artificial Sequence
  Description of Artificial Sequence: Synthetic oligonucleotide
ggaagugacccauagugac

SEQ ID NO: 650907 - RNA, 19 nt, Artificial Sequence
  Description of Artificial Sequence: Synthetic oligonucleotide
agagauuggcagaaauuuc

SEQ ID NO: 650908 - RNA, 19 nt, Artificial Sequence
  Description of Artificial Sequence: Synthetic oligonucleotide
ugcacuaggaagugaccca

SEQ ID NO: 650909 - RNA, 19 nt, Artificial Sequence
  Description of Artificial Sequence: Synthetic oligonucleotide
agcgggaacaucaugcaag

SEQ ID NO: 650910 - RNA, 19 nt, Artificial Sequence
  Description of Artificial Sequence: Synthetic oligonucleotide
agaguagaucaggagaucu

SEQ ID NO: 650911 - RNA, 19 nt, Artificial Sequence
  Description of Artificial Sequence: Synthetic oligonucleotide
caugaguacuuccucccgc

SEQ ID NO: 650912 - RNA, 19 nt, Artificial Sequence
  Description of Artificial Sequence: Synthetic oligonucleotide
aaaauugcggagguauuua

SEQ ID NO: 650913 - RNA, 19 nt, Artificial Sequence
  Description of Artificial Sequence: Synthetic oligonucleotide
uucagauagggaugaggcu

SEQ ID NO: 650914 - RNA, 19 nt, Artificial Sequence
  Description of Artificial Sequence: Synthetic oligonucleotide
agguauuuaggugaggcau

SEQ ID NO: 650915 - RNA, 19 nt, Artificial Sequence
  Description of Artificial Sequence: Synthetic oligonucleotide
agauaggagcauuguaggu

SEQ ID NO: 650916 - RNA, 19 nt, Artificial Sequence
  Description of Artificial Sequence: Synthetic oligonucleotide
aagguucgagaagacacca

SEQ ID NO: 650917 - RNA, 19 nt, Artificial Sequence
  Description of Artificial Sequence: Synthetic oligonucleotide
guauuuaggugaggcauag

SEQ ID NO: 650918 - RNA, 19 nt, Artificial Sequence
  Description of Artificial Sequence: Synthetic oligonucleotide
uaaaauugcggagguauuu

SEQ ID NO: 650919 - RNA, 19 nt, Artificial Sequence
  Description of Artificial Sequence: Synthetic oligonucleotide
augggccgaaauccagucc

SEQ ID NO: 650920 - RNA, 19 nt, Artificial Sequence
  Description of Artificial Sequence: Synthetic oligonucleotide
aucaggagaucuugccuag

SEQ ID NO: 650921 - RNA, 19 nt, Artificial Sequence
  Description of Artificial Sequence: Synthetic oligonucleotide
cugcacuaggaagugaccc

SEQ ID NO: 650922 - RNA, 19 nt, Artificial Sequence
  Description of Artificial Sequence: Synthetic oligonucleotide
uggaagcuaagacuaggua

SEQ ID NO: 650923 - RNA, 19 nt, Artificial Sequence
  Description of Artificial Sequence: Synthetic oligonucleotide
ucggaaaaguccaccucga

SEQ ID NO: 650924 - RNA, 19 nt, Artificial Sequence
  Description of Artificial Sequence: Synthetic oligonucleotide
auacauagccagguagguc

SEQ ID NO: 650925 - RNA, 19 nt, Artificial Sequence
  Description of Artificial Sequence: Synthetic oligonucleotide
aggauugugggcccagugu

SEQ ID NO: 650926 - RNA, 19 nt, Artificial Sequence
  Description of Artificial Sequence: Synthetic oligonucleotide
uguuaggaggcugcacuag

SEQ ID NO: 650927 - RNA, 19 nt, Artificial Sequence
  Description of Artificial Sequence: Synthetic oligonucleotide
ggagguauuuaggugaggc

SEQ ID NO: 650928 - RNA, 19 nt, Artificial Sequence
  Description of Artificial Sequence: Synthetic oligonucleotide
guccacguaacaaaggguc

SEQ ID NO: 650929 - RNA, 19 nt, Artificial Sequence
  Description of Artificial Sequence: Synthetic oligonucleotide
uugcggagguauuuaggug

SEQ ID NO: 650930 - RNA, 19 nt, Artificial Sequence
  Description of Artificial Sequence: Synthetic oligonucleotide
cagaaauuucaggugcacc

SEQ ID NO: 650931 - RNA, 19 nt, Artificial Sequence
  Description of Artificial Sequence: Synthetic oligonucleotide
augaguacuuccucccgcu

SEQ ID NO: 650932 - RNA, 19 nt, Artificial Sequence
  Description of Artificial Sequence: Synthetic oligonucleotide
acguaagaccuuugugcuc

SEQ ID NO: 650933 - RNA, 19 nt, Artificial Sequence
  Description of Artificial Sequence: Synthetic oligonucleotide
gagguauuuaggugaggca

SEQ ID NO: 650934 - RNA, 19 nt, Artificial Sequence
  Description of Artificial Sequence: Synthetic oligonucleotide
agcccaggaauuuggccuc

SEQ ID NO: 650935 - RNA, 19 nt, Artificial Sequence
  Description of Artificial Sequence: Synthetic oligonucleotide
agcccuugguguaagguuc

SEQ ID NO: 650936 - RNA, 19 nt, Artificial Sequence
  Description of Artificial Sequence: Synthetic oligonucleotide
agcauuguaggugguccac

SEQ ID NO: 650937 - RNA, 19 nt, Artificial Sequence
  Description of Artificial Sequence: Synthetic oligonucleotide
ccauguuggggucaguucc

SEQ ID NO: 650938 - RNA, 19 nt, Artificial Sequence
  Description of Artificial Sequence: Synthetic oligonucleotide
uuguagcgggaacaucaug

SEQ ID NO: 650939 - RNA, 19 nt, Artificial Sequence
  Description of Artificial Sequence: Synthetic oligonucleotide
guguucacuaucagucacg

SEQ ID NO: 650940 - RNA, 19 nt, Artificial Sequence
  Description of Artificial Sequence: Synthetic oligonucleotide
ggauugugggcccagugug

SEQ ID NO: 650941 - RNA, 19 nt, Artificial Sequence
  Description of Artificial Sequence: Synthetic oligonucleotide
ugccgcucauggaagugag

SEQ ID NO: 650942 - RNA, 19 nt, Artificial Sequence
  Description of Artificial Sequence: Synthetic oligonucleotide
uuaccagagccgccccagg

SEQ ID NO: 650943 - RNA, 19 nt, Artificial Sequence
  Description of Artificial Sequence: Synthetic oligonucleotide
agcacuuggucuugucaug

SEQ ID NO: 650944 - RNA, 19 nt, Artificial Sequence
  Description of Artificial Sequence: Synthetic oligonucleotide
guaggucccucccuuggag

SEQ ID NO: 650945 - RNA, 19 nt, Artificial Sequence
  Description of Artificial Sequence: Synthetic oligonucleotide
ucuugccacagagaguccu

SEQ ID NO: 650946 - RNA, 19 nt, Artificial Sequence
  Description of Artificial Sequence: Synthetic oligonucleotide
aagagggcuacugcuacaa

SEQ ID NO: 650947 - RNA, 19 nt, Artificial Sequence
  Description of Artificial Sequence: Synthetic oligonucleotide
aacuggcaaggcucuaaau

SEQ ID NO: 650948 - RNA, 19 nt, Artificial Sequence
  Description of Artificial Sequence: Synthetic oligonucleotide
guagaucaggagaucuugc

SEQ ID NO: 650949 - RNA, 19 nt, Artificial Sequence
  Description of Artificial Sequence: Synthetic oligonucleotide
uggcaaggcucuaaaugaa

SEQ ID NO: 650950 - RNA, 19 nt, Artificial Sequence
  Description of Artificial Sequence: Synthetic oligonucleotide
gagagauuggcagaaauuu

SEQ ID NO: 650951 - RNA, 19 nt, Artificial Sequence
  Description of Artificial Sequence: Synthetic oligonucleotide
ugucgggaugcccacccac

SEQ ID NO: 650952 - RNA, 19 nt, Artificial Sequence
  Description of Artificial Sequence: Synthetic oligonucleotide
cucccuuggagagauuggc

SEQ ID NO: 650953 - RNA, 19 nt, Artificial Sequence
  Description of Artificial Sequence: Synthetic oligonucleotide
aucuugccuaggccaaguc

SEQ ID NO: 650954 - RNA, 19 nt, Artificial Sequence
  Description of Artificial Sequence: Synthetic oligonucleotide
caaagaaguugauacauuu

SEQ ID NO: 650955 - RNA, 19 nt, Artificial Sequence
  Description of Artificial Sequence: Synthetic oligonucleotide
uguuaccagagccgcccca

SEQ ID NO: 650956 - RNA, 19 nt, Artificial Sequence
  Description of Artificial Sequence: Synthetic oligonucleotide
uacauuugugccgcucaug

SEQ ID NO: 650957 - RNA, 19 nt, Artificial Sequence
  Description of Artificial Sequence: Synthetic oligonucleotide
ucaugcaagcauguccccu

SEQ ID NO: 650958 - RNA, 19 nt, Artificial Sequence
  Description of Artificial Sequence: Synthetic oligonucleotide
agggcuacugcuacaagga

SEQ ID NO: 650959 - RNA, 19 nt, Artificial Sequence
  Description of Artificial Sequence: Synthetic oligonucleotide
caacugugaacugcucgcg

SEQ ID NO: 650960 - RNA, 19 nt, Artificial Sequence
  Description of Artificial Sequence: Synthetic oligonucleotide
gugaccugcuucaaacacc

SEQ ID NO: 650961 - RNA, 19 nt, Artificial Sequence
  Description of Artificial Sequence: Synthetic oligonucleotide
gacucguccccacugcgca

SEQ ID NO: 650962 - RNA, 19 nt, Artificial Sequence
  Description of Artificial Sequence: Synthetic oligonucleotide
cuaccuuguucagguaggg

SEQ ID NO: 650963 - RNA, 19 nt, Artificial Sequence
  Description of Artificial Sequence: Synthetic oligonucleotide
caugcuuguagcgggaaca

SEQ ID NO: 650964 - RNA, 19 nt, Artificial Sequence
  Description of Artificial Sequence: Synthetic oligonucleotide
cacuuggucuugucauggg

SEQ ID NO: 650965 - RNA, 19 nt, Artificial Sequence
  Description of Artificial Sequence: Synthetic oligonucleotide
uggacuccuuugcugaguu

SEQ ID NO: 650966 - RNA, 19 nt, Artificial Sequence
  Description of Artificial Sequence: Synthetic oligonucleotide
guagcgggaacaucaugca

SEQ ID NO: 650967 - RNA, 19 nt, Artificial Sequence
  Description of Artificial Sequence: Synthetic oligonucleotide
guuaccagagccgccccag

SEQ ID NO: 650968 - RNA, 19 nt, Artificial Sequence
  Description of Artificial Sequence: Synthetic oligonucleotide
caucggaaaaguccaccuc

SEQ ID NO: 650969 - RNA, 19 nt, Artificial Sequence
  Description of Artificial Sequence: Synthetic oligonucleotide
ucaggagaucuugccuagg

SEQ ID NO: 650970 - RNA, 19 nt, Artificial Sequence
  Description of Artificial Sequence: Synthetic oligonucleotide
acccucuccacuaaauaca

SEQ ID NO: 650971 - RNA, 19 nt, Artificial Sequence
  Description of Artificial Sequence: Synthetic oligonucleotide
auacauuugugccgcucau

SEQ ID NO: 650972 - RNA, 19 nt, Artificial Sequence
  Description of Artificial Sequence: Synthetic oligonucleotide
ucgcgcuggacauugccuc

SEQ ID NO: 650973 - RNA, 19 nt, Artificial Sequence
  Description of Artificial Sequence: Synthetic oligonucleotide
caccaaauauauauauaua

SEQ ID NO: 650974 - RNA, 19 nt, Artificial Sequence
  Description of Artificial Sequence: Synthetic oligonucleotide
acacucuuuggcuccccug

SEQ ID NO: 650975 - RNA, 19 nt, Artificial Sequence
  Description of Artificial Sequence: Synthetic oligonucleotide
gcuuguagcgggaacauca

SEQ ID NO: 650976 - RNA, 19 nt, Artificial Sequence
  Description of Artificial Sequence: Synthetic oligonucleotide
augcaagcauguccccuag

SEQ ID NO: 650977 - RNA, 19 nt, Artificial Sequence
  Description of Artificial Sequence: Synthetic oligonucleotide
caauugucgggaugcccac

SEQ ID NO: 650978 - RNA, 19 nt, Artificial Sequence
  Description of Artificial Sequence: Synthetic oligonucleotide
ugguuugaaagggcagaca

SEQ ID NO: 650979 - RNA, 19 nt, Artificial Sequence
  Description of Artificial Sequence: Synthetic oligonucleotide
cauugccuccaagugcugc

SEQ ID NO: 650980 - RNA, 19 nt, Artificial Sequence
  Description of Artificial Sequence: Synthetic oligonucleotide
uagcgggaacaucaugcaa

SEQ ID NO: 650981 - RNA, 19 nt, Artificial Sequence
  Description of Artificial Sequence: Synthetic oligonucleotide
caagcaguguccaacugcu

SEQ ID NO: 650982 - RNA, 19 nt, Artificial Sequence
  Description of Artificial Sequence: Synthetic oligonucleotide
caccucgacgucacgggag

SEQ ID NO: 650983 - RNA, 19 nt, Artificial Sequence
  Description of Artificial Sequence: Synthetic oligonucleotide
gagcauuguagguggucca

SEQ ID NO: 650984 - RNA, 19 nt, Artificial Sequence
  Description of Artificial Sequence: Synthetic oligonucleotide
gggagaguuccacaccacc

SEQ ID NO: 650985 - RNA, 19 nt, Artificial Sequence
  Description of Artificial Sequence: Synthetic oligonucleotide
uuccagcuacgguagcagu

SEQ ID NO: 650986 - RNA, 19 nt, Artificial Sequence
  Description of Artificial Sequence: Synthetic oligonucleotide
acguaacaaagggucagga

SEQ ID NO: 650987 - RNA, 19 nt, Artificial Sequence
  Description of Artificial Sequence: Synthetic oligonucleotide
gugacagucagaguaaaau

SEQ ID NO: 650988 - RNA, 19 nt, Artificial Sequence
  Description of Artificial Sequence: Synthetic oligonucleotide
auaggguggcucugucucu

SEQ ID NO: 650989 - RNA, 19 nt, Artificial Sequence
  Description of Artificial Sequence: Synthetic oligonucleotide
aggcucuaaaugaacuuga

SEQ ID NO: 650990 - RNA, 19 nt, Artificial Sequence
  Description of Artificial Sequence: Synthetic oligonucleotide
aggugugcccuguguuagg

SEQ ID NO: 650991 - RNA, 19 nt, Artificial Sequence
  Description of Artificial Sequence: Synthetic oligonucleotide
ccaacguaagaccuuugug

SEQ ID NO: 650992 - RNA, 19 nt, Artificial Sequence
  Description of Artificial Sequence: Synthetic oligonucleotide
agggaauucaugaguacuu

SEQ ID NO: 650993 - RNA, 19 nt, Artificial Sequence
  Description of Artificial Sequence: Synthetic oligonucleotide
aguccacguaacaaagggu

SEQ ID NO: 650994 - RNA, 19 nt, Artificial Sequence
  Description of Artificial Sequence: Synthetic oligonucleotide
caggauugugggcccagug

SEQ ID NO: 650995 - RNA, 19 nt, Artificial Sequence
  Description of Artificial Sequence: Synthetic oligonucleotide
ucgacgucacgggagaguu

SEQ ID NO: 650996 - RNA, 19 nt, Artificial Sequence
  Description of Artificial Sequence: Synthetic oligonucleotide
caccacuaccuuguucagg

SEQ ID NO: 650997 - RNA, 19 nt, Artificial Sequence
  Description of Artificial Sequence: Synthetic oligonucleotide
uaaagacagcuaccccuuu

SEQ ID NO: 650998 - RNA, 19 nt, Artificial Sequence
  Description of Artificial Sequence: Synthetic oligonucleotide
ggcauauagccguacaccu

SEQ ID NO: 650999 - RNA, 19 nt, Artificial Sequence
  Description of Artificial Sequence: Synthetic oligonucleotide
uguacaagaggggcauaua

SEQ ID NO: 651000 - RNA, 19 nt, Artificial Sequence
  Description of Artificial Sequence: Synthetic oligonucleotide
uucaacaccugggaaccuu

SEQ ID NO: 651001 - RNA, 19 nt, Artificial Sequence
  Description of Artificial Sequence: Synthetic oligonucleotide
uugugccgcucauggaagu

SEQ ID NO: 651002 - RNA, 19 nt, Artificial Sequence
  Description of Artificial Sequence: Synthetic oligonucleotide
ccaccaaauauauauauau

SEQ ID NO: 651003 - RNA, 19 nt, Artificial Sequence
  Description of Artificial Sequence: Synthetic oligonucleotide
caccaguggcacucuguag

SEQ ID NO: 651004 - RNA, 19 nt, Artificial Sequence
  Description of Artificial Sequence: Synthetic oligonucleotide
cuuccucccgcucauaggu

SEQ ID NO: 651005 - RNA, 19 nt, Artificial Sequence
  Description of Artificial Sequence: Synthetic oligonucleotide
cacuaucagucacgugccc

SEQ ID NO: 651006 - RNA, 19 nt, Artificial Sequence
  Description of Artificial Sequence: Synthetic oligonucleotide
gcgggaacaucaugcaagc

SEQ ID NO: 651007 - RNA, 19 nt, Artificial Sequence
  Description of Artificial Sequence: Synthetic oligonucleotide
gggaacaucaugcaagcau

SEQ ID NO: 651008 - RNA, 19 nt, Artificial Sequence
  Description of Artificial Sequence: Synthetic oligonucleotide
cccaacccaaaagacaagc

SEQ ID NO: 651009 - RNA, 19 nt, Artificial Sequence
  Description of Artificial Sequence: Synthetic oligonucleotide
ccgaaauccagucccugag

SEQ ID NO: 651010 - RNA, 19 nt, Artificial Sequence
  Description of Artificial Sequence: Synthetic oligonucleotide
ccaugcucacuaacaaggc

SEQ ID NO: 651011 - RNA, 19 nt, Artificial Sequence
  Description of Artificial Sequence: Synthetic oligonucleotide
cucauggaagugagaguca

SEQ ID NO: 651012 - RNA, 19 nt, Artificial Sequence
  Description of Artificial Sequence: Synthetic oligonucleotide
caugcaagcauguccccua

SEQ ID NO: 651013 - RNA, 19 nt, Artificial Sequence
  Description of Artificial Sequence: Synthetic oligonucleotide
accaaugggccgaaaucca

SEQ ID NO: 651014 - RNA, 19 nt, Artificial Sequence
  Description of Artificial Sequence: Synthetic oligonucleotide
gguucgagaagacaccagu

SEQ ID NO: 651015 - RNA, 19 nt, Artificial Sequence
  Description of Artificial Sequence: Synthetic oligonucleotide
ggcuacugcuacaaggaac

SEQ ID NO: 651016 - RNA, 19 nt, Artificial Sequence
  Description of Artificial Sequence: Synthetic oligonucleotide
gcucauggcagagcaauug

SEQ ID NO: 651017 - RNA, 19 nt, Artificial Sequence
  Description of Artificial Sequence: Synthetic oligonucleotide
gcuacgguagcagucugug

SEQ ID NO: 651018 - RNA, 19 nt, Artificial Sequence
  Description of Artificial Sequence: Synthetic oligonucleotide
ccgcucauggaagugagag

SEQ ID NO: 651019 - RNA, 19 nt, Artificial Sequence
  Description of Artificial Sequence: Synthetic oligonucleotide
ccugagucuguugaccagg

SEQ ID NO: 651020 - RNA, 19 nt, Artificial Sequence
  Description of Artificial Sequence: Synthetic oligonucleotide
cacugcgcagccuccagca

SEQ ID NO: 651021 - RNA, 19 nt, Artificial Sequence
  Description of Artificial Sequence: Synthetic oligonucleotide
gguugagucucuccaggga

SEQ ID NO: 651022 - RNA, 19 nt, Artificial Sequence
  Description of Artificial Sequence: Synthetic oligonucleotide
ccugggaaccuugggagcg

SEQ ID NO: 651023 - RNA, 19 nt, Artificial Sequence
  Description of Artificial Sequence: Synthetic oligonucleotide
gcaguguccaacugcuuuc

SEQ ID NO: 651024 - RNA, 19 nt, Artificial Sequence
  Description of Artificial Sequence: Synthetic oligonucleotide
uugccuaggccaaguccau

SEQ ID NO: 651025 - RNA, 19 nt, Artificial Sequence
  Description of Artificial Sequence: Synthetic oligonucleotide
cacuaacaaggccacccca

SEQ ID NO: 651026 - RNA, 19 nt, Artificial Sequence
  Description of Artificial Sequence: Synthetic oligonucleotide
gggacucguccccacugcg

SEQ ID NO: 651027 - RNA, 19 nt, Artificial Sequence
  Description of Artificial Sequence: Synthetic oligonucleotide
ggagaguuccacaccacca

SEQ ID NO: 651028 - RNA, 19 nt, Artificial Sequence
  Description of Artificial Sequence: Synthetic oligonucleotide
agccguacaccuugacaaa

SEQ ID NO: 651029 - RNA, 19 nt, Artificial Sequence
  Description of Artificial Sequence: Synthetic oligonucleotide
uugucgggaugcccaccca

SEQ ID NO: 651030 - RNA, 19 nt, Artificial Sequence
  Description of Artificial Sequence: Synthetic oligonucleotide
cuggaagcuaagacuaggu

SEQ ID NO: 651031 - RNA, 19 nt, Artificial Sequence
  Description of Artificial Sequence: Synthetic oligonucleotide
gugugcccuguguuaggag

SEQ ID NO: 651032 - RNA, 19 nt, Artificial Sequence
  Description of Artificial Sequence: Synthetic oligonucleotide
cguaacaaagggucaggac

SEQ ID NO: 651033 - RNA, 19 nt, Artificial Sequence
  Description of Artificial Sequence: Synthetic oligonucleotide
agguucgagaagacaccag

SEQ ID NO: 651034 - RNA, 19 nt, Artificial Sequence
  Description of Artificial Sequence: Synthetic oligonucleotide
gcccuuguccucaagauaa

SEQ ID NO: 651035 - RNA, 19 nt, Artificial Sequence
  Description of Artificial Sequence: Synthetic oligonucleotide
cauuugugccgcucaugga

SEQ ID NO: 651036 - RNA, 19 nt, Artificial Sequence
  Description of Artificial Sequence: Synthetic oligonucleotide
ggcagagcaauugucggga

SEQ ID NO: 651037 - RNA, 19 nt, Artificial Sequence
  Description of Artificial Sequence: Synthetic oligonucleotide
aucagucacgugcccucgu

SEQ ID NO: 651038 - RNA, 19 nt, Artificial Sequence
  Description of Artificial Sequence: Synthetic oligonucleotide
uggcugacuucaagauaaa

SEQ ID NO: 651039 - RNA, 19 nt, Artificial Sequence
  Description of Artificial Sequence: Synthetic oligonucleotide
cccauagugaccugcuuca

SEQ ID NO: 651040 - RNA, 19 nt, Artificial Sequence
  Description of Artificial Sequence: Synthetic oligonucleotide
cucguccccacugcgcagc

SEQ ID NO: 651041 - RNA, 19 nt, Artificial Sequence
  Description of Artificial Sequence: Synthetic oligonucleotide
ccacguaacaaagggucag

SEQ ID NO: 651042 - RNA, 19 nt, Artificial Sequence
  Description of Artificial Sequence: Synthetic oligonucleotide
cuguguuaggaggcugcac

SEQ ID NO: 651043 - RNA, 19 nt, Artificial Sequence
  Description of Artificial Sequence: Synthetic oligonucleotide
cugcucgcgcuggacauug

SEQ ID NO: 651044 - RNA, 19 nt, Artificial Sequence
  Description of Artificial Sequence: Synthetic oligonucleotide
gccguacaccuugacaaag

SEQ ID NO: 651045 - RNA, 19 nt, Artificial Sequence
  Description of Artificial Sequence: Synthetic oligonucleotide
ucguccccacugcgcagcc

SEQ ID NO: 651046 - RNA, 19 nt, Artificial Sequence
  Description of Artificial Sequence: Synthetic oligonucleotide
guguaagguucgagaagac

SEQ ID NO: 651047 - RNA, 19 nt, Artificial Sequence
  Description of Artificial Sequence: Synthetic oligonucleotide
gucacgugcccucguggca

SEQ ID NO: 651048 - RNA, 19 nt, Artificial Sequence
  Description of Artificial Sequence: Synthetic oligonucleotide
caaugggccgaaauccagu

SEQ ID NO: 651049 - RNA, 19 nt, Artificial Sequence
  Description of Artificial Sequence: Synthetic oligonucleotide
ccuuguccucaagauaaag

SEQ ID NO: 651050 - RNA, 19 nt, Artificial Sequence
  Description of Artificial Sequence: Synthetic oligonucleotide
ugggaaccuugggagcgac

SEQ ID NO: 651051 - RNA, 19 nt, Artificial Sequence
  Description of Artificial Sequence: Synthetic oligonucleotide
gguauuuaggugaggcaua

SEQ ID NO: 651052 - RNA, 19 nt, Artificial Sequence
  Description of Artificial Sequence: Synthetic oligonucleotide
gccgaaauccagucccuga

SEQ ID NO: 651053 - RNA, 19 nt, Artificial Sequence
  Description of Artificial Sequence: Synthetic oligonucleotide
aggacccucuccacuaaau

SEQ ID NO: 651054 - RNA, 19 nt, Artificial Sequence
  Description of Artificial Sequence: Synthetic oligonucleotide
uguguacaagaggggcaua

SEQ ID NO: 651055 - RNA, 19 nt, Artificial Sequence
  Description of Artificial Sequence: Synthetic oligonucleotide
cuaggaagugacccauagu

SEQ ID NO: 651056 - RNA, 19 nt, Artificial Sequence
  Description of Artificial Sequence: Synthetic oligonucleotide
cagcuacgguagcagucug

SEQ ID NO: 651057 - RNA, 19 nt, Artificial Sequence
  Description of Artificial Sequence: Synthetic oligonucleotide
ccagagccgccccaggcag

SEQ ID NO: 651058 - RNA, 19 nt, Artificial Sequence
  Description of Artificial Sequence: Synthetic oligonucleotide
ugcucgcgcuggacauugc

SEQ ID NO: 651059 - RNA, 19 nt, Artificial Sequence
  Description of Artificial Sequence: Synthetic oligonucleotide
cgguugagucucuccaggg

SEQ ID NO: 651060 - RNA, 19 nt, Artificial Sequence
  Description of Artificial Sequence: Synthetic oligonucleotide
gcggagguauuuaggugag

SEQ ID NO: 651061 - RNA, 19 nt, Artificial Sequence
  Description of Artificial Sequence: Synthetic oligonucleotide
gucgggaugcccacccaca

SEQ ID NO: 651062 - RNA, 19 nt, Artificial Sequence
  Description of Artificial Sequence: Synthetic oligonucleotide
guaaaauugcggagguauu

SEQ ID NO: 651063 - RNA, 19 nt, Artificial Sequence
  Description of Artificial Sequence: Synthetic oligonucleotide
ggacccucuccacuaaaua

SEQ ID NO: 651064 - RNA, 19 nt, Artificial Sequence
  Description of Artificial Sequence: Synthetic oligonucleotide
cccucccuuggagagauug

SEQ ID NO: 651065 - RNA, 19 nt, Artificial Sequence
  Description of Artificial Sequence: Synthetic oligonucleotide
guguguacaagaggggcau

SEQ ID NO: 651066 - RNA, 19 nt, Artificial Sequence
  Description of Artificial Sequence: Synthetic oligonucleotide
guguacaagaggggcauau

SEQ ID NO: 651067 - RNA, 19 nt, Artificial Sequence
  Description of Artificial Sequence: Synthetic oligonucleotide
auccaacguaagaccuuug

SEQ ID NO: 651068 - RNA, 19 nt, Artificial Sequence
  Description of Artificial Sequence: Synthetic oligonucleotide
ugccuaggccaaguccauc

SEQ ID NO: 651069 - RNA, 19 nt, Artificial Sequence
  Description of Artificial Sequence: Synthetic oligonucleotide
cucgcgcuggacauugccu

SEQ ID NO: 651070 - RNA, 19 nt, Artificial Sequence
  Description of Artificial Sequence: Synthetic oligonucleotide
gcgacuacucugacucugc

SEQ ID NO: 651071 - RNA, 19 nt, Artificial Sequence
  Description of Artificial Sequence: Synthetic oligonucleotide
gcccucguggcagaagccc

SEQ ID NO: 651072 - RNA, 19 nt, Artificial Sequence
  Description of Artificial Sequence: Synthetic oligonucleotide
ggacucguccccacugcgc

SEQ ID NO: 651073 - RNA, 19 nt, Artificial Sequence
  Description of Artificial Sequence: Synthetic oligonucleotide
aguccacccugaacugugu

SEQ ID NO: 651074 - RNA, 19 nt, Artificial Sequence
  Description of Artificial Sequence: Synthetic oligonucleotide
ggacuccuuugcugaguug

SEQ ID NO: 651075 - RNA, 19 nt, Artificial Sequence
  Description of Artificial Sequence: Synthetic oligonucleotide
ccaugcuuguagcgggaac

SEQ ID NO: 651076 - RNA, 19 nt, Artificial Sequence
  Description of Artificial Sequence: Synthetic oligonucleotide
ggugugcccuguguuagga

SEQ ID NO: 651077 - RNA, 19 nt, Artificial Sequence
  Description of Artificial Sequence: Synthetic oligonucleotide
cccugagucuguugaccag

SEQ ID NO: 651078 - RNA, 19 nt, Artificial Sequence
  Description of Artificial Sequence: Synthetic oligonucleotide
ggcucuaaaugaacuugaa

SEQ ID NO: 651079 - RNA, 19 nt, Artificial Sequence
  Description of Artificial Sequence: Synthetic oligonucleotide
cgacaaaauagcagccaca

SEQ ID NO: 651080 - RNA, 19 nt, Artificial Sequence
  Description of Artificial Sequence: Synthetic oligonucleotide
ggagagauuggcagaaauu

SEQ ID NO: 651081 - RNA, 19 nt, Artificial Sequence
  Description of Artificial Sequence: Synthetic oligonucleotide
ggccgaaauccagucccug

SEQ ID NO: 651082 - RNA, 19 nt, Artificial Sequence
  Description of Artificial Sequence: Synthetic oligonucleotide
gaggccgguugagucucuc

SEQ ID NO: 651083 - RNA, 19 nt, Artificial Sequence
  Description of Artificial Sequence: Synthetic oligonucleotide
gggcuacugcuacaaggaa

SEQ ID NO: 651084 - RNA, 19 nt, Artificial Sequence
  Description of Artificial Sequence: Synthetic oligonucleotide
gcucacuaacaaggccacc

SEQ ID NO: 651085 - RNA, 19 nt, Artificial Sequence
  Description of Artificial Sequence: Synthetic oligonucleotide
gggaggccgguugagucuc

SEQ ID NO: 651086 - RNA, 19 nt, Artificial Sequence
  Description of Artificial Sequence: Synthetic oligonucleotide
agaggggcauauagccgua

SEQ ID NO: 651087 - RNA, 19 nt, Artificial Sequence
  Description of Artificial Sequence: Synthetic oligonucleotide
cccagauaggagcauugua

SEQ ID NO: 651088 - RNA, 19 nt, Artificial Sequence
  Description of Artificial Sequence: Synthetic oligonucleotide
cggaaaaguccaccucgac

SEQ ID NO: 651089 - RNA, 19 nt, Artificial Sequence
  Description of Artificial Sequence: Synthetic oligonucleotide
acugcucgcgcuggacauu

SEQ ID NO: 651090 - RNA, 19 nt, Artificial Sequence
  Description of Artificial Sequence: Synthetic oligonucleotide
cgcgcuggacauugccucc

SEQ ID NO: 651091 - RNA, 19 nt, Artificial Sequence
  Description of Artificial Sequence: Synthetic oligonucleotide
cugggaaccuugggagcga

SEQ ID NO: 651092 - RNA, 19 nt, Artificial Sequence
  Description of Artificial Sequence: Synthetic oligonucleotide
ccaggugugcccuguguua

SEQ ID NO: 651093 - RNA, 19 nt, Artificial Sequence
  Description of Artificial Sequence: Synthetic oligonucleotide
cucgacgucacgggagagu

SEQ ID NO: 651094 - RNA, 19 nt, Artificial Sequence
  Description of Artificial Sequence: Synthetic oligonucleotide
cccacugcgcagccuccag

SEQ ID NO: 651095 - RNA, 19 nt, Artificial Sequence
  Description of Artificial Sequence: Synthetic oligonucleotide
ccuagcuccccaacccaaa

SEQ ID NO: 651096 - RNA, 19 nt, Artificial Sequence
  Description of Artificial Sequence: Synthetic oligonucleotide
gguagcagucugugacagu

SEQ ID NO: 651097 - RNA, 19 nt, Artificial Sequence
  Description of Artificial Sequence: Synthetic oligonucleotide
cuacucugacucugcucau

SEQ ID NO: 651098 - RNA, 19 nt, Artificial Sequence
  Description of Artificial Sequence: Synthetic oligonucleotide
gggcaucggaaaaguccac

SEQ ID NO: 651099 - RNA, 19 nt, Artificial Sequence
  Description of Artificial Sequence: Synthetic oligonucleotide
gcauguccccuagcucccc

SEQ ID NO: 651100 - RNA, 19 nt, Artificial Sequence
  Description of Artificial Sequence: Synthetic oligonucleotide
cccucuccacuaaauacau

SEQ ID NO: 651101 - RNA, 19 nt, Artificial Sequence
  Description of Artificial Sequence: Synthetic oligonucleotide
acgucacgggagaguucca

SEQ ID NO: 651102 - RNA, 19 nt, Artificial Sequence
  Description of Artificial Sequence: Synthetic oligonucleotide
cccuagcuccccaacccaa

SEQ ID NO: 651103 - RNA, 19 nt, Artificial Sequence
  Description of Artificial Sequence: Synthetic oligonucleotide
cggagguauuuaggugagg

SEQ ID NO: 651104 - RNA, 19 nt, Artificial Sequence
  Description of Artificial Sequence: Synthetic oligonucleotide
ccccuagcuccccaaccca

SEQ ID NO: 651105 - RNA, 19 nt, Artificial Sequence
  Description of Artificial Sequence: Synthetic oligonucleotide
gggcagacagauggacaaa

SEQ ID NO: 651106 - RNA, 19 nt, Artificial Sequence
  Description of Artificial Sequence: Synthetic oligonucleotide
gcuaccccuuuccacucuu

SEQ ID NO: 651107 - RNA, 19 nt, Artificial Sequence
  Description of Artificial Sequence: Synthetic oligonucleotide
caccccagauaggagcauu

SEQ ID NO: 651108 - RNA, 19 nt, Artificial Sequence
  Description of Artificial Sequence: Synthetic oligonucleotide
gccgcucauggaagugaga

SEQ ID NO: 651109 - RNA, 19 nt, Artificial Sequence
  Description of Artificial Sequence: Synthetic oligonucleotide
ccaccccaccaaauauaua

SEQ ID NO: 651110 - RNA, 19 nt, Artificial Sequence
  Description of Artificial Sequence: Synthetic oligonucleotide
cgcucauggaagugagagu

SEQ ID NO: 651111 - RNA, 19 nt, Artificial Sequence
  Description of Artificial Sequence: Synthetic oligonucleotide
gggccgaaauccagucccu

SEQ ID NO: 651112 - RNA, 19 nt, Artificial Sequence
  Description of Artificial Sequence: Synthetic oligonucleotide
gggaaccuugggagcgacu

SEQ ID NO: 651113 - RNA, 19 nt, Artificial Sequence
  Description of Artificial Sequence: Synthetic oligonucleotide
ccccagauaggagcauugu

SEQ ID NO: 651114 - RNA, 19 nt, Artificial Sequence
  Description of Artificial Sequence: Synthetic oligonucleotide
cgacuacucugacucugcu

SEQ ID NO: 651115 - RNA, 19 nt, Artificial Sequence
  Description of Artificial Sequence: Synthetic oligonucleotide
cgggaacaucaugcaagca

SEQ ID NO: 651116 - RNA, 19 nt, Artificial Sequence
  Description of Artificial Sequence: Synthetic oligonucleotide
caaguccauccugcuuauu

SEQ ID NO: 651117 - RNA, 19 nt, Artificial Sequence
  Description of Artificial Sequence: Synthetic oligonucleotide
caccaccaaugggccgaaa

SEQ ID NO: 651118 - RNA, 19 nt, Artificial Sequence
  Description of Artificial Sequence: Synthetic oligonucleotide
gcacggggucaaagggugu

SEQ ID NO: 651119 - RNA, 19 nt, Artificial Sequence
  Description of Artificial Sequence: Synthetic oligonucleotide
ggaggccgguugagucucu

SEQ ID NO: 651120 - RNA, 19 nt, Artificial Sequence
  Description of Artificial Sequence: Synthetic oligonucleotide
aaaguaauagggcuaagcg

SEQ ID NO: 651121 - RNA, 19 nt, Artificial Sequence
  Description of Artificial Sequence: Synthetic oligonucleotide
agggcuaucacauacaaac

SEQ ID NO: 651122 - RNA, 19 nt, Artificial Sequence
  Description of Artificial Sequence: Synthetic oligonucleotide
aaguaauagggcuaagcgc

SEQ ID NO: 651123 - RNA, 19 nt, Artificial Sequence
  Description of Artificial Sequence: Synthetic oligonucleotide
uaaagaauugccaagauua

SEQ ID NO: 651124 - RNA, 19 nt, Artificial Sequence
  Description of Artificial Sequence: Synthetic oligonucleotide
uuuaguacaaacaagcuuu

SEQ ID NO: 651125 - RNA, 19 nt, Artificial Sequence
  Description of Artificial Sequence: Synthetic oligonucleotide
auagcguaaacacauacuc

SEQ ID NO: 651126 - RNA, 19 nt, Artificial Sequence
  Description of Artificial Sequence: Synthetic oligonucleotide
auacgaacaacauauuaac

SEQ ID NO: 651127 - RNA, 19 nt, Artificial Sequence
  Description of Artificial Sequence: Synthetic oligonucleotide
ucggauaagccucugauag

SEQ ID NO: 651128 - RNA, 19 nt, Artificial Sequence
  Description of Artificial Sequence: Synthetic oligonucleotide
uuauauagcguaaacacau

SEQ ID NO: 651129 - RNA, 19 nt, Artificial Sequence
  Description of Artificial Sequence: Synthetic oligonucleotide
aacuuuauauagcguaaac

SEQ ID NO: 651130 - RNA, 19 nt, Artificial Sequence
  Description of Artificial Sequence: Synthetic oligonucleotide
ucuaguaucggauaagccu

SEQ ID NO: 651131 - RNA, 19 nt, Artificial Sequence
  Description of Artificial Sequence: Synthetic oligonucleotide
auauuaacaugaucgcugc

SEQ ID NO: 651132 - RNA, 19 nt, Artificial Sequence
  Description of Artificial Sequence: Synthetic oligonucleotide
uuaaacuuuauauagcgua

SEQ ID NO: 651133 - RNA, 19 nt, Artificial Sequence
  Description of Artificial Sequence: Synthetic oligonucleotide
auucuaguuacguuauggc

SEQ ID NO: 651134 - RNA, 19 nt, Artificial Sequence
  Description of Artificial Sequence: Synthetic oligonucleotide
aauguuuacgcucugcaau

SEQ ID NO: 651135 - RNA, 19 nt, Artificial Sequence
  Description of Artificial Sequence: Synthetic oligonucleotide
auauagcguaaacacauac

SEQ ID NO: 651136 - RNA, 19 nt, Artificial Sequence
  Description of Artificial Sequence: Synthetic oligonucleotide
uguaucugaauucaugggu

SEQ ID NO: 651137 - RNA, 19 nt, Artificial Sequence
  Description of Artificial Sequence: Synthetic oligonucleotide
ucugcaauuauucuaguua

SEQ ID NO: 651138 - RNA, 19 nt, Artificial Sequence
  Description of Artificial Sequence: Synthetic oligonucleotide
aacaaaaccuucaaggcug

SEQ ID NO: 651139 - RNA, 19 nt, Artificial Sequence
  Description of Artificial Sequence: Synthetic oligonucleotide
uuuggauaaacgcuggggu

SEQ ID NO: 651140 - RNA, 19 nt, Artificial Sequence
  Description of Artificial Sequence: Synthetic oligonucleotide
auagagaucuggcagccac

SEQ ID NO: 651141 - RNA, 19 nt, Artificial Sequence
  Description of Artificial Sequence: Synthetic oligonucleotide
aauacgaacaacauauuaa

SEQ ID NO: 651142 - RNA, 19 nt, Artificial Sequence
  Description of Artificial Sequence: Synthetic oligonucleotide
uuaauggagagcuguagug

SEQ ID NO: 651143 - RNA, 19 nt, Artificial Sequence
  Description of Artificial Sequence: Synthetic oligonucleotide
uuauuuucacccucgggag

SEQ ID NO: 651144 - RNA, 19 nt, Artificial Sequence
  Description of Artificial Sequence: Synthetic oligonucleotide
uggguuuucacacacuacu

SEQ ID NO: 651145 - RNA, 19 nt, Artificial Sequence
  Description of Artificial Sequence: Synthetic oligonucleotide
uuuuggauaaacgcugggg

SEQ ID NO: 651146 - RNA, 19 nt, Artificial Sequence
  Description of Artificial Sequence: Synthetic oligonucleotide
aacgcugggguacugacug

SEQ ID NO: 651147 - RNA, 19 nt, Artificial Sequence
  Description of Artificial Sequence: Synthetic oligonucleotide
uucggugaggcaauaaagc

SEQ ID NO: 651148 - RNA, 19 nt, Artificial Sequence
  Description of Artificial Sequence: Synthetic oligonucleotide
acgaacaacauauuaacau

SEQ ID NO: 651149 - RNA, 19 nt, Artificial Sequence
  Description of Artificial Sequence: Synthetic oligonucleotide
ugaagcuaaaacacuuuug

SEQ ID NO: 651150 - RNA, 19 nt, Artificial Sequence
  Description of Artificial Sequence: Synthetic oligonucleotide
uccggcuuuauuaaaugag

SEQ ID NO: 651151 - RNA, 19 nt, Artificial Sequence
  Description of Artificial Sequence: Synthetic oligonucleotide
aagaccugccuauacaggu

SEQ ID NO: 651152 - RNA, 19 nt, Artificial Sequence
  Description of Artificial Sequence: Synthetic oligonucleotide
aauuacuuacagauuccac

SEQ ID NO: 651153 - RNA, 19 nt, Artificial Sequence
  Description of Artificial Sequence: Synthetic oligonucleotide
aaguaagggccccgaaggc

SEQ ID NO: 651154 - RNA, 19 nt, Artificial Sequence
  Description of Artificial Sequence: Synthetic oligonucleotide
gaacucugaacucugugcc

SEQ ID NO: 651155 - RNA, 19 nt, Artificial Sequence
  Description of Artificial Sequence: Synthetic oligonucleotide
uaaacuuuauauagcguaa

SEQ ID NO: 651156 - RNA, 19 nt, Artificial Sequence
  Description of Artificial Sequence: Synthetic oligonucleotide
guaccgaaagaacucauag

SEQ ID NO: 651157 - RNA, 19 nt, Artificial Sequence
  Description of Artificial Sequence: Synthetic oligonucleotide
ugcaauuauucuaguuacg

SEQ ID NO: 651158 - RNA, 19 nt, Artificial Sequence
  Description of Artificial Sequence: Synthetic oligonucleotide
uauagcguaaacacauacu

SEQ ID NO: 651159 - RNA, 19 nt, Artificial Sequence
  Description of Artificial Sequence: Synthetic oligonucleotide
ucugauagcagcuccugug

SEQ ID NO: 651160 - RNA, 19 nt, Artificial Sequence
  Description of Artificial Sequence: Synthetic oligonucleotide
uuuguuuuaggagugguau

SEQ ID NO: 651161 - RNA, 19 nt, Artificial Sequence
  Description of Artificial Sequence: Synthetic oligonucleotide
cuaguaucggauaagccuc

SEQ ID NO: 651162 - RNA, 19 nt, Artificial Sequence
  Description of Artificial Sequence: Synthetic oligonucleotide
acaugaucgcugcaguuac

SEQ ID NO: 651163 - RNA, 19 nt, Artificial Sequence
  Description of Artificial Sequence: Synthetic oligonucleotide
gaaaguaauagggcuaagc

SEQ ID NO: 651164 - RNA, 19 nt, Artificial Sequence
  Description of Artificial Sequence: Synthetic oligonucleotide
auaaaauacgaacaacaua

SEQ ID NO: 651165 - RNA, 19 nt, Artificial Sequence
  Description of Artificial Sequence: Synthetic oligonucleotide
aagugauacaaaucauccu

SEQ ID NO: 651166 - RNA, 19 nt, Artificial Sequence
  Description of Artificial Sequence: Synthetic oligonucleotide
acaagugauacaaaucauc

SEQ ID NO: 651167 - RNA, 19 nt, Artificial Sequence
  Description of Artificial Sequence: Synthetic oligonucleotide
ucacaucagacagaauucg

SEQ ID NO: 651168 - RNA, 19 nt, Artificial Sequence
  Description of Artificial Sequence: Synthetic oligonucleotide
cugcaauuauucuaguuac

SEQ ID NO: 651169 - RNA, 19 nt, Artificial Sequence
  Description of Artificial Sequence: Synthetic oligonucleotide
uuaaagaauugccaagauu

SEQ ID NO: 651170 - RNA, 19 nt, Artificial Sequence
  Description of Artificial Sequence: Synthetic oligonucleotide
uccuauuucuuucaauguc

SEQ ID NO: 651171 - RNA, 19 nt, Artificial Sequence
  Description of Artificial Sequence: Synthetic oligonucleotide
agcguaaacacauacucau

SEQ ID NO: 651172 - RNA, 19 nt, Artificial Sequence
  Description of Artificial Sequence: Synthetic oligonucleotide
auuauucaguucucucgac

SEQ ID NO: 651173 - RNA, 19 nt, Artificial Sequence
  Description of Artificial Sequence: Synthetic oligonucleotide
ugaaucaguacuugccaug

SEQ ID NO: 651174 - RNA, 19 nt, Artificial Sequence
  Description of Artificial Sequence: Synthetic oligonucleotide
agacagaauucggugaggc

SEQ ID NO: 651175 - RNA, 19 nt, Artificial Sequence
  Description of Artificial Sequence: Synthetic oligonucleotide
uccuguaucugaauucaug

SEQ ID NO: 651176 - RNA, 19 nt, Artificial Sequence
  Description of Artificial Sequence: Synthetic oligonucleotide
uuauucaguucucucgacu

SEQ ID NO: 651177 - RNA, 19 nt, Artificial Sequence
  Description of Artificial Sequence: Synthetic oligonucleotide
ggaacaaaaccuucaaggc

SEQ ID NO: 651178 - RNA, 19 nt, Artificial Sequence
  Description of Artificial Sequence: Synthetic oligonucleotide
uacgaacaacauauuaaca

SEQ ID NO: 651179 - RNA, 19 nt, Artificial Sequence
  Description of Artificial Sequence: Synthetic oligonucleotide
ucugcugaguuuuggauaa

SEQ ID NO: 651180 - RNA, 19 nt, Artificial Sequence
  Description of Artificial Sequence: Synthetic oligonucleotide
aaauguuuacgcucugcaa

SEQ ID NO: 651181 - RNA, 19 nt, Artificial Sequence
  Description of Artificial Sequence: Synthetic oligonucleotide
cucauucuaaauguuuacg

SEQ ID NO: 651182 - RNA, 19 nt, Artificial Sequence
  Description of Artificial Sequence: Synthetic oligonucleotide
cuaguuacguuauggcagc

SEQ ID NO: 651183 - RNA, 19 nt, Artificial Sequence
  Description of Artificial Sequence: Synthetic oligonucleotide
uucuaguaucggauaagcc

SEQ ID NO: 651184 - RNA, 19 nt, Artificial Sequence
  Description of Artificial Sequence: Synthetic oligonucleotide
gaguuuuggauaaacgcug

SEQ ID NO: 651185 - RNA, 19 nt, Artificial Sequence
  Description of Artificial Sequence: Synthetic oligonucleotide
uuauuacuucauucaguag

SEQ ID NO: 651186 - RNA, 19 nt, Artificial Sequence
  Description of Artificial Sequence: Synthetic oligonucleotide
cuguaucugaauucauggg

SEQ ID NO: 651187 - RNA, 19 nt, Artificial Sequence
  Description of Artificial Sequence: Synthetic oligonucleotide
uaucggauaagccucugau

SEQ ID NO: 651188 - RNA, 19 nt, Artificial Sequence
  Description of Artificial Sequence: Synthetic oligonucleotide
aaaaccuucaaggcuggca

SEQ ID NO: 651189 - RNA, 19 nt, Artificial Sequence
  Description of Artificial Sequence: Synthetic oligonucleotide
uauacaggugucuacuaau

SEQ ID NO: 651190 - RNA, 19 nt, Artificial Sequence
  Description of Artificial Sequence: Synthetic oligonucleotide
ccuguaucugaauucaugg

SEQ ID NO: 651191 - RNA, 19 nt, Artificial Sequence
  Description of Artificial Sequence: Synthetic oligonucleotide
ucacuaaacagaaguugcu

SEQ ID NO: 651192 - RNA, 19 nt, Artificial Sequence
  Description of Artificial Sequence: Synthetic oligonucleotide
gcgaauuagcuguagaaag

SEQ ID NO: 651193 - RNA, 19 nt, Artificial Sequence
  Description of Artificial Sequence: Synthetic oligonucleotide
uauccuuaccuuccucucc

SEQ ID NO: 651194 - RNA, 19 nt, Artificial Sequence
  Description of Artificial Sequence: Synthetic oligonucleotide
agggcuaagcgccugaaga

SEQ ID NO: 651195 - RNA, 19 nt, Artificial Sequence
  Description of Artificial Sequence: Synthetic oligonucleotide
uuuccgaaggccgaggaga

SEQ ID NO: 651196 - RNA, 19 nt, Artificial Sequence
  Description of Artificial Sequence: Synthetic oligonucleotide
augagcaagcagcacugac

SEQ ID NO: 651197 - RNA, 19 nt, Artificial Sequence
  Description of Artificial Sequence: Synthetic oligonucleotide
uguggguuuucacacacua

SEQ ID NO: 651198 - RNA, 19 nt, Artificial Sequence
  Description of Artificial Sequence: Synthetic oligonucleotide
aaagaccugccuauacagg

SEQ ID NO: 651199 - RNA, 19 nt, Artificial Sequence
  Description of Artificial Sequence: Synthetic oligonucleotide
auggggcucaaucaguuug

SEQ ID NO: 651200 - RNA, 19 nt, Artificial Sequence
  Description of Artificial Sequence: Synthetic oligonucleotide
uagcguaaacacauacuca

SEQ ID NO: 651201 - RNA, 19 nt, Artificial Sequence
  Description of Artificial Sequence: Synthetic oligonucleotide
uaccgaaagaacucauagc

SEQ ID NO: 651202 - RNA, 19 nt, Artificial Sequence
  Description of Artificial Sequence: Synthetic oligonucleotide
auuaaaugagcaagcagca

SEQ ID NO: 651203 - RNA, 19 nt, Artificial Sequence
  Description of Artificial Sequence: Synthetic oligonucleotide
gugucuacuaauuucaggu

SEQ ID NO: 651204 - RNA, 19 nt, Artificial Sequence
  Description of Artificial Sequence: Synthetic oligonucleotide
uauucaguucucucgacuu

SEQ ID NO: 651205 - RNA, 19 nt, Artificial Sequence
  Description of Artificial Sequence: Synthetic oligonucleotide
uaauggagagcuguaguga

SEQ ID NO: 651206 - RNA, 19 nt, Artificial Sequence
  Description of Artificial Sequence: Synthetic oligonucleotide
cacaucagacagaauucgg

SEQ ID NO: 651207 - RNA, 19 nt, Artificial Sequence
  Description of Artificial Sequence: Synthetic oligonucleotide
augaucgcugcaguuacac

SEQ ID NO: 651208 - RNA, 19 nt, Artificial Sequence
  Description of Artificial Sequence: Synthetic oligonucleotide
uguucuaguaucggauaag

SEQ ID NO: 651209 - RNA, 19 nt, Artificial Sequence
  Description of Artificial Sequence: Synthetic oligonucleotide
ugauacaaaucauccuuuc

SEQ ID NO: 651210 - RNA, 19 nt, Artificial Sequence
  Description of Artificial Sequence: Synthetic oligonucleotide
aggacauucuuucuucagu

SEQ ID NO: 651211 - RNA, 19 nt, Artificial Sequence
  Description of Artificial Sequence: Synthetic oligonucleotide
aauugccaagauuauccuu

SEQ ID NO: 651212 - RNA, 19 nt, Artificial Sequence
  Description of Artificial Sequence: Synthetic oligonucleotide
uguccggcuuuauuaaaug

SEQ ID NO: 651213 - RNA, 19 nt, Artificial Sequence
  Description of Artificial Sequence: Synthetic oligonucleotide
cuugaaaguuggcucuugc

SEQ ID NO: 651214 - RNA, 19 nt, Artificial Sequence
  Description of Artificial Sequence: Synthetic oligonucleotide
uggauaaacgcugggguac

SEQ ID NO: 651215 - RNA, 19 nt, Artificial Sequence
  Description of Artificial Sequence: Synthetic oligonucleotide
uagaaaguaauagggcuaa

SEQ ID NO: 651216 - RNA, 19 nt, Artificial Sequence
  Description of Artificial Sequence: Synthetic oligonucleotide
auacucauuucccuuucca

SEQ ID NO: 651217 - RNA, 19 nt, Artificial Sequence
  Description of Artificial Sequence: Synthetic oligonucleotide
aguaagggccccgaaggcg

SEQ ID NO: 651218 - RNA, 19 nt, Artificial Sequence
  Description of Artificial Sequence: Synthetic oligonucleotide
ugucaacacagcgugguca

SEQ ID NO: 651219 - RNA, 19 nt, Artificial Sequence
  Description of Artificial Sequence: Synthetic oligonucleotide
cgaaagaacucauagcugc

SEQ ID NO: 651220 - RNA, 19 nt, Artificial Sequence
  Description of Artificial Sequence: Synthetic oligonucleotide
acauauuaacaugaucgcu

SEQ ID NO: 651221 - RNA, 19 nt, Artificial Sequence
  Description of Artificial Sequence: Synthetic oligonucleotide
uuauucuaguuacguuaug

SEQ ID NO: 651222 - RNA, 19 nt, Artificial Sequence
  Description of Artificial Sequence: Synthetic oligonucleotide
guucuaguaucggauaagc

SEQ ID NO: 651223 - RNA, 19 nt, Artificial Sequence
  Description of Artificial Sequence: Synthetic oligonucleotide
caggcuaaagccaucuguc

SEQ ID NO: 651224 - RNA, 19 nt, Artificial Sequence
  Description of Artificial Sequence: Synthetic oligonucleotide
auucggugaggcaauaaag

SEQ ID NO: 651225 - RNA, 19 nt, Artificial Sequence
  Description of Artificial Sequence: Synthetic oligonucleotide
aagccucaguaaguaaggg

SEQ ID NO: 651226 - RNA, 19 nt, Artificial Sequence
  Description of Artificial Sequence: Synthetic oligonucleotide
ugaagcuuucaaucccagc

SEQ ID NO: 651227 - RNA, 19 nt, Artificial Sequence
  Description of Artificial Sequence: Synthetic oligonucleotide
aguuuuggauaaacgcugg

SEQ ID NO: 651228 - RNA, 19 nt, Artificial Sequence
  Description of Artificial Sequence: Synthetic oligonucleotide
gaauuacuuacagauucca

SEQ ID NO: 651229 - RNA, 19 nt, Artificial Sequence
  Description of Artificial Sequence: Synthetic oligonucleotide
guagaaagagcucauucua

SEQ ID NO: 651230 - RNA, 19 nt, Artificial Sequence
  Description of Artificial Sequence: Synthetic oligonucleotide
uuccuaaagaccugccuau

SEQ ID NO: 651231 - RNA, 19 nt, Artificial Sequence
  Description of Artificial Sequence: Synthetic oligonucleotide
cuauuccuaaagaccugcc

SEQ ID NO: 651232 - RNA, 19 nt, Artificial Sequence
  Description of Artificial Sequence: Synthetic oligonucleotide
gaaaguuggcucuugcagu

SEQ ID NO: 651233 - RNA, 19 nt, Artificial Sequence
  Description of Artificial Sequence: Synthetic oligonucleotide
caggugucuacuaauuuca

SEQ ID NO: 651234 - RNA, 19 nt, Artificial Sequence
  Description of Artificial Sequence: Synthetic oligonucleotide
uuaaaugagcaagcagcac

SEQ ID NO: 651235 - RNA, 19 nt, Artificial Sequence
  Description of Artificial Sequence: Synthetic oligonucleotide
uuggauaaacgcuggggua

SEQ ID NO: 651236 - RNA, 19 nt, Artificial Sequence
  Description of Artificial Sequence: Synthetic oligonucleotide
cucacuuucuaugucuaug

SEQ ID NO: 651237 - RNA, 19 nt, Artificial Sequence
  Description of Artificial Sequence: Synthetic oligonucleotide
aaauucagccccacuuuca

SEQ ID NO: 651238 - RNA, 19 nt, Artificial Sequence
  Description of Artificial Sequence: Synthetic oligonucleotide
gcuaaagccaucugucaag

SEQ ID NO: 651239 - RNA, 19 nt, Artificial Sequence
  Description of Artificial Sequence: Synthetic oligonucleotide
ucaguaaguaagggccccg

SEQ ID NO: 651240 - RNA, 19 nt, Artificial Sequence
  Description of Artificial Sequence: Synthetic oligonucleotide
uucggaacucacuuucuau

SEQ ID NO: 651241 - RNA, 19 nt, Artificial Sequence
  Description of Artificial Sequence: Synthetic oligonucleotide
auccuuaccuuccucuccu

SEQ ID NO: 651242 - RNA, 19 nt, Artificial Sequence
  Description of Artificial Sequence: Synthetic oligonucleotide
aguuggaacaaaaccuuca

SEQ ID NO: 651243 - RNA, 19 nt, Artificial Sequence
  Description of Artificial Sequence: Synthetic oligonucleotide
uuucggaacucacuuucua

SEQ ID NO: 651244 - RNA, 19 nt, Artificial Sequence
  Description of Artificial Sequence: Synthetic oligonucleotide
ucagggauagggucucugu

SEQ ID NO: 651245 - RNA, 19 nt, Artificial Sequence
  Description of Artificial Sequence: Synthetic oligonucleotide
uccuagugacuuuuccugu

SEQ ID NO: 651246 - RNA, 19 nt, Artificial Sequence
  Description of Artificial Sequence: Synthetic oligonucleotide
ccacauaugcuucuaauuc

SEQ ID NO: 651247 - RNA, 19 nt, Artificial Sequence
  Description of Artificial Sequence: Synthetic oligonucleotide
cugggguacugacuggugc

SEQ ID NO: 651248 - RNA, 19 nt, Artificial Sequence
  Description of Artificial Sequence: Synthetic oligonucleotide
agauuauccuuaccuuccu

SEQ ID NO: 651249 - RNA, 19 nt, Artificial Sequence
  Description of Artificial Sequence: Synthetic oligonucleotide
acauaugcuucuaauuccu

SEQ ID NO: 651250 - RNA, 19 nt, Artificial Sequence
  Description of Artificial Sequence: Synthetic oligonucleotide
acacacuacuucuggcuug

SEQ ID NO: 651251 - RNA, 19 nt, Artificial Sequence
  Description of Artificial Sequence: Synthetic oligonucleotide
cauucuaaauguuuacgcu

SEQ ID NO: 651252 - RNA, 19 nt, Artificial Sequence
  Description of Artificial Sequence: Synthetic oligonucleotide
uggggcucaaucaguuuga

SEQ ID NO: 651253 - RNA, 19 nt, Artificial Sequence
  Description of Artificial Sequence: Synthetic oligonucleotide
agcguggucacuaaacaga

SEQ ID NO: 651254 - RNA, 19 nt, Artificial Sequence
  Description of Artificial Sequence: Synthetic oligonucleotide
auguuuacgcucugcaauu

SEQ ID NO: 651255 - RNA, 19 nt, Artificial Sequence
  Description of Artificial Sequence: Synthetic oligonucleotide
ugggucuacaggagacaag

SEQ ID NO: 651256 - RNA, 19 nt, Artificial Sequence
  Description of Artificial Sequence: Synthetic oligonucleotide
aggaacaaccaaaaucacu

SEQ ID NO: 651257 - RNA, 19 nt, Artificial Sequence
  Description of Artificial Sequence: Synthetic oligonucleotide
cagcguggucacuaaacag

SEQ ID NO: 651258 - RNA, 19 nt, Artificial Sequence
  Description of Artificial Sequence: Synthetic oligonucleotide
ugugaacauuauucaguuc

SEQ ID NO: 651259 - RNA, 19 nt, Artificial Sequence
  Description of Artificial Sequence: Synthetic oligonucleotide
uaguaucggauaagccucu

SEQ ID NO: 651260 - RNA, 19 nt, Artificial Sequence
  Description of Artificial Sequence: Synthetic oligonucleotide
augcuguccggcuuuauua

SEQ ID NO: 651261 - RNA, 19 nt, Artificial Sequence
  Description of Artificial Sequence: Synthetic oligonucleotide
uucaaggcuggcaggcuaa

SEQ ID NO: 651262 - RNA, 19 nt, Artificial Sequence
  Description of Artificial Sequence: Synthetic oligonucleotide
cugaguuucaaaguaccga

SEQ ID NO: 651263 - RNA, 19 nt, Artificial Sequence
  Description of Artificial Sequence: Synthetic oligonucleotide
uagggcuaagcgccugaag

SEQ ID NO: 651264 - RNA, 19 nt, Artificial Sequence
  Description of Artificial Sequence: Synthetic oligonucleotide
uuguuuuaggagugguaua

SEQ ID NO: 651265 - RNA, 19 nt, Artificial Sequence
  Description of Artificial Sequence: Synthetic oligonucleotide
cugacuggugcugaguuuc

SEQ ID NO: 651266 - RNA, 19 nt, Artificial Sequence
  Description of Artificial Sequence: Synthetic oligonucleotide
ccggcuuuauuaaaugagc

SEQ ID NO: 651267 - RNA, 19 nt, Artificial Sequence
  Description of Artificial Sequence: Synthetic oligonucleotide
aggcuaaagccaucuguca

SEQ ID NO: 651268 - RNA, 19 nt, Artificial Sequence
  Description of Artificial Sequence: Synthetic oligonucleotide
aacauggggcucaaucagu

SEQ ID NO: 651269 - RNA, 19 nt, Artificial Sequence
  Description of Artificial Sequence: Synthetic oligonucleotide
agaguuggaacaaaaccuu

SEQ ID NO: 651270 - RNA, 19 nt, Artificial Sequence
  Description of Artificial Sequence: Synthetic oligonucleotide
aggucaguuucugaaucag

SEQ ID NO: 651271 - RNA, 19 nt, Artificial Sequence
  Description of Artificial Sequence: Synthetic oligonucleotide
ugaauucauggguguuucu

SEQ ID NO: 651272 - RNA, 19 nt, Artificial Sequence
  Description of Artificial Sequence: Synthetic oligonucleotide
ugcuguccggcuuuauuaa

SEQ ID NO: 651273 - RNA, 19 nt, Artificial Sequence
  Description of Artificial Sequence: Synthetic oligonucleotide
cucaguaaguaagggcccc

SEQ ID NO: 651274 - RNA, 19 nt, Artificial Sequence
  Description of Artificial Sequence: Synthetic oligonucleotide
ugcuuaauggagagcugua

SEQ ID NO: 651275 - RNA, 19 nt, Artificial Sequence
  Description of Artificial Sequence: Synthetic oligonucleotide
ugccaagauuauccuuacc

SEQ ID NO: 651276 - RNA, 19 nt, Artificial Sequence
  Description of Artificial Sequence: Synthetic oligonucleotide
cugaauucauggguguuuc

SEQ ID NO: 651277 - RNA, 19 nt, Artificial Sequence
  Description of Artificial Sequence: Synthetic oligonucleotide
gacagaauucggugaggca

SEQ ID NO: 651278 - RNA, 19 nt, Artificial Sequence
  Description of Artificial Sequence: Synthetic oligonucleotide
ggauaagccucugauagca

SEQ ID NO: 651279 - RNA, 19 nt, Artificial Sequence
  Description of Artificial Sequence: Synthetic oligonucleotide
ugccuauacaggugucuac

SEQ ID NO: 651280 - RNA, 19 nt, Artificial Sequence
  Description of Artificial Sequence: Synthetic oligonucleotide
aaguuggcucuugcaguuc

SEQ ID NO: 651281 - RNA, 19 nt, Artificial Sequence
  Description of Artificial Sequence: Synthetic oligonucleotide
ugugccacccagaguugga

SEQ ID NO: 651282 - RNA, 19 nt, Artificial Sequence
  Description of Artificial Sequence: Synthetic oligonucleotide
cuuuaguacaaacaagcuu

SEQ ID NO: 651283 - RNA, 19 nt, Artificial Sequence
  Description of Artificial Sequence: Synthetic oligonucleotide
cugcagucgggcuagccuc

SEQ ID NO: 651284 - RNA, 19 nt, Artificial Sequence
  Description of Artificial Sequence: Synthetic oligonucleotide
ugaucgcugcaguuacaca

SEQ ID NO: 651285 - RNA, 19 nt, Artificial Sequence
  Description of Artificial Sequence: Synthetic oligonucleotide
gaaggcgaauuagcuguag

SEQ ID NO: 651286 - RNA, 19 nt, Artificial Sequence
  Description of Artificial Sequence: Synthetic oligonucleotide
gacaacugcagucgggcua

SEQ ID NO: 651287 - RNA, 19 nt, Artificial Sequence
  Description of Artificial Sequence: Synthetic oligonucleotide
cuuaauggagagcuguagu

SEQ ID NO: 651288 - RNA, 19 nt, Artificial Sequence
  Description of Artificial Sequence: Synthetic oligonucleotide
aucacuucauuguggcuuu

SEQ ID NO: 651289 - RNA, 19 nt, Artificial Sequence
  Description of Artificial Sequence: Synthetic oligonucleotide
guaggacauucuuucuuca

SEQ ID NO: 651290 - RNA, 19 nt, Artificial Sequence
  Description of Artificial Sequence: Synthetic oligonucleotide
aucggauaagccucugaua

SEQ ID NO: 651291 - RNA, 19 nt, Artificial Sequence
  Description of Artificial Sequence: Synthetic oligonucleotide
aguaaguaagggccccgaa

SEQ ID NO: 651292 - RNA, 19 nt, Artificial Sequence
  Description of Artificial Sequence: Synthetic oligonucleotide
gaaugagcaugagguagac

SEQ ID NO: 651293 - RNA, 19 nt, Artificial Sequence
  Description of Artificial Sequence: Synthetic oligonucleotide
ucgggcuagccucugcuua

SEQ ID NO: 651294 - RNA, 19 nt, Artificial Sequence
  Description of Artificial Sequence: Synthetic oligonucleotide
cuauacaggugucuacuaa

SEQ ID NO: 651295 - RNA, 19 nt, Artificial Sequence
  Description of Artificial Sequence: Synthetic oligonucleotide
acguuauggcagcaaaguu

SEQ ID NO: 651296 - RNA, 19 nt, Artificial Sequence
  Description of Artificial Sequence: Synthetic oligonucleotide
agucgggcuagccucugcu

SEQ ID NO: 651297 - RNA, 19 nt, Artificial Sequence
  Description of Artificial Sequence: Synthetic oligonucleotide
acguguagagggcucacua

SEQ ID NO: 651298 - RNA, 19 nt, Artificial Sequence
  Description of Artificial Sequence: Synthetic oligonucleotide
gaaucaguacuugccaugu

SEQ ID NO: 651299 - RNA, 19 nt, Artificial Sequence
  Description of Artificial Sequence: Synthetic oligonucleotide
ccuguaucuuuguuuuagg

SEQ ID NO: 651300 - RNA, 19 nt, Artificial Sequence
  Description of Artificial Sequence: Synthetic oligonucleotide
ggaacaaccaaaaucacuu

SEQ ID NO: 651301 - RNA, 19 nt, Artificial Sequence
  Description of Artificial Sequence: Synthetic oligonucleotide
agcagcagcagcagcagcu

SEQ ID NO: 651302 - RNA, 19 nt, Artificial Sequence
  Description of Artificial Sequence: Synthetic oligonucleotide
gguggugaaugauagagau

SEQ ID NO: 651303 - RNA, 19 nt, Artificial Sequence
  Description of Artificial Sequence: Synthetic oligonucleotide
ugucacguguagagggcuc

SEQ ID NO: 651304 - RNA, 19 nt, Artificial Sequence
  Description of Artificial Sequence: Synthetic oligonucleotide
uuccgaaggccgaggagau

SEQ ID NO: 651305 - RNA, 19 nt, Artificial Sequence
  Description of Artificial Sequence: Synthetic oligonucleotide
acacugguaggacauucuu

SEQ ID NO: 651306 - RNA, 19 nt, Artificial Sequence
  Description of Artificial Sequence: Synthetic oligonucleotide
caucaccaaaagucuguuc

SEQ ID NO: 651307 - RNA, 19 nt, Artificial Sequence
  Description of Artificial Sequence: Synthetic oligonucleotide
auaaacgcugggguacuga

SEQ ID NO: 651308 - RNA, 19 nt, Artificial Sequence
  Description of Artificial Sequence: Synthetic oligonucleotide
cacuuucuaugucuauguc

SEQ ID NO: 651309 - RNA, 19 nt, Artificial Sequence
  Description of Artificial Sequence: Synthetic oligonucleotide
ggguagcuagccuugcagc

SEQ ID NO: 651310 - RNA, 19 nt, Artificial Sequence
  Description of Artificial Sequence: Synthetic oligonucleotide
guccggcuuuauuaaauga

SEQ ID NO: 651311 - RNA, 19 nt, Artificial Sequence
  Description of Artificial Sequence: Synthetic oligonucleotide
caggccgcaucaagggugc

SEQ ID NO: 651312 - RNA, 19 nt, Artificial Sequence
  Description of Artificial Sequence: Synthetic oligonucleotide
ugacuggugcugaguuuca

SEQ ID NO: 651313 - RNA, 19 nt, Artificial Sequence
  Description of Artificial Sequence: Synthetic oligonucleotide
ccuuucggaacucacuuuc

SEQ ID NO: 651314 - RNA, 19 nt, Artificial Sequence
  Description of Artificial Sequence: Synthetic oligonucleotide
aaacgcugggguacugacu

SEQ ID NO: 651315 - RNA, 19 nt, Artificial Sequence
  Description of Artificial Sequence: Synthetic oligonucleotide
uuccuguaucugaauucau

SEQ ID NO: 651316 - RNA, 19 nt, Artificial Sequence
  Description of Artificial Sequence: Synthetic oligonucleotide
gauaaacgcugggguacug

SEQ ID NO: 651317 - RNA, 19 nt, Artificial Sequence
  Description of Artificial Sequence: Synthetic oligonucleotide
ugcagucgggcuagccucu

SEQ ID NO: 651318 - RNA, 19 nt, Artificial Sequence
  Description of Artificial Sequence: Synthetic oligonucleotide
aaguaccgaaagaacucau

SEQ ID NO: 651319 - RNA, 19 nt, Artificial Sequence
  Description of Artificial Sequence: Synthetic oligonucleotide
acucacuuucuaugucuau

SEQ ID NO: 651320 - RNA, 19 nt, Artificial Sequence
  Description of Artificial Sequence: Synthetic oligonucleotide
caggucaguuucugaauca

SEQ ID NO: 651321 - RNA, 19 nt, Artificial Sequence
  Description of Artificial Sequence: Synthetic oligonucleotide
uguuuacgcucugcaauua

SEQ ID NO: 651322 - RNA, 19 nt, Artificial Sequence
  Description of Artificial Sequence: Synthetic oligonucleotide
cugugccacccagaguugg

SEQ ID NO: 651323 - RNA, 19 nt, Artificial Sequence
  Description of Artificial Sequence: Synthetic oligonucleotide
auacaggugucuacuaauu

SEQ ID NO: 651324 - RNA, 19 nt, Artificial Sequence
  Description of Artificial Sequence: Synthetic oligonucleotide
aguuacguuauggcagcaa

SEQ ID NO: 651325 - RNA, 19 nt, Artificial Sequence
  Description of Artificial Sequence: Synthetic oligonucleotide
cuuaaagaauugccaagau

SEQ ID NO: 651326 - RNA, 19 nt, Artificial Sequence
  Description of Artificial Sequence: Synthetic oligonucleotide
gaccugccuauacaggugu

SEQ ID NO: 651327 - RNA, 19 nt, Artificial Sequence
  Description of Artificial Sequence: Synthetic oligonucleotide
aguaccgaaagaacucaua

SEQ ID NO: 651328 - RNA, 19 nt, Artificial Sequence
  Description of Artificial Sequence: Synthetic oligonucleotide
acugacuggugcugaguuu

SEQ ID NO: 651329 - RNA, 19 nt, Artificial Sequence
  Description of Artificial Sequence: Synthetic oligonucleotide
augucacguguagagggcu

SEQ ID NO: 651330 - RNA, 19 nt, Artificial Sequence
  Description of Artificial Sequence: Synthetic oligonucleotide
agaccugccuauacaggug

SEQ ID NO: 651331 - RNA, 19 nt, Artificial Sequence
  Description of Artificial Sequence: Synthetic oligonucleotide
ggcuaaagccaucugucaa

SEQ ID NO: 651332 - RNA, 19 nt, Artificial Sequence
  Description of Artificial Sequence: Synthetic oligonucleotide
uccuccgaagcaguuuauc

SEQ ID NO: 651333 - RNA, 19 nt, Artificial Sequence
  Description of Artificial Sequence: Synthetic oligonucleotide
ccucaucaccaaaagucug

SEQ ID NO: 651334 - RNA, 19 nt, Artificial Sequence
  Description of Artificial Sequence: Synthetic oligonucleotide
uguccucaaugugcagagc

SEQ ID NO: 651335 - RNA, 19 nt, Artificial Sequence
  Description of Artificial Sequence: Synthetic oligonucleotide
guggguuuucacacacuac

SEQ ID NO: 651336 - RNA, 19 nt, Artificial Sequence
  Description of Artificial Sequence: Synthetic oligonucleotide
caauuauucuaguuacguu

SEQ ID NO: 651337 - RNA, 19 nt, Artificial Sequence
  Description of Artificial Sequence: Synthetic oligonucleotide
gacaagugauacaaaucau

SEQ ID NO: 651338 - RNA, 19 nt, Artificial Sequence
  Description of Artificial Sequence: Synthetic oligonucleotide
caguuacacacugcaagga

SEQ ID NO: 651339 - RNA, 19 nt, Artificial Sequence
  Description of Artificial Sequence: Synthetic oligonucleotide
gauagagaucuggcagcca

SEQ ID NO: 651340 - RNA, 19 nt, Artificial Sequence
  Description of Artificial Sequence: Synthetic oligonucleotide
ggcgaauuagcuguagaaa

SEQ ID NO: 651341 - RNA, 19 nt, Artificial Sequence
  Description of Artificial Sequence: Synthetic oligonucleotide
gaauucggugaggcaauaa

SEQ ID NO: 651342 - RNA, 19 nt, Artificial Sequence
  Description of Artificial Sequence: Synthetic oligonucleotide
ggagggcuaucacauacaa

SEQ ID NO: 651343 - RNA, 19 nt, Artificial Sequence
  Description of Artificial Sequence: Synthetic oligonucleotide
uaguuacguuauggcagca

SEQ ID NO: 651344 - RNA, 19 nt, Artificial Sequence
  Description of Artificial Sequence: Synthetic oligonucleotide
gggcucaaucaguuugagc

SEQ ID NO: 651345 - RNA, 19 nt, Artificial Sequence
  Description of Artificial Sequence: Synthetic oligonucleotide
cccgaaggcgaauuagcug

SEQ ID NO: 651346 - RNA, 19 nt, Artificial Sequence
  Description of Artificial Sequence: Synthetic oligonucleotide
gccgcaucaagggugcugc

SEQ ID NO: 651347 - RNA, 19 nt, Artificial Sequence
  Description of Artificial Sequence: Synthetic oligonucleotide
aguagggcuuucaggugga

SEQ ID NO: 651348 - RNA, 19 nt, Artificial Sequence
  Description of Artificial Sequence: Synthetic oligonucleotide
gcaggcuaaagccaucugu

SEQ ID NO: 651349 - RNA, 19 nt, Artificial Sequence
  Description of Artificial Sequence: Synthetic oligonucleotide
gcaggccgcaucaagggug

SEQ ID NO: 651350 - RNA, 19 nt, Artificial Sequence
  Description of Artificial Sequence: Synthetic oligonucleotide
agcgccugaagaacucuga

SEQ ID NO: 651351 - RNA, 19 nt, Artificial Sequence
  Description of Artificial Sequence: Synthetic oligonucleotide
ggcuaagcgccugaagaac

SEQ ID NO: 651352 - RNA, 19 nt, Artificial Sequence
  Description of Artificial Sequence: Synthetic oligonucleotide
uuccuccgaagcaguuuau

SEQ ID NO: 651353 - RNA, 19 nt, Artificial Sequence
  Description of Artificial Sequence: Synthetic oligonucleotide
ccgaaggcgaauuagcugu

SEQ ID NO: 651354 - RNA, 19 nt, Artificial Sequence
  Description of Artificial Sequence: Synthetic oligonucleotide
auggagagcuguagugagu

SEQ ID NO: 651355 - RNA, 19 nt, Artificial Sequence
  Description of Artificial Sequence: Synthetic oligonucleotide
cagcagcagcagcagcagc

SEQ ID NO: 651356 - RNA, 19 nt, Artificial Sequence
  Description of Artificial Sequence: Synthetic oligonucleotide
gacaguagaaagagcucau

SEQ ID NO: 651357 - RNA, 19 nt, Artificial Sequence
  Description of Artificial Sequence: Synthetic oligonucleotide
caugaucgcugcaguuaca

SEQ ID NO: 651358 - RNA, 19 nt, Artificial Sequence
  Description of Artificial Sequence: Synthetic oligonucleotide
guuuacgcucugcaauuau

SEQ ID NO: 651359 - RNA, 19 nt, Artificial Sequence
  Description of Artificial Sequence: Synthetic oligonucleotide
acauacaaacucaguccua

SEQ ID NO: 651360 - RNA, 19 nt, Artificial Sequence
  Description of Artificial Sequence: Synthetic oligonucleotide
aggggcgguggccccagca

SEQ ID NO: 651361 - RNA, 19 nt, Artificial Sequence
  Description of Artificial Sequence: Synthetic oligonucleotide
gggcuaagcgccugaagaa

SEQ ID NO: 651362 - RNA, 19 nt, Artificial Sequence
  Description of Artificial Sequence: Synthetic oligonucleotide
gagggcuaucacauacaaa

SEQ ID NO: 651363 - RNA, 19 nt, Artificial Sequence
  Description of Artificial Sequence: Synthetic oligonucleotide
cugcaguuacacacugcaa

SEQ ID NO: 651364 - RNA, 19 nt, Artificial Sequence
  Description of Artificial Sequence: Synthetic oligonucleotide
cagcuuuccgaaggccgag

SEQ ID NO: 651365 - RNA, 19 nt, Artificial Sequence
  Description of Artificial Sequence: Synthetic oligonucleotide
cuguccggcuuuauuaaau

SEQ ID NO: 651366 - RNA, 19 nt, Artificial Sequence
  Description of Artificial Sequence: Synthetic oligonucleotide
auagggcuaagcgccugaa

SEQ ID NO: 651367 - RNA, 19 nt, Artificial Sequence
  Description of Artificial Sequence: Synthetic oligonucleotide
gguaccacacagauguagu

SEQ ID NO: 651368 - RNA, 19 nt, Artificial Sequence
  Description of Artificial Sequence: Synthetic oligonucleotide
cggcuuuauuaaaugagca

SEQ ID NO: 651369 - RNA, 19 nt, Artificial Sequence
  Description of Artificial Sequence: Synthetic oligonucleotide
cacacugguaggacauucu

SEQ ID NO: 651370 - RNA, 19 nt, Artificial Sequence
  Description of Artificial Sequence: Synthetic oligonucleotide
cccagcagcagcagcagca

SEQ ID NO: 651371 - RNA, 19 nt, Artificial Sequence
  Description of Artificial Sequence: Synthetic oligonucleotide
uccuuaccuuccucuccua

SEQ ID NO: 651372 - RNA, 19 nt, Artificial Sequence
  Description of Artificial Sequence: Synthetic oligonucleotide
uggccugaacauggggcuc

SEQ ID NO: 651373 - RNA, 19 nt, Artificial Sequence
  Description of Artificial Sequence: Synthetic oligonucleotide
ggcagugaaggugaauucu

SEQ ID NO: 651374 - RNA, 19 nt, Artificial Sequence
  Description of Artificial Sequence: Synthetic oligonucleotide
ggcuagccucugcuuaaug

SEQ ID NO: 651375 - RNA, 19 nt, Artificial Sequence
  Description of Artificial Sequence: Synthetic oligonucleotide
caguaaguaagggccccga

SEQ ID NO: 651376 - RNA, 19 nt, Artificial Sequence
  Description of Artificial Sequence: Synthetic oligonucleotide
ggccccgaaggcgaauuag

SEQ ID NO: 651377 - RNA, 19 nt, Artificial Sequence
  Description of Artificial Sequence: Synthetic oligonucleotide
acccucgggagggcuauca

SEQ ID NO: 651378 - RNA, 19 nt, Artificial Sequence
  Description of Artificial Sequence: Synthetic oligonucleotide
cugguaggacauucuuucu

SEQ ID NO: 651379 - RNA, 19 nt, Artificial Sequence
  Description of Artificial Sequence: Synthetic oligonucleotide
gccccgaaggcgaauuagc

SEQ ID NO: 651380 - RNA, 19 nt, Artificial Sequence
  Description of Artificial Sequence: Synthetic oligonucleotide
ggggcucaaucaguuugag

SEQ ID NO: 651381 - RNA, 19 nt, Artificial Sequence
  Description of Artificial Sequence: Synthetic oligonucleotide
guaauagggcuaagcgccu

SEQ ID NO: 651382 - RNA, 19 nt, Artificial Sequence
  Description of Artificial Sequence: Synthetic oligonucleotide
cucugauagcagcuccugu

SEQ ID NO: 651383 - RNA, 19 nt, Artificial Sequence
  Description of Artificial Sequence: Synthetic oligonucleotide
gccuauacaggugucuacu

SEQ ID NO: 651384 - RNA, 19 nt, Artificial Sequence
  Description of Artificial Sequence: Synthetic oligonucleotide
gcguggucacuaaacagaa

SEQ ID NO: 651385 - RNA, 19 nt, Artificial Sequence
  Description of Artificial Sequence: Synthetic oligonucleotide
ccagcagcagcagcagcag

SEQ ID NO: 651386 - RNA, 19 nt, Artificial Sequence
  Description of Artificial Sequence: Synthetic oligonucleotide
ccuauacaggugucuacua

SEQ ID NO: 651387 - RNA, 19 nt, Artificial Sequence
  Description of Artificial Sequence: Synthetic oligonucleotide
gggagggcuaucacauaca

SEQ ID NO: 651388 - RNA, 19 nt, Artificial Sequence
  Description of Artificial Sequence: Synthetic oligonucleotide
cacgcuucugucucucuuu

SEQ ID NO: 651389 - RNA, 19 nt, Artificial Sequence
  Description of Artificial Sequence: Synthetic oligonucleotide
guacugacuggugcugagu

SEQ ID NO: 651390 - RNA, 19 nt, Artificial Sequence
  Description of Artificial Sequence: Synthetic oligonucleotide
aagggccccgaaggcgaau

SEQ ID NO: 651391 - RNA, 19 nt, Artificial Sequence
  Description of Artificial Sequence: Synthetic oligonucleotide
gcgccugaagaacucugaa

SEQ ID NO: 651392 - RNA, 19 nt, Artificial Sequence
  Description of Artificial Sequence: Synthetic oligonucleotide
agggccccgaaggcgaauu

SEQ ID NO: 651393 - RNA, 19 nt, Artificial Sequence
  Description of Artificial Sequence: Synthetic oligonucleotide
ucacuucauuguggcuuuu

SEQ ID NO: 651394 - RNA, 19 nt, Artificial Sequence
  Description of Artificial Sequence: Synthetic oligonucleotide
guagcuagccuugcagcuu

SEQ ID NO: 651395 - RNA, 19 nt, Artificial Sequence
  Description of Artificial Sequence: Synthetic oligonucleotide
ggauaaacgcugggguacu

SEQ ID NO: 651396 - RNA, 19 nt, Artificial Sequence
  Description of Artificial Sequence: Synthetic oligonucleotide
agcuagccuugcagcuuga

SEQ ID NO: 651397 - RNA, 19 nt, Artificial Sequence
  Description of Artificial Sequence: Synthetic oligonucleotide
cccucgggagggcuaucac

SEQ ID NO: 651398 - RNA, 19 nt, Artificial Sequence
  Description of Artificial Sequence: Synthetic oligonucleotide
gucgggcuagccucugcuu

SEQ ID NO: 651399 - RNA, 19 nt, Artificial Sequence
  Description of Artificial Sequence: Synthetic oligonucleotide
cacguguagagggcucacu

SEQ ID NO: 651400 - RNA, 19 nt, Artificial Sequence
  Description of Artificial Sequence: Synthetic oligonucleotide
aggccgcaucaagggugcu

SEQ ID NO: 651401 - RNA, 19 nt, Artificial Sequence
  Description of Artificial Sequence: Synthetic oligonucleotide
gcguaaacacauacucauu

SEQ ID NO: 651402 - RNA, 19 nt, Artificial Sequence
  Description of Artificial Sequence: Synthetic oligonucleotide
ccccacuuucacacuggua

SEQ ID NO: 651403 - RNA, 19 nt, Artificial Sequence
  Description of Artificial Sequence: Synthetic oligonucleotide
cacccucgggagggcuauc

SEQ ID NO: 651404 - RNA, 19 nt, Artificial Sequence
  Description of Artificial Sequence: Synthetic oligonucleotide
gggccccgaaggcgaauua

SEQ ID NO: 651405 - RNA, 19 nt, Artificial Sequence
  Description of Artificial Sequence: Synthetic oligonucleotide
cgaaggcgaauuagcugua

SEQ ID NO: 651406 - RNA, 19 nt, Artificial Sequence
  Description of Artificial Sequence: Synthetic oligonucleotide
gcagcagcagcagcagcuu

SEQ ID NO: 651407 - RNA, 19 nt, Artificial Sequence
  Description of Artificial Sequence: Synthetic oligonucleotide
ccgcaucaagggugcugca

SEQ ID NO: 651408 - RNA, 19 nt, Artificial Sequence
  Description of Artificial Sequence: Synthetic oligonucleotide
gggcuagccucugcuuaau

SEQ ID NO: 651409 - RNA, 19 nt, Artificial Sequence
  Description of Artificial Sequence: Synthetic oligonucleotide
gcagugcaguguggguuuu

SEQ ID NO: 651410 - RNA, 19 nt, Artificial Sequence
  Description of Artificial Sequence: Synthetic oligonucleotide
aaaauaaccaacuauaggg

SEQ ID NO: 651411 - RNA, 19 nt, Artificial Sequence
  Description of Artificial Sequence: Synthetic oligonucleotide
auugcuauagagcacaugg

SEQ ID NO: 651412 - RNA, 19 nt, Artificial Sequence
  Description of Artificial Sequence: Synthetic oligonucleotide
aguuauguaagucauauug

SEQ ID NO: 651413 - RNA, 19 nt, Artificial Sequence
  Description of Artificial Sequence: Synthetic oligonucleotide
uaaguguucgcucagagcc

SEQ ID NO: 651414 - RNA, 19 nt, Artificial Sequence
  Description of Artificial Sequence: Synthetic oligonucleotide
uuuggguuccguuuaaugg

SEQ ID NO: 651415 - RNA, 19 nt, Artificial Sequence
  Description of Artificial Sequence: Synthetic oligonucleotide
uaacccuugauaaagguug

SEQ ID NO: 651416 - RNA, 19 nt, Artificial Sequence
  Description of Artificial Sequence: Synthetic oligonucleotide
cuugcaaccauccucauag

SEQ ID NO: 651417 - RNA, 19 nt, Artificial Sequence
  Description of Artificial Sequence: Synthetic oligonucleotide
auggauagcauccuuguac

SEQ ID NO: 651418 - RNA, 19 nt, Artificial Sequence
  Description of Artificial Sequence: Synthetic oligonucleotide
uuuuguauaguccuucaug

SEQ ID NO: 651419 - RNA, 19 nt, Artificial Sequence
  Description of Artificial Sequence: Synthetic oligonucleotide
aaucgaauucguccgcucc

SEQ ID NO: 651420 - RNA, 19 nt, Artificial Sequence
  Description of Artificial Sequence: Synthetic oligonucleotide
agauuaggcaaguugaaag

SEQ ID NO: 651421 - RNA, 19 nt, Artificial Sequence
  Description of Artificial Sequence: Synthetic oligonucleotide
gauuuaggaacucaagggc

SEQ ID NO: 651422 - RNA, 19 nt, Artificial Sequence
  Description of Artificial Sequence: Synthetic oligonucleotide
gauuaggcaaguugaaagg

SEQ ID NO: 651423 - RNA, 19 nt, Artificial Sequence
  Description of Artificial Sequence: Synthetic oligonucleotide
uacagauuaggcaaguuga

SEQ ID NO: 651424 - RNA, 19 nt, Artificial Sequence
  Description of Artificial Sequence: Synthetic oligonucleotide
guugaaucgaauucguccg

SEQ ID NO: 651425 - RNA, 19 nt, Artificial Sequence
  Description of Artificial Sequence: Synthetic oligonucleotide
aaauaggaauugccgauuc

SEQ ID NO: 651426 - RNA, 19 nt, Artificial Sequence
  Description of Artificial Sequence: Synthetic oligonucleotide
agacuuauuguagaaaugg

SEQ ID NO: 651427 - RNA, 19 nt, Artificial Sequence
  Description of Artificial Sequence: Synthetic oligonucleotide
caaguuaucaccgaauugc

SEQ ID NO: 651428 - RNA, 19 nt, Artificial Sequence
  Description of Artificial Sequence: Synthetic oligonucleotide
ugguguagcaggcagcucg

SEQ ID NO: 651429 - RNA, 19 nt, Artificial Sequence
  Description of Artificial Sequence: Synthetic oligonucleotide
aauaaccaacuauagggga

SEQ ID NO: 651430 - RNA, 19 nt, Artificial Sequence
  Description of Artificial Sequence: Synthetic oligonucleotide
ugucauaaugcuucaaggc

SEQ ID NO: 651431 - RNA, 19 nt, Artificial Sequence
  Description of Artificial Sequence: Synthetic oligonucleotide
uguauaguccuucauggcu

SEQ ID NO: 651432 - RNA, 19 nt, Artificial Sequence
  Description of Artificial Sequence: Synthetic oligonucleotide
aagaauucccuccccuccc

SEQ ID NO: 651433 - RNA, 19 nt, Artificial Sequence
  Description of Artificial Sequence: Synthetic oligonucleotide
uguauagugcuucauggcu

SEQ ID NO: 651434 - RNA, 19 nt, Artificial Sequence
  Description of Artificial Sequence: Synthetic oligonucleotide
uuuaaguguucgcucagag

SEQ ID NO: 651435 - RNA, 19 nt, Artificial Sequence
  Description of Artificial Sequence: Synthetic oligonucleotide
uugaguuggagguuauugg

SEQ ID NO: 651436 - RNA, 19 nt, Artificial Sequence
  Description of Artificial Sequence: Synthetic oligonucleotide
gaaaagcaaguuaucaccg

SEQ ID NO: 651437 - RNA, 19 nt, Artificial Sequence
  Description of Artificial Sequence: Synthetic oligonucleotide
cagaauagcacuguaaggc

SEQ ID NO: 651438 - RNA, 19 nt, Artificial Sequence
  Description of Artificial Sequence: Synthetic oligonucleotide
ucagaauagcacuguaagg

SEQ ID NO: 651439 - RNA, 19 nt, Artificial Sequence
  Description of Artificial Sequence: Synthetic oligonucleotide
uugaaauaggaauugccga

SEQ ID NO: 651440 - RNA, 19 nt, Artificial Sequence
  Description of Artificial Sequence: Synthetic oligonucleotide
aaauggauagcauccuugu

SEQ ID NO: 651441 - RNA, 19 nt, Artificial Sequence
  Description of Artificial Sequence: Synthetic oligonucleotide
uguauuuucgugcccaggu

SEQ ID NO: 651442 - RNA, 19 nt, Artificial Sequence
  Description of Artificial Sequence: Synthetic oligonucleotide
uauguaagucauauuggug

SEQ ID NO: 651443 - RNA, 19 nt, Artificial Sequence
  Description of Artificial Sequence: Synthetic oligonucleotide
aaggacgugggguaacaac

SEQ ID NO: 651444 - RNA, 19 nt, Artificial Sequence
  Description of Artificial Sequence: Synthetic oligonucleotide
uggggaucuaguuuaauug

SEQ ID NO: 651445 - RNA, 19 nt, Artificial Sequence
  Description of Artificial Sequence: Synthetic oligonucleotide
acucauaaucugcugcacc

SEQ ID NO: 651446 - RNA, 19 nt, Artificial Sequence
  Description of Artificial Sequence: Synthetic oligonucleotide
ugcuugauuaguuauguaa

SEQ ID NO: 651447 - RNA, 19 nt, Artificial Sequence
  Description of Artificial Sequence: Synthetic oligonucleotide
uuaguuauguaagucauau

SEQ ID NO: 651448 - RNA, 19 nt, Artificial Sequence
  Description of Artificial Sequence: Synthetic oligonucleotide
uaggaauugccgauucugg

SEQ ID NO: 651449 - RNA, 19 nt, Artificial Sequence
  Description of Artificial Sequence: Synthetic oligonucleotide
auguuuuaaacccucuuca

SEQ ID NO: 651450 - RNA, 19 nt, Artificial Sequence
  Description of Artificial Sequence: Synthetic oligonucleotide
cugucauaaugcuucaagg

SEQ ID NO: 651451 - RNA, 19 nt, Artificial Sequence
  Description of Artificial Sequence: Synthetic oligonucleotide
agagcgauugcuauagagc

SEQ ID NO: 651452 - RNA, 19 nt, Artificial Sequence
  Description of Artificial Sequence: Synthetic oligonucleotide
aggaauugccgauucuggc

SEQ ID NO: 651453 - RNA, 19 nt, Artificial Sequence
  Description of Artificial Sequence: Synthetic oligonucleotide
cauacugcccagaucaacc

SEQ ID NO: 651454 - RNA, 19 nt, Artificial Sequence
  Description of Artificial Sequence: Synthetic oligonucleotide
uucgaaccgauuuaggaac

SEQ ID NO: 651455 - RNA, 19 nt, Artificial Sequence
  Description of Artificial Sequence: Synthetic oligonucleotide
auaaccacgccugacuggc

SEQ ID NO: 651456 - RNA, 19 nt, Artificial Sequence
  Description of Artificial Sequence: Synthetic oligonucleotide
uuuaaacccucuucauagg

SEQ ID NO: 651457 - RNA, 19 nt, Artificial Sequence
  Description of Artificial Sequence: Synthetic oligonucleotide
uauuacgggguucuuuaag

SEQ ID NO: 651458 - RNA, 19 nt, Artificial Sequence
  Description of Artificial Sequence: Synthetic oligonucleotide
gaucuuguauuuucgugcc

SEQ ID NO: 651459 - RNA, 19 nt, Artificial Sequence
  Description of Artificial Sequence: Synthetic oligonucleotide
augaguucccgguagguag

SEQ ID NO: 651460 - RNA, 19 nt, Artificial Sequence
  Description of Artificial Sequence: Synthetic oligonucleotide
uucuaugaguucccgguag

SEQ ID NO: 651461 - RNA, 19 nt, Artificial Sequence
  Description of Artificial Sequence: Synthetic oligonucleotide
accgaauugcaaucagacc

SEQ ID NO: 651462 - RNA, 19 nt, Artificial Sequence
  Description of Artificial Sequence: Synthetic oligonucleotide
uuaauugccucagaauagc

SEQ ID NO: 651463 - RNA, 19 nt, Artificial Sequence
  Description of Artificial Sequence: Synthetic oligonucleotide
ucuaugaguucccgguagg

SEQ ID NO: 651464 - RNA, 19 nt, Artificial Sequence
  Description of Artificial Sequence: Synthetic oligonucleotide
ccgaauugcaaucagaccc

SEQ ID NO: 651465 - RNA, 19 nt, Artificial Sequence
  Description of Artificial Sequence: Synthetic oligonucleotide
ucgccuuuccacauuggcg

SEQ ID NO: 651466 - RNA, 19 nt, Artificial Sequence
  Description of Artificial Sequence: Synthetic oligonucleotide
uuaaacccucuucauaggu

SEQ ID NO: 651467 - RNA, 19 nt, Artificial Sequence
  Description of Artificial Sequence: Synthetic oligonucleotide
auaaagguuggcuccagcu

SEQ ID NO: 651468 - RNA, 19 nt, Artificial Sequence
  Description of Artificial Sequence: Synthetic oligonucleotide
aauaacccuugccccaguc

SEQ ID NO: 651469 - RNA, 19 nt, Artificial Sequence
  Description of Artificial Sequence: Synthetic oligonucleotide
aaaagcaaguuaucaccga

SEQ ID NO: 651470 - RNA, 19 nt, Artificial Sequence
  Description of Artificial Sequence: Synthetic oligonucleotide
guacagauuaggcaaguug

SEQ ID NO: 651471 - RNA, 19 nt, Artificial Sequence
  Description of Artificial Sequence: Synthetic oligonucleotide
uucuugaauaacccuugcc

SEQ ID NO: 651472 - RNA, 19 nt, Artificial Sequence
  Description of Artificial Sequence: Synthetic oligonucleotide
uuuuggguuccguuuaaug

SEQ ID NO: 651473 - RNA, 19 nt, Artificial Sequence
  Description of Artificial Sequence: Synthetic oligonucleotide
ucaugaauuuccucucugc

SEQ ID NO: 651474 - RNA, 19 nt, Artificial Sequence
  Description of Artificial Sequence: Synthetic oligonucleotide
auuacgggguucuuuaagu

SEQ ID NO: 651475 - RNA, 19 nt, Artificial Sequence
  Description of Artificial Sequence: Synthetic oligonucleotide
uauaaccacgccugacugg

SEQ ID NO: 651476 - RNA, 19 nt, Artificial Sequence
  Description of Artificial Sequence: Synthetic oligonucleotide
uuauugaaggacguggggu

SEQ ID NO: 651477 - RNA, 19 nt, Artificial Sequence
  Description of Artificial Sequence: Synthetic oligonucleotide
uagguagggucacugagca

SEQ ID NO: 651478 - RNA, 19 nt, Artificial Sequence
  Description of Artificial Sequence: Synthetic oligonucleotide
auuggcgaagggaagaggg

SEQ ID NO: 651479 - RNA, 19 nt, Artificial Sequence
  Description of Artificial Sequence: Synthetic oligonucleotide
ggcuucauguuuuaaaccc

SEQ ID NO: 651480 - RNA, 19 nt, Artificial Sequence
  Description of Artificial Sequence: Synthetic oligonucleotide
cuucugugcuauuacgggg

SEQ ID NO: 651481 - RNA, 19 nt, Artificial Sequence
  Description of Artificial Sequence: Synthetic oligonucleotide
gaaauggauagcauccuug

SEQ ID NO: 651482 - RNA, 19 nt, Artificial Sequence
  Description of Artificial Sequence: Synthetic oligonucleotide
caugcgugugcugagaggg

SEQ ID NO: 651483 - RNA, 19 nt, Artificial Sequence
  Description of Artificial Sequence: Synthetic oligonucleotide
ucugccagagacuuauugu

SEQ ID NO: 651484 - RNA, 19 nt, Artificial Sequence
  Description of Artificial Sequence: Synthetic oligonucleotide
augagucugucuuccuugc

SEQ ID NO: 651485 - RNA, 19 nt, Artificial Sequence
  Description of Artificial Sequence: Synthetic oligonucleotide
agaauagcacuguaaggca

SEQ ID NO: 651486 - RNA, 19 nt, Artificial Sequence
  Description of Artificial Sequence: Synthetic oligonucleotide
uguacugugccaucauaca

SEQ ID NO: 651487 - RNA, 19 nt, Artificial Sequence
  Description of Artificial Sequence: Synthetic oligonucleotide
ucugucgguaguccucucg

SEQ ID NO: 651488 - RNA, 19 nt, Artificial Sequence
  Description of Artificial Sequence: Synthetic oligonucleotide
aucgccuucucacacagcu

SEQ ID NO: 651489 - RNA, 19 nt, Artificial Sequence
  Description of Artificial Sequence: Synthetic oligonucleotide
uugaauaacccuugcccca

SEQ ID NO: 651490 - RNA, 19 nt, Artificial Sequence
  Description of Artificial Sequence: Synthetic oligonucleotide
uuuggcaaucugucgguag

SEQ ID NO: 651491 - RNA, 19 nt, Artificial Sequence
  Description of Artificial Sequence: Synthetic oligonucleotide
agaguagucaugauccggg

SEQ ID NO: 651492 - RNA, 19 nt, Artificial Sequence
  Description of Artificial Sequence: Synthetic oligonucleotide
uguaacccuugauaaaggu

SEQ ID NO: 651493 - RNA, 19 nt, Artificial Sequence
  Description of Artificial Sequence: Synthetic oligonucleotide
caccgaauugcaaucagac

SEQ ID NO: 651494 - RNA, 19 nt, Artificial Sequence
  Description of Artificial Sequence: Synthetic oligonucleotide
uguaccuuucuucuuugaa

SEQ ID NO: 651495 - RNA, 19 nt, Artificial Sequence
  Description of Artificial Sequence: Synthetic oligonucleotide
cuucugguacagauuaggc

SEQ ID NO: 651496 - RNA, 19 nt, Artificial Sequence
  Description of Artificial Sequence: Synthetic oligonucleotide
aucgaauucguccgcuccg

SEQ ID NO: 651497 - RNA, 19 nt, Artificial Sequence
  Description of Artificial Sequence: Synthetic oligonucleotide
ugagaguagucaugauccg

SEQ ID NO: 651498 - RNA, 19 nt, Artificial Sequence
  Description of Artificial Sequence: Synthetic oligonucleotide
auaggaauugccgauucug

SEQ ID NO: 651499 - RNA, 19 nt, Artificial Sequence
  Description of Artificial Sequence: Synthetic oligonucleotide
uuucuugaauaacccuugc

SEQ ID NO: 651500 - RNA, 19 nt, Artificial Sequence
  Description of Artificial Sequence: Synthetic oligonucleotide
accccguugaaucgaauuc

SEQ ID NO: 651501 - RNA, 19 nt, Artificial Sequence
  Description of Artificial Sequence: Synthetic oligonucleotide
ugccagagacuuauuguag

SEQ ID NO: 651502 - RNA, 19 nt, Artificial Sequence
  Description of Artificial Sequence: Synthetic oligonucleotide
uucgcucagagccugggga

SEQ ID NO: 651503 - RNA, 19 nt, Artificial Sequence
  Description of Artificial Sequence: Synthetic oligonucleotide
uugauuaguuauguaaguc

SEQ ID NO: 651504 - RNA, 19 nt, Artificial Sequence
  Description of Artificial Sequence: Synthetic oligonucleotide
cuugaguuggagguuauug

SEQ ID NO: 651505 - RNA, 19 nt, Artificial Sequence
  Description of Artificial Sequence: Synthetic oligonucleotide
cuuguaggcuucauuuccc

SEQ ID NO: 651506 - RNA, 19 nt, Artificial Sequence
  Description of Artificial Sequence: Synthetic oligonucleotide
ugaguucccgguagguagg

SEQ ID NO: 651507 - RNA, 19 nt, Artificial Sequence
  Description of Artificial Sequence: Synthetic oligonucleotide
uuaucaccgaauugcaauc

SEQ ID NO: 651508 - RNA, 19 nt, Artificial Sequence
  Description of Artificial Sequence: Synthetic oligonucleotide
gaucuaguuuaauugccuc

SEQ ID NO: 651509 - RNA, 19 nt, Artificial Sequence
  Description of Artificial Sequence: Synthetic oligonucleotide
ugugcuauuacgggguucu

SEQ ID NO: 651510 - RNA, 19 nt, Artificial Sequence
  Description of Artificial Sequence: Synthetic oligonucleotide
auaaccaacuauaggggag

SEQ ID NO: 651511 - RNA, 19 nt, Artificial Sequence
  Description of Artificial Sequence: Synthetic oligonucleotide
uuggcgaagggaagagggg

SEQ ID NO: 651512 - RNA, 19 nt, Artificial Sequence
  Description of Artificial Sequence: Synthetic oligonucleotide
cuguauagugcuucauggc

SEQ ID NO: 651513 - RNA, 19 nt, Artificial Sequence
  Description of Artificial Sequence: Synthetic oligonucleotide
ccaaggaggacacugagag

SEQ ID NO: 651514 - RNA, 19 nt, Artificial Sequence
  Description of Artificial Sequence: Synthetic oligonucleotide
ucauacagcgcugguaacc

SEQ ID NO: 651515 - RNA, 19 nt, Artificial Sequence
  Description of Artificial Sequence: Synthetic oligonucleotide
uauugaaggacguggggua

SEQ ID NO: 651516 - RNA, 19 nt, Artificial Sequence
  Description of Artificial Sequence: Synthetic oligonucleotide
gagaguagucaugauccgg

SEQ ID NO: 651517 - RNA, 19 nt, Artificial Sequence
  Description of Artificial Sequence: Synthetic oligonucleotide
uaagucauauugguggggu

SEQ ID NO: 651518 - RNA, 19 nt, Artificial Sequence
  Description of Artificial Sequence: Synthetic oligonucleotide
acuauaggggagcagccga

SEQ ID NO: 651519 - RNA, 19 nt, Artificial Sequence
  Description of Artificial Sequence: Synthetic oligonucleotide
uuacgggguucuuuaagug

SEQ ID NO: 651520 - RNA, 19 nt, Artificial Sequence
  Description of Artificial Sequence: Synthetic oligonucleotide
auauugguggggucuagcu

SEQ ID NO: 651521 - RNA, 19 nt, Artificial Sequence
  Description of Artificial Sequence: Synthetic oligonucleotide
aggauucaugaauuuccuc

SEQ ID NO: 651522 - RNA, 19 nt, Artificial Sequence
  Description of Artificial Sequence: Synthetic oligonucleotide
uccggaaccccguugaauc

SEQ ID NO: 651523 - RNA, 19 nt, Artificial Sequence
  Description of Artificial Sequence: Synthetic oligonucleotide
uuuccucucugccaaccug

SEQ ID NO: 651524 - RNA, 19 nt, Artificial Sequence
  Description of Artificial Sequence: Synthetic oligonucleotide
uguuucuuauucucuggaa

SEQ ID NO: 651525 - RNA, 19 nt, Artificial Sequence
  Description of Artificial Sequence: Synthetic oligonucleotide
ugcacagcugcuugauuag

SEQ ID NO: 651526 - RNA, 19 nt, Artificial Sequence
  Description of Artificial Sequence: Synthetic oligonucleotide
uccgagguggcgcuggaug

SEQ ID NO: 651527 - RNA, 19 nt, Artificial Sequence
  Description of Artificial Sequence: Synthetic oligonucleotide
cauagccugguccggaacc

SEQ ID NO: 651528 - RNA, 19 nt, Artificial Sequence
  Description of Artificial Sequence: Synthetic oligonucleotide
ugaauaacccuugccccag

SEQ ID NO: 651529 - RNA, 19 nt, Artificial Sequence
  Description of Artificial Sequence: Synthetic oligonucleotide
ucaccgaauugcaaucaga

SEQ ID NO: 651530 - RNA, 19 nt, Artificial Sequence
  Description of Artificial Sequence: Synthetic oligonucleotide
agggaagaauucccucccc

SEQ ID NO: 651531 - RNA, 19 nt, Artificial Sequence
  Description of Artificial Sequence: Synthetic oligonucleotide
caggcauguauaaauauaa

SEQ ID NO: 651532 - RNA, 19 nt, Artificial Sequence
  Description of Artificial Sequence: Synthetic oligonucleotide
auuaggcaaguugaaagga

SEQ ID NO: 651533 - RNA, 19 nt, Artificial Sequence
  Description of Artificial Sequence: Synthetic oligonucleotide
agcuuuuguauaguccuuc

SEQ ID NO: 651534 - RNA, 19 nt, Artificial Sequence
  Description of Artificial Sequence: Synthetic oligonucleotide
acuuauuguagaaauggau

SEQ ID NO: 651535 - RNA, 19 nt, Artificial Sequence
  Description of Artificial Sequence: Synthetic oligonucleotide
acuguaaggcaucaucgau

SEQ ID NO: 651536 - RNA, 19 nt, Artificial Sequence
  Description of Artificial Sequence: Synthetic oligonucleotide
aggucuagcgccuucuggu

SEQ ID NO: 651537 - RNA, 19 nt, Artificial Sequence
  Description of Artificial Sequence: Synthetic oligonucleotide
ucauguuuuaaacccucuu

SEQ ID NO: 651538 - RNA, 19 nt, Artificial Sequence
  Description of Artificial Sequence: Synthetic oligonucleotide
gcuugauuaguuauguaag

SEQ ID NO: 651539 - RNA, 19 nt, Artificial Sequence
  Description of Artificial Sequence: Synthetic oligonucleotide
cguugaaucgaauucgucc

SEQ ID NO: 651540 - RNA, 19 nt, Artificial Sequence
  Description of Artificial Sequence: Synthetic oligonucleotide
ucaaccccaaggaggacac

SEQ ID NO: 651541 - RNA, 19 nt, Artificial Sequence
  Description of Artificial Sequence: Synthetic oligonucleotide
uauugguggggucuagcuc

SEQ ID NO: 651542 - RNA, 19 nt, Artificial Sequence
  Description of Artificial Sequence: Synthetic oligonucleotide
agcaaguuaucaccgaauu

SEQ ID NO: 651543 - RNA, 19 nt, Artificial Sequence
  Description of Artificial Sequence: Synthetic oligonucleotide
caacuauaggggagcagcc

SEQ ID NO: 651544 - RNA, 19 nt, Artificial Sequence
  Description of Artificial Sequence: Synthetic oligonucleotide
aucaccgaauugcaaucag

SEQ ID NO: 651545 - RNA, 19 nt, Artificial Sequence
  Description of Artificial Sequence: Synthetic oligonucleotide
uugcuauagagcacauggu

SEQ ID NO: 651546 - RNA, 19 nt, Artificial Sequence
  Description of Artificial Sequence: Synthetic oligonucleotide
ucuugcuccuucaggauuu

SEQ ID NO: 651547 - RNA, 19 nt, Artificial Sequence
  Description of Artificial Sequence: Synthetic oligonucleotide
aauggauagcauccuugua

SEQ ID NO: 651548 - RNA, 19 nt, Artificial Sequence
  Description of Artificial Sequence: Synthetic oligonucleotide
agucuugcaaccauccuca

SEQ ID NO: 651549 - RNA, 19 nt, Artificial Sequence
  Description of Artificial Sequence: Synthetic oligonucleotide
ugauccggggaucuuguau

SEQ ID NO: 651550 - RNA, 19 nt, Artificial Sequence
  Description of Artificial Sequence: Synthetic oligonucleotide
aaguuaucaccgaauugca

SEQ ID NO: 651551 - RNA, 19 nt, Artificial Sequence
  Description of Artificial Sequence: Synthetic oligonucleotide
agucauauugguggggucu

SEQ ID NO: 651552 - RNA, 19 nt, Artificial Sequence
  Description of Artificial Sequence: Synthetic oligonucleotide
aaccccguugaaucgaauu

SEQ ID NO: 651553 - RNA, 19 nt, Artificial Sequence
  Description of Artificial Sequence: Synthetic oligonucleotide
cuguucuaugaguucccgg

SEQ ID NO: 651554 - RNA, 19 nt, Artificial Sequence
  Description of Artificial Sequence: Synthetic oligonucleotide
uggggauccuuuugcaucu

SEQ ID NO: 651555 - RNA, 19 nt, Artificial Sequence
  Description of Artificial Sequence: Synthetic oligonucleotide
auagccugguccggaaccc

SEQ ID NO: 651556 - RNA, 19 nt, Artificial Sequence
  Description of Artificial Sequence: Synthetic oligonucleotide
cugucgguaguccucucgg

SEQ ID NO: 651557 - RNA, 19 nt, Artificial Sequence
  Description of Artificial Sequence: Synthetic oligonucleotide
cuucgaaccgauuuaggaa

SEQ ID NO: 651558 - RNA, 19 nt, Artificial Sequence
  Description of Artificial Sequence: Synthetic oligonucleotide
ucaugauccggggaucuug

SEQ ID NO: 651559 - RNA, 19 nt, Artificial Sequence
  Description of Artificial Sequence: Synthetic oligonucleotide
ucaaucgccuucucacaca

SEQ ID NO: 651560 - RNA, 19 nt, Artificial Sequence
  Description of Artificial Sequence: Synthetic oligonucleotide
agaucaaccccaaggagga

SEQ ID NO: 651561 - RNA, 19 nt, Artificial Sequence
  Description of Artificial Sequence: Synthetic oligonucleotide
uucccgguagguaggguca

SEQ ID NO: 651562 - RNA, 19 nt, Artificial Sequence
  Description of Artificial Sequence: Synthetic oligonucleotide
ucuagcgccuucugguaca

SEQ ID NO: 651563 - RNA, 19 nt, Artificial Sequence
  Description of Artificial Sequence: Synthetic oligonucleotide
cucaaucgccuucucacac

SEQ ID NO: 651564 - RNA, 19 nt, Artificial Sequence
  Description of Artificial Sequence: Synthetic oligonucleotide
acaagugaagacagcuggg

SEQ ID NO: 651565 - RNA, 19 nt, Artificial Sequence
  Description of Artificial Sequence: Synthetic oligonucleotide
caaucgccuucucacacag

SEQ ID NO: 651566 - RNA, 19 nt, Artificial Sequence
  Description of Artificial Sequence: Synthetic oligonucleotide
gcagccgagacagugacgg

SEQ ID NO: 651567 - RNA, 19 nt, Artificial Sequence
  Description of Artificial Sequence: Synthetic oligonucleotide
guaagucauauuggugggg

SEQ ID NO: 651568 - RNA, 19 nt, Artificial Sequence
  Description of Artificial Sequence: Synthetic oligonucleotide
ugguacacauccauagcuu

SEQ ID NO: 651569 - RNA, 19 nt, Artificial Sequence
  Description of Artificial Sequence: Synthetic oligonucleotide
ugucuguuguacugugcca

SEQ ID NO: 651570 - RNA, 19 nt, Artificial Sequence
  Description of Artificial Sequence: Synthetic oligonucleotide
uuguaggcuucauuuccca

SEQ ID NO: 651571 - RNA, 19 nt, Artificial Sequence
  Description of Artificial Sequence: Synthetic oligonucleotide
cucgccuuuccacauuggc

SEQ ID NO: 651572 - RNA, 19 nt, Artificial Sequence
  Description of Artificial Sequence: Synthetic oligonucleotide
uaucaccgaauugcaauca

SEQ ID NO: 651573 - RNA, 19 nt, Artificial Sequence
  Description of Artificial Sequence: Synthetic oligonucleotide
ugguccggaaccccguuga

SEQ ID NO: 651574 - RNA, 19 nt, Artificial Sequence
  Description of Artificial Sequence: Synthetic oligonucleotide
auaacccuugccccaguca

SEQ ID NO: 651575 - RNA, 19 nt, Artificial Sequence
  Description of Artificial Sequence: Synthetic oligonucleotide
gacgugggguaacaacaag

SEQ ID NO: 651576 - RNA, 19 nt, Artificial Sequence
  Description of Artificial Sequence: Synthetic oligonucleotide
gcacuguaaggcaucaucg

SEQ ID NO: 651577 - RNA, 19 nt, Artificial Sequence
  Description of Artificial Sequence: Synthetic oligonucleotide
uuuccguguguaacccuug

SEQ ID NO: 651578 - RNA, 19 nt, Artificial Sequence
  Description of Artificial Sequence: Synthetic oligonucleotide
gauuaguuauguaagucau

SEQ ID NO: 651579 - RNA, 19 nt, Artificial Sequence
  Description of Artificial Sequence: Synthetic oligonucleotide
gaauucccuccccuccccg

SEQ ID NO: 651580 - RNA, 19 nt, Artificial Sequence
  Description of Artificial Sequence: Synthetic oligonucleotide
guucuggggaucuaguuua

SEQ ID NO: 651581 - RNA, 19 nt, Artificial Sequence
  Description of Artificial Sequence: Synthetic oligonucleotide
gcagugaagagaccaugcg

SEQ ID NO: 651582 - RNA, 19 nt, Artificial Sequence
  Description of Artificial Sequence: Synthetic oligonucleotide
agaaauggauagcauccuu

SEQ ID NO: 651583 - RNA, 19 nt, Artificial Sequence
  Description of Artificial Sequence: Synthetic oligonucleotide
ccaacuauaggggagcagc

SEQ ID NO: 651584 - RNA, 19 nt, Artificial Sequence
  Description of Artificial Sequence: Synthetic oligonucleotide
ucgaaccgauuuaggaacu

SEQ ID NO: 651585 - RNA, 19 nt, Artificial Sequence
  Description of Artificial Sequence: Synthetic oligonucleotide
guagguagggucacugagc

SEQ ID NO: 651586 - RNA, 19 nt, Artificial Sequence
  Description of Artificial Sequence: Synthetic oligonucleotide
accaugcgugugcugagag

SEQ ID NO: 651587 - RNA, 19 nt, Artificial Sequence
  Description of Artificial Sequence: Synthetic oligonucleotide
agcgccuucugguacacau

SEQ ID NO: 651588 - RNA, 19 nt, Artificial Sequence
  Description of Artificial Sequence: Synthetic oligonucleotide
ugaaucgaauucguccgcu

SEQ ID NO: 651589 - RNA, 19 nt, Artificial Sequence
  Description of Artificial Sequence: Synthetic oligonucleotide
acagugacggggcgugggg

SEQ ID NO: 651590 - RNA, 19 nt, Artificial Sequence
  Description of Artificial Sequence: Synthetic oligonucleotide
aggacgugggguaacaaca

SEQ ID NO: 651591 - RNA, 19 nt, Artificial Sequence
  Description of Artificial Sequence: Synthetic oligonucleotide
agacccacauccaucagcu

SEQ ID NO: 651592 - RNA, 19 nt, Artificial Sequence
  Description of Artificial Sequence: Synthetic oligonucleotide
guguaacccuugauaaagg

SEQ ID NO: 651593 - RNA, 19 nt, Artificial Sequence
  Description of Artificial Sequence: Synthetic oligonucleotide
gguucgcuuggcuucuucg

SEQ ID NO: 651594 - RNA, 19 nt, Artificial Sequence
  Description of Artificial Sequence: Synthetic oligonucleotide
cagcucgguuacuauacag

SEQ ID NO: 651595 - RNA, 19 nt, Artificial Sequence
  Description of Artificial Sequence: Synthetic oligonucleotide
aggcuucaggucaacaguc

SEQ ID NO: 651596 - RNA, 19 nt, Artificial Sequence
  Description of Artificial Sequence: Synthetic oligonucleotide
uguucgcucagagccuggg

SEQ ID NO: 651597 - RNA, 19 nt, Artificial Sequence
  Description of Artificial Sequence: Synthetic oligonucleotide
cuucugguagucuccuuuc

SEQ ID NO: 651598 - RNA, 19 nt, Artificial Sequence
  Description of Artificial Sequence: Synthetic oligonucleotide
cuugauuaguuauguaagu

SEQ ID NO: 651599 - RNA, 19 nt, Artificial Sequence
  Description of Artificial Sequence: Synthetic oligonucleotide
ugcuuuccguguguaaccc

SEQ ID NO: 651600 - RNA, 19 nt, Artificial Sequence
  Description of Artificial Sequence: Synthetic oligonucleotide
ggaauugccgauucuggca

SEQ ID NO: 651601 - RNA, 19 nt, Artificial Sequence
  Description of Artificial Sequence: Synthetic oligonucleotide
gcuaucaugucuguuguac

SEQ ID NO: 651602 - RNA, 19 nt, Artificial Sequence
  Description of Artificial Sequence: Synthetic oligonucleotide
aucaaccccaaggaggaca

SEQ ID NO: 651603 - RNA, 19 nt, Artificial Sequence
  Description of Artificial Sequence: Synthetic oligonucleotide
guagcuguucuaugaguuc

SEQ ID NO: 651604 - RNA, 19 nt, Artificial Sequence
  Description of Artificial Sequence: Synthetic oligonucleotide
gaaucgaauucguccgcuc

SEQ ID NO: 651605 - RNA, 19 nt, Artificial Sequence
  Description of Artificial Sequence: Synthetic oligonucleotide
aagcaaguuaucaccgaau

SEQ ID NO: 651606 - RNA, 19 nt, Artificial Sequence
  Description of Artificial Sequence: Synthetic oligonucleotide
gcaaguuaucaccgaauug

SEQ ID NO: 651607 - RNA, 19 nt, Artificial Sequence
  Description of Artificial Sequence: Synthetic oligonucleotide
ucuugcaaccauccucaua

SEQ ID NO: 651608 - RNA, 19 nt, Artificial Sequence
  Description of Artificial Sequence: Synthetic oligonucleotide
ggaacucaagggcugcugc

SEQ ID NO: 651609 - RNA, 19 nt, Artificial Sequence
  Description of Artificial Sequence: Synthetic oligonucleotide
aucaugucuguuguacugu

SEQ ID NO: 651610 - RNA, 19 nt, Artificial Sequence
  Description of Artificial Sequence: Synthetic oligonucleotide
cauauugguggggucuagc

SEQ ID NO: 651611 - RNA, 19 nt, Artificial Sequence
  Description of Artificial Sequence: Synthetic oligonucleotide
uguagcaggcagcucgguu

SEQ ID NO: 651612 - RNA, 19 nt, Artificial Sequence
  Description of Artificial Sequence: Synthetic oligonucleotide
uggcauaagcuuuggcaau

SEQ ID NO: 651613 - RNA, 19 nt, Artificial Sequence
  Description of Artificial Sequence: Synthetic oligonucleotide
agcgauugcuauagagcac

SEQ ID NO: 651614 - RNA, 19 nt, Artificial Sequence
  Description of Artificial Sequence: Synthetic oligonucleotide
uaugaguucccgguaggua

SEQ ID NO: 651615 - RNA, 19 nt, Artificial Sequence
  Description of Artificial Sequence: Synthetic oligonucleotide
aaucgccuucucacacagc

SEQ ID NO: 651616 - RNA, 19 nt, Artificial Sequence
  Description of Artificial Sequence: Synthetic oligonucleotide
guagucaugauccggggau

SEQ ID NO: 651617 - RNA, 19 nt, Artificial Sequence
  Description of Artificial Sequence: Synthetic oligonucleotide
acuauacaguuuggcaucu

SEQ ID NO: 651618 - RNA, 19 nt, Artificial Sequence
  Description of Artificial Sequence: Synthetic oligonucleotide
cuucaaggccaugucgaag

SEQ ID NO: 651619 - RNA, 19 nt, Artificial Sequence
  Description of Artificial Sequence: Synthetic oligonucleotide
caacagucuugcaaccauc

SEQ ID NO: 651620 - RNA, 19 nt, Artificial Sequence
  Description of Artificial Sequence: Synthetic oligonucleotide
uucgugcccaggucugaag

SEQ ID NO: 651621 - RNA, 19 nt, Artificial Sequence
  Description of Artificial Sequence: Synthetic oligonucleotide
ucauugcccuuguucuucu

SEQ ID NO: 651622 - RNA, 19 nt, Artificial Sequence
  Description of Artificial Sequence: Synthetic oligonucleotide
aaccacgccugacuggcuu

SEQ ID NO: 651623 - RNA, 19 nt, Artificial Sequence
  Description of Artificial Sequence: Synthetic oligonucleotide
ucgaauucguccgcuccgc

SEQ ID NO: 651624 - RNA, 19 nt, Artificial Sequence
  Description of Artificial Sequence: Synthetic oligonucleotide
gaauugccgauucuggcau

SEQ ID NO: 651625 - RNA, 19 nt, Artificial Sequence
  Description of Artificial Sequence: Synthetic oligonucleotide
agcucgguuacuauacagu

SEQ ID NO: 651626 - RNA, 19 nt, Artificial Sequence
  Description of Artificial Sequence: Synthetic oligonucleotide
aggggaaaagcaaguuauc

SEQ ID NO: 651627 - RNA, 19 nt, Artificial Sequence
  Description of Artificial Sequence: Synthetic oligonucleotide
cccguaugaacccacugcc

SEQ ID NO: 651628 - RNA, 19 nt, Artificial Sequence
  Description of Artificial Sequence: Synthetic oligonucleotide
agaccaugcgugugcugag

SEQ ID NO: 651629 - RNA, 19 nt, Artificial Sequence
  Description of Artificial Sequence: Synthetic oligonucleotide
caaccauccucauaggccu

SEQ ID NO: 651630 - RNA, 19 nt, Artificial Sequence
  Description of Artificial Sequence: Synthetic oligonucleotide
auaaucugcugcaccucag

SEQ ID NO: 651631 - RNA, 19 nt, Artificial Sequence
  Description of Artificial Sequence: Synthetic oligonucleotide
ucauauugguggggucuag

SEQ ID NO: 651632 - RNA, 19 nt, Artificial Sequence
  Description of Artificial Sequence: Synthetic oligonucleotide
cacuguaaggcaucaucga

SEQ ID NO: 651633 - RNA, 19 nt, Artificial Sequence
  Description of Artificial Sequence: Synthetic oligonucleotide
guaugaacccacugcccca

SEQ ID NO: 651634 - RNA, 19 nt, Artificial Sequence
  Description of Artificial Sequence: Synthetic oligonucleotide
ucaaggccaugucgaaguc

SEQ ID NO: 651635 - RNA, 19 nt, Artificial Sequence
  Description of Artificial Sequence: Synthetic oligonucleotide
cauuggcgaagggaagagg

SEQ ID NO: 651636 - RNA, 19 nt, Artificial Sequence
  Description of Artificial Sequence: Synthetic oligonucleotide
cguaugaacccacugcccc

SEQ ID NO: 651637 - RNA, 19 nt, Artificial Sequence
  Description of Artificial Sequence: Synthetic oligonucleotide
uaguuauguaagucauauu

SEQ ID NO: 651638 - RNA, 19 nt, Artificial Sequence
  Description of Artificial Sequence: Synthetic oligonucleotide
aaccaacuauaggggagca

SEQ ID NO: 651639 - RNA, 19 nt, Artificial Sequence
  Description of Artificial Sequence: Synthetic oligonucleotide
gguagggaagaauucccuc

SEQ ID NO: 651640 - RNA, 19 nt, Artificial Sequence
  Description of Artificial Sequence: Synthetic oligonucleotide
guucgcuuggcuucuucga

SEQ ID NO: 651641 - RNA, 19 nt, Artificial Sequence
  Description of Artificial Sequence: Synthetic oligonucleotide
aacucaagggcugcugcuu

SEQ ID NO: 651642 - RNA, 19 nt, Artificial Sequence
  Description of Artificial Sequence: Synthetic oligonucleotide
auucauugcccuuguucuu

SEQ ID NO: 651643 - RNA, 19 nt, Artificial Sequence
  Description of Artificial Sequence: Synthetic oligonucleotide
agcugcuugauuaguuaug

SEQ ID NO: 651644 - RNA, 19 nt, Artificial Sequence
  Description of Artificial Sequence: Synthetic oligonucleotide
gaauugcaaucagacccac

SEQ ID NO: 651645 - RNA, 19 nt, Artificial Sequence
  Description of Artificial Sequence: Synthetic oligonucleotide
ggcccgucgcuucacaucc

SEQ ID NO: 651646 - RNA, 19 nt, Artificial Sequence
  Description of Artificial Sequence: Synthetic oligonucleotide
gcuauuacgggguucuuua

SEQ ID NO: 651647 - RNA, 19 nt, Artificial Sequence
  Description of Artificial Sequence: Synthetic oligonucleotide
acacauccauagcuuuugu

SEQ ID NO: 651648 - RNA, 19 nt, Artificial Sequence
  Description of Artificial Sequence: Synthetic oligonucleotide
aaguguucgcucagagccu

SEQ ID NO: 651649 - RNA, 19 nt, Artificial Sequence
  Description of Artificial Sequence: Synthetic oligonucleotide
agucaugauccggggaucu

SEQ ID NO: 651650 - RNA, 19 nt, Artificial Sequence
  Description of Artificial Sequence: Synthetic oligonucleotide
auucguccgcuccgcguuc

SEQ ID NO: 651651 - RNA, 19 nt, Artificial Sequence
  Description of Artificial Sequence: Synthetic oligonucleotide
uccguguguaacccuugau

SEQ ID NO: 651652 - RNA, 19 nt, Artificial Sequence
  Description of Artificial Sequence: Synthetic oligonucleotide
acagauuaggcaaguugaa

SEQ ID NO: 651653 - RNA, 19 nt, Artificial Sequence
  Description of Artificial Sequence: Synthetic oligonucleotide
ccugggaucguucuccaac

SEQ ID NO: 651654 - RNA, 19 nt, Artificial Sequence
  Description of Artificial Sequence: Synthetic oligonucleotide
aauugccgauucuggcaua

SEQ ID NO: 651655 - RNA, 19 nt, Artificial Sequence
  Description of Artificial Sequence: Synthetic oligonucleotide
gucuagcgccuucugguac

SEQ ID NO: 651656 - RNA, 19 nt, Artificial Sequence
  Description of Artificial Sequence: Synthetic oligonucleotide
uaaccaucugcugccuccu

SEQ ID NO: 651657 - RNA, 19 nt, Artificial Sequence
  Description of Artificial Sequence: Synthetic oligonucleotide
auuaguuauguaagucaua

SEQ ID NO: 651658 - RNA, 19 nt, Artificial Sequence
  Description of Artificial Sequence: Synthetic oligonucleotide
gaguucccgguagguaggg

SEQ ID NO: 651659 - RNA, 19 nt, Artificial Sequence
  Description of Artificial Sequence: Synthetic oligonucleotide
ucugugcuauuacgggguu

SEQ ID NO: 651660 - RNA, 19 nt, Artificial Sequence
  Description of Artificial Sequence: Synthetic oligonucleotide
cuaguuuaauugccucaga

SEQ ID NO: 651661 - RNA, 19 nt, Artificial Sequence
  Description of Artificial Sequence: Synthetic oligonucleotide
gauccggggaucuuguauu

SEQ ID NO: 651662 - RNA, 19 nt, Artificial Sequence
  Description of Artificial Sequence: Synthetic oligonucleotide
uuuucgugcccaggucuga

SEQ ID NO: 651663 - RNA, 19 nt, Artificial Sequence
  Description of Artificial Sequence: Synthetic oligonucleotide
auagguucgcuuggcuucu

SEQ ID NO: 651664 - RNA, 19 nt, Artificial Sequence
  Description of Artificial Sequence: Synthetic oligonucleotide
accaacuauaggggagcag

SEQ ID NO: 651665 - RNA, 19 nt, Artificial Sequence
  Description of Artificial Sequence: Synthetic oligonucleotide
ucgcucagagccuggggau

SEQ ID NO: 651666 - RNA, 19 nt, Artificial Sequence
  Description of Artificial Sequence: Synthetic oligonucleotide
guguguaacccuugauaaa

SEQ ID NO: 651667 - RNA, 19 nt, Artificial Sequence
  Description of Artificial Sequence: Synthetic oligonucleotide
acagcgcugguaaccaucu

SEQ ID NO: 651668 - RNA, 19 nt, Artificial Sequence
  Description of Artificial Sequence: Synthetic oligonucleotide
cuuccauugguucuggcuu

SEQ ID NO: 651669 - RNA, 19 nt, Artificial Sequence
  Description of Artificial Sequence: Synthetic oligonucleotide
cagggucagccauggcccg

SEQ ID NO: 651670 - RNA, 19 nt, Artificial Sequence
  Description of Artificial Sequence: Synthetic oligonucleotide
gcuuuuguauaguccuuca

SEQ ID NO: 651671 - RNA, 19 nt, Artificial Sequence
  Description of Artificial Sequence: Synthetic oligonucleotide
accacgccugacuggcuug

SEQ ID NO: 651672 - RNA, 19 nt, Artificial Sequence
  Description of Artificial Sequence: Synthetic oligonucleotide
gccagagacuuauuguaga

SEQ ID NO: 651673 - RNA, 19 nt, Artificial Sequence
  Description of Artificial Sequence: Synthetic oligonucleotide
gcgauugcuauagagcaca

SEQ ID NO: 651674 - RNA, 19 nt, Artificial Sequence
  Description of Artificial Sequence: Synthetic oligonucleotide
gaacucaagggcugcugcu

SEQ ID NO: 651675 - RNA, 19 nt, Artificial Sequence
  Description of Artificial Sequence: Synthetic oligonucleotide
gaauucguccgcuccgcgu

SEQ ID NO: 651676 - RNA, 19 nt, Artificial Sequence
  Description of Artificial Sequence: Synthetic oligonucleotide
gauagcauccuuguaccuu

SEQ ID NO: 651677 - RNA, 19 nt, Artificial Sequence
  Description of Artificial Sequence: Synthetic oligonucleotide
ccccguaugaacccacugc

SEQ ID NO: 651678 - RNA, 19 nt, Artificial Sequence
  Description of Artificial Sequence: Synthetic oligonucleotide
cuuuaaguguucgcucaga

SEQ ID NO: 651679 - RNA, 19 nt, Artificial Sequence
  Description of Artificial Sequence: Synthetic oligonucleotide
gaguuggagguuauuggcu

SEQ ID NO: 651680 - RNA, 19 nt, Artificial Sequence
  Description of Artificial Sequence: Synthetic oligonucleotide
cucgccaccgucccagcuc

SEQ ID NO: 651681 - RNA, 19 nt, Artificial Sequence
  Description of Artificial Sequence: Synthetic oligonucleotide
gaaauaggaauugccgauu

SEQ ID NO: 651682 - RNA, 19 nt, Artificial Sequence
  Description of Artificial Sequence: Synthetic oligonucleotide
ccccguugaaucgaauucg

SEQ ID NO: 651683 - RNA, 19 nt, Artificial Sequence
  Description of Artificial Sequence: Synthetic oligonucleotide
aggcauguauaaauauaaa

SEQ ID NO: 651684 - RNA, 19 nt, Artificial Sequence
  Description of Artificial Sequence: Synthetic oligonucleotide
uagucaugauccggggauc

SEQ ID NO: 651685 - RNA, 19 nt, Artificial Sequence
  Description of Artificial Sequence: Synthetic oligonucleotide
guagggucacugagcagug

SEQ ID NO: 651686 - RNA, 19 nt, Artificial Sequence
  Description of Artificial Sequence: Synthetic oligonucleotide
gguuccguuuaauggcuuc

SEQ ID NO: 651687 - RNA, 19 nt, Artificial Sequence
  Description of Artificial Sequence: Synthetic oligonucleotide
gguguagcaggcagcucgg

SEQ ID NO: 651688 - RNA, 19 nt, Artificial Sequence
  Description of Artificial Sequence: Synthetic oligonucleotide
acgggguucuuuaaguguu

SEQ ID NO: 651689 - RNA, 19 nt, Artificial Sequence
  Description of Artificial Sequence: Synthetic oligonucleotide
uggcccgucgcuucacauc

SEQ ID NO: 651690 - RNA, 19 nt, Artificial Sequence
  Description of Artificial Sequence: Synthetic oligonucleotide
cucgguucucucugcccac

SEQ ID NO: 651691 - RNA, 19 nt, Artificial Sequence
  Description of Artificial Sequence: Synthetic oligonucleotide
ucuagcuccuuggcccugu

SEQ ID NO: 651692 - RNA, 19 nt, Artificial Sequence
  Description of Artificial Sequence: Synthetic oligonucleotide
cagauuaggcaaguugaaa

SEQ ID NO: 651693 - RNA, 19 nt, Artificial Sequence
  Description of Artificial Sequence: Synthetic oligonucleotide
uggcccugucauaaugcuu

SEQ ID NO: 651694 - RNA, 19 nt, Artificial Sequence
  Description of Artificial Sequence: Synthetic oligonucleotide
ugccuccuuacagcuggag

SEQ ID NO: 651695 - RNA, 19 nt, Artificial Sequence
  Description of Artificial Sequence: Synthetic oligonucleotide
ugggaucguucuccaacuu

SEQ ID NO: 651696 - RNA, 19 nt, Artificial Sequence
  Description of Artificial Sequence: Synthetic oligonucleotide
uuucgugcccaggucugaa

SEQ ID NO: 651697 - RNA, 19 nt, Artificial Sequence
  Description of Artificial Sequence: Synthetic oligonucleotide
ucgguucucucugcccacc

SEQ ID NO: 651698 - RNA, 19 nt, Artificial Sequence
  Description of Artificial Sequence: Synthetic oligonucleotide
gcuuggcuucuucgaaccg

SEQ ID NO: 651699 - RNA, 19 nt, Artificial Sequence
  Description of Artificial Sequence: Synthetic oligonucleotide
aggcagcucgguuacuaua

SEQ ID NO: 651700 - RNA, 19 nt, Artificial Sequence
  Description of Artificial Sequence: Synthetic oligonucleotide
ggcaaguugaaaggauuca

SEQ ID NO: 651701 - RNA, 19 nt, Artificial Sequence
  Description of Artificial Sequence: Synthetic oligonucleotide
cuauuacgggguucuuuaa

SEQ ID NO: 651702 - RNA, 19 nt, Artificial Sequence
  Description of Artificial Sequence: Synthetic oligonucleotide
gugaagagaccaugcgugu

SEQ ID NO: 651703 - RNA, 19 nt, Artificial Sequence
  Description of Artificial Sequence: Synthetic oligonucleotide
gccaagucaggguugauau

SEQ ID NO: 651704 - RNA, 19 nt, Artificial Sequence
  Description of Artificial Sequence: Synthetic oligonucleotide
uaaccacgccugacuggcu

SEQ ID NO: 651705 - RNA, 19 nt, Artificial Sequence
  Description of Artificial Sequence: Synthetic oligonucleotide
gagcacaucuggaguucug

SEQ ID NO: 651706 - RNA, 19 nt, Artificial Sequence
  Description of Artificial Sequence: Synthetic oligonucleotide
cagagacuuauuguagaaa

SEQ ID NO: 651707 - RNA, 19 nt, Artificial Sequence
  Description of Artificial Sequence: Synthetic oligonucleotide
uugccgauucuggcauaag

SEQ ID NO: 651708 - RNA, 19 nt, Artificial Sequence
  Description of Artificial Sequence: Synthetic oligonucleotide
ccguaugaacccacugccc

SEQ ID NO: 651709 - RNA, 19 nt, Artificial Sequence
  Description of Artificial Sequence: Synthetic oligonucleotide
aggguugauauaggccagu

SEQ ID NO: 651710 - RNA, 19 nt, Artificial Sequence
  Description of Artificial Sequence: Synthetic oligonucleotide
ucuggggaucuaguuuaau

SEQ ID NO: 651711 - RNA, 19 nt, Artificial Sequence
  Description of Artificial Sequence: Synthetic oligonucleotide
cugguccggaaccccguug

SEQ ID NO: 651712 - RNA, 19 nt, Artificial Sequence
  Description of Artificial Sequence: Synthetic oligonucleotide
auccggggaucuuguauuu

SEQ ID NO: 651713 - RNA, 19 nt, Artificial Sequence
  Description of Artificial Sequence: Synthetic oligonucleotide
cuggggaucuaguuuaauu

SEQ ID NO: 651714 - RNA, 19 nt, Artificial Sequence
  Description of Artificial Sequence: Synthetic oligonucleotide
cugugccaucauacagcgc

SEQ ID NO: 651715 - RNA, 19 nt, Artificial Sequence
  Description of Artificial Sequence: Synthetic oligonucleotide
cuuguuccguagcuguucu

SEQ ID NO: 651716 - RNA, 19 nt, Artificial Sequence
  Description of Artificial Sequence: Synthetic oligonucleotide
cuuuuguauaguccuucau

SEQ ID NO: 651717 - RNA, 19 nt, Artificial Sequence
  Description of Artificial Sequence: Synthetic oligonucleotide
uucguccgcuccgcguucc

SEQ ID NO: 651718 - RNA, 19 nt, Artificial Sequence
  Description of Artificial Sequence: Synthetic oligonucleotide
ccggggaucuuguauuuuc

SEQ ID NO: 651719 - RNA, 19 nt, Artificial Sequence
  Description of Artificial Sequence: Synthetic oligonucleotide
cuuuccguguguaacccuu

SEQ ID NO: 651720 - RNA, 19 nt, Artificial Sequence
  Description of Artificial Sequence: Synthetic oligonucleotide
auaggccuucugguagucu

SEQ ID NO: 651721 - RNA, 19 nt, Artificial Sequence
  Description of Artificial Sequence: Synthetic oligonucleotide
ugguaaccaucugcugccu

SEQ ID NO: 651722 - RNA, 19 nt, Artificial Sequence
  Description of Artificial Sequence: Synthetic oligonucleotide
ccggaaccccguugaaucg

SEQ ID NO: 651723 - RNA, 19 nt, Artificial Sequence
  Description of Artificial Sequence: Synthetic oligonucleotide
cagccgagacagugacggg

SEQ ID NO: 651724 - RNA, 19 nt, Artificial Sequence
  Description of Artificial Sequence: Synthetic oligonucleotide
cccagguagggaagaauuc

SEQ ID NO: 651725 - RNA, 19 nt, Artificial Sequence
  Description of Artificial Sequence: Synthetic oligonucleotide
caugauccggggaucuugu

SEQ ID NO: 651726 - RNA, 19 nt, Artificial Sequence
  Description of Artificial Sequence: Synthetic oligonucleotide
caaucagacccacauccau

SEQ ID NO: 651727 - RNA, 19 nt, Artificial Sequence
  Description of Artificial Sequence: Synthetic oligonucleotide
aaccaucugcugccuccuu

SEQ ID NO: 651728 - RNA, 19 nt, Artificial Sequence
  Description of Artificial Sequence: Synthetic oligonucleotide
guauagugcuucauggcuu

SEQ ID NO: 651729 - RNA, 19 nt, Artificial Sequence
  Description of Artificial Sequence: Synthetic oligonucleotide
ggaucuaguuuaauugccu

SEQ ID NO: 651730 - RNA, 19 nt, Artificial Sequence
  Description of Artificial Sequence: Synthetic oligonucleotide
gaucaaccccaaggaggac

SEQ ID NO: 651731 - RNA, 19 nt, Artificial Sequence
  Description of Artificial Sequence: Synthetic oligonucleotide
acgccugacuggcuuguuu

SEQ ID NO: 651732 - RNA, 19 nt, Artificial Sequence
  Description of Artificial Sequence: Synthetic oligonucleotide
ggccaugucgaagucuuuc

SEQ ID NO: 651733 - RNA, 19 nt, Artificial Sequence
  Description of Artificial Sequence: Synthetic oligonucleotide
cgaauugcaaucagaccca

SEQ ID NO: 651734 - RNA, 19 nt, Artificial Sequence
  Description of Artificial Sequence: Synthetic oligonucleotide
gcaggcauguauaaauaua

SEQ ID NO: 651735 - RNA, 19 nt, Artificial Sequence
  Description of Artificial Sequence: Synthetic oligonucleotide
uuguuccguagcuguucua

SEQ ID NO: 651736 - RNA, 19 nt, Artificial Sequence
  Description of Artificial Sequence: Synthetic oligonucleotide
ggcuucuucgaaccgauuu

SEQ ID NO: 651737 - RNA, 19 nt, Artificial Sequence
  Description of Artificial Sequence: Synthetic oligonucleotide
cauugcccuuguucuucuc

SEQ ID NO: 651738 - RNA, 19 nt, Artificial Sequence
  Description of Artificial Sequence: Synthetic oligonucleotide
gguucuggggaucuaguuu

SEQ ID NO: 651739 - RNA, 19 nt, Artificial Sequence
  Description of Artificial Sequence: Synthetic oligonucleotide
uggcaucuuuuggguuccg

SEQ ID NO: 651740 - RNA, 19 nt, Artificial Sequence
  Description of Artificial Sequence: Synthetic oligonucleotide
gucauauugguggggucua

SEQ ID NO: 651741 - RNA, 19 nt, Artificial Sequence
  Description of Artificial Sequence: Synthetic oligonucleotide
cugugcuauuacgggguuc

SEQ ID NO: 651742 - RNA, 19 nt, Artificial Sequence
  Description of Artificial Sequence: Synthetic oligonucleotide
gugccaucauacagcgcug

SEQ ID NO: 651743 - RNA, 19 nt, Artificial Sequence
  Description of Artificial Sequence: Synthetic oligonucleotide
ccagagacuuauuguagaa

SEQ ID NO: 651744 - RNA, 19 nt, Artificial Sequence
  Description of Artificial Sequence: Synthetic oligonucleotide
cuagcgccuucugguacac

SEQ ID NO: 651745 - RNA, 19 nt, Artificial Sequence
  Description of Artificial Sequence: Synthetic oligonucleotide
uggagguuauuggcuucau

SEQ ID NO: 651746 - RNA, 19 nt, Artificial Sequence
  Description of Artificial Sequence: Synthetic oligonucleotide
augauccggggaucuugua

SEQ ID NO: 651747 - RNA, 19 nt, Artificial Sequence
  Description of Artificial Sequence: Synthetic oligonucleotide
guguucgcucagagccugg

SEQ ID NO: 651748 - RNA, 19 nt, Artificial Sequence
  Description of Artificial Sequence: Synthetic oligonucleotide
gcucgguuacuauacaguu

SEQ ID NO: 651749 - RNA, 19 nt, Artificial Sequence
  Description of Artificial Sequence: Synthetic oligonucleotide
cucgguuacuauacaguuu

SEQ ID NO: 651750 - RNA, 19 nt, Artificial Sequence
  Description of Artificial Sequence: Synthetic oligonucleotide
gaauaacccuugccccagu

SEQ ID NO: 651751 - RNA, 19 nt, Artificial Sequence
  Description of Artificial Sequence: Synthetic oligonucleotide
ucccgguagguagggucac

SEQ ID NO: 651752 - RNA, 19 nt, Artificial Sequence
  Description of Artificial Sequence: Synthetic oligonucleotide
ccguguguaacccuugaua

SEQ ID NO: 651753 - RNA, 19 nt, Artificial Sequence
  Description of Artificial Sequence: Synthetic oligonucleotide
uccggggaucuuguauuuu

SEQ ID NO: 651754 - RNA, 19 nt, Artificial Sequence
  Description of Artificial Sequence: Synthetic oligonucleotide
accccagguagggaagaau

SEQ ID NO: 651755 - RNA, 19 nt, Artificial Sequence
  Description of Artificial Sequence: Synthetic oligonucleotide
ggcggcugcuuuccgugug

SEQ ID NO: 651756 - RNA, 19 nt, Artificial Sequence
  Description of Artificial Sequence: Synthetic oligonucleotide
cuaugaguucccgguaggu

SEQ ID NO: 651757 - RNA, 19 nt, Artificial Sequence
  Description of Artificial Sequence: Synthetic oligonucleotide
ccguuuaauggcuucugua

SEQ ID NO: 651758 - RNA, 19 nt, Artificial Sequence
  Description of Artificial Sequence: Synthetic oligonucleotide
ggagcagccgagacaguga

SEQ ID NO: 651759 - RNA, 19 nt, Artificial Sequence
  Description of Artificial Sequence: Synthetic oligonucleotide
gaggguccgagguggcgcu

SEQ ID NO: 651760 - RNA, 19 nt, Artificial Sequence
  Description of Artificial Sequence: Synthetic oligonucleotide
gccaugucgaagucuuucu

SEQ ID NO: 651761 - RNA, 19 nt, Artificial Sequence
  Description of Artificial Sequence: Synthetic oligonucleotide
cgguuacuauacaguuugg

SEQ ID NO: 651762 - RNA, 19 nt, Artificial Sequence
  Description of Artificial Sequence: Synthetic oligonucleotide
ggucuagcgccuucuggua

SEQ ID NO: 651763 - RNA, 19 nt, Artificial Sequence
  Description of Artificial Sequence: Synthetic oligonucleotide
cagggccuuauugcccuuc

SEQ ID NO: 651764 - RNA, 19 nt, Artificial Sequence
  Description of Artificial Sequence: Synthetic oligonucleotide
acacagcucccggcauuug

SEQ ID NO: 651765 - RNA, 19 nt, Artificial Sequence
  Description of Artificial Sequence: Synthetic oligonucleotide
cgaauucguccgcuccgcg

SEQ ID NO: 651766 - RNA, 19 nt, Artificial Sequence
  Description of Artificial Sequence: Synthetic oligonucleotide
ccauagccugguccggaac

SEQ ID NO: 651767 - RNA, 19 nt, Artificial Sequence
  Description of Artificial Sequence: Synthetic oligonucleotide
ggacgugggguaacaacaa

SEQ ID NO: 651768 - RNA, 19 nt, Artificial Sequence
  Description of Artificial Sequence: Synthetic oligonucleotide
augcgugugcugagagggu

SEQ ID NO: 651769 - RNA, 19 nt, Artificial Sequence
  Description of Artificial Sequence: Synthetic oligonucleotide
cacugagcaguguccuugu

SEQ ID NO: 651770 - RNA, 19 nt, Artificial Sequence
  Description of Artificial Sequence: Synthetic oligonucleotide
ccgguagguagggucacug

SEQ ID NO: 651771 - RNA, 19 nt, Artificial Sequence
  Description of Artificial Sequence: Synthetic oligonucleotide
cgcuccgcguucccaaccg

SEQ ID NO: 651772 - RNA, 19 nt, Artificial Sequence
  Description of Artificial Sequence: Synthetic oligonucleotide
gccuccuuacagcuggagu

SEQ ID NO: 651773 - RNA, 19 nt, Artificial Sequence
  Description of Artificial Sequence: Synthetic oligonucleotide
ccaggucuagcgccuucug

SEQ ID NO: 651774 - RNA, 19 nt, Artificial Sequence
  Description of Artificial Sequence: Synthetic oligonucleotide
gccaccgucccagcucgcc

SEQ ID NO: 651775 - RNA, 19 nt, Artificial Sequence
  Description of Artificial Sequence: Synthetic oligonucleotide
gggccuuauugcccuucuc

SEQ ID NO: 651776 - RNA, 19 nt, Artificial Sequence
  Description of Artificial Sequence: Synthetic oligonucleotide
ggaaccccguugaaucgaa

SEQ ID NO: 651777 - RNA, 19 nt, Artificial Sequence
  Description of Artificial Sequence: Synthetic oligonucleotide
ggcauaggcugcagagcga

SEQ ID NO: 651778 - RNA, 19 nt, Artificial Sequence
  Description of Artificial Sequence: Synthetic oligonucleotide
ggcgcuggaugagucuguc

SEQ ID NO: 651779 - RNA, 19 nt, Artificial Sequence
  Description of Artificial Sequence: Synthetic oligonucleotide
ccgauucuggcauaagcuu

SEQ ID NO: 651780 - RNA, 19 nt, Artificial Sequence
  Description of Artificial Sequence: Synthetic oligonucleotide
caggcagcucgguuacuau

SEQ ID NO: 651781 - RNA, 19 nt, Artificial Sequence
  Description of Artificial Sequence: Synthetic oligonucleotide
cuccccguaugaacccacu

SEQ ID NO: 651782 - RNA, 19 nt, Artificial Sequence
  Description of Artificial Sequence: Synthetic oligonucleotide
cccguugaaucgaauucgu

SEQ ID NO: 651783 - RNA, 19 nt, Artificial Sequence
  Description of Artificial Sequence: Synthetic oligonucleotide
aggguccgagguggcgcug

SEQ ID NO: 651784 - RNA, 19 nt, Artificial Sequence
  Description of Artificial Sequence: Synthetic oligonucleotide
cgggguucuuuaaguguuc

SEQ ID NO: 651785 - RNA, 19 nt, Artificial Sequence
  Description of Artificial Sequence: Synthetic oligonucleotide
guccggaaccccguugaau

SEQ ID NO: 651786 - RNA, 19 nt, Artificial Sequence
  Description of Artificial Sequence: Synthetic oligonucleotide
gcuuuccguguguaacccu

SEQ ID NO: 651787 - RNA, 19 nt, Artificial Sequence
  Description of Artificial Sequence: Synthetic oligonucleotide
ggggauccuuuugcaucug

SEQ ID NO: 651788 - RNA, 19 nt, Artificial Sequence
  Description of Artificial Sequence: Synthetic oligonucleotide
cagggcggcugcuuuccgu

SEQ ID NO: 651789 - RNA, 19 nt, Artificial Sequence
  Description of Artificial Sequence: Synthetic oligonucleotide
ccagggcggcugcuuuccg

SEQ ID NO: 651790 - RNA, 19 nt, Artificial Sequence
  Description of Artificial Sequence: Synthetic oligonucleotide
gguccggaaccccguugaa

SEQ ID NO: 651791 - RNA, 19 nt, Artificial Sequence
  Description of Artificial Sequence: Synthetic oligonucleotide
ccaagucaggguugauaua

SEQ ID NO: 651792 - RNA, 19 nt, Artificial Sequence
  Description of Artificial Sequence: Synthetic oligonucleotide
cgaaccgauuuaggaacuc

SEQ ID NO: 651793 - RNA, 19 nt, Artificial Sequence
  Description of Artificial Sequence: Synthetic oligonucleotide
gucuugcaaccauccucau

SEQ ID NO: 651794 - RNA, 19 nt, Artificial Sequence
  Description of Artificial Sequence: Synthetic oligonucleotide
cauaggcugcagagcgauu

SEQ ID NO: 651795 - RNA, 19 nt, Artificial Sequence
  Description of Artificial Sequence: Synthetic oligonucleotide
gucaugauccggggaucuu

SEQ ID NO: 651796 - RNA, 19 nt, Artificial Sequence
  Description of Artificial Sequence: Synthetic oligonucleotide
gcgcuggaugagucugucu

SEQ ID NO: 651797 - RNA, 19 nt, Artificial Sequence
  Description of Artificial Sequence: Synthetic oligonucleotide
cggaaccccguugaaucga

SEQ ID NO: 651798 - RNA, 19 nt, Artificial Sequence
  Description of Artificial Sequence: Synthetic oligonucleotide
cagugcugcucgccaccgu

SEQ ID NO: 651799 - RNA, 19 nt, Artificial Sequence
  Description of Artificial Sequence: Synthetic oligonucleotide
cccuccccguaugaaccca

SEQ ID NO: 651800 - RNA, 19 nt, Artificial Sequence
  Description of Artificial Sequence: Synthetic oligonucleotide
caaccccaaggaggacacu

SEQ ID NO: 651801 - RNA, 19 nt, Artificial Sequence
  Description of Artificial Sequence: Synthetic oligonucleotide
gugcuauuacgggguucuu

SEQ ID NO: 651802 - RNA, 19 nt, Artificial Sequence
  Description of Artificial Sequence: Synthetic oligonucleotide
guccgagguggcgcuggau

SEQ ID NO: 651803 - RNA, 19 nt, Artificial Sequence
  Description of Artificial Sequence: Synthetic oligonucleotide
ggguuccguuuaauggcuu

SEQ ID NO: 651804 - RNA, 19 nt, Artificial Sequence
  Description of Artificial Sequence: Synthetic oligonucleotide
cgauugcuauagagcacau

SEQ ID NO: 651805 - RNA, 19 nt, Artificial Sequence
  Description of Artificial Sequence: Synthetic oligonucleotide
ccuugaguuggagguuauu

SEQ ID NO: 651806 - RNA, 19 nt, Artificial Sequence
  Description of Artificial Sequence: Synthetic oligonucleotide
cgccaccgucccagcucgc

SEQ ID NO: 651807 - RNA, 19 nt, Artificial Sequence
  Description of Artificial Sequence: Synthetic oligonucleotide
cacgccugacuggcuuguu

SEQ ID NO: 651808 - RNA, 19 nt, Artificial Sequence
  Description of Artificial Sequence: Synthetic oligonucleotide
cccgguagguagggucacu

SEQ ID NO: 651809 - RNA, 19 nt, Artificial Sequence
  Description of Artificial Sequence: Synthetic oligonucleotide
gcccgucgcuucacauccu

SEQ ID NO: 651810 - RNA, 19 nt, Artificial Sequence
  Description of Artificial Sequence: Synthetic oligonucleotide
aauauaguuaaugaauagc

SEQ ID NO: 651811 - RNA, 19 nt, Artificial Sequence
  Description of Artificial Sequence: Synthetic oligonucleotide
gauaguaguaauccgagag

SEQ ID NO: 651812 - RNA, 19 nt, Artificial Sequence
  Description of Artificial Sequence: Synthetic oligonucleotide
auugcaacuauauguauuc

SEQ ID NO: 651813 - RNA, 19 nt, Artificial Sequence
  Description of Artificial Sequence: Synthetic oligonucleotide
uauuugagaauauaguuaa

SEQ ID NO: 651814 - RNA, 19 nt, Artificial Sequence
  Description of Artificial Sequence: Synthetic oligonucleotide
auaguaguaauccgagagc

SEQ ID NO: 651815 - RNA, 19 nt, Artificial Sequence
  Description of Artificial Sequence: Synthetic oligonucleotide
guagaagccagacagauac

SEQ ID NO: 651816 - RNA, 19 nt, Artificial Sequence
  Description of Artificial Sequence: Synthetic oligonucleotide
aauaguaccgugugcagcu

SEQ ID NO: 651817 - RNA, 19 nt, Artificial Sequence
  Description of Artificial Sequence: Synthetic oligonucleotide
ugcucuuccaauaguaccg

SEQ ID NO: 651818 - RNA, 19 nt, Artificial Sequence
  Description of Artificial Sequence: Synthetic oligonucleotide
uuauuugagaauauaguua

SEQ ID NO: 651819 - RNA, 19 nt, Artificial Sequence
  Description of Artificial Sequence: Synthetic oligonucleotide
ugugugaagaaucccaucu

SEQ ID NO: 651820 - RNA, 19 nt, Artificial Sequence
  Description of Artificial Sequence: Synthetic oligonucleotide
gaauauaguuaaugaauag

SEQ ID NO: 651821 - RNA, 19 nt, Artificial Sequence
  Description of Artificial Sequence: Synthetic oligonucleotide
uuagcauuaaggccggugc

SEQ ID NO: 651822 - RNA, 19 nt, Artificial Sequence
  Description of Artificial Sequence: Synthetic oligonucleotide
auugagaugacugcagagc

SEQ ID NO: 651823 - RNA, 19 nt, Artificial Sequence
  Description of Artificial Sequence: Synthetic oligonucleotide
acaaggacccuucuguccc

SEQ ID NO: 651824 - RNA, 19 nt, Artificial Sequence
  Description of Artificial Sequence: Synthetic oligonucleotide
cucgcuaccaggaauaaag

SEQ ID NO: 651825 - RNA, 19 nt, Artificial Sequence
  Description of Artificial Sequence: Synthetic oligonucleotide
cucuuauuugagaauauag

SEQ ID NO: 651826 - RNA, 19 nt, Artificial Sequence
  Description of Artificial Sequence: Synthetic oligonucleotide
accgugugcagcuucagcc

SEQ ID NO: 651827 - RNA, 19 nt, Artificial Sequence
  Description of Artificial Sequence: Synthetic oligonucleotide
ugaguggcuguccagaacc

SEQ ID NO: 651828 - RNA, 19 nt, Artificial Sequence
  Description of Artificial Sequence: Synthetic oligonucleotide
uugauaaacacaucucugu

SEQ ID NO: 651829 - RNA, 19 nt, Artificial Sequence
  Description of Artificial Sequence: Synthetic oligonucleotide
ugugaagaaucccaucuug

SEQ ID NO: 651830 - RNA, 19 nt, Artificial Sequence
  Description of Artificial Sequence: Synthetic oligonucleotide
agugaggcgugccaggacc

SEQ ID NO: 651831 - RNA, 19 nt, Artificial Sequence
  Description of Artificial Sequence: Synthetic oligonucleotide
ugaaguccaguucagcuug

SEQ ID NO: 651832 - RNA, 19 nt, Artificial Sequence
  Description of Artificial Sequence: Synthetic oligonucleotide
cuugcuuacaagcucacac

SEQ ID NO: 651833 - RNA, 19 nt, Artificial Sequence
  Description of Artificial Sequence: Synthetic oligonucleotide
ugaaggagagguuagugcu

SEQ ID NO: 651834 - RNA, 19 nt, Artificial Sequence
  Description of Artificial Sequence: Synthetic oligonucleotide
agaaugucaacagaauggg

SEQ ID NO: 651835 - RNA, 19 nt, Artificial Sequence
  Description of Artificial Sequence: Synthetic oligonucleotide
aacugcauuuggcuuuagc

SEQ ID NO: 651836 - RNA, 19 nt, Artificial Sequence
  Description of Artificial Sequence: Synthetic oligonucleotide
ugcaacuauauguauucag

SEQ ID NO: 651837 - RNA, 19 nt, Artificial Sequence
  Description of Artificial Sequence: Synthetic oligonucleotide
aacuauauguauucagaau

SEQ ID NO: 651838 - RNA, 19 nt, Artificial Sequence
  Description of Artificial Sequence: Synthetic oligonucleotide
aagacuguguuggucaggg

SEQ ID NO: 651839 - RNA, 19 nt, Artificial Sequence
  Description of Artificial Sequence: Synthetic oligonucleotide
caugcuauggucacuuugc

SEQ ID NO: 651840 - RNA, 19 nt, Artificial Sequence
  Description of Artificial Sequence: Synthetic oligonucleotide
aauauugcaacuauaugua

SEQ ID NO: 651841 - RNA, 19 nt, Artificial Sequence
  Description of Artificial Sequence: Synthetic oligonucleotide
acacgugacagguccaugc

SEQ ID NO: 651842 - RNA, 19 nt, Artificial Sequence
  Description of Artificial Sequence: Synthetic oligonucleotide
uuugcggugaugcugccgc

SEQ ID NO: 651843 - RNA, 19 nt, Artificial Sequence
  Description of Artificial Sequence: Synthetic oligonucleotide
uugagaugacugcagagca

SEQ ID NO: 651844 - RNA, 19 nt, Artificial Sequence
  Description of Artificial Sequence: Synthetic oligonucleotide
uuugccucccgacagugag

SEQ ID NO: 651845 - RNA, 19 nt, Artificial Sequence
  Description of Artificial Sequence: Synthetic oligonucleotide
ugagaggugccuaugcagc

SEQ ID NO: 651846 - RNA, 19 nt, Artificial Sequence
  Description of Artificial Sequence: Synthetic oligonucleotide
uugagauugagaugacugc

SEQ ID NO: 651847 - RNA, 19 nt, Artificial Sequence
  Description of Artificial Sequence: Synthetic oligonucleotide
gauugagaugacugcagag

SEQ ID NO: 651848 - RNA, 19 nt, Artificial Sequence
  Description of Artificial Sequence: Synthetic oligonucleotide
uuccugaauagacagcaca

SEQ ID NO: 651849 - RNA, 19 nt, Artificial Sequence
  Description of Artificial Sequence: Synthetic oligonucleotide
cagacagauaccaucguag

SEQ ID NO: 651850 - RNA, 19 nt, Artificial Sequence
  Description of Artificial Sequence: Synthetic oligonucleotide
uccaauaguaccgugugca

SEQ ID NO: 651851 - RNA, 19 nt, Artificial Sequence
  Description of Artificial Sequence: Synthetic oligonucleotide
ugucaccacccaaagagcc

SEQ ID NO: 651852 - RNA, 19 nt, Artificial Sequence
  Description of Artificial Sequence: Synthetic oligonucleotide
uuauacaaggacccuucug

SEQ ID NO: 651853 - RNA, 19 nt, Artificial Sequence
  Description of Artificial Sequence: Synthetic oligonucleotide
ugcuuacaagcucacacug

SEQ ID NO: 651854 - RNA, 19 nt, Artificial Sequence
  Description of Artificial Sequence: Synthetic oligonucleotide
ugauaaacacaucucuguc

SEQ ID NO: 651855 - RNA, 19 nt, Artificial Sequence
  Description of Artificial Sequence: Synthetic oligonucleotide
gugacaugcugccagagcc

SEQ ID NO: 651856 - RNA, 19 nt, Artificial Sequence
  Description of Artificial Sequence: Synthetic oligonucleotide
ucuuccaauaguaccgugu

SEQ ID NO: 651857 - RNA, 19 nt, Artificial Sequence
  Description of Artificial Sequence: Synthetic oligonucleotide
cagugagucccguagaacc

SEQ ID NO: 651858 - RNA, 19 nt, Artificial Sequence
  Description of Artificial Sequence: Synthetic oligonucleotide
ucuuauacaaggacccuuc

SEQ ID NO: 651859 - RNA, 19 nt, Artificial Sequence
  Description of Artificial Sequence: Synthetic oligonucleotide
uagcugacaugucaggaag

SEQ ID NO: 651860 - RNA, 19 nt, Artificial Sequence
  Description of Artificial Sequence: Synthetic oligonucleotide
ucucauaucgguagcgcca

SEQ ID NO: 651861 - RNA, 19 nt, Artificial Sequence
  Description of Artificial Sequence: Synthetic oligonucleotide
ucacucggaguccagaaga

SEQ ID NO: 651862 - RNA, 19 nt, Artificial Sequence
  Description of Artificial Sequence: Synthetic oligonucleotide
caacagaaugggaagacug

SEQ ID NO: 651863 - RNA, 19 nt, Artificial Sequence
  Description of Artificial Sequence: Synthetic oligonucleotide
cuggcuaugaccagagggc

SEQ ID NO: 651864 - RNA, 19 nt, Artificial Sequence
  Description of Artificial Sequence: Synthetic oligonucleotide
augucaacagaaugggaag

SEQ ID NO: 651865 - RNA, 19 nt, Artificial Sequence
  Description of Artificial Sequence: Synthetic oligonucleotide
guuagugcucccugaaggg

SEQ ID NO: 651866 - RNA, 19 nt, Artificial Sequence
  Description of Artificial Sequence: Synthetic oligonucleotide
uauucugcgaugucuuuca

SEQ ID NO: 651867 - RNA, 19 nt, Artificial Sequence
  Description of Artificial Sequence: Synthetic oligonucleotide
aauagcugacaugucagga

SEQ ID NO: 651868 - RNA, 19 nt, Artificial Sequence
  Description of Artificial Sequence: Synthetic oligonucleotide
uucucacaugcuaugguca

SEQ ID NO: 651869 - RNA, 19 nt, Artificial Sequence
  Description of Artificial Sequence: Synthetic oligonucleotide
uaguaguaauccgagagcu

SEQ ID NO: 651870 - RNA, 19 nt, Artificial Sequence
  Description of Artificial Sequence: Synthetic oligonucleotide
guaguaauccgagagcuug

SEQ ID NO: 651871 - RNA, 19 nt, Artificial Sequence
  Description of Artificial Sequence: Synthetic oligonucleotide
ugagauugagaugacugca

SEQ ID NO: 651872 - RNA, 19 nt, Artificial Sequence
  Description of Artificial Sequence: Synthetic oligonucleotide
caugggucgguguaaagug

SEQ ID NO: 651873 - RNA, 19 nt, Artificial Sequence
  Description of Artificial Sequence: Synthetic oligonucleotide
acuacucucggugaccugg

SEQ ID NO: 651874 - RNA, 19 nt, Artificial Sequence
  Description of Artificial Sequence: Synthetic oligonucleotide
uucucauaucgguagcgcc

SEQ ID NO: 651875 - RNA, 19 nt, Artificial Sequence
  Description of Artificial Sequence: Synthetic oligonucleotide
uaaggccggugcuaggugg

SEQ ID NO: 651876 - RNA, 19 nt, Artificial Sequence
  Description of Artificial Sequence: Synthetic oligonucleotide
auacaaggacccuucuguc

SEQ ID NO: 651877 - RNA, 19 nt, Artificial Sequence
  Description of Artificial Sequence: Synthetic oligonucleotide
ugcaccgaggacaugggcu

SEQ ID NO: 651878 - RNA, 19 nt, Artificial Sequence
  Description of Artificial Sequence: Synthetic oligonucleotide
agacacaggaggauggugg

SEQ ID NO: 651879 - RNA, 19 nt, Artificial Sequence
  Description of Artificial Sequence: Synthetic oligonucleotide
uuuagcauuaaggccggug

SEQ ID NO: 651880 - RNA, 19 nt, Artificial Sequence
  Description of Artificial Sequence: Synthetic oligonucleotide
ugagaugacugcagagcag

SEQ ID NO: 651881 - RNA, 19 nt, Artificial Sequence
  Description of Artificial Sequence: Synthetic oligonucleotide
ucgguagcgccauucuugg

SEQ ID NO: 651882 - RNA, 19 nt, Artificial Sequence
  Description of Artificial Sequence: Synthetic oligonucleotide
cguagcacaagcuucaugc

SEQ ID NO: 651883 - RNA, 19 nt, Artificial Sequence
  Description of Artificial Sequence: Synthetic oligonucleotide
agaauauaguuaaugaaua

SEQ ID NO: 651884 - RNA, 19 nt, Artificial Sequence
  Description of Artificial Sequence: Synthetic oligonucleotide
cuuccaauaguaccgugug

SEQ ID NO: 651885 - RNA, 19 nt, Artificial Sequence
  Description of Artificial Sequence: Synthetic oligonucleotide
uucacgggcacgcugccgc

SEQ ID NO: 651886 - RNA, 19 nt, Artificial Sequence
  Description of Artificial Sequence: Synthetic oligonucleotide
acaugcuauggucacuuug

SEQ ID NO: 651887 - RNA, 19 nt, Artificial Sequence
  Description of Artificial Sequence: Synthetic oligonucleotide
ucuucucacaugcuauggu

SEQ ID NO: 651888 - RNA, 19 nt, Artificial Sequence
  Description of Artificial Sequence: Synthetic oligonucleotide
augauaguaguaauccgag

SEQ ID NO: 651889 - RNA, 19 nt, Artificial Sequence
  Description of Artificial Sequence: Synthetic oligonucleotide
auauucugcgaugucuuuc

SEQ ID NO: 651890 - RNA, 19 nt, Artificial Sequence
  Description of Artificial Sequence: Synthetic oligonucleotide
ucucccucguugcagugag

SEQ ID NO: 651891 - RNA, 19 nt, Artificial Sequence
  Description of Artificial Sequence: Synthetic oligonucleotide
cugagaggugccuaugcag

SEQ ID NO: 651892 - RNA, 19 nt, Artificial Sequence
  Description of Artificial Sequence: Synthetic oligonucleotide
cuauguagaaggguauggc

SEQ ID NO: 651893 - RNA, 19 nt, Artificial Sequence
  Description of Artificial Sequence: Synthetic oligonucleotide
cauccucuuauacaaggac

SEQ ID NO: 651894 - RNA, 19 nt, Artificial Sequence
  Description of Artificial Sequence: Synthetic oligonucleotide
cuucucacaugcuaugguc

SEQ ID NO: 651895 - RNA, 19 nt, Artificial Sequence
  Description of Artificial Sequence: Synthetic oligonucleotide
ugcucagaaguugauguca

SEQ ID NO: 651896 - RNA, 19 nt, Artificial Sequence
  Description of Artificial Sequence: Synthetic oligonucleotide
augaccagagggcugguca

SEQ ID NO: 651897 - RNA, 19 nt, Artificial Sequence
  Description of Artificial Sequence: Synthetic oligonucleotide
gcuauggucacuuugccuc

SEQ ID NO: 651898 - RNA, 19 nt, Artificial Sequence
  Description of Artificial Sequence: Synthetic oligonucleotide
ugauaguaguaauccgaga

SEQ ID NO: 651899 - RNA, 19 nt, Artificial Sequence
  Description of Artificial Sequence: Synthetic oligonucleotide
augccugugggccucacug

SEQ ID NO: 651900 - RNA, 19 nt, Artificial Sequence
  Description of Artificial Sequence: Synthetic oligonucleotide
agcuugcugaggaaggagc

SEQ ID NO: 651901 - RNA, 19 nt, Artificial Sequence
  Description of Artificial Sequence: Synthetic oligonucleotide
uccgguugcugacauagaa

SEQ ID NO: 651902 - RNA, 19 nt, Artificial Sequence
  Description of Artificial Sequence: Synthetic oligonucleotide
ggaauauugcaacuauaug

SEQ ID NO: 651903 - RNA, 19 nt, Artificial Sequence
  Description of Artificial Sequence: Synthetic oligonucleotide
gaaggagcgaggcuccagc

SEQ ID NO: 651904 - RNA, 19 nt, Artificial Sequence
  Description of Artificial Sequence: Synthetic oligonucleotide
agcagaaaccaggagcggg

SEQ ID NO: 651905 - RNA, 19 nt, Artificial Sequence
  Description of Artificial Sequence: Synthetic oligonucleotide
ugagucccguagaaccugg

SEQ ID NO: 651906 - RNA, 19 nt, Artificial Sequence
  Description of Artificial Sequence: Synthetic oligonucleotide
ggcugugguucucauaucg

SEQ ID NO: 651907 - RNA, 19 nt, Artificial Sequence
  Description of Artificial Sequence: Synthetic oligonucleotide
aacagaaugggaagacugu

SEQ ID NO: 651908 - RNA, 19 nt, Artificial Sequence
  Description of Artificial Sequence: Synthetic oligonucleotide
caccacacgugacaggucc

SEQ ID NO: 651909 - RNA, 19 nt, Artificial Sequence
  Description of Artificial Sequence: Synthetic oligonucleotide
gauguucacgggcacgcug

SEQ ID NO: 651910 - RNA, 19 nt, Artificial Sequence
  Description of Artificial Sequence: Synthetic oligonucleotide
uaguaauccgagagcuugc

SEQ ID NO: 651911 - RNA, 19 nt, Artificial Sequence
  Description of Artificial Sequence: Synthetic oligonucleotide
ggacuugagauugagauga

SEQ ID NO: 651912 - RNA, 19 nt, Artificial Sequence
  Description of Artificial Sequence: Synthetic oligonucleotide
auguucacgggcacgcugc

SEQ ID NO: 651913 - RNA, 19 nt, Artificial Sequence
  Description of Artificial Sequence: Synthetic oligonucleotide
uuccaauaguaccgugugc

SEQ ID NO: 651914 - RNA, 19 nt, Artificial Sequence
  Description of Artificial Sequence: Synthetic oligonucleotide
gucgguguaaagugcuggg

SEQ ID NO: 651915 - RNA, 19 nt, Artificial Sequence
  Description of Artificial Sequence: Synthetic oligonucleotide
gacccuucugucccagugg

SEQ ID NO: 651916 - RNA, 19 nt, Artificial Sequence
  Description of Artificial Sequence: Synthetic oligonucleotide
aucccaagggcucuuauuu

SEQ ID NO: 651917 - RNA, 19 nt, Artificial Sequence
  Description of Artificial Sequence: Synthetic oligonucleotide
gacagauaccaucguagca

SEQ ID NO: 651918 - RNA, 19 nt, Artificial Sequence
  Description of Artificial Sequence: Synthetic oligonucleotide
ugucuggccagacaucguc

SEQ ID NO: 651919 - RNA, 19 nt, Artificial Sequence
  Description of Artificial Sequence: Synthetic oligonucleotide
cugucauccucuuauacaa

SEQ ID NO: 651920 - RNA, 19 nt, Artificial Sequence
  Description of Artificial Sequence: Synthetic oligonucleotide
ugucccaguggccaugccu

SEQ ID NO: 651921 - RNA, 19 nt, Artificial Sequence
  Description of Artificial Sequence: Synthetic oligonucleotide
agguugucuggccagacau

SEQ ID NO: 651922 - RNA, 19 nt, Artificial Sequence
  Description of Artificial Sequence: Synthetic oligonucleotide
aggaagguugucuggccag

SEQ ID NO: 651923 - RNA, 19 nt, Artificial Sequence
  Description of Artificial Sequence: Synthetic oligonucleotide
uuuucggagccgccgguca

SEQ ID NO: 651924 - RNA, 19 nt, Artificial Sequence
  Description of Artificial Sequence: Synthetic oligonucleotide
aguuaaugaauagcugaca

SEQ ID NO: 651925 - RNA, 19 nt, Artificial Sequence
  Description of Artificial Sequence: Synthetic oligonucleotide
cagaaguugaugucaccac

SEQ ID NO: 651926 - RNA, 19 nt, Artificial Sequence
  Description of Artificial Sequence: Synthetic oligonucleotide
gagagguuagugcucccug

SEQ ID NO: 651927 - RNA, 19 nt, Artificial Sequence
  Description of Artificial Sequence: Synthetic oligonucleotide
uggugcugcucccaaagaa

SEQ ID NO: 651928 - RNA, 19 nt, Artificial Sequence
  Description of Artificial Sequence: Synthetic oligonucleotide
uuaaggccggugcuaggug

SEQ ID NO: 651929 - RNA, 19 nt, Artificial Sequence
  Description of Artificial Sequence: Synthetic oligonucleotide
aucgucucccuuuguagug

SEQ ID NO: 651930 - RNA, 19 nt, Artificial Sequence
  Description of Artificial Sequence: Synthetic oligonucleotide
  modified_base (10)..(10): a, c, u, g, unknown or other
cugaagccancuccgguug

SEQ ID NO: 651931 - RNA, 19 nt, Artificial Sequence
  Description of Artificial Sequence: Synthetic oligonucleotide
ucccguagaaccuggacuu

SEQ ID NO: 651932 - RNA, 19 nt, Artificial Sequence
  Description of Artificial Sequence: Synthetic oligonucleotide
caauaguaccgugugcagc

SEQ ID NO: 651933 - RNA, 19 nt, Artificial Sequence
  Description of Artificial Sequence: Synthetic oligonucleotide
cacacacgcacagagggcc

SEQ ID NO: 651934 - RNA, 19 nt, Artificial Sequence
  Description of Artificial Sequence: Synthetic oligonucleotide
ucaacagaaugggaagacu

SEQ ID NO: 651935 - RNA, 19 nt, Artificial Sequence
  Description of Artificial Sequence: Synthetic oligonucleotide
uagcauuaaggccggugcu

SEQ ID NO: 651936 - RNA, 19 nt, Artificial Sequence
  Description of Artificial Sequence: Synthetic oligonucleotide
ggucacggcacacagcugc

SEQ ID NO: 651937 - RNA, 19 nt, Artificial Sequence
  Description of Artificial Sequence: Synthetic oligonucleotide
ugggucgguguaaagugcu

SEQ ID NO: 651938 - RNA, 19 nt, Artificial Sequence
  Description of Artificial Sequence: Synthetic oligonucleotide
ucaacauggcugagaggug

SEQ ID NO: 651939 - RNA, 19 nt, Artificial Sequence
  Description of Artificial Sequence: Synthetic oligonucleotide
ugcucauauucugcgaugu

SEQ ID NO: 651940 - RNA, 19 nt, Artificial Sequence
  Description of Artificial Sequence: Synthetic oligonucleotide
gggguuauaggguuucuug

SEQ ID NO: 651941 - RNA, 19 nt, Artificial Sequence
  Description of Artificial Sequence: Synthetic oligonucleotide
auuaaggccggugcuaggu

SEQ ID NO: 651942 - RNA, 19 nt, Artificial Sequence
  Description of Artificial Sequence: Synthetic oligonucleotide
cuauggucacuuugccucc

SEQ ID NO: 651943 - RNA, 19 nt, Artificial Sequence
  Description of Artificial Sequence: Synthetic oligonucleotide
caagcucacacugccauug

SEQ ID NO: 651944 - RNA, 19 nt, Artificial Sequence
  Description of Artificial Sequence: Synthetic oligonucleotide
acucggaguccagaagacc

SEQ ID NO: 651945 - RNA, 19 nt, Artificial Sequence
  Description of Artificial Sequence: Synthetic oligonucleotide
ugcuauguagaaggguaug

SEQ ID NO: 651946 - RNA, 19 nt, Artificial Sequence
  Description of Artificial Sequence: Synthetic oligonucleotide
aggguauggcuguuggucu

SEQ ID NO: 651947 - RNA, 19 nt, Artificial Sequence
  Description of Artificial Sequence: Synthetic oligonucleotide
cuauauguauucagaaugu

SEQ ID NO: 651948 - RNA, 19 nt, Artificial Sequence
  Description of Artificial Sequence: Synthetic oligonucleotide
uagcuuuucggagccgccg

SEQ ID NO: 651949 - RNA, 19 nt, Artificial Sequence
  Description of Artificial Sequence: Synthetic oligonucleotide
ucccucguugcagugagug

SEQ ID NO: 651950 - RNA, 19 nt, Artificial Sequence
  Description of Artificial Sequence: Synthetic oligonucleotide
acagugagucccguagaac

SEQ ID NO: 651951 - RNA, 19 nt, Artificial Sequence
  Description of Artificial Sequence: Synthetic oligonucleotide
gcuauguagaaggguaugg

SEQ ID NO: 651952 - RNA, 19 nt, Artificial Sequence
  Description of Artificial Sequence: Synthetic oligonucleotide
uauggcuguuggucugagg

SEQ ID NO: 651953 - RNA, 19 nt, Artificial Sequence
  Description of Artificial Sequence: Synthetic oligonucleotide
  modified_base (9)..(9): a, c, u, g, unknown or other
ugaagccancuccgguugc

SEQ ID NO: 651954 - RNA, 19 nt, Artificial Sequence
  Description of Artificial Sequence: Synthetic oligonucleotide
ucagucugcucuuccaaua

SEQ ID NO: 651955 - RNA, 19 nt, Artificial Sequence
  Description of Artificial Sequence: Synthetic oligonucleotide
uccccaggaagguugucug

SEQ ID NO: 651956 - RNA, 19 nt, Artificial Sequence
  Description of Artificial Sequence: Synthetic oligonucleotide
agccacuacucucggugac

SEQ ID NO: 651957 - RNA, 19 nt, Artificial Sequence
  Description of Artificial Sequence: Synthetic oligonucleotide
ugacaugcugccagagccu

SEQ ID NO: 651958 - RNA, 19 nt, Artificial Sequence
  Description of Artificial Sequence: Synthetic oligonucleotide
ucguagcacaagcuucaug

SEQ ID NO: 651959 - RNA, 19 nt, Artificial Sequence
  Description of Artificial Sequence: Synthetic oligonucleotide
ucgcuaccaggaauaaagu

SEQ ID NO: 651960 - RNA, 19 nt, Artificial Sequence
  Description of Artificial Sequence: Synthetic oligonucleotide
guagcgccauucuugggug

SEQ ID NO: 651961 - RNA, 19 nt, Artificial Sequence
  Description of Artificial Sequence: Synthetic oligonucleotide
augggucgguguaaagugc

SEQ ID NO: 651962 - RNA, 19 nt, Artificial Sequence
  Description of Artificial Sequence: Synthetic oligonucleotide
uagaagccagacagauacc

SEQ ID NO: 651963 - RNA, 19 nt, Artificial Sequence
  Description of Artificial Sequence: Synthetic oligonucleotide
caucguagcacaagcuuca

SEQ ID NO: 651964 - RNA, 19 nt, Artificial Sequence
  Description of Artificial Sequence: Synthetic oligonucleotide
ugcggaccuccucacucgg

SEQ ID NO: 651965 - RNA, 19 nt, Artificial Sequence
  Description of Artificial Sequence: Synthetic oligonucleotide
gcuaugaccagagggcugg

SEQ ID NO: 651966 - RNA, 19 nt, Artificial Sequence
  Description of Artificial Sequence: Synthetic oligonucleotide
gaaaccuuguuuucucccu

SEQ ID NO: 651967 - RNA, 19 nt, Artificial Sequence
  Description of Artificial Sequence: Synthetic oligonucleotide
uuagugcucccugaagggu

SEQ ID NO: 651968 - RNA, 19 nt, Artificial Sequence
  Description of Artificial Sequence: Synthetic oligonucleotide
uuucggagccgccggucag

SEQ ID NO: 651969 - RNA, 19 nt, Artificial Sequence
  Description of Artificial Sequence: Synthetic oligonucleotide
guucaacauggcugagagg

SEQ ID NO: 651970 - RNA, 19 nt, Artificial Sequence
  Description of Artificial Sequence: Synthetic oligonucleotide
uaccgugugcagcuucagc

SEQ ID NO: 651971 - RNA, 19 nt, Artificial Sequence
  Description of Artificial Sequence: Synthetic oligonucleotide
gaaccuggacuuugcggug

SEQ ID NO: 651972 - RNA, 19 nt, Artificial Sequence
  Description of Artificial Sequence: Synthetic oligonucleotide
guagugugugaagaauccc

SEQ ID NO: 651973 - RNA, 19 nt, Artificial Sequence
  Description of Artificial Sequence: Synthetic oligonucleotide
ucaccacccaaagagcccu

SEQ ID NO: 651974 - RNA, 19 nt, Artificial Sequence
  Description of Artificial Sequence: Synthetic oligonucleotide
cuaccaggaauaaaguccu

SEQ ID NO: 651975 - RNA, 19 nt, Artificial Sequence
  Description of Artificial Sequence: Synthetic oligonucleotide
gugccucuugccugcaccg

SEQ ID NO: 651976 - RNA, 19 nt, Artificial Sequence
  Description of Artificial Sequence: Synthetic oligonucleotide
gucaacagaaugggaagac

SEQ ID NO: 651977 - RNA, 19 nt, Artificial Sequence
  Description of Artificial Sequence: Synthetic oligonucleotide
gaaggguccuacagcuggg

SEQ ID NO: 651978 - RNA, 19 nt, Artificial Sequence
  Description of Artificial Sequence: Synthetic oligonucleotide
cucacucggaguccagaag

SEQ ID NO: 651979 - RNA, 19 nt, Artificial Sequence
  Description of Artificial Sequence: Synthetic oligonucleotide
gacagugagucccguagaa

SEQ ID NO: 651980 - RNA, 19 nt, Artificial Sequence
  Description of Artificial Sequence: Synthetic oligonucleotide
gaugggguuauaggguuuc

SEQ ID NO: 651981 - RNA, 19 nt, Artificial Sequence
  Description of Artificial Sequence: Synthetic oligonucleotide
cauuaaggccggugcuagg

SEQ ID NO: 651982 - RNA, 19 nt, Artificial Sequence
  Description of Artificial Sequence: Synthetic oligonucleotide
ugaccagagggcuggucac

SEQ ID NO: 651983 - RNA, 19 nt, Artificial Sequence
  Description of Artificial Sequence: Synthetic oligonucleotide
cagagggcuggucacuagc

SEQ ID NO: 651984 - RNA, 19 nt, Artificial Sequence
  Description of Artificial Sequence: Synthetic oligonucleotide
gcaacuauauguauucaga

SEQ ID NO: 651985 - RNA, 19 nt, Artificial Sequence
  Description of Artificial Sequence: Synthetic oligonucleotide
cagacaucgucucccuuug

SEQ ID NO: 651986 - RNA, 19 nt, Artificial Sequence
  Description of Artificial Sequence: Synthetic oligonucleotide
cacagagggccauccacac

SEQ ID NO: 651987 - RNA, 19 nt, Artificial Sequence
  Description of Artificial Sequence: Synthetic oligonucleotide
ugccuggcacgcacugugg

SEQ ID NO: 651988 - RNA, 19 nt, Artificial Sequence
  Description of Artificial Sequence: Synthetic oligonucleotide
guaauccgagagcuugcug

SEQ ID NO: 651989 - RNA, 19 nt, Artificial Sequence
  Description of Artificial Sequence: Synthetic oligonucleotide
caccggacuccccaggaag

SEQ ID NO: 651990 - RNA, 19 nt, Artificial Sequence
  Description of Artificial Sequence: Synthetic oligonucleotide
auggucacuuugccucccg

SEQ ID NO: 651991 - RNA, 19 nt, Artificial Sequence
  Description of Artificial Sequence: Synthetic oligonucleotide
agaguagguccccaugaua

SEQ ID NO: 651992 - RNA, 19 nt, Artificial Sequence
  Description of Artificial Sequence: Synthetic oligonucleotide
cugcggaccuccucacucg

SEQ ID NO: 651993 - RNA, 19 nt, Artificial Sequence
  Description of Artificial Sequence: Synthetic oligonucleotide
  modified_base (7)..(7): a, c, u, g, unknown or other
aagccancuccgguugcug

SEQ ID NO: 651994 - RNA, 19 nt, Artificial Sequence
  Description of Artificial Sequence: Synthetic oligonucleotide
ugaccuggcuaugaccaga

SEQ ID NO: 651995 - RNA, 19 nt, Artificial Sequence
  Description of Artificial Sequence: Synthetic oligonucleotide
uggcuaugaccagagggcu

SEQ ID NO: 651996 - RNA, 19 nt, Artificial Sequence
  Description of Artificial Sequence: Synthetic oligonucleotide
gacaugggcucucgcuacc

SEQ ID NO: 651997 - RNA, 19 nt, Artificial Sequence
  Description of Artificial Sequence: Synthetic oligonucleotide
gaaugucaacagaauggga

SEQ ID NO: 651998 - RNA, 19 nt, Artificial Sequence
  Description of Artificial Sequence: Synthetic oligonucleotide
ggguuauaggguuucuuga

SEQ ID NO: 651999 - RNA, 19 nt, Artificial Sequence
  Description of Artificial Sequence: Synthetic oligonucleotide
uccaugggucgguguaaag

SEQ ID NO: 652000 - RNA, 19 nt, Artificial Sequence
  Description of Artificial Sequence: Synthetic oligonucleotide
ggagaguagguccccauga

SEQ ID NO: 652001 - RNA, 19 nt, Artificial Sequence
  Description of Artificial Sequence: Synthetic oligonucleotide
ggucgguguaaagugcugg

SEQ ID NO: 652002 - RNA, 19 nt, Artificial Sequence
  Description of Artificial Sequence: Synthetic oligonucleotide
ucggaguccagaagaccuc

SEQ ID NO: 652003 - RNA, 19 nt, Artificial Sequence
  Description of Artificial Sequence: Synthetic oligonucleotide
cuacucucggugaccuggc

SEQ ID NO: 652004 - RNA, 19 nt, Artificial Sequence
  Description of Artificial Sequence: Synthetic oligonucleotide
cacucggaguccagaagac

SEQ ID NO: 652005 - RNA, 19 nt, Artificial Sequence
  Description of Artificial Sequence: Synthetic oligonucleotide
ugggaaaucuuggaaucuu

SEQ ID NO: 652006 - RNA, 19 nt, Artificial Sequence
  Description of Artificial Sequence: Synthetic oligonucleotide
gaaggagagguuagugcuc

SEQ ID NO: 652007 - RNA, 19 nt, Artificial Sequence
  Description of Artificial Sequence: Synthetic oligonucleotide
agggcuggucacuagcuuu

SEQ ID NO: 652008 - RNA, 19 nt, Artificial Sequence
  Description of Artificial Sequence: Synthetic oligonucleotide
uguccagaaccugcacaag

SEQ ID NO: 652009 - RNA, 19 nt, Artificial Sequence
  Description of Artificial Sequence: Synthetic oligonucleotide
ugggcaggacucaggugug

SEQ ID NO: 652010 - RNA, 19 nt, Artificial Sequence
  Description of Artificial Sequence: Synthetic oligonucleotide
cuggucacggcacacagcu

SEQ ID NO: 652011 - RNA, 19 nt, Artificial Sequence
  Description of Artificial Sequence: Synthetic oligonucleotide
agggcucuuauuugagaau

SEQ ID NO: 652012 - RNA, 19 nt, Artificial Sequence
  Description of Artificial Sequence: Synthetic oligonucleotide
ucgguguaaagugcugggu

SEQ ID NO: 652013 - RNA, 19 nt, Artificial Sequence
  Description of Artificial Sequence: Synthetic oligonucleotide
gccggugcuagguggaggg

SEQ ID NO: 652014 - RNA, 19 nt, Artificial Sequence
  Description of Artificial Sequence: Synthetic oligonucleotide
gacauagaaggcagacaca

SEQ ID NO: 652015 - RNA, 19 nt, Artificial Sequence
  Description of Artificial Sequence: Synthetic oligonucleotide
agguccccaugauaguagu

SEQ ID NO: 652016 - RNA, 19 nt, Artificial Sequence
  Description of Artificial Sequence: Synthetic oligonucleotide
  modified_base (6)..(6): a, c, u, g, unknown or other
agccancuccgguugcuga

SEQ ID NO: 652017 - RNA, 19 nt, Artificial Sequence
  Description of Artificial Sequence: Synthetic oligonucleotide
gaguucaacauggcugaga

SEQ ID NO: 652018 - RNA, 19 nt, Artificial Sequence
  Description of Artificial Sequence: Synthetic oligonucleotide
uauggucacuuugccuccc

SEQ ID NO: 652019 - RNA, 19 nt, Artificial Sequence
  Description of Artificial Sequence: Synthetic oligonucleotide
ugggaagacuguguugguc

SEQ ID NO: 652020 - RNA, 19 nt, Artificial Sequence
  Description of Artificial Sequence: Synthetic oligonucleotide
cccgacgugaucuucccag

SEQ ID NO: 652021 - RNA, 19 nt, Artificial Sequence
  Description of Artificial Sequence: Synthetic oligonucleotide
gacaccggacuccccagga

SEQ ID NO: 652022 - RNA, 19 nt, Artificial Sequence
  Description of Artificial Sequence: Synthetic oligonucleotide
cuuugcggugaugcugccg

SEQ ID NO: 652023 - RNA, 19 nt, Artificial Sequence
  Description of Artificial Sequence: Synthetic oligonucleotide
accggacuccccaggaagg

SEQ ID NO: 652024 - RNA, 19 nt, Artificial Sequence
  Description of Artificial Sequence: Synthetic oligonucleotide
gcugacauagaaggcagac

SEQ ID NO: 652025 - RNA, 19 nt, Artificial Sequence
  Description of Artificial Sequence: Synthetic oligonucleotide
ugccucccgacagugaguc

SEQ ID NO: 652026 - RNA, 19 nt, Artificial Sequence
  Description of Artificial Sequence: Synthetic oligonucleotide
ugcagaucccaagggcucu

SEQ ID NO: 652027 - RNA, 19 nt, Artificial Sequence
  Description of Artificial Sequence: Synthetic oligonucleotide
gcuggucacuagcuuuucg

SEQ ID NO: 652028 - RNA, 19 nt, Artificial Sequence
  Description of Artificial Sequence: Synthetic oligonucleotide
gucaccacccaaagagccc

SEQ ID NO: 652029 - RNA, 19 nt, Artificial Sequence
  Description of Artificial Sequence: Synthetic oligonucleotide
gucccguagaaccuggacu

SEQ ID NO: 652030 - RNA, 19 nt, Artificial Sequence
  Description of Artificial Sequence: Synthetic oligonucleotide
ccgacagugagucccguag

SEQ ID NO: 652031 - RNA, 19 nt, Artificial Sequence
  Description of Artificial Sequence: Synthetic oligonucleotide
uccguagccggugugccuc

SEQ ID NO: 652032 - RNA, 19 nt, Artificial Sequence
  Description of Artificial Sequence: Synthetic oligonucleotide
gagccacuacucucgguga

SEQ ID NO: 652033 - RNA, 19 nt, Artificial Sequence
  Description of Artificial Sequence: Synthetic oligonucleotide
caagggcucuuauuugaga

SEQ ID NO: 652034 - RNA, 19 nt, Artificial Sequence
  Description of Artificial Sequence: Synthetic oligonucleotide
ggacccuucugucccagug

SEQ ID NO: 652035 - RNA, 19 nt, Artificial Sequence
  Description of Artificial Sequence: Synthetic oligonucleotide
gacaugucaggaagaugca

SEQ ID NO: 652036 - RNA, 19 nt, Artificial Sequence
  Description of Artificial Sequence: Synthetic oligonucleotide
cugacaugucaggaagaug

SEQ ID NO: 652037 - RNA, 19 nt, Artificial Sequence
  Description of Artificial Sequence: Synthetic oligonucleotide
ggacuuugcggugaugcug

SEQ ID NO: 652038 - RNA, 19 nt, Artificial Sequence
  Description of Artificial Sequence: Synthetic oligonucleotide
gugaccuggcuaugaccag

SEQ ID NO: 652039 - RNA, 19 nt, Artificial Sequence
  Description of Artificial Sequence: Synthetic oligonucleotide
agcgccauucuugggugag

SEQ ID NO: 652040 - RNA, 19 nt, Artificial Sequence
  Description of Artificial Sequence: Synthetic oligonucleotide
ucgucucccuuuguagugu

SEQ ID NO: 652041 - RNA, 19 nt, Artificial Sequence
  Description of Artificial Sequence: Synthetic oligonucleotide
gguagcgccauucuugggu

SEQ ID NO: 652042 - RNA, 19 nt, Artificial Sequence
  Description of Artificial Sequence: Synthetic oligonucleotide
gcuuuagcauuaaggccgg

SEQ ID NO: 652043 - RNA, 19 nt, Artificial Sequence
  Description of Artificial Sequence: Synthetic oligonucleotide
caugggcucucgcuaccag

SEQ ID NO: 652044 - RNA, 19 nt, Artificial Sequence
  Description of Artificial Sequence: Synthetic oligonucleotide
caugcugccagagccucuc

SEQ ID NO: 652045 - RNA, 19 nt, Artificial Sequence
  Description of Artificial Sequence: Synthetic oligonucleotide
agcauuaaggccggugcua

SEQ ID NO: 652046 - RNA, 19 nt, Artificial Sequence
  Description of Artificial Sequence: Synthetic oligonucleotide
cacgcacagagggccaucc

SEQ ID NO: 652047 - RNA, 19 nt, Artificial Sequence
  Description of Artificial Sequence: Synthetic oligonucleotide
ccgguugcugacauagaag

SEQ ID NO: 652048 - RNA, 19 nt, Artificial Sequence
  Description of Artificial Sequence: Synthetic oligonucleotide
aggguccuacagcuggggu

SEQ ID NO: 652049 - RNA, 19 nt, Artificial Sequence
  Description of Artificial Sequence: Synthetic oligonucleotide
uccucacucggaguccaga

SEQ ID NO: 652050 - RNA, 19 nt, Artificial Sequence
  Description of Artificial Sequence: Synthetic oligonucleotide
agaaucccaucuugcucau

SEQ ID NO: 652051 - RNA, 19 nt, Artificial Sequence
  Description of Artificial Sequence: Synthetic oligonucleotide
uugccucccgacagugagu

SEQ ID NO: 652052 - RNA, 19 nt, Artificial Sequence
  Description of Artificial Sequence: Synthetic oligonucleotide
agaucccaagggcucuuau

SEQ ID NO: 652053 - RNA, 19 nt, Artificial Sequence
  Description of Artificial Sequence: Synthetic oligonucleotide
caggaagguugucuggcca

SEQ ID NO: 652054 - RNA, 19 nt, Artificial Sequence
  Description of Artificial Sequence: Synthetic oligonucleotide
cauggagugaggcucugcu

SEQ ID NO: 652055 - RNA, 19 nt, Artificial Sequence
  Description of Artificial Sequence: Synthetic oligonucleotide
auguggcaagcuugagccu

SEQ ID NO: 652056 - RNA, 19 nt, Artificial Sequence
  Description of Artificial Sequence: Synthetic oligonucleotide
cugcucugcuauguagaag

SEQ ID NO: 652057 - RNA, 19 nt, Artificial Sequence
  Description of Artificial Sequence: Synthetic oligonucleotide
gguccuacagcugggguca

SEQ ID NO: 652058 - RNA, 19 nt, Artificial Sequence
  Description of Artificial Sequence: Synthetic oligonucleotide
gaggugccuaugcagcucu

SEQ ID NO: 652059 - RNA, 19 nt, Artificial Sequence
  Description of Artificial Sequence: Synthetic oligonucleotide
acgcacuguggaguucaac

SEQ ID NO: 652060 - RNA, 19 nt, Artificial Sequence
  Description of Artificial Sequence: Synthetic oligonucleotide
ccucccgacagugaguccc

SEQ ID NO: 652061 - RNA, 19 nt, Artificial Sequence
  Description of Artificial Sequence: Synthetic oligonucleotide
ggacaugggcucucgcuac

SEQ ID NO: 652062 - RNA, 19 nt, Artificial Sequence
  Description of Artificial Sequence: Synthetic oligonucleotide
caguaggggucuuccucug

SEQ ID NO: 652063 - RNA, 19 nt, Artificial Sequence
  Description of Artificial Sequence: Synthetic oligonucleotide
ggguccuacagcugggguc

SEQ ID NO: 652064 - RNA, 19 nt, Artificial Sequence
  Description of Artificial Sequence: Synthetic oligonucleotide
ucucgcuaccaggaauaaa

SEQ ID NO: 652065 - RNA, 19 nt, Artificial Sequence
  Description of Artificial Sequence: Synthetic oligonucleotide
ucguugcagugaguggcug

SEQ ID NO: 652066 - RNA, 19 nt, Artificial Sequence
  Description of Artificial Sequence: Synthetic oligonucleotide
uaugaccagagggcugguc

SEQ ID NO: 652067 - RNA, 19 nt, Artificial Sequence
  Description of Artificial Sequence: Synthetic oligonucleotide
ugauguucacgggcacgcu

SEQ ID NO: 652068 - RNA, 19 nt, Artificial Sequence
  Description of Artificial Sequence: Synthetic oligonucleotide
ugggguuauaggguuucuu

SEQ ID NO: 652069 - RNA, 19 nt, Artificial Sequence
  Description of Artificial Sequence: Synthetic oligonucleotide
ccugaaggagagguuagug

SEQ ID NO: 652070 - RNA, 19 nt, Artificial Sequence
  Description of Artificial Sequence: Synthetic oligonucleotide
cccuuuguagugugugaag

SEQ ID NO: 652071 - RNA, 19 nt, Artificial Sequence
  Description of Artificial Sequence: Synthetic oligonucleotide
cguagaaccuggacuuugc

SEQ ID NO: 652072 - RNA, 19 nt, Artificial Sequence
  Description of Artificial Sequence: Synthetic oligonucleotide
aguaguaauccgagagcuu

SEQ ID NO: 652073 - RNA, 19 nt, Artificial Sequence
  Description of Artificial Sequence: Synthetic oligonucleotide
gugggcagacugcucagaa

SEQ ID NO: 652074 - RNA, 19 nt, Artificial Sequence
  Description of Artificial Sequence: Synthetic oligonucleotide
uagcgccauucuuggguga

SEQ ID NO: 652075 - RNA, 19 nt, Artificial Sequence
  Description of Artificial Sequence: Synthetic oligonucleotide
guagccggugugccucuug

SEQ ID NO: 652076 - RNA, 19 nt, Artificial Sequence
  Description of Artificial Sequence: Synthetic oligonucleotide
gcagaggcuggucacggca

SEQ ID NO: 652077 - RNA, 19 nt, Artificial Sequence
  Description of Artificial Sequence: Synthetic oligonucleotide
  modified_base (2)..(2): a, c, u, g, unknown or other
ancuccgguugcugacaua

SEQ ID NO: 652078 - RNA, 19 nt, Artificial Sequence
  Description of Artificial Sequence: Synthetic oligonucleotide
agggccauccacacagggu

SEQ ID NO: 652079 - RNA, 19 nt, Artificial Sequence
  Description of Artificial Sequence: Synthetic oligonucleotide
guucacgggcacgcugccg

SEQ ID NO: 652080 - RNA, 19 nt, Artificial Sequence
  Description of Artificial Sequence: Synthetic oligonucleotide
auccguagccggugugccu

SEQ ID NO: 652081 - RNA, 19 nt, Artificial Sequence
  Description of Artificial Sequence: Synthetic oligonucleotide
gcaccgaggacaugggcuc

SEQ ID NO: 652082 - RNA, 19 nt, Artificial Sequence
  Description of Artificial Sequence: Synthetic oligonucleotide
accgaggacaugggcucuc

SEQ ID NO: 652083 - RNA, 19 nt, Artificial Sequence
  Description of Artificial Sequence: Synthetic oligonucleotide
cgguguaaagugcugggug

SEQ ID NO: 652084 - RNA, 19 nt, Artificial Sequence
  Description of Artificial Sequence: Synthetic oligonucleotide
gaucccaagggcucuuauu

SEQ ID NO: 652085 - RNA, 19 nt, Artificial Sequence
  Description of Artificial Sequence: Synthetic oligonucleotide
gccucuugccugcaccgag

SEQ ID NO: 652086 - RNA, 19 nt, Artificial Sequence
  Description of Artificial Sequence: Synthetic oligonucleotide
  modified_base (5)..(5): a, c, u, g, unknown or other
gccancuccgguugcugac

SEQ ID NO: 652087 - RNA, 19 nt, Artificial Sequence
  Description of Artificial Sequence: Synthetic oligonucleotide
cuaggggccgacggcugcc

SEQ ID NO: 652088 - RNA, 19 nt, Artificial Sequence
  Description of Artificial Sequence: Synthetic oligonucleotide
acaugggcucucgcuacca

SEQ ID NO: 652089 - RNA, 19 nt, Artificial Sequence
  Description of Artificial Sequence: Synthetic oligonucleotide
ggcccuggugacaugcugc

SEQ ID NO: 652090 - RNA, 19 nt, Artificial Sequence
  Description of Artificial Sequence: Synthetic oligonucleotide
  modified_base (8)..(8): a, c, u, g, unknown or other
gaagccancuccgguugcu

SEQ ID NO: 652091 - RNA, 19 nt, Artificial Sequence
  Description of Artificial Sequence: Synthetic oligonucleotide
acgggcacgcugccgcugu

SEQ ID NO: 652092 - RNA, 19 nt, Artificial Sequence
  Description of Artificial Sequence: Synthetic oligonucleotide
gcucugcuauguagaaggg

SEQ ID NO: 652093 - RNA, 19 nt, Artificial Sequence
  Description of Artificial Sequence: Synthetic oligonucleotide
guggaacaacuguggcuuc

SEQ ID NO: 652094 - RNA, 19 nt, Artificial Sequence
  Description of Artificial Sequence: Synthetic oligonucleotide
acacgcacagagggccauc

SEQ ID NO: 652095 - RNA, 19 nt, Artificial Sequence
  Description of Artificial Sequence: Synthetic oligonucleotide
gcccuggugacaugcugcc

SEQ ID NO: 652096 - RNA, 19 nt, Artificial Sequence
  Description of Artificial Sequence: Synthetic oligonucleotide
ccugcggaccuccucacuc

SEQ ID NO: 652097 - RNA, 19 nt, Artificial Sequence
  Description of Artificial Sequence: Synthetic oligonucleotide
guaccgugugcagcuucag

SEQ ID NO: 652098 - RNA, 19 nt, Artificial Sequence
  Description of Artificial Sequence: Synthetic oligonucleotide
guaaagugcugggugccua

SEQ ID NO: 652099 - RNA, 19 nt, Artificial Sequence
  Description of Artificial Sequence: Synthetic oligonucleotide
ugccucuugccugcaccga

SEQ ID NO: 652100 - RNA, 19 nt, Artificial Sequence
  Description of Artificial Sequence: Synthetic oligonucleotide
cacuagcuuuucggagccg

SEQ ID NO: 652101 - RNA, 19 nt, Artificial Sequence
  Description of Artificial Sequence: Synthetic oligonucleotide
ggugccuaugcagcucuug

SEQ ID NO: 652102 - RNA, 19 nt, Artificial Sequence
  Description of Artificial Sequence: Synthetic oligonucleotide
gcuuccaugggucggugua

SEQ ID NO: 652103 - RNA, 19 nt, Artificial Sequence
  Description of Artificial Sequence: Synthetic oligonucleotide
cacuacucucggugaccug

SEQ ID NO: 652104 - RNA, 19 nt, Artificial Sequence
  Description of Artificial Sequence: Synthetic oligonucleotide
uugcggugaugcugccgcu

SEQ ID NO: 652105 - RNA, 19 nt, Artificial Sequence
  Description of Artificial Sequence: Synthetic oligonucleotide
acgcacagagggccaucca

SEQ ID NO: 652106 - RNA, 19 nt, Artificial Sequence
  Description of Artificial Sequence: Synthetic oligonucleotide
ccgacggcugccuggcacg

SEQ ID NO: 652107 - RNA, 19 nt, Artificial Sequence
  Description of Artificial Sequence: Synthetic oligonucleotide
ccugcacaagccuuccuga

SEQ ID NO: 652108 - RNA, 19 nt, Artificial Sequence
  Description of Artificial Sequence: Synthetic oligonucleotide
ucauaucgguagcgccauu

SEQ ID NO: 652109 - RNA, 19 nt, Artificial Sequence
  Description of Artificial Sequence: Synthetic oligonucleotide
augggguuauaggguuucu

SEQ ID NO: 652110 - RNA, 19 nt, Artificial Sequence
  Description of Artificial Sequence: Synthetic oligonucleotide
gugugaagaaucccaucuu

SEQ ID NO: 652111 - RNA, 19 nt, Artificial Sequence
  Description of Artificial Sequence: Synthetic oligonucleotide
gcucauauucugcgauguc

SEQ ID NO: 652112 - RNA, 19 nt, Artificial Sequence
  Description of Artificial Sequence: Synthetic oligonucleotide
ggcuaugaccagagggcug

SEQ ID NO: 652113 - RNA, 19 nt, Artificial Sequence
  Description of Artificial Sequence: Synthetic oligonucleotide
caaggacccuucuguccca

SEQ ID NO: 652114 - RNA, 19 nt, Artificial Sequence
  Description of Artificial Sequence: Synthetic oligonucleotide
ggaguccagaagaccucag

SEQ ID NO: 652115 - RNA, 19 nt, Artificial Sequence
  Description of Artificial Sequence: Synthetic oligonucleotide
gcucuuauuugagaauaua

SEQ ID NO: 652116 - RNA, 19 nt, Artificial Sequence
  Description of Artificial Sequence: Synthetic oligonucleotide
cucagucugcucuuccaau

SEQ ID NO: 652117 - RNA, 19 nt, Artificial Sequence
  Description of Artificial Sequence: Synthetic oligonucleotide
aucguagcacaagcuucau

SEQ ID NO: 652118 - RNA, 19 nt, Artificial Sequence
  Description of Artificial Sequence: Synthetic oligonucleotide
aggcuggucacggcacaca

SEQ ID NO: 652119 - RNA, 19 nt, Artificial Sequence
  Description of Artificial Sequence: Synthetic oligonucleotide
gacuucuccuguguggcuu

SEQ ID NO: 652120 - RNA, 19 nt, Artificial Sequence
  Description of Artificial Sequence: Synthetic oligonucleotide
gcggcaguaggggucuucc

SEQ ID NO: 652121 - RNA, 19 nt, Artificial Sequence
  Description of Artificial Sequence: Synthetic oligonucleotide
cucuuauacaaggacccuu

SEQ ID NO: 652122 - RNA, 19 nt, Artificial Sequence
  Description of Artificial Sequence: Synthetic oligonucleotide
cucguugcagugaguggcu

SEQ ID NO: 652123 - RNA, 19 nt, Artificial Sequence
  Description of Artificial Sequence: Synthetic oligonucleotide
ugcggcaguaggggucuuc

SEQ ID NO: 652124 - RNA, 19 nt, Artificial Sequence
  Description of Artificial Sequence: Synthetic oligonucleotide
accacacgugacaggucca

SEQ ID NO: 652125 - RNA, 19 nt, Artificial Sequence
  Description of Artificial Sequence: Synthetic oligonucleotide
gguauggcuguuggucuga

SEQ ID NO: 652126 - RNA, 19 nt, Artificial Sequence
  Description of Artificial Sequence: Synthetic oligonucleotide
gcacgcacuguggaguuca

SEQ ID NO: 652127 - RNA, 19 nt, Artificial Sequence
  Description of Artificial Sequence: Synthetic oligonucleotide
gccgacggcugccuggcac

SEQ ID NO: 652128 - RNA, 19 nt, Artificial Sequence
  Description of Artificial Sequence: Synthetic oligonucleotide
ccccagaucugaugccuug

SEQ ID NO: 652129 - RNA, 19 nt, Artificial Sequence
  Description of Artificial Sequence: Synthetic oligonucleotide
ccguagaaccuggacuuug

SEQ ID NO: 652130 - RNA, 19 nt, Artificial Sequence
  Description of Artificial Sequence: Synthetic oligonucleotide
auaguaccgugugcagcuu

SEQ ID NO: 652131 - RNA, 19 nt, Artificial Sequence
  Description of Artificial Sequence: Synthetic oligonucleotide
cggugaccuggcuaugacc

SEQ ID NO: 652132 - RNA, 19 nt, Artificial Sequence
  Description of Artificial Sequence: Synthetic oligonucleotide
cuggcacgcacuguggagu

SEQ ID NO: 652133 - RNA, 19 nt, Artificial Sequence
  Description of Artificial Sequence: Synthetic oligonucleotide
gcggugaugcugccgcuca

SEQ ID NO: 652134 - RNA, 19 nt, Artificial Sequence
  Description of Artificial Sequence: Synthetic oligonucleotide
cuccgguugcugacauaga

SEQ ID NO: 652135 - RNA, 19 nt, Artificial Sequence
  Description of Artificial Sequence: Synthetic oligonucleotide
ggccggugcuagguggagg

SEQ ID NO: 652136 - RNA, 19 nt, Artificial Sequence
  Description of Artificial Sequence: Synthetic oligonucleotide
ccucuugugccuggacacc

SEQ ID NO: 652137 - RNA, 19 nt, Artificial Sequence
  Description of Artificial Sequence: Synthetic oligonucleotide
gugugccucuugccugcac

SEQ ID NO: 652138 - RNA, 19 nt, Artificial Sequence
  Description of Artificial Sequence: Synthetic oligonucleotide
gcucccugaaggguccuac

SEQ ID NO: 652139 - RNA, 19 nt, Artificial Sequence
  Description of Artificial Sequence: Synthetic oligonucleotide
aggggccgacggcugccug

SEQ ID NO: 652140 - RNA, 19 nt, Artificial Sequence
  Description of Artificial Sequence: Synthetic oligonucleotide
uaggggccgacggcugccu

SEQ ID NO: 652141 - RNA, 19 nt, Artificial Sequence
  Description of Artificial Sequence: Synthetic oligonucleotide
cucauaucgguagcgccau

SEQ ID NO: 652142 - RNA, 19 nt, Artificial Sequence
  Description of Artificial Sequence: Synthetic oligonucleotide
caugcggcaguaggggucu

SEQ ID NO: 652143 - RNA, 19 nt, Artificial Sequence
  Description of Artificial Sequence: Synthetic oligonucleotide
gccuggaauauugcaacua

SEQ ID NO: 652144 - RNA, 19 nt, Artificial Sequence
  Description of Artificial Sequence: Synthetic oligonucleotide
gggucgguguaaagugcug

SEQ ID NO: 652145 - RNA, 19 nt, Artificial Sequence
  Description of Artificial Sequence: Synthetic oligonucleotide
aggccucgcccugcagauc

SEQ ID NO: 652146 - RNA, 19 nt, Artificial Sequence
  Description of Artificial Sequence: Synthetic oligonucleotide
uugagccucccuggccuuu

SEQ ID NO: 652147 - RNA, 19 nt, Artificial Sequence
  Description of Artificial Sequence: Synthetic oligonucleotide
ccucacucggaguccagaa

SEQ ID NO: 652148 - RNA, 19 nt, Artificial Sequence
  Description of Artificial Sequence: Synthetic oligonucleotide
ucccgacagugagucccgu

SEQ ID NO: 652149 - RNA, 19 nt, Artificial Sequence
  Description of Artificial Sequence: Synthetic oligonucleotide
caggaggcuaggggccgac

SEQ ID NO: 652150 - RNA, 19 nt, Artificial Sequence
  Description of Artificial Sequence: Synthetic oligonucleotide
cucgcccugcagaucccaa

SEQ ID NO: 652151 - RNA, 19 nt, Artificial Sequence
  Description of Artificial Sequence: Synthetic oligonucleotide
ccggucagggccaggccuc

SEQ ID NO: 652152 - RNA, 19 nt, Artificial Sequence
  Description of Artificial Sequence: Synthetic oligonucleotide
cucacaugcuauggucacu

SEQ ID NO: 652153 - RNA, 19 nt, Artificial Sequence
  Description of Artificial Sequence: Synthetic oligonucleotide
ccagacaucgucucccuuu

SEQ ID NO: 652154 - RNA, 19 nt, Artificial Sequence
  Description of Artificial Sequence: Synthetic oligonucleotide
  modified_base (3)..(3): a, c, u, g, unknown or other
cancuccgguugcugacau

SEQ ID NO: 652155 - RNA, 19 nt, Artificial Sequence
  Description of Artificial Sequence: Synthetic oligonucleotide
cacgggcacgcugccgcug

SEQ ID NO: 652156 - RNA, 19 nt, Artificial Sequence
  Description of Artificial Sequence: Synthetic oligonucleotide
ccgaggacaugggcucucg

SEQ ID NO: 652157 - RNA, 19 nt, Artificial Sequence
  Description of Artificial Sequence: Synthetic oligonucleotide
ccaugggucgguguaaagu

SEQ ID NO: 652158 - RNA, 19 nt, Artificial Sequence
  Description of Artificial Sequence: Synthetic oligonucleotide
cccagagaucugguugaug

SEQ ID NO: 652159 - RNA, 19 nt, Artificial Sequence
  Description of Artificial Sequence: Synthetic oligonucleotide
agcgaggcuccagcacaaa

SEQ ID NO: 652160 - RNA, 19 nt, Artificial Sequence
  Description of Artificial Sequence: Synthetic oligonucleotide
gugaggcgugccaggaccu

SEQ ID NO: 652161 - RNA, 19 nt, Artificial Sequence
  Description of Artificial Sequence: Synthetic oligonucleotide
  modified_base (4)..(4): a, c, u, g, unknown or other
ccancuccgguugcugaca

SEQ ID NO: 652162 - RNA, 19 nt, Artificial Sequence
  Description of Artificial Sequence: Synthetic oligonucleotide
ccgacgugaucuucccaga

SEQ ID NO: 652163 - RNA, 19 nt, Artificial Sequence
  Description of Artificial Sequence: Synthetic oligonucleotide
ggcucuuauuugagaauau

SEQ ID NO: 652164 - RNA, 19 nt, Artificial Sequence
  Description of Artificial Sequence: Synthetic oligonucleotide
cacgcacuguggaguucaa

SEQ ID NO: 652165 - RNA, 19 nt, Artificial Sequence
  Description of Artificial Sequence: Synthetic oligonucleotide
ggaccuccucacucggagu

SEQ ID NO: 652166 - RNA, 19 nt, Artificial Sequence
  Description of Artificial Sequence: Synthetic oligonucleotide
cgguagcgccauucuuggg

SEQ ID NO: 652167 - RNA, 19 nt, Artificial Sequence
  Description of Artificial Sequence: Synthetic oligonucleotide
gccucccgacagugagucc

SEQ ID NO: 652168 - RNA, 19 nt, Artificial Sequence
  Description of Artificial Sequence: Synthetic oligonucleotide
gguccccaugauaguagua

SEQ ID NO: 652169 - RNA, 19 nt, Artificial Sequence
  Description of Artificial Sequence: Synthetic oligonucleotide
cgacagugagucccguaga

SEQ ID NO: 652170 - RNA, 19 nt, Artificial Sequence
  Description of Artificial Sequence: Synthetic oligonucleotide
cagaucccaagggcucuua

SEQ ID NO: 652171 - RNA, 19 nt, Artificial Sequence
  Description of Artificial Sequence: Synthetic oligonucleotide
gggcucucgcuaccaggaa

SEQ ID NO: 652172 - RNA, 19 nt, Artificial Sequence
  Description of Artificial Sequence: Synthetic oligonucleotide
ccacuacucucggugaccu

SEQ ID NO: 652173 - RNA, 19 nt, Artificial Sequence
  Description of Artificial Sequence: Synthetic oligonucleotide
ccggugcuagguggagggc

SEQ ID NO: 652174 - RNA, 19 nt, Artificial Sequence
  Description of Artificial Sequence: Synthetic oligonucleotide
cuuuagcauuaaggccggu

SEQ ID NO: 652175 - RNA, 19 nt, Artificial Sequence
  Description of Artificial Sequence: Synthetic oligonucleotide
ccucuuauacaaggacccu

SEQ ID NO: 652176 - RNA, 19 nt, Artificial Sequence
  Description of Artificial Sequence: Synthetic oligonucleotide
aggugccuaugcagcucuu

SEQ ID NO: 652177 - RNA, 19 nt, Artificial Sequence
  Description of Artificial Sequence: Synthetic oligonucleotide
cuaugaccagagggcuggu

SEQ ID NO: 652178 - RNA, 19 nt, Artificial Sequence
  Description of Artificial Sequence: Synthetic oligonucleotide
gggcuggucacuagcuuuu

SEQ ID NO: 652179 - RNA, 19 nt, Artificial Sequence
  Description of Artificial Sequence: Synthetic oligonucleotide
ggaugggguuauaggguuu

SEQ ID NO: 652180 - RNA, 19 nt, Artificial Sequence
  Description of Artificial Sequence: Synthetic oligonucleotide
caccgaggacaugggcucu

SEQ ID NO: 652181 - RNA, 19 nt, Artificial Sequence
  Description of Artificial Sequence: Synthetic oligonucleotide
cucccucguugcagugagu

SEQ ID NO: 652182 - RNA, 19 nt, Artificial Sequence
  Description of Artificial Sequence: Synthetic oligonucleotide
cguugcagugaguggcugu

SEQ ID NO: 652183 - RNA, 19 nt, Artificial Sequence
  Description of Artificial Sequence: Synthetic oligonucleotide
cccgacagugagucccgua

SEQ ID NO: 652184 - RNA, 19 nt, Artificial Sequence
  Description of Artificial Sequence: Synthetic oligonucleotide
cgacggcugccuggcacgc

SEQ ID NO: 652185 - RNA, 19 nt, Artificial Sequence
  Description of Artificial Sequence: Synthetic oligonucleotide
ccccgacgugaucuuccca

SEQ ID NO: 652186 - RNA, 19 nt, Artificial Sequence
  Description of Artificial Sequence: Synthetic oligonucleotide
gccugcggaccuccucacu

SEQ ID NO: 652187 - RNA, 19 nt, Artificial Sequence
  Description of Artificial Sequence: Synthetic oligonucleotide
cccuggugacaugcugcca

SEQ ID NO: 652188 - RNA, 19 nt, Artificial Sequence
  Description of Artificial Sequence: Synthetic oligonucleotide
augcggcaguaggggucuu

SEQ ID NO: 652189 - RNA, 19 nt, Artificial Sequence
  Description of Artificial Sequence: Synthetic oligonucleotide
ggccgacggcugccuggca

SEQ ID NO: 652190 - RNA, 19 nt, Artificial Sequence
  Description of Artificial Sequence: Synthetic oligonucleotide
gcgccauucuugggugagu

SEQ ID NO: 652191 - RNA, 19 nt, Artificial Sequence
  Description of Artificial Sequence: Synthetic oligonucleotide
ccguagccggugugccucu

SEQ ID NO: 652192 - RNA, 19 nt, Artificial Sequence
  Description of Artificial Sequence: Synthetic oligonucleotide
cggcaguaggggucuuccu

SEQ ID NO: 652193 - RNA, 19 nt, Artificial Sequence
  Description of Artificial Sequence: Synthetic oligonucleotide
cccguagaaccuggacuuu

SEQ ID NO: 652194 - RNA, 19 nt, Artificial Sequence
  Description of Artificial Sequence: Synthetic oligonucleotide
cggugaugcugccgcucau

SEQ ID NO: 652195 - RNA, 19 nt, Artificial Sequence
  Description of Artificial Sequence: Synthetic oligonucleotide
uuagauuccuuauaaaagg

SEQ ID NO: 652196 - RNA, 19 nt, Artificial Sequence
  Description of Artificial Sequence: Synthetic oligonucleotide
aaucguaaaaugcaccggc

SEQ ID NO: 652197 - RNA, 19 nt, Artificial Sequence
  Description of Artificial Sequence: Synthetic oligonucleotide
uauauaaucgcagagagug

SEQ ID NO: 652198 - RNA, 19 nt, Artificial Sequence
  Description of Artificial Sequence: Synthetic oligonucleotide
aaugguauggaacacccgg

SEQ ID NO: 652199 - RNA, 19 nt, Artificial Sequence
  Description of Artificial Sequence: Synthetic oligonucleotide
uuuacuaggagauugguca

SEQ ID NO: 652200 - RNA, 19 nt, Artificial Sequence
  Description of Artificial Sequence: Synthetic oligonucleotide
uuaacgauauccuucaucc

SEQ ID NO: 652201 - RNA, 19 nt, Artificial Sequence
  Description of Artificial Sequence: Synthetic oligonucleotide
aaguaaacaguacuaauag

SEQ ID NO: 652202 - RNA, 19 nt, Artificial Sequence
  Description of Artificial Sequence: Synthetic oligonucleotide
gauguagucauucaaccgg

SEQ ID NO: 652203 - RNA, 19 nt, Artificial Sequence
  Description of Artificial Sequence: Synthetic oligonucleotide
gauuacauccuuuggacgg

SEQ ID NO: 652204 - RNA, 19 nt, Artificial Sequence
  Description of Artificial Sequence: Synthetic oligonucleotide
uacaguuucaccugaacgg

SEQ ID NO: 652205 - RNA, 19 nt, Artificial Sequence
  Description of Artificial Sequence: Synthetic oligonucleotide
aaacaguacuaauagccac

SEQ ID NO: 652206 - RNA, 19 nt, Artificial Sequence
  Description of Artificial Sequence: Synthetic oligonucleotide
aguacuaauagccacuuug

SEQ ID NO: 652207 - RNA, 19 nt, Artificial Sequence
  Description of Artificial Sequence: Synthetic oligonucleotide
ucuauuaaagugaugucca

SEQ ID NO: 652208 - RNA, 19 nt, Artificial Sequence
  Description of Artificial Sequence: Synthetic oligonucleotide
aauaagucaucuaacaucu

SEQ ID NO: 652209 - RNA, 19 nt, Artificial Sequence
  Description of Artificial Sequence: Synthetic oligonucleotide
caugauuuaaccuuagcac

SEQ ID NO: 652210 - RNA, 19 nt, Artificial Sequence
  Description of Artificial Sequence: Synthetic oligonucleotide
uuuguaaaaucucagggaa

SEQ ID NO: 652211 - RNA, 19 nt, Artificial Sequence
  Description of Artificial Sequence: Synthetic oligonucleotide
acauagauaaucuuauuug

SEQ ID NO: 652212 - RNA, 19 nt, Artificial Sequence
  Description of Artificial Sequence: Synthetic oligonucleotide
guaaacaguacuaauagcc

SEQ ID NO: 652213 - RNA, 19 nt, Artificial Sequence
  Description of Artificial Sequence: Synthetic oligonucleotide
agcucauauauauaaucgc

SEQ ID NO: 652214 - RNA, 19 nt, Artificial Sequence
  Description of Artificial Sequence: Synthetic oligonucleotide
uggaaauugaucuugcaga

SEQ ID NO: 652215 - RNA, 19 nt, Artificial Sequence
  Description of Artificial Sequence: Synthetic oligonucleotide
uuaaugguauggaacaccc

SEQ ID NO: 652216 - RNA, 19 nt, Artificial Sequence
  Description of Artificial Sequence: Synthetic oligonucleotide
cauagauaaucuuauuugc

SEQ ID NO: 652217 - RNA, 19 nt, Artificial Sequence
  Description of Artificial Sequence: Synthetic oligonucleotide
aguauaucaaaccccuugg

SEQ ID NO: 652218 - RNA, 19 nt, Artificial Sequence
  Description of Artificial Sequence: Synthetic oligonucleotide
uaucguaaaacucugugaa

SEQ ID NO: 652219 - RNA, 19 nt, Artificial Sequence
  Description of Artificial Sequence: Synthetic oligonucleotide
ugugagauaaucuggaaau

SEQ ID NO: 652220 - RNA, 19 nt, Artificial Sequence
  Description of Artificial Sequence: Synthetic oligonucleotide
aucaacauuggccagacgu

SEQ ID NO: 652221 - RNA, 19 nt, Artificial Sequence
  Description of Artificial Sequence: Synthetic oligonucleotide
uucacuaugguuaauggua

SEQ ID NO: 652222 - RNA, 19 nt, Artificial Sequence
  Description of Artificial Sequence: Synthetic oligonucleotide
accugaacggguuuuaaac

SEQ ID NO: 652223 - RNA, 19 nt, Artificial Sequence
  Description of Artificial Sequence: Synthetic oligonucleotide
ucuuuagcuauguugggag

SEQ ID NO: 652224 - RNA, 19 nt, Artificial Sequence
  Description of Artificial Sequence: Synthetic oligonucleotide
ucuccuacaugauuuaacc

SEQ ID NO: 652225 - RNA, 19 nt, Artificial Sequence
  Description of Artificial Sequence: Synthetic oligonucleotide
gaagauccccaauaggagg

SEQ ID NO: 652226 - RNA, 19 nt, Artificial Sequence
  Description of Artificial Sequence: Synthetic oligonucleotide
aaguggacauuaaugaaac

SEQ ID NO: 652227 - RNA, 19 nt, Artificial Sequence
  Description of Artificial Sequence: Synthetic oligonucleotide
cuugauagaaggauucgcc

SEQ ID NO: 652228 - RNA, 19 nt, Artificial Sequence
  Description of Artificial Sequence: Synthetic oligonucleotide
aaagagucggcucauacuu

SEQ ID NO: 652229 - RNA, 19 nt, Artificial Sequence
  Description of Artificial Sequence: Synthetic oligonucleotide
ugauagucuccaaacuugg

SEQ ID NO: 652230 - RNA, 19 nt, Artificial Sequence
  Description of Artificial Sequence: Synthetic oligonucleotide
ucauauauauaaucgcaga

SEQ ID NO: 652231 - RNA, 19 nt, Artificial Sequence
  Description of Artificial Sequence: Synthetic oligonucleotide
ucuuuaacgauauccuuca

SEQ ID NO: 652232 - RNA, 19 nt, Artificial Sequence
  Description of Artificial Sequence: Synthetic oligonucleotide
augauuuaaccuuagcaca

SEQ ID NO: 652233 - RNA, 19 nt, Artificial Sequence
  Description of Artificial Sequence: Synthetic oligonucleotide
aguuacuuuagggucauac

SEQ ID NO: 652234 - RNA, 19 nt, Artificial Sequence
  Description of Artificial Sequence: Synthetic oligonucleotide
ucguaaaacucugugaaag

SEQ ID NO: 652235 - RNA, 19 nt, Artificial Sequence
  Description of Artificial Sequence: Synthetic oligonucleotide
augauaguugaccugaggu

SEQ ID NO: 652236 - RNA, 19 nt, Artificial Sequence
  Description of Artificial Sequence: Synthetic oligonucleotide
cucauauauauaaucgcag

SEQ ID NO: 652237 - RNA, 19 nt, Artificial Sequence
  Description of Artificial Sequence: Synthetic oligonucleotide
ugguuaaugguauggaaca

SEQ ID NO: 652238 - RNA, 19 nt, Artificial Sequence
  Description of Artificial Sequence: Synthetic oligonucleotide
aaggcguacagcaaguagg

SEQ ID NO: 652239 - RNA, 19 nt, Artificial Sequence
  Description of Artificial Sequence: Synthetic oligonucleotide
agugaaacaacacacugau

SEQ ID NO: 652240 - RNA, 19 nt, Artificial Sequence
  Description of Artificial Sequence: Synthetic oligonucleotide
cuuuacuacuuuuguaucc

SEQ ID NO: 652241 - RNA, 19 nt, Artificial Sequence
  Description of Artificial Sequence: Synthetic oligonucleotide
uucuuuaacgauauccuuc

SEQ ID NO: 652242 - RNA, 19 nt, Artificial Sequence
  Description of Artificial Sequence: Synthetic oligonucleotide
cuugaguuacuuuaggguc

SEQ ID NO: 652243 - RNA, 19 nt, Artificial Sequence
  Description of Artificial Sequence: Synthetic oligonucleotide
auauucauuguucggcagg

SEQ ID NO: 652244 - RNA, 19 nt, Artificial Sequence
  Description of Artificial Sequence: Synthetic oligonucleotide
ucuccuaugauaguugacc

SEQ ID NO: 652245 - RNA, 19 nt, Artificial Sequence
  Description of Artificial Sequence: Synthetic oligonucleotide
uaggagauuggucaacugc

SEQ ID NO: 652246 - RNA, 19 nt, Artificial Sequence
  Description of Artificial Sequence: Synthetic oligonucleotide
uauccuucauccuaucuug

SEQ ID NO: 652247 - RNA, 19 nt, Artificial Sequence
  Description of Artificial Sequence: Synthetic oligonucleotide
uuuaacgauauccuucauc

SEQ ID NO: 652248 - RNA, 19 nt, Artificial Sequence
  Description of Artificial Sequence: Synthetic oligonucleotide
uccauuuacuaggagauug

SEQ ID NO: 652249 - RNA, 19 nt, Artificial Sequence
  Description of Artificial Sequence: Synthetic oligonucleotide
uuuauucccaguauaucaa

SEQ ID NO: 652250 - RNA, 19 nt, Artificial Sequence
  Description of Artificial Sequence: Synthetic oligonucleotide
cuuuggacggguuuuauuc

SEQ ID NO: 652251 - RNA, 19 nt, Artificial Sequence
  Description of Artificial Sequence: Synthetic oligonucleotide
uaucuugauagaaggauuc

SEQ ID NO: 652252 - RNA, 19 nt, Artificial Sequence
  Description of Artificial Sequence: Synthetic oligonucleotide
uauuaaacucugcacggga

SEQ ID NO: 652253 - RNA, 19 nt, Artificial Sequence
  Description of Artificial Sequence: Synthetic oligonucleotide
ugauaguugaccugaggug

SEQ ID NO: 652254 - RNA, 19 nt, Artificial Sequence
  Description of Artificial Sequence: Synthetic oligonucleotide
ggaaucguaaaaugcaccg

SEQ ID NO: 652255 - RNA, 19 nt, Artificial Sequence
  Description of Artificial Sequence: Synthetic oligonucleotide
acuaugguuaaugguaugg

SEQ ID NO: 652256 - RNA, 19 nt, Artificial Sequence
  Description of Artificial Sequence: Synthetic oligonucleotide
aaaguaaacaguacuaaua

SEQ ID NO: 652257 - RNA, 19 nt, Artificial Sequence
  Description of Artificial Sequence: Synthetic oligonucleotide
aacgauauccuucauccua

SEQ ID NO: 652258 - RNA, 19 nt, Artificial Sequence
  Description of Artificial Sequence: Synthetic oligonucleotide
agagcagguaguugaauuc

SEQ ID NO: 652259 - RNA, 19 nt, Artificial Sequence
  Description of Artificial Sequence: Synthetic oligonucleotide
cuggcuuggaguuacgacc

SEQ ID NO: 652260 - RNA, 19 nt, Artificial Sequence
  Description of Artificial Sequence: Synthetic oligonucleotide
agcagcuacugcuucacac

SEQ ID NO: 652261 - RNA, 19 nt, Artificial Sequence
  Description of Artificial Sequence: Synthetic oligonucleotide
augguuaaugguauggaac

SEQ ID NO: 652262 - RNA, 19 nt, Artificial Sequence
  Description of Artificial Sequence: Synthetic oligonucleotide
ugcaucguagauuuuauua

SEQ ID NO: 652263 - RNA, 19 nt, Artificial Sequence
  Description of Artificial Sequence: Synthetic oligonucleotide
gaaaguaguugccagcuca

SEQ ID NO: 652264 - RNA, 19 nt, Artificial Sequence
  Description of Artificial Sequence: Synthetic oligonucleotide
uauaaucgcagagagugug

SEQ ID NO: 652265 - RNA, 19 nt, Artificial Sequence
  Description of Artificial Sequence: Synthetic oligonucleotide
ucguagauuuuauuaaacu

SEQ ID NO: 652266 - RNA, 19 nt, Artificial Sequence
  Description of Artificial Sequence: Synthetic oligonucleotide
auuacauugauagucucca

SEQ ID NO: 652267 - RNA, 19 nt, Artificial Sequence
  Description of Artificial Sequence: Synthetic oligonucleotide
gaaaagucaacuauaaccu

SEQ ID NO: 652268 - RNA, 19 nt, Artificial Sequence
  Description of Artificial Sequence: Synthetic oligonucleotide
agcaugccaaacugggucc

SEQ ID NO: 652269 - RNA, 19 nt, Artificial Sequence
  Description of Artificial Sequence: Synthetic oligonucleotide
cacuauuacauugauaguc

SEQ ID NO: 652270 - RNA, 19 nt, Artificial Sequence
  Description of Artificial Sequence: Synthetic oligonucleotide
uugaguuacuuuaggguca

SEQ ID NO: 652271 - RNA, 19 nt, Artificial Sequence
  Description of Artificial Sequence: Synthetic oligonucleotide
uaaccuuagcacaucauau

SEQ ID NO: 652272 - RNA, 19 nt, Artificial Sequence
  Description of Artificial Sequence: Synthetic oligonucleotide
aaccccuuggccaugacag

SEQ ID NO: 652273 - RNA, 19 nt, Artificial Sequence
  Description of Artificial Sequence: Synthetic oligonucleotide
ucauucaaccgguuauggg

SEQ ID NO: 652274 - RNA, 19 nt, Artificial Sequence
  Description of Artificial Sequence: Synthetic oligonucleotide
uuauuaaacucugcacggg

SEQ ID NO: 652275 - RNA, 19 nt, Artificial Sequence
  Description of Artificial Sequence: Synthetic oligonucleotide
acuacuuuuguauccacau

SEQ ID NO: 652276 - RNA, 19 nt, Artificial Sequence
  Description of Artificial Sequence: Synthetic oligonucleotide
cuuggaguuacgaccagag

SEQ ID NO: 652277 - RNA, 19 nt, Artificial Sequence
  Description of Artificial Sequence: Synthetic oligonucleotide
uuaaacucugcacgggaga

SEQ ID NO: 652278 - RNA, 19 nt, Artificial Sequence
  Description of Artificial Sequence: Synthetic oligonucleotide
uaagucaucuaacaucuuu

SEQ ID NO: 652279 - RNA, 19 nt, Artificial Sequence
  Description of Artificial Sequence: Synthetic oligonucleotide
ucggagaaucuucuaagug

SEQ ID NO: 652280 - RNA, 19 nt, Artificial Sequence
  Description of Artificial Sequence: Synthetic oligonucleotide
uguccauagaccguuuuag

SEQ ID NO: 652281 - RNA, 19 nt, Artificial Sequence
  Description of Artificial Sequence: Synthetic oligonucleotide
guuacuuuagggucauacc

SEQ ID NO: 652282 - RNA, 19 nt, Artificial Sequence
  Description of Artificial Sequence: Synthetic oligonucleotide
ugaauuccauuuacuagga

SEQ ID NO: 652283 - RNA, 19 nt, Artificial Sequence
  Description of Artificial Sequence: Synthetic oligonucleotide
agagauuuaaucuccuuuu

SEQ ID NO: 652284 - RNA, 19 nt, Artificial Sequence
  Description of Artificial Sequence: Synthetic oligonucleotide
ucaaagagucggcucauac

SEQ ID NO: 652285 - RNA, 19 nt, Artificial Sequence
  Description of Artificial Sequence: Synthetic oligonucleotide
uugauagaaggauucgccu

SEQ ID NO: 652286 - RNA, 19 nt, Artificial Sequence
  Description of Artificial Sequence: Synthetic oligonucleotide
uuucacuaugguuaauggu

SEQ ID NO: 652287 - RNA, 19 nt, Artificial Sequence
  Description of Artificial Sequence: Synthetic oligonucleotide
cauucaaccgguuauggga

SEQ ID NO: 652288 - RNA, 19 nt, Artificial Sequence
  Description of Artificial Sequence: Synthetic oligonucleotide
uauuugaugcagccguaug

SEQ ID NO: 652289 - RNA, 19 nt, Artificial Sequence
  Description of Artificial Sequence: Synthetic oligonucleotide
accuucaauacuuucccug

SEQ ID NO: 652290 - RNA, 19 nt, Artificial Sequence
  Description of Artificial Sequence: Synthetic oligonucleotide
acucggagaaucuucuaag

SEQ ID NO: 652291 - RNA, 19 nt, Artificial Sequence
  Description of Artificial Sequence: Synthetic oligonucleotide
acuaauagccacuuuggua

SEQ ID NO: 652292 - RNA, 19 nt, Artificial Sequence
  Description of Artificial Sequence: Synthetic oligonucleotide
aguggacauuaaugaaacc

SEQ ID NO: 652293 - RNA, 19 nt, Artificial Sequence
  Description of Artificial Sequence: Synthetic oligonucleotide
ucuugauagaaggauucgc

SEQ ID NO: 652294 - RNA, 19 nt, Artificial Sequence
  Description of Artificial Sequence: Synthetic oligonucleotide
uccauagaccguuuuaguc

SEQ ID NO: 652295 - RNA, 19 nt, Artificial Sequence
  Description of Artificial Sequence: Synthetic oligonucleotide
uagucauucaaccgguuau

SEQ ID NO: 652296 - RNA, 19 nt, Artificial Sequence
  Description of Artificial Sequence: Synthetic oligonucleotide
gauaaucuggaaauugauc

SEQ ID NO: 652297 - RNA, 19 nt, Artificial Sequence
  Description of Artificial Sequence: Synthetic oligonucleotide
agagucggcucauacuuuc

SEQ ID NO: 652298 - RNA, 19 nt, Artificial Sequence
  Description of Artificial Sequence: Synthetic oligonucleotide
gaaggcguacagcaaguag

SEQ ID NO: 652299 - RNA, 19 nt, Artificial Sequence
  Description of Artificial Sequence: Synthetic oligonucleotide
guaguugaauuccauuuac

SEQ ID NO: 652300 - RNA, 19 nt, Artificial Sequence
  Description of Artificial Sequence: Synthetic oligonucleotide
uaaugguauggaacacccg

SEQ ID NO: 652301 - RNA, 19 nt, Artificial Sequence
  Description of Artificial Sequence: Synthetic oligonucleotide
uguuugauagcagcuaggu

SEQ ID NO: 652302 - RNA, 19 nt, Artificial Sequence
  Description of Artificial Sequence: Synthetic oligonucleotide
aucguagauuuuauuaaac

SEQ ID NO: 652303 - RNA, 19 nt, Artificial Sequence
  Description of Artificial Sequence: Synthetic oligonucleotide
gaaucguaaaaugcaccgg

SEQ ID NO: 652304 - RNA, 19 nt, Artificial Sequence
  Description of Artificial Sequence: Synthetic oligonucleotide
agaugagcgaugagcaugc

SEQ ID NO: 652305 - RNA, 19 nt, Artificial Sequence
  Description of Artificial Sequence: Synthetic oligonucleotide
ugauagaaggauucgccuc

SEQ ID NO: 652306 - RNA, 19 nt, Artificial Sequence
  Description of Artificial Sequence: Synthetic oligonucleotide
uucuagugaaggcguacag

SEQ ID NO: 652307 - RNA, 19 nt, Artificial Sequence
  Description of Artificial Sequence: Synthetic oligonucleotide
ucaaguggacauuaaugaa

SEQ ID NO: 652308 - RNA, 19 nt, Artificial Sequence
  Description of Artificial Sequence: Synthetic oligonucleotide
uacuuuagggucauaccaa

SEQ ID NO: 652309 - RNA, 19 nt, Artificial Sequence
  Description of Artificial Sequence: Synthetic oligonucleotide
uuuacucugcagugaaaca

SEQ ID NO: 652310 - RNA, 19 nt, Artificial Sequence
  Description of Artificial Sequence: Synthetic oligonucleotide
agauuuuauuaaacucugc

SEQ ID NO: 652311 - RNA, 19 nt, Artificial Sequence
  Description of Artificial Sequence: Synthetic oligonucleotide
uccaagucuggguaugcag

SEQ ID NO: 652312 - RNA, 19 nt, Artificial Sequence
  Description of Artificial Sequence: Synthetic oligonucleotide
guggacauuaaugaaacca

SEQ ID NO: 652313 - RNA, 19 nt, Artificial Sequence
  Description of Artificial Sequence: Synthetic oligonucleotide
uuuucugccugaagacucc

SEQ ID NO: 652314 - RNA, 19 nt, Artificial Sequence
  Description of Artificial Sequence: Synthetic oligonucleotide
uggguaugcagccuuaaua

SEQ ID NO: 652315 - RNA, 19 nt, Artificial Sequence
  Description of Artificial Sequence: Synthetic oligonucleotide
ucguaacugguccaaacuc

SEQ ID NO: 652316 - RNA, 19 nt, Artificial Sequence
  Description of Artificial Sequence: Synthetic oligonucleotide
uuggaguuacgaccagagg

SEQ ID NO: 652317 - RNA, 19 nt, Artificial Sequence
  Description of Artificial Sequence: Synthetic oligonucleotide
ucguaaaaugcaccggccu

SEQ ID NO: 652318 - RNA, 19 nt, Artificial Sequence
  Description of Artificial Sequence: Synthetic oligonucleotide
aaucucagggaaucguaaa

SEQ ID NO: 652319 - RNA, 19 nt, Artificial Sequence
  Description of Artificial Sequence: Synthetic oligonucleotide
aacacccgggcacgaagac

SEQ ID NO: 652320 - RNA, 19 nt, Artificial Sequence
  Description of Artificial Sequence: Synthetic oligonucleotide
aacaguacuaauagccacu

SEQ ID NO: 652321 - RNA, 19 nt, Artificial Sequence
  Description of Artificial Sequence: Synthetic oligonucleotide
acacaagagcauucgccac

SEQ ID NO: 652322 - RNA, 19 nt, Artificial Sequence
  Description of Artificial Sequence: Synthetic oligonucleotide
ugguauggaacacccgggc

SEQ ID NO: 652323 - RNA, 19 nt, Artificial Sequence
  Description of Artificial Sequence: Synthetic oligonucleotide
uucacacaagagcauucgc

SEQ ID NO: 652324 - RNA, 19 nt, Artificial Sequence
  Description of Artificial Sequence: Synthetic oligonucleotide
ucacuaugguuaaugguau

SEQ ID NO: 652325 - RNA, 19 nt, Artificial Sequence
  Description of Artificial Sequence: Synthetic oligonucleotide
ucuagugaaggcguacagc

SEQ ID NO: 652326 - RNA, 19 nt, Artificial Sequence
  Description of Artificial Sequence: Synthetic oligonucleotide
uagaccugauucuagugaa

SEQ ID NO: 652327 - RNA, 19 nt, Artificial Sequence
  Description of Artificial Sequence: Synthetic oligonucleotide
uauggaacacccgggcacg

SEQ ID NO: 652328 - RNA, 19 nt, Artificial Sequence
  Description of Artificial Sequence: Synthetic oligonucleotide
auagcagcuaggucagaag

SEQ ID NO: 652329 - RNA, 19 nt, Artificial Sequence
  Description of Artificial Sequence: Synthetic oligonucleotide
ccauagaccguuuuagucc

SEQ ID NO: 652330 - RNA, 19 nt, Artificial Sequence
  Description of Artificial Sequence: Synthetic oligonucleotide
uuccccuagcaccacacca

SEQ ID NO: 652331 - RNA, 19 nt, Artificial Sequence
  Description of Artificial Sequence: Synthetic oligonucleotide
cugugaaaguaguugccag

SEQ ID NO: 652332 - RNA, 19 nt, Artificial Sequence
  Description of Artificial Sequence: Synthetic oligonucleotide
aucguaaaaugcaccggcc

SEQ ID NO: 652333 - RNA, 19 nt, Artificial Sequence
  Description of Artificial Sequence: Synthetic oligonucleotide
uucagucuauacuucaauu

SEQ ID NO: 652334 - RNA, 19 nt, Artificial Sequence
  Description of Artificial Sequence: Synthetic oligonucleotide
gaaucuucuaagugaccac

SEQ ID NO: 652335 - RNA, 19 nt, Artificial Sequence
  Description of Artificial Sequence: Synthetic oligonucleotide
uucccgagcagcuuucuga

SEQ ID NO: 652336 - RNA, 19 nt, Artificial Sequence
  Description of Artificial Sequence: Synthetic oligonucleotide
ucuucuaagugaccacagu

SEQ ID NO: 652337 - RNA, 19 nt, Artificial Sequence
  Description of Artificial Sequence: Synthetic oligonucleotide
ugaacggguuuuaaacuuc

SEQ ID NO: 652338 - RNA, 19 nt, Artificial Sequence
  Description of Artificial Sequence: Synthetic oligonucleotide
uccucgguaucaaaccucu

SEQ ID NO: 652339 - RNA, 19 nt, Artificial Sequence
  Description of Artificial Sequence: Synthetic oligonucleotide
ucgguaucaaaccucuuuu

SEQ ID NO: 652340 - RNA, 19 nt, Artificial Sequence
  Description of Artificial Sequence: Synthetic oligonucleotide
uggcuuggaguuacgacca

SEQ ID NO: 652341 - RNA, 19 nt, Artificial Sequence
  Description of Artificial Sequence: Synthetic oligonucleotide
uccucaaauagucucuguu

SEQ ID NO: 652342 - RNA, 19 nt, Artificial Sequence
  Description of Artificial Sequence: Synthetic oligonucleotide
aaauagucucuguuugaua

SEQ ID NO: 652343 - RNA, 19 nt, Artificial Sequence
  Description of Artificial Sequence: Synthetic oligonucleotide
ccugcaaauucaaagaguc

SEQ ID NO: 652344 - RNA, 19 nt, Artificial Sequence
  Description of Artificial Sequence: Synthetic oligonucleotide
uuggacggguuuuauuccc

SEQ ID NO: 652345 - RNA, 19 nt, Artificial Sequence
  Description of Artificial Sequence: Synthetic oligonucleotide
cuaucguaaaacucuguga

SEQ ID NO: 652346 - RNA, 19 nt, Artificial Sequence
  Description of Artificial Sequence: Synthetic oligonucleotide
guaaaaugcaccggccuag

SEQ ID NO: 652347 - RNA, 19 nt, Artificial Sequence
  Description of Artificial Sequence: Synthetic oligonucleotide
guauggaacacccgggcac

SEQ ID NO: 652348 - RNA, 19 nt, Artificial Sequence
  Description of Artificial Sequence: Synthetic oligonucleotide
agggaaucguaaaaugcac

SEQ ID NO: 652349 - RNA, 19 nt, Artificial Sequence
  Description of Artificial Sequence: Synthetic oligonucleotide
cuacaaggcguacaguuuc

SEQ ID NO: 652350 - RNA, 19 nt, Artificial Sequence
  Description of Artificial Sequence: Synthetic oligonucleotide
uucucaaguggacauuaau

SEQ ID NO: 652351 - RNA, 19 nt, Artificial Sequence
  Description of Artificial Sequence: Synthetic oligonucleotide
aagugauguccaaugcauc

SEQ ID NO: 652352 - RNA, 19 nt, Artificial Sequence
  Description of Artificial Sequence: Synthetic oligonucleotide
aaggauucgccucuuucua

SEQ ID NO: 652353 - RNA, 19 nt, Artificial Sequence
  Description of Artificial Sequence: Synthetic oligonucleotide
ucuuucuauuaaagugaug

SEQ ID NO: 652354 - RNA, 19 nt, Artificial Sequence
  Description of Artificial Sequence: Synthetic oligonucleotide
caaguggacauuaaugaaa

SEQ ID NO: 652355 - RNA, 19 nt, Artificial Sequence
  Description of Artificial Sequence: Synthetic oligonucleotide
gagaaauacccauugcacu

SEQ ID NO: 652356 - RNA, 19 nt, Artificial Sequence
  Description of Artificial Sequence: Synthetic oligonucleotide
uccuaugauaguugaccug

SEQ ID NO: 652357 - RNA, 19 nt, Artificial Sequence
  Description of Artificial Sequence: Synthetic oligonucleotide
acaugcaucucuuuagcua

SEQ ID NO: 652358 - RNA, 19 nt, Artificial Sequence
  Description of Artificial Sequence: Synthetic oligonucleotide
gcuaucguaaaacucugug

SEQ ID NO: 652359 - RNA, 19 nt, Artificial Sequence
  Description of Artificial Sequence: Synthetic oligonucleotide
auuacauccuuuggacggg

SEQ ID NO: 652360 - RNA, 19 nt, Artificial Sequence
  Description of Artificial Sequence: Synthetic oligonucleotide
aggaggguuguccaagucu

SEQ ID NO: 652361 - RNA, 19 nt, Artificial Sequence
  Description of Artificial Sequence: Synthetic oligonucleotide
auuaaacucugcacgggag

SEQ ID NO: 652362 - RNA, 19 nt, Artificial Sequence
  Description of Artificial Sequence: Synthetic oligonucleotide
uuccuuauaaaaggccuga

SEQ ID NO: 652363 - RNA, 19 nt, Artificial Sequence
  Description of Artificial Sequence: Synthetic oligonucleotide
ucucguaacugguccaaac

SEQ ID NO: 652364 - RNA, 19 nt, Artificial Sequence
  Description of Artificial Sequence: Synthetic oligonucleotide
uuauucccaguauaucaaa

SEQ ID NO: 652365 - RNA, 19 nt, Artificial Sequence
  Description of Artificial Sequence: Synthetic oligonucleotide
gauagaaggauucgccucu

SEQ ID NO: 652366 - RNA, 19 nt, Artificial Sequence
  Description of Artificial Sequence: Synthetic oligonucleotide
ucauccuaucuugauagaa

SEQ ID NO: 652367 - RNA, 19 nt, Artificial Sequence
  Description of Artificial Sequence: Synthetic oligonucleotide
ucaaccgguuaugggauag

SEQ ID NO: 652368 - RNA, 19 nt, Artificial Sequence
  Description of Artificial Sequence: Synthetic oligonucleotide
aaauccaacaugggucacu

SEQ ID NO: 652369 - RNA, 19 nt, Artificial Sequence
  Description of Artificial Sequence: Synthetic oligonucleotide
ugaugcagccguaugcaau

SEQ ID NO: 652370 - RNA, 19 nt, Artificial Sequence
  Description of Artificial Sequence: Synthetic oligonucleotide
gagcagguaguugaauucc

SEQ ID NO: 652371 - RNA, 19 nt, Artificial Sequence
  Description of Artificial Sequence: Synthetic oligonucleotide
cuuaaauuccuccucggua

SEQ ID NO: 652372 - RNA, 19 nt, Artificial Sequence
  Description of Artificial Sequence: Synthetic oligonucleotide
uuguucggcagguguuugg

SEQ ID NO: 652373 - RNA, 19 nt, Artificial Sequence
  Description of Artificial Sequence: Synthetic oligonucleotide
aaugcaucguagauuuuau

SEQ ID NO: 652374 - RNA, 19 nt, Artificial Sequence
  Description of Artificial Sequence: Synthetic oligonucleotide
auugcacuauuacauugau

SEQ ID NO: 652375 - RNA, 19 nt, Artificial Sequence
  Description of Artificial Sequence: Synthetic oligonucleotide
gaaauugaucuugcagaug

SEQ ID NO: 652376 - RNA, 19 nt, Artificial Sequence
  Description of Artificial Sequence: Synthetic oligonucleotide
accggccuaguuuccauuc

SEQ ID NO: 652377 - RNA, 19 nt, Artificial Sequence
  Description of Artificial Sequence: Synthetic oligonucleotide
ugcacgggagacgucacag

SEQ ID NO: 652378 - RNA, 19 nt, Artificial Sequence
  Description of Artificial Sequence: Synthetic oligonucleotide
gucacuugaguuacuuuag

SEQ ID NO: 652379 - RNA, 19 nt, Artificial Sequence
  Description of Artificial Sequence: Synthetic oligonucleotide
gaaggauucgccucuuucu

SEQ ID NO: 652380 - RNA, 19 nt, Artificial Sequence
  Description of Artificial Sequence: Synthetic oligonucleotide
caaggcguacaguuucacc

SEQ ID NO: 652381 - RNA, 19 nt, Artificial Sequence
  Description of Artificial Sequence: Synthetic oligonucleotide
ugucgaucuuucuccacac

SEQ ID NO: 652382 - RNA, 19 nt, Artificial Sequence
  Description of Artificial Sequence: Synthetic oligonucleotide
ucggcucauacuuucuccu

SEQ ID NO: 652383 - RNA, 19 nt, Artificial Sequence
  Description of Artificial Sequence: Synthetic oligonucleotide
auaaucgcagagagugugg

SEQ ID NO: 652384 - RNA, 19 nt, Artificial Sequence
  Description of Artificial Sequence: Synthetic oligonucleotide
aguuacgaccagaggaggg

SEQ ID NO: 652385 - RNA, 19 nt, Artificial Sequence
  Description of Artificial Sequence: Synthetic oligonucleotide
uacaaggcguacaguuuca

SEQ ID NO: 652386 - RNA, 19 nt, Artificial Sequence
  Description of Artificial Sequence: Synthetic oligonucleotide
ugagguuccaggccuuuau

SEQ ID NO: 652387 - RNA, 19 nt, Artificial Sequence
  Description of Artificial Sequence: Synthetic oligonucleotide
cagaugagcgaugagcaug

SEQ ID NO: 652388 - RNA, 19 nt, Artificial Sequence
  Description of Artificial Sequence: Synthetic oligonucleotide
aacuuguccauagaccguu

SEQ ID NO: 652389 - RNA, 19 nt, Artificial Sequence
  Description of Artificial Sequence: Synthetic oligonucleotide
auuccuuauaaaaggccug

SEQ ID NO: 652390 - RNA, 19 nt, Artificial Sequence
  Description of Artificial Sequence: Synthetic oligonucleotide
acggguuuuauucccagua

SEQ ID NO: 652391 - RNA, 19 nt, Artificial Sequence
  Description of Artificial Sequence: Synthetic oligonucleotide
ucucagggaaucguaaaau

SEQ ID NO: 652392 - RNA, 19 nt, Artificial Sequence
  Description of Artificial Sequence: Synthetic oligonucleotide
ggaguuacgaccagaggag

SEQ ID NO: 652393 - RNA, 19 nt, Artificial Sequence
  Description of Artificial Sequence: Synthetic oligonucleotide
uuacuaggagauuggucaa

SEQ ID NO: 652394 - RNA, 19 nt, Artificial Sequence
  Description of Artificial Sequence: Synthetic oligonucleotide
ggacauuaaugaaaccagg

SEQ ID NO: 652395 - RNA, 19 nt, Artificial Sequence
  Description of Artificial Sequence: Synthetic oligonucleotide
uuguccauagaccguuuua

SEQ ID NO: 652396 - RNA, 19 nt, Artificial Sequence
  Description of Artificial Sequence: Synthetic oligonucleotide
accacauagauaaucuuau

SEQ ID NO: 652397 - RNA, 19 nt, Artificial Sequence
  Description of Artificial Sequence: Synthetic oligonucleotide
gauucuagugaaggcguac

SEQ ID NO: 652398 - RNA, 19 nt, Artificial Sequence
  Description of Artificial Sequence: Synthetic oligonucleotide
gaguuacgaccagaggagg

SEQ ID NO: 652399 - RNA, 19 nt, Artificial Sequence
  Description of Artificial Sequence: Synthetic oligonucleotide
cuaugauaguugaccugag

SEQ ID NO: 652400 - RNA, 19 nt, Artificial Sequence
  Description of Artificial Sequence: Synthetic oligonucleotide
gaccccgcaauuucaacuc

SEQ ID NO: 652401 - RNA, 19 nt, Artificial Sequence
  Description of Artificial Sequence: Synthetic oligonucleotide
ugaaaguaguugccagcuc

SEQ ID NO: 652402 - RNA, 19 nt, Artificial Sequence
  Description of Artificial Sequence: Synthetic oligonucleotide
uucgccucuuucuauuaaa

SEQ ID NO: 652403 - RNA, 19 nt, Artificial Sequence
  Description of Artificial Sequence: Synthetic oligonucleotide
cagugaaacaacacacuga

SEQ ID NO: 652404 - RNA, 19 nt, Artificial Sequence
  Description of Artificial Sequence: Synthetic oligonucleotide
uucuccuaugauaguugac

SEQ ID NO: 652405 - RNA, 19 nt, Artificial Sequence
  Description of Artificial Sequence: Synthetic oligonucleotide
ccaaccaaucauuugagca

SEQ ID NO: 652406 - RNA, 19 nt, Artificial Sequence
  Description of Artificial Sequence: Synthetic oligonucleotide
ugauaggcucgcuucuuaa

SEQ ID NO: 652407 - RNA, 19 nt, Artificial Sequence
  Description of Artificial Sequence: Synthetic oligonucleotide
agacgugcaauagaccuga

SEQ ID NO: 652408 - RNA, 19 nt, Artificial Sequence
  Description of Artificial Sequence: Synthetic oligonucleotide
aagucaacuauaaccuuuu

SEQ ID NO: 652409 - RNA, 19 nt, Artificial Sequence
  Description of Artificial Sequence: Synthetic oligonucleotide
aaccgguuaugggauaggu

SEQ ID NO: 652410 - RNA, 19 nt, Artificial Sequence
  Description of Artificial Sequence: Synthetic oligonucleotide
acuaggagauuggucaacu

SEQ ID NO: 652411 - RNA, 19 nt, Artificial Sequence
  Description of Artificial Sequence: Synthetic oligonucleotide
agauaaucuggaaauugau

SEQ ID NO: 652412 - RNA, 19 nt, Artificial Sequence
  Description of Artificial Sequence: Synthetic oligonucleotide
auagcacagccaaagacau

SEQ ID NO: 652413 - RNA, 19 nt, Artificial Sequence
  Description of Artificial Sequence: Synthetic oligonucleotide
aucguaaaacucugugaaa

SEQ ID NO: 652414 - RNA, 19 nt, Artificial Sequence
  Description of Artificial Sequence: Synthetic oligonucleotide
caucguagauuuuauuaaa

SEQ ID NO: 652415 - RNA, 19 nt, Artificial Sequence
  Description of Artificial Sequence: Synthetic oligonucleotide
uaacgauauccuucauccu

SEQ ID NO: 652416 - RNA, 19 nt, Artificial Sequence
  Description of Artificial Sequence: Synthetic oligonucleotide
uaacugguccaaacucgga

SEQ ID NO: 652417 - RNA, 19 nt, Artificial Sequence
  Description of Artificial Sequence: Synthetic oligonucleotide
uacgaccagaggaggguug

SEQ ID NO: 652418 - RNA, 19 nt, Artificial Sequence
  Description of Artificial Sequence: Synthetic oligonucleotide
ccauuuacuaggagauugg

SEQ ID NO: 652419 - RNA, 19 nt, Artificial Sequence
  Description of Artificial Sequence: Synthetic oligonucleotide
gguaugcagccuuaauagc

SEQ ID NO: 652420 - RNA, 19 nt, Artificial Sequence
  Description of Artificial Sequence: Synthetic oligonucleotide
cguaacugguccaaacucg

SEQ ID NO: 652421 - RNA, 19 nt, Artificial Sequence
  Description of Artificial Sequence: Synthetic oligonucleotide
aggaccccgcaauuucaac

SEQ ID NO: 652422 - RNA, 19 nt, Artificial Sequence
  Description of Artificial Sequence: Synthetic oligonucleotide
auucuagugaaggcguaca

SEQ ID NO: 652423 - RNA, 19 nt, Artificial Sequence
  Description of Artificial Sequence: Synthetic oligonucleotide
uucauccuaucuugauaga

SEQ ID NO: 652424 - RNA, 19 nt, Artificial Sequence
  Description of Artificial Sequence: Synthetic oligonucleotide
acaguagcagcuaucguaa

SEQ ID NO: 652425 - RNA, 19 nt, Artificial Sequence
  Description of Artificial Sequence: Synthetic oligonucleotide
cagcuaucguaaaacucug

SEQ ID NO: 652426 - RNA, 19 nt, Artificial Sequence
  Description of Artificial Sequence: Synthetic oligonucleotide
cagccguaugcaauggaug

SEQ ID NO: 652427 - RNA, 19 nt, Artificial Sequence
  Description of Artificial Sequence: Synthetic oligonucleotide
auauauaaucgcagagagu

SEQ ID NO: 652428 - RNA, 19 nt, Artificial Sequence
  Description of Artificial Sequence: Synthetic oligonucleotide
cuaggagauuggucaacug

SEQ ID NO: 652429 - RNA, 19 nt, Artificial Sequence
  Description of Artificial Sequence: Synthetic oligonucleotide
uggacggguuuuauuccca

SEQ ID NO: 652430 - RNA, 19 nt, Artificial Sequence
  Description of Artificial Sequence: Synthetic oligonucleotide
aaucuccuacaugauuuaa

SEQ ID NO: 652431 - RNA, 19 nt, Artificial Sequence
  Description of Artificial Sequence: Synthetic oligonucleotide
caccacauagauaaucuua

SEQ ID NO: 652432 - RNA, 19 nt, Artificial Sequence
  Description of Artificial Sequence: Synthetic oligonucleotide
ccaagucuggguaugcagc

SEQ ID NO: 652433 - RNA, 19 nt, Artificial Sequence
  Description of Artificial Sequence: Synthetic oligonucleotide
gauuuaaccuuagcacauc

SEQ ID NO: 652434 - RNA, 19 nt, Artificial Sequence
  Description of Artificial Sequence: Synthetic oligonucleotide
aaaguaguugccagcucau

SEQ ID NO: 652435 - RNA, 19 nt, Artificial Sequence
  Description of Artificial Sequence: Synthetic oligonucleotide
gauagcagcuaggucagaa

SEQ ID NO: 652436 - RNA, 19 nt, Artificial Sequence
  Description of Artificial Sequence: Synthetic oligonucleotide
cagacgugcaauagaccug

SEQ ID NO: 652437 - RNA, 19 nt, Artificial Sequence
  Description of Artificial Sequence: Synthetic oligonucleotide
ugauucuagugaaggcgua

SEQ ID NO: 652438 - RNA, 19 nt, Artificial Sequence
  Description of Artificial Sequence: Synthetic oligonucleotide
uuaugggauaggucagcau

SEQ ID NO: 652439 - RNA, 19 nt, Artificial Sequence
  Description of Artificial Sequence: Synthetic oligonucleotide
uuggucgucuucucuuuuc

SEQ ID NO: 652440 - RNA, 19 nt, Artificial Sequence
  Description of Artificial Sequence: Synthetic oligonucleotide
accccuuggccaugacagc

SEQ ID NO: 652441 - RNA, 19 nt, Artificial Sequence
  Description of Artificial Sequence: Synthetic oligonucleotide
aaacucggagaaucuucua

SEQ ID NO: 652442 - RNA, 19 nt, Artificial Sequence
  Description of Artificial Sequence: Synthetic oligonucleotide
gccuuaauagcacagccaa

SEQ ID NO: 652443 - RNA, 19 nt, Artificial Sequence
  Description of Artificial Sequence: Synthetic oligonucleotide
guagucauucaaccgguua

SEQ ID NO: 652444 - RNA, 19 nt, Artificial Sequence
  Description of Artificial Sequence: Synthetic oligonucleotide
uaaaaugcaccggccuagu

SEQ ID NO: 652445 - RNA, 19 nt, Artificial Sequence
  Description of Artificial Sequence: Synthetic oligonucleotide
guaugcaauggaugucuga

SEQ ID NO: 652446 - RNA, 19 nt, Artificial Sequence
  Description of Artificial Sequence: Synthetic oligonucleotide
cacuaugguuaaugguaug

SEQ ID NO: 652447 - RNA, 19 nt, Artificial Sequence
  Description of Artificial Sequence: Synthetic oligonucleotide
aauacccauugcacuauua

SEQ ID NO: 652448 - RNA, 19 nt, Artificial Sequence
  Description of Artificial Sequence: Synthetic oligonucleotide
gggaaucguaaaaugcacc

SEQ ID NO: 652449 - RNA, 19 nt, Artificial Sequence
  Description of Artificial Sequence: Synthetic oligonucleotide
guuaugggauaggucagca

SEQ ID NO: 652450 - RNA, 19 nt, Artificial Sequence
  Description of Artificial Sequence: Synthetic oligonucleotide
auucaaccgguuaugggau

SEQ ID NO: 652451 - RNA, 19 nt, Artificial Sequence
  Description of Artificial Sequence: Synthetic oligonucleotide
accgguuaugggauagguc

SEQ ID NO: 652452 - RNA, 19 nt, Artificial Sequence
  Description of Artificial Sequence: Synthetic oligonucleotide
uacuaggagauuggucaac

SEQ ID NO: 652453 - RNA, 19 nt, Artificial Sequence
  Description of Artificial Sequence: Synthetic oligonucleotide
ugaguuacuuuagggucau

SEQ ID NO: 652454 - RNA, 19 nt, Artificial Sequence
  Description of Artificial Sequence: Synthetic oligonucleotide
cacaagagcauucgccaca

SEQ ID NO: 652455 - RNA, 19 nt, Artificial Sequence
  Description of Artificial Sequence: Synthetic oligonucleotide
cugauucuagugaaggcgu

SEQ ID NO: 652456 - RNA, 19 nt, Artificial Sequence
  Description of Artificial Sequence: Synthetic oligonucleotide
cuauuaaagugauguccaa

SEQ ID NO: 652457 - RNA, 19 nt, Artificial Sequence
  Description of Artificial Sequence: Synthetic oligonucleotide
uguagucauucaaccgguu

SEQ ID NO: 652458 - RNA, 19 nt, Artificial Sequence
  Description of Artificial Sequence: Synthetic oligonucleotide
uucagccggucgaucucag

SEQ ID NO: 652459 - RNA, 19 nt, Artificial Sequence
  Description of Artificial Sequence: Synthetic oligonucleotide
acauccuguaggcggcugu

SEQ ID NO: 652460 - RNA, 19 nt, Artificial Sequence
  Description of Artificial Sequence: Synthetic oligonucleotide
ggaacacccgggcacgaag

SEQ ID NO: 652461 - RNA, 19 nt, Artificial Sequence
  Description of Artificial Sequence: Synthetic oligonucleotide
ccguuuuaguccuucuccc

SEQ ID NO: 652462 - RNA, 19 nt, Artificial Sequence
  Description of Artificial Sequence: Synthetic oligonucleotide
gaggguuguccaagucugg

SEQ ID NO: 652463 - RNA, 19 nt, Artificial Sequence
  Description of Artificial Sequence: Synthetic oligonucleotide
auauaaucgcagagagugu

SEQ ID NO: 652464 - RNA, 19 nt, Artificial Sequence
  Description of Artificial Sequence: Synthetic oligonucleotide
agccuuaauagcacagcca

SEQ ID NO: 652465 - RNA, 19 nt, Artificial Sequence
  Description of Artificial Sequence: Synthetic oligonucleotide
caaugcaucguagauuuua

SEQ ID NO: 652466 - RNA, 19 nt, Artificial Sequence
  Description of Artificial Sequence: Synthetic oligonucleotide
aggauucgccucuuucuau

SEQ ID NO: 652467 - RNA, 19 nt, Artificial Sequence
  Description of Artificial Sequence: Synthetic oligonucleotide
cuaggucagaaguaucaua

SEQ ID NO: 652468 - RNA, 19 nt, Artificial Sequence
  Description of Artificial Sequence: Synthetic oligonucleotide
gaucuugcagaugagcgau

SEQ ID NO: 652469 - RNA, 19 nt, Artificial Sequence
  Description of Artificial Sequence: Synthetic oligonucleotide
auuguucggcagguguuug

SEQ ID NO: 652470 - RNA, 19 nt, Artificial Sequence
  Description of Artificial Sequence: Synthetic oligonucleotide
uccuuauaaaaggccugaa

SEQ ID NO: 652471 - RNA, 19 nt, Artificial Sequence
  Description of Artificial Sequence: Synthetic oligonucleotide
uagaccguuuuaguccuuc

SEQ ID NO: 652472 - RNA, 19 nt, Artificial Sequence
  Description of Artificial Sequence: Synthetic oligonucleotide
uggccaacaugcaucucuu

SEQ ID NO: 652473 - RNA, 19 nt, Artificial Sequence
  Description of Artificial Sequence: Synthetic oligonucleotide
cuuugagcaucugagaaau

SEQ ID NO: 652474 - RNA, 19 nt, Artificial Sequence
  Description of Artificial Sequence: Synthetic oligonucleotide
acgauauccuucauccuau

SEQ ID NO: 652475 - RNA, 19 nt, Artificial Sequence
  Description of Artificial Sequence: Synthetic oligonucleotide
cuguaggcggcuguugaug

SEQ ID NO: 652476 - RNA, 19 nt, Artificial Sequence
  Description of Artificial Sequence: Synthetic oligonucleotide
ccuaugauaguugaccuga

SEQ ID NO: 652477 - RNA, 19 nt, Artificial Sequence
  Description of Artificial Sequence: Synthetic oligonucleotide
cagccggucgaucucagca

SEQ ID NO: 652478 - RNA, 19 nt, Artificial Sequence
  Description of Artificial Sequence: Synthetic oligonucleotide
cuaccaucauccacuugca

SEQ ID NO: 652479 - RNA, 19 nt, Artificial Sequence
  Description of Artificial Sequence: Synthetic oligonucleotide
gauucgccucuuucuauua

SEQ ID NO: 652480 - RNA, 19 nt, Artificial Sequence
  Description of Artificial Sequence: Synthetic oligonucleotide
cacccgggcacgaagacaa

SEQ ID NO: 652481 - RNA, 19 nt, Artificial Sequence
  Description of Artificial Sequence: Synthetic oligonucleotide
caguucuucagccggucga

SEQ ID NO: 652482 - RNA, 19 nt, Artificial Sequence
  Description of Artificial Sequence: Synthetic oligonucleotide
gcuauguugggagaggaaa

SEQ ID NO: 652483 - RNA, 19 nt, Artificial Sequence
  Description of Artificial Sequence: Synthetic oligonucleotide
caaagagucggcucauacu

SEQ ID NO: 652484 - RNA, 19 nt, Artificial Sequence
  Description of Artificial Sequence: Synthetic oligonucleotide
acaagagcauucgccacau

SEQ ID NO: 652485 - RNA, 19 nt, Artificial Sequence
  Description of Artificial Sequence: Synthetic oligonucleotide
ggaaauugaucuugcagau

SEQ ID NO: 652486 - RNA, 19 nt, Artificial Sequence
  Description of Artificial Sequence: Synthetic oligonucleotide
gguauggaacacccgggca

SEQ ID NO: 652487 - RNA, 19 nt, Artificial Sequence
  Description of Artificial Sequence: Synthetic oligonucleotide
cagucuauacuucaauuuu

SEQ ID NO: 652488 - RNA, 19 nt, Artificial Sequence
  Description of Artificial Sequence: Synthetic oligonucleotide
gguuaugggauaggucagc

SEQ ID NO: 652489 - RNA, 19 nt, Artificial Sequence
  Description of Artificial Sequence: Synthetic oligonucleotide
augcaucguagauuuuauu

SEQ ID NO: 652490 - RNA, 19 nt, Artificial Sequence
  Description of Artificial Sequence: Synthetic oligonucleotide
acgugcaauagaccugauu

SEQ ID NO: 652491 - RNA, 19 nt, Artificial Sequence
  Description of Artificial Sequence: Synthetic oligonucleotide
gaacacccgggcacgaaga

SEQ ID NO: 652492 - RNA, 19 nt, Artificial Sequence
  Description of Artificial Sequence: Synthetic oligonucleotide
aguuucaccugaacggguu

SEQ ID NO: 652493 - RNA, 19 nt, Artificial Sequence
  Description of Artificial Sequence: Synthetic oligonucleotide
cucguaacugguccaaacu

SEQ ID NO: 652494 - RNA, 19 nt, Artificial Sequence
  Description of Artificial Sequence: Synthetic oligonucleotide
ucuggguaugcagccuuaa

SEQ ID NO: 652495 - RNA, 19 nt, Artificial Sequence
  Description of Artificial Sequence: Synthetic oligonucleotide
cucugcacgggagacguca

SEQ ID NO: 652496 - RNA, 19 nt, Artificial Sequence
  Description of Artificial Sequence: Synthetic oligonucleotide
uucaaccgguuaugggaua

SEQ ID NO: 652497 - RNA, 19 nt, Artificial Sequence
  Description of Artificial Sequence: Synthetic oligonucleotide
ugaaggcguacagcaagua

SEQ ID NO: 652498 - RNA, 19 nt, Artificial Sequence
  Description of Artificial Sequence: Synthetic oligonucleotide
auucaaagagucggcucau

SEQ ID NO: 652499 - RNA, 19 nt, Artificial Sequence
  Description of Artificial Sequence: Synthetic oligonucleotide
gauccccaauaggagguga

SEQ ID NO: 652500 - RNA, 19 nt, Artificial Sequence
  Description of Artificial Sequence: Synthetic oligonucleotide
aaguaguugccagcucaua

SEQ ID NO: 652501 - RNA, 19 nt, Artificial Sequence
  Description of Artificial Sequence: Synthetic oligonucleotide
caaccgguuaugggauagg

SEQ ID NO: 652502 - RNA, 19 nt, Artificial Sequence
  Description of Artificial Sequence: Synthetic oligonucleotide
ggguuuuauucccaguaua

SEQ ID NO: 652503 - RNA, 19 nt, Artificial Sequence
  Description of Artificial Sequence: Synthetic oligonucleotide
cugaacggguuuuaaacuu

SEQ ID NO: 652504 - RNA, 19 nt, Artificial Sequence
  Description of Artificial Sequence: Synthetic oligonucleotide
ugcaccggccuaguuucca

SEQ ID NO: 652505 - RNA, 19 nt, Artificial Sequence
  Description of Artificial Sequence: Synthetic oligonucleotide
gaacggguuuuaaacuucu

SEQ ID NO: 652506 - RNA, 19 nt, Artificial Sequence
  Description of Artificial Sequence: Synthetic oligonucleotide
uuacgaccagaggaggguu

SEQ ID NO: 652507 - RNA, 19 nt, Artificial Sequence
  Description of Artificial Sequence: Synthetic oligonucleotide
ccagacgugcaauagaccu

SEQ ID NO: 652508 - RNA, 19 nt, Artificial Sequence
  Description of Artificial Sequence: Synthetic oligonucleotide
cucggagaaucuucuaagu

SEQ ID NO: 652509 - RNA, 19 nt, Artificial Sequence
  Description of Artificial Sequence: Synthetic oligonucleotide
aagagucggcucauacuuu

SEQ ID NO: 652510 - RNA, 19 nt, Artificial Sequence
  Description of Artificial Sequence: Synthetic oligonucleotide
guuacgaccagaggagggu

SEQ ID NO: 652511 - RNA, 19 nt, Artificial Sequence
  Description of Artificial Sequence: Synthetic oligonucleotide
cuccuacaugauuuaaccu

SEQ ID NO: 652512 - RNA, 19 nt, Artificial Sequence
  Description of Artificial Sequence: Synthetic oligonucleotide
agcuacugcuucacacaag

SEQ ID NO: 652513 - RNA, 19 nt, Artificial Sequence
  Description of Artificial Sequence: Synthetic oligonucleotide
acgaccagaggaggguugu

SEQ ID NO: 652514 - RNA, 19 nt, Artificial Sequence
  Description of Artificial Sequence: Synthetic oligonucleotide
cucgguaucaaaccucuuu

SEQ ID NO: 652515 - RNA, 19 nt, Artificial Sequence
  Description of Artificial Sequence: Synthetic oligonucleotide
caaauccaacaugggucac

SEQ ID NO: 652516 - RNA, 19 nt, Artificial Sequence
  Description of Artificial Sequence: Synthetic oligonucleotide
agcuaucguaaaacucugu

SEQ ID NO: 652517 - RNA, 19 nt, Artificial Sequence
  Description of Artificial Sequence: Synthetic oligonucleotide
guccauagaccguuuuagu

SEQ ID NO: 652518 - RNA, 19 nt, Artificial Sequence
  Description of Artificial Sequence: Synthetic oligonucleotide
uucaaagagucggcucaua

SEQ ID NO: 652519 - RNA, 19 nt, Artificial Sequence
  Description of Artificial Sequence: Synthetic oligonucleotide
gaugagcgaugagcaugcc

SEQ ID NO: 652520 - RNA, 19 nt, Artificial Sequence
  Description of Artificial Sequence: Synthetic oligonucleotide
acgggagacgucacagaug

SEQ ID NO: 652521 - RNA, 19 nt, Artificial Sequence
  Description of Artificial Sequence: Synthetic oligonucleotide
caccugaacggguuuuaaa

SEQ ID NO: 652522 - RNA, 19 nt, Artificial Sequence
  Description of Artificial Sequence: Synthetic oligonucleotide
aacggguuuuaaacuucuu

SEQ ID NO: 652523 - RNA, 19 nt, Artificial Sequence
  Description of Artificial Sequence: Synthetic oligonucleotide
ugggauaggucagcauauu

SEQ ID NO: 652524 - RNA, 19 nt, Artificial Sequence
  Description of Artificial Sequence: Synthetic oligonucleotide
cgggagacgucacagauga

SEQ ID NO: 652525 - RNA, 19 nt, Artificial Sequence
  Description of Artificial Sequence: Synthetic oligonucleotide
ccucuaggaguuccuuugc

SEQ ID NO: 652526 - RNA, 19 nt, Artificial Sequence
  Description of Artificial Sequence: Synthetic oligonucleotide
cauuuacuaggagauuggu

SEQ ID NO: 652527 - RNA, 19 nt, Artificial Sequence
  Description of Artificial Sequence: Synthetic oligonucleotide
ggcucgcuucuuaaauucc

SEQ ID NO: 652528 - RNA, 19 nt, Artificial Sequence
  Description of Artificial Sequence: Synthetic oligonucleotide
gcugcuggcuuggaguuac

SEQ ID NO: 652529 - RNA, 19 nt, Artificial Sequence
  Description of Artificial Sequence: Synthetic oligonucleotide
gagcgaugagcaugccaaa

SEQ ID NO: 652530 - RNA, 19 nt, Artificial Sequence
  Description of Artificial Sequence: Synthetic oligonucleotide
ggaccccgcaauuucaacu

SEQ ID NO: 652531 - RNA, 19 nt, Artificial Sequence
  Description of Artificial Sequence: Synthetic oligonucleotide
agcaggucuacaaggcgua

SEQ ID NO: 652532 - RNA, 19 nt, Artificial Sequence
  Description of Artificial Sequence: Synthetic oligonucleotide
acacccgggcacgaagaca

SEQ ID NO: 652533 - RNA, 19 nt, Artificial Sequence
  Description of Artificial Sequence: Synthetic oligonucleotide
augcaccggccuaguuucc

SEQ ID NO: 652534 - RNA, 19 nt, Artificial Sequence
  Description of Artificial Sequence: Synthetic oligonucleotide
cugagccaccagcccgucc

SEQ ID NO: 652535 - RNA, 19 nt, Artificial Sequence
  Description of Artificial Sequence: Synthetic oligonucleotide
cggguuuuaaacuucuucu

SEQ ID NO: 652536 - RNA, 19 nt, Artificial Sequence
  Description of Artificial Sequence: Synthetic oligonucleotide
cugcuggcuuggaguuacg

SEQ ID NO: 652537 - RNA, 19 nt, Artificial Sequence
  Description of Artificial Sequence: Synthetic oligonucleotide
uggaacacccgggcacgaa

SEQ ID NO: 652538 - RNA, 19 nt, Artificial Sequence
  Description of Artificial Sequence: Synthetic oligonucleotide
auccccaauaggaggugaa

SEQ ID NO: 652539 - RNA, 19 nt, Artificial Sequence
  Description of Artificial Sequence: Synthetic oligonucleotide
guccaagucuggguaugca

SEQ ID NO: 652540 - RNA, 19 nt, Artificial Sequence
  Description of Artificial Sequence: Synthetic oligonucleotide
cacgggagacgucacagau

SEQ ID NO: 652541 - RNA, 19 nt, Artificial Sequence
  Description of Artificial Sequence: Synthetic oligonucleotide
caggaccccgcaauuucaa

SEQ ID NO: 652542 - RNA, 19 nt, Artificial Sequence
  Description of Artificial Sequence: Synthetic oligonucleotide
cgguuaugggauaggucag

SEQ ID NO: 652543 - RNA, 19 nt, Artificial Sequence
  Description of Artificial Sequence: Synthetic oligonucleotide
cacugauaggcucgcuucu

SEQ ID NO: 652544 - RNA, 19 nt, Artificial Sequence
  Description of Artificial Sequence: Synthetic oligonucleotide
auaagucaucuaacaucuu

SEQ ID NO: 652545 - RNA, 19 nt, Artificial Sequence
  Description of Artificial Sequence: Synthetic oligonucleotide
caguuucaccugaacgggu

SEQ ID NO: 652546 - RNA, 19 nt, Artificial Sequence
  Description of Artificial Sequence: Synthetic oligonucleotide
cguaugcaauggaugucug

SEQ ID NO: 652547 - RNA, 19 nt, Artificial Sequence
  Description of Artificial Sequence: Synthetic oligonucleotide
ccgcaauuucaacucuguc

SEQ ID NO: 652548 - RNA, 19 nt, Artificial Sequence
  Description of Artificial Sequence: Synthetic oligonucleotide
gcacuauuacauugauagu

SEQ ID NO: 652549 - RNA, 19 nt, Artificial Sequence
  Description of Artificial Sequence: Synthetic oligonucleotide
caguagcagcuaucguaaa

SEQ ID NO: 652550 - RNA, 19 nt, Artificial Sequence
  Description of Artificial Sequence: Synthetic oligonucleotide
ccuuagcacaucauauccu

SEQ ID NO: 652551 - RNA, 19 nt, Artificial Sequence
  Description of Artificial Sequence: Synthetic oligonucleotide
gcuuggaguuacgaccaga

SEQ ID NO: 652552 - RNA, 19 nt, Artificial Sequence
  Description of Artificial Sequence: Synthetic oligonucleotide
gggauaggucagcauauuu

SEQ ID NO: 652553 - RNA, 19 nt, Artificial Sequence
  Description of Artificial Sequence: Synthetic oligonucleotide
ggauucgccucuuucuauu

SEQ ID NO: 652554 - RNA, 19 nt, Artificial Sequence
  Description of Artificial Sequence: Synthetic oligonucleotide
ccuuaauagcacagccaaa

SEQ ID NO: 652555 - RNA, 19 nt, Artificial Sequence
  Description of Artificial Sequence: Synthetic oligonucleotide
cuuguccauagaccguuuu

SEQ ID NO: 652556 - RNA, 19 nt, Artificial Sequence
  Description of Artificial Sequence: Synthetic oligonucleotide
cugcacgggagacgucaca

SEQ ID NO: 652557 - RNA, 19 nt, Artificial Sequence
  Description of Artificial Sequence: Synthetic oligonucleotide
acuuguccauagaccguuu

SEQ ID NO: 652558 - RNA, 19 nt, Artificial Sequence
  Description of Artificial Sequence: Synthetic oligonucleotide
cccugucugucgaucuuuc

SEQ ID NO: 652559 - RNA, 19 nt, Artificial Sequence
  Description of Artificial Sequence: Synthetic oligonucleotide
cuuuaacgauauccuucau

SEQ ID NO: 652560 - RNA, 19 nt, Artificial Sequence
  Description of Artificial Sequence: Synthetic oligonucleotide
gcacgggagacgucacaga

SEQ ID NO: 652561 - RNA, 19 nt, Artificial Sequence
  Description of Artificial Sequence: Synthetic oligonucleotide
cauuguucggcagguguuu

SEQ ID NO: 652562 - RNA, 19 nt, Artificial Sequence
  Description of Artificial Sequence: Synthetic oligonucleotide
cuggguaugcagccuuaau

SEQ ID NO: 652563 - RNA, 19 nt, Artificial Sequence
  Description of Artificial Sequence: Synthetic oligonucleotide
ccguaugcaauggaugucu

SEQ ID NO: 652564 - RNA, 19 nt, Artificial Sequence
  Description of Artificial Sequence: Synthetic oligonucleotide
gcagccguaugcaauggau

SEQ ID NO: 652565 - RNA, 19 nt, Artificial Sequence
  Description of Artificial Sequence: Synthetic oligonucleotide
gcaggucuacaaggcguac

SEQ ID NO: 652566 - RNA, 19 nt, Artificial Sequence
  Description of Artificial Sequence: Synthetic oligonucleotide
cgauauccuucauccuauc

SEQ ID NO: 652567 - RNA, 19 nt, Artificial Sequence
  Description of Artificial Sequence: Synthetic oligonucleotide
gcuaggucagaaguaucau

SEQ ID NO: 652568 - RNA, 19 nt, Artificial Sequence
  Description of Artificial Sequence: Synthetic oligonucleotide
cccgcaauuucaacucugu

SEQ ID NO: 652569 - RNA, 19 nt, Artificial Sequence
  Description of Artificial Sequence: Synthetic oligonucleotide
ccagaggaggguuguccaa

SEQ ID NO: 652570 - RNA, 19 nt, Artificial Sequence
  Description of Artificial Sequence: Synthetic oligonucleotide
gccggucgaucucagcagu

SEQ ID NO: 652571 - RNA, 19 nt, Artificial Sequence
  Description of Artificial Sequence: Synthetic oligonucleotide
gggagacgucacagaugag

SEQ ID NO: 652572 - RNA, 19 nt, Artificial Sequence
  Description of Artificial Sequence: Synthetic oligonucleotide
gaguuacuuuagggucaua

SEQ ID NO: 652573 - RNA, 19 nt, Artificial Sequence
  Description of Artificial Sequence: Synthetic oligonucleotide
ccacuugcacauauccuuu

SEQ ID NO: 652574 - RNA, 19 nt, Artificial Sequence
  Description of Artificial Sequence: Synthetic oligonucleotide
ccgggcacgaagacaauuu

SEQ ID NO: 652575 - RNA, 19 nt, Artificial Sequence
  Description of Artificial Sequence: Synthetic oligonucleotide
caccggccuaguuuccauu

SEQ ID NO: 652576 - RNA, 19 nt, Artificial Sequence
  Description of Artificial Sequence: Synthetic oligonucleotide
gacgugcaauagaccugau

SEQ ID NO: 652577 - RNA, 19 nt, Artificial Sequence
  Description of Artificial Sequence: Synthetic oligonucleotide
gcaccggccuaguuuccau

SEQ ID NO: 652578 - RNA, 19 nt, Artificial Sequence
  Description of Artificial Sequence: Synthetic oligonucleotide
cggguuuuauucccaguau

SEQ ID NO: 652579 - RNA, 19 nt, Artificial Sequence
  Description of Artificial Sequence: Synthetic oligonucleotide
acccgggcacgaagacaau

SEQ ID NO: 652580 - RNA, 19 nt, Artificial Sequence
  Description of Artificial Sequence: Synthetic oligonucleotide
ggccaacaugcaucucuuu

SEQ ID NO: 652581 - RNA, 19 nt, Artificial Sequence
  Description of Artificial Sequence: Synthetic oligonucleotide
cccuagcaccacaccaaau

SEQ ID NO: 652582 - RNA, 19 nt, Artificial Sequence
  Description of Artificial Sequence: Synthetic oligonucleotide
cccgggcacgaagacaauu

SEQ ID NO: 652583 - RNA, 19 nt, Artificial Sequence
  Description of Artificial Sequence: Synthetic oligonucleotide
ccucgguaucaaaccucuu

SEQ ID NO: 652584 - RNA, 19 nt, Artificial Sequence
  Description of Artificial Sequence: Synthetic oligonucleotide
aauuauaucacuuccguag

SEQ ID NO: 652585 - RNA, 19 nt, Artificial Sequence
  Description of Artificial Sequence: Synthetic oligonucleotide
acuaaaggcaaucucaucc

SEQ ID NO: 652586 - RNA, 19 nt, Artificial Sequence
  Description of Artificial Sequence: Synthetic oligonucleotide
uuauagacaaaucagggcc

SEQ ID NO: 652587 - RNA, 19 nt, Artificial Sequence
  Description of Artificial Sequence: Synthetic oligonucleotide
aaggaauuauaucacuucc

SEQ ID NO: 652588 - RNA, 19 nt, Artificial Sequence
  Description of Artificial Sequence: Synthetic oligonucleotide
aaugugacuuauuagcugg

SEQ ID NO: 652589 - RNA, 19 nt, Artificial Sequence
  Description of Artificial Sequence: Synthetic oligonucleotide
uuagauucccaacacaucc

SEQ ID NO: 652590 - RNA, 19 nt, Artificial Sequence
  Description of Artificial Sequence: Synthetic oligonucleotide
uguacgaucgauuuauagg

SEQ ID NO: 652591 - RNA, 19 nt, Artificial Sequence
  Description of Artificial Sequence: Synthetic oligonucleotide
aaauacagcguuucguugg

SEQ ID NO: 652592 - RNA, 19 nt, Artificial Sequence
  Description of Artificial Sequence: Synthetic oligonucleotide
ugucguuggacaaacauag

SEQ ID NO: 652593 - RNA, 19 nt, Artificial Sequence
  Description of Artificial Sequence: Synthetic oligonucleotide
uauaaauuuggauaggguc

SEQ ID NO: 652594 - RNA, 19 nt, Artificial Sequence
  Description of Artificial Sequence: Synthetic oligonucleotide
uuugucauaagcauaucga

SEQ ID NO: 652595 - RNA, 19 nt, Artificial Sequence
  Description of Artificial Sequence: Synthetic oligonucleotide
cauagcaacgcccacaucc

SEQ ID NO: 652596 - RNA, 19 nt, Artificial Sequence
  Description of Artificial Sequence: Synthetic oligonucleotide
uaucccauaaagaaucucc

SEQ ID NO: 652597 - RNA, 19 nt, Artificial Sequence
  Description of Artificial Sequence: Synthetic oligonucleotide
gauguucugauacuggucc

SEQ ID NO: 652598 - RNA, 19 nt, Artificial Sequence
  Description of Artificial Sequence: Synthetic oligonucleotide
auaucuuccuucuuuagag

SEQ ID NO: 652599 - RNA, 19 nt, Artificial Sequence
  Description of Artificial Sequence: Synthetic oligonucleotide
aaaauagugacucuuuaua

SEQ ID NO: 652600 - RNA, 19 nt, Artificial Sequence
  Description of Artificial Sequence: Synthetic oligonucleotide
ugauaucccauaaagaauc

SEQ ID NO: 652601 - RNA, 19 nt, Artificial Sequence
  Description of Artificial Sequence: Synthetic oligonucleotide
uuuauagacaaaucagggc

SEQ ID NO: 652602 - RNA, 19 nt, Artificial Sequence
  Description of Artificial Sequence: Synthetic oligonucleotide
caucguuuaagcaauagac

SEQ ID NO: 652603 - RNA, 19 nt, Artificial Sequence
  Description of Artificial Sequence: Synthetic oligonucleotide
uaagcauaucgaacgaugg

SEQ ID NO: 652604 - RNA, 19 nt, Artificial Sequence
  Description of Artificial Sequence: Synthetic oligonucleotide
aacacggaagcuuucaaca

SEQ ID NO: 652605 - RNA, 19 nt, Artificial Sequence
  Description of Artificial Sequence: Synthetic oligonucleotide
guacgaucgauuuauaggc

SEQ ID NO: 652606 - RNA, 19 nt, Artificial Sequence
  Description of Artificial Sequence: Synthetic oligonucleotide
uaauauaaggaaaggcuac

SEQ ID NO: 652607 - RNA, 19 nt, Artificial Sequence
  Description of Artificial Sequence: Synthetic oligonucleotide
aaauagugacucuuuauaa

SEQ ID NO: 652608 - RNA, 19 nt, Artificial Sequence
  Description of Artificial Sequence: Synthetic oligonucleotide
ugaauaguguccucuuugg

SEQ ID NO: 652609 - RNA, 19 nt, Artificial Sequence
  Description of Artificial Sequence: Synthetic oligonucleotide
cucacuagaacacggaagc

SEQ ID NO: 652610 - RNA, 19 nt, Artificial Sequence
  Description of Artificial Sequence: Synthetic oligonucleotide
ugugauguucugauacugg

SEQ ID NO: 652611 - RNA, 19 nt, Artificial Sequence
  Description of Artificial Sequence: Synthetic oligonucleotide
uuuaccaagcucauagacu

SEQ ID NO: 652612 - RNA, 19 nt, Artificial Sequence
  Description of Artificial Sequence: Synthetic oligonucleotide
uuauaucacuuccguagcg

SEQ ID NO: 652613 - RNA, 19 nt, Artificial Sequence
  Description of Artificial Sequence: Synthetic oligonucleotide
uauaucauauccaguaaau

SEQ ID NO: 652614 - RNA, 19 nt, Artificial Sequence
  Description of Artificial Sequence: Synthetic oligonucleotide
auagggucuaaguuacccc

SEQ ID NO: 652615 - RNA, 19 nt, Artificial Sequence
  Description of Artificial Sequence: Synthetic oligonucleotide
uuauaaauuuggauagggu

SEQ ID NO: 652616 - RNA, 19 nt, Artificial Sequence
  Description of Artificial Sequence: Synthetic oligonucleotide
gaccauguuuaauucaucc

SEQ ID NO: 652617 - RNA, 19 nt, Artificial Sequence
  Description of Artificial Sequence: Synthetic oligonucleotide
cauggucuauaucauaucc

SEQ ID NO: 652618 - RNA, 19 nt, Artificial Sequence
  Description of Artificial Sequence: Synthetic oligonucleotide
uuauuagcggaccacgcca

SEQ ID NO: 652619 - RNA, 19 nt, Artificial Sequence
  Description of Artificial Sequence: Synthetic oligonucleotide
ucuaaguuaccccuuguaa

SEQ ID NO: 652620 - RNA, 19 nt, Artificial Sequence
  Description of Artificial Sequence: Synthetic oligonucleotide
agcauaucgaacgauggcg

SEQ ID NO: 652621 - RNA, 19 nt, Artificial Sequence
  Description of Artificial Sequence: Synthetic oligonucleotide
ucugaaaacuggauggccu

SEQ ID NO: 652622 - RNA, 19 nt, Artificial Sequence
  Description of Artificial Sequence: Synthetic oligonucleotide
gauguggucauucuguaga

SEQ ID NO: 652623 - RNA, 19 nt, Artificial Sequence
  Description of Artificial Sequence: Synthetic oligonucleotide
caaacgaggauucuucgcc

SEQ ID NO: 652624 - RNA, 19 nt, Artificial Sequence
  Description of Artificial Sequence: Synthetic oligonucleotide
cucagcaacguagagacgg

SEQ ID NO: 652625 - RNA, 19 nt, Artificial Sequence
  Description of Artificial Sequence: Synthetic oligonucleotide
auauauguggaugugguca

SEQ ID NO: 652626 - RNA, 19 nt, Artificial Sequence
  Description of Artificial Sequence: Synthetic oligonucleotide
uauaucacuuccguagcgg

SEQ ID NO: 652627 - RNA, 19 nt, Artificial Sequence
  Description of Artificial Sequence: Synthetic oligonucleotide
agagauacugaugugaccu

SEQ ID NO: 652628 - RNA, 19 nt, Artificial Sequence
  Description of Artificial Sequence: Synthetic oligonucleotide
uaaagaaucuccuguggac

SEQ ID NO: 652629 - RNA, 19 nt, Artificial Sequence
  Description of Artificial Sequence: Synthetic oligonucleotide
ucgggauuuggaauuuugg

SEQ ID NO: 652630 - RNA, 19 nt, Artificial Sequence
  Description of Artificial Sequence: Synthetic oligonucleotide
cuagcaagggcguuguuag

SEQ ID NO: 652631 - RNA, 19 nt, Artificial Sequence
  Description of Artificial Sequence: Synthetic oligonucleotide
cuuuagaguucuugcaucc

SEQ ID NO: 652632 - RNA, 19 nt, Artificial Sequence
  Description of Artificial Sequence: Synthetic oligonucleotide
ucaucguuuaagcaauaga

SEQ ID NO: 652633 - RNA, 19 nt, Artificial Sequence
  Description of Artificial Sequence: Synthetic oligonucleotide
uucaaacgaggauucuucg

SEQ ID NO: 652634 - RNA, 19 nt, Artificial Sequence
  Description of Artificial Sequence: Synthetic oligonucleotide
aggauuagcucuuuuguca

SEQ ID NO: 652635 - RNA, 19 nt, Artificial Sequence
  Description of Artificial Sequence: Synthetic oligonucleotide
uagacucucacugaaggag

SEQ ID NO: 652636 - RNA, 19 nt, Artificial Sequence
  Description of Artificial Sequence: Synthetic oligonucleotide
uuuggauagggucuaaguu

SEQ ID NO: 652637 - RNA, 19 nt, Artificial Sequence
  Description of Artificial Sequence: Synthetic oligonucleotide
aaacauguauugccgcaag

SEQ ID NO: 652638 - RNA, 19 nt, Artificial Sequence
  Description of Artificial Sequence: Synthetic oligonucleotide
augaaaacauguauugccg

SEQ ID NO: 652639 - RNA, 19 nt, Artificial Sequence
  Description of Artificial Sequence: Synthetic oligonucleotide
agacggcaugcuuagauuc

SEQ ID NO: 652640 - RNA, 19 nt, Artificial Sequence
  Description of Artificial Sequence: Synthetic oligonucleotide
gagaagaucuacagaaucc

SEQ ID NO: 652641 - RNA, 19 nt, Artificial Sequence
  Description of Artificial Sequence: Synthetic oligonucleotide
uggauagggucuaaguuac

SEQ ID NO: 652642 - RNA, 19 nt, Artificial Sequence
  Description of Artificial Sequence: Synthetic oligonucleotide
uuggauagggucuaaguua

SEQ ID NO: 652643 - RNA, 19 nt, Artificial Sequence
  Description of Artificial Sequence: Synthetic oligonucleotide
cuuuaccaagcucauagac

SEQ ID NO: 652644 - RNA, 19 nt, Artificial Sequence
  Description of Artificial Sequence: Synthetic oligonucleotide
gauagggucuaaguuaccc

SEQ ID NO: 652645 - RNA, 19 nt, Artificial Sequence
  Description of Artificial Sequence: Synthetic oligonucleotide
ucuauaucauauccaguaa

SEQ ID NO: 652646 - RNA, 19 nt, Artificial Sequence
  Description of Artificial Sequence: Synthetic oligonucleotide
uuauaggcuacaaucuuua

SEQ ID NO: 652647 - RNA, 19 nt, Artificial Sequence
  Description of Artificial Sequence: Synthetic oligonucleotide
acgcuagagauacugaugu

SEQ ID NO: 652648 - RNA, 19 nt, Artificial Sequence
  Description of Artificial Sequence: Synthetic oligonucleotide
ucuugcauccacaacuauc

SEQ ID NO: 652649 - RNA, 19 nt, Artificial Sequence
  Description of Artificial Sequence: Synthetic oligonucleotide
auuuggauagggucuaagu

SEQ ID NO: 652650 - RNA, 19 nt, Artificial Sequence
  Description of Artificial Sequence: Synthetic oligonucleotide
cuaaagaccugguagcauc

SEQ ID NO: 652651 - RNA, 19 nt, Artificial Sequence
  Description of Artificial Sequence: Synthetic oligonucleotide
gauguaagacucugugcag

SEQ ID NO: 652652 - RNA, 19 nt, Artificial Sequence
  Description of Artificial Sequence: Synthetic oligonucleotide
acucuuuauaaauuuggau

SEQ ID NO: 652653 - RNA, 19 nt, Artificial Sequence
  Description of Artificial Sequence: Synthetic oligonucleotide
acauguauugccgcaaguc

SEQ ID NO: 652654 - RNA, 19 nt, Artificial Sequence
  Description of Artificial Sequence: Synthetic oligonucleotide
cuuauuagcggaccacgcc

SEQ ID NO: 652655 - RNA, 19 nt, Artificial Sequence
  Description of Artificial Sequence: Synthetic oligonucleotide
gagccaggaacuuuguggc

SEQ ID NO: 652656 - RNA, 19 nt, Artificial Sequence
  Description of Artificial Sequence: Synthetic oligonucleotide
gagacuugccugcucaaag

SEQ ID NO: 652657 - RNA, 19 nt, Artificial Sequence
  Description of Artificial Sequence: Synthetic oligonucleotide
gaccugagaagaucuacag

SEQ ID NO: 652658 - RNA, 19 nt, Artificial Sequence
  Description of Artificial Sequence: Synthetic oligonucleotide
auguugcugguccacgggc

SEQ ID NO: 652659 - RNA, 19 nt, Artificial Sequence
  Description of Artificial Sequence: Synthetic oligonucleotide
uucgugaaugucuuggaaa

SEQ ID NO: 652660 - RNA, 19 nt, Artificial Sequence
  Description of Artificial Sequence: Synthetic oligonucleotide
ucgcuuuucuuuaccaagc

SEQ ID NO: 652661 - RNA, 19 nt, Artificial Sequence
  Description of Artificial Sequence: Synthetic oligonucleotide
uccauccugaacaacaauu

SEQ ID NO: 652662 - RNA, 19 nt, Artificial Sequence
  Description of Artificial Sequence: Synthetic oligonucleotide
agcacuuccccucugauuu

SEQ ID NO: 652663 - RNA, 19 nt, Artificial Sequence
  Description of Artificial Sequence: Synthetic oligonucleotide
augcuuagauucccaacac

SEQ ID NO: 652664 - RNA, 19 nt, Artificial Sequence
  Description of Artificial Sequence: Synthetic oligonucleotide
cucgcuuuucuuuaccaag

SEQ ID NO: 652665 - RNA, 19 nt, Artificial Sequence
  Description of Artificial Sequence: Synthetic oligonucleotide
auaucgaacgauggcgacc

SEQ ID NO: 652666 - RNA, 19 nt, Artificial Sequence
  Description of Artificial Sequence: Synthetic oligonucleotide
aauacagcguuucguuggu

SEQ ID NO: 652667 - RNA, 19 nt, Artificial Sequence
  Description of Artificial Sequence: Synthetic oligonucleotide
ucgugaaugucuuggaaaa

SEQ ID NO: 652668 - RNA, 19 nt, Artificial Sequence
  Description of Artificial Sequence: Synthetic oligonucleotide
aaaggguccucacuuuaga

SEQ ID NO: 652669 - RNA, 19 nt, Artificial Sequence
  Description of Artificial Sequence: Synthetic oligonucleotide
aacugugccucugugggag

SEQ ID NO: 652670 - RNA, 19 nt, Artificial Sequence
  Description of Artificial Sequence: Synthetic oligonucleotide
ggcuacaccaacuugagga

SEQ ID NO: 652671 - RNA, 19 nt, Artificial Sequence
  Description of Artificial Sequence: Synthetic oligonucleotide
aauuuggauagggucuaag

SEQ ID NO: 652672 - RNA, 19 nt, Artificial Sequence
  Description of Artificial Sequence: Synthetic oligonucleotide
aacgaggauucuucgccag

SEQ ID NO: 652673 - RNA, 19 nt, Artificial Sequence
  Description of Artificial Sequence: Synthetic oligonucleotide
aggaauuauaucacuuccg

SEQ ID NO: 652674 - RNA, 19 nt, Artificial Sequence
  Description of Artificial Sequence: Synthetic oligonucleotide
auaagcauaucgaacgaug

SEQ ID NO: 652675 - RNA, 19 nt, Artificial Sequence
  Description of Artificial Sequence: Synthetic oligonucleotide
aaacgaggauucuucgcca

SEQ ID NO: 652676 - RNA, 19 nt, Artificial Sequence
  Description of Artificial Sequence: Synthetic oligonucleotide
uugacggcuucugucagcg

SEQ ID NO: 652677 - RNA, 19 nt, Artificial Sequence
  Description of Artificial Sequence: Synthetic oligonucleotide
gaacccuugaauagugucc

SEQ ID NO: 652678 - RNA, 19 nt, Artificial Sequence
  Description of Artificial Sequence: Synthetic oligonucleotide
ucagaucaucaauagcacu

SEQ ID NO: 652679 - RNA, 19 nt, Artificial Sequence
  Description of Artificial Sequence: Synthetic oligonucleotide
uagggucuaaguuaccccu

SEQ ID NO: 652680 - RNA, 19 nt, Artificial Sequence
  Description of Artificial Sequence: Synthetic oligonucleotide
aucagaucaucaauagcac

SEQ ID NO: 652681 - RNA, 19 nt, Artificial Sequence
  Description of Artificial Sequence: Synthetic oligonucleotide
uaucgaacgauggcgacca

SEQ ID NO: 652682 - RNA, 19 nt, Artificial Sequence
  Description of Artificial Sequence: Synthetic oligonucleotide
caaugugacuuauuagcug

SEQ ID NO: 652683 - RNA, 19 nt, Artificial Sequence
  Description of Artificial Sequence: Synthetic oligonucleotide
cuguacgaucgauuuauag

SEQ ID NO: 652684 - RNA, 19 nt, Artificial Sequence
  Description of Artificial Sequence: Synthetic oligonucleotide
aaagaguuacccauagcaa

SEQ ID NO: 652685 - RNA, 19 nt, Artificial Sequence
  Description of Artificial Sequence: Synthetic oligonucleotide
guagagacggcaugcuuag

SEQ ID NO: 652686 - RNA, 19 nt, Artificial Sequence
  Description of Artificial Sequence: Synthetic oligonucleotide
aaaaggguccucacuuuag

SEQ ID NO: 652687 - RNA, 19 nt, Artificial Sequence
  Description of Artificial Sequence: Synthetic oligonucleotide
uuuggagguuggaaacaag

SEQ ID NO: 652688 - RNA, 19 nt, Artificial Sequence
  Description of Artificial Sequence: Synthetic oligonucleotide
aacccuugaauaguguccu

SEQ ID NO: 652689 - RNA, 19 nt, Artificial Sequence
  Description of Artificial Sequence: Synthetic oligonucleotide
aggacuaaaggcaaucuca

SEQ ID NO: 652690 - RNA, 19 nt, Artificial Sequence
  Description of Artificial Sequence: Synthetic oligonucleotide
ugauacugguccucacuag

SEQ ID NO: 652691 - RNA, 19 nt, Artificial Sequence
  Description of Artificial Sequence: Synthetic oligonucleotide
accaacuugaggauuagcu

SEQ ID NO: 652692 - RNA, 19 nt, Artificial Sequence
  Description of Artificial Sequence: Synthetic oligonucleotide
agggccgauggucagcugg

SEQ ID NO: 652693 - RNA, 19 nt, Artificial Sequence
  Description of Artificial Sequence: Synthetic oligonucleotide
cgauuuauaggcuacaauc

SEQ ID NO: 652694 - RNA, 19 nt, Artificial Sequence
  Description of Artificial Sequence: Synthetic oligonucleotide
uaaucagaguaacuccauc

SEQ ID NO: 652695 - RNA, 19 nt, Artificial Sequence
  Description of Artificial Sequence: Synthetic oligonucleotide
aucgccagagcuucagguc

SEQ ID NO: 652696 - RNA, 19 nt, Artificial Sequence
  Description of Artificial Sequence: Synthetic oligonucleotide
acaacuauccagcucuuuu

SEQ ID NO: 652697 - RNA, 19 nt, Artificial Sequence
  Description of Artificial Sequence: Synthetic oligonucleotide
auggcgaccauguuuaauu

SEQ ID NO: 652698 - RNA, 19 nt, Artificial Sequence
  Description of Artificial Sequence: Synthetic oligonucleotide
uagcggaacccuugaauag

SEQ ID NO: 652699 - RNA, 19 nt, Artificial Sequence
  Description of Artificial Sequence: Synthetic oligonucleotide
ucgauuuauaggcuacaau

SEQ ID NO: 652700 - RNA, 19 nt, Artificial Sequence
  Description of Artificial Sequence: Synthetic oligonucleotide
uuugcuccugagcugucug

SEQ ID NO: 652701 - RNA, 19 nt, Artificial Sequence
  Description of Artificial Sequence: Synthetic oligonucleotide
auaggcuacaaucuuuaua

SEQ ID NO: 652702 - RNA, 19 nt, Artificial Sequence
  Description of Artificial Sequence: Synthetic oligonucleotide
cacggaagcuuucaacagg

SEQ ID NO: 652703 - RNA, 19 nt, Artificial Sequence
  Description of Artificial Sequence: Synthetic oligonucleotide
gaggauuagcucuuuuguc

SEQ ID NO: 652704 - RNA, 19 nt, Artificial Sequence
  Description of Artificial Sequence: Synthetic oligonucleotide
acacggaagcuuucaacag

SEQ ID NO: 652705 - RNA, 19 nt, Artificial Sequence
  Description of Artificial Sequence: Synthetic oligonucleotide
cuuagauucccaacacauc

SEQ ID NO: 652706 - RNA, 19 nt, Artificial Sequence
  Description of Artificial Sequence: Synthetic oligonucleotide
uauauguggauguggucau

SEQ ID NO: 652707 - RNA, 19 nt, Artificial Sequence
  Description of Artificial Sequence: Synthetic oligonucleotide
uccuguacgaucgauuuau

SEQ ID NO: 652708 - RNA, 19 nt, Artificial Sequence
  Description of Artificial Sequence: Synthetic oligonucleotide
agagacggcaugcuuagau

SEQ ID NO: 652709 - RNA, 19 nt, Artificial Sequence
  Description of Artificial Sequence: Synthetic oligonucleotide
ggcuacaaucuuuauagac

SEQ ID NO: 652710 - RNA, 19 nt, Artificial Sequence
  Description of Artificial Sequence: Synthetic oligonucleotide
ugugacuuauuagcuggag

SEQ ID NO: 652711 - RNA, 19 nt, Artificial Sequence
  Description of Artificial Sequence: Synthetic oligonucleotide
uauuagcuggagacuugcc

SEQ ID NO: 652712 - RNA, 19 nt, Artificial Sequence
  Description of Artificial Sequence: Synthetic oligonucleotide
uccuguggaccugagaaga

SEQ ID NO: 652713 - RNA, 19 nt, Artificial Sequence
  Description of Artificial Sequence: Synthetic oligonucleotide
auaucacuuccguagcgga

SEQ ID NO: 652714 - RNA, 19 nt, Artificial Sequence
  Description of Artificial Sequence: Synthetic oligonucleotide
agauacugaugugaccuuc

SEQ ID NO: 652715 - RNA, 19 nt, Artificial Sequence
  Description of Artificial Sequence: Synthetic oligonucleotide
aaucagggccgauggucag

SEQ ID NO: 652716 - RNA, 19 nt, Artificial Sequence
  Description of Artificial Sequence: Synthetic oligonucleotide
ccuuaauauaaggaaaggc

SEQ ID NO: 652717 - RNA, 19 nt, Artificial Sequence
  Description of Artificial Sequence: Synthetic oligonucleotide
uucuaaagaccugguagca

SEQ ID NO: 652718 - RNA, 19 nt, Artificial Sequence
  Description of Artificial Sequence: Synthetic oligonucleotide
aucguuuaagcaauagaca

SEQ ID NO: 652719 - RNA, 19 nt, Artificial Sequence
  Description of Artificial Sequence: Synthetic oligonucleotide
aaggcuacaccaacuugag

SEQ ID NO: 652720 - RNA, 19 nt, Artificial Sequence
  Description of Artificial Sequence: Synthetic oligonucleotide
cuauaucauauccaguaaa

SEQ ID NO: 652721 - RNA, 19 nt, Artificial Sequence
  Description of Artificial Sequence: Synthetic oligonucleotide
guuacccauagcaacgccc

SEQ ID NO: 652722 - RNA, 19 nt, Artificial Sequence
  Description of Artificial Sequence: Synthetic oligonucleotide
ucuucgugaaugucuugga

SEQ ID NO: 652723 - RNA, 19 nt, Artificial Sequence
  Description of Artificial Sequence: Synthetic oligonucleotide
uacgaucgauuuauaggcu

SEQ ID NO: 652724 - RNA, 19 nt, Artificial Sequence
  Description of Artificial Sequence: Synthetic oligonucleotide
ucuucgccaggaaaagagu

SEQ ID NO: 652725 - RNA, 19 nt, Artificial Sequence
  Description of Artificial Sequence: Synthetic oligonucleotide
uuaccccuuguaauauaug

SEQ ID NO: 652726 - RNA, 19 nt, Artificial Sequence
  Description of Artificial Sequence: Synthetic oligonucleotide
cuuucaucucaguggggag

SEQ ID NO: 652727 - RNA, 19 nt, Artificial Sequence
  Description of Artificial Sequence: Synthetic oligonucleotide
gggagugcauuucuuauug

SEQ ID NO: 652728 - RNA, 19 nt, Artificial Sequence
  Description of Artificial Sequence: Synthetic oligonucleotide
auuagcucuuuugucauaa

SEQ ID NO: 652729 - RNA, 19 nt, Artificial Sequence
  Description of Artificial Sequence: Synthetic oligonucleotide
gaaaacaccugucguugga

SEQ ID NO: 652730 - RNA, 19 nt, Artificial Sequence
  Description of Artificial Sequence: Synthetic oligonucleotide
cugaaauucgggauuugga

SEQ ID NO: 652731 - RNA, 19 nt, Artificial Sequence
  Description of Artificial Sequence: Synthetic oligonucleotide
cacgcuagagauacugaug

SEQ ID NO: 652732 - RNA, 19 nt, Artificial Sequence
  Description of Artificial Sequence: Synthetic oligonucleotide
ugcuuguucaaacgaggau

SEQ ID NO: 652733 - RNA, 19 nt, Artificial Sequence
  Description of Artificial Sequence: Synthetic oligonucleotide
ugugggagugcauuucuua

SEQ ID NO: 652734 - RNA, 19 nt, Artificial Sequence
  Description of Artificial Sequence: Synthetic oligonucleotide
aucaucguuuaagcaauag

SEQ ID NO: 652735 - RNA, 19 nt, Artificial Sequence
  Description of Artificial Sequence: Synthetic oligonucleotide
cauguugcugguccacggg

SEQ ID NO: 652736 - RNA, 19 nt, Artificial Sequence
  Description of Artificial Sequence: Synthetic oligonucleotide
guucaaacgaggauucuuc

SEQ ID NO: 652737 - RNA, 19 nt, Artificial Sequence
  Description of Artificial Sequence: Synthetic oligonucleotide
uuagcucuuuugucauaag

SEQ ID NO: 652738 - RNA, 19 nt, Artificial Sequence
  Description of Artificial Sequence: Synthetic oligonucleotide
agcgcugcucuucugaaaa

SEQ ID NO: 652739 - RNA, 19 nt, Artificial Sequence
  Description of Artificial Sequence: Synthetic oligonucleotide
gaauaguguccucuuugga

SEQ ID NO: 652740 - RNA, 19 nt, Artificial Sequence
  Description of Artificial Sequence: Synthetic oligonucleotide
uuaguguugucuguuccaa

SEQ ID NO: 652741 - RNA, 19 nt, Artificial Sequence
  Description of Artificial Sequence: Synthetic oligonucleotide
uucugucagcgggaaaagg

SEQ ID NO: 652742 - RNA, 19 nt, Artificial Sequence
  Description of Artificial Sequence: Synthetic oligonucleotide
cugccucacuagaacacgg

SEQ ID NO: 652743 - RNA, 19 nt, Artificial Sequence
  Description of Artificial Sequence: Synthetic oligonucleotide
uagaacacggaagcuuuca

SEQ ID NO: 652744 - RNA, 19 nt, Artificial Sequence
  Description of Artificial Sequence: Synthetic oligonucleotide
gaaucccaaaacagagaag

SEQ ID NO: 652745 - RNA, 19 nt, Artificial Sequence
  Description of Artificial Sequence: Synthetic oligonucleotide
guagcggaacccuugaaua

SEQ ID NO: 652746 - RNA, 19 nt, Artificial Sequence
  Description of Artificial Sequence: Synthetic oligonucleotide
uccacgggcgguuugguua

SEQ ID NO: 652747 - RNA, 19 nt, Artificial Sequence
  Description of Artificial Sequence: Synthetic oligonucleotide
cauaucgaacgauggcgac

SEQ ID NO: 652748 - RNA, 19 nt, Artificial Sequence
  Description of Artificial Sequence: Synthetic oligonucleotide
uuccguagcggaacccuug

SEQ ID NO: 652749 - RNA, 19 nt, Artificial Sequence
  Description of Artificial Sequence: Synthetic oligonucleotide
agaccuucagaacuugaua

SEQ ID NO: 652750 - RNA, 19 nt, Artificial Sequence
  Description of Artificial Sequence: Synthetic oligonucleotide
uauuagcggaccacgccau

SEQ ID NO: 652751 - RNA, 19 nt, Artificial Sequence
  Description of Artificial Sequence: Synthetic oligonucleotide
agacaaaucagggccgaug

SEQ ID NO: 652752 - RNA, 19 nt, Artificial Sequence
  Description of Artificial Sequence: Synthetic oligonucleotide
ucgccaggaaaagaguuac

SEQ ID NO: 652753 - RNA, 19 nt, Artificial Sequence
  Description of Artificial Sequence: Synthetic oligonucleotide
ucacuuccguagcggaacc

SEQ ID NO: 652754 - RNA, 19 nt, Artificial Sequence
  Description of Artificial Sequence: Synthetic oligonucleotide
agagaagcacuuccccucu

SEQ ID NO: 652755 - RNA, 19 nt, Artificial Sequence
  Description of Artificial Sequence: Synthetic oligonucleotide
guagcaucaggugucugug

SEQ ID NO: 652756 - RNA, 19 nt, Artificial Sequence
  Description of Artificial Sequence: Synthetic oligonucleotide
gaaaaggguccucacuuua

SEQ ID NO: 652757 - RNA, 19 nt, Artificial Sequence
  Description of Artificial Sequence: Synthetic oligonucleotide
acgaggauucuucgccagg

SEQ ID NO: 652758 - RNA, 19 nt, Artificial Sequence
  Description of Artificial Sequence: Synthetic oligonucleotide
gacuaaaggcaaucucauc

SEQ ID NO: 652759 - RNA, 19 nt, Artificial Sequence
  Description of Artificial Sequence: Synthetic oligonucleotide
guugcugguccacgggcgg

SEQ ID NO: 652760 - RNA, 19 nt, Artificial Sequence
  Description of Artificial Sequence: Synthetic oligonucleotide
gaguuacccauagcaacgc

SEQ ID NO: 652761 - RNA, 19 nt, Artificial Sequence
  Description of Artificial Sequence: Synthetic oligonucleotide
uggaccugagaagaucuac

SEQ ID NO: 652762 - RNA, 19 nt, Artificial Sequence
  Description of Artificial Sequence: Synthetic oligonucleotide
ucacacuuccaaccuuggu

SEQ ID NO: 652763 - RNA, 19 nt, Artificial Sequence
  Description of Artificial Sequence: Synthetic oligonucleotide
cagcguuucguugguaucc

SEQ ID NO: 652764 - RNA, 19 nt, Artificial Sequence
  Description of Artificial Sequence: Synthetic oligonucleotide
cguagacucucacugaagg

SEQ ID NO: 652765 - RNA, 19 nt, Artificial Sequence
  Description of Artificial Sequence: Synthetic oligonucleotide
cuaaguuaccccuuguaau

SEQ ID NO: 652766 - RNA, 19 nt, Artificial Sequence
  Description of Artificial Sequence: Synthetic oligonucleotide
ggaauuauaucacuuccgu

SEQ ID NO: 652767 - RNA, 19 nt, Artificial Sequence
  Description of Artificial Sequence: Synthetic oligonucleotide
uccucacuagcaagggcgu

SEQ ID NO: 652768 - RNA, 19 nt, Artificial Sequence
  Description of Artificial Sequence: Synthetic oligonucleotide
aacguagagacggcaugcu

SEQ ID NO: 652769 - RNA, 19 nt, Artificial Sequence
  Description of Artificial Sequence: Synthetic oligonucleotide
uauaggcuacaaucuuuau

SEQ ID NO: 652770 - RNA, 19 nt, Artificial Sequence
  Description of Artificial Sequence: Synthetic oligonucleotide
acuagaacacggaagcuuu

SEQ ID NO: 652771 - RNA, 19 nt, Artificial Sequence
  Description of Artificial Sequence: Synthetic oligonucleotide
gacggcaugcuuagauucc

SEQ ID NO: 652772 - RNA, 19 nt, Artificial Sequence
  Description of Artificial Sequence: Synthetic oligonucleotide
cuugacggcuucugucagc

SEQ ID NO: 652773 - RNA, 19 nt, Artificial Sequence
  Description of Artificial Sequence: Synthetic oligonucleotide
gaguucuugcauccacaac

SEQ ID NO: 652774 - RNA, 19 nt, Artificial Sequence
  Description of Artificial Sequence: Synthetic oligonucleotide
uuagcggaccacgccaugu

SEQ ID NO: 652775 - RNA, 19 nt, Artificial Sequence
  Description of Artificial Sequence: Synthetic oligonucleotide
cucacuagcaagggcguug

SEQ ID NO: 652776 - RNA, 19 nt, Artificial Sequence
  Description of Artificial Sequence: Synthetic oligonucleotide
uccucacuuuagagagagg

SEQ ID NO: 652777 - RNA, 19 nt, Artificial Sequence
  Description of Artificial Sequence: Synthetic oligonucleotide
acuagcaagggcguuguua

SEQ ID NO: 652778 - RNA, 19 nt, Artificial Sequence
  Description of Artificial Sequence: Synthetic oligonucleotide
aagggcguuguuaguguug

SEQ ID NO: 652779 - RNA, 19 nt, Artificial Sequence
  Description of Artificial Sequence: Synthetic oligonucleotide
ggcagcugcacauaaacua

SEQ ID NO: 652780 - RNA, 19 nt, Artificial Sequence
  Description of Artificial Sequence: Synthetic oligonucleotide
acaaaucagggccgauggu

SEQ ID NO: 652781 - RNA, 19 nt, Artificial Sequence
  Description of Artificial Sequence: Synthetic oligonucleotide
auagacaaaucagggccga

SEQ ID NO: 652782 - RNA, 19 nt, Artificial Sequence
  Description of Artificial Sequence: Synthetic oligonucleotide
uggauguggucauucugua

SEQ ID NO: 652783 - RNA, 19 nt, Artificial Sequence
  Description of Artificial Sequence: Synthetic oligonucleotide
ugcugaucgccagagcuuc

SEQ ID NO: 652784 - RNA, 19 nt, Artificial Sequence
  Description of Artificial Sequence: Synthetic oligonucleotide
cccaugaauggcuuccagg

SEQ ID NO: 652785 - RNA, 19 nt, Artificial Sequence
  Description of Artificial Sequence: Synthetic oligonucleotide
cauguauugccgcaagucu

SEQ ID NO: 652786 - RNA, 19 nt, Artificial Sequence
  Description of Artificial Sequence: Synthetic oligonucleotide
uggggugauuugcuccuga

SEQ ID NO: 652787 - RNA, 19 nt, Artificial Sequence
  Description of Artificial Sequence: Synthetic oligonucleotide
auuucccagaaaugauuua

SEQ ID NO: 652788 - RNA, 19 nt, Artificial Sequence
  Description of Artificial Sequence: Synthetic oligonucleotide
gaucgauuuauaggcuaca

SEQ ID NO: 652789 - RNA, 19 nt, Artificial Sequence
  Description of Artificial Sequence: Synthetic oligonucleotide
ugccguagacucucacuga

SEQ ID NO: 652790 - RNA, 19 nt, Artificial Sequence
  Description of Artificial Sequence: Synthetic oligonucleotide
cuagaacacggaagcuuuc

SEQ ID NO: 652791 - RNA, 19 nt, Artificial Sequence
  Description of Artificial Sequence: Synthetic oligonucleotide
cuuugucuuugggagccag

SEQ ID NO: 652792 - RNA, 19 nt, Artificial Sequence
  Description of Artificial Sequence: Synthetic oligonucleotide
acuuccguagcggaacccu

SEQ ID NO: 652793 - RNA, 19 nt, Artificial Sequence
  Description of Artificial Sequence: Synthetic oligonucleotide
ccuuauuagcggaccacgc

SEQ ID NO: 652794 - RNA, 19 nt, Artificial Sequence
  Description of Artificial Sequence: Synthetic oligonucleotide
aucgauuuauaggcuacaa

SEQ ID NO: 652795 - RNA, 19 nt, Artificial Sequence
  Description of Artificial Sequence: Synthetic oligonucleotide
ggauguggucauucuguag

SEQ ID NO: 652796 - RNA, 19 nt, Artificial Sequence
  Description of Artificial Sequence: Synthetic oligonucleotide
auagcaacgcccacaucca

SEQ ID NO: 652797 - RNA, 19 nt, Artificial Sequence
  Description of Artificial Sequence: Synthetic oligonucleotide
uucuugcauccacaacuau

SEQ ID NO: 652798 - RNA, 19 nt, Artificial Sequence
  Description of Artificial Sequence: Synthetic oligonucleotide
uggagcgccucucaaucuu

SEQ ID NO: 652799 - RNA, 19 nt, Artificial Sequence
  Description of Artificial Sequence: Synthetic oligonucleotide
acgauggcgaccauguuua

SEQ ID NO: 652800 - RNA, 19 nt, Artificial Sequence
  Description of Artificial Sequence: Synthetic oligonucleotide
gccuuauuagcggaccacg

SEQ ID NO: 652801 - RNA, 19 nt, Artificial Sequence
  Description of Artificial Sequence: Synthetic oligonucleotide
ugccuuauuagcggaccac

SEQ ID NO: 652802 - RNA, 19 nt, Artificial Sequence
  Description of Artificial Sequence: Synthetic oligonucleotide
agcggaacccuugaauagu

SEQ ID NO: 652803 - RNA, 19 nt, Artificial Sequence
  Description of Artificial Sequence: Synthetic oligonucleotide
auuagcggaccacgccaug

SEQ ID NO: 652804 - RNA, 19 nt, Artificial Sequence
  Description of Artificial Sequence: Synthetic oligonucleotide
ucagggccgauggucagcu

SEQ ID NO: 652805 - RNA, 19 nt, Artificial Sequence
  Description of Artificial Sequence: Synthetic oligonucleotide
agcggaccacgccauguug

SEQ ID NO: 652806 - RNA, 19 nt, Artificial Sequence
  Description of Artificial Sequence: Synthetic oligonucleotide
cugucguuggacaaacaua

SEQ ID NO: 652807 - RNA, 19 nt, Artificial Sequence
  Description of Artificial Sequence: Synthetic oligonucleotide
cugauacugguccucacua

SEQ ID NO: 652808 - RNA, 19 nt, Artificial Sequence
  Description of Artificial Sequence: Synthetic oligonucleotide
agggcguuguuaguguugu

SEQ ID NO: 652809 - RNA, 19 nt, Artificial Sequence
  Description of Artificial Sequence: Synthetic oligonucleotide
aggcuacaaucuuuauaga

SEQ ID NO: 652810 - RNA, 19 nt, Artificial Sequence
  Description of Artificial Sequence: Synthetic oligonucleotide
caaucuucuuaaagacaca

SEQ ID NO: 652811 - RNA, 19 nt, Artificial Sequence
  Description of Artificial Sequence: Synthetic oligonucleotide
gucuaaguuaccccuugua

SEQ ID NO: 652812 - RNA, 19 nt, Artificial Sequence
  Description of Artificial Sequence: Synthetic oligonucleotide
gaaggacuaaaggcaaucu

SEQ ID NO: 652813 - RNA, 19 nt, Artificial Sequence
  Description of Artificial Sequence: Synthetic oligonucleotide
gggugauuugcuccugagc

SEQ ID NO: 652814 - RNA, 19 nt, Artificial Sequence
  Description of Artificial Sequence: Synthetic oligonucleotide
agcgggaaaaggguccuca

SEQ ID NO: 652815 - RNA, 19 nt, Artificial Sequence
  Description of Artificial Sequence: Synthetic oligonucleotide
ggaauuuuggagguuggaa

SEQ ID NO: 652816 - RNA, 19 nt, Artificial Sequence
  Description of Artificial Sequence: Synthetic oligonucleotide
aguuaccccuuguaauaua

SEQ ID NO: 652817 - RNA, 19 nt, Artificial Sequence
  Description of Artificial Sequence: Synthetic oligonucleotide
gggcaaacgcucuugggga

SEQ ID NO: 652818 - RNA, 19 nt, Artificial Sequence
  Description of Artificial Sequence: Synthetic oligonucleotide
cuucgugaaugucuuggaa

SEQ ID NO: 652819 - RNA, 19 nt, Artificial Sequence
  Description of Artificial Sequence: Synthetic oligonucleotide
ccucacuuuagagagagga

SEQ ID NO: 652820 - RNA, 19 nt, Artificial Sequence
  Description of Artificial Sequence: Synthetic oligonucleotide
cugaucgccagagcuucag

SEQ ID NO: 652821 - RNA, 19 nt, Artificial Sequence
  Description of Artificial Sequence: Synthetic oligonucleotide
auuugcuccugagcugucu

SEQ ID NO: 652822 - RNA, 19 nt, Artificial Sequence
  Description of Artificial Sequence: Synthetic oligonucleotide
acgcucuuggggauguaag

SEQ ID NO: 652823 - RNA, 19 nt, Artificial Sequence
  Description of Artificial Sequence: Synthetic oligonucleotide
gcaugcuuagauucccaac

SEQ ID NO: 652824 - RNA, 19 nt, Artificial Sequence
  Description of Artificial Sequence: Synthetic oligonucleotide
ugugccucugugggagugc

SEQ ID NO: 652825 - RNA, 19 nt, Artificial Sequence
  Description of Artificial Sequence: Synthetic oligonucleotide
uucagccacgcuagagaua

SEQ ID NO: 652826 - RNA, 19 nt, Artificial Sequence
  Description of Artificial Sequence: Synthetic oligonucleotide
gagauucagcauauucaaa

SEQ ID NO: 652827 - RNA, 19 nt, Artificial Sequence
  Description of Artificial Sequence: Synthetic oligonucleotide
gggucuaaguuaccccuug

SEQ ID NO: 652828 - RNA, 19 nt, Artificial Sequence
  Description of Artificial Sequence: Synthetic oligonucleotide
ggaguagaucucauccagc

SEQ ID NO: 652829 - RNA, 19 nt, Artificial Sequence
  Description of Artificial Sequence: Synthetic oligonucleotide
gguagcaucaggugucugu

SEQ ID NO: 652830 - RNA, 19 nt, Artificial Sequence
  Description of Artificial Sequence: Synthetic oligonucleotide
caccugucguuggacaaac

SEQ ID NO: 652831 - RNA, 19 nt, Artificial Sequence
  Description of Artificial Sequence: Synthetic oligonucleotide
acguagagacggcaugcuu

SEQ ID NO: 652832 - RNA, 19 nt, Artificial Sequence
  Description of Artificial Sequence: Synthetic oligonucleotide
agcguuucguugguaucca

SEQ ID NO: 652833 - RNA, 19 nt, Artificial Sequence
  Description of Artificial Sequence: Synthetic oligonucleotide
cugucagcgggaaaagggu

SEQ ID NO: 652834 - RNA, 19 nt, Artificial Sequence
  Description of Artificial Sequence: Synthetic oligonucleotide
caccaacuugaggauuagc

SEQ ID NO: 652835 - RNA, 19 nt, Artificial Sequence
  Description of Artificial Sequence: Synthetic oligonucleotide
cuguuccaaagaaggacua

SEQ ID NO: 652836 - RNA, 19 nt, Artificial Sequence
  Description of Artificial Sequence: Synthetic oligonucleotide
guucuugcauccacaacua

SEQ ID NO: 652837 - RNA, 19 nt, Artificial Sequence
  Description of Artificial Sequence: Synthetic oligonucleotide
cucugugggagugcauuuc

SEQ ID NO: 652838 - RNA, 19 nt, Artificial Sequence
  Description of Artificial Sequence: Synthetic oligonucleotide
ggcgaccauguuuaauuca

SEQ ID NO: 652839 - RNA, 19 nt, Artificial Sequence
  Description of Artificial Sequence: Synthetic oligonucleotide
uagcaagggcguuguuagu

SEQ ID NO: 652840 - RNA, 19 nt, Artificial Sequence
  Description of Artificial Sequence: Synthetic oligonucleotide
uagcggaccacgccauguu

SEQ ID NO: 652841 - RNA, 19 nt, Artificial Sequence
  Description of Artificial Sequence: Synthetic oligonucleotide
gcugccuuauuagcggacc

SEQ ID NO: 652842 - RNA, 19 nt, Artificial Sequence
  Description of Artificial Sequence: Synthetic oligonucleotide
guuaccccuuguaauauau

SEQ ID NO: 652843 - RNA, 19 nt, Artificial Sequence
  Description of Artificial Sequence: Synthetic oligonucleotide
ccuugguaaucagaguaac

SEQ ID NO: 652844 - RNA, 19 nt, Artificial Sequence
  Description of Artificial Sequence: Synthetic oligonucleotide
gcauaucgaacgauggcga

SEQ ID NO: 652845 - RNA, 19 nt, Artificial Sequence
  Description of Artificial Sequence: Synthetic oligonucleotide
ggaccugagaagaucuaca

SEQ ID NO: 652846 - RNA, 19 nt, Artificial Sequence
  Description of Artificial Sequence: Synthetic oligonucleotide
ccaaagcaugaauaaggga

SEQ ID NO: 652847 - RNA, 19 nt, Artificial Sequence
  Description of Artificial Sequence: Synthetic oligonucleotide
auuuggaauuuuggagguu

SEQ ID NO: 652848 - RNA, 19 nt, Artificial Sequence
  Description of Artificial Sequence: Synthetic oligonucleotide
augugacuuauuagcugga

SEQ ID NO: 652849 - RNA, 19 nt, Artificial Sequence
  Description of Artificial Sequence: Synthetic oligonucleotide
cugccuuauuagcggacca

SEQ ID NO: 652850 - RNA, 19 nt, Artificial Sequence
  Description of Artificial Sequence: Synthetic oligonucleotide
gugggagugcauuucuuau

SEQ ID NO: 652851 - RNA, 19 nt, Artificial Sequence
  Description of Artificial Sequence: Synthetic oligonucleotide
gcaggaccagggcauggag

SEQ ID NO: 652852 - RNA, 19 nt, Artificial Sequence
  Description of Artificial Sequence: Synthetic oligonucleotide
uuggcagcgggccccucuu

SEQ ID NO: 652853 - RNA, 19 nt, Artificial Sequence
  Description of Artificial Sequence: Synthetic oligonucleotide
cuucgccaggaaaagaguu

SEQ ID NO: 652854 - RNA, 19 nt, Artificial Sequence
  Description of Artificial Sequence: Synthetic oligonucleotide
gagacggcaugcuuagauu

SEQ ID NO: 652855 - RNA, 19 nt, Artificial Sequence
  Description of Artificial Sequence: Synthetic oligonucleotide
uuggggugauuugcuccug

SEQ ID NO: 652856 - RNA, 19 nt, Artificial Sequence
  Description of Artificial Sequence: Synthetic oligonucleotide
ccauggucuauaucauauc

SEQ ID NO: 652857 - RNA, 19 nt, Artificial Sequence
  Description of Artificial Sequence: Synthetic oligonucleotide
gcucucagcaacguagaga

SEQ ID NO: 652858 - RNA, 19 nt, Artificial Sequence
  Description of Artificial Sequence: Synthetic oligonucleotide
acgcccacauccauacaca

SEQ ID NO: 652859 - RNA, 19 nt, Artificial Sequence
  Description of Artificial Sequence: Synthetic oligonucleotide
cugagaagaucuacagaau

SEQ ID NO: 652860 - RNA, 19 nt, Artificial Sequence
  Description of Artificial Sequence: Synthetic oligonucleotide
cacuuccguagcggaaccc

SEQ ID NO: 652861 - RNA, 19 nt, Artificial Sequence
  Description of Artificial Sequence: Synthetic oligonucleotide
ggcguuguuaguguugucu

SEQ ID NO: 652862 - RNA, 19 nt, Artificial Sequence
  Description of Artificial Sequence: Synthetic oligonucleotide
uagacaaaucagggccgau

SEQ ID NO: 652863 - RNA, 19 nt, Artificial Sequence
  Description of Artificial Sequence: Synthetic oligonucleotide
acgccauguugcuggucca

SEQ ID NO: 652864 - RNA, 19 nt, Artificial Sequence
  Description of Artificial Sequence: Synthetic oligonucleotide
ggaaaggcuacaccaacuu

SEQ ID NO: 652865 - RNA, 19 nt, Artificial Sequence
  Description of Artificial Sequence: Synthetic oligonucleotide
guaaucagaguaacuccau

SEQ ID NO: 652866 - RNA, 19 nt, Artificial Sequence
  Description of Artificial Sequence: Synthetic oligonucleotide
ugguagcaucaggugucug

SEQ ID NO: 652867 - RNA, 19 nt, Artificial Sequence
  Description of Artificial Sequence: Synthetic oligonucleotide
caacugugccucuguggga

SEQ ID NO: 652868 - RNA, 19 nt, Artificial Sequence
  Description of Artificial Sequence: Synthetic oligonucleotide
agccuucauccuugguaau

SEQ ID NO: 652869 - RNA, 19 nt, Artificial Sequence
  Description of Artificial Sequence: Synthetic oligonucleotide
cauaagcauaucgaacgau

SEQ ID NO: 652870 - RNA, 19 nt, Artificial Sequence
  Description of Artificial Sequence: Synthetic oligonucleotide
gauuugcuccugagcuguc

SEQ ID NO: 652871 - RNA, 19 nt, Artificial Sequence
  Description of Artificial Sequence: Synthetic oligonucleotide
gccguagacucucacugaa

SEQ ID NO: 652872 - RNA, 19 nt, Artificial Sequence
  Description of Artificial Sequence: Synthetic oligonucleotide
uagagacggcaugcuuaga

SEQ ID NO: 652873 - RNA, 19 nt, Artificial Sequence
  Description of Artificial Sequence: Synthetic oligonucleotide
cacuagaacacggaagcuu

SEQ ID NO: 652874 - RNA, 19 nt, Artificial Sequence
  Description of Artificial Sequence: Synthetic oligonucleotide
cguagagacggcaugcuua

SEQ ID NO: 652875 - RNA, 19 nt, Artificial Sequence
  Description of Artificial Sequence: Synthetic oligonucleotide
caucaucguuuaagcaaua

SEQ ID NO: 652876 - RNA, 19 nt, Artificial Sequence
  Description of Artificial Sequence: Synthetic oligonucleotide
gcaaacgcucuuggggaug

SEQ ID NO: 652877 - RNA, 19 nt, Artificial Sequence
  Description of Artificial Sequence: Synthetic oligonucleotide
ccuuguaauauauguggau

SEQ ID NO: 652878 - RNA, 19 nt, Artificial Sequence
  Description of Artificial Sequence: Synthetic oligonucleotide
agggucuaaguuaccccuu

SEQ ID NO: 652879 - RNA, 19 nt, Artificial Sequence
  Description of Artificial Sequence: Synthetic oligonucleotide
ggauagggucuaaguuacc

SEQ ID NO: 652880 - RNA, 19 nt, Artificial Sequence
  Description of Artificial Sequence: Synthetic oligonucleotide
ccacgggcgguuugguuac

SEQ ID NO: 652881 - RNA, 19 nt, Artificial Sequence
  Description of Artificial Sequence: Synthetic oligonucleotide
cagcaacguagagacggca

SEQ ID NO: 652882 - RNA, 19 nt, Artificial Sequence
  Description of Artificial Sequence: Synthetic oligonucleotide
cugagcucucagcaacgua

SEQ ID NO: 652883 - RNA, 19 nt, Artificial Sequence
  Description of Artificial Sequence: Synthetic oligonucleotide
cuccuguacgaucgauuua

SEQ ID NO: 652884 - RNA, 19 nt, Artificial Sequence
  Description of Artificial Sequence: Synthetic oligonucleotide
gcaagggcguuguuagugu

SEQ ID NO: 652885 - RNA, 19 nt, Artificial Sequence
  Description of Artificial Sequence: Synthetic oligonucleotide
gcgccucucaaucuucuua

SEQ ID NO: 652886 - RNA, 19 nt, Artificial Sequence
  Description of Artificial Sequence: Synthetic oligonucleotide
ggucuauaucauauccagu

SEQ ID NO: 652887 - RNA, 19 nt, Artificial Sequence
  Description of Artificial Sequence: Synthetic oligonucleotide
ggagugcauuucuuauugu

SEQ ID NO: 652888 - RNA, 19 nt, Artificial Sequence
  Description of Artificial Sequence: Synthetic oligonucleotide
caaacgcucuuggggaugu

SEQ ID NO: 652889 - RNA, 19 nt, Artificial Sequence
  Description of Artificial Sequence: Synthetic oligonucleotide
gcgaccauguuuaauucau

SEQ ID NO: 652890 - RNA, 19 nt, Artificial Sequence
  Description of Artificial Sequence: Synthetic oligonucleotide
ccugucguuggacaaacau

SEQ ID NO: 652891 - RNA, 19 nt, Artificial Sequence
  Description of Artificial Sequence: Synthetic oligonucleotide
ccccaugaauggcuuccag

SEQ ID NO: 652892 - RNA, 19 nt, Artificial Sequence
  Description of Artificial Sequence: Synthetic oligonucleotide
ccucgcuuuucuuuaccaa

SEQ ID NO: 652893 - RNA, 19 nt, Artificial Sequence
  Description of Artificial Sequence: Synthetic oligonucleotide
cguuucguugguauccaaa

SEQ ID NO: 652894 - RNA, 19 nt, Artificial Sequence
  Description of Artificial Sequence: Synthetic oligonucleotide
aaacgcucuuggggaugua

SEQ ID NO: 652895 - RNA, 19 nt, Artificial Sequence
  Description of Artificial Sequence: Synthetic oligonucleotide
aucgaacgauggcgaccau

SEQ ID NO: 652896 - RNA, 19 nt, Artificial Sequence
  Description of Artificial Sequence: Synthetic oligonucleotide
cccggaaagcuuugaugca

SEQ ID NO: 652897 - RNA, 19 nt, Artificial Sequence
  Description of Artificial Sequence: Synthetic oligonucleotide
ccacaucgccaccuucuuc

SEQ ID NO: 652898 - RNA, 19 nt, Artificial Sequence
  Description of Artificial Sequence: Synthetic oligonucleotide
accugucguuggacaaaca

SEQ ID NO: 652899 - RNA, 19 nt, Artificial Sequence
  Description of Artificial Sequence: Synthetic oligonucleotide
gccacgcuagagauacuga

SEQ ID NO: 652900 - RNA, 19 nt, Artificial Sequence
  Description of Artificial Sequence: Synthetic oligonucleotide
gucguuggacaaacauagu

SEQ ID NO: 652901 - RNA, 19 nt, Artificial Sequence
  Description of Artificial Sequence: Synthetic oligonucleotide
guggaccugagaagaucua

SEQ ID NO: 652902 - RNA, 19 nt, Artificial Sequence
  Description of Artificial Sequence: Synthetic oligonucleotide
cuuccguagcggaacccuu

SEQ ID NO: 652903 - RNA, 19 nt, Artificial Sequence
  Description of Artificial Sequence: Synthetic oligonucleotide
caagggcguuguuaguguu

SEQ ID NO: 652904 - RNA, 19 nt, Artificial Sequence
  Description of Artificial Sequence: Synthetic oligonucleotide
ccacgcuagagauacugau

SEQ ID NO: 652905 - RNA, 19 nt, Artificial Sequence
  Description of Artificial Sequence: Synthetic oligonucleotide
cagggccgauggucagcug

SEQ ID NO: 652906 - RNA, 19 nt, Artificial Sequence
  Description of Artificial Sequence: Synthetic oligonucleotide
uuuuggcagcgggccccuc

SEQ ID NO: 652907 - RNA, 19 nt, Artificial Sequence
  Description of Artificial Sequence: Synthetic oligonucleotide
ggcaaacgcucuuggggau

SEQ ID NO: 652908 - RNA, 19 nt, Artificial Sequence
  Description of Artificial Sequence: Synthetic oligonucleotide
gggcguuguuaguguuguc

SEQ ID NO: 652909 - RNA, 19 nt, Artificial Sequence
  Description of Artificial Sequence: Synthetic oligonucleotide
gcguuucguugguauccaa

SEQ ID NO: 652910 - RNA, 19 nt, Artificial Sequence
  Description of Artificial Sequence: Synthetic oligonucleotide
ggccccucuucgugaaugu

SEQ ID NO: 652911 - RNA, 19 nt, Artificial Sequence
  Description of Artificial Sequence: Synthetic oligonucleotide
cacaacuauccagcucuuu

SEQ ID NO: 652912 - RNA, 19 nt, Artificial Sequence
  Description of Artificial Sequence: Synthetic oligonucleotide
guccacgggcgguuugguu

SEQ ID NO: 652913 - RNA, 19 nt, Artificial Sequence
  Description of Artificial Sequence: Synthetic oligonucleotide
cgcuuuucuuuaccaagcu

SEQ ID NO: 652914 - RNA, 19 nt, Artificial Sequence
  Description of Artificial Sequence: Synthetic oligonucleotide
ggccgauggucagcuggca

SEQ ID NO: 652915 - RNA, 19 nt, Artificial Sequence
  Description of Artificial Sequence: Synthetic oligonucleotide
cggcaugcuuagauuccca

SEQ ID NO: 652916 - RNA, 19 nt, Artificial Sequence
  Description of Artificial Sequence: Synthetic oligonucleotide
ccacgccauguugcugguc

SEQ ID NO: 652917 - RNA, 19 nt, Artificial Sequence
  Description of Artificial Sequence: Synthetic oligonucleotide
cgugaaugucuuggaaaau

SEQ ID NO: 652918 - RNA, 19 nt, Artificial Sequence
  Description of Artificial Sequence: Synthetic oligonucleotide
gcacaacagcugccuuauu

SEQ ID NO: 652919 - RNA, 19 nt, Artificial Sequence
  Description of Artificial Sequence: Synthetic oligonucleotide
ccucacuagcaagggcguu

SEQ ID NO: 652920 - RNA, 19 nt, Artificial Sequence
  Description of Artificial Sequence: Synthetic oligonucleotide
cgggccccucuucgugaau

SEQ ID NO: 652921 - RNA, 19 nt, Artificial Sequence
  Description of Artificial Sequence: Synthetic oligonucleotide
aucaauauaaucaaggccc

SEQ ID NO: 652922 - RNA, 19 nt, Artificial Sequence
  Description of Artificial Sequence: Synthetic oligonucleotide
aaagagagugcccuggugc

SEQ ID NO: 652923 - RNA, 19 nt, Artificial Sequence
  Description of Artificial Sequence: Synthetic oligonucleotide
uacaucaauauaaucaagg

SEQ ID NO: 652924 - RNA, 19 nt, Artificial Sequence
  Description of Artificial Sequence: Synthetic oligonucleotide
uucucuauuguuaggaugg

SEQ ID NO: 652925 - RNA, 19 nt, Artificial Sequence
  Description of Artificial Sequence: Synthetic oligonucleotide
ucuauaauuggacacauau

SEQ ID NO: 652926 - RNA, 19 nt, Artificial Sequence
  Description of Artificial Sequence: Synthetic oligonucleotide
acuugauggaggcugaugc

SEQ ID NO: 652927 - RNA, 19 nt, Artificial Sequence
  Description of Artificial Sequence: Synthetic oligonucleotide
uuugauuccagauucggug

SEQ ID NO: 652928 - RNA, 19 nt, Artificial Sequence
  Description of Artificial Sequence: Synthetic oligonucleotide
aaucucuagggccugacag

SEQ ID NO: 652929 - RNA, 19 nt, Artificial Sequence
  Description of Artificial Sequence: Synthetic oligonucleotide
auaauuggugaacuuggcc

SEQ ID NO: 652930 - RNA, 19 nt, Artificial Sequence
  Description of Artificial Sequence: Synthetic oligonucleotide
ucaacuugcacucuguaga

SEQ ID NO: 652931 - RNA, 19 nt, Artificial Sequence
  Description of Artificial Sequence: Synthetic oligonucleotide
ucagacuaagcucauacug

SEQ ID NO: 652932 - RNA, 19 nt, Artificial Sequence
  Description of Artificial Sequence: Synthetic oligonucleotide
aacacuuaggucugguuuc

SEQ ID NO: 652933 - RNA, 19 nt, Artificial Sequence
  Description of Artificial Sequence: Synthetic oligonucleotide
aguaaacccauuugauucc

SEQ ID NO: 652934 - RNA, 19 nt, Artificial Sequence
  Description of Artificial Sequence: Synthetic oligonucleotide
uaauuggacacauauacaa

SEQ ID NO: 652935 - RNA, 19 nt, Artificial Sequence
  Description of Artificial Sequence: Synthetic oligonucleotide
aaacucaugguguaguaca

SEQ ID NO: 652936 - RNA, 19 nt, Artificial Sequence
  Description of Artificial Sequence: Synthetic oligonucleotide
acuaagcucauacugguag

SEQ ID NO: 652937 - RNA, 19 nt, Artificial Sequence
  Description of Artificial Sequence: Synthetic oligonucleotide
uacaagaacucauugguca

SEQ ID NO: 652938 - RNA, 19 nt, Artificial Sequence
  Description of Artificial Sequence: Synthetic oligonucleotide
cauauagccagccaguccc

SEQ ID NO: 652939 - RNA, 19 nt, Artificial Sequence
  Description of Artificial Sequence: Synthetic oligonucleotide
caucaauauaaucaaggcc

SEQ ID NO: 652940 - RNA, 19 nt, Artificial Sequence
  Description of Artificial Sequence: Synthetic oligonucleotide
aggaccaaagggaagaugc

SEQ ID NO: 652941 - RNA, 19 nt, Artificial Sequence
  Description of Artificial Sequence: Synthetic oligonucleotide
aguacaucaauauaaucaa

SEQ ID NO: 652942 - RNA, 19 nt, Artificial Sequence
  Description of Artificial Sequence: Synthetic oligonucleotide
agggugaugaacuccggcc

SEQ ID NO: 652943 - RNA, 19 nt, Artificial Sequence
  Description of Artificial Sequence: Synthetic oligonucleotide
agaauguucccucagaguu

SEQ ID NO: 652944 - RNA, 19 nt, Artificial Sequence
  Description of Artificial Sequence: Synthetic oligonucleotide
uuauaaugccagaaggggu

SEQ ID NO: 652945 - RNA, 19 nt, Artificial Sequence
  Description of Artificial Sequence: Synthetic oligonucleotide
agauucggugccuucacac

SEQ ID NO: 652946 - RNA, 19 nt, Artificial Sequence
  Description of Artificial Sequence: Synthetic oligonucleotide
aauguggaacauaacuuuc

SEQ ID NO: 652947 - RNA, 19 nt, Artificial Sequence
  Description of Artificial Sequence: Synthetic oligonucleotide
cacuauaaauuuuaaugug

SEQ ID NO: 652948 - RNA, 19 nt, Artificial Sequence
  Description of Artificial Sequence: Synthetic oligonucleotide
uguauuuguaaaacauaac

SEQ ID NO: 652949 - RNA, 19 nt, Artificial Sequence
  Description of Artificial Sequence: Synthetic oligonucleotide
uguagucuuucuuggagcc

SEQ ID NO: 652950 - RNA, 19 nt, Artificial Sequence
  Description of Artificial Sequence: Synthetic oligonucleotide
ugcgagaagacauucuuga

SEQ ID NO: 652951 - RNA, 19 nt, Artificial Sequence
  Description of Artificial Sequence: Synthetic oligonucleotide
aguacuuacauggaaccuc

SEQ ID NO: 652952 - RNA, 19 nt, Artificial Sequence
  Description of Artificial Sequence: Synthetic oligonucleotide
augacgauguuguauccgg

SEQ ID NO: 652953 - RNA, 19 nt, Artificial Sequence
  Description of Artificial Sequence: Synthetic oligonucleotide
gaugguaggauauuucuaa

SEQ ID NO: 652954 - RNA, 19 nt, Artificial Sequence
  Description of Artificial Sequence: Synthetic oligonucleotide
gguaggauauuucuaaagc

SEQ ID NO: 652955 - RNA, 19 nt, Artificial Sequence
  Description of Artificial Sequence: Synthetic oligonucleotide
agauaguacaucaauauaa

SEQ ID NO: 652956 - RNA, 19 nt, Artificial Sequence
  Description of Artificial Sequence: Synthetic oligonucleotide
uguauucaccaccuaugag

SEQ ID NO: 652957 - RNA, 19 nt, Artificial Sequence
  Description of Artificial Sequence: Synthetic oligonucleotide
uccuaucucagugggaugg

SEQ ID NO: 652958 - RNA, 19 nt, Artificial Sequence
  Description of Artificial Sequence: Synthetic oligonucleotide
ggugauagggguuuuacug

SEQ ID NO: 652959 - RNA, 19 nt, Artificial Sequence
  Description of Artificial Sequence: Synthetic oligonucleotide
ugauguauucaccaccuau

SEQ ID NO: 652960 - RNA, 19 nt, Artificial Sequence
  Description of Artificial Sequence: Synthetic oligonucleotide
aaccucacggaagauauug

SEQ ID NO: 652961 - RNA, 19 nt, Artificial Sequence
  Description of Artificial Sequence: Synthetic oligonucleotide
agagcaauuccgaagagug

SEQ ID NO: 652962 - RNA, 19 nt, Artificial Sequence
  Description of Artificial Sequence: Synthetic oligonucleotide
aauuccgaagagugggaug

SEQ ID NO: 652963 - RNA, 19 nt, Artificial Sequence
  Description of Artificial Sequence: Synthetic oligonucleotide
uaggugaucucguagggcu

SEQ ID NO: 652964 - RNA, 19 nt, Artificial Sequence
  Description of Artificial Sequence: Synthetic oligonucleotide
aauauaaucaaggcccuuu

SEQ ID NO: 652965 - RNA, 19 nt, Artificial Sequence
  Description of Artificial Sequence: Synthetic oligonucleotide
ucaauauaaucaaggcccu

SEQ ID NO: 652966 - RNA, 19 nt, Artificial Sequence
  Description of Artificial Sequence: Synthetic oligonucleotide
agggcauauagccagccag

SEQ ID NO: 652967 - RNA, 19 nt, Artificial Sequence
  Description of Artificial Sequence: Synthetic oligonucleotide
uaacacuuaggucugguuu

SEQ ID NO: 652968 - RNA, 19 nt, Artificial Sequence
  Description of Artificial Sequence: Synthetic oligonucleotide
gcugaugucauucaacuug

SEQ ID NO: 652969 - RNA, 19 nt, Artificial Sequence
  Description of Artificial Sequence: Synthetic oligonucleotide
agaauguggccuguggggc

SEQ ID NO: 652970 - RNA, 19 nt, Artificial Sequence
  Description of Artificial Sequence: Synthetic oligonucleotide
uuguauccggcucugauua

SEQ ID NO: 652971 - RNA, 19 nt, Artificial Sequence
  Description of Artificial Sequence: Synthetic oligonucleotide
aaaagagagugcccuggug

SEQ ID NO: 652972 - RNA, 19 nt, Artificial Sequence
  Description of Artificial Sequence: Synthetic oligonucleotide
aaagguuucuccagcuuuc

SEQ ID NO: 652973 - RNA, 19 nt, Artificial Sequence
  Description of Artificial Sequence: Synthetic oligonucleotide
aauguucccucagaguuug

SEQ ID NO: 652974 - RNA, 19 nt, Artificial Sequence
  Description of Artificial Sequence: Synthetic oligonucleotide
uccggcucugauuaggaag

SEQ ID NO: 652975 - RNA, 19 nt, Artificial Sequence
  Description of Artificial Sequence: Synthetic oligonucleotide
aguguauagucccuccuug

SEQ ID NO: 652976 - RNA, 19 nt, Artificial Sequence
  Description of Artificial Sequence: Synthetic oligonucleotide
uuagaguaacacuuagguc

SEQ ID NO: 652977 - RNA, 19 nt, Artificial Sequence
  Description of Artificial Sequence: Synthetic oligonucleotide
cuugcgguucuccagauuc

SEQ ID NO: 652978 - RNA, 19 nt, Artificial Sequence
  Description of Artificial Sequence: Synthetic oligonucleotide
cagaauguggccugugggg

SEQ ID NO: 652979 - RNA, 19 nt, Artificial Sequence
  Description of Artificial Sequence: Synthetic oligonucleotide
ucuagggccugacagcagc

SEQ ID NO: 652980 - RNA, 19 nt, Artificial Sequence
  Description of Artificial Sequence: Synthetic oligonucleotide
uuccucuauaauuggacac

SEQ ID NO: 652981 - RNA, 19 nt, Artificial Sequence
  Description of Artificial Sequence: Synthetic oligonucleotide
uuuacugccugauggguuc

SEQ ID NO: 652982 - RNA, 19 nt, Artificial Sequence
  Description of Artificial Sequence: Synthetic oligonucleotide
accuaugagugacaacagg

SEQ ID NO: 652983 - RNA, 19 nt, Artificial Sequence
  Description of Artificial Sequence: Synthetic oligonucleotide
aaguucaacuuguagucuu

SEQ ID NO: 652984 - RNA, 19 nt, Artificial Sequence
  Description of Artificial Sequence: Synthetic oligonucleotide
caguauagggaguacuuac

SEQ ID NO: 652985 - RNA, 19 nt, Artificial Sequence
  Description of Artificial Sequence: Synthetic oligonucleotide
gaugacgauguuguauccg

SEQ ID NO: 652986 - RNA, 19 nt, Artificial Sequence
  Description of Artificial Sequence: Synthetic oligonucleotide
ucccgugcagggcauauag

SEQ ID NO: 652987 - RNA, 19 nt, Artificial Sequence
  Description of Artificial Sequence: Synthetic oligonucleotide
uuuccuaucucagugggau

SEQ ID NO: 652988 - RNA, 19 nt, Artificial Sequence
  Description of Artificial Sequence: Synthetic oligonucleotide
gugauagggguuuuacugc

SEQ ID NO: 652989 - RNA, 19 nt, Artificial Sequence
  Description of Artificial Sequence: Synthetic oligonucleotide
auguauucaccaccuauga

SEQ ID NO: 652990 - RNA, 19 nt, Artificial Sequence
  Description of Artificial Sequence: Synthetic oligonucleotide
ucuuggaccgcacggacuc

SEQ ID NO: 652991 - RNA, 19 nt, Artificial Sequence
  Description of Artificial Sequence: Synthetic oligonucleotide
ugucacuauaaauuuuaau

SEQ ID NO: 652992 - RNA, 19 nt, Artificial Sequence
  Description of Artificial Sequence: Synthetic oligonucleotide
gugacuuauggggugaucc

SEQ ID NO: 652993 - RNA, 19 nt, Artificial Sequence
  Description of Artificial Sequence: Synthetic oligonucleotide
uuaggucugguuucucuug

SEQ ID NO: 652994 - RNA, 19 nt, Artificial Sequence
  Description of Artificial Sequence: Synthetic oligonucleotide
aggcugaugucauucaacu

SEQ ID NO: 652995 - RNA, 19 nt, Artificial Sequence
  Description of Artificial Sequence: Synthetic oligonucleotide
agacuaagcucauacuggu

SEQ ID NO: 652996 - RNA, 19 nt, Artificial Sequence
  Description of Artificial Sequence: Synthetic oligonucleotide
guugcuguaugcgagaaga

SEQ ID NO: 652997 - RNA, 19 nt, Artificial Sequence
  Description of Artificial Sequence: Synthetic oligonucleotide
agaagguugcuguaugcga

SEQ ID NO: 652998 - RNA, 19 nt, Artificial Sequence
  Description of Artificial Sequence: Synthetic oligonucleotide
agggaugcgcuucuugggg

SEQ ID NO: 652999 - RNA, 19 nt, Artificial Sequence
  Description of Artificial Sequence: Synthetic oligonucleotide
ccgcuaaggagaaagaggg

SEQ ID NO: 653000 - RNA, 19 nt, Artificial Sequence
  Description of Artificial Sequence: Synthetic oligonucleotide
guaguaacccaagucacug

SEQ ID NO: 653001 - RNA, 19 nt, Artificial Sequence
  Description of Artificial Sequence: Synthetic oligonucleotide
ugacaaucagcuugguggu

SEQ ID NO: 653002 - RNA, 19 nt, Artificial Sequence
  Description of Artificial Sequence: Synthetic oligonucleotide
uuugcaguguauagucccu

SEQ ID NO: 653003 - RNA, 19 nt, Artificial Sequence
  Description of Artificial Sequence: Synthetic oligonucleotide
aaaucucuagggccugaca

SEQ ID NO: 653004 - RNA, 19 nt, Artificial Sequence
  Description of Artificial Sequence: Synthetic oligonucleotide
auuccgaagagugggauga

SEQ ID NO: 653005 - RNA, 19 nt, Artificial Sequence
  Description of Artificial Sequence: Synthetic oligonucleotide
uguuguauccggcucugau

SEQ ID NO: 653006 - RNA, 19 nt, Artificial Sequence
  Description of Artificial Sequence: Synthetic oligonucleotide
cacuacaggaccaaaggga

SEQ ID NO: 653007 - RNA, 19 nt, Artificial Sequence
  Description of Artificial Sequence: Synthetic oligonucleotide
aagaacggucuggaagugg

SEQ ID NO: 653008 - RNA, 19 nt, Artificial Sequence
  Description of Artificial Sequence: Synthetic oligonucleotide
uccaggucugguuggugcg

SEQ ID NO: 653009 - RNA, 19 nt, Artificial Sequence
  Description of Artificial Sequence: Synthetic oligonucleotide
agcggcuggaauucaaaug

SEQ ID NO: 653010 - RNA, 19 nt, Artificial Sequence
  Description of Artificial Sequence: Synthetic oligonucleotide
ucgguagucccgugcaggg

SEQ ID NO: 653011 - RNA, 19 nt, Artificial Sequence
  Description of Artificial Sequence: Synthetic oligonucleotide
uucagacuaagcucauacu

SEQ ID NO: 653012 - RNA, 19 nt, Artificial Sequence
  Description of Artificial Sequence: Synthetic oligonucleotide
uucgguagucccgugcagg

SEQ ID NO: 653013 - RNA, 19 nt, Artificial Sequence
  Description of Artificial Sequence: Synthetic oligonucleotide
aggcccuuuagaguaacac

SEQ ID NO: 653014 - RNA, 19 nt, Artificial Sequence
  Description of Artificial Sequence: Synthetic oligonucleotide
agucagaacagucuaucuu

SEQ ID NO: 653015 - RNA, 19 nt, Artificial Sequence
  Description of Artificial Sequence: Synthetic oligonucleotide
auuggcaggagcucaguau

SEQ ID NO: 653016 - RNA, 19 nt, Artificial Sequence
  Description of Artificial Sequence: Synthetic oligonucleotide
uuuuacugccugauggguu

SEQ ID NO: 653017 - RNA, 19 nt, Artificial Sequence
  Description of Artificial Sequence: Synthetic oligonucleotide
gaagucagaacagucuauc

SEQ ID NO: 653018 - RNA, 19 nt, Artificial Sequence
  Description of Artificial Sequence: Synthetic oligonucleotide
uuguuaggauggcacagaa

SEQ ID NO: 653019 - RNA, 19 nt, Artificial Sequence
  Description of Artificial Sequence: Synthetic oligonucleotide
cauuuccacaaugacccgg

SEQ ID NO: 653020 - RNA, 19 nt, Artificial Sequence
  Description of Artificial Sequence: Synthetic oligonucleotide
gaggggacgcaguaguccc

SEQ ID NO: 653021 - RNA, 19 nt, Artificial Sequence
  Description of Artificial Sequence: Synthetic oligonucleotide
acggucuggaaguggacag

SEQ ID NO: 653022 - RNA, 19 nt, Artificial Sequence
  Description of Artificial Sequence: Synthetic oligonucleotide
ugcaguguauagucccucc

SEQ ID NO: 653023 - RNA, 19 nt, Artificial Sequence
  Description of Artificial Sequence: Synthetic oligonucleotide
ucugauuaggaaggggccu

SEQ ID NO: 653024 - RNA, 19 nt, Artificial Sequence
  Description of Artificial Sequence: Synthetic oligonucleotide
gccaagaacggucuggaag

SEQ ID NO: 653025 - RNA, 19 nt, Artificial Sequence
  Description of Artificial Sequence: Synthetic oligonucleotide
auggguucccuucaaagua

SEQ ID NO: 653026 - RNA, 19 nt, Artificial Sequence
  Description of Artificial Sequence: Synthetic oligonucleotide
cacagaauguggccugugg

SEQ ID NO: 653027 - RNA, 19 nt, Artificial Sequence
  Description of Artificial Sequence: Synthetic oligonucleotide
uguaugcgagaagacauuc

SEQ ID NO: 653028 - RNA, 19 nt, Artificial Sequence
  Description of Artificial Sequence: Synthetic oligonucleotide
gaaacucaugguguaguac

SEQ ID NO: 653029 - RNA, 19 nt, Artificial Sequence
  Description of Artificial Sequence: Synthetic oligonucleotide
aguucgguagucccgugca

SEQ ID NO: 653030 - RNA, 19 nt, Artificial Sequence
  Description of Artificial Sequence: Synthetic oligonucleotide
guuggugcgguuugagagc

SEQ ID NO: 653031 - RNA, 19 nt, Artificial Sequence
  Description of Artificial Sequence: Synthetic oligonucleotide
aguaacccaagucacuguu

SEQ ID NO: 653032 - RNA, 19 nt, Artificial Sequence
  Description of Artificial Sequence: Synthetic oligonucleotide
aagauggggugcagauucc

SEQ ID NO: 653033 - RNA, 19 nt, Artificial Sequence
  Description of Artificial Sequence: Synthetic oligonucleotide
ggcaaagguaacuucuagc

SEQ ID NO: 653034 - RNA, 19 nt, Artificial Sequence
  Description of Artificial Sequence: Synthetic oligonucleotide
ucucuagggccugacagca

SEQ ID NO: 653035 - RNA, 19 nt, Artificial Sequence
  Description of Artificial Sequence: Synthetic oligonucleotide
aacggucuggaaguggaca

SEQ ID NO: 653036 - RNA, 19 nt, Artificial Sequence
  Description of Artificial Sequence: Synthetic oligonucleotide
gaaagaggggacgcaguag

SEQ ID NO: 653037 - RNA, 19 nt, Artificial Sequence
  Description of Artificial Sequence: Synthetic oligonucleotide
ccucuuuuacugcaggugg

SEQ ID NO: 653038 - RNA, 19 nt, Artificial Sequence
  Description of Artificial Sequence: Synthetic oligonucleotide
gacuuauggggugaucccc

SEQ ID NO: 653039 - RNA, 19 nt, Artificial Sequence
  Description of Artificial Sequence: Synthetic oligonucleotide
ugacgauguuguauccggc

SEQ ID NO: 653040 - RNA, 19 nt, Artificial Sequence
  Description of Artificial Sequence: Synthetic oligonucleotide
agugcccuggugcuugcgg

SEQ ID NO: 653041 - RNA, 19 nt, Artificial Sequence
  Description of Artificial Sequence: Synthetic oligonucleotide
ugggaugguaggauauuuc

SEQ ID NO: 653042 - RNA, 19 nt, Artificial Sequence
  Description of Artificial Sequence: Synthetic oligonucleotide
uggggaguucgguaguccc

SEQ ID NO: 653043 - RNA, 19 nt, Artificial Sequence
  Description of Artificial Sequence: Synthetic oligonucleotide
uccuuggaaaaucuccauu

SEQ ID NO: 653044 - RNA, 19 nt, Artificial Sequence
  Description of Artificial Sequence: Synthetic oligonucleotide
uuuacugcaggugguccca

SEQ ID NO: 653045 - RNA, 19 nt, Artificial Sequence
  Description of Artificial Sequence: Synthetic oligonucleotide
cucacggaagauauuggca

SEQ ID NO: 653046 - RNA, 19 nt, Artificial Sequence
  Description of Artificial Sequence: Synthetic oligonucleotide
cauggaaccucacggaaga

SEQ ID NO: 653047 - RNA, 19 nt, Artificial Sequence
  Description of Artificial Sequence: Synthetic oligonucleotide
cugccugguauaauuggug

SEQ ID NO: 653048 - RNA, 19 nt, Artificial Sequence
  Description of Artificial Sequence: Synthetic oligonucleotide
agaaagaggggacgcagua

SEQ ID NO: 653049 - RNA, 19 nt, Artificial Sequence
  Description of Artificial Sequence: Synthetic oligonucleotide
uggugauagggguuuuacu

SEQ ID NO: 653050 - RNA, 19 nt, Artificial Sequence
  Description of Artificial Sequence: Synthetic oligonucleotide
ggagccagauaguacauca

SEQ ID NO: 653051 - RNA, 19 nt, Artificial Sequence
  Description of Artificial Sequence: Synthetic oligonucleotide
gucuaucuuacaguaguac

SEQ ID NO: 653052 - RNA, 19 nt, Artificial Sequence
  Description of Artificial Sequence: Synthetic oligonucleotide
aguauagggaguacuuaca

SEQ ID NO: 653053 - RNA, 19 nt, Artificial Sequence
  Description of Artificial Sequence: Synthetic oligonucleotide
ucguuccggaagaucaccu

SEQ ID NO: 653054 - RNA, 19 nt, Artificial Sequence
  Description of Artificial Sequence: Synthetic oligonucleotide
cuugcacucuguagagaag

SEQ ID NO: 653055 - RNA, 19 nt, Artificial Sequence
  Description of Artificial Sequence: Synthetic oligonucleotide
uguuaggauggcacagaau

SEQ ID NO: 653056 - RNA, 19 nt, Artificial Sequence
  Description of Artificial Sequence: Synthetic oligonucleotide
gaguucgguagucccgugc

SEQ ID NO: 653057 - RNA, 19 nt, Artificial Sequence
  Description of Artificial Sequence: Synthetic oligonucleotide
uucggugccuucacacuga

SEQ ID NO: 653058 - RNA, 19 nt, Artificial Sequence
  Description of Artificial Sequence: Synthetic oligonucleotide
agaguaacacuuaggucug

SEQ ID NO: 653059 - RNA, 19 nt, Artificial Sequence
  Description of Artificial Sequence: Synthetic oligonucleotide
gcaaagguaacuucuagcu

SEQ ID NO: 653060 - RNA, 19 nt, Artificial Sequence
  Description of Artificial Sequence: Synthetic oligonucleotide
ucaguauagggaguacuua

SEQ ID NO: 653061 - RNA, 19 nt, Artificial Sequence
  Description of Artificial Sequence: Synthetic oligonucleotide
cuauaauuggacacauaua

SEQ ID NO: 653062 - RNA, 19 nt, Artificial Sequence
  Description of Artificial Sequence: Synthetic oligonucleotide
gauguuguauccggcucug

SEQ ID NO: 653063 - RNA, 19 nt, Artificial Sequence
  Description of Artificial Sequence: Synthetic oligonucleotide
gcggcuggaauucaaauga

SEQ ID NO: 653064 - RNA, 19 nt, Artificial Sequence
  Description of Artificial Sequence: Synthetic oligonucleotide
caccuaugagugacaacag

SEQ ID NO: 653065 - RNA, 19 nt, Artificial Sequence
  Description of Artificial Sequence: Synthetic oligonucleotide
cugauuggcaggagcucag

SEQ ID NO: 653066 - RNA, 19 nt, Artificial Sequence
  Description of Artificial Sequence: Synthetic oligonucleotide
ucagcggcuggaauucaaa

SEQ ID NO: 653067 - RNA, 19 nt, Artificial Sequence
  Description of Artificial Sequence: Synthetic oligonucleotide
ugaugucauucaacuugca

SEQ ID NO: 653068 - RNA, 19 nt, Artificial Sequence
  Description of Artificial Sequence: Synthetic oligonucleotide
ccgugcagggcauauagcc

SEQ ID NO: 653069 - RNA, 19 nt, Artificial Sequence
  Description of Artificial Sequence: Synthetic oligonucleotide
uuggugcgguuugagagca

SEQ ID NO: 653070 - RNA, 19 nt, Artificial Sequence
  Description of Artificial Sequence: Synthetic oligonucleotide
cauuccaugaacacuuccu

SEQ ID NO: 653071 - RNA, 19 nt, Artificial Sequence
  Description of Artificial Sequence: Synthetic oligonucleotide
gcuaaggagaaagagggga

SEQ ID NO: 653072 - RNA, 19 nt, Artificial Sequence
  Description of Artificial Sequence: Synthetic oligonucleotide
cuaugagugacaacaggcu

SEQ ID NO: 653073 - RNA, 19 nt, Artificial Sequence
  Description of Artificial Sequence: Synthetic oligonucleotide
cagucuaucuuacaguagu

SEQ ID NO: 653074 - RNA, 19 nt, Artificial Sequence
  Description of Artificial Sequence: Synthetic oligonucleotide
ucuagcuugcaaaguucuu

SEQ ID NO: 653075 - RNA, 19 nt, Artificial Sequence
  Description of Artificial Sequence: Synthetic oligonucleotide
ugguuggugcgguuugaga

SEQ ID NO: 653076 - RNA, 19 nt, Artificial Sequence
  Description of Artificial Sequence: Synthetic oligonucleotide
uggcggacugagcuuguca

SEQ ID NO: 653077 - RNA, 19 nt, Artificial Sequence
  Description of Artificial Sequence: Synthetic oligonucleotide
gguugugacuuauggggug

SEQ ID NO: 653078 - RNA, 19 nt, Artificial Sequence
  Description of Artificial Sequence: Synthetic oligonucleotide
uccguguggaagucagaac

SEQ ID NO: 653079 - RNA, 19 nt, Artificial Sequence
  Description of Artificial Sequence: Synthetic oligonucleotide
gggugaugaacuccggccc

SEQ ID NO: 653080 - RNA, 19 nt, Artificial Sequence
  Description of Artificial Sequence: Synthetic oligonucleotide
gcagccgcuaaggagaaag

SEQ ID NO: 653081 - RNA, 19 nt, Artificial Sequence
  Description of Artificial Sequence: Synthetic oligonucleotide
cuucagauaguaaacccau

SEQ ID NO: 653082 - RNA, 19 nt, Artificial Sequence
  Description of Artificial Sequence: Synthetic oligonucleotide
uuauggggugauccccuuc

SEQ ID NO: 653083 - RNA, 19 nt, Artificial Sequence
  Description of Artificial Sequence: Synthetic oligonucleotide
guaggugaucucguagggc

SEQ ID NO: 653084 - RNA, 19 nt, Artificial Sequence
  Description of Artificial Sequence: Synthetic oligonucleotide
cuagggccugacagcagcc

SEQ ID NO: 653085 - RNA, 19 nt, Artificial Sequence
  Description of Artificial Sequence: Synthetic oligonucleotide
ccaccuaugagugacaaca

SEQ ID NO: 653086 - RNA, 19 nt, Artificial Sequence
  Description of Artificial Sequence: Synthetic oligonucleotide
ccucacggaagauauuggc

SEQ ID NO: 653087 - RNA, 19 nt, Artificial Sequence
  Description of Artificial Sequence: Synthetic oligonucleotide
cuggggcuuguucagccag

SEQ ID NO: 653088 - RNA, 19 nt, Artificial Sequence
  Description of Artificial Sequence: Synthetic oligonucleotide
guacaagaacucauugguc

SEQ ID NO: 653089 - RNA, 19 nt, Artificial Sequence
  Description of Artificial Sequence: Synthetic oligonucleotide
ucggugccuucacacugag

SEQ ID NO: 653090 - RNA, 19 nt, Artificial Sequence
  Description of Artificial Sequence: Synthetic oligonucleotide
cagccaguugcugauuggc

SEQ ID NO: 653091 - RNA, 19 nt, Artificial Sequence
  Description of Artificial Sequence: Synthetic oligonucleotide
auggucugcgugugccggg

SEQ ID NO: 653092 - RNA, 19 nt, Artificial Sequence
  Description of Artificial Sequence: Synthetic oligonucleotide
cagauaguacaucaauaua

SEQ ID NO: 653093 - RNA, 19 nt, Artificial Sequence
  Description of Artificial Sequence: Synthetic oligonucleotide
accucacggaagauauugg

SEQ ID NO: 653094 - RNA, 19 nt, Artificial Sequence
  Description of Artificial Sequence: Synthetic oligonucleotide
agcucaguauagggaguac

SEQ ID NO: 653095 - RNA, 19 nt, Artificial Sequence
  Description of Artificial Sequence: Synthetic oligonucleotide
cucguuccggaagaucacc

SEQ ID NO: 653096 - RNA, 19 nt, Artificial Sequence
  Description of Artificial Sequence: Synthetic oligonucleotide
ggugcgguuugagagcagg

SEQ ID NO: 653097 - RNA, 19 nt, Artificial Sequence
  Description of Artificial Sequence: Synthetic oligonucleotide
ugcgguuugagagcaggau

SEQ ID NO: 653098 - RNA, 19 nt, Artificial Sequence
  Description of Artificial Sequence: Synthetic oligonucleotide
gggccuguaggugaucucg

SEQ ID NO: 653099 - RNA, 19 nt, Artificial Sequence
  Description of Artificial Sequence: Synthetic oligonucleotide
gggcaaagguaacuucuag

SEQ ID NO: 653100 - RNA, 19 nt, Artificial Sequence
  Description of Artificial Sequence: Synthetic oligonucleotide
guauagggaguacuuacau

SEQ ID NO: 653101 - RNA, 19 nt, Artificial Sequence
  Description of Artificial Sequence: Synthetic oligonucleotide
gugcucacccucaaagaug

SEQ ID NO: 653102 - RNA, 19 nt, Artificial Sequence
  Description of Artificial Sequence: Synthetic oligonucleotide
cucguagggcuuguuuugc

SEQ ID NO: 653103 - RNA, 19 nt, Artificial Sequence
  Description of Artificial Sequence: Synthetic oligonucleotide
uuggggaguucgguagucc

SEQ ID NO: 653104 - RNA, 19 nt, Artificial Sequence
  Description of Artificial Sequence: Synthetic oligonucleotide
uacuuacauggaaccucac

SEQ ID NO: 653105 - RNA, 19 nt, Artificial Sequence
  Description of Artificial Sequence: Synthetic oligonucleotide
guggugauagggguuuuac

SEQ ID NO: 653106 - RNA, 19 nt, Artificial Sequence
  Description of Artificial Sequence: Synthetic oligonucleotide
ugucuucugccugguauaa

SEQ ID NO: 653107 - RNA, 19 nt, Artificial Sequence
  Description of Artificial Sequence: Synthetic oligonucleotide
gguagucccgugcagggca

SEQ ID NO: 653108 - RNA, 19 nt, Artificial Sequence
  Description of Artificial Sequence: Synthetic oligonucleotide
ucuuuccguguggaaguca

SEQ ID NO: 653109 - RNA, 19 nt, Artificial Sequence
  Description of Artificial Sequence: Synthetic oligonucleotide
gugccgggagcgcacuugg

SEQ ID NO: 653110 - RNA, 19 nt, Artificial Sequence
  Description of Artificial Sequence: Synthetic oligonucleotide
ggaugacgauguuguaucc

SEQ ID NO: 653111 - RNA, 19 nt, Artificial Sequence
  Description of Artificial Sequence: Synthetic oligonucleotide
gauuggcaggagcucagua

SEQ ID NO: 653112 - RNA, 19 nt, Artificial Sequence
  Description of Artificial Sequence: Synthetic oligonucleotide
uuuggggaguucgguaguc

SEQ ID NO: 653113 - RNA, 19 nt, Artificial Sequence
  Description of Artificial Sequence: Synthetic oligonucleotide
guugugacuuaugggguga

SEQ ID NO: 653114 - RNA, 19 nt, Artificial Sequence
  Description of Artificial Sequence: Synthetic oligonucleotide
cuggaauucaaaugagaau

SEQ ID NO: 653115 - RNA, 19 nt, Artificial Sequence
  Description of Artificial Sequence: Synthetic oligonucleotide
gagcgcacuuggcaguuga

SEQ ID NO: 653116 - RNA, 19 nt, Artificial Sequence
  Description of Artificial Sequence: Synthetic oligonucleotide
uagggcuuguuuugcugau

SEQ ID NO: 653117 - RNA, 19 nt, Artificial Sequence
  Description of Artificial Sequence: Synthetic oligonucleotide
gacaaucagcuugguggug

SEQ ID NO: 653118 - RNA, 19 nt, Artificial Sequence
  Description of Artificial Sequence: Synthetic oligonucleotide
uuacugccugauggguucc

SEQ ID NO: 653119 - RNA, 19 nt, Artificial Sequence
  Description of Artificial Sequence: Synthetic oligonucleotide
uuggaccgcacggacucug

SEQ ID NO: 653120 - RNA, 19 nt, Artificial Sequence
  Description of Artificial Sequence: Synthetic oligonucleotide
gaacuccggccccucccag

SEQ ID NO: 653121 - RNA, 19 nt, Artificial Sequence
  Description of Artificial Sequence: Synthetic oligonucleotide
agauggggugcagauucca

SEQ ID NO: 653122 - RNA, 19 nt, Artificial Sequence
  Description of Artificial Sequence: Synthetic oligonucleotide
uugcaguguauagucccuc

SEQ ID NO: 653123 - RNA, 19 nt, Artificial Sequence
  Description of Artificial Sequence: Synthetic oligonucleotide
gucugcgugugccgggagc

SEQ ID NO: 653124 - RNA, 19 nt, Artificial Sequence
  Description of Artificial Sequence: Synthetic oligonucleotide
ugugacuuauggggugauc

SEQ ID NO: 653125 - RNA, 19 nt, Artificial Sequence
  Description of Artificial Sequence: Synthetic oligonucleotide
uggaccgcacggacucuga

SEQ ID NO: 653126 - RNA, 19 nt, Artificial Sequence
  Description of Artificial Sequence: Synthetic oligonucleotide
gguugcuguaugcgagaag

SEQ ID NO: 653127 - RNA, 19 nt, Artificial Sequence
  Description of Artificial Sequence: Synthetic oligonucleotide
gaguuugcaggcacagaaa

SEQ ID NO: 653128 - RNA, 19 nt, Artificial Sequence
  Description of Artificial Sequence: Synthetic oligonucleotide
caagaacggucuggaagug

SEQ ID NO: 653129 - RNA, 19 nt, Artificial Sequence
  Description of Artificial Sequence: Synthetic oligonucleotide
augauguauucaccaccua

SEQ ID NO: 653130 - RNA, 19 nt, Artificial Sequence
  Description of Artificial Sequence: Synthetic oligonucleotide
cugguuggugcgguuugag

SEQ ID NO: 653131 - RNA, 19 nt, Artificial Sequence
  Description of Artificial Sequence: Synthetic oligonucleotide
gaguacuuacauggaaccu

SEQ ID NO: 653132 - RNA, 19 nt, Artificial Sequence
  Description of Artificial Sequence: Synthetic oligonucleotide
cucuagggccugacagcag

SEQ ID NO: 653133 - RNA, 19 nt, Artificial Sequence
  Description of Artificial Sequence: Synthetic oligonucleotide
gaucucguagggcuuguuu

SEQ ID NO: 653134 - RNA, 19 nt, Artificial Sequence
  Description of Artificial Sequence: Synthetic oligonucleotide
cugguauaauuggugaacu

SEQ ID NO: 653135 - RNA, 19 nt, Artificial Sequence
  Description of Artificial Sequence: Synthetic oligonucleotide
gaugcacuacaggaccaaa

SEQ ID NO: 653136 - RNA, 19 nt, Artificial Sequence
  Description of Artificial Sequence: Synthetic oligonucleotide
aguugcugauuggcaggag

SEQ ID NO: 653137 - RNA, 19 nt, Artificial Sequence
  Description of Artificial Sequence: Synthetic oligonucleotide
ugcgugugccgggagcgca

SEQ ID NO: 653138 - RNA, 19 nt, Artificial Sequence
  Description of Artificial Sequence: Synthetic oligonucleotide
ccaagaacggucuggaagu

SEQ ID NO: 653139 - RNA, 19 nt, Artificial Sequence
  Description of Artificial Sequence: Synthetic oligonucleotide
gcagagcaauuccgaagag

SEQ ID NO: 653140 - RNA, 19 nt, Artificial Sequence
  Description of Artificial Sequence: Synthetic oligonucleotide
gaacggucuggaaguggac

SEQ ID NO: 653141 - RNA, 19 nt, Artificial Sequence
  Description of Artificial Sequence: Synthetic oligonucleotide
cuuaggucugguuucucuu

SEQ ID NO: 653142 - RNA, 19 nt, Artificial Sequence
  Description of Artificial Sequence: Synthetic oligonucleotide
ggaauucaaaugagaaugu

SEQ ID NO: 653143 - RNA, 19 nt, Artificial Sequence
  Description of Artificial Sequence: Synthetic oligonucleotide
guagagaaggucacagaau

SEQ ID NO: 653144 - RNA, 19 nt, Artificial Sequence
  Description of Artificial Sequence: Synthetic oligonucleotide
uggucugcgugugccggga

SEQ ID NO: 653145 - RNA, 19 nt, Artificial Sequence
  Description of Artificial Sequence: Synthetic oligonucleotide
ugcggggccuguaggugau

SEQ ID NO: 653146 - RNA, 19 nt, Artificial Sequence
  Description of Artificial Sequence: Synthetic oligonucleotide
cucuauaauuggacacaua

SEQ ID NO: 653147 - RNA, 19 nt, Artificial Sequence
  Description of Artificial Sequence: Synthetic oligonucleotide
gagaaagaggggacgcagu

SEQ ID NO: 653148 - RNA, 19 nt, Artificial Sequence
  Description of Artificial Sequence: Synthetic oligonucleotide
gcuguaugcgagaagacau

SEQ ID NO: 653149 - RNA, 19 nt, Artificial Sequence
  Description of Artificial Sequence: Synthetic oligonucleotide
ugccgggagcgcacuuggc

SEQ ID NO: 653150 - RNA, 19 nt, Artificial Sequence
  Description of Artificial Sequence: Synthetic oligonucleotide
ggcauauagccagccaguc

SEQ ID NO: 653151 - RNA, 19 nt, Artificial Sequence
  Description of Artificial Sequence: Synthetic oligonucleotide
agcccggauggugaaggcu

SEQ ID NO: 653152 - RNA, 19 nt, Artificial Sequence
  Description of Artificial Sequence: Synthetic oligonucleotide
gacuaagcucauacuggua

SEQ ID NO: 653153 - RNA, 19 nt, Artificial Sequence
  Description of Artificial Sequence: Synthetic oligonucleotide
aggaugccuuuggucucac

SEQ ID NO: 653154 - RNA, 19 nt, Artificial Sequence
  Description of Artificial Sequence: Synthetic oligonucleotide
gcccggauggugaaggcug

SEQ ID NO: 653155 - RNA, 19 nt, Artificial Sequence
  Description of Artificial Sequence: Synthetic oligonucleotide
gauagggguuuuacugccu

SEQ ID NO: 653156 - RNA, 19 nt, Artificial Sequence
  Description of Artificial Sequence: Synthetic oligonucleotide
gauuccagauucggugccu

SEQ ID NO: 653157 - RNA, 19 nt, Artificial Sequence
  Description of Artificial Sequence: Synthetic oligonucleotide
caguugcugauuggcagga

SEQ ID NO: 653158 - RNA, 19 nt, Artificial Sequence
  Description of Artificial Sequence: Synthetic oligonucleotide
guaugcgagaagacauucu

SEQ ID NO: 653159 - RNA, 19 nt, Artificial Sequence
  Description of Artificial Sequence: Synthetic oligonucleotide
gugaggcucagagggcuuc

SEQ ID NO: 653160 - RNA, 19 nt, Artificial Sequence
  Description of Artificial Sequence: Synthetic oligonucleotide
gaauagggcaggggauucu

SEQ ID NO: 653161 - RNA, 19 nt, Artificial Sequence
  Description of Artificial Sequence: Synthetic oligonucleotide
gccgggagcgcacuuggca

SEQ ID NO: 653162 - RNA, 19 nt, Artificial Sequence
  Description of Artificial Sequence: Synthetic oligonucleotide
cuuuggggaguucgguagu

SEQ ID NO: 653163 - RNA, 19 nt, Artificial Sequence
  Description of Artificial Sequence: Synthetic oligonucleotide
gcccuuuagaguaacacuu

SEQ ID NO: 653164 - RNA, 19 nt, Artificial Sequence
  Description of Artificial Sequence: Synthetic oligonucleotide
caccuuugcaguguauagu

SEQ ID NO: 653165 - RNA, 19 nt, Artificial Sequence
  Description of Artificial Sequence: Synthetic oligonucleotide
cugaugcacucuggcggac

SEQ ID NO: 653166 - RNA, 19 nt, Artificial Sequence
  Description of Artificial Sequence: Synthetic oligonucleotide
gcaauuccgaagaguggga

SEQ ID NO: 653167 - RNA, 19 nt, Artificial Sequence
  Description of Artificial Sequence: Synthetic oligonucleotide
ggaguucgguagucccgug

SEQ ID NO: 653168 - RNA, 19 nt, Artificial Sequence
  Description of Artificial Sequence: Synthetic oligonucleotide
caguguauagucccuccuu

SEQ ID NO: 653169 - RNA, 19 nt, Artificial Sequence
  Description of Artificial Sequence: Synthetic oligonucleotide
gugcgguuugagagcagga

SEQ ID NO: 653170 - RNA, 19 nt, Artificial Sequence
  Description of Artificial Sequence: Synthetic oligonucleotide
cccgugcagggcauauagc

SEQ ID NO: 653171 - RNA, 19 nt, Artificial Sequence
  Description of Artificial Sequence: Synthetic oligonucleotide
ugaucucguagggcuuguu

SEQ ID NO: 653172 - RNA, 19 nt, Artificial Sequence
  Description of Artificial Sequence: Synthetic oligonucleotide
auggaaccucacggaagau

SEQ ID NO: 653173 - RNA, 19 nt, Artificial Sequence
  Description of Artificial Sequence: Synthetic oligonucleotide
gccugauggguucccuuca

SEQ ID NO: 653174 - RNA, 19 nt, Artificial Sequence
  Description of Artificial Sequence: Synthetic oligonucleotide
cuaucucagugggauggua

SEQ ID NO: 653175 - RNA, 19 nt, Artificial Sequence
  Description of Artificial Sequence: Synthetic oligonucleotide
gcaguguauagucccuccu

SEQ ID NO: 653176 - RNA, 19 nt, Artificial Sequence
  Description of Artificial Sequence: Synthetic oligonucleotide
caauuccgaagagugggau

SEQ ID NO: 653177 - RNA, 19 nt, Artificial Sequence
  Description of Artificial Sequence: Synthetic oligonucleotide
gcggacugagcuugucauc

SEQ ID NO: 653178 - RNA, 19 nt, Artificial Sequence
  Description of Artificial Sequence: Synthetic oligonucleotide
ggggaugacgauguuguau

SEQ ID NO: 653179 - RNA, 19 nt, Artificial Sequence
  Description of Artificial Sequence: Synthetic oligonucleotide
ccgcacggacucugaagcc

SEQ ID NO: 653180 - RNA, 19 nt, Artificial Sequence
  Description of Artificial Sequence: Synthetic oligonucleotide
cgugcagggcauauagcca

SEQ ID NO: 653181 - RNA, 19 nt, Artificial Sequence
  Description of Artificial Sequence: Synthetic oligonucleotide
cccuuuagaguaacacuua

SEQ ID NO: 653182 - RNA, 19 nt, Artificial Sequence
  Description of Artificial Sequence: Synthetic oligonucleotide
ggcaggggauucuccaacu

SEQ ID NO: 653183 - RNA, 19 nt, Artificial Sequence
  Description of Artificial Sequence: Synthetic oligonucleotide
cagcggcuggaauucaaau

SEQ ID NO: 653184 - RNA, 19 nt, Artificial Sequence
  Description of Artificial Sequence: Synthetic oligonucleotide
ggucugcgugugccgggag

SEQ ID NO: 653185 - RNA, 19 nt, Artificial Sequence
  Description of Artificial Sequence: Synthetic oligonucleotide
aggggacgcaguaguccca

SEQ ID NO: 653186 - RNA, 19 nt, Artificial Sequence
  Description of Artificial Sequence: Synthetic oligonucleotide
cugauuaggaaggggccuu

SEQ ID NO: 653187 - RNA, 19 nt, Artificial Sequence
  Description of Artificial Sequence: Synthetic oligonucleotide
cuggcggacugagcuuguc

SEQ ID NO: 653188 - RNA, 19 nt, Artificial Sequence
  Description of Artificial Sequence: Synthetic oligonucleotide
gggcauauagccagccagu

SEQ ID NO: 653189 - RNA, 19 nt, Artificial Sequence
  Description of Artificial Sequence: Synthetic oligonucleotide
cuuauggggugauccccuu

SEQ ID NO: 653190 - RNA, 19 nt, Artificial Sequence
  Description of Artificial Sequence: Synthetic oligonucleotide
agcgcacuuggcaguugaa

SEQ ID NO: 653191 - RNA, 19 nt, Artificial Sequence
  Description of Artificial Sequence: Synthetic oligonucleotide
gggaguucgguagucccgu

SEQ ID NO: 653192 - RNA, 19 nt, Artificial Sequence
  Description of Artificial Sequence: Synthetic oligonucleotide
caaagauggggugcagauu

SEQ ID NO: 653193 - RNA, 19 nt, Artificial Sequence
  Description of Artificial Sequence: Synthetic oligonucleotide
gcgcacuuggcaguugaaa

SEQ ID NO: 653194 - RNA, 19 nt, Artificial Sequence
  Description of Artificial Sequence: Synthetic oligonucleotide
caauauaaucaaggcccuu

SEQ ID NO: 653195 - RNA, 19 nt, Artificial Sequence
  Description of Artificial Sequence: Synthetic oligonucleotide
gguugcugccaagaacggu

SEQ ID NO: 653196 - RNA, 19 nt, Artificial Sequence
  Description of Artificial Sequence: Synthetic oligonucleotide
gccuguaggugaucucgua

SEQ ID NO: 653197 - RNA, 19 nt, Artificial Sequence
  Description of Artificial Sequence: Synthetic oligonucleotide
ggaccgcacggacucugaa

SEQ ID NO: 653198 - RNA, 19 nt, Artificial Sequence
  Description of Artificial Sequence: Synthetic oligonucleotide
ggagcucaguauagggagu

SEQ ID NO: 653199 - RNA, 19 nt, Artificial Sequence
  Description of Artificial Sequence: Synthetic oligonucleotide
ccggauggugaaggcuggg

SEQ ID NO: 653200 - RNA, 19 nt, Artificial Sequence
  Description of Artificial Sequence: Synthetic oligonucleotide
uagucccgugcagggcaua

SEQ ID NO: 653201 - RNA, 19 nt, Artificial Sequence
  Description of Artificial Sequence: Synthetic oligonucleotide
cagcuuuggggaguucggu

SEQ ID NO: 653202 - RNA, 19 nt, Artificial Sequence
  Description of Artificial Sequence: Synthetic oligonucleotide
auguggccuguggggcuga

SEQ ID NO: 653203 - RNA, 19 nt, Artificial Sequence
  Description of Artificial Sequence: Synthetic oligonucleotide
gaaccucacggaagauauu

SEQ ID NO: 653204 - RNA, 19 nt, Artificial Sequence
  Description of Artificial Sequence: Synthetic oligonucleotide
cggacugagcuugucaucu

SEQ ID NO: 653205 - RNA, 19 nt, Artificial Sequence
  Description of Artificial Sequence: Synthetic oligonucleotide
gcaggggauucuccaacuu

SEQ ID NO: 653206 - RNA, 19 nt, Artificial Sequence
  Description of Artificial Sequence: Synthetic oligonucleotide
caacuugauggaggcugau

SEQ ID NO: 653207 - RNA, 19 nt, Artificial Sequence
  Description of Artificial Sequence: Synthetic oligonucleotide
gucccgugcagggcauaua

SEQ ID NO: 653208 - RNA, 19 nt, Artificial Sequence
  Description of Artificial Sequence: Synthetic oligonucleotide
cuuggaccgcacggacucu

SEQ ID NO: 653209 - RNA, 19 nt, Artificial Sequence
  Description of Artificial Sequence: Synthetic oligonucleotide
cgguagucccgugcagggc

SEQ ID NO: 653210 - RNA, 19 nt, Artificial Sequence
  Description of Artificial Sequence: Synthetic oligonucleotide
ggccuguaggugaucucgu

SEQ ID NO: 653211 - RNA, 19 nt, Artificial Sequence
  Description of Artificial Sequence: Synthetic oligonucleotide
gcgugugccgggagcgcac

SEQ ID NO: 653212 - RNA, 19 nt, Artificial Sequence
  Description of Artificial Sequence: Synthetic oligonucleotide
ccaacaugcuuugguugcu

SEQ ID NO: 653213 - RNA, 19 nt, Artificial Sequence
  Description of Artificial Sequence: Synthetic oligonucleotide
ggggacgcaguagucccau

SEQ ID NO: 653214 - RNA, 19 nt, Artificial Sequence
  Description of Artificial Sequence: Synthetic oligonucleotide
ccuaucucagugggauggu

SEQ ID NO: 653215 - RNA, 19 nt, Artificial Sequence
  Description of Artificial Sequence: Synthetic oligonucleotide
cgcugaccucggugccacc

SEQ ID NO: 653216 - RNA, 19 nt, Artificial Sequence
  Description of Artificial Sequence: Synthetic oligonucleotide
cggaaucucuggggcuugu

SEQ ID NO: 653217 - RNA, 19 nt, Artificial Sequence
  Description of Artificial Sequence: Synthetic oligonucleotide
aaaggcaucagcccuauac

SEQ ID NO: 653218 - RNA, 19 nt, Artificial Sequence
  Description of Artificial Sequence: Synthetic oligonucleotide
uuuaauacuagccaaugug

SEQ ID NO: 653219 - RNA, 19 nt, Artificial Sequence
  Description of Artificial Sequence: Synthetic oligonucleotide
agauuuaugauacaaagga

SEQ ID NO: 653220 - RNA, 19 nt, Artificial Sequence
  Description of Artificial Sequence: Synthetic oligonucleotide
augaguuuaaauuuaggac

SEQ ID NO: 653221 - RNA, 19 nt, Artificial Sequence
  Description of Artificial Sequence: Synthetic oligonucleotide
cauuguauagaguauauag

SEQ ID NO: 653222 - RNA, 19 nt, Artificial Sequence
  Description of Artificial Sequence: Synthetic oligonucleotide
aguauucuaacuguugucc

SEQ ID NO: 653223 - RNA, 19 nt, Artificial Sequence
  Description of Artificial Sequence: Synthetic oligonucleotide
aaggguaaugaagaggacc

SEQ ID NO: 653224 - RNA, 19 nt, Artificial Sequence
  Description of Artificial Sequence: Synthetic oligonucleotide
aguauauagggauaggaug

SEQ ID NO: 653225 - RNA, 19 nt, Artificial Sequence
  Description of Artificial Sequence: Synthetic oligonucleotide
aaggcaucagcccuauacc

SEQ ID NO: 653226 - RNA, 19 nt, Artificial Sequence
  Description of Artificial Sequence: Synthetic oligonucleotide
aauugcuugcuuucuuccc

SEQ ID NO: 653227 - RNA, 19 nt, Artificial Sequence
  Description of Artificial Sequence: Synthetic oligonucleotide
uuaaacagagcucuuuggc

SEQ ID NO: 653228 - RNA, 19 nt, Artificial Sequence
  Description of Artificial Sequence: Synthetic oligonucleotide
acuaccuagcccaagaacc

SEQ ID NO: 653229 - RNA, 19 nt, Artificial Sequence
  Description of Artificial Sequence: Synthetic oligonucleotide
aacgugugugaccaaaggg

SEQ ID NO: 653230 - RNA, 19 nt, Artificial Sequence
  Description of Artificial Sequence: Synthetic oligonucleotide
uuaauacuagccaaugugu

SEQ ID NO: 653231 - RNA, 19 nt, Artificial Sequence
  Description of Artificial Sequence: Synthetic oligonucleotide
aaugaaauuggcccuuucu

SEQ ID NO: 653232 - RNA, 19 nt, Artificial Sequence
  Description of Artificial Sequence: Synthetic oligonucleotide
gaaagaauacguuggguug

SEQ ID NO: 653233 - RNA, 19 nt, Artificial Sequence
  Description of Artificial Sequence: Synthetic oligonucleotide
gaauuaaccaucaaaagaa

SEQ ID NO: 653234 - RNA, 19 nt, Artificial Sequence
  Description of Artificial Sequence: Synthetic oligonucleotide
aaauuggcccuuucucugc

SEQ ID NO: 653235 - RNA, 19 nt, Artificial Sequence
  Description of Artificial Sequence: Synthetic oligonucleotide
ugcucaaucaggaaaggug

SEQ ID NO: 653236 - RNA, 19 nt, Artificial Sequence
  Description of Artificial Sequence: Synthetic oligonucleotide
auagggauaggaugcagcg

SEQ ID NO: 653237 - RNA, 19 nt, Artificial Sequence
  Description of Artificial Sequence: Synthetic oligonucleotide
uaagugucgacucaucugu

SEQ ID NO: 653238 - RNA, 19 nt, Artificial Sequence
  Description of Artificial Sequence: Synthetic oligonucleotide
augaaauuggcccuuucuc

SEQ ID NO: 653239 - RNA, 19 nt, Artificial Sequence
  Description of Artificial Sequence: Synthetic oligonucleotide
ugucuguuguguuagaacu

SEQ ID NO: 653240 - RNA, 19 nt, Artificial Sequence
  Description of Artificial Sequence: Synthetic oligonucleotide
aucucauuucgguucaggc

SEQ ID NO: 653241 - RNA, 19 nt, Artificial Sequence
  Description of Artificial Sequence: Synthetic oligonucleotide
uccuuauuucaacagggag

SEQ ID NO: 653242 - RNA, 19 nt, Artificial Sequence
  Description of Artificial Sequence: Synthetic oligonucleotide
agggauaggaugcagcggg

SEQ ID NO: 653243 - RNA, 19 nt, Artificial Sequence
  Description of Artificial Sequence: Synthetic oligonucleotide
acagguggaauuaacaagg

SEQ ID NO: 653244 - RNA, 19 nt, Artificial Sequence
  Description of Artificial Sequence: Synthetic oligonucleotide
accacuuuguaccauuggg

SEQ ID NO: 653245 - RNA, 19 nt, Artificial Sequence
  Description of Artificial Sequence: Synthetic oligonucleotide
uaauacuagccaaugugug

SEQ ID NO: 653246 - RNA, 19 nt, Artificial Sequence
  Description of Artificial Sequence: Synthetic oligonucleotide
agagcuguauaauacauau

SEQ ID NO: 653247 - RNA, 19 nt, Artificial Sequence
  Description of Artificial Sequence: Synthetic oligonucleotide
acaagguaggaauucaucu

SEQ ID NO: 653248 - RNA, 19 nt, Artificial Sequence
  Description of Artificial Sequence: Synthetic oligonucleotide
agauccuaccacuuuguac

SEQ ID NO: 653249 - RNA, 19 nt, Artificial Sequence
  Description of Artificial Sequence: Synthetic oligonucleotide
gaauucaucuauccaguag

SEQ ID NO: 653250 - RNA, 19 nt, Artificial Sequence
  Description of Artificial Sequence: Synthetic oligonucleotide
ugcaaccacagacacauug

SEQ ID NO: 653251 - RNA, 19 nt, Artificial Sequence
  Description of Artificial Sequence: Synthetic oligonucleotide
gacagguggaauuaacaag

SEQ ID NO: 653252 - RNA, 19 nt, Artificial Sequence
  Description of Artificial Sequence: Synthetic oligonucleotide
gguggaauuaacaagguag

SEQ ID NO: 653253 - RNA, 19 nt, Artificial Sequence
  Description of Artificial Sequence: Synthetic oligonucleotide
guacccauggacuauuggg

SEQ ID NO: 653254 - RNA, 19 nt, Artificial Sequence
  Description of Artificial Sequence: Synthetic oligonucleotide
aggguaaugaagaggaccc

SEQ ID NO: 653255 - RNA, 19 nt, Artificial Sequence
  Description of Artificial Sequence: Synthetic oligonucleotide
uggagugaaccuaugccgg

SEQ ID NO: 653256 - RNA, 19 nt, Artificial Sequence
  Description of Artificial Sequence: Synthetic oligonucleotide
guauauagggauaggaugc

SEQ ID NO: 653257 - RNA, 19 nt, Artificial Sequence
  Description of Artificial Sequence: Synthetic oligonucleotide
uuauauuucugccuuuaaa

SEQ ID NO: 653258 - RNA, 19 nt, Artificial Sequence
  Description of Artificial Sequence: Synthetic oligonucleotide
caugacauaggcuaugguc

SEQ ID NO: 653259 - RNA, 19 nt, Artificial Sequence
  Description of Artificial Sequence: Synthetic oligonucleotide
acaccauaaagauccuacc

SEQ ID NO: 653260 - RNA, 19 nt, Artificial Sequence
  Description of Artificial Sequence: Synthetic oligonucleotide
aauuggcccuuucucugcc

SEQ ID NO: 653261 - RNA, 19 nt, Artificial Sequence
  Description of Artificial Sequence: Synthetic oligonucleotide
ucaauuccgugcuugguag

SEQ ID NO: 653262 - RNA, 19 nt, Artificial Sequence
  Description of Artificial Sequence: Synthetic oligonucleotide
ugucccauagggcaccugg

SEQ ID NO: 653263 - RNA, 19 nt, Artificial Sequence
  Description of Artificial Sequence: Synthetic oligonucleotide
ugaaauuggcccuuucucu

SEQ ID NO: 653264 - RNA, 19 nt, Artificial Sequence
  Description of Artificial Sequence: Synthetic oligonucleotide
aguaaugaacucaggacac

SEQ ID NO: 653265 - RNA, 19 nt, Artificial Sequence
  Description of Artificial Sequence: Synthetic oligonucleotide
cuuuaaacugcauuccuuc

SEQ ID NO: 653266 - RNA, 19 nt, Artificial Sequence
  Description of Artificial Sequence: Synthetic oligonucleotide
ucgugguuuaauacuagcc

SEQ ID NO: 653267 - RNA, 19 nt, Artificial Sequence
  Description of Artificial Sequence: Synthetic oligonucleotide
uuguguuagaacugacagg

SEQ ID NO: 653268 - RNA, 19 nt, Artificial Sequence
  Description of Artificial Sequence: Synthetic oligonucleotide
ucucuuaguccaaaugggc

SEQ ID NO: 653269 - RNA, 19 nt, Artificial Sequence
  Description of Artificial Sequence: Synthetic oligonucleotide
ugguuguaacaccagaacu

SEQ ID NO: 653270 - RNA, 19 nt, Artificial Sequence
  Description of Artificial Sequence: Synthetic oligonucleotide
guuggagugaaccuaugcc

SEQ ID NO: 653271 - RNA, 19 nt, Artificial Sequence
  Description of Artificial Sequence: Synthetic oligonucleotide
cucucuuaguccaaauggg

SEQ ID NO: 653272 - RNA, 19 nt, Artificial Sequence
  Description of Artificial Sequence: Synthetic oligonucleotide
ugcuaguccauuuucagau

SEQ ID NO: 653273 - RNA, 19 nt, Artificial Sequence
  Description of Artificial Sequence: Synthetic oligonucleotide
uguuguguuagaacugaca

SEQ ID NO: 653274 - RNA, 19 nt, Artificial Sequence
  Description of Artificial Sequence: Synthetic oligonucleotide
ugaaugaaucuucaggauu

SEQ ID NO: 653275 - RNA, 19 nt, Artificial Sequence
  Description of Artificial Sequence: Synthetic oligonucleotide
auagaguauauagggauag

SEQ ID NO: 653276 - RNA, 19 nt, Artificial Sequence
  Description of Artificial Sequence: Synthetic oligonucleotide
aauguuguagccacagucu

SEQ ID NO: 653277 - RNA, 19 nt, Artificial Sequence
  Description of Artificial Sequence: Synthetic oligonucleotide
gcagccuagauacugaagg

SEQ ID NO: 653278 - RNA, 19 nt, Artificial Sequence
  Description of Artificial Sequence: Synthetic oligonucleotide
agacacauuguggaaagac

SEQ ID NO: 653279 - RNA, 19 nt, Artificial Sequence
  Description of Artificial Sequence: Synthetic oligonucleotide
aacagauaggagaauucuc

SEQ ID NO: 653280 - RNA, 19 nt, Artificial Sequence
  Description of Artificial Sequence: Synthetic oligonucleotide
ugacuaaggguauuccugc

SEQ ID NO: 653281 - RNA, 19 nt, Artificial Sequence
  Description of Artificial Sequence: Synthetic oligonucleotide
guugggacauuucagugcc

SEQ ID NO: 653282 - RNA, 19 nt, Artificial Sequence
  Description of Artificial Sequence: Synthetic oligonucleotide
auaagugucgacucaucug

SEQ ID NO: 653283 - RNA, 19 nt, Artificial Sequence
  Description of Artificial Sequence: Synthetic oligonucleotide
auaggcuauggucauaagu

SEQ ID NO: 653284 - RNA, 19 nt, Artificial Sequence
  Description of Artificial Sequence: Synthetic oligonucleotide
ucauagauuuaugauacaa

SEQ ID NO: 653285 - RNA, 19 nt, Artificial Sequence
  Description of Artificial Sequence: Synthetic oligonucleotide
ugaugccuuagccaaauaa

SEQ ID NO: 653286 - RNA, 19 nt, Artificial Sequence
  Description of Artificial Sequence: Synthetic oligonucleotide
cacugacauaccaugaggc

SEQ ID NO: 653287 - RNA, 19 nt, Artificial Sequence
  Description of Artificial Sequence: Synthetic oligonucleotide
aguuacuaggguugugggg

SEQ ID NO: 653288 - RNA, 19 nt, Artificial Sequence
  Description of Artificial Sequence: Synthetic oligonucleotide
acauucgugguuuaauacu

SEQ ID NO: 653289 - RNA, 19 nt, Artificial Sequence
  Description of Artificial Sequence: Synthetic oligonucleotide
aaauucagcucuucccacu

SEQ ID NO: 653290 - RNA, 19 nt, Artificial Sequence
  Description of Artificial Sequence: Synthetic oligonucleotide
uuccaacucagguuugagg

SEQ ID NO: 653291 - RNA, 19 nt, Artificial Sequence
  Description of Artificial Sequence: Synthetic oligonucleotide
gucuguuccuuuuagcacc

SEQ ID NO: 653292 - RNA, 19 nt, Artificial Sequence
  Description of Artificial Sequence: Synthetic oligonucleotide
gcuaauaaacccuuuuccc

SEQ ID NO: 653293 - RNA, 19 nt, Artificial Sequence
  Description of Artificial Sequence: Synthetic oligonucleotide
ugacauaccaugaggcaga

SEQ ID NO: 653294 - RNA, 19 nt, Artificial Sequence
  Description of Artificial Sequence: Synthetic oligonucleotide
augccgggaagacaauucc

SEQ ID NO: 653295 - RNA, 19 nt, Artificial Sequence
  Description of Artificial Sequence: Synthetic oligonucleotide
agcccuguaguauucuaac

SEQ ID NO: 653296 - RNA, 19 nt, Artificial Sequence
  Description of Artificial Sequence: Synthetic oligonucleotide
gacaccauaaagauccuac

SEQ ID NO: 653297 - RNA, 19 nt, Artificial Sequence
  Description of Artificial Sequence: Synthetic oligonucleotide
auuuuggcagguugguuag

SEQ ID NO: 653298 - RNA, 19 nt, Artificial Sequence
  Description of Artificial Sequence: Synthetic oligonucleotide
ucucauuucgguucaggcu

SEQ ID NO: 653299 - RNA, 19 nt, Artificial Sequence
  Description of Artificial Sequence: Synthetic oligonucleotide
cuugcuaguccauuuucag

SEQ ID NO: 653300 - RNA, 19 nt, Artificial Sequence
  Description of Artificial Sequence: Synthetic oligonucleotide
uauagaguauauagggaua

SEQ ID NO: 653301 - RNA, 19 nt, Artificial Sequence
  Description of Artificial Sequence: Synthetic oligonucleotide
uacccauggacuauuggga

SEQ ID NO: 653302 - RNA, 19 nt, Artificial Sequence
  Description of Artificial Sequence: Synthetic oligonucleotide
uuucgguucaggcugcaac

SEQ ID NO: 653303 - RNA, 19 nt, Artificial Sequence
  Description of Artificial Sequence: Synthetic oligonucleotide
aauuagugaggcucccacu

SEQ ID NO: 653304 - RNA, 19 nt, Artificial Sequence
  Description of Artificial Sequence: Synthetic oligonucleotide
caguaggacuuucucaugg

SEQ ID NO: 653305 - RNA, 19 nt, Artificial Sequence
  Description of Artificial Sequence: Synthetic oligonucleotide
cuuugugaaacagauagga

SEQ ID NO: 653306 - RNA, 19 nt, Artificial Sequence
  Description of Artificial Sequence: Synthetic oligonucleotide
ucuaaagggugcugggcag

SEQ ID NO: 653307 - RNA, 19 nt, Artificial Sequence
  Description of Artificial Sequence: Synthetic oligonucleotide
augacauaggcuaugguca

SEQ ID NO: 653308 - RNA, 19 nt, Artificial Sequence
  Description of Artificial Sequence: Synthetic oligonucleotide
aggagaauucuccugucug

SEQ ID NO: 653309 - RNA, 19 nt, Artificial Sequence
  Description of Artificial Sequence: Synthetic oligonucleotide
agccaaugugugaugaugc

SEQ ID NO: 653310 - RNA, 19 nt, Artificial Sequence
  Description of Artificial Sequence: Synthetic oligonucleotide
guugguuaggguccugagg

SEQ ID NO: 653311 - RNA, 19 nt, Artificial Sequence
  Description of Artificial Sequence: Synthetic oligonucleotide
agguaaggaagcucugagg

SEQ ID NO: 653312 - RNA, 19 nt, Artificial Sequence
  Description of Artificial Sequence: Synthetic oligonucleotide
uucgguucaggcugcaacc

SEQ ID NO: 653313 - RNA, 19 nt, Artificial Sequence
  Description of Artificial Sequence: Synthetic oligonucleotide
ucuccaacgugugugacca

SEQ ID NO: 653314 - RNA, 19 nt, Artificial Sequence
  Description of Artificial Sequence: Synthetic oligonucleotide
aucuaaagggugcugggca

SEQ ID NO: 653315 - RNA, 19 nt, Artificial Sequence
  Description of Artificial Sequence: Synthetic oligonucleotide
accucgguuggagugaacc

SEQ ID NO: 653316 - RNA, 19 nt, Artificial Sequence
  Description of Artificial Sequence: Synthetic oligonucleotide
cuuuuagcaccucgguugg

SEQ ID NO: 653317 - RNA, 19 nt, Artificial Sequence
  Description of Artificial Sequence: Synthetic oligonucleotide
uggacuauugggaggggca

SEQ ID NO: 653318 - RNA, 19 nt, Artificial Sequence
  Description of Artificial Sequence: Synthetic oligonucleotide
uucgugguuuaauacuagc

SEQ ID NO: 653319 - RNA, 19 nt, Artificial Sequence
  Description of Artificial Sequence: Synthetic oligonucleotide
uuuagcaccucgguuggag

SEQ ID NO: 653320 - RNA, 19 nt, Artificial Sequence
  Description of Artificial Sequence: Synthetic oligonucleotide
uaaugaacucaggacacca

SEQ ID NO: 653321 - RNA, 19 nt, Artificial Sequence
  Description of Artificial Sequence: Synthetic oligonucleotide
ugucuguuccuuuuagcac

SEQ ID NO: 653322 - RNA, 19 nt, Artificial Sequence
  Description of Artificial Sequence: Synthetic oligonucleotide
auuucuuacauucgugguu

SEQ ID NO: 653323 - RNA, 19 nt, Artificial Sequence
  Description of Artificial Sequence: Synthetic oligonucleotide
uggcuaauaaacccuuuuc

SEQ ID NO: 653324 - RNA, 19 nt, Artificial Sequence
  Description of Artificial Sequence: Synthetic oligonucleotide
uuacauucgugguuuaaua

SEQ ID NO: 653325 - RNA, 19 nt, Artificial Sequence
  Description of Artificial Sequence: Synthetic oligonucleotide
agacagguggaauuaacaa

SEQ ID NO: 653326 - RNA, 19 nt, Artificial Sequence
  Description of Artificial Sequence: Synthetic oligonucleotide
gguaggaauucaucuaucc

SEQ ID NO: 653327 - RNA, 19 nt, Artificial Sequence
  Description of Artificial Sequence: Synthetic oligonucleotide
acauuguggaaagacaccu

SEQ ID NO: 653328 - RNA, 19 nt, Artificial Sequence
  Description of Artificial Sequence: Synthetic oligonucleotide
ugaaacagauaggagaauu

SEQ ID NO: 653329 - RNA, 19 nt, Artificial Sequence
  Description of Artificial Sequence: Synthetic oligonucleotide
auuagugaggcucccacua

SEQ ID NO: 653330 - RNA, 19 nt, Artificial Sequence
  Description of Artificial Sequence: Synthetic oligonucleotide
uaugccgggaagacaauuc

SEQ ID NO: 653331 - RNA, 19 nt, Artificial Sequence
  Description of Artificial Sequence: Synthetic oligonucleotide
auaggagaauucuccuguc

SEQ ID NO: 653332 - RNA, 19 nt, Artificial Sequence
  Description of Artificial Sequence: Synthetic oligonucleotide
cuaaggguauuccugccac

SEQ ID NO: 653333 - RNA, 19 nt, Artificial Sequence
  Description of Artificial Sequence: Synthetic oligonucleotide
auaccugcugaaugaaucu

SEQ ID NO: 653334 - RNA, 19 nt, Artificial Sequence
  Description of Artificial Sequence: Synthetic oligonucleotide
uccuacaggugcaagcccu

SEQ ID NO: 653335 - RNA, 19 nt, Artificial Sequence
  Description of Artificial Sequence: Synthetic oligonucleotide
guauagaguauauagggau

SEQ ID NO: 653336 - RNA, 19 nt, Artificial Sequence
  Description of Artificial Sequence: Synthetic oligonucleotide
guaccauugggcaagaaaa

SEQ ID NO: 653337 - RNA, 19 nt, Artificial Sequence
  Description of Artificial Sequence: Synthetic oligonucleotide
aauucagcucuucccacua

SEQ ID NO: 653338 - RNA, 19 nt, Artificial Sequence
  Description of Artificial Sequence: Synthetic oligonucleotide
aauuaaccaucaaaagaaa

SEQ ID NO: 653339 - RNA, 19 nt, Artificial Sequence
  Description of Artificial Sequence: Synthetic oligonucleotide
guuccuuuuagcaccucgg

SEQ ID NO: 653340 - RNA, 19 nt, Artificial Sequence
  Description of Artificial Sequence: Synthetic oligonucleotide
agaugaguuuaaauuuagg

SEQ ID NO: 653341 - RNA, 19 nt, Artificial Sequence
  Description of Artificial Sequence: Synthetic oligonucleotide
agcucuucccacuaacacu

SEQ ID NO: 653342 - RNA, 19 nt, Artificial Sequence
  Description of Artificial Sequence: Synthetic oligonucleotide
ugaaccuaugccgggaaga

SEQ ID NO: 653343 - RNA, 19 nt, Artificial Sequence
  Description of Artificial Sequence: Synthetic oligonucleotide
gugacuaaggguauuccug

SEQ ID NO: 653344 - RNA, 19 nt, Artificial Sequence
  Description of Artificial Sequence: Synthetic oligonucleotide
agucaucaugcugauggcg

SEQ ID NO: 653345 - RNA, 19 nt, Artificial Sequence
  Description of Artificial Sequence: Synthetic oligonucleotide
ugccuuagccaaauaaaua

SEQ ID NO: 653346 - RNA, 19 nt, Artificial Sequence
  Description of Artificial Sequence: Synthetic oligonucleotide
uuggcuaauaaacccuuuu

SEQ ID NO: 653347 - RNA, 19 nt, Artificial Sequence
  Description of Artificial Sequence: Synthetic oligonucleotide
uggucauaagugucgacuc

SEQ ID NO: 653348 - RNA, 19 nt, Artificial Sequence
  Description of Artificial Sequence: Synthetic oligonucleotide
auaaagauccuaccacuuu

SEQ ID NO: 653349 - RNA, 19 nt, Artificial Sequence
  Description of Artificial Sequence: Synthetic oligonucleotide
gaugccuuagccaaauaaa

SEQ ID NO: 653350 - RNA, 19 nt, Artificial Sequence
  Description of Artificial Sequence: Synthetic oligonucleotide
uaacccaccuuugucagcu

SEQ ID NO: 653351 - RNA, 19 nt, Artificial Sequence
  Description of Artificial Sequence: Synthetic oligonucleotide
uaggagaauucuccugucu

SEQ ID NO: 653352 - RNA, 19 nt, Artificial Sequence
  Description of Artificial Sequence: Synthetic oligonucleotide
aaagauccuaccacuuugu

SEQ ID NO: 653353 - RNA, 19 nt, Artificial Sequence
  Description of Artificial Sequence: Synthetic oligonucleotide
uuccgugcuugguaggucc

SEQ ID NO: 653354 - RNA, 19 nt, Artificial Sequence
  Description of Artificial Sequence: Synthetic oligonucleotide
acuaaggguauuccugcca

SEQ ID NO: 653355 - RNA, 19 nt, Artificial Sequence
  Description of Artificial Sequence: Synthetic oligonucleotide
cccucuauuucuuacauuc

SEQ ID NO: 653356 - RNA, 19 nt, Artificial Sequence
  Description of Artificial Sequence: Synthetic oligonucleotide
aagcccucuauuucuuaca

SEQ ID NO: 653357 - RNA, 19 nt, Artificial Sequence
  Description of Artificial Sequence: Synthetic oligonucleotide
uaggcagcgccacugacau

SEQ ID NO: 653358 - RNA, 19 nt, Artificial Sequence
  Description of Artificial Sequence: Synthetic oligonucleotide
caacgugugugaccaaagg

SEQ ID NO: 653359 - RNA, 19 nt, Artificial Sequence
  Description of Artificial Sequence: Synthetic oligonucleotide
acccauggacuauugggag

SEQ ID NO: 653360 - RNA, 19 nt, Artificial Sequence
  Description of Artificial Sequence: Synthetic oligonucleotide
uagccaaugugugaugaug

SEQ ID NO: 653361 - RNA, 19 nt, Artificial Sequence
  Description of Artificial Sequence: Synthetic oligonucleotide
aagcauuguauagaguaua

SEQ ID NO: 653362 - RNA, 19 nt, Artificial Sequence
  Description of Artificial Sequence: Synthetic oligonucleotide
auuaaccaucaaaagaaaa

SEQ ID NO: 653363 - RNA, 19 nt, Artificial Sequence
  Description of Artificial Sequence: Synthetic oligonucleotide
agcuucaagcagcagaauu

SEQ ID NO: 653364 - RNA, 19 nt, Artificial Sequence
  Description of Artificial Sequence: Synthetic oligonucleotide
gcuauggucauaagugucg

SEQ ID NO: 653365 - RNA, 19 nt, Artificial Sequence
  Description of Artificial Sequence: Synthetic oligonucleotide
ucaggacaccauaaagauc

SEQ ID NO: 653366 - RNA, 19 nt, Artificial Sequence
  Description of Artificial Sequence: Synthetic oligonucleotide
guauucuuauuuuauuggu

SEQ ID NO: 653367 - RNA, 19 nt, Artificial Sequence
  Description of Artificial Sequence: Synthetic oligonucleotide
agagacagguggaauuaac

SEQ ID NO: 653368 - RNA, 19 nt, Artificial Sequence
  Description of Artificial Sequence: Synthetic oligonucleotide
ugggcacuguuccuugaag

SEQ ID NO: 653369 - RNA, 19 nt, Artificial Sequence
  Description of Artificial Sequence: Synthetic oligonucleotide
aggauucugccuuugugaa

SEQ ID NO: 653370 - RNA, 19 nt, Artificial Sequence
  Description of Artificial Sequence: Synthetic oligonucleotide
guaaugaagaggacccagc

SEQ ID NO: 653371 - RNA, 19 nt, Artificial Sequence
  Description of Artificial Sequence: Synthetic oligonucleotide
aggugacuaaggguauucc

SEQ ID NO: 653372 - RNA, 19 nt, Artificial Sequence
  Description of Artificial Sequence: Synthetic oligonucleotide
gacuaaggguauuccugcc

SEQ ID NO: 653373 - RNA, 19 nt, Artificial Sequence
  Description of Artificial Sequence: Synthetic oligonucleotide
agagggcgcagauggcagc

SEQ ID NO: 653374 - RNA, 19 nt, Artificial Sequence
  Description of Artificial Sequence: Synthetic oligonucleotide
gguugggacauuucagugc

SEQ ID NO: 653375 - RNA, 19 nt, Artificial Sequence
  Description of Artificial Sequence: Synthetic oligonucleotide
aggcuauggucauaagugu

SEQ ID NO: 653376 - RNA, 19 nt, Artificial Sequence
  Description of Artificial Sequence: Synthetic oligonucleotide
auacuagccaaugugugau

SEQ ID NO: 653377 - RNA, 19 nt, Artificial Sequence
  Description of Artificial Sequence: Synthetic oligonucleotide
uccuugcuaguccauuuuc

SEQ ID NO: 653378 - RNA, 19 nt, Artificial Sequence
  Description of Artificial Sequence: Synthetic oligonucleotide
acaccaguuacuaggguug

SEQ ID NO: 653379 - RNA, 19 nt, Artificial Sequence
  Description of Artificial Sequence: Synthetic oligonucleotide
gagacagguggaauuaaca

SEQ ID NO: 653380 - RNA, 19 nt, Artificial Sequence
  Description of Artificial Sequence: Synthetic oligonucleotide
ucauaagugucgacucauc

SEQ ID NO: 653381 - RNA, 19 nt, Artificial Sequence
  Description of Artificial Sequence: Synthetic oligonucleotide
caccauaaagauccuacca

SEQ ID NO: 653382 - RNA, 19 nt, Artificial Sequence
  Description of Artificial Sequence: Synthetic oligonucleotide
uuucagugccaccuagcau

SEQ ID NO: 653383 - RNA, 19 nt, Artificial Sequence
  Description of Artificial Sequence: Synthetic oligonucleotide
ucuucccacuaacacuggu

SEQ ID NO: 653384 - RNA, 19 nt, Artificial Sequence
  Description of Artificial Sequence: Synthetic oligonucleotide
uaaggguauuccugccacc

SEQ ID NO: 653385 - RNA, 19 nt, Artificial Sequence
  Description of Artificial Sequence: Synthetic oligonucleotide
aggcugccauccuuucucc

SEQ ID NO: 653386 - RNA, 19 nt, Artificial Sequence
  Description of Artificial Sequence: Synthetic oligonucleotide
gguuuaauacuagccaaug

SEQ ID NO: 653387 - RNA, 19 nt, Artificial Sequence
  Description of Artificial Sequence: Synthetic oligonucleotide
aggaauucaucuauccagu

SEQ ID NO: 653388 - RNA, 19 nt, Artificial Sequence
  Description of Artificial Sequence: Synthetic oligonucleotide
acuagccaaugugugauga

SEQ ID NO: 653389 - RNA, 19 nt, Artificial Sequence
  Description of Artificial Sequence: Synthetic oligonucleotide
uuacaagcaagaagcuguu

SEQ ID NO: 653390 - RNA, 19 nt, Artificial Sequence
  Description of Artificial Sequence: Synthetic oligonucleotide
auaaacccuuuuccccauc

SEQ ID NO: 653391 - RNA, 19 nt, Artificial Sequence
  Description of Artificial Sequence: Synthetic oligonucleotide
cacuaccuagcccaagaac

SEQ ID NO: 653392 - RNA, 19 nt, Artificial Sequence
  Description of Artificial Sequence: Synthetic oligonucleotide
ugucgacucaucugucugu

SEQ ID NO: 653393 - RNA, 19 nt, Artificial Sequence
  Description of Artificial Sequence: Synthetic oligonucleotide
aagagggcgcagauggcag

SEQ ID NO: 653394 - RNA, 19 nt, Artificial Sequence
  Description of Artificial Sequence: Synthetic oligonucleotide
cauucgugguuuaauacua

SEQ ID NO: 653395 - RNA, 19 nt, Artificial Sequence
  Description of Artificial Sequence: Synthetic oligonucleotide
uuguggaaagacaccucuc

SEQ ID NO: 653396 - RNA, 19 nt, Artificial Sequence
  Description of Artificial Sequence: Synthetic oligonucleotide
uucaucuauccaguaggac

SEQ ID NO: 653397 - RNA, 19 nt, Artificial Sequence
  Description of Artificial Sequence: Synthetic oligonucleotide
aagauccuaccacuuugua

SEQ ID NO: 653398 - RNA, 19 nt, Artificial Sequence
  Description of Artificial Sequence: Synthetic oligonucleotide
gguuggagugaaccuaugc

SEQ ID NO: 653399 - RNA, 19 nt, Artificial Sequence
  Description of Artificial Sequence: Synthetic oligonucleotide
ucgguuggagugaaccuau

SEQ ID NO: 653400 - RNA, 19 nt, Artificial Sequence
  Description of Artificial Sequence: Synthetic oligonucleotide
ucgacucaucugucugugg

SEQ ID NO: 653401 - RNA, 19 nt, Artificial Sequence
  Description of Artificial Sequence: Synthetic oligonucleotide
ugggacauuucagugccac

SEQ ID NO: 653402 - RNA, 19 nt, Artificial Sequence
  Description of Artificial Sequence: Synthetic oligonucleotide
auaccaugaggcagagugg

SEQ ID NO: 653403 - RNA, 19 nt, Artificial Sequence
  Description of Artificial Sequence: Synthetic oligonucleotide
uuuggcuaauaaacccuuu

SEQ ID NO: 653404 - RNA, 19 nt, Artificial Sequence
  Description of Artificial Sequence: Synthetic oligonucleotide
gccuccuuauuucaacagg

SEQ ID NO: 653405 - RNA, 19 nt, Artificial Sequence
  Description of Artificial Sequence: Synthetic oligonucleotide
uguugucccauagggcacc

SEQ ID NO: 653406 - RNA, 19 nt, Artificial Sequence
  Description of Artificial Sequence: Synthetic oligonucleotide
ggaauuaacaagguaggaa

SEQ ID NO: 653407 - RNA, 19 nt, Artificial Sequence
  Description of Artificial Sequence: Synthetic oligonucleotide
uauggucauaagugucgac

SEQ ID NO: 653408 - RNA, 19 nt, Artificial Sequence
  Description of Artificial Sequence: Synthetic oligonucleotide
gaaccuaugccgggaagac

SEQ ID NO: 653409 - RNA, 19 nt, Artificial Sequence
  Description of Artificial Sequence: Synthetic oligonucleotide
aggcagcguaggcagcgcc

SEQ ID NO: 653410 - RNA, 19 nt, Artificial Sequence
  Description of Artificial Sequence: Synthetic oligonucleotide
guaaugaacucaggacacc

SEQ ID NO: 653411 - RNA, 19 nt, Artificial Sequence
  Description of Artificial Sequence: Synthetic oligonucleotide
uuagcaccucgguuggagu

SEQ ID NO: 653412 - RNA, 19 nt, Artificial Sequence
  Description of Artificial Sequence: Synthetic oligonucleotide
agccuagauacugaaggca

SEQ ID NO: 653413 - RNA, 19 nt, Artificial Sequence
  Description of Artificial Sequence: Synthetic oligonucleotide
aggcccuguguguaauuuc

SEQ ID NO: 653414 - RNA, 19 nt, Artificial Sequence
  Description of Artificial Sequence: Synthetic oligonucleotide
uguuuccuacaggugcaag

SEQ ID NO: 653415 - RNA, 19 nt, Artificial Sequence
  Description of Artificial Sequence: Synthetic oligonucleotide
caucucauuucgguucagg

SEQ ID NO: 653416 - RNA, 19 nt, Artificial Sequence
  Description of Artificial Sequence: Synthetic oligonucleotide
gugauuauauuucugccuu

SEQ ID NO: 653417 - RNA, 19 nt, Artificial Sequence
  Description of Artificial Sequence: Synthetic oligonucleotide
uuuauggcuugugggcagc

SEQ ID NO: 653418 - RNA, 19 nt, Artificial Sequence
  Description of Artificial Sequence: Synthetic oligonucleotide
auguuguagccacagucuu

SEQ ID NO: 653419 - RNA, 19 nt, Artificial Sequence
  Description of Artificial Sequence: Synthetic oligonucleotide
accuaugccgggaagacaa

SEQ ID NO: 653420 - RNA, 19 nt, Artificial Sequence
  Description of Artificial Sequence: Synthetic oligonucleotide
gucuccaacgugugugacc

SEQ ID NO: 653421 - RNA, 19 nt, Artificial Sequence
  Description of Artificial Sequence: Synthetic oligonucleotide
aaugaacucaggacaccau

SEQ ID NO: 653422 - RNA, 19 nt, Artificial Sequence
  Description of Artificial Sequence: Synthetic oligonucleotide
cuaccuagcccaagaacca

SEQ ID NO: 653423 - RNA, 19 nt, Artificial Sequence
  Description of Artificial Sequence: Synthetic oligonucleotide
gaacucaggacaccauaaa

SEQ ID NO: 653424 - RNA, 19 nt, Artificial Sequence
  Description of Artificial Sequence: Synthetic oligonucleotide
aagugucgacucaucuguc

SEQ ID NO: 653425 - RNA, 19 nt, Artificial Sequence
  Description of Artificial Sequence: Synthetic oligonucleotide
augccuuagccaaauaaau

SEQ ID NO: 653426 - RNA, 19 nt, Artificial Sequence
  Description of Artificial Sequence: Synthetic oligonucleotide
agcccaagaaccagccugg

SEQ ID NO: 653427 - RNA, 19 nt, Artificial Sequence
  Description of Artificial Sequence: Synthetic oligonucleotide
uacuagccaaugugugaug

SEQ ID NO: 653428 - RNA, 19 nt, Artificial Sequence
  Description of Artificial Sequence: Synthetic oligonucleotide
auucgugguuuaauacuag

SEQ ID NO: 653429 - RNA, 19 nt, Artificial Sequence
  Description of Artificial Sequence: Synthetic oligonucleotide
agcccucuauuucuuacau

SEQ ID NO: 653430 - RNA, 19 nt, Artificial Sequence
  Description of Artificial Sequence: Synthetic oligonucleotide
gaguggcaacaugaagagg

SEQ ID NO: 653431 - RNA, 19 nt, Artificial Sequence
  Description of Artificial Sequence: Synthetic oligonucleotide
uaccuagcccaagaaccag

SEQ ID NO: 653432 - RNA, 19 nt, Artificial Sequence
  Description of Artificial Sequence: Synthetic oligonucleotide
cuguugucccauagggcac

SEQ ID NO: 653433 - RNA, 19 nt, Artificial Sequence
  Description of Artificial Sequence: Synthetic oligonucleotide
uccaacgugugugaccaaa

SEQ ID NO: 653434 - RNA, 19 nt, Artificial Sequence
  Description of Artificial Sequence: Synthetic oligonucleotide
guaccacggggacacgugc

SEQ ID NO: 653435 - RNA, 19 nt, Artificial Sequence
  Description of Artificial Sequence: Synthetic oligonucleotide
ccacugacauaccaugagg

SEQ ID NO: 653436 - RNA, 19 nt, Artificial Sequence
  Description of Artificial Sequence: Synthetic oligonucleotide
gaguauauagggauaggau

SEQ ID NO: 653437 - RNA, 19 nt, Artificial Sequence
  Description of Artificial Sequence: Synthetic oligonucleotide
ccauggacuauugggaggg

SEQ ID NO: 653438 - RNA, 19 nt, Artificial Sequence
  Description of Artificial Sequence: Synthetic oligonucleotide
caaggguaaugaagaggac

SEQ ID NO: 653439 - RNA, 19 nt, Artificial Sequence
  Description of Artificial Sequence: Synthetic oligonucleotide
aggcucccacuaccuagcc

SEQ ID NO: 653440 - RNA, 19 nt, Artificial Sequence
  Description of Artificial Sequence: Synthetic oligonucleotide
cucuuaguccaaaugggcu

SEQ ID NO: 653441 - RNA, 19 nt, Artificial Sequence
  Description of Artificial Sequence: Synthetic oligonucleotide
ugguuaggguccugaggug

SEQ ID NO: 653442 - RNA, 19 nt, Artificial Sequence
  Description of Artificial Sequence: Synthetic oligonucleotide
guggagauaggccaguaau

SEQ ID NO: 653443 - RNA, 19 nt, Artificial Sequence
  Description of Artificial Sequence: Synthetic oligonucleotide
uuauugguuuauggcuugu

SEQ ID NO: 653444 - RNA, 19 nt, Artificial Sequence
  Description of Artificial Sequence: Synthetic oligonucleotide
cuccuuauuucaacaggga

SEQ ID NO: 653445 - RNA, 19 nt, Artificial Sequence
  Description of Artificial Sequence: Synthetic oligonucleotide
agguggaauuaacaaggua

SEQ ID NO: 653446 - RNA, 19 nt, Artificial Sequence
  Description of Artificial Sequence: Synthetic oligonucleotide
cauaagugucgacucaucu

SEQ ID NO: 653447 - RNA, 19 nt, Artificial Sequence
  Description of Artificial Sequence: Synthetic oligonucleotide
agcauuguauagaguauau

SEQ ID NO: 653448 - RNA, 19 nt, Artificial Sequence
  Description of Artificial Sequence: Synthetic oligonucleotide
ugguuucaugucuguugug

SEQ ID NO: 653449 - RNA, 19 nt, Artificial Sequence
  Description of Artificial Sequence: Synthetic oligonucleotide
gugccggguagccugguug

SEQ ID NO: 653450 - RNA, 19 nt, Artificial Sequence
  Description of Artificial Sequence: Synthetic oligonucleotide
gacauaccaugaggcagag

SEQ ID NO: 653451 - RNA, 19 nt, Artificial Sequence
  Description of Artificial Sequence: Synthetic oligonucleotide
uccgugcuugguagguccc

SEQ ID NO: 653452 - RNA, 19 nt, Artificial Sequence
  Description of Artificial Sequence: Synthetic oligonucleotide
gcaagaagcuguugucaag

SEQ ID NO: 653453 - RNA, 19 nt, Artificial Sequence
  Description of Artificial Sequence: Synthetic oligonucleotide
ugauggcgcaggcagcgua

SEQ ID NO: 653454 - RNA, 19 nt, Artificial Sequence
  Description of Artificial Sequence: Synthetic oligonucleotide
cauaggcuauggucauaag

SEQ ID NO: 653455 - RNA, 19 nt, Artificial Sequence
  Description of Artificial Sequence: Synthetic oligonucleotide
ggcugaagcuucaagcagc

SEQ ID NO: 653456 - RNA, 19 nt, Artificial Sequence
  Description of Artificial Sequence: Synthetic oligonucleotide
aaccuaugccgggaagaca

SEQ ID NO: 653457 - RNA, 19 nt, Artificial Sequence
  Description of Artificial Sequence: Synthetic oligonucleotide
guaacccaccuuugucagc

SEQ ID NO: 653458 - RNA, 19 nt, Artificial Sequence
  Description of Artificial Sequence: Synthetic oligonucleotide
ucaugucuguuguguuaga

SEQ ID NO: 653459 - RNA, 19 nt, Artificial Sequence
  Description of Artificial Sequence: Synthetic oligonucleotide
cagaucuugaccauugauu

SEQ ID NO: 653460 - RNA, 19 nt, Artificial Sequence
  Description of Artificial Sequence: Synthetic oligonucleotide
gacuauugggaggggcagc

SEQ ID NO: 653461 - RNA, 19 nt, Artificial Sequence
  Description of Artificial Sequence: Synthetic oligonucleotide
aucagcccuauaccugcug

SEQ ID NO: 653462 - RNA, 19 nt, Artificial Sequence
  Description of Artificial Sequence: Synthetic oligonucleotide
gguugguuaggguccugag

SEQ ID NO: 653463 - RNA, 19 nt, Artificial Sequence
  Description of Artificial Sequence: Synthetic oligonucleotide
ucgguucaggcugcaacca

SEQ ID NO: 653464 - RNA, 19 nt, Artificial Sequence
  Description of Artificial Sequence: Synthetic oligonucleotide
ccaucaauuccgugcuugg

SEQ ID NO: 653465 - RNA, 19 nt, Artificial Sequence
  Description of Artificial Sequence: Synthetic oligonucleotide
ccuagcccaagaaccagcc

SEQ ID NO: 653466 - RNA, 19 nt, Artificial Sequence
  Description of Artificial Sequence: Synthetic oligonucleotide
uucccagcccuguaguauu

SEQ ID NO: 653467 - RNA, 19 nt, Artificial Sequence
  Description of Artificial Sequence: Synthetic oligonucleotide
uaguccauuuucagaucuu

SEQ ID NO: 653468 - RNA, 19 nt, Artificial Sequence
  Description of Artificial Sequence: Synthetic oligonucleotide
ucuauccaguaggacuuuc

SEQ ID NO: 653469 - RNA, 19 nt, Artificial Sequence
  Description of Artificial Sequence: Synthetic oligonucleotide
guagagacagguggaauua

SEQ ID NO: 653470 - RNA, 19 nt, Artificial Sequence
  Description of Artificial Sequence: Synthetic oligonucleotide
cuugggguugggacauuuc

SEQ ID NO: 653471 - RNA, 19 nt, Artificial Sequence
  Description of Artificial Sequence: Synthetic oligonucleotide
gucgacucaucugucugug

SEQ ID NO: 653472 - RNA, 19 nt, Artificial Sequence
  Description of Artificial Sequence: Synthetic oligonucleotide
uagagacagguggaauuaa

SEQ ID NO: 653473 - RNA, 19 nt, Artificial Sequence
  Description of Artificial Sequence: Synthetic oligonucleotide
gaugugguccagggaaauc

SEQ ID NO: 653474 - RNA, 19 nt, Artificial Sequence
  Description of Artificial Sequence: Synthetic oligonucleotide
acuguuccuugaagacagc

SEQ ID NO: 653475 - RNA, 19 nt, Artificial Sequence
  Description of Artificial Sequence: Synthetic oligonucleotide
cuugguagguccccuaccu

SEQ ID NO: 653476 - RNA, 19 nt, Artificial Sequence
  Description of Artificial Sequence: Synthetic oligonucleotide
uuaguccaaaugggcuucu

SEQ ID NO: 653477 - RNA, 19 nt, Artificial Sequence
  Description of Artificial Sequence: Synthetic oligonucleotide
cuauggucauaagugucga

SEQ ID NO: 653478 - RNA, 19 nt, Artificial Sequence
  Description of Artificial Sequence: Synthetic oligonucleotide
ggucauaagugucgacuca

SEQ ID NO: 653479 - RNA, 19 nt, Artificial Sequence
  Description of Artificial Sequence: Synthetic oligonucleotide
cauaaagauccuaccacuu

SEQ ID NO: 653480 - RNA, 19 nt, Artificial Sequence
  Description of Artificial Sequence: Synthetic oligonucleotide
uugggacauuucagugcca

SEQ ID NO: 653481 - RNA, 19 nt, Artificial Sequence
  Description of Artificial Sequence: Synthetic oligonucleotide
ggaagacaauucccagccc

SEQ ID NO: 653482 - RNA, 19 nt, Artificial Sequence
  Description of Artificial Sequence: Synthetic oligonucleotide
ugcccaugggccuccuuau

SEQ ID NO: 653483 - RNA, 19 nt, Artificial Sequence
  Description of Artificial Sequence: Synthetic oligonucleotide
ccaacgugugugaccaaag

SEQ ID NO: 653484 - RNA, 19 nt, Artificial Sequence
  Description of Artificial Sequence: Synthetic oligonucleotide
gggcacuguuccuugaaga

SEQ ID NO: 653485 - RNA, 19 nt, Artificial Sequence
  Description of Artificial Sequence: Synthetic oligonucleotide
ggacuauugggaggggcag

SEQ ID NO: 653486 - RNA, 19 nt, Artificial Sequence
  Description of Artificial Sequence: Synthetic oligonucleotide
cucagguuugaggugacua

SEQ ID NO: 653487 - RNA, 19 nt, Artificial Sequence
  Description of Artificial Sequence: Synthetic oligonucleotide
gcgccacugacauaccaug

SEQ ID NO: 653488 - RNA, 19 nt, Artificial Sequence
  Description of Artificial Sequence: Synthetic oligonucleotide
ggugacuaaggguauuccu

SEQ ID NO: 653489 - RNA, 19 nt, Artificial Sequence
  Description of Artificial Sequence: Synthetic oligonucleotide
ggcaucagcccuauaccug

SEQ ID NO: 653490 - RNA, 19 nt, Artificial Sequence
  Description of Artificial Sequence: Synthetic oligonucleotide
uucuuacauucgugguuua

SEQ ID NO: 653491 - RNA, 19 nt, Artificial Sequence
  Description of Artificial Sequence: Synthetic oligonucleotide
uucuaacuguugucccaua

SEQ ID NO: 653492 - RNA, 19 nt, Artificial Sequence
  Description of Artificial Sequence: Synthetic oligonucleotide
agcaccucgguuggaguga

SEQ ID NO: 653493 - RNA, 19 nt, Artificial Sequence
  Description of Artificial Sequence: Synthetic oligonucleotide
cccaggaaaauucagcucu

SEQ ID NO: 653494 - RNA, 19 nt, Artificial Sequence
  Description of Artificial Sequence: Synthetic oligonucleotide
ccccaucucauuucgguuc

SEQ ID NO: 653495 - RNA, 19 nt, Artificial Sequence
  Description of Artificial Sequence: Synthetic oligonucleotide
cuauccaguaggacuuucu

SEQ ID NO: 653496 - RNA, 19 nt, Artificial Sequence
  Description of Artificial Sequence: Synthetic oligonucleotide
gguagagacagguggaauu

SEQ ID NO: 653497 - RNA, 19 nt, Artificial Sequence
  Description of Artificial Sequence: Synthetic oligonucleotide
gcuugguagguccccuacc

SEQ ID NO: 653498 - RNA, 19 nt, Artificial Sequence
  Description of Artificial Sequence: Synthetic oligonucleotide
ucccagcccuguaguauuc

SEQ ID NO: 653499 - RNA, 19 nt, Artificial Sequence
  Description of Artificial Sequence: Synthetic oligonucleotide
cccuauaccugcugaauga

SEQ ID NO: 653500 - RNA, 19 nt, Artificial Sequence
  Description of Artificial Sequence: Synthetic oligonucleotide
cauggacuauugggagggg

SEQ ID NO: 653501 - RNA, 19 nt, Artificial Sequence
  Description of Artificial Sequence: Synthetic oligonucleotide
ggcuauggucauaaguguc

SEQ ID NO: 653502 - RNA, 19 nt, Artificial Sequence
  Description of Artificial Sequence: Synthetic oligonucleotide
agcccuauaccugcugaau

SEQ ID NO: 653503 - RNA, 19 nt, Artificial Sequence
  Description of Artificial Sequence: Synthetic oligonucleotide
cagcccuguaguauucuaa

SEQ ID NO: 653504 - RNA, 19 nt, Artificial Sequence
  Description of Artificial Sequence: Synthetic oligonucleotide
ccugguuguaacaccagaa

SEQ ID NO: 653505 - RNA, 19 nt, Artificial Sequence
  Description of Artificial Sequence: Synthetic oligonucleotide
ccuugcuaguccauuuuca

SEQ ID NO: 653506 - RNA, 19 nt, Artificial Sequence
  Description of Artificial Sequence: Synthetic oligonucleotide
cacccagaugugguccagg

SEQ ID NO: 653507 - RNA, 19 nt, Artificial Sequence
  Description of Artificial Sequence: Synthetic oligonucleotide
agcgccacugacauaccau

SEQ ID NO: 653508 - RNA, 19 nt, Artificial Sequence
  Description of Artificial Sequence: Synthetic oligonucleotide
ccauaaagauccuaccacu

SEQ ID NO: 653509 - RNA, 19 nt, Artificial Sequence
  Description of Artificial Sequence: Synthetic oligonucleotide
auacguuggguuggagaau

SEQ ID NO: 653510 - RNA, 19 nt, Artificial Sequence
  Description of Artificial Sequence: Synthetic oligonucleotide
uuaggguccugaggugcuc

SEQ ID NO: 653511 - RNA, 19 nt, Artificial Sequence
  Description of Artificial Sequence: Synthetic oligonucleotide
gucauaagugucgacucau

SEQ ID NO: 653512 - RNA, 19 nt, Artificial Sequence
  Description of Artificial Sequence: Synthetic oligonucleotide
cucgguuggagugaaccua

SEQ ID NO: 653513 - RNA, 19 nt, Artificial Sequence
  Description of Artificial Sequence: Synthetic oligonucleotide
acuuucucaugggcacugu

SEQ ID NO: 653514 - RNA, 19 nt, Artificial Sequence
  Description of Artificial Sequence: Synthetic oligonucleotide
ggugucccaggaaaauuca

SEQ ID NO: 653515 - RNA, 19 nt, Artificial Sequence
  Description of Artificial Sequence: Synthetic oligonucleotide
ggcagccuagauacugaag

SEQ ID NO: 653516 - RNA, 19 nt, Artificial Sequence
  Description of Artificial Sequence: Synthetic oligonucleotide
augaugccuuagccaaaua

SEQ ID NO: 653517 - RNA, 19 nt, Artificial Sequence
  Description of Artificial Sequence: Synthetic oligonucleotide
gccugguuguaacaccaga

SEQ ID NO: 653518 - RNA, 19 nt, Artificial Sequence
  Description of Artificial Sequence: Synthetic oligonucleotide
uccuaccacuuuguaccau

SEQ ID NO: 653519 - RNA, 19 nt, Artificial Sequence
  Description of Artificial Sequence: Synthetic oligonucleotide
auuucgguucaggcugcaa

SEQ ID NO: 653520 - RNA, 19 nt, Artificial Sequence
  Description of Artificial Sequence: Synthetic oligonucleotide
gacaccucucuuaguccaa

SEQ ID NO: 653521 - RNA, 19 nt, Artificial Sequence
  Description of Artificial Sequence: Synthetic oligonucleotide
cauagggcaccugggaccu

SEQ ID NO: 653522 - RNA, 19 nt, Artificial Sequence
  Description of Artificial Sequence: Synthetic oligonucleotide
ccuuucuccaggcagccua

SEQ ID NO: 653523 - RNA, 19 nt, Artificial Sequence
  Description of Artificial Sequence: Synthetic oligonucleotide
cagcgccacugacauacca

SEQ ID NO: 653524 - RNA, 19 nt, Artificial Sequence
  Description of Artificial Sequence: Synthetic oligonucleotide
agcuuuaaacagagcucuu

SEQ ID NO: 653525 - RNA, 19 nt, Artificial Sequence
  Description of Artificial Sequence: Synthetic oligonucleotide
cccacuaccuagcccaaga

SEQ ID NO: 653526 - RNA, 19 nt, Artificial Sequence
  Description of Artificial Sequence: Synthetic oligonucleotide
acauaccaugaggcagagu

SEQ ID NO: 653527 - RNA, 19 nt, Artificial Sequence
  Description of Artificial Sequence: Synthetic oligonucleotide
gcauuguauagaguauaua

SEQ ID NO: 653528 - RNA, 19 nt, Artificial Sequence
  Description of Artificial Sequence: Synthetic oligonucleotide
agcgggugucccaggaaaa

SEQ ID NO: 653529 - RNA, 19 nt, Artificial Sequence
  Description of Artificial Sequence: Synthetic oligonucleotide
gugaggcucccacuaccua

SEQ ID NO: 653530 - RNA, 19 nt, Artificial Sequence
  Description of Artificial Sequence: Synthetic oligonucleotide
acguuggguuggagaaucu

SEQ ID NO: 653531 - RNA, 19 nt, Artificial Sequence
  Description of Artificial Sequence: Synthetic oligonucleotide
gguagguccccuaccugaa

SEQ ID NO: 653532 - RNA, 19 nt, Artificial Sequence
  Description of Artificial Sequence: Synthetic oligonucleotide
gaggcccuguguguaauuu

SEQ ID NO: 653533 - RNA, 19 nt, Artificial Sequence
  Description of Artificial Sequence: Synthetic oligonucleotide
guauuccugccaccagaau

SEQ ID NO: 653534 - RNA, 19 nt, Artificial Sequence
  Description of Artificial Sequence: Synthetic oligonucleotide
gggcuucuaucuuggagau

SEQ ID NO: 653535 - RNA, 19 nt, Artificial Sequence
  Description of Artificial Sequence: Synthetic oligonucleotide
ccccuaccugaaagcauug

SEQ ID NO: 653536 - RNA, 19 nt, Artificial Sequence
  Description of Artificial Sequence: Synthetic oligonucleotide
gcccuguaguauucuaacu

SEQ ID NO: 653537 - RNA, 19 nt, Artificial Sequence
  Description of Artificial Sequence: Synthetic oligonucleotide
gguguaacaaaaggaccuu

SEQ ID NO: 653538 - RNA, 19 nt, Artificial Sequence
  Description of Artificial Sequence: Synthetic oligonucleotide
ggguacccauggacuauug

SEQ ID NO: 653539 - RNA, 19 nt, Artificial Sequence
  Description of Artificial Sequence: Synthetic oligonucleotide
gugcuugguagguccccua

SEQ ID NO: 653540 - RNA, 19 nt, Artificial Sequence
  Description of Artificial Sequence: Synthetic oligonucleotide
caccucgguuggagugaac

SEQ ID NO: 653541 - RNA, 19 nt, Artificial Sequence
  Description of Artificial Sequence: Synthetic oligonucleotide
ccuauaccugcugaaugaa

SEQ ID NO: 653542 - RNA, 19 nt, Artificial Sequence
  Description of Artificial Sequence: Synthetic oligonucleotide
cucccacuaccuagcccaa

SEQ ID NO: 653543 - RNA, 19 nt, Artificial Sequence
  Description of Artificial Sequence: Synthetic oligonucleotide
cuaugccgggaagacaauu

SEQ ID NO: 653544 - RNA, 19 nt, Artificial Sequence
  Description of Artificial Sequence: Synthetic oligonucleotide
ccuagauacugaaggcaau

SEQ ID NO: 653545 - RNA, 19 nt, Artificial Sequence
  Description of Artificial Sequence: Synthetic oligonucleotide
ccacuaccuagcccaagaa

SEQ ID NO: 653546 - RNA, 19 nt, Artificial Sequence
  Description of Artificial Sequence: Synthetic oligonucleotide
ccuaccacuuuguaccauu

SEQ ID NO: 653547 - RNA, 19 nt, Artificial Sequence
  Description of Artificial Sequence: Synthetic oligonucleotide
caccaguuacuaggguugu

SEQ ID NO: 653548 - RNA, 19 nt, Artificial Sequence
  Description of Artificial Sequence: Synthetic oligonucleotide
ccgugcuugguaggucccc

SEQ ID NO: 653549 - RNA, 19 nt, Artificial Sequence
  Description of Artificial Sequence: Synthetic oligonucleotide
ccucgguuggagugaaccu

SEQ ID NO: 653550 - RNA, 19 nt, Artificial Sequence
  Description of Artificial Sequence: Synthetic oligonucleotide
caaaggcaucagcccuaua

SEQ ID NO: 653551 - RNA, 19 nt, Artificial Sequence
  Description of Artificial Sequence: Synthetic oligonucleotide
cuccaacgugugugaccaa

SEQ ID NO: 653552 - RNA, 19 nt, Artificial Sequence
  Description of Artificial Sequence: Synthetic oligonucleotide
gcagcgccacugacauacc

SEQ ID NO: 653553 - RNA, 19 nt, Artificial Sequence
  Description of Artificial Sequence: Synthetic oligonucleotide
acgugccggguagccuggu

SEQ ID NO: 653554 - RNA, 19 nt, Artificial Sequence
  Description of Artificial Sequence: Synthetic oligonucleotide
ccaugacauaggcuauggu

SEQ ID NO: 653555 - RNA, 19 nt, Artificial Sequence
  Description of Artificial Sequence: Synthetic oligonucleotide
ccuccuugcuaguccauuu

SEQ ID NO: 653556 - RNA, 19 nt, Artificial Sequence
  Description of Artificial Sequence: Synthetic oligonucleotide
gggauaggaugcagcgggu

SEQ ID NO: 653557 - RNA, 19 nt, Artificial Sequence
  Description of Artificial Sequence: Synthetic oligonucleotide
gcauuuuggcagguugguu

SEQ ID NO: 653558 - RNA, 19 nt, Artificial Sequence
  Description of Artificial Sequence: Synthetic oligonucleotide
gcaccucgguuggagugaa

SEQ ID NO: 653559 - RNA, 19 nt, Artificial Sequence
  Description of Artificial Sequence: Synthetic oligonucleotide
cccaagaaccagccugggu

SEQ ID NO: 653560 - RNA, 19 nt, Artificial Sequence
  Description of Artificial Sequence: Synthetic oligonucleotide
gcccucuauuucuuacauu

SEQ ID NO: 653561 - RNA, 19 nt, Artificial Sequence
  Description of Artificial Sequence: Synthetic oligonucleotide
auagggcaccugggaccuu

SEQ ID NO: 653562 - RNA, 19 nt, Artificial Sequence
  Description of Artificial Sequence: Synthetic oligonucleotide
cugauggcgcaggcagcgu

SEQ ID NO: 653563 - RNA, 19 nt, Artificial Sequence
  Description of Artificial Sequence: Synthetic oligonucleotide
cguuggguuggagaaucua

SEQ ID NO: 653564 - RNA, 19 nt, Artificial Sequence
  Description of Artificial Sequence: Synthetic oligonucleotide
gcgggugucccaggaaaau

SEQ ID NO: 653565 - RNA, 19 nt, Artificial Sequence
  Description of Artificial Sequence: Synthetic oligonucleotide
cccuaccugaaagcauugu

SEQ ID NO: 653566 - RNA, 19 nt, Artificial Sequence
  Description of Artificial Sequence: Synthetic oligonucleotide
ccuaugccgggaagacaau

SEQ ID NO: 653567 - RNA, 19 nt, Artificial Sequence
  Description of Artificial Sequence: Synthetic oligonucleotide
cgugccggguagccugguu

SEQ ID NO: 653568 - RNA, 19 nt, Artificial Sequence
  Description of Artificial Sequence: Synthetic oligonucleotide
aaauuaauggaugggauag

SEQ ID NO: 653569 - RNA, 19 nt, Artificial Sequence
  Description of Artificial Sequence: Synthetic oligonucleotide
auaucaaaugagcuggugc

SEQ ID NO: 653570 - RNA, 19 nt, Artificial Sequence
  Description of Artificial Sequence: Synthetic oligonucleotide
aauguaaccaccaagggcu

SEQ ID NO: 653571 - RNA, 19 nt, Artificial Sequence
  Description of Artificial Sequence: Synthetic oligonucleotide
aaccuucccgcuuaaaggc

SEQ ID NO: 653572 - RNA, 19 nt, Artificial Sequence
  Description of Artificial Sequence: Synthetic oligonucleotide
ucaagauagaaccaccugc

SEQ ID NO: 653573 - RNA, 19 nt, Artificial Sequence
  Description of Artificial Sequence: Synthetic oligonucleotide
ucaucuauuuaccugggag

SEQ ID NO: 653574 - RNA, 19 nt, Artificial Sequence
  Description of Artificial Sequence: Synthetic oligonucleotide
caaucaauagccauuagac

SEQ ID NO: 653575 - RNA, 19 nt, Artificial Sequence
  Description of Artificial Sequence: Synthetic oligonucleotide
uauacggacaaucaauagc

SEQ ID NO: 653576 - RNA, 19 nt, Artificial Sequence
  Description of Artificial Sequence: Synthetic oligonucleotide
aacguagcgacacugaacu

SEQ ID NO: 653577 - RNA, 19 nt, Artificial Sequence
  Description of Artificial Sequence: Synthetic oligonucleotide
uauuuuggagcauacaaca

SEQ ID NO: 653578 - RNA, 19 nt, Artificial Sequence
  Description of Artificial Sequence: Synthetic oligonucleotide
aauuccacuauguaugaca

SEQ ID NO: 653579 - RNA, 19 nt, Artificial Sequence
  Description of Artificial Sequence: Synthetic oligonucleotide
auacggacaaucaauagcc

SEQ ID NO: 653580 - RNA, 19 nt, Artificial Sequence
  Description of Artificial Sequence: Synthetic oligonucleotide
uuaagagcagguaaucucc

SEQ ID NO: 653581 - RNA, 19 nt, Artificial Sequence
  Description of Artificial Sequence: Synthetic oligonucleotide
augacuauaucaaaugagc

SEQ ID NO: 653582 - RNA, 19 nt, Artificial Sequence
  Description of Artificial Sequence: Synthetic oligonucleotide
uguaugacaccacuguucc

SEQ ID NO: 653583 - RNA, 19 nt, Artificial Sequence
  Description of Artificial Sequence: Synthetic oligonucleotide
uccucgaaaaguuuauagg

SEQ ID NO: 653584 - RNA, 19 nt, Artificial Sequence
  Description of Artificial Sequence: Synthetic oligonucleotide
auagccauuagaccccugc

SEQ ID NO: 653585 - RNA, 19 nt, Artificial Sequence
  Description of Artificial Sequence: Synthetic oligonucleotide
uaugaaucaucaguaaucc

SEQ ID NO: 653586 - RNA, 19 nt, Artificial Sequence
  Description of Artificial Sequence: Synthetic oligonucleotide
gacuauaucaaaugagcug

SEQ ID NO: 653587 - RNA, 19 nt, Artificial Sequence
  Description of Artificial Sequence: Synthetic oligonucleotide
uuuuggagcauacaacaca

SEQ ID NO: 653588 - RNA, 19 nt, Artificial Sequence
  Description of Artificial Sequence: Synthetic oligonucleotide
aagggaagcggcuauccgg

SEQ ID NO: 653589 - RNA, 19 nt, Artificial Sequence
  Description of Artificial Sequence: Synthetic oligonucleotide
cuuauaucagcauuuaaca

SEQ ID NO: 653590 - RNA, 19 nt, Artificial Sequence
  Description of Artificial Sequence: Synthetic oligonucleotide
agccauuaggguuaguuuc

SEQ ID NO: 653591 - RNA, 19 nt, Artificial Sequence
  Description of Artificial Sequence: Synthetic oligonucleotide
uuuaagagcagguaaucuc

SEQ ID NO: 653592 - RNA, 19 nt, Artificial Sequence
  Description of Artificial Sequence: Synthetic oligonucleotide
uacggucugaguaaagucc

SEQ ID NO: 653593 - RNA, 19 nt, Artificial Sequence
  Description of Artificial Sequence: Synthetic oligonucleotide
ugggauagcuuaauaaaug

SEQ ID NO: 653594 - RNA, 19 nt, Artificial Sequence
  Description of Artificial Sequence: Synthetic oligonucleotide
uuuucaccauaacuaaaag

SEQ ID NO: 653595 - RNA, 19 nt, Artificial Sequence
  Description of Artificial Sequence: Synthetic oligonucleotide
caucuauuuaccugggagg

SEQ ID NO: 653596 - RNA, 19 nt, Artificial Sequence
  Description of Artificial Sequence: Synthetic oligonucleotide
caugucacaacguagcgac

SEQ ID NO: 653597 - RNA, 19 nt, Artificial Sequence
  Description of Artificial Sequence: Synthetic oligonucleotide
uucaaauuaauggauggga

SEQ ID NO: 653598 - RNA, 19 nt, Artificial Sequence
  Description of Artificial Sequence: Synthetic oligonucleotide
uuucaaauuaauggauggg

SEQ ID NO: 653599 - RNA, 19 nt, Artificial Sequence
  Description of Artificial Sequence: Synthetic oligonucleotide
aaagauuaacccugagaga

SEQ ID NO: 653600 - RNA, 19 nt, Artificial Sequence
  Description of Artificial Sequence: Synthetic oligonucleotide
aaagcuaccuguugguagu

SEQ ID NO: 653601 - RNA, 19 nt, Artificial Sequence
  Description of Artificial Sequence: Synthetic oligonucleotide
uuccuaucaacacacacau

SEQ ID NO: 653602 - RNA, 19 nt, Artificial Sequence
  Description of Artificial Sequence: Synthetic oligonucleotide
ucaaauuaauggaugggau

SEQ ID NO: 653603 - RNA, 19 nt, Artificial Sequence
  Description of Artificial Sequence: Synthetic oligonucleotide
acggcauuaggcccuagcc

SEQ ID NO: 653604 - RNA, 19 nt, Artificial Sequence
  Description of Artificial Sequence: Synthetic oligonucleotide
aaguuuauaggaauucuga

SEQ ID NO: 653605 - RNA, 19 nt, Artificial Sequence
  Description of Artificial Sequence: Synthetic oligonucleotide
uuucaagauagaaccaccu

SEQ ID NO: 653606 - RNA, 19 nt, Artificial Sequence
  Description of Artificial Sequence: Synthetic oligonucleotide
acaacaccaaucgaaaguc

SEQ ID NO: 653607 - RNA, 19 nt, Artificial Sequence
  Description of Artificial Sequence: Synthetic oligonucleotide
uguugguaguccacaaucc

SEQ ID NO: 653608 - RNA, 19 nt, Artificial Sequence
  Description of Artificial Sequence: Synthetic oligonucleotide
acaaucccaguauacggac

SEQ ID NO: 653609 - RNA, 19 nt, Artificial Sequence
  Description of Artificial Sequence: Synthetic oligonucleotide
aaagggaagcggcuauccg

SEQ ID NO: 653610 - RNA, 19 nt, Artificial Sequence
  Description of Artificial Sequence: Synthetic oligonucleotide
uucgcgguuuacaaaagug

SEQ ID NO: 653611 - RNA, 19 nt, Artificial Sequence
  Description of Artificial Sequence: Synthetic oligonucleotide
guaaccuucccgcuuaaag

SEQ ID NO: 653612 - RNA, 19 nt, Artificial Sequence
  Description of Artificial Sequence: Synthetic oligonucleotide
gaugggauagcuuaauaaa

SEQ ID NO: 653613 - RNA, 19 nt, Artificial Sequence
  Description of Artificial Sequence: Synthetic oligonucleotide
ugagagaacacaguauggc

SEQ ID NO: 653614 - RNA, 19 nt, Artificial Sequence
  Description of Artificial Sequence: Synthetic oligonucleotide
agagauucagguuuauagu

SEQ ID NO: 653615 - RNA, 19 nt, Artificial Sequence
  Description of Artificial Sequence: Synthetic oligonucleotide
uucaagauagaaccaccug

SEQ ID NO: 653616 - RNA, 19 nt, Artificial Sequence
  Description of Artificial Sequence: Synthetic oligonucleotide
uuauaguaaauuccacuau

SEQ ID NO: 653617 - RNA, 19 nt, Artificial Sequence
  Description of Artificial Sequence: Synthetic oligonucleotide
auacggucugaguaaaguc

SEQ ID NO: 653618 - RNA, 19 nt, Artificial Sequence
  Description of Artificial Sequence: Synthetic oligonucleotide
uuuguaucacuuagaaguc

SEQ ID NO: 653619 - RNA, 19 nt, Artificial Sequence
  Description of Artificial Sequence: Synthetic oligonucleotide
aaguccgggguauuucagg

SEQ ID NO: 653620 - RNA, 19 nt, Artificial Sequence
  Description of Artificial Sequence: Synthetic oligonucleotide
acccauguaacgcagggug

SEQ ID NO: 653621 - RNA, 19 nt, Artificial Sequence
  Description of Artificial Sequence: Synthetic oligonucleotide
uccgggaccggauaaaugu

SEQ ID NO: 653622 - RNA, 19 nt, Artificial Sequence
  Description of Artificial Sequence: Synthetic oligonucleotide
uaucacuuagaagucuuag

SEQ ID NO: 653623 - RNA, 19 nt, Artificial Sequence
  Description of Artificial Sequence: Synthetic oligonucleotide
uaauaaauguaaccaccaa

SEQ ID NO: 653624 - RNA, 19 nt, Artificial Sequence
  Description of Artificial Sequence: Synthetic oligonucleotide
acuuucgcgguuuacaaaa

SEQ ID NO: 653625 - RNA, 19 nt, Artificial Sequence
  Description of Artificial Sequence: Synthetic oligonucleotide
uaaauuccacuauguauga

SEQ ID NO: 653626 - RNA, 19 nt, Artificial Sequence
  Description of Artificial Sequence: Synthetic oligonucleotide
aaguagguaugaaucauca

SEQ ID NO: 653627 - RNA, 19 nt, Artificial Sequence
  Description of Artificial Sequence: Synthetic oligonucleotide
ucgcgguuuacaaaaguga

SEQ ID NO: 653628 - RNA, 19 nt, Artificial Sequence
  Description of Artificial Sequence: Synthetic oligonucleotide
guaaucuccccggaaaggg

SEQ ID NO: 653629 - RNA, 19 nt, Artificial Sequence
  Description of Artificial Sequence: Synthetic oligonucleotide
aguggcaucgggcccgacc

SEQ ID NO: 653630 - RNA, 19 nt, Artificial Sequence
  Description of Artificial Sequence: Synthetic oligonucleotide
aacccaaguagguaugaau

SEQ ID NO: 653631 - RNA, 19 nt, Artificial Sequence
  Description of Artificial Sequence: Synthetic oligonucleotide
ccuucuauacacaauuuag

SEQ ID NO: 653632 - RNA, 19 nt, Artificial Sequence
  Description of Artificial Sequence: Synthetic oligonucleotide
gauuccgccaccgaugaug

SEQ ID NO: 653633 - RNA, 19 nt, Artificial Sequence
  Description of Artificial Sequence: Synthetic oligonucleotide
aaauuccacuauguaugac

SEQ ID NO: 653634 - RNA, 19 nt, Artificial Sequence
  Description of Artificial Sequence: Synthetic oligonucleotide
uccgggguauuucaggaug

SEQ ID NO: 653635 - RNA, 19 nt, Artificial Sequence
  Description of Artificial Sequence: Synthetic oligonucleotide
cuauuuaccugggaggcgc

SEQ ID NO: 653636 - RNA, 19 nt, Artificial Sequence
  Description of Artificial Sequence: Synthetic oligonucleotide
uaagagcagguaaucuccc

SEQ ID NO: 653637 - RNA, 19 nt, Artificial Sequence
  Description of Artificial Sequence: Synthetic oligonucleotide
ucgguguaaagugaacucc

SEQ ID NO: 653638 - RNA, 19 nt, Artificial Sequence
  Description of Artificial Sequence: Synthetic oligonucleotide
gaugcaagccccacgauuc

SEQ ID NO: 653639 - RNA, 19 nt, Artificial Sequence
  Description of Artificial Sequence: Synthetic oligonucleotide
ugcaauaugguuccuucuu

SEQ ID NO: 653640 - RNA, 19 nt, Artificial Sequence
  Description of Artificial Sequence: Synthetic oligonucleotide
cacucaacucugaaauacg

SEQ ID NO: 653641 - RNA, 19 nt, Artificial Sequence
  Description of Artificial Sequence: Synthetic oligonucleotide
uucgguguaaagugaacuc

SEQ ID NO: 653642 - RNA, 19 nt, Artificial Sequence
  Description of Artificial Sequence: Synthetic oligonucleotide
augacaaagcuaccuguug

SEQ ID NO: 653643 - RNA, 19 nt, Artificial Sequence
  Description of Artificial Sequence: Synthetic oligonucleotide
auuuuggagcauacaacac

SEQ ID NO: 653644 - RNA, 19 nt, Artificial Sequence
  Description of Artificial Sequence: Synthetic oligonucleotide
auaguaaauuccacuaugu

SEQ ID NO: 653645 - RNA, 19 nt, Artificial Sequence
  Description of Artificial Sequence: Synthetic oligonucleotide
caagauagaaccaccugca

SEQ ID NO: 653646 - RNA, 19 nt, Artificial Sequence
  Description of Artificial Sequence: Synthetic oligonucleotide
cuguugguaguccacaauc

SEQ ID NO: 653647 - RNA, 19 nt, Artificial Sequence
  Description of Artificial Sequence: Synthetic oligonucleotide
acaagguagcccuuuucug

SEQ ID NO: 653648 - RNA, 19 nt, Artificial Sequence
  Description of Artificial Sequence: Synthetic oligonucleotide
agguaaucuccccggaaag

SEQ ID NO: 653649 - RNA, 19 nt, Artificial Sequence
  Description of Artificial Sequence: Synthetic oligonucleotide
gaagcggcuauccgggacc

SEQ ID NO: 653650 - RNA, 19 nt, Artificial Sequence
  Description of Artificial Sequence: Synthetic oligonucleotide
cuggaucacgucucaagcc

SEQ ID NO: 653651 - RNA, 19 nt, Artificial Sequence
  Description of Artificial Sequence: Synthetic oligonucleotide
guuccguccagucugguga

SEQ ID NO: 653652 - RNA, 19 nt, Artificial Sequence
  Description of Artificial Sequence: Synthetic oligonucleotide
uuucgcgguuuacaaaagu

SEQ ID NO: 653653 - RNA, 19 nt, Artificial Sequence
  Description of Artificial Sequence: Synthetic oligonucleotide
uuagugcguguguacaaga

SEQ ID NO: 653654 - RNA, 19 nt, Artificial Sequence
  Description of Artificial Sequence: Synthetic oligonucleotide
ggagaaauguccucgaaaa

SEQ ID NO: 653655 - RNA, 19 nt, Artificial Sequence
  Description of Artificial Sequence: Synthetic oligonucleotide
cacaugucacaacguagcg

SEQ ID NO: 653656 - RNA, 19 nt, Artificial Sequence
  Description of Artificial Sequence: Synthetic oligonucleotide
gaaagggaagcggcuaucc

SEQ ID NO: 653657 - RNA, 19 nt, Artificial Sequence
  Description of Artificial Sequence: Synthetic oligonucleotide
uguaacgcagggugggcca

SEQ ID NO: 653658 - RNA, 19 nt, Artificial Sequence
  Description of Artificial Sequence: Synthetic oligonucleotide
uaaucuccccggaaaggga

SEQ ID NO: 653659 - RNA, 19 nt, Artificial Sequence
  Description of Artificial Sequence: Synthetic oligonucleotide
ugcuauggagagccauuag

SEQ ID NO: 653660 - RNA, 19 nt, Artificial Sequence
  Description of Artificial Sequence: Synthetic oligonucleotide
cuuaaaggcgagcacggca

SEQ ID NO: 653661 - RNA, 19 nt, Artificial Sequence
  Description of Artificial Sequence: Synthetic oligonucleotide
acuauguaugacaccacug

SEQ ID NO: 653662 - RNA, 19 nt, Artificial Sequence
  Description of Artificial Sequence: Synthetic oligonucleotide
acgucucaagccuuggacu

SEQ ID NO: 653663 - RNA, 19 nt, Artificial Sequence
  Description of Artificial Sequence: Synthetic oligonucleotide
uagcaugugucauuucaaa

SEQ ID NO: 653664 - RNA, 19 nt, Artificial Sequence
  Description of Artificial Sequence: Synthetic oligonucleotide
uucgaagggucuguaaccu

SEQ ID NO: 653665 - RNA, 19 nt, Artificial Sequence
  Description of Artificial Sequence: Synthetic oligonucleotide
cacgucucaagccuuggac

SEQ ID NO: 653666 - RNA, 19 nt, Artificial Sequence
  Description of Artificial Sequence: Synthetic oligonucleotide
ucacaacguagcgacacug

SEQ ID NO: 653667 - RNA, 19 nt, Artificial Sequence
  Description of Artificial Sequence: Synthetic oligonucleotide
caaauuaauggaugggaua

SEQ ID NO: 653668 - RNA, 19 nt, Artificial Sequence
  Description of Artificial Sequence: Synthetic oligonucleotide
cucgaaaaguuuauaggaa

SEQ ID NO: 653669 - RNA, 19 nt, Artificial Sequence
  Description of Artificial Sequence: Synthetic oligonucleotide
uaggcccuagccaaauggu

SEQ ID NO: 653670 - RNA, 19 nt, Artificial Sequence
  Description of Artificial Sequence: Synthetic oligonucleotide
cuuagugcguguguacaag

SEQ ID NO: 653671 - RNA, 19 nt, Artificial Sequence
  Description of Artificial Sequence: Synthetic oligonucleotide
aguggagaaauguccucga

SEQ ID NO: 653672 - RNA, 19 nt, Artificial Sequence
  Description of Artificial Sequence: Synthetic oligonucleotide
gacaaucaauagccauuag

SEQ ID NO: 653673 - RNA, 19 nt, Artificial Sequence
  Description of Artificial Sequence: Synthetic oligonucleotide
caacguagcgacacugaac

SEQ ID NO: 653674 - RNA, 19 nt, Artificial Sequence
  Description of Artificial Sequence: Synthetic oligonucleotide
aaucgaaaguccgggguau

SEQ ID NO: 653675 - RNA, 19 nt, Artificial Sequence
  Description of Artificial Sequence: Synthetic oligonucleotide
caggauuuuaaacugcucu

SEQ ID NO: 653676 - RNA, 19 nt, Artificial Sequence
  Description of Artificial Sequence: Synthetic oligonucleotide
acggacaaucaauagccau

SEQ ID NO: 653677 - RNA, 19 nt, Artificial Sequence
  Description of Artificial Sequence: Synthetic oligonucleotide
aguauacggacaaucaaua

SEQ ID NO: 653678 - RNA, 19 nt, Artificial Sequence
  Description of Artificial Sequence: Synthetic oligonucleotide
cacgauuccgccaccgaug

SEQ ID NO: 653679 - RNA, 19 nt, Artificial Sequence
  Description of Artificial Sequence: Synthetic oligonucleotide
uuuaccugggaggcgcugc

SEQ ID NO: 653680 - RNA, 19 nt, Artificial Sequence
  Description of Artificial Sequence: Synthetic oligonucleotide
aaggcgagcacggcauuag

SEQ ID NO: 653681 - RNA, 19 nt, Artificial Sequence
  Description of Artificial Sequence: Synthetic oligonucleotide
aaaguccgggguauuucag

SEQ ID NO: 653682 - RNA, 19 nt, Artificial Sequence
  Description of Artificial Sequence: Synthetic oligonucleotide
ugaaguucgaagggucugu

SEQ ID NO: 653683 - RNA, 19 nt, Artificial Sequence
  Description of Artificial Sequence: Synthetic oligonucleotide
agaugcaagccccacgauu

SEQ ID NO: 653684 - RNA, 19 nt, Artificial Sequence
  Description of Artificial Sequence: Synthetic oligonucleotide
acaacguagcgacacugaa

SEQ ID NO: 653685 - RNA, 19 nt, Artificial Sequence
  Description of Artificial Sequence: Synthetic oligonucleotide
ccucgaaaaguuuauagga

SEQ ID NO: 653686 - RNA, 19 nt, Artificial Sequence
  Description of Artificial Sequence: Synthetic oligonucleotide
cuuucgcgguuuacaaaag

SEQ ID NO: 653687 - RNA, 19 nt, Artificial Sequence
  Description of Artificial Sequence: Synthetic oligonucleotide
augggauagcuuaauaaau

SEQ ID NO: 653688 - RNA, 19 nt, Artificial Sequence
  Description of Artificial Sequence: Synthetic oligonucleotide
augacaccacuguuccguc

SEQ ID NO: 653689 - RNA, 19 nt, Artificial Sequence
  Description of Artificial Sequence: Synthetic oligonucleotide
ggaugggauagcuuaauaa

SEQ ID NO: 653690 - RNA, 19 nt, Artificial Sequence
  Description of Artificial Sequence: Synthetic oligonucleotide
acgauuccgccaccgauga

SEQ ID NO: 653691 - RNA, 19 nt, Artificial Sequence
  Description of Artificial Sequence: Synthetic oligonucleotide
uagugcguguguacaagau

SEQ ID NO: 653692 - RNA, 19 nt, Artificial Sequence
  Description of Artificial Sequence: Synthetic oligonucleotide
ucccaguauacggacaauc

SEQ ID NO: 653693 - RNA, 19 nt, Artificial Sequence
  Description of Artificial Sequence: Synthetic oligonucleotide
agccauuagaccccugcaa

SEQ ID NO: 653694 - RNA, 19 nt, Artificial Sequence
  Description of Artificial Sequence: Synthetic oligonucleotide
gguaaucuccccggaaagg

SEQ ID NO: 653695 - RNA, 19 nt, Artificial Sequence
  Description of Artificial Sequence: Synthetic oligonucleotide
agauucagguuuauaguaa

SEQ ID NO: 653696 - RNA, 19 nt, Artificial Sequence
  Description of Artificial Sequence: Synthetic oligonucleotide
guaugacaccacuguuccg

SEQ ID NO: 653697 - RNA, 19 nt, Artificial Sequence
  Description of Artificial Sequence: Synthetic oligonucleotide
ucccgcuuaaaggcgagca

SEQ ID NO: 653698 - RNA, 19 nt, Artificial Sequence
  Description of Artificial Sequence: Synthetic oligonucleotide
agaucauagcaugugucau

SEQ ID NO: 653699 - RNA, 19 nt, Artificial Sequence
  Description of Artificial Sequence: Synthetic oligonucleotide
aacaucuuagugacauaaa

SEQ ID NO: 653700 - RNA, 19 nt, Artificial Sequence
  Description of Artificial Sequence: Synthetic oligonucleotide
ucacgucucaagccuugga

SEQ ID NO: 653701 - RNA, 19 nt, Artificial Sequence
  Description of Artificial Sequence: Synthetic oligonucleotide
accggauaaauguuuccuu

SEQ ID NO: 653702 - RNA, 19 nt, Artificial Sequence
  Description of Artificial Sequence: Synthetic oligonucleotide
acaugucacaacguagcga

SEQ ID NO: 653703 - RNA, 19 nt, Artificial Sequence
  Description of Artificial Sequence: Synthetic oligonucleotide
uguagaccucucucauaca

SEQ ID NO: 653704 - RNA, 19 nt, Artificial Sequence
  Description of Artificial Sequence: Synthetic oligonucleotide
cacaacaccaaucgaaagu

SEQ ID NO: 653705 - RNA, 19 nt, Artificial Sequence
  Description of Artificial Sequence: Synthetic oligonucleotide
ugacaccacuguuccgucc

SEQ ID NO: 653706 - RNA, 19 nt, Artificial Sequence
  Description of Artificial Sequence: Synthetic oligonucleotide
uaccuguugguaguccaca

SEQ ID NO: 653707 - RNA, 19 nt, Artificial Sequence
  Description of Artificial Sequence: Synthetic oligonucleotide
gaucacgucucaagccuug

SEQ ID NO: 653708 - RNA, 19 nt, Artificial Sequence
  Description of Artificial Sequence: Synthetic oligonucleotide
caggauugcagccacucaa

SEQ ID NO: 653709 - RNA, 19 nt, Artificial Sequence
  Description of Artificial Sequence: Synthetic oligonucleotide
ugcgccuucuauacacaau

SEQ ID NO: 653710 - RNA, 19 nt, Artificial Sequence
  Description of Artificial Sequence: Synthetic oligonucleotide
cacggcauuaggcccuagc

SEQ ID NO: 653711 - RNA, 19 nt, Artificial Sequence
  Description of Artificial Sequence: Synthetic oligonucleotide
ggcaccacccauguaacgc

SEQ ID NO: 653712 - RNA, 19 nt, Artificial Sequence
  Description of Artificial Sequence: Synthetic oligonucleotide
caguauacggacaaucaau

SEQ ID NO: 653713 - RNA, 19 nt, Artificial Sequence
  Description of Artificial Sequence: Synthetic oligonucleotide
gcagaugcaagccccacga

SEQ ID NO: 653714 - RNA, 19 nt, Artificial Sequence
  Description of Artificial Sequence: Synthetic oligonucleotide
uugcuauggagagccauua

SEQ ID NO: 653715 - RNA, 19 nt, Artificial Sequence
  Description of Artificial Sequence: Synthetic oligonucleotide
acggucugaguaaaguccu

SEQ ID NO: 653716 - RNA, 19 nt, Artificial Sequence
  Description of Artificial Sequence: Synthetic oligonucleotide
ccacucaacucugaaauac

SEQ ID NO: 653717 - RNA, 19 nt, Artificial Sequence
  Description of Artificial Sequence: Synthetic oligonucleotide
aggcgagcacggcauuagg

SEQ ID NO: 653718 - RNA, 19 nt, Artificial Sequence
  Description of Artificial Sequence: Synthetic oligonucleotide
aucacgucucaagccuugg

SEQ ID NO: 653719 - RNA, 19 nt, Artificial Sequence
  Description of Artificial Sequence: Synthetic oligonucleotide
cagacccaaauggaauaag

SEQ ID NO: 653720 - RNA, 19 nt, Artificial Sequence
  Description of Artificial Sequence: Synthetic oligonucleotide
cuucccgcuuaaaggcgag

SEQ ID NO: 653721 - RNA, 19 nt, Artificial Sequence
  Description of Artificial Sequence: Synthetic oligonucleotide
gguaugaaucaucaguaau

SEQ ID NO: 653722 - RNA, 19 nt, Artificial Sequence
  Description of Artificial Sequence: Synthetic oligonucleotide
accuucccgcuuaaaggcg

SEQ ID NO: 653723 - RNA, 19 nt, Artificial Sequence
  Description of Artificial Sequence: Synthetic oligonucleotide
cggaaagggacaauuugag

SEQ ID NO: 653724 - RNA, 19 nt, Artificial Sequence
  Description of Artificial Sequence: Synthetic oligonucleotide
cacaacguagcgacacuga

SEQ ID NO: 653725 - RNA, 19 nt, Artificial Sequence
  Description of Artificial Sequence: Synthetic oligonucleotide
ggaccggauaaauguuucc

SEQ ID NO: 653726 - RNA, 19 nt, Artificial Sequence
  Description of Artificial Sequence: Synthetic oligonucleotide
uccuaucaacacacacauc

SEQ ID NO: 653727 - RNA, 19 nt, Artificial Sequence
  Description of Artificial Sequence: Synthetic oligonucleotide
ggcacuuggcaccaacuca

SEQ ID NO: 653728 - RNA, 19 nt, Artificial Sequence
  Description of Artificial Sequence: Synthetic oligonucleotide
uccuuacuucuggaagggc

SEQ ID NO: 653729 - RNA, 19 nt, Artificial Sequence
  Description of Artificial Sequence: Synthetic oligonucleotide
gaccggauaaauguuuccu

SEQ ID NO: 653730 - RNA, 19 nt, Artificial Sequence
  Description of Artificial Sequence: Synthetic oligonucleotide
guaaaguccugcacauguc

SEQ ID NO: 653731 - RNA, 19 nt, Artificial Sequence
  Description of Artificial Sequence: Synthetic oligonucleotide
cuuuaagagcagguaaucu

SEQ ID NO: 653732 - RNA, 19 nt, Artificial Sequence
  Description of Artificial Sequence: Synthetic oligonucleotide
uauccgggaccggauaaau

SEQ ID NO: 653733 - RNA, 19 nt, Artificial Sequence
  Description of Artificial Sequence: Synthetic oligonucleotide
gccauuaggguuaguuucc

SEQ ID NO: 653734 - RNA, 19 nt, Artificial Sequence
  Description of Artificial Sequence: Synthetic oligonucleotide
ccgcuuaaaggcgagcacg

SEQ ID NO: 653735 - RNA, 19 nt, Artificial Sequence
  Description of Artificial Sequence: Synthetic oligonucleotide
caaucgaaaguccggggua

SEQ ID NO: 653736 - RNA, 19 nt, Artificial Sequence
  Description of Artificial Sequence: Synthetic oligonucleotide
uguccucgaaaaguuuaua

SEQ ID NO: 653737 - RNA, 19 nt, Artificial Sequence
  Description of Artificial Sequence: Synthetic oligonucleotide
auguuucaauaugcccauc

SEQ ID NO: 653738 - RNA, 19 nt, Artificial Sequence
  Description of Artificial Sequence: Synthetic oligonucleotide
cacuauguaugacaccacu

SEQ ID NO: 653739 - RNA, 19 nt, Artificial Sequence
  Description of Artificial Sequence: Synthetic oligonucleotide
cuucgguguaaagugaacu

SEQ ID NO: 653740 - RNA, 19 nt, Artificial Sequence
  Description of Artificial Sequence: Synthetic oligonucleotide
aauagccauuagaccccug

SEQ ID NO: 653741 - RNA, 19 nt, Artificial Sequence
  Description of Artificial Sequence: Synthetic oligonucleotide
gcccuagccaaauggugcc

SEQ ID NO: 653742 - RNA, 19 nt, Artificial Sequence
  Description of Artificial Sequence: Synthetic oligonucleotide
ucgaaaguccgggguauuu

SEQ ID NO: 653743 - RNA, 19 nt, Artificial Sequence
  Description of Artificial Sequence: Synthetic oligonucleotide
ccggaaagggacaauuuga

SEQ ID NO: 653744 - RNA, 19 nt, Artificial Sequence
  Description of Artificial Sequence: Synthetic oligonucleotide
cccaguauacggacaauca

SEQ ID NO: 653745 - RNA, 19 nt, Artificial Sequence
  Description of Artificial Sequence: Synthetic oligonucleotide
agcuucgguguaaagugaa

SEQ ID NO: 653746 - RNA, 19 nt, Artificial Sequence
  Description of Artificial Sequence: Synthetic oligonucleotide
cucucucgcccggaggaag

SEQ ID NO: 653747 - RNA, 19 nt, Artificial Sequence
  Description of Artificial Sequence: Synthetic oligonucleotide
ggaagcggcuauccgggac

SEQ ID NO: 653748 - RNA, 19 nt, Artificial Sequence
  Description of Artificial Sequence: Synthetic oligonucleotide
ucuccccggaaagggacaa

SEQ ID NO: 653749 - RNA, 19 nt, Artificial Sequence
  Description of Artificial Sequence: Synthetic oligonucleotide
gcaauguuuguaucacuua

SEQ ID NO: 653750 - RNA, 19 nt, Artificial Sequence
  Description of Artificial Sequence: Synthetic oligonucleotide
guggagaaauguccucgaa

SEQ ID NO: 653751 - RNA, 19 nt, Artificial Sequence
  Description of Artificial Sequence: Synthetic oligonucleotide
aggcacuuucgcgguuuac

SEQ ID NO: 653752 - RNA, 19 nt, Artificial Sequence
  Description of Artificial Sequence: Synthetic oligonucleotide
cacuuucgcgguuuacaaa

SEQ ID NO: 653753 - RNA, 19 nt, Artificial Sequence
  Description of Artificial Sequence: Synthetic oligonucleotide
gaaguucgaagggucugua

SEQ ID NO: 653754 - RNA, 19 nt, Artificial Sequence
  Description of Artificial Sequence: Synthetic oligonucleotide
cguagcgacacugaacuuc

SEQ ID NO: 653755 - RNA, 19 nt, Artificial Sequence
  Description of Artificial Sequence: Synthetic oligonucleotide
uucccgcuuaaaggcgagc

SEQ ID NO: 653756 - RNA, 19 nt, Artificial Sequence
  Description of Artificial Sequence: Synthetic oligonucleotide
auccgggaccggauaaaug

SEQ ID NO: 653757 - RNA, 19 nt, Artificial Sequence
  Description of Artificial Sequence: Synthetic oligonucleotide
ggguuaguuuccucuguaa

SEQ ID NO: 653758 - RNA, 19 nt, Artificial Sequence
  Description of Artificial Sequence: Synthetic oligonucleotide
aacgcagggugggccacau

SEQ ID NO: 653759 - RNA, 19 nt, Artificial Sequence
  Description of Artificial Sequence: Synthetic oligonucleotide
ccaguauacggacaaucaa

SEQ ID NO: 653760 - RNA, 19 nt, Artificial Sequence
  Description of Artificial Sequence: Synthetic oligonucleotide
cugcaauaugguuccuucu

SEQ ID NO: 653761 - RNA, 19 nt, Artificial Sequence
  Description of Artificial Sequence: Synthetic oligonucleotide
gggaccggauaaauguuuc

SEQ ID NO: 653762 - RNA, 19 nt, Artificial Sequence
  Description of Artificial Sequence: Synthetic oligonucleotide
uaacgcagggugggccaca

SEQ ID NO: 653763 - RNA, 19 nt, Artificial Sequence
  Description of Artificial Sequence: Synthetic oligonucleotide
cugcgccuucuauacacaa

SEQ ID NO: 653764 - RNA, 19 nt, Artificial Sequence
  Description of Artificial Sequence: Synthetic oligonucleotide
gcuauccgggaccggauaa

SEQ ID NO: 653765 - RNA, 19 nt, Artificial Sequence
  Description of Artificial Sequence: Synthetic oligonucleotide
gcuuaaaggcgagcacggc

SEQ ID NO: 653766 - RNA, 19 nt, Artificial Sequence
  Description of Artificial Sequence: Synthetic oligonucleotide
gcaagccccacgauuccgc

SEQ ID NO: 653767 - RNA, 19 nt, Artificial Sequence
  Description of Artificial Sequence: Synthetic oligonucleotide
gucacaacguagcgacacu

SEQ ID NO: 653768 - RNA, 19 nt, Artificial Sequence
  Description of Artificial Sequence: Synthetic oligonucleotide
gccauuagaccccugcaau

SEQ ID NO: 653769 - RNA, 19 nt, Artificial Sequence
  Description of Artificial Sequence: Synthetic oligonucleotide
ucccgcggacgcccgcucu

SEQ ID NO: 653770 - RNA, 19 nt, Artificial Sequence
  Description of Artificial Sequence: Synthetic oligonucleotide
gcguguguacaagaucuca

SEQ ID NO: 653771 - RNA, 19 nt, Artificial Sequence
  Description of Artificial Sequence: Synthetic oligonucleotide
acguagcgacacugaacuu

SEQ ID NO: 653772 - RNA, 19 nt, Artificial Sequence
  Description of Artificial Sequence: Synthetic oligonucleotide
aaguggcaucgggcccgac

SEQ ID NO: 653773 - RNA, 19 nt, Artificial Sequence
  Description of Artificial Sequence: Synthetic oligonucleotide
ucgggcccgaccgcaggca

SEQ ID NO: 653774 - RNA, 19 nt, Artificial Sequence
  Description of Artificial Sequence: Synthetic oligonucleotide
gcgccuucuauacacaauu

SEQ ID NO: 653775 - RNA, 19 nt, Artificial Sequence
  Description of Artificial Sequence: Synthetic oligonucleotide
cccgcuuaaaggcgagcac

SEQ ID NO: 653776 - RNA, 19 nt, Artificial Sequence
  Description of Artificial Sequence: Synthetic oligonucleotide
gcuucgguguaaagugaac

SEQ ID NO: 653777 - RNA, 19 nt, Artificial Sequence
  Description of Artificial Sequence: Synthetic oligonucleotide
gcaauaugguuccuucuuu

SEQ ID NO: 653778 - RNA, 19 nt, Artificial Sequence
  Description of Artificial Sequence: Synthetic oligonucleotide
ccaaucgaaaguccggggu

SEQ ID NO: 653779 - RNA, 19 nt, Artificial Sequence
  Description of Artificial Sequence: Synthetic oligonucleotide
cuauccgggaccggauaaa

SEQ ID NO: 653780 - RNA, 19 nt, Artificial Sequence
  Description of Artificial Sequence: Synthetic oligonucleotide
aucccaguauacggacaau

SEQ ID NO: 653781 - RNA, 19 nt, Artificial Sequence
  Description of Artificial Sequence: Synthetic oligonucleotide
ccauuagaccccugcaaua

SEQ ID NO: 653782 - RNA, 19 nt, Artificial Sequence
  Description of Artificial Sequence: Synthetic oligonucleotide
ccaccgaugaugacuauau

SEQ ID NO: 653783 - RNA, 19 nt, Artificial Sequence
  Description of Artificial Sequence: Synthetic oligonucleotide
ccuucccgcuuaaaggcga

SEQ ID NO: 653784 - RNA, 19 nt, Artificial Sequence
  Description of Artificial Sequence: Synthetic oligonucleotide
agcggcuauccgggaccgg

SEQ ID NO: 653785 - RNA, 19 nt, Artificial Sequence
  Description of Artificial Sequence: Synthetic oligonucleotide
ccgggguauuucaggauga

SEQ ID NO: 653786 - RNA, 19 nt, Artificial Sequence
  Description of Artificial Sequence: Synthetic oligonucleotide
cccgaccgcaggcaccacc

SEQ ID NO: 653787 - RNA, 19 nt, Artificial Sequence
  Description of Artificial Sequence: Synthetic oligonucleotide
gcggcuauccgggaccgga

SEQ ID NO: 653788 - RNA, 19 nt, Artificial Sequence
  Description of Artificial Sequence: Synthetic oligonucleotide
cauuaggcccuagccaaau

SEQ ID NO: 653789 - RNA, 19 nt, Artificial Sequence
  Description of Artificial Sequence: Synthetic oligonucleotide
caauagccauuagaccccu

SEQ ID NO: 653790 - RNA, 19 nt, Artificial Sequence
  Description of Artificial Sequence: Synthetic oligonucleotide
ccggauaaauguuuccuuu

SEQ ID NO: 653791 - RNA, 19 nt, Artificial Sequence
  Description of Artificial Sequence: Synthetic oligonucleotide
ggcuauccgggaccggaua

SEQ ID NO: 653792 - RNA, 19 nt, Artificial Sequence
  Description of Artificial Sequence: Synthetic oligonucleotide
ggcaucgggcccgaccgca

SEQ ID NO: 653793 - RNA, 19 nt, Artificial Sequence
  Description of Artificial Sequence: Synthetic oligonucleotide
ccgcucucucgcccggagg

SEQ ID NO: 653794 - RNA, 19 nt, Artificial Sequence
  Description of Artificial Sequence: Synthetic oligonucleotide
gccaccgaugaugacuaua

SEQ ID NO: 653795 - RNA, 19 nt, Artificial Sequence
  Description of Artificial Sequence: Synthetic oligonucleotide
gggaagcggcuauccggga

SEQ ID NO: 653796 - RNA, 19 nt, Artificial Sequence
  Description of Artificial Sequence: Synthetic oligonucleotide
ccgccaccgaugaugacua

SEQ ID NO: 653797 - RNA, 19 nt, Artificial Sequence
  Description of Artificial Sequence: Synthetic oligonucleotide
agcacggcauuaggcccua

SEQ ID NO: 653798 - RNA, 19 nt, Artificial Sequence
  Description of Artificial Sequence: Synthetic oligonucleotide
gcaucgggcccgaccgcag

SEQ ID NO: 653799 - RNA, 19 nt, Artificial Sequence
  Description of Artificial Sequence: Synthetic oligonucleotide
cagaugcaagccccacgau

SEQ ID NO: 653800 - RNA, 19 nt, Artificial Sequence
  Description of Artificial Sequence: Synthetic oligonucleotide
ccacuguuccguccagucu

SEQ ID NO: 653801 - RNA, 19 nt, Artificial Sequence
  Description of Artificial Sequence: Synthetic oligonucleotide
ggaucacgucucaagccuu

SEQ ID NO: 653802 - RNA, 19 nt, Artificial Sequence
  Description of Artificial Sequence: Synthetic oligonucleotide
gccccacgauuccgccacc

SEQ ID NO: 653803 - RNA, 19 nt, Artificial Sequence
  Description of Artificial Sequence: Synthetic oligonucleotide
gcucucucgcccggaggaa

SEQ ID NO: 653804 - RNA, 19 nt, Artificial Sequence
  Description of Artificial Sequence: Synthetic oligonucleotide
cgggaccggauaaauguuu

SEQ ID NO: 653805 - RNA, 19 nt, Artificial Sequence
  Description of Artificial Sequence: Synthetic oligonucleotide
ccgggaccggauaaauguu

SEQ ID NO: 653806 - RNA, 19 nt, Artificial Sequence
  Description of Artificial Sequence: Synthetic oligonucleotide
ggucccgcggacgcccgcu

SEQ ID NO: 653807 - RNA, 19 nt, Artificial Sequence
  Description of Artificial Sequence: Synthetic oligonucleotide
cuccccggaaagggacaau

SEQ ID NO: 653808 - RNA, 19 nt, Artificial Sequence
  Description of Artificial Sequence: Synthetic oligonucleotide
gcccgaccgcaggcaccac

SEQ ID NO: 653809 - RNA, 19 nt, Artificial Sequence
  Description of Artificial Sequence: Synthetic oligonucleotide
ccgcggacgcccgcucucu

SEQ ID NO: 653810 - RNA, 19 nt, Artificial Sequence
  Description of Artificial Sequence: Synthetic oligonucleotide
cgauuccgccaccgaugau

SEQ ID NO: 653811 - RNA, 19 nt, Artificial Sequence
  Description of Artificial Sequence: Synthetic oligonucleotide
cgcccggaggaagccccua

SEQ ID NO: 653812 - RNA, 19 nt, Artificial Sequence
  Description of Artificial Sequence: Synthetic oligonucleotide
agugagagcaaauaucugc

SEQ ID NO: 653813 - RNA, 19 nt, Artificial Sequence
  Description of Artificial Sequence: Synthetic oligonucleotide
auguuaauaccauaggugg

SEQ ID NO: 653814 - RNA, 19 nt, Artificial Sequence
  Description of Artificial Sequence: Synthetic oligonucleotide
ugcaagaaagucaucaagg

SEQ ID NO: 653815 - RNA, 19 nt, Artificial Sequence
  Description of Artificial Sequence: Synthetic oligonucleotide
aacgugaucucucaucugg

SEQ ID NO: 653816 - RNA, 19 nt, Artificial Sequence
  Description of Artificial Sequence: Synthetic oligonucleotide
aaacuagugauacgggugg

SEQ ID NO: 653817 - RNA, 19 nt, Artificial Sequence
  Description of Artificial Sequence: Synthetic oligonucleotide
uacaauaucacuucucuca

SEQ ID NO: 653818 - RNA, 19 nt, Artificial Sequence
  Description of Artificial Sequence: Synthetic oligonucleotide
uuaauuuugcagcaguggc

SEQ ID NO: 653819 - RNA, 19 nt, Artificial Sequence
  Description of Artificial Sequence: Synthetic oligonucleotide
gauaacguucuccuuagcg

SEQ ID NO: 653820 - RNA, 19 nt, Artificial Sequence
  Description of Artificial Sequence: Synthetic oligonucleotide
aauguuaauaccauaggug

SEQ ID NO: 653821 - RNA, 19 nt, Artificial Sequence
  Description of Artificial Sequence: Synthetic oligonucleotide
aacauuaggguaccccacc

SEQ ID NO: 653822 - RNA, 19 nt, Artificial Sequence
  Description of Artificial Sequence: Synthetic oligonucleotide
uugguagacacaaaggaug

SEQ ID NO: 653823 - RNA, 19 nt, Artificial Sequence
  Description of Artificial Sequence: Synthetic oligonucleotide
uaauguuaauaccauaggu

SEQ ID NO: 653824 - RNA, 19 nt, Artificial Sequence
  Description of Artificial Sequence: Synthetic oligonucleotide
uccagaucuagccucaggg

SEQ ID NO: 653825 - RNA, 19 nt, Artificial Sequence
  Description of Artificial Sequence: Synthetic oligonucleotide
uucuauugagccaaguuca

SEQ ID NO: 653826 - RNA, 19 nt, Artificial Sequence
  Description of Artificial Sequence: Synthetic oligonucleotide
auaacguucuccuuagcgg

SEQ ID NO: 653827 - RNA, 19 nt, Artificial Sequence
  Description of Artificial Sequence: Synthetic oligonucleotide
gaaguuaucuuucucugcc

SEQ ID NO: 653828 - RNA, 19 nt, Artificial Sequence
  Description of Artificial Sequence: Synthetic oligonucleotide
ucaucuucgucacuugugg

SEQ ID NO: 653829 - RNA, 19 nt, Artificial Sequence
  Description of Artificial Sequence: Synthetic oligonucleotide
aaagggagucaauaucaac

SEQ ID NO: 653830 - RNA, 19 nt, Artificial Sequence
  Description of Artificial Sequence: Synthetic oligonucleotide
aaauccucacaucuaaaca

SEQ ID NO: 653831 - RNA, 19 nt, Artificial Sequence
  Description of Artificial Sequence: Synthetic oligonucleotide
auuaggguaccccaccagc

SEQ ID NO: 653832 - RNA, 19 nt, Artificial Sequence
  Description of Artificial Sequence: Synthetic oligonucleotide
ccaaauuucguucaaaggg

SEQ ID NO: 653833 - RNA, 19 nt, Artificial Sequence
  Description of Artificial Sequence: Synthetic oligonucleotide
gaaaauaaccuucacaccu

SEQ ID NO: 653834 - RNA, 19 nt, Artificial Sequence
  Description of Artificial Sequence: Synthetic oligonucleotide
ugcuuugguagacacaaag

SEQ ID NO: 653835 - RNA, 19 nt, Artificial Sequence
  Description of Artificial Sequence: Synthetic oligonucleotide
acuacaauaucacuucucu

SEQ ID NO: 653836 - RNA, 19 nt, Artificial Sequence
  Description of Artificial Sequence: Synthetic oligonucleotide
gacauaguccuucaggaug

SEQ ID NO: 653837 - RNA, 19 nt, Artificial Sequence
  Description of Artificial Sequence: Synthetic oligonucleotide
auagccaucauugaguuca

SEQ ID NO: 653838 - RNA, 19 nt, Artificial Sequence
  Description of Artificial Sequence: Synthetic oligonucleotide
uuugauaccagguggcuac

SEQ ID NO: 653839 - RNA, 19 nt, Artificial Sequence
  Description of Artificial Sequence: Synthetic oligonucleotide
uggcaaacuagugauacgg

SEQ ID NO: 653840 - RNA, 19 nt, Artificial Sequence
  Description of Artificial Sequence: Synthetic oligonucleotide
ucugcguggaauuucauuc

SEQ ID NO: 653841 - RNA, 19 nt, Artificial Sequence
  Description of Artificial Sequence: Synthetic oligonucleotide
acaggagaggguuucgagc

SEQ ID NO: 653842 - RNA, 19 nt, Artificial Sequence
  Description of Artificial Sequence: Synthetic oligonucleotide
aauaucugcguggaauuuc

SEQ ID NO: 653843 - RNA, 19 nt, Artificial Sequence
  Description of Artificial Sequence: Synthetic oligonucleotide
aaaguccaaauuucguuca

SEQ ID NO: 653844 - RNA, 19 nt, Artificial Sequence
  Description of Artificial Sequence: Synthetic oligonucleotide
cucgcaugcauccauaagc

SEQ ID NO: 653845 - RNA, 19 nt, Artificial Sequence
  Description of Artificial Sequence: Synthetic oligonucleotide
cuuagcgguaucuaccucc

SEQ ID NO: 653846 - RNA, 19 nt, Artificial Sequence
  Description of Artificial Sequence: Synthetic oligonucleotide
uguaacgugcggaucgagg

SEQ ID NO: 653847 - RNA, 19 nt, Artificial Sequence
  Description of Artificial Sequence: Synthetic oligonucleotide
ucccaauugggucuccucg

SEQ ID NO: 653848 - RNA, 19 nt, Artificial Sequence
  Description of Artificial Sequence: Synthetic oligonucleotide
aaaagguuuugucgaccac

SEQ ID NO: 653849 - RNA, 19 nt, Artificial Sequence
  Description of Artificial Sequence: Synthetic oligonucleotide
uuuagagugaagaguuucu

SEQ ID NO: 653850 - RNA, 19 nt, Artificial Sequence
  Description of Artificial Sequence: Synthetic oligonucleotide
cuucuauugagccaaguuc

SEQ ID NO: 653851 - RNA, 19 nt, Artificial Sequence
  Description of Artificial Sequence: Synthetic oligonucleotide
uguuaauaccauagguggc

SEQ ID NO: 653852 - RNA, 19 nt, Artificial Sequence
  Description of Artificial Sequence: Synthetic oligonucleotide
uuggucagcgcucugacgu

SEQ ID NO: 653853 - RNA, 19 nt, Artificial Sequence
  Description of Artificial Sequence: Synthetic oligonucleotide
agagccuucgacuuuucuc

SEQ ID NO: 653854 - RNA, 19 nt, Artificial Sequence
  Description of Artificial Sequence: Synthetic oligonucleotide
aagacgaccccagucauag

SEQ ID NO: 653855 - RNA, 19 nt, Artificial Sequence
  Description of Artificial Sequence: Synthetic oligonucleotide
aucuucgucacuuguggac

SEQ ID NO: 653856 - RNA, 19 nt, Artificial Sequence
  Description of Artificial Sequence: Synthetic oligonucleotide
uggucaauugggaggaucc

SEQ ID NO: 653857 - RNA, 19 nt, Artificial Sequence
  Description of Artificial Sequence: Synthetic oligonucleotide
uauugagccaaguucacau

SEQ ID NO: 653858 - RNA, 19 nt, Artificial Sequence
  Description of Artificial Sequence: Synthetic oligonucleotide
aguucacucgugugcaacc

SEQ ID NO: 653859 - RNA, 19 nt, Artificial Sequence
  Description of Artificial Sequence: Synthetic oligonucleotide
uagugauacggguggaacg

SEQ ID NO: 653860 - RNA, 19 nt, Artificial Sequence
  Description of Artificial Sequence: Synthetic oligonucleotide
ucgguauagacaagaacug

SEQ ID NO: 653861 - RNA, 19 nt, Artificial Sequence
  Description of Artificial Sequence: Synthetic oligonucleotide
ucuaaaacaugucguggga

SEQ ID NO: 653862 - RNA, 19 nt, Artificial Sequence
  Description of Artificial Sequence: Synthetic oligonucleotide
aaaugcuugguguggccag

SEQ ID NO: 653863 - RNA, 19 nt, Artificial Sequence
  Description of Artificial Sequence: Synthetic oligonucleotide
caaacuagugauacgggug

SEQ ID NO: 653864 - RNA, 19 nt, Artificial Sequence
  Description of Artificial Sequence: Synthetic oligonucleotide
aguugcaagaaagucauca

SEQ ID NO: 653865 - RNA, 19 nt, Artificial Sequence
  Description of Artificial Sequence: Synthetic oligonucleotide
uucuccgcuacaaacucag

SEQ ID NO: 653866 - RNA, 19 nt, Artificial Sequence
  Description of Artificial Sequence: Synthetic oligonucleotide
caaauccucacaucuaaac

SEQ ID NO: 653867 - RNA, 19 nt, Artificial Sequence
  Description of Artificial Sequence: Synthetic oligonucleotide
aacgccacaggaucucuuc

SEQ ID NO: 653868 - RNA, 19 nt, Artificial Sequence
  Description of Artificial Sequence: Synthetic oligonucleotide
acuaagugagagcaaauau

SEQ ID NO: 653869 - RNA, 19 nt, Artificial Sequence
  Description of Artificial Sequence: Synthetic oligonucleotide
ucagggagcacgaacuuga

SEQ ID NO: 653870 - RNA, 19 nt, Artificial Sequence
  Description of Artificial Sequence: Synthetic oligonucleotide
ugaauccucgcaugcaucc

SEQ ID NO: 653871 - RNA, 19 nt, Artificial Sequence
  Description of Artificial Sequence: Synthetic oligonucleotide
agcucuuaccaacauuagg

SEQ ID NO: 653872 - RNA, 19 nt, Artificial Sequence
  Description of Artificial Sequence: Synthetic oligonucleotide
agcgguaucuaccuccuuc

SEQ ID NO: 653873 - RNA, 19 nt, Artificial Sequence
  Description of Artificial Sequence: Synthetic oligonucleotide
gacgaccccagucauagcc

SEQ ID NO: 653874 - RNA, 19 nt, Artificial Sequence
  Description of Artificial Sequence: Synthetic oligonucleotide
gucgguaugacgcuggcug

SEQ ID NO: 653875 - RNA, 19 nt, Artificial Sequence
  Description of Artificial Sequence: Synthetic oligonucleotide
ucgcaugcauccauaagcc

SEQ ID NO: 653876 - RNA, 19 nt, Artificial Sequence
  Description of Artificial Sequence: Synthetic oligonucleotide
guccaaauuucguucaaag

SEQ ID NO: 653877 - RNA, 19 nt, Artificial Sequence
  Description of Artificial Sequence: Synthetic oligonucleotide
ugaugguugagcucuuacc

SEQ ID NO: 653878 - RNA, 19 nt, Artificial Sequence
  Description of Artificial Sequence: Synthetic oligonucleotide
aggcguggcagacacagac

SEQ ID NO: 653879 - RNA, 19 nt, Artificial Sequence
  Description of Artificial Sequence: Synthetic oligonucleotide
uggacuacaauaucacuuc

SEQ ID NO: 653880 - RNA, 19 nt, Artificial Sequence
  Description of Artificial Sequence: Synthetic oligonucleotide
ggauguaacgugcggaucg

SEQ ID NO: 653881 - RNA, 19 nt, Artificial Sequence
  Description of Artificial Sequence: Synthetic oligonucleotide
gauuaagacgaccccaguc

SEQ ID NO: 653882 - RNA, 19 nt, Artificial Sequence
  Description of Artificial Sequence: Synthetic oligonucleotide
guaacgugcggaucgaggc

SEQ ID NO: 653883 - RNA, 19 nt, Artificial Sequence
  Description of Artificial Sequence: Synthetic oligonucleotide
uuaggguaccccaccagcc

SEQ ID NO: 653884 - RNA, 19 nt, Artificial Sequence
  Description of Artificial Sequence: Synthetic oligonucleotide
aaagcugaccagaaaauaa

SEQ ID NO: 653885 - RNA, 19 nt, Artificial Sequence
  Description of Artificial Sequence: Synthetic oligonucleotide
cucgguauagacaagaacu

SEQ ID NO: 653886 - RNA, 19 nt, Artificial Sequence
  Description of Artificial Sequence: Synthetic oligonucleotide
uauuaagcuucuccgcuac

SEQ ID NO: 653887 - RNA, 19 nt, Artificial Sequence
  Description of Artificial Sequence: Synthetic oligonucleotide
uggagauuaagacgacccc

SEQ ID NO: 653888 - RNA, 19 nt, Artificial Sequence
  Description of Artificial Sequence: Synthetic oligonucleotide
ugucgugggauauucuggc

SEQ ID NO: 653889 - RNA, 19 nt, Artificial Sequence
  Description of Artificial Sequence: Synthetic oligonucleotide
uugucgaccacauuuucaa

SEQ ID NO: 653890 - RNA, 19 nt, Artificial Sequence
  Description of Artificial Sequence: Synthetic oligonucleotide
uaacguucuccuuagcggu

SEQ ID NO: 653891 - RNA, 19 nt, Artificial Sequence
  Description of Artificial Sequence: Synthetic oligonucleotide
uccuucaggauguaacgug

SEQ ID NO: 653892 - RNA, 19 nt, Artificial Sequence
  Description of Artificial Sequence: Synthetic oligonucleotide
uguuuaucaggauaacguu

SEQ ID NO: 653893 - RNA, 19 nt, Artificial Sequence
  Description of Artificial Sequence: Synthetic oligonucleotide
uaguguugaugguugagcu

SEQ ID NO: 653894 - RNA, 19 nt, Artificial Sequence
  Description of Artificial Sequence: Synthetic oligonucleotide
gauauuaagcuucuccgcu

SEQ ID NO: 653895 - RNA, 19 nt, Artificial Sequence
  Description of Artificial Sequence: Synthetic oligonucleotide
cucacaucuaaacaggaga

SEQ ID NO: 653896 - RNA, 19 nt, Artificial Sequence
  Description of Artificial Sequence: Synthetic oligonucleotide
gauggcaucaccaggccug

SEQ ID NO: 653897 - RNA, 19 nt, Artificial Sequence
  Description of Artificial Sequence: Synthetic oligonucleotide
uuguggacuccucacuaag

SEQ ID NO: 653898 - RNA, 19 nt, Artificial Sequence
  Description of Artificial Sequence: Synthetic oligonucleotide
aguguugaugguugagcuc

SEQ ID NO: 653899 - RNA, 19 nt, Artificial Sequence
  Description of Artificial Sequence: Synthetic oligonucleotide
ucgguaggggucuucaucu

SEQ ID NO: 653900 - RNA, 19 nt, Artificial Sequence
  Description of Artificial Sequence: Synthetic oligonucleotide
caugucgugggauauucug

SEQ ID NO: 653901 - RNA, 19 nt, Artificial Sequence
  Description of Artificial Sequence: Synthetic oligonucleotide
ugcggaucgaggcuggucu

SEQ ID NO: 653902 - RNA, 19 nt, Artificial Sequence
  Description of Artificial Sequence: Synthetic oligonucleotide
uugagccaaguucacauau

SEQ ID NO: 653903 - RNA, 19 nt, Artificial Sequence
  Description of Artificial Sequence: Synthetic oligonucleotide
auccauaagccgucaacag

SEQ ID NO: 653904 - RNA, 19 nt, Artificial Sequence
  Description of Artificial Sequence: Synthetic oligonucleotide
agaucuagccucagggagc

SEQ ID NO: 653905 - RNA, 19 nt, Artificial Sequence
  Description of Artificial Sequence: Synthetic oligonucleotide
ucuucuagccggacaagcu

SEQ ID NO: 653906 - RNA, 19 nt, Artificial Sequence
  Description of Artificial Sequence: Synthetic oligonucleotide
uacggguggaacgugaucu

SEQ ID NO: 653907 - RNA, 19 nt, Artificial Sequence
  Description of Artificial Sequence: Synthetic oligonucleotide
uuaggaaguuaucuuucuc

SEQ ID NO: 653908 - RNA, 19 nt, Artificial Sequence
  Description of Artificial Sequence: Synthetic oligonucleotide
cagcacgucaccaagucug

SEQ ID NO: 653909 - RNA, 19 nt, Artificial Sequence
  Description of Artificial Sequence: Synthetic oligonucleotide
uccguuacugacuggagau

SEQ ID NO: 653910 - RNA, 19 nt, Artificial Sequence
  Description of Artificial Sequence: Synthetic oligonucleotide
ugagucugaugccggauga

SEQ ID NO: 653911 - RNA, 19 nt, Artificial Sequence
  Description of Artificial Sequence: Synthetic oligonucleotide
acgucuccauuuuaggaag

SEQ ID NO: 653912 - RNA, 19 nt, Artificial Sequence
  Description of Artificial Sequence: Synthetic oligonucleotide
cuccuuagcgguaucuacc

SEQ ID NO: 653913 - RNA, 19 nt, Artificial Sequence
  Description of Artificial Sequence: Synthetic oligonucleotide
guccuuuuagagugaagag

SEQ ID NO: 653914 - RNA, 19 nt, Artificial Sequence
  Description of Artificial Sequence: Synthetic oligonucleotide
aucuaaacuagaguuuuca

SEQ ID NO: 653915 - RNA, 19 nt, Artificial Sequence
  Description of Artificial Sequence: Synthetic oligonucleotide
uagccggacaagcugacgu

SEQ ID NO: 653916 - RNA, 19 nt, Artificial Sequence
  Description of Artificial Sequence: Synthetic oligonucleotide
gauaguguugaugguugag

SEQ ID NO: 653917 - RNA, 19 nt, Artificial Sequence
  Description of Artificial Sequence: Synthetic oligonucleotide
ucuauugagccaaguucac

SEQ ID NO: 653918 - RNA, 19 nt, Artificial Sequence
  Description of Artificial Sequence: Synthetic oligonucleotide
gaguacccggcccagagac

SEQ ID NO: 653919 - RNA, 19 nt, Artificial Sequence
  Description of Artificial Sequence: Synthetic oligonucleotide
uugaugguugagcucuuac

SEQ ID NO: 653920 - RNA, 19 nt, Artificial Sequence
  Description of Artificial Sequence: Synthetic oligonucleotide
cuucaggauguaacgugcg

SEQ ID NO: 653921 - RNA, 19 nt, Artificial Sequence
  Description of Artificial Sequence: Synthetic oligonucleotide
gucaugaauccucgcaugc

SEQ ID NO: 653922 - RNA, 19 nt, Artificial Sequence
  Description of Artificial Sequence: Synthetic oligonucleotide
ucuuaccaacauuagggua

SEQ ID NO: 653923 - RNA, 19 nt, Artificial Sequence
  Description of Artificial Sequence: Synthetic oligonucleotide
cugacgucuccauuuuagg

SEQ ID NO: 653924 - RNA, 19 nt, Artificial Sequence
  Description of Artificial Sequence: Synthetic oligonucleotide
augaguacccggcccagag

SEQ ID NO: 653925 - RNA, 19 nt, Artificial Sequence
  Description of Artificial Sequence: Synthetic oligonucleotide
ucaggauguaacgugcgga

SEQ ID NO: 653926 - RNA, 19 nt, Artificial Sequence
  Description of Artificial Sequence: Synthetic oligonucleotide
ucuccuuagcgguaucuac

SEQ ID NO: 653927 - RNA, 19 nt, Artificial Sequence
  Description of Artificial Sequence: Synthetic oligonucleotide
caaguucugcaguugcaag

SEQ ID NO: 653928 - RNA, 19 nt, Artificial Sequence
  Description of Artificial Sequence: Synthetic oligonucleotide
acuaucuggacuacaauau

SEQ ID NO: 653929 - RNA, 19 nt, Artificial Sequence
  Description of Artificial Sequence: Synthetic oligonucleotide
augauaguguugaugguug

SEQ ID NO: 653930 - RNA, 19 nt, Artificial Sequence
  Description of Artificial Sequence: Synthetic oligonucleotide
uccuuagcgguaucuaccu

SEQ ID NO: 653931 - RNA, 19 nt, Artificial Sequence
  Description of Artificial Sequence: Synthetic oligonucleotide
ugauacggguggaacguga

SEQ ID NO: 653932 - RNA, 19 nt, Artificial Sequence
  Description of Artificial Sequence: Synthetic oligonucleotide
gucuccucgguauagacaa

SEQ ID NO: 653933 - RNA, 19 nt, Artificial Sequence
  Description of Artificial Sequence: Synthetic oligonucleotide
accaggagucgguaugacg

SEQ ID NO: 653934 - RNA, 19 nt, Artificial Sequence
  Description of Artificial Sequence: Synthetic oligonucleotide
aacaugucugccagucuuc

SEQ ID NO: 653935 - RNA, 19 nt, Artificial Sequence
  Description of Artificial Sequence: Synthetic oligonucleotide
gcuucuaaaacaugucgug

SEQ ID NO: 653936 - RNA, 19 nt, Artificial Sequence
  Description of Artificial Sequence: Synthetic oligonucleotide
ucgugggauauucuggcaa

SEQ ID NO: 653937 - RNA, 19 nt, Artificial Sequence
  Description of Artificial Sequence: Synthetic oligonucleotide
uggaacgugaucucucauc

SEQ ID NO: 653938 - RNA, 19 nt, Artificial Sequence
  Description of Artificial Sequence: Synthetic oligonucleotide
uggacuccucacuaaguga

SEQ ID NO: 653939 - RNA, 19 nt, Artificial Sequence
  Description of Artificial Sequence: Synthetic oligonucleotide
cuucuagccggacaagcug

SEQ ID NO: 653940 - RNA, 19 nt, Artificial Sequence
  Description of Artificial Sequence: Synthetic oligonucleotide
agugauacggguggaacgu

SEQ ID NO: 653941 - RNA, 19 nt, Artificial Sequence
  Description of Artificial Sequence: Synthetic oligonucleotide
ucuucgucacuuguggacu

SEQ ID NO: 653942 - RNA, 19 nt, Artificial Sequence
  Description of Artificial Sequence: Synthetic oligonucleotide
acgccacaggaucucuucc

SEQ ID NO: 653943 - RNA, 19 nt, Artificial Sequence
  Description of Artificial Sequence: Synthetic oligonucleotide
caugcauccauaagccguc

SEQ ID NO: 653944 - RNA, 19 nt, Artificial Sequence
  Description of Artificial Sequence: Synthetic oligonucleotide
ugccggaugaguacccggc

SEQ ID NO: 653945 - RNA, 19 nt, Artificial Sequence
  Description of Artificial Sequence: Synthetic oligonucleotide
aauuucguucaaagggagu

SEQ ID NO: 653946 - RNA, 19 nt, Artificial Sequence
  Description of Artificial Sequence: Synthetic oligonucleotide
uccaugugcugucaugaau

SEQ ID NO: 653947 - RNA, 19 nt, Artificial Sequence
  Description of Artificial Sequence: Synthetic oligonucleotide
uuaccaacauuaggguacc

SEQ ID NO: 653948 - RNA, 19 nt, Artificial Sequence
  Description of Artificial Sequence: Synthetic oligonucleotide
uauuucuguugccaugcuu

SEQ ID NO: 653949 - RNA, 19 nt, Artificial Sequence
  Description of Artificial Sequence: Synthetic oligonucleotide
gagccuucgacuuuucucu

SEQ ID NO: 653950 - RNA, 19 nt, Artificial Sequence
  Description of Artificial Sequence: Synthetic oligonucleotide
aagccgucaacagcucuuc

SEQ ID NO: 653951 - RNA, 19 nt, Artificial Sequence
  Description of Artificial Sequence: Synthetic oligonucleotide
uaauuccugcuuugauacc

SEQ ID NO: 653952 - RNA, 19 nt, Artificial Sequence
  Description of Artificial Sequence: Synthetic oligonucleotide
auauuaagcuucuccgcua

SEQ ID NO: 653953 - RNA, 19 nt, Artificial Sequence
  Description of Artificial Sequence: Synthetic oligonucleotide
uuggaggucgguagggguc

SEQ ID NO: 653954 - RNA, 19 nt, Artificial Sequence
  Description of Artificial Sequence: Synthetic oligonucleotide
gacagcaguccagaucuag

SEQ ID NO: 653955 - RNA, 19 nt, Artificial Sequence
  Description of Artificial Sequence: Synthetic oligonucleotide
ggcaguacaacaguuuccc

SEQ ID NO: 653956 - RNA, 19 nt, Artificial Sequence
  Description of Artificial Sequence: Synthetic oligonucleotide
ucuaaacaggagaggguuu

SEQ ID NO: 653957 - RNA, 19 nt, Artificial Sequence
  Description of Artificial Sequence: Synthetic oligonucleotide
ggaaguuaucuuucucugc

SEQ ID NO: 653958 - RNA, 19 nt, Artificial Sequence
  Description of Artificial Sequence: Synthetic oligonucleotide
caggagaggguuucgagca

SEQ ID NO: 653959 - RNA, 19 nt, Artificial Sequence
  Description of Artificial Sequence: Synthetic oligonucleotide
ucagcacgucaccaagucu

SEQ ID NO: 653960 - RNA, 19 nt, Artificial Sequence
  Description of Artificial Sequence: Synthetic oligonucleotide
uaagccgucaacagcucuu

SEQ ID NO: 653961 - RNA, 19 nt, Artificial Sequence
  Description of Artificial Sequence: Synthetic oligonucleotide
auacggguggaacgugauc

SEQ ID NO: 653962 - RNA, 19 nt, Artificial Sequence
  Description of Artificial Sequence: Synthetic oligonucleotide
aaguccaaauuucguucaa

SEQ ID NO: 653963 - RNA, 19 nt, Artificial Sequence
  Description of Artificial Sequence: Synthetic oligonucleotide
auaagccgucaacagcucu

SEQ ID NO: 653964 - RNA, 19 nt, Artificial Sequence
  Description of Artificial Sequence: Synthetic oligonucleotide
aagugagagcaaauaucug

SEQ ID NO: 653965 - RNA, 19 nt, Artificial Sequence
  Description of Artificial Sequence: Synthetic oligonucleotide
uaacgugcggaucgaggcu

SEQ ID NO: 653966 - RNA, 19 nt, Artificial Sequence
  Description of Artificial Sequence: Synthetic oligonucleotide
ugaugccggaugaguaccc

SEQ ID NO: 653967 - RNA, 19 nt, Artificial Sequence
  Description of Artificial Sequence: Synthetic oligonucleotide
agcaguccagaucuagccu

SEQ ID NO: 653968 - RNA, 19 nt, Artificial Sequence
  Description of Artificial Sequence: Synthetic oligonucleotide
ugcguggaauuucauucuc

SEQ ID NO: 653969 - RNA, 19 nt, Artificial Sequence
  Description of Artificial Sequence: Synthetic oligonucleotide
ucacuaagugagagcaaau

SEQ ID NO: 653970 - RNA, 19 nt, Artificial Sequence
  Description of Artificial Sequence: Synthetic oligonucleotide
gguauagacaagaacuguc

SEQ ID NO: 653971 - RNA, 19 nt, Artificial Sequence
  Description of Artificial Sequence: Synthetic oligonucleotide
guuaauaccauagguggcu

SEQ ID NO: 653972 - RNA, 19 nt, Artificial Sequence
  Description of Artificial Sequence: Synthetic oligonucleotide
gaaaugcuugguguggcca

SEQ ID NO: 653973 - RNA, 19 nt, Artificial Sequence
  Description of Artificial Sequence: Synthetic oligonucleotide
agcgcucugacguucuccu

SEQ ID NO: 653974 - RNA, 19 nt, Artificial Sequence
  Description of Artificial Sequence: Synthetic oligonucleotide
gacuacaauaucacuucuc

SEQ ID NO: 653975 - RNA, 19 nt, Artificial Sequence
  Description of Artificial Sequence: Synthetic oligonucleotide
ggacuccucacuaagugag

SEQ ID NO: 653976 - RNA, 19 nt, Artificial Sequence
  Description of Artificial Sequence: Synthetic oligonucleotide
aaccaggagucgguaugac

SEQ ID NO: 653977 - RNA, 19 nt, Artificial Sequence
  Description of Artificial Sequence: Synthetic oligonucleotide
auaucugcguggaauuuca

SEQ ID NO: 653978 - RNA, 19 nt, Artificial Sequence
  Description of Artificial Sequence: Synthetic oligonucleotide
gaugccggaugaguacccg

SEQ ID NO: 653979 - RNA, 19 nt, Artificial Sequence
  Description of Artificial Sequence: Synthetic oligonucleotide
gggagcacgaacuugauau

SEQ ID NO: 653980 - RNA, 19 nt, Artificial Sequence
  Description of Artificial Sequence: Synthetic oligonucleotide
guuccacauacagagucug

SEQ ID NO: 653981 - RNA, 19 nt, Artificial Sequence
  Description of Artificial Sequence: Synthetic oligonucleotide
ucgguaugacgcuggcugc

SEQ ID NO: 653982 - RNA, 19 nt, Artificial Sequence
  Description of Artificial Sequence: Synthetic oligonucleotide
ccaugugcugucaugaauc

SEQ ID NO: 653983 - RNA, 19 nt, Artificial Sequence
  Description of Artificial Sequence: Synthetic oligonucleotide
uaauaccauagguggcuuc

SEQ ID NO: 653984 - RNA, 19 nt, Artificial Sequence
  Description of Artificial Sequence: Synthetic oligonucleotide
guagccggacuucuucacc

SEQ ID NO: 653985 - RNA, 19 nt, Artificial Sequence
  Description of Artificial Sequence: Synthetic oligonucleotide
uucguucaaagggagucaa

SEQ ID NO: 653986 - RNA, 19 nt, Artificial Sequence
  Description of Artificial Sequence: Synthetic oligonucleotide
caucuaaacuagaguuuuc

SEQ ID NO: 653987 - RNA, 19 nt, Artificial Sequence
  Description of Artificial Sequence: Synthetic oligonucleotide
ugcuggaacgccacaggau

SEQ ID NO: 653988 - RNA, 19 nt, Artificial Sequence
  Description of Artificial Sequence: Synthetic oligonucleotide
gaacgugaucucucaucug

SEQ ID NO: 653989 - RNA, 19 nt, Artificial Sequence
  Description of Artificial Sequence: Synthetic oligonucleotide
uccucgguauagacaagaa

SEQ ID NO: 653990 - RNA, 19 nt, Artificial Sequence
  Description of Artificial Sequence: Synthetic oligonucleotide
ucugagccucagaaucaca

SEQ ID NO: 653991 - RNA, 19 nt, Artificial Sequence
  Description of Artificial Sequence: Synthetic oligonucleotide
agguggcuacaauuguuca

SEQ ID NO: 653992 - RNA, 19 nt, Artificial Sequence
  Description of Artificial Sequence: Synthetic oligonucleotide
gugugcaaccaggagucgg

SEQ ID NO: 653993 - RNA, 19 nt, Artificial Sequence
  Description of Artificial Sequence: Synthetic oligonucleotide
agcacgucaccaagucugc

SEQ ID NO: 653994 - RNA, 19 nt, Artificial Sequence
  Description of Artificial Sequence: Synthetic oligonucleotide
caggauaacguucuccuua

SEQ ID NO: 653995 - RNA, 19 nt, Artificial Sequence
  Description of Artificial Sequence: Synthetic oligonucleotide
aggauguaacgugcggauc

SEQ ID NO: 653996 - RNA, 19 nt, Artificial Sequence
  Description of Artificial Sequence: Synthetic oligonucleotide
gagaggguuucgagcaucc

SEQ ID NO: 653997 - RNA, 19 nt, Artificial Sequence
  Description of Artificial Sequence: Synthetic oligonucleotide
cuuuccuccggcccauaac

SEQ ID NO: 653998 - RNA, 19 nt, Artificial Sequence
  Description of Artificial Sequence: Synthetic oligonucleotide
guauagacaagaacugucu

SEQ ID NO: 653999 - RNA, 19 nt, Artificial Sequence
  Description of Artificial Sequence: Synthetic oligonucleotide
guacccggcccagagaccc

SEQ ID NO: 654000 - RNA, 19 nt, Artificial Sequence
  Description of Artificial Sequence: Synthetic oligonucleotide
gagcaaauaucugcgugga

SEQ ID NO: 654001 - RNA, 19 nt, Artificial Sequence
  Description of Artificial Sequence: Synthetic oligonucleotide
acggguggaacgugaucuc

SEQ ID NO: 654002 - RNA, 19 nt, Artificial Sequence
  Description of Artificial Sequence: Synthetic oligonucleotide
gcacgaacuugauauuaag

SEQ ID NO: 654003 - RNA, 19 nt, Artificial Sequence
  Description of Artificial Sequence: Synthetic oligonucleotide
gagcuggcgccaaaagucc

SEQ ID NO: 654004 - RNA, 19 nt, Artificial Sequence
  Description of Artificial Sequence: Synthetic oligonucleotide
gaucuagccucagggagca

SEQ ID NO: 654005 - RNA, 19 nt, Artificial Sequence
  Description of Artificial Sequence: Synthetic oligonucleotide
cugcaguugcaagaaaguc

SEQ ID NO: 654006 - RNA, 19 nt, Artificial Sequence
  Description of Artificial Sequence: Synthetic oligonucleotide
gcuggaacgccacaggauc

SEQ ID NO: 654007 - RNA, 19 nt, Artificial Sequence
  Description of Artificial Sequence: Synthetic oligonucleotide
gucgguaggggucuucauc

SEQ ID NO: 654008 - RNA, 19 nt, Artificial Sequence
  Description of Artificial Sequence: Synthetic oligonucleotide
gcaaccaggagucgguaug

SEQ ID NO: 654009 - RNA, 19 nt, Artificial Sequence
  Description of Artificial Sequence: Synthetic oligonucleotide
gagcucuuaccaacauuag

SEQ ID NO: 654010 - RNA, 19 nt, Artificial Sequence
  Description of Artificial Sequence: Synthetic oligonucleotide
gcugucaugaauccucgca

SEQ ID NO: 654011 - RNA, 19 nt, Artificial Sequence
  Description of Artificial Sequence: Synthetic oligonucleotide
cucacuaagugagagcaaa

SEQ ID NO: 654012 - RNA, 19 nt, Artificial Sequence
  Description of Artificial Sequence: Synthetic oligonucleotide
aagcugacgucuccauuuu

SEQ ID NO: 654013 - RNA, 19 nt, Artificial Sequence
  Description of Artificial Sequence: Synthetic oligonucleotide
gcugacgucuccauuuuag

SEQ ID NO: 654014 - RNA, 19 nt, Artificial Sequence
  Description of Artificial Sequence: Synthetic oligonucleotide
gaguucacucgugugcaac

SEQ ID NO: 654015 - RNA, 19 nt, Artificial Sequence
  Description of Artificial Sequence: Synthetic oligonucleotide
ggagauuaagacgacccca

SEQ ID NO: 654016 - RNA, 19 nt, Artificial Sequence
  Description of Artificial Sequence: Synthetic oligonucleotide
uaagacgaccccagucaua

SEQ ID NO: 654017 - RNA, 19 nt, Artificial Sequence
  Description of Artificial Sequence: Synthetic oligonucleotide
ucuccucgguauagacaag

SEQ ID NO: 654018 - RNA, 19 nt, Artificial Sequence
  Description of Artificial Sequence: Synthetic oligonucleotide
ggcaaacuagugauacggg

SEQ ID NO: 654019 - RNA, 19 nt, Artificial Sequence
  Description of Artificial Sequence: Synthetic oligonucleotide
ggaacgugaucucucaucu

SEQ ID NO: 654020 - RNA, 19 nt, Artificial Sequence
  Description of Artificial Sequence: Synthetic oligonucleotide
uggaccccuuuggucagcg

SEQ ID NO: 654021 - RNA, 19 nt, Artificial Sequence
  Description of Artificial Sequence: Synthetic oligonucleotide
agacgaccccagucauagc

SEQ ID NO: 654022 - RNA, 19 nt, Artificial Sequence
  Description of Artificial Sequence: Synthetic oligonucleotide
ucaggauaacguucuccuu

SEQ ID NO: 654023 - RNA, 19 nt, Artificial Sequence
  Description of Artificial Sequence: Synthetic oligonucleotide
ggaaaugcuugguguggcc

SEQ ID NO: 654024 - RNA, 19 nt, Artificial Sequence
  Description of Artificial Sequence: Synthetic oligonucleotide
agcccaacaguuaguuguc

SEQ ID NO: 654025 - RNA, 19 nt, Artificial Sequence
  Description of Artificial Sequence: Synthetic oligonucleotide
uccucgcaugcauccauaa

SEQ ID NO: 654026 - RNA, 19 nt, Artificial Sequence
  Description of Artificial Sequence: Synthetic oligonucleotide
cuucgucacuuguggacuc

SEQ ID NO: 654027 - RNA, 19 nt, Artificial Sequence
  Description of Artificial Sequence: Synthetic oligonucleotide
caucauugaguucacucgu

SEQ ID NO: 654028 - RNA, 19 nt, Artificial Sequence
  Description of Artificial Sequence: Synthetic oligonucleotide
gaccccuuuggucagcgcu

SEQ ID NO: 654029 - RNA, 19 nt, Artificial Sequence
  Description of Artificial Sequence: Synthetic oligonucleotide
ccaacauuaggguacccca

SEQ ID NO: 654030 - RNA, 19 nt, Artificial Sequence
  Description of Artificial Sequence: Synthetic oligonucleotide
uuguagagccuucgacuuu

SEQ ID NO: 654031 - RNA, 19 nt, Artificial Sequence
  Description of Artificial Sequence: Synthetic oligonucleotide
gagucugaugccggaugag

SEQ ID NO: 654032 - RNA, 19 nt, Artificial Sequence
  Description of Artificial Sequence: Synthetic oligonucleotide
gagcucuguuccguuacug

SEQ ID NO: 654033 - RNA, 19 nt, Artificial Sequence
  Description of Artificial Sequence: Synthetic oligonucleotide
gagucgguaugacgcuggc

SEQ ID NO: 654034 - RNA, 19 nt, Artificial Sequence
  Description of Artificial Sequence: Synthetic oligonucleotide
cccaauugggucuccucgg

SEQ ID NO: 654035 - RNA, 19 nt, Artificial Sequence
  Description of Artificial Sequence: Synthetic oligonucleotide
gcauccacuaucuggacua

SEQ ID NO: 654036 - RNA, 19 nt, Artificial Sequence
  Description of Artificial Sequence: Synthetic oligonucleotide
cugaccagaaaauaaccuu

SEQ ID NO: 654037 - RNA, 19 nt, Artificial Sequence
  Description of Artificial Sequence: Synthetic oligonucleotide
acaguuaguuguccaucuu

SEQ ID NO: 654038 - RNA, 19 nt, Artificial Sequence
  Description of Artificial Sequence: Synthetic oligonucleotide
gauguaacgugcggaucga

SEQ ID NO: 654039 - RNA, 19 nt, Artificial Sequence
  Description of Artificial Sequence: Synthetic oligonucleotide
gggaggaucccauugcaaa

SEQ ID NO: 654040 - RNA, 19 nt, Artificial Sequence
  Description of Artificial Sequence: Synthetic oligonucleotide
aagggagcucuguuccguu

SEQ ID NO: 654041 - RNA, 19 nt, Artificial Sequence
  Description of Artificial Sequence: Synthetic oligonucleotide
aguacccggcccagagacc

SEQ ID NO: 654042 - RNA, 19 nt, Artificial Sequence
  Description of Artificial Sequence: Synthetic oligonucleotide
cugacguucuccugaugga

SEQ ID NO: 654043 - RNA, 19 nt, Artificial Sequence
  Description of Artificial Sequence: Synthetic oligonucleotide
agacaagaacugucuguuu

SEQ ID NO: 654044 - RNA, 19 nt, Artificial Sequence
  Description of Artificial Sequence: Synthetic oligonucleotide
caguguguagcuucuuaaa

SEQ ID NO: 654045 - RNA, 19 nt, Artificial Sequence
  Description of Artificial Sequence: Synthetic oligonucleotide
ugaguucacucgugugcaa

SEQ ID NO: 654046 - RNA, 19 nt, Artificial Sequence
  Description of Artificial Sequence: Synthetic oligonucleotide
gagcacgaacuugauauua

SEQ ID NO: 654047 - RNA, 19 nt, Artificial Sequence
  Description of Artificial Sequence: Synthetic oligonucleotide
guaugacgcuggcugcggc

SEQ ID NO: 654048 - RNA, 19 nt, Artificial Sequence
  Description of Artificial Sequence: Synthetic oligonucleotide
cuagccucagggagcacga

SEQ ID NO: 654049 - RNA, 19 nt, Artificial Sequence
  Description of Artificial Sequence: Synthetic oligonucleotide
agcacgaacuugauauuaa

SEQ ID NO: 654050 - RNA, 19 nt, Artificial Sequence
  Description of Artificial Sequence: Synthetic oligonucleotide
agcaaauaucugcguggaa

SEQ ID NO: 654051 - RNA, 19 nt, Artificial Sequence
  Description of Artificial Sequence: Synthetic oligonucleotide
acuagugauacggguggaa

SEQ ID NO: 654052 - RNA, 19 nt, Artificial Sequence
  Description of Artificial Sequence: Synthetic oligonucleotide
cuggucaauugggaggauc

SEQ ID NO: 654053 - RNA, 19 nt, Artificial Sequence
  Description of Artificial Sequence: Synthetic oligonucleotide
gccgucaacagcucuucug

SEQ ID NO: 654054 - RNA, 19 nt, Artificial Sequence
  Description of Artificial Sequence: Synthetic oligonucleotide
uugguccuuuuagagugaa

SEQ ID NO: 654055 - RNA, 19 nt, Artificial Sequence
  Description of Artificial Sequence: Synthetic oligonucleotide
gguggaacgugaucucuca

SEQ ID NO: 654056 - RNA, 19 nt, Artificial Sequence
  Description of Artificial Sequence: Synthetic oligonucleotide
cuagccggacaagcugacg

SEQ ID NO: 654057 - RNA, 19 nt, Artificial Sequence
  Description of Artificial Sequence: Synthetic oligonucleotide
gcaaacuagugauacgggu

SEQ ID NO: 654058 - RNA, 19 nt, Artificial Sequence
  Description of Artificial Sequence: Synthetic oligonucleotide
caucuucgucacuugugga

SEQ ID NO: 654059 - RNA, 19 nt, Artificial Sequence
  Description of Artificial Sequence: Synthetic oligonucleotide
ccucgguauagacaagaac

SEQ ID NO: 654060 - RNA, 19 nt, Artificial Sequence
  Description of Artificial Sequence: Synthetic oligonucleotide
cacuaagugagagcaaaua

SEQ ID NO: 654061 - RNA, 19 nt, Artificial Sequence
  Description of Artificial Sequence: Synthetic oligonucleotide
cacucgugugcaaccagga

SEQ ID NO: 654062 - RNA, 19 nt, Artificial Sequence
  Description of Artificial Sequence: Synthetic oligonucleotide
gguuggaggucgguagggg

SEQ ID NO: 654063 - RNA, 19 nt, Artificial Sequence
  Description of Artificial Sequence: Synthetic oligonucleotide
uugauaccagguggcuaca

SEQ ID NO: 654064 - RNA, 19 nt, Artificial Sequence
  Description of Artificial Sequence: Synthetic oligonucleotide
auguaacgugcggaucgag

SEQ ID NO: 654065 - RNA, 19 nt, Artificial Sequence
  Description of Artificial Sequence: Synthetic oligonucleotide
gcaaauaucugcguggaau

SEQ ID NO: 654066 - RNA, 19 nt, Artificial Sequence
  Description of Artificial Sequence: Synthetic oligonucleotide
cuccucgguauagacaaga

SEQ ID NO: 654067 - RNA, 19 nt, Artificial Sequence
  Description of Artificial Sequence: Synthetic oligonucleotide
gugugaggcccaggcaagg

SEQ ID NO: 654068 - RNA, 19 nt, Artificial Sequence
  Description of Artificial Sequence: Synthetic oligonucleotide
gaauccucgcaugcaucca

SEQ ID NO: 654069 - RNA, 19 nt, Artificial Sequence
  Description of Artificial Sequence: Synthetic oligonucleotide
guucacucgugugcaacca

SEQ ID NO: 654070 - RNA, 19 nt, Artificial Sequence
  Description of Artificial Sequence: Synthetic oligonucleotide
gccuuguuuaucaggauaa

SEQ ID NO: 654071 - RNA, 19 nt, Artificial Sequence
  Description of Artificial Sequence: Synthetic oligonucleotide
ugggucuccucgguauaga

SEQ ID NO: 654072 - RNA, 19 nt, Artificial Sequence
  Description of Artificial Sequence: Synthetic oligonucleotide
gcgguaucuaccuccuuca

SEQ ID NO: 654073 - RNA, 19 nt, Artificial Sequence
  Description of Artificial Sequence: Synthetic oligonucleotide
gacuggagauuaagacgac

SEQ ID NO: 654074 - RNA, 19 nt, Artificial Sequence
  Description of Artificial Sequence: Synthetic oligonucleotide
gucccaauugggucuccuc

SEQ ID NO: 654075 - RNA, 19 nt, Artificial Sequence
  Description of Artificial Sequence: Synthetic oligonucleotide
agggagcacgaacuugaua

SEQ ID NO: 654076 - RNA, 19 nt, Artificial Sequence
  Description of Artificial Sequence: Synthetic oligonucleotide
cuuugauaccagguggcua

SEQ ID NO: 654077 - RNA, 19 nt, Artificial Sequence
  Description of Artificial Sequence: Synthetic oligonucleotide
ggucaauugggaggauccc

SEQ ID NO: 654078 - RNA, 19 nt, Artificial Sequence
  Description of Artificial Sequence: Synthetic oligonucleotide
aacguucuccuuagcggua

SEQ ID NO: 654079 - RNA, 19 nt, Artificial Sequence
  Description of Artificial Sequence: Synthetic oligonucleotide
cagcgcucugacguucucc

SEQ ID NO: 654080 - RNA, 19 nt, Artificial Sequence
  Description of Artificial Sequence: Synthetic oligonucleotide
ggcaaggcgcugcucagca

SEQ ID NO: 654081 - RNA, 19 nt, Artificial Sequence
  Description of Artificial Sequence: Synthetic oligonucleotide
gugauacggguggaacgug

SEQ ID NO: 654082 - RNA, 19 nt, Artificial Sequence
  Description of Artificial Sequence: Synthetic oligonucleotide
gaugaguacccggcccaga

SEQ ID NO: 654083 - RNA, 19 nt, Artificial Sequence
  Description of Artificial Sequence: Synthetic oligonucleotide
gacuccucacuaagugaga

SEQ ID NO: 654084 - RNA, 19 nt, Artificial Sequence
  Description of Artificial Sequence: Synthetic oligonucleotide
uaccaacauuaggguaccc

SEQ ID NO: 654085 - RNA, 19 nt, Artificial Sequence
  Description of Artificial Sequence: Synthetic oligonucleotide
gguugagcucuuaccaaca

SEQ ID NO: 654086 - RNA, 19 nt, Artificial Sequence
  Description of Artificial Sequence: Synthetic oligonucleotide
agccgucaacagcucuucu

SEQ ID NO: 654087 - RNA, 19 nt, Artificial Sequence
  Description of Artificial Sequence: Synthetic oligonucleotide
caaccaggagucgguauga

SEQ ID NO: 654088 - RNA, 19 nt, Artificial Sequence
  Description of Artificial Sequence: Synthetic oligonucleotide
cauccacuaucuggacuac

SEQ ID NO: 654089 - RNA, 19 nt, Artificial Sequence
  Description of Artificial Sequence: Synthetic oligonucleotide
acaugucgugggauauucu

SEQ ID NO: 654090 - RNA, 19 nt, Artificial Sequence
  Description of Artificial Sequence: Synthetic oligonucleotide
cuuuagcuccuguccaccu

SEQ ID NO: 654091 - RNA, 19 nt, Artificial Sequence
  Description of Artificial Sequence: Synthetic oligonucleotide
caggauguaacgugcggau

SEQ ID NO: 654092 - RNA, 19 nt, Artificial Sequence
  Description of Artificial Sequence: Synthetic oligonucleotide
gcaugcauccauaagccgu

SEQ ID NO: 654093 - RNA, 19 nt, Artificial Sequence
  Description of Artificial Sequence: Synthetic oligonucleotide
cugcguggaauuucauucu

SEQ ID NO: 654094 - RNA, 19 nt, Artificial Sequence
  Description of Artificial Sequence: Synthetic oligonucleotide
agggagcucuguuccguua

SEQ ID NO: 654095 - RNA, 19 nt, Artificial Sequence
  Description of Artificial Sequence: Synthetic oligonucleotide
acguucuccuuagcgguau

SEQ ID NO: 654096 - RNA, 19 nt, Artificial Sequence
  Description of Artificial Sequence: Synthetic oligonucleotide
gcgccaaaaguccaaauuu

SEQ ID NO: 654097 - RNA, 19 nt, Artificial Sequence
  Description of Artificial Sequence: Synthetic oligonucleotide
agcugacgucuccauuuua

SEQ ID NO: 654098 - RNA, 19 nt, Artificial Sequence
  Description of Artificial Sequence: Synthetic oligonucleotide
uggucagcgcucugacguu

SEQ ID NO: 654099 - RNA, 19 nt, Artificial Sequence
  Description of Artificial Sequence: Synthetic oligonucleotide
ggcgcuuuccuccggccca

SEQ ID NO: 654100 - RNA, 19 nt, Artificial Sequence
  Description of Artificial Sequence: Synthetic oligonucleotide
gauacggguggaacgugau

SEQ ID NO: 654101 - RNA, 19 nt, Artificial Sequence
  Description of Artificial Sequence: Synthetic oligonucleotide
cccaacaguuaguugucca

SEQ ID NO: 654102 - RNA, 19 nt, Artificial Sequence
  Description of Artificial Sequence: Synthetic oligonucleotide
cuggaacgccacaggaucu

SEQ ID NO: 654103 - RNA, 19 nt, Artificial Sequence
  Description of Artificial Sequence: Synthetic oligonucleotide
cugcucagcacgucaccaa

SEQ ID NO: 654104 - RNA, 19 nt, Artificial Sequence
  Description of Artificial Sequence: Synthetic oligonucleotide
ggacuacaauaucacuucu

SEQ ID NO: 654105 - RNA, 19 nt, Artificial Sequence
  Description of Artificial Sequence: Synthetic oligonucleotide
ggaugaguacccggcccag

SEQ ID NO: 654106 - RNA, 19 nt, Artificial Sequence
  Description of Artificial Sequence: Synthetic oligonucleotide
ggcgccaaaaguccaaauu

SEQ ID NO: 654107 - RNA, 19 nt, Artificial Sequence
  Description of Artificial Sequence: Synthetic oligonucleotide
caauugggucuccucggua

SEQ ID NO: 654108 - RNA, 19 nt, Artificial Sequence
  Description of Artificial Sequence: Synthetic oligonucleotide
ggaggaucccauugcaaau

SEQ ID NO: 654109 - RNA, 19 nt, Artificial Sequence
  Description of Artificial Sequence: Synthetic oligonucleotide
acgugcggaucgaggcugg

SEQ ID NO: 654110 - RNA, 19 nt, Artificial Sequence
  Description of Artificial Sequence: Synthetic oligonucleotide
cgguuuguagcccaucaca

SEQ ID NO: 654111 - RNA, 19 nt, Artificial Sequence
  Description of Artificial Sequence: Synthetic oligonucleotide
ccgguuuguagcccaucac

SEQ ID NO: 654112 - RNA, 19 nt, Artificial Sequence
  Description of Artificial Sequence: Synthetic oligonucleotide
ggguggaacgugaucucuc

SEQ ID NO: 654113 - RNA, 19 nt, Artificial Sequence
  Description of Artificial Sequence: Synthetic oligonucleotide
guugaugguugagcucuua

SEQ ID NO: 654114 - RNA, 19 nt, Artificial Sequence
  Description of Artificial Sequence: Synthetic oligonucleotide
cccgguuuguagcccauca

SEQ ID NO: 654115 - RNA, 19 nt, Artificial Sequence
  Description of Artificial Sequence: Synthetic oligonucleotide
gcggaucgaggcuggucug

SEQ ID NO: 654116 - RNA, 19 nt, Artificial Sequence
  Description of Artificial Sequence: Synthetic oligonucleotide
gugcggaucgaggcugguc

SEQ ID NO: 654117 - RNA, 19 nt, Artificial Sequence
  Description of Artificial Sequence: Synthetic oligonucleotide
gaggucgguaggggucuuc

SEQ ID NO: 654118 - RNA, 19 nt, Artificial Sequence
  Description of Artificial Sequence: Synthetic oligonucleotide
ggucagcgcucugacguuc

SEQ ID NO: 654119 - RNA, 19 nt, Artificial Sequence
  Description of Artificial Sequence: Synthetic oligonucleotide
auccucgcaugcauccaua

SEQ ID NO: 654120 - RNA, 19 nt, Artificial Sequence
  Description of Artificial Sequence: Synthetic oligonucleotide
cugucccaauugggucucc

SEQ ID NO: 654121 - RNA, 19 nt, Artificial Sequence
  Description of Artificial Sequence: Synthetic oligonucleotide
ccggacaagcugacgucuc

SEQ ID NO: 654122 - RNA, 19 nt, Artificial Sequence
  Description of Artificial Sequence: Synthetic oligonucleotide
guggaacgugaucucucau

SEQ ID NO: 654123 - RNA, 19 nt, Artificial Sequence
  Description of Artificial Sequence: Synthetic oligonucleotide
ccuuagcgguaucuaccuc

SEQ ID NO: 654124 - RNA, 19 nt, Artificial Sequence
  Description of Artificial Sequence: Synthetic oligonucleotide
agcaggccacuccccgguu

SEQ ID NO: 654125 - RNA, 19 nt, Artificial Sequence
  Description of Artificial Sequence: Synthetic oligonucleotide
cgugggauauucuggcaaa

SEQ ID NO: 654126 - RNA, 19 nt, Artificial Sequence
  Description of Artificial Sequence: Synthetic oligonucleotide
gcacgucaccaagucugcc

SEQ ID NO: 654127 - RNA, 19 nt, Artificial Sequence
  Description of Artificial Sequence: Synthetic oligonucleotide
gcuuuccuccggcccauaa

SEQ ID NO: 654128 - RNA, 19 nt, Artificial Sequence
  Description of Artificial Sequence: Synthetic oligonucleotide
ggaccccuuuggucagcgc

SEQ ID NO: 654129 - RNA, 19 nt, Artificial Sequence
  Description of Artificial Sequence: Synthetic oligonucleotide
cguuacugacuggagauua

SEQ ID NO: 654130 - RNA, 19 nt, Artificial Sequence
  Description of Artificial Sequence: Synthetic oligonucleotide
gcaguacaacaguuucccu

SEQ ID NO: 654131 - RNA, 19 nt, Artificial Sequence
  Description of Artificial Sequence: Synthetic oligonucleotide
ggagcucuguuccguuacu

SEQ ID NO: 654132 - RNA, 19 nt, Artificial Sequence
  Description of Artificial Sequence: Synthetic oligonucleotide
cggaucgaggcuggucugg

SEQ ID NO: 654133 - RNA, 19 nt, Artificial Sequence
  Description of Artificial Sequence: Synthetic oligonucleotide
gugcaaccaggagucggua

SEQ ID NO: 654134 - RNA, 19 nt, Artificial Sequence
  Description of Artificial Sequence: Synthetic oligonucleotide
cccggcgcuuuccuccggc

SEQ ID NO: 654135 - RNA, 19 nt, Artificial Sequence
  Description of Artificial Sequence: Synthetic oligonucleotide
ccggcgcuuuccuccggcc

SEQ ID NO: 654136 - RNA, 19 nt, Artificial Sequence
  Description of Artificial Sequence: Synthetic oligonucleotide
gaacgccacaggaucucuu

SEQ ID NO: 654137 - RNA, 19 nt, Artificial Sequence
  Description of Artificial Sequence: Synthetic oligonucleotide
ccucacuaagugagagcaa

SEQ ID NO: 654138 - RNA, 19 nt, Artificial Sequence
  Description of Artificial Sequence: Synthetic oligonucleotide
ccaauugggucuccucggu

SEQ ID NO: 654139 - RNA, 19 nt, Artificial Sequence
  Description of Artificial Sequence: Synthetic oligonucleotide
cggcgcuuuccuccggccc

SEQ ID NO: 654140 - RNA, 19 nt, Artificial Sequence
  Description of Artificial Sequence: Synthetic oligonucleotide
gccggacaagcugacgucu

SEQ ID NO: 654141 - RNA, 19 nt, Artificial Sequence
  Description of Artificial Sequence: Synthetic oligonucleotide
ggaacgccacaggaucucu

SEQ ID NO: 654142 - RNA, 19 nt, Artificial Sequence
  Description of Artificial Sequence: Synthetic oligonucleotide
ccucauggaguuucuuaau

SEQ ID NO: 654143 - RNA, 19 nt, Artificial Sequence
  Description of Artificial Sequence: Synthetic oligonucleotide
cgguauagacaagaacugu

SEQ ID NO: 654144 - RNA, 19 nt, Artificial Sequence
  Description of Artificial Sequence: Synthetic oligonucleotide
ggucgguaggggucuucau

SEQ ID NO: 654145 - RNA, 19 nt, Artificial Sequence
  Description of Artificial Sequence: Synthetic oligonucleotide
cugcggcuucgcugagucu

SEQ ID NO: 654146 - RNA, 19 nt, Artificial Sequence
  Description of Artificial Sequence: Synthetic oligonucleotide
ccccgguuuguagcccauc

SEQ ID NO: 654147 - RNA, 19 nt, Artificial Sequence
  Description of Artificial Sequence: Synthetic oligonucleotide
ccccggcgcuuuccuccgg

SEQ ID NO: 654148 - RNA, 19 nt, Artificial Sequence
  Description of Artificial Sequence: Synthetic oligonucleotide
ccguuacugacuggagauu

SEQ ID NO: 654149 - RNA, 19 nt, Artificial Sequence
  Description of Artificial Sequence: Synthetic oligonucleotide
ggaggucgguaggggucuu

SEQ ID NO: 654150 - RNA, 19 nt, Artificial Sequence
  Description of Artificial Sequence: Synthetic oligonucleotide
cgugcggaucgaggcuggu

SEQ ID NO: 654151 - RNA, 19 nt, Artificial Sequence
  Description of Artificial Sequence: Synthetic oligonucleotide
uugagaguagauaagaccg

SEQ ID NO: 654152 - RNA, 19 nt, Artificial Sequence
  Description of Artificial Sequence: Synthetic oligonucleotide
aauaauaagguguucauau

SEQ ID NO: 654153 - RNA, 19 nt, Artificial Sequence
  Description of Artificial Sequence: Synthetic oligonucleotide
aaugguagucuuuuguagc

SEQ ID NO: 654154 - RNA, 19 nt, Artificial Sequence
  Description of Artificial Sequence: Synthetic oligonucleotide
aaugcaaacagguuucccg

SEQ ID NO: 654155 - RNA, 19 nt, Artificial Sequence
  Description of Artificial Sequence: Synthetic oligonucleotide
auagaauugcuauggaucc

SEQ ID NO: 654156 - RNA, 19 nt, Artificial Sequence
  Description of Artificial Sequence: Synthetic oligonucleotide
auugagaguagauaagacc

SEQ ID NO: 654157 - RNA, 19 nt, Artificial Sequence
  Description of Artificial Sequence: Synthetic oligonucleotide
uaaagcucuagaaugaucc

SEQ ID NO: 654158 - RNA, 19 nt, Artificial Sequence
  Description of Artificial Sequence: Synthetic oligonucleotide
ucaaauagaauugcuaugg

SEQ ID NO: 654159 - RNA, 19 nt, Artificial Sequence
  Description of Artificial Sequence: Synthetic oligonucleotide
ucugaugcuagacuggugg

SEQ ID NO: 654160 - RNA, 19 nt, Artificial Sequence
  Description of Artificial Sequence: Synthetic oligonucleotide
aaagaguugcaucaaaaca

SEQ ID NO: 654161 - RNA, 19 nt, Artificial Sequence
  Description of Artificial Sequence: Synthetic oligonucleotide
uauuuaguggugauguagg

SEQ ID NO: 654162 - RNA, 19 nt, Artificial Sequence
  Description of Artificial Sequence: Synthetic oligonucleotide
agugaggugauauuaauug

SEQ ID NO: 654163 - RNA, 19 nt, Artificial Sequence
  Description of Artificial Sequence: Synthetic oligonucleotide
agauaagaccgauugauuc

SEQ ID NO: 654164 - RNA, 19 nt, Artificial Sequence
  Description of Artificial Sequence: Synthetic oligonucleotide
uuggggauagacaaguccg

SEQ ID NO: 654165 - RNA, 19 nt, Artificial Sequence
  Description of Artificial Sequence: Synthetic oligonucleotide
ugaucgagaaacaucugcg

SEQ ID NO: 654166 - RNA, 19 nt, Artificial Sequence
  Description of Artificial Sequence: Synthetic oligonucleotide
ucugcgaggagguauacgg

SEQ ID NO: 654167 - RNA, 19 nt, Artificial Sequence
  Description of Artificial Sequence: Synthetic oligonucleotide
agucauaaggcauaggugu

SEQ ID NO: 654168 - RNA, 19 nt, Artificial Sequence
  Description of Artificial Sequence: Synthetic oligonucleotide
uaaguaaggaaguauacuc

SEQ ID NO: 654169 - RNA, 19 nt, Artificial Sequence
  Description of Artificial Sequence: Synthetic oligonucleotide
uauuauuuaguggugaugu

SEQ ID NO: 654170 - RNA, 19 nt, Artificial Sequence
  Description of Artificial Sequence: Synthetic oligonucleotide
gaguagauaagaccgauug

SEQ ID NO: 654171 - RNA, 19 nt, Artificial Sequence
  Description of Artificial Sequence: Synthetic oligonucleotide
uaugguuaggucaaucacc

SEQ ID NO: 654172 - RNA, 19 nt, Artificial Sequence
  Description of Artificial Sequence: Synthetic oligonucleotide
gauaaugucugguaugaug

SEQ ID NO: 654173 - RNA, 19 nt, Artificial Sequence
  Description of Artificial Sequence: Synthetic oligonucleotide
gguaugaugccaaagaugg

SEQ ID NO: 654174 - RNA, 19 nt, Artificial Sequence
  Description of Artificial Sequence: Synthetic oligonucleotide
uacauauucugcuauugag

SEQ ID NO: 654175 - RNA, 19 nt, Artificial Sequence
  Description of Artificial Sequence: Synthetic oligonucleotide
aaacaggauagguaaaaca

SEQ ID NO: 654176 - RNA, 19 nt, Artificial Sequence
  Description of Artificial Sequence: Synthetic oligonucleotide
aguccaacgagauaauguc

SEQ ID NO: 654177 - RNA, 19 nt, Artificial Sequence
  Description of Artificial Sequence: Synthetic oligonucleotide
uugaguuucaaacuguuua

SEQ ID NO: 654178 - RNA, 19 nt, Artificial Sequence
  Description of Artificial Sequence: Synthetic oligonucleotide
aaagauggacgccgugucc

SEQ ID NO: 654179 - RNA, 19 nt, Artificial Sequence
  Description of Artificial Sequence: Synthetic oligonucleotide
uaauuggucggcuauguug

SEQ ID NO: 654180 - RNA, 19 nt, Artificial Sequence
  Description of Artificial Sequence: Synthetic oligonucleotide
aaauaagcaaggcuaagua

SEQ ID NO: 654181 - RNA, 19 nt, Artificial Sequence
  Description of Artificial Sequence: Synthetic oligonucleotide
uuauuuaguggugauguag

SEQ ID NO: 654182 - RNA, 19 nt, Artificial Sequence
  Description of Artificial Sequence: Synthetic oligonucleotide
ggugauauuaauuggucgg

SEQ ID NO: 654183 - RNA, 19 nt, Artificial Sequence
  Description of Artificial Sequence: Synthetic oligonucleotide
agaaguucguguuugcguc

SEQ ID NO: 654184 - RNA, 19 nt, Artificial Sequence
  Description of Artificial Sequence: Synthetic oligonucleotide
ugaaguuaccugaugcucc

SEQ ID NO: 654185 - RNA, 19 nt, Artificial Sequence
  Description of Artificial Sequence: Synthetic oligonucleotide
aguaaggaaguauacucag

SEQ ID NO: 654186 - RNA, 19 nt, Artificial Sequence
  Description of Artificial Sequence: Synthetic oligonucleotide
auucccuuugcucguaacc

SEQ ID NO: 654187 - RNA, 19 nt, Artificial Sequence
  Description of Artificial Sequence: Synthetic oligonucleotide
uauguuguggagucaaggc

SEQ ID NO: 654188 - RNA, 19 nt, Artificial Sequence
  Description of Artificial Sequence: Synthetic oligonucleotide
gaaugguagauggagacag

SEQ ID NO: 654189 - RNA, 19 nt, Artificial Sequence
  Description of Artificial Sequence: Synthetic oligonucleotide
gguguuguaaugcugauug

SEQ ID NO: 654190 - RNA, 19 nt, Artificial Sequence
  Description of Artificial Sequence: Synthetic oligonucleotide
uugcuauggauccacaugu

SEQ ID NO: 654191 - RNA, 19 nt, Artificial Sequence
  Description of Artificial Sequence: Synthetic oligonucleotide
ugaggugauauuaauuggu

SEQ ID NO: 654192 - RNA, 19 nt, Artificial Sequence
  Description of Artificial Sequence: Synthetic oligonucleotide
uccuaugucaugcuuguca

SEQ ID NO: 654193 - RNA, 19 nt, Artificial Sequence
  Description of Artificial Sequence: Synthetic oligonucleotide
aaucggacaagugagguga

SEQ ID NO: 654194 - RNA, 19 nt, Artificial Sequence
  Description of Artificial Sequence: Synthetic oligonucleotide
uauuuugguacugucguag

SEQ ID NO: 654195 - RNA, 19 nt, Artificial Sequence
  Description of Artificial Sequence: Synthetic oligonucleotide
ucugccaagucauugaauc

SEQ ID NO: 654196 - RNA, 19 nt, Artificial Sequence
  Description of Artificial Sequence: Synthetic oligonucleotide
aagaaguucguguuugcgu

SEQ ID NO: 654197 - RNA, 19 nt, Artificial Sequence
  Description of Artificial Sequence: Synthetic oligonucleotide
cuugucauuaaaaggugag

SEQ ID NO: 654198 - RNA, 19 nt, Artificial Sequence
  Description of Artificial Sequence: Synthetic oligonucleotide
aaaccaaaacgacuuguga

SEQ ID NO: 654199 - RNA, 19 nt, Artificial Sequence
  Description of Artificial Sequence: Synthetic oligonucleotide
aggugauauuaauuggucg

SEQ ID NO: 654200 - RNA, 19 nt, Artificial Sequence
  Description of Artificial Sequence: Synthetic oligonucleotide
uguagcuuguaucuacagc

SEQ ID NO: 654201 - RNA, 19 nt, Artificial Sequence
  Description of Artificial Sequence: Synthetic oligonucleotide
uuccaguucauguuuaggu

SEQ ID NO: 654202 - RNA, 19 nt, Artificial Sequence
  Description of Artificial Sequence: Synthetic oligonucleotide
auugcuauggauccacaug

SEQ ID NO: 654203 - RNA, 19 nt, Artificial Sequence
  Description of Artificial Sequence: Synthetic oligonucleotide
aucaaauagaauugcuaug

SEQ ID NO: 654204 - RNA, 19 nt, Artificial Sequence
  Description of Artificial Sequence: Synthetic oligonucleotide
uuuacauauucugcuauug

SEQ ID NO: 654205 - RNA, 19 nt, Artificial Sequence
  Description of Artificial Sequence: Synthetic oligonucleotide
ggauagguaaaacagagca

SEQ ID NO: 654206 - RNA, 19 nt, Artificial Sequence
  Description of Artificial Sequence: Synthetic oligonucleotide
ugguaugaugccaaagaug

SEQ ID NO: 654207 - RNA, 19 nt, Artificial Sequence
  Description of Artificial Sequence: Synthetic oligonucleotide
uagaaugguagucuuuugu

SEQ ID NO: 654208 - RNA, 19 nt, Artificial Sequence
  Description of Artificial Sequence: Synthetic oligonucleotide
uccgucaacuccauuguag

SEQ ID NO: 654209 - RNA, 19 nt, Artificial Sequence
  Description of Artificial Sequence: Synthetic oligonucleotide
aagauggacgccguguccg

SEQ ID NO: 654210 - RNA, 19 nt, Artificial Sequence
  Description of Artificial Sequence: Synthetic oligonucleotide
aaaaccaaaacgacuugug

SEQ ID NO: 654211 - RNA, 19 nt, Artificial Sequence
  Description of Artificial Sequence: Synthetic oligonucleotide
aggucaaucaccucgacuu

SEQ ID NO: 654212 - RNA, 19 nt, Artificial Sequence
  Description of Artificial Sequence: Synthetic oligonucleotide
aacccaucaauaauaaggu

SEQ ID NO: 654213 - RNA, 19 nt, Artificial Sequence
  Description of Artificial Sequence: Synthetic oligonucleotide
aagcucuagaaugauccgg

SEQ ID NO: 654214 - RNA, 19 nt, Artificial Sequence
  Description of Artificial Sequence: Synthetic oligonucleotide
agaauugcuauggauccac

SEQ ID NO: 654215 - RNA, 19 nt, Artificial Sequence
  Description of Artificial Sequence: Synthetic oligonucleotide
aauuggucggcuauguugu

SEQ ID NO: 654216 - RNA, 19 nt, Artificial Sequence
  Description of Artificial Sequence: Synthetic oligonucleotide
uggcauaggacuugaaugu

SEQ ID NO: 654217 - RNA, 19 nt, Artificial Sequence
  Description of Artificial Sequence: Synthetic oligonucleotide
uguugauguagcuuguauc

SEQ ID NO: 654218 - RNA, 19 nt, Artificial Sequence
  Description of Artificial Sequence: Synthetic oligonucleotide
aauaagguguucauaugga

SEQ ID NO: 654219 - RNA, 19 nt, Artificial Sequence
  Description of Artificial Sequence: Synthetic oligonucleotide
uuuaguggugauguaggag

SEQ ID NO: 654220 - RNA, 19 nt, Artificial Sequence
  Description of Artificial Sequence: Synthetic oligonucleotide
gccuuuaacaaaugaaggg

SEQ ID NO: 654221 - RNA, 19 nt, Artificial Sequence
  Description of Artificial Sequence: Synthetic oligonucleotide
ugucauuaaaaggugagua

SEQ ID NO: 654222 - RNA, 19 nt, Artificial Sequence
  Description of Artificial Sequence: Synthetic oligonucleotide
ugugaaguuaccugaugcu

SEQ ID NO: 654223 - RNA, 19 nt, Artificial Sequence
  Description of Artificial Sequence: Synthetic oligonucleotide
aaacuguauuucaucacag

SEQ ID NO: 654224 - RNA, 19 nt, Artificial Sequence
  Description of Artificial Sequence: Synthetic oligonucleotide
augagggaaguguugaugu

SEQ ID NO: 654225 - RNA, 19 nt, Artificial Sequence
  Description of Artificial Sequence: Synthetic oligonucleotide
agguaagugcccgacaugg

SEQ ID NO: 654226 - RNA, 19 nt, Artificial Sequence
  Description of Artificial Sequence: Synthetic oligonucleotide
uuaccugaugcuccaaugu

SEQ ID NO: 654227 - RNA, 19 nt, Artificial Sequence
  Description of Artificial Sequence: Synthetic oligonucleotide
ggugauguaggagacaggg

SEQ ID NO: 654228 - RNA, 19 nt, Artificial Sequence
  Description of Artificial Sequence: Synthetic oligonucleotide
gaaacccguaggcuggugg

SEQ ID NO: 654229 - RNA, 19 nt, Artificial Sequence
  Description of Artificial Sequence: Synthetic oligonucleotide
gugugaaguuaccugaugc

SEQ ID NO: 654230 - RNA, 19 nt, Artificial Sequence
  Description of Artificial Sequence: Synthetic oligonucleotide
uagauggagacagagucgc

SEQ ID NO: 654231 - RNA, 19 nt, Artificial Sequence
  Description of Artificial Sequence: Synthetic oligonucleotide
uuauuauuuaguggugaug

SEQ ID NO: 654232 - RNA, 19 nt, Artificial Sequence
  Description of Artificial Sequence: Synthetic oligonucleotide
uaauuuucugagggaaccg

SEQ ID NO: 654233 - RNA, 19 nt, Artificial Sequence
  Description of Artificial Sequence: Synthetic oligonucleotide
aauugcuauggauccacau

SEQ ID NO: 654234 - RNA, 19 nt, Artificial Sequence
  Description of Artificial Sequence: Synthetic oligonucleotide
aacgagauaaugucuggua

SEQ ID NO: 654235 - RNA, 19 nt, Artificial Sequence
  Description of Artificial Sequence: Synthetic oligonucleotide
uguugucugaugcuagacu

SEQ ID NO: 654236 - RNA, 19 nt, Artificial Sequence
  Description of Artificial Sequence: Synthetic oligonucleotide
gacuuuucuaaacaggaua

SEQ ID NO: 654237 - RNA, 19 nt, Artificial Sequence
  Description of Artificial Sequence: Synthetic oligonucleotide
uuugguacugucguagaca

SEQ ID NO: 654238 - RNA, 19 nt, Artificial Sequence
  Description of Artificial Sequence: Synthetic oligonucleotide
aaguaaggaaguauacuca

SEQ ID NO: 654239 - RNA, 19 nt, Artificial Sequence
  Description of Artificial Sequence: Synthetic oligonucleotide
guugugugaaguuaccuga

SEQ ID NO: 654240 - RNA, 19 nt, Artificial Sequence
  Description of Artificial Sequence: Synthetic oligonucleotide
auauuaauuggucggcuau

SEQ ID NO: 654241 - RNA, 19 nt, Artificial Sequence
  Description of Artificial Sequence: Synthetic oligonucleotide
ugaugaacugucuaugguu

SEQ ID NO: 654242 - RNA, 19 nt, Artificial Sequence
  Description of Artificial Sequence: Synthetic oligonucleotide
aggacaaacccacguuggc

SEQ ID NO: 654243 - RNA, 19 nt, Artificial Sequence
  Description of Artificial Sequence: Synthetic oligonucleotide
cuugaauguacguugggga

SEQ ID NO: 654244 - RNA, 19 nt, Artificial Sequence
  Description of Artificial Sequence: Synthetic oligonucleotide
gaauguacguuggggauag

SEQ ID NO: 654245 - RNA, 19 nt, Artificial Sequence
  Description of Artificial Sequence: Synthetic oligonucleotide
uacugucguagacaaucgg

SEQ ID NO: 654246 - RNA, 19 nt, Artificial Sequence
  Description of Artificial Sequence: Synthetic oligonucleotide
ucuaauccuuguaagucau

SEQ ID NO: 654247 - RNA, 19 nt, Artificial Sequence
  Description of Artificial Sequence: Synthetic oligonucleotide
agcguagcccaacagaacu

SEQ ID NO: 654248 - RNA, 19 nt, Artificial Sequence
  Description of Artificial Sequence: Synthetic oligonucleotide
ugagcuguggaaugguaga

SEQ ID NO: 654249 - RNA, 19 nt, Artificial Sequence
  Description of Artificial Sequence: Synthetic oligonucleotide
cuaugguuaggucaaucac

SEQ ID NO: 654250 - RNA, 19 nt, Artificial Sequence
  Description of Artificial Sequence: Synthetic oligonucleotide
agacaaucggacaagugag

SEQ ID NO: 654251 - RNA, 19 nt, Artificial Sequence
  Description of Artificial Sequence: Synthetic oligonucleotide
aaugauccggauuccuuau

SEQ ID NO: 654252 - RNA, 19 nt, Artificial Sequence
  Description of Artificial Sequence: Synthetic oligonucleotide
acugguugugugaaguuac

SEQ ID NO: 654253 - RNA, 19 nt, Artificial Sequence
  Description of Artificial Sequence: Synthetic oligonucleotide
cuauguuguggagucaagg

SEQ ID NO: 654254 - RNA, 19 nt, Artificial Sequence
  Description of Artificial Sequence: Synthetic oligonucleotide
ugagaugugggaguuccag

SEQ ID NO: 654255 - RNA, 19 nt, Artificial Sequence
  Description of Artificial Sequence: Synthetic oligonucleotide
ugugugaaguuaccugaug

SEQ ID NO: 654256 - RNA, 19 nt, Artificial Sequence
  Description of Artificial Sequence: Synthetic oligonucleotide
aauuuccgcaguccaagaa

SEQ ID NO: 654257 - RNA, 19 nt, Artificial Sequence
  Description of Artificial Sequence: Synthetic oligonucleotide
gucaacuccauuguaggag

SEQ ID NO: 654258 - RNA, 19 nt, Artificial Sequence
  Description of Artificial Sequence: Synthetic oligonucleotide
agcugaucgagaaacaucu

SEQ ID NO: 654259 - RNA, 19 nt, Artificial Sequence
  Description of Artificial Sequence: Synthetic oligonucleotide
cauguuuaggucccagaag

SEQ ID NO: 654260 - RNA, 19 nt, Artificial Sequence
  Description of Artificial Sequence: Synthetic oligonucleotide
agguccucuuggcagaggg

SEQ ID NO: 654261 - RNA, 19 nt, Artificial Sequence
  Description of Artificial Sequence: Synthetic oligonucleotide
ugauccggauuccuuauuc

SEQ ID NO: 654262 - RNA, 19 nt, Artificial Sequence
  Description of Artificial Sequence: Synthetic oligonucleotide
aagaccgauugauucuuga

SEQ ID NO: 654263 - RNA, 19 nt, Artificial Sequence
  Description of Artificial Sequence: Synthetic oligonucleotide
cugucguagacaaucggac

SEQ ID NO: 654264 - RNA, 19 nt, Artificial Sequence
  Description of Artificial Sequence: Synthetic oligonucleotide
uugguacugucguagacaa

SEQ ID NO: 654265 - RNA, 19 nt, Artificial Sequence
  Description of Artificial Sequence: Synthetic oligonucleotide
guacugucaacuuuaggga

SEQ ID NO: 654266 - RNA, 19 nt, Artificial Sequence
  Description of Artificial Sequence: Synthetic oligonucleotide
accaucauaggugagcugu

SEQ ID NO: 654267 - RNA, 19 nt, Artificial Sequence
  Description of Artificial Sequence: Synthetic oligonucleotide
aguagauaagaccgauuga

SEQ ID NO: 654268 - RNA, 19 nt, Artificial Sequence
  Description of Artificial Sequence: Synthetic oligonucleotide
uuugaucucaucggagccc

SEQ ID NO: 654269 - RNA, 19 nt, Artificial Sequence
  Description of Artificial Sequence: Synthetic oligonucleotide
uauauccggauggacuggg

SEQ ID NO: 654270 - RNA, 19 nt, Artificial Sequence
  Description of Artificial Sequence: Synthetic oligonucleotide
accgauugauucuugaauu

SEQ ID NO: 654271 - RNA, 19 nt, Artificial Sequence
  Description of Artificial Sequence: Synthetic oligonucleotide
agaaugguagucuuuugua

SEQ ID NO: 654272 - RNA, 19 nt, Artificial Sequence
  Description of Artificial Sequence: Synthetic oligonucleotide
uuugcguccgugcuuguuc

SEQ ID NO: 654273 - RNA, 19 nt, Artificial Sequence
  Description of Artificial Sequence: Synthetic oligonucleotide
guacugcaggacuacagcc

SEQ ID NO: 654274 - RNA, 19 nt, Artificial Sequence
  Description of Artificial Sequence: Synthetic oligonucleotide
auguacguuggggauagac

SEQ ID NO: 654275 - RNA, 19 nt, Artificial Sequence
  Description of Artificial Sequence: Synthetic oligonucleotide
gaugagggaaguguugaug

SEQ ID NO: 654276 - RNA, 19 nt, Artificial Sequence
  Description of Artificial Sequence: Synthetic oligonucleotide
ucuaaacaggauagguaaa

SEQ ID NO: 654277 - RNA, 19 nt, Artificial Sequence
  Description of Artificial Sequence: Synthetic oligonucleotide
uauuaauuggucggcuaug

SEQ ID NO: 654278 - RNA, 19 nt, Artificial Sequence
  Description of Artificial Sequence: Synthetic oligonucleotide
augccaaagauggacgccg

SEQ ID NO: 654279 - RNA, 19 nt, Artificial Sequence
  Description of Artificial Sequence: Synthetic oligonucleotide
aguagaggggaugaugcag

SEQ ID NO: 654280 - RNA, 19 nt, Artificial Sequence
  Description of Artificial Sequence: Synthetic oligonucleotide
uuucugagggaaccgccgc

SEQ ID NO: 654281 - RNA, 19 nt, Artificial Sequence
  Description of Artificial Sequence: Synthetic oligonucleotide
agugaaacccguaggcugg

SEQ ID NO: 654282 - RNA, 19 nt, Artificial Sequence
  Description of Artificial Sequence: Synthetic oligonucleotide
gagauaaugucugguauga

SEQ ID NO: 654283 - RNA, 19 nt, Artificial Sequence
  Description of Artificial Sequence: Synthetic oligonucleotide
ugucguagacaaucggaca

SEQ ID NO: 654284 - RNA, 19 nt, Artificial Sequence
  Description of Artificial Sequence: Synthetic oligonucleotide
gauaagaccgauugauucu

SEQ ID NO: 654285 - RNA, 19 nt, Artificial Sequence
  Description of Artificial Sequence: Synthetic oligonucleotide
guuaccugaugcuccaaug

SEQ ID NO: 654286 - RNA, 19 nt, Artificial Sequence
  Description of Artificial Sequence: Synthetic oligonucleotide
cagugaaacccguaggcug

SEQ ID NO: 654287 - RNA, 19 nt, Artificial Sequence
  Description of Artificial Sequence: Synthetic oligonucleotide
guagaggggaugaugcagg

SEQ ID NO: 654288 - RNA, 19 nt, Artificial Sequence
  Description of Artificial Sequence: Synthetic oligonucleotide
gacauggaauugucagccg

SEQ ID NO: 654289 - RNA, 19 nt, Artificial Sequence
  Description of Artificial Sequence: Synthetic oligonucleotide
auuuccgcaguccaagaaa

SEQ ID NO: 654290 - RNA, 19 nt, Artificial Sequence
  Description of Artificial Sequence: Synthetic oligonucleotide
aggauagguaaaacagagc

SEQ ID NO: 654291 - RNA, 19 nt, Artificial Sequence
  Description of Artificial Sequence: Synthetic oligonucleotide
aaguucguguuugcguccg

SEQ ID NO: 654292 - RNA, 19 nt, Artificial Sequence
  Description of Artificial Sequence: Synthetic oligonucleotide
uuugcucguaaccucugaa

SEQ ID NO: 654293 - RNA, 19 nt, Artificial Sequence
  Description of Artificial Sequence: Synthetic oligonucleotide
cucaucggagcccaugagc

SEQ ID NO: 654294 - RNA, 19 nt, Artificial Sequence
  Description of Artificial Sequence: Synthetic oligonucleotide
cacgccauggccauggcuc

SEQ ID NO: 654295 - RNA, 19 nt, Artificial Sequence
  Description of Artificial Sequence: Synthetic oligonucleotide
uucauguuuaggucccaga

SEQ ID NO: 654296 - RNA, 19 nt, Artificial Sequence
  Description of Artificial Sequence: Synthetic oligonucleotide
auuuaguggugauguagga

SEQ ID NO: 654297 - RNA, 19 nt, Artificial Sequence
  Description of Artificial Sequence: Synthetic oligonucleotide
uccggauuccuuauucccu

SEQ ID NO: 654298 - RNA, 19 nt, Artificial Sequence
  Description of Artificial Sequence: Synthetic oligonucleotide
cauccaacaggucauagaa

SEQ ID NO: 654299 - RNA, 19 nt, Artificial Sequence
  Description of Artificial Sequence: Synthetic oligonucleotide
ucguaaccucugaagaaga

SEQ ID NO: 654300 - RNA, 19 nt, Artificial Sequence
  Description of Artificial Sequence: Synthetic oligonucleotide
gaacuguugaggacaacug

SEQ ID NO: 654301 - RNA, 19 nt, Artificial Sequence
  Description of Artificial Sequence: Synthetic oligonucleotide
ucggcuauguuguggaguc

SEQ ID NO: 654302 - RNA, 19 nt, Artificial Sequence
  Description of Artificial Sequence: Synthetic oligonucleotide
cucguaaccucugaagaag

SEQ ID NO: 654303 - RNA, 19 nt, Artificial Sequence
  Description of Artificial Sequence: Synthetic oligonucleotide
gauauuaauuggucggcua

SEQ ID NO: 654304 - RNA, 19 nt, Artificial Sequence
  Description of Artificial Sequence: Synthetic oligonucleotide
acgagauaaugucugguau

SEQ ID NO: 654305 - RNA, 19 nt, Artificial Sequence
  Description of Artificial Sequence: Synthetic oligonucleotide
ugauauuaauuggucggcu

SEQ ID NO: 654306 - RNA, 19 nt, Artificial Sequence
  Description of Artificial Sequence: Synthetic oligonucleotide
gacaaucggacaagugagg

SEQ ID NO: 654307 - RNA, 19 nt, Artificial Sequence
  Description of Artificial Sequence: Synthetic oligonucleotide
gguugugugaaguuaccug

SEQ ID NO: 654308 - RNA, 19 nt, Artificial Sequence
  Description of Artificial Sequence: Synthetic oligonucleotide
uggucaucugagacugccg

SEQ ID NO: 654309 - RNA, 19 nt, Artificial Sequence
  Description of Artificial Sequence: Synthetic oligonucleotide
uuauauccggauggacugg

SEQ ID NO: 654310 - RNA, 19 nt, Artificial Sequence
  Description of Artificial Sequence: Synthetic oligonucleotide
auuaauuggucggcuaugu

SEQ ID NO: 654311 - RNA, 19 nt, Artificial Sequence
  Description of Artificial Sequence: Synthetic oligonucleotide
uaggucaaucaccucgacu

SEQ ID NO: 654312 - RNA, 19 nt, Artificial Sequence
  Description of Artificial Sequence: Synthetic oligonucleotide
uggggauagacaaguccgc

SEQ ID NO: 654313 - RNA, 19 nt, Artificial Sequence
  Description of Artificial Sequence: Synthetic oligonucleotide
uggaaagggugccuguagu

SEQ ID NO: 654314 - RNA, 19 nt, Artificial Sequence
  Description of Artificial Sequence: Synthetic oligonucleotide
aaguauacucagaaccagu

SEQ ID NO: 654315 - RNA, 19 nt, Artificial Sequence
  Description of Artificial Sequence: Synthetic oligonucleotide
uagcugaucgagaaacauc

SEQ ID NO: 654316 - RNA, 19 nt, Artificial Sequence
  Description of Artificial Sequence: Synthetic oligonucleotide
cuauugagaguagauaaga

SEQ ID NO: 654317 - RNA, 19 nt, Artificial Sequence
  Description of Artificial Sequence: Synthetic oligonucleotide
aauggguauuuugguacug

SEQ ID NO: 654318 - RNA, 19 nt, Artificial Sequence
  Description of Artificial Sequence: Synthetic oligonucleotide
gguacugucguagacaauc

SEQ ID NO: 654319 - RNA, 19 nt, Artificial Sequence
  Description of Artificial Sequence: Synthetic oligonucleotide
uaagugcccgacauggaau

SEQ ID NO: 654320 - RNA, 19 nt, Artificial Sequence
  Description of Artificial Sequence: Synthetic oligonucleotide
gugauauuaauuggucggc

SEQ ID NO: 654321 - RNA, 19 nt, Artificial Sequence
  Description of Artificial Sequence: Synthetic oligonucleotide
gaaguucguguuugcgucc

SEQ ID NO: 654322 - RNA, 19 nt, Artificial Sequence
  Description of Artificial Sequence: Synthetic oligonucleotide
uucguguuugcguccgugc

SEQ ID NO: 654323 - RNA, 19 nt, Artificial Sequence
  Description of Artificial Sequence: Synthetic oligonucleotide
aguugcaucaaaacacuga

SEQ ID NO: 654324 - RNA, 19 nt, Artificial Sequence
  Description of Artificial Sequence: Synthetic oligonucleotide
gugucauauggaaagggug

SEQ ID NO: 654325 - RNA, 19 nt, Artificial Sequence
  Description of Artificial Sequence: Synthetic oligonucleotide
augaacugucuaugguuag

SEQ ID NO: 654326 - RNA, 19 nt, Artificial Sequence
  Description of Artificial Sequence: Synthetic oligonucleotide
uagauaagaccgauugauu

SEQ ID NO: 654327 - RNA, 19 nt, Artificial Sequence
  Description of Artificial Sequence: Synthetic oligonucleotide
ugaccaucauaggugagcu

SEQ ID NO: 654328 - RNA, 19 nt, Artificial Sequence
  Description of Artificial Sequence: Synthetic oligonucleotide
aggugucauauggaaaggg

SEQ ID NO: 654329 - RNA, 19 nt, Artificial Sequence
  Description of Artificial Sequence: Synthetic oligonucleotide
gaaugauccggauuccuua

SEQ ID NO: 654330 - RNA, 19 nt, Artificial Sequence
  Description of Artificial Sequence: Synthetic oligonucleotide
cuauuucacugucuggauc

SEQ ID NO: 654331 - RNA, 19 nt, Artificial Sequence
  Description of Artificial Sequence: Synthetic oligonucleotide
ugguagauggagacagagu

SEQ ID NO: 654332 - RNA, 19 nt, Artificial Sequence
  Description of Artificial Sequence: Synthetic oligonucleotide
cugaugcuagacugguggg

SEQ ID NO: 654333 - RNA, 19 nt, Artificial Sequence
  Description of Artificial Sequence: Synthetic oligonucleotide
agggcgucaguccaacgag

SEQ ID NO: 654334 - RNA, 19 nt, Artificial Sequence
  Description of Artificial Sequence: Synthetic oligonucleotide
uuaacaaaugaagggcuuu

SEQ ID NO: 654335 - RNA, 19 nt, Artificial Sequence
  Description of Artificial Sequence: Synthetic oligonucleotide
auuuugguacugucguaga

SEQ ID NO: 654336 - RNA, 19 nt, Artificial Sequence
  Description of Artificial Sequence: Synthetic oligonucleotide
agaaaacaacaauggguau

SEQ ID NO: 654337 - RNA, 19 nt, Artificial Sequence
  Description of Artificial Sequence: Synthetic oligonucleotide
agauggacgccguguccgc

SEQ ID NO: 654338 - RNA, 19 nt, Artificial Sequence
  Description of Artificial Sequence: Synthetic oligonucleotide
cauauggaaagggugccug

SEQ ID NO: 654339 - RNA, 19 nt, Artificial Sequence
  Description of Artificial Sequence: Synthetic oligonucleotide
aucucaucggagcccauga

SEQ ID NO: 654340 - RNA, 19 nt, Artificial Sequence
  Description of Artificial Sequence: Synthetic oligonucleotide
caggcgaugcuugaugagg

SEQ ID NO: 654341 - RNA, 19 nt, Artificial Sequence
  Description of Artificial Sequence: Synthetic oligonucleotide
aucauaggugagcugugga

SEQ ID NO: 654342 - RNA, 19 nt, Artificial Sequence
  Description of Artificial Sequence: Synthetic oligonucleotide
gaugaacugucuaugguua

SEQ ID NO: 654343 - RNA, 19 nt, Artificial Sequence
  Description of Artificial Sequence: Synthetic oligonucleotide
ucucaucggagcccaugag

SEQ ID NO: 654344 - RNA, 19 nt, Artificial Sequence
  Description of Artificial Sequence: Synthetic oligonucleotide
cuuccaauuuccgcagucc

SEQ ID NO: 654345 - RNA, 19 nt, Artificial Sequence
  Description of Artificial Sequence: Synthetic oligonucleotide
acaaucggacaagugaggu

SEQ ID NO: 654346 - RNA, 19 nt, Artificial Sequence
  Description of Artificial Sequence: Synthetic oligonucleotide
uccaauuuccgcaguccaa

SEQ ID NO: 654347 - RNA, 19 nt, Artificial Sequence
  Description of Artificial Sequence: Synthetic oligonucleotide
aaguccgcaggugucauaa

SEQ ID NO: 654348 - RNA, 19 nt, Artificial Sequence
  Description of Artificial Sequence: Synthetic oligonucleotide
ugcuauggauccacaugug

SEQ ID NO: 654349 - RNA, 19 nt, Artificial Sequence
  Description of Artificial Sequence: Synthetic oligonucleotide
gccgcauuuucccaagugg

SEQ ID NO: 654350 - RNA, 19 nt, Artificial Sequence
  Description of Artificial Sequence: Synthetic oligonucleotide
gcaaggcuaaguaaggaag

SEQ ID NO: 654351 - RNA, 19 nt, Artificial Sequence
  Description of Artificial Sequence: Synthetic oligonucleotide
uucugagggaaccgccgcc

SEQ ID NO: 654352 - RNA, 19 nt, Artificial Sequence
  Description of Artificial Sequence: Synthetic oligonucleotide
uugaucucaucggagccca

SEQ ID NO: 654353 - RNA, 19 nt, Artificial Sequence
  Description of Artificial Sequence: Synthetic oligonucleotide
aagugcccgacauggaauu

SEQ ID NO: 654354 - RNA, 19 nt, Artificial Sequence
  Description of Artificial Sequence: Synthetic oligonucleotide
uaagaccgauugauucuug

SEQ ID NO: 654355 - RNA, 19 nt, Artificial Sequence
  Description of Artificial Sequence: Synthetic oligonucleotide
gaugcuccaauguggagcu

SEQ ID NO: 654356 - RNA, 19 nt, Artificial Sequence
  Description of Artificial Sequence: Synthetic oligonucleotide
acccaucaauaauaaggug

SEQ ID NO: 654357 - RNA, 19 nt, Artificial Sequence
  Description of Artificial Sequence: Synthetic oligonucleotide
agagucgcuggcauaggac

SEQ ID NO: 654358 - RNA, 19 nt, Artificial Sequence
  Description of Artificial Sequence: Synthetic oligonucleotide
acugucguagacaaucgga

SEQ ID NO: 654359 - RNA, 19 nt, Artificial Sequence
  Description of Artificial Sequence: Synthetic oligonucleotide
guagauaagaccgauugau

SEQ ID NO: 654360 - RNA, 19 nt, Artificial Sequence
  Description of Artificial Sequence: Synthetic oligonucleotide
aaaagcgggaggagugcag

SEQ ID NO: 654361 - RNA, 19 nt, Artificial Sequence
  Description of Artificial Sequence: Synthetic oligonucleotide
gucauauggaaagggugcc

SEQ ID NO: 654362 - RNA, 19 nt, Artificial Sequence
  Description of Artificial Sequence: Synthetic oligonucleotide
acagguuucccgaagcgcu

SEQ ID NO: 654363 - RNA, 19 nt, Artificial Sequence
  Description of Artificial Sequence: Synthetic oligonucleotide
ggguauuuugguacugucg

SEQ ID NO: 654364 - RNA, 19 nt, Artificial Sequence
  Description of Artificial Sequence: Synthetic oligonucleotide
guacugucguagacaaucg

SEQ ID NO: 654365 - RNA, 19 nt, Artificial Sequence
  Description of Artificial Sequence: Synthetic oligonucleotide
ggaaccgccgccuguagag

SEQ ID NO: 654366 - RNA, 19 nt, Artificial Sequence
  Description of Artificial Sequence: Synthetic oligonucleotide
gagggcgucaguccaacga

SEQ ID NO: 654367 - RNA, 19 nt, Artificial Sequence
  Description of Artificial Sequence: Synthetic oligonucleotide
ugaagggcuuuuguaagaa

SEQ ID NO: 654368 - RNA, 19 nt, Artificial Sequence
  Description of Artificial Sequence: Synthetic oligonucleotide
auuaaagcucuagaaugau

SEQ ID NO: 654369 - RNA, 19 nt, Artificial Sequence
  Description of Artificial Sequence: Synthetic oligonucleotide
ggacagguccucuuggcag

SEQ ID NO: 654370 - RNA, 19 nt, Artificial Sequence
  Description of Artificial Sequence: Synthetic oligonucleotide
caaucggacaagugaggug

SEQ ID NO: 654371 - RNA, 19 nt, Artificial Sequence
  Description of Artificial Sequence: Synthetic oligonucleotide
auauggaaagggugccugu

SEQ ID NO: 654372 - RNA, 19 nt, Artificial Sequence
  Description of Artificial Sequence: Synthetic oligonucleotide
cugguugugugaaguuacc

SEQ ID NO: 654373 - RNA, 19 nt, Artificial Sequence
  Description of Artificial Sequence: Synthetic oligonucleotide
uagacugguggguuugauc

SEQ ID NO: 654374 - RNA, 19 nt, Artificial Sequence
  Description of Artificial Sequence: Synthetic oligonucleotide
uugcguccgugcuuguucc

SEQ ID NO: 654375 - RNA, 19 nt, Artificial Sequence
  Description of Artificial Sequence: Synthetic oligonucleotide
caguggagcaaauaacuaa

SEQ ID NO: 654376 - RNA, 19 nt, Artificial Sequence
  Description of Artificial Sequence: Synthetic oligonucleotide
guaagugcccgacauggaa

SEQ ID NO: 654377 - RNA, 19 nt, Artificial Sequence
  Description of Artificial Sequence: Synthetic oligonucleotide
gauguagcuuguaucuaca

SEQ ID NO: 654378 - RNA, 19 nt, Artificial Sequence
  Description of Artificial Sequence: Synthetic oligonucleotide
uuaauuggucggcuauguu

SEQ ID NO: 654379 - RNA, 19 nt, Artificial Sequence
  Description of Artificial Sequence: Synthetic oligonucleotide
ugaauguacguuggggaua

SEQ ID NO: 654380 - RNA, 19 nt, Artificial Sequence
  Description of Artificial Sequence: Synthetic oligonucleotide
cuaaacaggauagguaaaa

SEQ ID NO: 654381 - RNA, 19 nt, Artificial Sequence
  Description of Artificial Sequence: Synthetic oligonucleotide
uggauccacaugugggcug

SEQ ID NO: 654382 - RNA, 19 nt, Artificial Sequence
  Description of Artificial Sequence: Synthetic oligonucleotide
gugaaguuaccugaugcuc

SEQ ID NO: 654383 - RNA, 19 nt, Artificial Sequence
  Description of Artificial Sequence: Synthetic oligonucleotide
cuagaaugauccggauucc

SEQ ID NO: 654384 - RNA, 19 nt, Artificial Sequence
  Description of Artificial Sequence: Synthetic oligonucleotide
ugaugcuagacuggugggu

SEQ ID NO: 654385 - RNA, 19 nt, Artificial Sequence
  Description of Artificial Sequence: Synthetic oligonucleotide
cugucuaugguuaggucaa

SEQ ID NO: 654386 - RNA, 19 nt, Artificial Sequence
  Description of Artificial Sequence: Synthetic oligonucleotide
cugcgaggagguauacggg

SEQ ID NO: 654387 - RNA, 19 nt, Artificial Sequence
  Description of Artificial Sequence: Synthetic oligonucleotide
acaggcgaugcuugaugag

SEQ ID NO: 654388 - RNA, 19 nt, Artificial Sequence
  Description of Artificial Sequence: Synthetic oligonucleotide
ggaaguauacucagaacca

SEQ ID NO: 654389 - RNA, 19 nt, Artificial Sequence
  Description of Artificial Sequence: Synthetic oligonucleotide
cagggagguguuguaaugc

SEQ ID NO: 654390 - RNA, 19 nt, Artificial Sequence
  Description of Artificial Sequence: Synthetic oligonucleotide
cagcacuuagcugaucgag

SEQ ID NO: 654391 - RNA, 19 nt, Artificial Sequence
  Description of Artificial Sequence: Synthetic oligonucleotide
uauucccuuugcucguaac

SEQ ID NO: 654392 - RNA, 19 nt, Artificial Sequence
  Description of Artificial Sequence: Synthetic oligonucleotide
ugaggacaacuguuuuaca

SEQ ID NO: 654393 - RNA, 19 nt, Artificial Sequence
  Description of Artificial Sequence: Synthetic oligonucleotide
uaacaaaugaagggcuuuu

SEQ ID NO: 654394 - RNA, 19 nt, Artificial Sequence
  Description of Artificial Sequence: Synthetic oligonucleotide
cauaggugucauauggaaa

SEQ ID NO: 654395 - RNA, 19 nt, Artificial Sequence
  Description of Artificial Sequence: Synthetic oligonucleotide
gggauagacaaguccgcag

SEQ ID NO: 654396 - RNA, 19 nt, Artificial Sequence
  Description of Artificial Sequence: Synthetic oligonucleotide
ugguugugugaaguuaccu

SEQ ID NO: 654397 - RNA, 19 nt, Artificial Sequence
  Description of Artificial Sequence: Synthetic oligonucleotide
acguuggggauagacaagu

SEQ ID NO: 654398 - RNA, 19 nt, Artificial Sequence
  Description of Artificial Sequence: Synthetic oligonucleotide
ucauauggaaagggugccu

SEQ ID NO: 654399 - RNA, 19 nt, Artificial Sequence
  Description of Artificial Sequence: Synthetic oligonucleotide
agccgcauuuucccaagug

SEQ ID NO: 654400 - RNA, 19 nt, Artificial Sequence
  Description of Artificial Sequence: Synthetic oligonucleotide
acgacuugugacuuuucua

SEQ ID NO: 654401 - RNA, 19 nt, Artificial Sequence
  Description of Artificial Sequence: Synthetic oligonucleotide
guaagucauaaggcauagg

SEQ ID NO: 654402 - RNA, 19 nt, Artificial Sequence
  Description of Artificial Sequence: Synthetic oligonucleotide
uaaugcugauugucuccug

SEQ ID NO: 654403 - RNA, 19 nt, Artificial Sequence
  Description of Artificial Sequence: Synthetic oligonucleotide
auaagaccgauugauucuu

SEQ ID NO: 654404 - RNA, 19 nt, Artificial Sequence
  Description of Artificial Sequence: Synthetic oligonucleotide
guuaggucaaucaccucga

SEQ ID NO: 654405 - RNA, 19 nt, Artificial Sequence
  Description of Artificial Sequence: Synthetic oligonucleotide
ugcuagacugguggguuug

SEQ ID NO: 654406 - RNA, 19 nt, Artificial Sequence
  Description of Artificial Sequence: Synthetic oligonucleotide
ccgucaacuccauuguagg

SEQ ID NO: 654407 - RNA, 19 nt, Artificial Sequence
  Description of Artificial Sequence: Synthetic oligonucleotide
ugcaaacagguuucccgaa

SEQ ID NO: 654408 - RNA, 19 nt, Artificial Sequence
  Description of Artificial Sequence: Synthetic oligonucleotide
aaugguagauggagacaga

SEQ ID NO: 654409 - RNA, 19 nt, Artificial Sequence
  Description of Artificial Sequence: Synthetic oligonucleotide
guguuugcguccgugcuug

SEQ ID NO: 654410 - RNA, 19 nt, Artificial Sequence
  Description of Artificial Sequence: Synthetic oligonucleotide
gcuaaguaaggaaguauac

SEQ ID NO: 654411 - RNA, 19 nt, Artificial Sequence
  Description of Artificial Sequence: Synthetic oligonucleotide
gacuugugacuuuucuaaa

SEQ ID NO: 654412 - RNA, 19 nt, Artificial Sequence
  Description of Artificial Sequence: Synthetic oligonucleotide
ggacuugaauguacguugg

SEQ ID NO: 654413 - RNA, 19 nt, Artificial Sequence
  Description of Artificial Sequence: Synthetic oligonucleotide
gauagacaaguccgcaggu

SEQ ID NO: 654414 - RNA, 19 nt, Artificial Sequence
  Description of Artificial Sequence: Synthetic oligonucleotide
augaugcagggugaccauc

SEQ ID NO: 654415 - RNA, 19 nt, Artificial Sequence
  Description of Artificial Sequence: Synthetic oligonucleotide
ugcgggacacaggcgaugc

SEQ ID NO: 654416 - RNA, 19 nt, Artificial Sequence
  Description of Artificial Sequence: Synthetic oligonucleotide
gaguagaggggaugaugca

SEQ ID NO: 654417 - RNA, 19 nt, Artificial Sequence
  Description of Artificial Sequence: Synthetic oligonucleotide
ugagggaaccgccgccugu

SEQ ID NO: 654418 - RNA, 19 nt, Artificial Sequence
  Description of Artificial Sequence: Synthetic oligonucleotide
ucccagcguagcccaacag

SEQ ID NO: 654419 - RNA, 19 nt, Artificial Sequence
  Description of Artificial Sequence: Synthetic oligonucleotide
aucugcgaggagguauacg

SEQ ID NO: 654420 - RNA, 19 nt, Artificial Sequence
  Description of Artificial Sequence: Synthetic oligonucleotide
ggaugaugcagggugacca

SEQ ID NO: 654421 - RNA, 19 nt, Artificial Sequence
  Description of Artificial Sequence: Synthetic oligonucleotide
uuagggaaacugacuucuu

SEQ ID NO: 654422 - RNA, 19 nt, Artificial Sequence
  Description of Artificial Sequence: Synthetic oligonucleotide
guaaggaaguauacucaga

SEQ ID NO: 654423 - RNA, 19 nt, Artificial Sequence
  Description of Artificial Sequence: Synthetic oligonucleotide
aaguguugauguagcuugu

SEQ ID NO: 654424 - RNA, 19 nt, Artificial Sequence
  Description of Artificial Sequence: Synthetic oligonucleotide
caacagaacuuggaguuca

SEQ ID NO: 654425 - RNA, 19 nt, Artificial Sequence
  Description of Artificial Sequence: Synthetic oligonucleotide
ggagguguuguaaugcuga

SEQ ID NO: 654426 - RNA, 19 nt, Artificial Sequence
  Description of Artificial Sequence: Synthetic oligonucleotide
agcacuuagcugaucgaga

SEQ ID NO: 654427 - RNA, 19 nt, Artificial Sequence
  Description of Artificial Sequence: Synthetic oligonucleotide
cacaggcgaugcuugauga

SEQ ID NO: 654428 - RNA, 19 nt, Artificial Sequence
  Description of Artificial Sequence: Synthetic oligonucleotide
cuguugucugaugcuagac

SEQ ID NO: 654429 - RNA, 19 nt, Artificial Sequence
  Description of Artificial Sequence: Synthetic oligonucleotide
ugccaaagauggacgccgu

SEQ ID NO: 654430 - RNA, 19 nt, Artificial Sequence
  Description of Artificial Sequence: Synthetic oligonucleotide
ccaauuuccgcaguccaag

SEQ ID NO: 654431 - RNA, 19 nt, Artificial Sequence
  Description of Artificial Sequence: Synthetic oligonucleotide
caaggcuaaguaaggaagu

SEQ ID NO: 654432 - RNA, 19 nt, Artificial Sequence
  Description of Artificial Sequence: Synthetic oligonucleotide
gucauaaggcauagguguc

SEQ ID NO: 654433 - RNA, 19 nt, Artificial Sequence
  Description of Artificial Sequence: Synthetic oligonucleotide
ggaaagggugccuguaguc

SEQ ID NO: 654434 - RNA, 19 nt, Artificial Sequence
  Description of Artificial Sequence: Synthetic oligonucleotide
aaccgccgccuguagaguu

SEQ ID NO: 654435 - RNA, 19 nt, Artificial Sequence
  Description of Artificial Sequence: Synthetic oligonucleotide
caucaauaauaagguguuc

SEQ ID NO: 654436 - RNA, 19 nt, Artificial Sequence
  Description of Artificial Sequence: Synthetic oligonucleotide
acccguaggcuggugguag

SEQ ID NO: 654437 - RNA, 19 nt, Artificial Sequence
  Description of Artificial Sequence: Synthetic oligonucleotide
gacugguugugugaaguua

SEQ ID NO: 654438 - RNA, 19 nt, Artificial Sequence
  Description of Artificial Sequence: Synthetic oligonucleotide
cagcguagcccaacagaac

SEQ ID NO: 654439 - RNA, 19 nt, Artificial Sequence
  Description of Artificial Sequence: Synthetic oligonucleotide
guauuuugguacugucgua

SEQ ID NO: 654440 - RNA, 19 nt, Artificial Sequence
  Description of Artificial Sequence: Synthetic oligonucleotide
ggaucuccauaaacaaccc

SEQ ID NO: 654441 - RNA, 19 nt, Artificial Sequence
  Description of Artificial Sequence: Synthetic oligonucleotide
gaauugcuauggauccaca

SEQ ID NO: 654442 - RNA, 19 nt, Artificial Sequence
  Description of Artificial Sequence: Synthetic oligonucleotide
uggcuguugucugaugcua

SEQ ID NO: 654443 - RNA, 19 nt, Artificial Sequence
  Description of Artificial Sequence: Synthetic oligonucleotide
ggcuaaguaaggaaguaua

SEQ ID NO: 654444 - RNA, 19 nt, Artificial Sequence
  Description of Artificial Sequence: Synthetic oligonucleotide
gggaguagaggggaugaug

SEQ ID NO: 654445 - RNA, 19 nt, Artificial Sequence
  Description of Artificial Sequence: Synthetic oligonucleotide
aggcgaugcuugaugagga

SEQ ID NO: 654446 - RNA, 19 nt, Artificial Sequence
  Description of Artificial Sequence: Synthetic oligonucleotide
gucuaugguuaggucaauc

SEQ ID NO: 654447 - RNA, 19 nt, Artificial Sequence
  Description of Artificial Sequence: Synthetic oligonucleotide
aucggagcccaugagccau

SEQ ID NO: 654448 - RNA, 19 nt, Artificial Sequence
  Description of Artificial Sequence: Synthetic oligonucleotide
aggacuacagccagccuuu

SEQ ID NO: 654449 - RNA, 19 nt, Artificial Sequence
  Description of Artificial Sequence: Synthetic oligonucleotide
gcgaugcuugaugaggaag

SEQ ID NO: 654450 - RNA, 19 nt, Artificial Sequence
  Description of Artificial Sequence: Synthetic oligonucleotide
gagaguagauaagaccgau

SEQ ID NO: 654451 - RNA, 19 nt, Artificial Sequence
  Description of Artificial Sequence: Synthetic oligonucleotide
agauaaugucugguaugau

SEQ ID NO: 654452 - RNA, 19 nt, Artificial Sequence
  Description of Artificial Sequence: Synthetic oligonucleotide
agaguagauaagaccgauu

SEQ ID NO: 654453 - RNA, 19 nt, Artificial Sequence
  Description of Artificial Sequence: Synthetic oligonucleotide
augauccggauuccuuauu

SEQ ID NO: 654454 - RNA, 19 nt, Artificial Sequence
  Description of Artificial Sequence: Synthetic oligonucleotide
agggaaccgccgccuguag

SEQ ID NO: 654455 - RNA, 19 nt, Artificial Sequence
  Description of Artificial Sequence: Synthetic oligonucleotide
gaugcuagacugguggguu

SEQ ID NO: 654456 - RNA, 19 nt, Artificial Sequence
  Description of Artificial Sequence: Synthetic oligonucleotide
gaugaugcagggugaccau

SEQ ID NO: 654457 - RNA, 19 nt, Artificial Sequence
  Description of Artificial Sequence: Synthetic oligonucleotide
ccugaugcuccaaugugga

SEQ ID NO: 654458 - RNA, 19 nt, Artificial Sequence
  Description of Artificial Sequence: Synthetic oligonucleotide
ugguagucuuuuguagcuu

SEQ ID NO: 654459 - RNA, 19 nt, Artificial Sequence
  Description of Artificial Sequence: Synthetic oligonucleotide
guguccgcgcugcuccugc

SEQ ID NO: 654460 - RNA, 19 nt, Artificial Sequence
  Description of Artificial Sequence: Synthetic oligonucleotide
gcucguaaccucugaagaa

SEQ ID NO: 654461 - RNA, 19 nt, Artificial Sequence
  Description of Artificial Sequence: Synthetic oligonucleotide
cgacuugugacuuuucuaa

SEQ ID NO: 654462 - RNA, 19 nt, Artificial Sequence
  Description of Artificial Sequence: Synthetic oligonucleotide
agguguucauauggagccu

SEQ ID NO: 654463 - RNA, 19 nt, Artificial Sequence
  Description of Artificial Sequence: Synthetic oligonucleotide
agugcccgacauggaauug

SEQ ID NO: 654464 - RNA, 19 nt, Artificial Sequence
  Description of Artificial Sequence: Synthetic oligonucleotide
cauccgucaacuccauugu

SEQ ID NO: 654465 - RNA, 19 nt, Artificial Sequence
  Description of Artificial Sequence: Synthetic oligonucleotide
augcuagacugguggguuu

SEQ ID NO: 654466 - RNA, 19 nt, Artificial Sequence
  Description of Artificial Sequence: Synthetic oligonucleotide
auccgucaacuccauugua

SEQ ID NO: 654467 - RNA, 19 nt, Artificial Sequence
  Description of Artificial Sequence: Synthetic oligonucleotide
acaucugcgaggagguaua

SEQ ID NO: 654468 - RNA, 19 nt, Artificial Sequence
  Description of Artificial Sequence: Synthetic oligonucleotide
ugguacugucguagacaau

SEQ ID NO: 654469 - RNA, 19 nt, Artificial Sequence
  Description of Artificial Sequence: Synthetic oligonucleotide
cauaggugagcuguggaau

SEQ ID NO: 654470 - RNA, 19 nt, Artificial Sequence
  Description of Artificial Sequence: Synthetic oligonucleotide
ggaacagguaagugcccga

SEQ ID NO: 654471 - RNA, 19 nt, Artificial Sequence
  Description of Artificial Sequence: Synthetic oligonucleotide
auccaacaggucauagaau

SEQ ID NO: 654472 - RNA, 19 nt, Artificial Sequence
  Description of Artificial Sequence: Synthetic oligonucleotide
ccgcauuuucccaagugga

SEQ ID NO: 654473 - RNA, 19 nt, Artificial Sequence
  Description of Artificial Sequence: Synthetic oligonucleotide
agguguuguaaugcugauu

SEQ ID NO: 654474 - RNA, 19 nt, Artificial Sequence
  Description of Artificial Sequence: Synthetic oligonucleotide
ggugucauauggaaagggu

SEQ ID NO: 654475 - RNA, 19 nt, Artificial Sequence
  Description of Artificial Sequence: Synthetic oligonucleotide
gucugaugcuagacuggug

SEQ ID NO: 654476 - RNA, 19 nt, Artificial Sequence
  Description of Artificial Sequence: Synthetic oligonucleotide
uuguggagucaaggcaaau

SEQ ID NO: 654477 - RNA, 19 nt, Artificial Sequence
  Description of Artificial Sequence: Synthetic oligonucleotide
cgucaguccaacgagauaa

SEQ ID NO: 654478 - RNA, 19 nt, Artificial Sequence
  Description of Artificial Sequence: Synthetic oligonucleotide
gcuauguuguggagucaag

SEQ ID NO: 654479 - RNA, 19 nt, Artificial Sequence
  Description of Artificial Sequence: Synthetic oligonucleotide
caugagccauccuccuuaa

SEQ ID NO: 654480 - RNA, 19 nt, Artificial Sequence
  Description of Artificial Sequence: Synthetic oligonucleotide
uguuugcguccgugcuugu

SEQ ID NO: 654481 - RNA, 19 nt, Artificial Sequence
  Description of Artificial Sequence: Synthetic oligonucleotide
ugucuaugguuaggucaau

SEQ ID NO: 654482 - RNA, 19 nt, Artificial Sequence
  Description of Artificial Sequence: Synthetic oligonucleotide
gguagucuuuuguagcuuu

SEQ ID NO: 654483 - RNA, 19 nt, Artificial Sequence
  Description of Artificial Sequence: Synthetic oligonucleotide
ucaccucgacuuucuuguu

SEQ ID NO: 654484 - RNA, 19 nt, Artificial Sequence
  Description of Artificial Sequence: Synthetic oligonucleotide
ugcguccgugcuuguuccu

SEQ ID NO: 654485 - RNA, 19 nt, Artificial Sequence
  Description of Artificial Sequence: Synthetic oligonucleotide
guagucuuuuguagcuuua

SEQ ID NO: 654486 - RNA, 19 nt, Artificial Sequence
  Description of Artificial Sequence: Synthetic oligonucleotide
aauguacguuggggauaga

SEQ ID NO: 654487 - RNA, 19 nt, Artificial Sequence
  Description of Artificial Sequence: Synthetic oligonucleotide
caucugcgaggagguauac

SEQ ID NO: 654488 - RNA, 19 nt, Artificial Sequence
  Description of Artificial Sequence: Synthetic oligonucleotide
guccaacgagauaaugucu

SEQ ID NO: 654489 - RNA, 19 nt, Artificial Sequence
  Description of Artificial Sequence: Synthetic oligonucleotide
ugaucucaucggagcccau

SEQ ID NO: 654490 - RNA, 19 nt, Artificial Sequence
  Description of Artificial Sequence: Synthetic oligonucleotide
ucggacaagugaggugaua

SEQ ID NO: 654491 - RNA, 19 nt, Artificial Sequence
  Description of Artificial Sequence: Synthetic oligonucleotide
auauccggauggacugggu

SEQ ID NO: 654492 - RNA, 19 nt, Artificial Sequence
  Description of Artificial Sequence: Synthetic oligonucleotide
cgagaaacaucugcgagga

SEQ ID NO: 654493 - RNA, 19 nt, Artificial Sequence
  Description of Artificial Sequence: Synthetic oligonucleotide
ggggauagacaaguccgca

SEQ ID NO: 654494 - RNA, 19 nt, Artificial Sequence
  Description of Artificial Sequence: Synthetic oligonucleotide
caacgagauaaugucuggu

SEQ ID NO: 654495 - RNA, 19 nt, Artificial Sequence
  Description of Artificial Sequence: Synthetic oligonucleotide
agucgcuggcauaggacuu

SEQ ID NO: 654496 - RNA, 19 nt, Artificial Sequence
  Description of Artificial Sequence: Synthetic oligonucleotide
uguccgcgcugcuccugcu

SEQ ID NO: 654497 - RNA, 19 nt, Artificial Sequence
  Description of Artificial Sequence: Synthetic oligonucleotide
aagcauccgucaacuccau

SEQ ID NO: 654498 - RNA, 19 nt, Artificial Sequence
  Description of Artificial Sequence: Synthetic oligonucleotide
gcccaacagaacuuggagu

SEQ ID NO: 654499 - RNA, 19 nt, Artificial Sequence
  Description of Artificial Sequence: Synthetic oligonucleotide
gaugcagggugaccaucau

SEQ ID NO: 654500 - RNA, 19 nt, Artificial Sequence
  Description of Artificial Sequence: Synthetic oligonucleotide
cucccagcguagcccaaca

SEQ ID NO: 654501 - RNA, 19 nt, Artificial Sequence
  Description of Artificial Sequence: Synthetic oligonucleotide
gcugaucgagaaacaucug

SEQ ID NO: 654502 - RNA, 19 nt, Artificial Sequence
  Description of Artificial Sequence: Synthetic oligonucleotide
cccagcguagcccaacaga

SEQ ID NO: 654503 - RNA, 19 nt, Artificial Sequence
  Description of Artificial Sequence: Synthetic oligonucleotide
ccgauugauucuugaauua

SEQ ID NO: 654504 - RNA, 19 nt, Artificial Sequence
  Description of Artificial Sequence: Synthetic oligonucleotide
ggacaaacccacguuggcu

SEQ ID NO: 654505 - RNA, 19 nt, Artificial Sequence
  Description of Artificial Sequence: Synthetic oligonucleotide
gugcgggacacaggcgaug

SEQ ID NO: 654506 - RNA, 19 nt, Artificial Sequence
  Description of Artificial Sequence: Synthetic oligonucleotide
agcauccgucaacuccauu

SEQ ID NO: 654507 - RNA, 19 nt, Artificial Sequence
  Description of Artificial Sequence: Synthetic oligonucleotide
ccaacagaacuuggaguuc

SEQ ID NO: 654508 - RNA, 19 nt, Artificial Sequence
  Description of Artificial Sequence: Synthetic oligonucleotide
gguccucuuggcagagggc

SEQ ID NO: 654509 - RNA, 19 nt, Artificial Sequence
  Description of Artificial Sequence: Synthetic oligonucleotide
cgcaggugucauaauuuuc

SEQ ID NO: 654510 - RNA, 19 nt, Artificial Sequence
  Description of Artificial Sequence: Synthetic oligonucleotide
cagcgcugaugugagaugu

SEQ ID NO: 654511 - RNA, 19 nt, Artificial Sequence
  Description of Artificial Sequence: Synthetic oligonucleotide
uggcagcgcugaugugaga

SEQ ID NO: 654512 - RNA, 19 nt, Artificial Sequence
  Description of Artificial Sequence: Synthetic oligonucleotide
gguaagugcccgacaugga

SEQ ID NO: 654513 - RNA, 19 nt, Artificial Sequence
  Description of Artificial Sequence: Synthetic oligonucleotide
ggcauaggacuugaaugua

SEQ ID NO: 654514 - RNA, 19 nt, Artificial Sequence
  Description of Artificial Sequence: Synthetic oligonucleotide
ggcgaugcuugaugaggaa

SEQ ID NO: 654515 - RNA, 19 nt, Artificial Sequence
  Description of Artificial Sequence: Synthetic oligonucleotide
gggaaccgccgccuguaga

SEQ ID NO: 654516 - RNA, 19 nt, Artificial Sequence
  Description of Artificial Sequence: Synthetic oligonucleotide
aucggacaagugaggugau

SEQ ID NO: 654517 - RNA, 19 nt, Artificial Sequence
  Description of Artificial Sequence: Synthetic oligonucleotide
ggcagcgcugaugugagau

SEQ ID NO: 654518 - RNA, 19 nt, Artificial Sequence
  Description of Artificial Sequence: Synthetic oligonucleotide
ggugccuguaguccuggau

SEQ ID NO: 654519 - RNA, 19 nt, Artificial Sequence
  Description of Artificial Sequence: Synthetic oligonucleotide
cgucaacuccauuguagga

SEQ ID NO: 654520 - RNA, 19 nt, Artificial Sequence
  Description of Artificial Sequence: Synthetic oligonucleotide
cccguaggcuggugguagc

SEQ ID NO: 654521 - RNA, 19 nt, Artificial Sequence
  Description of Artificial Sequence: Synthetic oligonucleotide
ccuuauucccuuugcucgu

SEQ ID NO: 654522 - RNA, 19 nt, Artificial Sequence
  Description of Artificial Sequence: Synthetic oligonucleotide
caaguccgcaggugucaua

SEQ ID NO: 654523 - RNA, 19 nt, Artificial Sequence
  Description of Artificial Sequence: Synthetic oligonucleotide
gaaccgccgccuguagagu

SEQ ID NO: 654524 - RNA, 19 nt, Artificial Sequence
  Description of Artificial Sequence: Synthetic oligonucleotide
cacaugugggcugcacugu

SEQ ID NO: 654525 - RNA, 19 nt, Artificial Sequence
  Description of Artificial Sequence: Synthetic oligonucleotide
gguguucauauggagccuu

SEQ ID NO: 654526 - RNA, 19 nt, Artificial Sequence
  Description of Artificial Sequence: Synthetic oligonucleotide
cuggccacgccauggccau

SEQ ID NO: 654527 - RNA, 19 nt, Artificial Sequence
  Description of Artificial Sequence: Synthetic oligonucleotide
gggcgucaguccaacgaga

SEQ ID NO: 654528 - RNA, 19 nt, Artificial Sequence
  Description of Artificial Sequence: Synthetic oligonucleotide
ccgccuguagaguucuuua

SEQ ID NO: 654529 - RNA, 19 nt, Artificial Sequence
  Description of Artificial Sequence: Synthetic oligonucleotide
ggacugguugugugaaguu

SEQ ID NO: 654530 - RNA, 19 nt, Artificial Sequence
  Description of Artificial Sequence: Synthetic oligonucleotide
cuagacugguggguuugau

SEQ ID NO: 654531 - RNA, 19 nt, Artificial Sequence
  Description of Artificial Sequence: Synthetic oligonucleotide
ggcgucaguccaacgagau

SEQ ID NO: 654532 - RNA, 19 nt, Artificial Sequence
  Description of Artificial Sequence: Synthetic oligonucleotide
gcgucaguccaacgagaua

SEQ ID NO: 654533 - RNA, 19 nt, Artificial Sequence
  Description of Artificial Sequence: Synthetic oligonucleotide
ggcuuccuaugucaugcuu

SEQ ID NO: 654534 - RNA, 19 nt, Artificial Sequence
  Description of Artificial Sequence: Synthetic oligonucleotide
acgccguguccgcgcugcu

SEQ ID NO: 654535 - RNA, 19 nt, Artificial Sequence
  Description of Artificial Sequence: Synthetic oligonucleotide
cgaggagguauacgggaaa

SEQ ID NO: 654536 - RNA, 19 nt, Artificial Sequence
  Description of Artificial Sequence: Synthetic oligonucleotide
ccaaaacgacuugugacuu

SEQ ID NO: 654537 - RNA, 19 nt, Artificial Sequence
  Description of Artificial Sequence: Synthetic oligonucleotide
gccacgccauggccauggc

SEQ ID NO: 654538 - RNA, 19 nt, Artificial Sequence
  Description of Artificial Sequence: Synthetic oligonucleotide
ggugcgggacacaggcgau

SEQ ID NO: 654539 - RNA, 19 nt, Artificial Sequence
  Description of Artificial Sequence: Synthetic oligonucleotide
gcguagcccaacagaacuu

SEQ ID NO: 654540 - RNA, 19 nt, Artificial Sequence
  Description of Artificial Sequence: Synthetic oligonucleotide
ggcucucccucagacuguu

SEQ ID NO: 654541 - RNA, 19 nt, Artificial Sequence
  Description of Artificial Sequence: Synthetic oligonucleotide
cguguccgcgcugcuccug

SEQ ID NO: 654542 - RNA, 19 nt, Artificial Sequence
  Description of Artificial Sequence: Synthetic oligonucleotide
cggauuccuuauucccuuu

SEQ ID NO: 654543 - RNA, 19 nt, Artificial Sequence
  Description of Artificial Sequence: Synthetic oligonucleotide
aauauguggaguuaggcac

SEQ ID NO: 654544 - RNA, 19 nt, Artificial Sequence
  Description of Artificial Sequence: Synthetic oligonucleotide
uucagauuaacacugacac

SEQ ID NO: 654545 - RNA, 19 nt, Artificial Sequence
  Description of Artificial Sequence: Synthetic oligonucleotide
aguuucagaauauaaccgc

SEQ ID NO: 654546 - RNA, 19 nt, Artificial Sequence
  Description of Artificial Sequence: Synthetic oligonucleotide
aucgcuacaaauugcaacc

SEQ ID NO: 654547 - RNA, 19 nt, Artificial Sequence
  Description of Artificial Sequence: Synthetic oligonucleotide
aauauaaccgcauaacuua

SEQ ID NO: 654548 - RNA, 19 nt, Artificial Sequence
  Description of Artificial Sequence: Synthetic oligonucleotide
aaccgcauaacuuagacau

SEQ ID NO: 654549 - RNA, 19 nt, Artificial Sequence
  Description of Artificial Sequence: Synthetic oligonucleotide
auaacuuagacauuauucu

SEQ ID NO: 654550 - RNA, 19 nt, Artificial Sequence
  Description of Artificial Sequence: Synthetic oligonucleotide
aauuaugcuaacaacaccu

SEQ ID NO: 654551 - RNA, 19 nt, Artificial Sequence
  Description of Artificial Sequence: Synthetic oligonucleotide
gauacaacugcuuucugag

SEQ ID NO: 654552 - RNA, 19 nt, Artificial Sequence
  Description of Artificial Sequence: Synthetic oligonucleotide
auuuaaguggcagaaacac

SEQ ID NO: 654553 - RNA, 19 nt, Artificial Sequence
  Description of Artificial Sequence: Synthetic oligonucleotide
aucccauccgaacagaagc

SEQ ID NO: 654554 - RNA, 19 nt, Artificial Sequence
  Description of Artificial Sequence: Synthetic oligonucleotide
gaauaugaagcuucucucg

SEQ ID NO: 654555 - RNA, 19 nt, Artificial Sequence
  Description of Artificial Sequence: Synthetic oligonucleotide
auaacaucgcuacaaauug

SEQ ID NO: 654556 - RNA, 19 nt, Artificial Sequence
  Description of Artificial Sequence: Synthetic oligonucleotide
aauacgaaugcugagaaau

SEQ ID NO: 654557 - RNA, 19 nt, Artificial Sequence
  Description of Artificial Sequence: Synthetic oligonucleotide
uaaagagacaaauuuugca

SEQ ID NO: 654558 - RNA, 19 nt, Artificial Sequence
  Description of Artificial Sequence: Synthetic oligonucleotide
auaaccgcauaacuuagac

SEQ ID NO: 654559 - RNA, 19 nt, Artificial Sequence
  Description of Artificial Sequence: Synthetic oligonucleotide
uagauguagaaccauucag

SEQ ID NO: 654560 - RNA, 19 nt, Artificial Sequence
  Description of Artificial Sequence: Synthetic oligonucleotide
cuguauaccacugucaucc

SEQ ID NO: 654561 - RNA, 19 nt, Artificial Sequence
  Description of Artificial Sequence: Synthetic oligonucleotide
aguguaacuggauacaacu

SEQ ID NO: 654562 - RNA, 19 nt, Artificial Sequence
  Description of Artificial Sequence: Synthetic oligonucleotide
aauugcaacccagagucac

SEQ ID NO: 654563 - RNA, 19 nt, Artificial Sequence
  Description of Artificial Sequence: Synthetic oligonucleotide
uccuguagaaauaauuuac

SEQ ID NO: 654564 - RNA, 19 nt, Artificial Sequence
  Description of Artificial Sequence: Synthetic oligonucleotide
gauuauaugaaaccaugga

SEQ ID NO: 654565 - RNA, 19 nt, Artificial Sequence
  Description of Artificial Sequence: Synthetic oligonucleotide
agacaugcaaagccggucc

SEQ ID NO: 654566 - RNA, 19 nt, Artificial Sequence
  Description of Artificial Sequence: Synthetic oligonucleotide
acaaauauuuagcugggcu

SEQ ID NO: 654567 - RNA, 19 nt, Artificial Sequence
  Description of Artificial Sequence: Synthetic oligonucleotide
agaauauguggaguuaggc

SEQ ID NO: 654568 - RNA, 19 nt, Artificial Sequence
  Description of Artificial Sequence: Synthetic oligonucleotide
gaguuucagaauauaaccg

SEQ ID NO: 654569 - RNA, 19 nt, Artificial Sequence
  Description of Artificial Sequence: Synthetic oligonucleotide
agaauauaaccgcauaacu

SEQ ID NO: 654570 - RNA, 19 nt, Artificial Sequence
  Description of Artificial Sequence: Synthetic oligonucleotide
uuaacacugacacuugguc

SEQ ID NO: 654571 - RNA, 19 nt, Artificial Sequence
  Description of Artificial Sequence: Synthetic oligonucleotide
gauuaacacugacacuugg

SEQ ID NO: 654572 - RNA, 19 nt, Artificial Sequence
  Description of Artificial Sequence: Synthetic oligonucleotide
uguucaucggcacuggagu

SEQ ID NO: 654573 - RNA, 19 nt, Artificial Sequence
  Description of Artificial Sequence: Synthetic oligonucleotide
gagaaaugcaucccauccg

SEQ ID NO: 654574 - RNA, 19 nt, Artificial Sequence
  Description of Artificial Sequence: Synthetic oligonucleotide
agauguagaaccauucagg

SEQ ID NO: 654575 - RNA, 19 nt, Artificial Sequence
  Description of Artificial Sequence: Synthetic oligonucleotide
aaguacccuuuccagagag

SEQ ID NO: 654576 - RNA, 19 nt, Artificial Sequence
  Description of Artificial Sequence: Synthetic oligonucleotide
aguuaugcuaaccccauga

SEQ ID NO: 654577 - RNA, 19 nt, Artificial Sequence
  Description of Artificial Sequence: Synthetic oligonucleotide
aaugaauagcaacucguuu

SEQ ID NO: 654578 - RNA, 19 nt, Artificial Sequence
  Description of Artificial Sequence: Synthetic oligonucleotide
accccaugaauuuaaauga

SEQ ID NO: 654579 - RNA, 19 nt, Artificial Sequence
  Description of Artificial Sequence: Synthetic oligonucleotide
auagcaacucguuuuauaa

SEQ ID NO: 654580 - RNA, 19 nt, Artificial Sequence
  Description of Artificial Sequence: Synthetic oligonucleotide
aguaagaagccuuaaugaa

SEQ ID NO: 654581 - RNA, 19 nt, Artificial Sequence
  Description of Artificial Sequence: Synthetic oligonucleotide
aguuugcuaaauuaacaca

SEQ ID NO: 654582 - RNA, 19 nt, Artificial Sequence
  Description of Artificial Sequence: Synthetic oligonucleotide
aacucguuuuauaaaauga

SEQ ID NO: 654583 - RNA, 19 nt, Artificial Sequence
  Description of Artificial Sequence: Synthetic oligonucleotide
gacuacaugucuuaagcuc

SEQ ID NO: 654584 - RNA, 19 nt, Artificial Sequence
  Description of Artificial Sequence: Synthetic oligonucleotide
auagcaggaagauacugca

SEQ ID NO: 654585 - RNA, 19 nt, Artificial Sequence
  Description of Artificial Sequence: Synthetic oligonucleotide
uggaguuaugcuaacccca

SEQ ID NO: 654586 - RNA, 19 nt, Artificial Sequence
  Description of Artificial Sequence: Synthetic oligonucleotide
ugugaauacgaaugcugag

SEQ ID NO: 654587 - RNA, 19 nt, Artificial Sequence
  Description of Artificial Sequence: Synthetic oligonucleotide
ugaucauucguugguaugc

SEQ ID NO: 654588 - RNA, 19 nt, Artificial Sequence
  Description of Artificial Sequence: Synthetic oligonucleotide
uuagggucuaauuugugau

SEQ ID NO: 654589 - RNA, 19 nt, Artificial Sequence
  Description of Artificial Sequence: Synthetic oligonucleotide
augaauagcaacucguuuu

SEQ ID NO: 654590 - RNA, 19 nt, Artificial Sequence
  Description of Artificial Sequence: Synthetic oligonucleotide
aaguggcagaaacacaccu

SEQ ID NO: 654591 - RNA, 19 nt, Artificial Sequence
  Description of Artificial Sequence: Synthetic oligonucleotide
aauggugugugugugugug

SEQ ID NO: 654592 - RNA, 19 nt, Artificial Sequence
  Description of Artificial Sequence: Synthetic oligonucleotide
uuaugcuaacaacaccugu

SEQ ID NO: 654593 - RNA, 19 nt, Artificial Sequence
  Description of Artificial Sequence: Synthetic oligonucleotide
gacacccugucucauuugg

SEQ ID NO: 654594 - RNA, 19 nt, Artificial Sequence
  Description of Artificial Sequence: Synthetic oligonucleotide
aaauuagggucuaauuugu

SEQ ID NO: 654595 - RNA, 19 nt, Artificial Sequence
  Description of Artificial Sequence: Synthetic oligonucleotide
acggguaucaaaugccauc

SEQ ID NO: 654596 - RNA, 19 nt, Artificial Sequence
  Description of Artificial Sequence: Synthetic oligonucleotide
aagacaugcaaagccgguc

SEQ ID NO: 654597 - RNA, 19 nt, Artificial Sequence
  Description of Artificial Sequence: Synthetic oligonucleotide
ucacaacggagaaaaguca

SEQ ID NO: 654598 - RNA, 19 nt, Artificial Sequence
  Description of Artificial Sequence: Synthetic oligonucleotide
caucgcuacaaauugcaac

SEQ ID NO: 654599 - RNA, 19 nt, Artificial Sequence
  Description of Artificial Sequence: Synthetic oligonucleotide
aggucuaucaagaauggug

SEQ ID NO: 654600 - RNA, 19 nt, Artificial Sequence
  Description of Artificial Sequence: Synthetic oligonucleotide
ucuaucaagaauggugugu

SEQ ID NO: 654601 - RNA, 19 nt, Artificial Sequence
  Description of Artificial Sequence: Synthetic oligonucleotide
ugcaucuaacaacacuucu

SEQ ID NO: 654602 - RNA, 19 nt, Artificial Sequence
  Description of Artificial Sequence: Synthetic oligonucleotide
cauguauuaccaaggcaag

SEQ ID NO: 654603 - RNA, 19 nt, Artificial Sequence
  Description of Artificial Sequence: Synthetic oligonucleotide
uuaccaaggcaagaaaaca

SEQ ID NO: 654604 - RNA, 19 nt, Artificial Sequence
  Description of Artificial Sequence: Synthetic oligonucleotide
uaccaaggcaagaaaacau

SEQ ID NO: 654605 - RNA, 19 nt, Artificial Sequence
  Description of Artificial Sequence: Synthetic oligonucleotide
ugugugugugugaaggcac

SEQ ID NO: 654606 - RNA, 19 nt, Artificial Sequence
  Description of Artificial Sequence: Synthetic oligonucleotide
gugugugugugugugaagg

SEQ ID NO: 654607 - RNA, 19 nt, Artificial Sequence
  Description of Artificial Sequence: Synthetic oligonucleotide
uuucagaauauaaccgcau

SEQ ID NO: 654608 - RNA, 19 nt, Artificial Sequence
  Description of Artificial Sequence: Synthetic oligonucleotide
uuggacuacaugucuuaag

SEQ ID NO: 654609 - RNA, 19 nt, Artificial Sequence
  Description of Artificial Sequence: Synthetic oligonucleotide
cagaauauaaccgcauaac

SEQ ID NO: 654610 - RNA, 19 nt, Artificial Sequence
  Description of Artificial Sequence: Synthetic oligonucleotide
acucgagucuccaccaucc

SEQ ID NO: 654611 - RNA, 19 nt, Artificial Sequence
  Description of Artificial Sequence: Synthetic oligonucleotide
gauguagaaccauucaggu

SEQ ID NO: 654612 - RNA, 19 nt, Artificial Sequence
  Description of Artificial Sequence: Synthetic oligonucleotide
cagaauauguggaguuagg

SEQ ID NO: 654613 - RNA, 19 nt, Artificial Sequence
  Description of Artificial Sequence: Synthetic oligonucleotide
uauaaccgcauaacuuaga

SEQ ID NO: 654614 - RNA, 19 nt, Artificial Sequence
  Description of Artificial Sequence: Synthetic oligonucleotide
cagagcuuaaguguaacug

SEQ ID NO: 654615 - RNA, 19 nt, Artificial Sequence
  Description of Artificial Sequence: Synthetic oligonucleotide
uaaguggcagaaacacacc

SEQ ID NO: 654616 - RNA, 19 nt, Artificial Sequence
  Description of Artificial Sequence: Synthetic oligonucleotide
aagaauggugugugugugu

SEQ ID NO: 654617 - RNA, 19 nt, Artificial Sequence
  Description of Artificial Sequence: Synthetic oligonucleotide
acuucugauauuggacuac

SEQ ID NO: 654618 - RNA, 19 nt, Artificial Sequence
  Description of Artificial Sequence: Synthetic oligonucleotide
uuacugcuacucuggaacc

SEQ ID NO: 654619 - RNA, 19 nt, Artificial Sequence
  Description of Artificial Sequence: Synthetic oligonucleotide
agucacaacggagaaaagu

SEQ ID NO: 654620 - RNA, 19 nt, Artificial Sequence
  Description of Artificial Sequence: Synthetic oligonucleotide
agcucauguauuaccaagg

SEQ ID NO: 654621 - RNA, 19 nt, Artificial Sequence
  Description of Artificial Sequence: Synthetic oligonucleotide
acuacaugucuuaagcuca

SEQ ID NO: 654622 - RNA, 19 nt, Artificial Sequence
  Description of Artificial Sequence: Synthetic oligonucleotide
uaaccgggugugaauacga

SEQ ID NO: 654623 - RNA, 19 nt, Artificial Sequence
  Description of Artificial Sequence: Synthetic oligonucleotide
uagggucuaauuugugaug

SEQ ID NO: 654624 - RNA, 19 nt, Artificial Sequence
  Description of Artificial Sequence: Synthetic oligonucleotide
uaaccgcauaacuuagaca

SEQ ID NO: 654625 - RNA, 19 nt, Artificial Sequence
  Description of Artificial Sequence: Synthetic oligonucleotide
ucccauccgaacagaagcc

SEQ ID NO: 654626 - RNA, 19 nt, Artificial Sequence
  Description of Artificial Sequence: Synthetic oligonucleotide
auaaccgggugugaauacg

SEQ ID NO: 654627 - RNA, 19 nt, Artificial Sequence
  Description of Artificial Sequence: Synthetic oligonucleotide
uacuuagagggcacgugcu

SEQ ID NO: 654628 - RNA, 19 nt, Artificial Sequence
  Description of Artificial Sequence: Synthetic oligonucleotide
auucagauuaacacugaca

SEQ ID NO: 654629 - RNA, 19 nt, Artificial Sequence
  Description of Artificial Sequence: Synthetic oligonucleotide
ugugugugugugugaaggc

SEQ ID NO: 654630 - RNA, 19 nt, Artificial Sequence
  Description of Artificial Sequence: Synthetic oligonucleotide
uuguuugggguuuugccua

SEQ ID NO: 654631 - RNA, 19 nt, Artificial Sequence
  Description of Artificial Sequence: Synthetic oligonucleotide
ugugaucauucguugguau

SEQ ID NO: 654632 - RNA, 19 nt, Artificial Sequence
  Description of Artificial Sequence: Synthetic oligonucleotide
auauguggaguuaggcacg

SEQ ID NO: 654633 - RNA, 19 nt, Artificial Sequence
  Description of Artificial Sequence: Synthetic oligonucleotide
auauaaccgcauaacuuag

SEQ ID NO: 654634 - RNA, 19 nt, Artificial Sequence
  Description of Artificial Sequence: Synthetic oligonucleotide
accgucagaacuucacucu

SEQ ID NO: 654635 - RNA, 19 nt, Artificial Sequence
  Description of Artificial Sequence: Synthetic oligonucleotide
uucauaugagcaaggcaua

SEQ ID NO: 654636 - RNA, 19 nt, Artificial Sequence
  Description of Artificial Sequence: Synthetic oligonucleotide
gaccgucagaacuucacuc

SEQ ID NO: 654637 - RNA, 19 nt, Artificial Sequence
  Description of Artificial Sequence: Synthetic oligonucleotide
aaugccugcgacaggaaaa

SEQ ID NO: 654638 - RNA, 19 nt, Artificial Sequence
  Description of Artificial Sequence: Synthetic oligonucleotide
agaauggugugugugugug

SEQ ID NO: 654639 - RNA, 19 nt, Artificial Sequence
  Description of Artificial Sequence: Synthetic oligonucleotide
uuucccuauagagcauggg

SEQ ID NO: 654640 - RNA, 19 nt, Artificial Sequence
  Description of Artificial Sequence: Synthetic oligonucleotide
aaccauucagguauggaua

SEQ ID NO: 654641 - RNA, 19 nt, Artificial Sequence
  Description of Artificial Sequence: Synthetic oligonucleotide
accauucagguauggauaa

SEQ ID NO: 654642 - RNA, 19 nt, Artificial Sequence
  Description of Artificial Sequence: Synthetic oligonucleotide
uaggcacgggucauuacac

SEQ ID NO: 654643 - RNA, 19 nt, Artificial Sequence
  Description of Artificial Sequence: Synthetic oligonucleotide
ugcuaacaacaccuguacu

SEQ ID NO: 654644 - RNA, 19 nt, Artificial Sequence
  Description of Artificial Sequence: Synthetic oligonucleotide
agggucuaauuugugaugu

SEQ ID NO: 654645 - RNA, 19 nt, Artificial Sequence
  Description of Artificial Sequence: Synthetic oligonucleotide
gugaucauucguugguaug

SEQ ID NO: 654646 - RNA, 19 nt, Artificial Sequence
  Description of Artificial Sequence: Synthetic oligonucleotide
accaaguguuacugugcac

SEQ ID NO: 654647 - RNA, 19 nt, Artificial Sequence
  Description of Artificial Sequence: Synthetic oligonucleotide
aauuuggcuuacccuggaa

SEQ ID NO: 654648 - RNA, 19 nt, Artificial Sequence
  Description of Artificial Sequence: Synthetic oligonucleotide
acucguuuuauaaaaugaa

SEQ ID NO: 654649 - RNA, 19 nt, Artificial Sequence
  Description of Artificial Sequence: Synthetic oligonucleotide
aucauucguugguaugcag

SEQ ID NO: 654650 - RNA, 19 nt, Artificial Sequence
  Description of Artificial Sequence: Synthetic oligonucleotide
gaauauaaccgcauaacuu

SEQ ID NO: 654651 - RNA, 19 nt, Artificial Sequence
  Description of Artificial Sequence: Synthetic oligonucleotide
aacacaccuugaauuaaga

SEQ ID NO: 654652 - RNA, 19 nt, Artificial Sequence
  Description of Artificial Sequence: Synthetic oligonucleotide
caaggcauaaccgggugug

SEQ ID NO: 654653 - RNA, 19 nt, Artificial Sequence
  Description of Artificial Sequence: Synthetic oligonucleotide
augaaaccauggaacaaag

SEQ ID NO: 654654 - RNA, 19 nt, Artificial Sequence
  Description of Artificial Sequence: Synthetic oligonucleotide
ucguaggcauucuguauac

SEQ ID NO: 654655 - RNA, 19 nt, Artificial Sequence
  Description of Artificial Sequence: Synthetic oligonucleotide
auuaugcuaacaacaccug

SEQ ID NO: 654656 - RNA, 19 nt, Artificial Sequence
  Description of Artificial Sequence: Synthetic oligonucleotide
uuggaauucccggcgccgg

SEQ ID NO: 654657 - RNA, 19 nt, Artificial Sequence
  Description of Artificial Sequence: Synthetic oligonucleotide
auuuacugcuacucuggaa

SEQ ID NO: 654658 - RNA, 19 nt, Artificial Sequence
  Description of Artificial Sequence: Synthetic oligonucleotide
ugcuacucuggaaccaaaa

SEQ ID NO: 654659 - RNA, 19 nt, Artificial Sequence
  Description of Artificial Sequence: Synthetic oligonucleotide
ugugugugugugugugaag

SEQ ID NO: 654660 - RNA, 19 nt, Artificial Sequence
  Description of Artificial Sequence: Synthetic oligonucleotide
cuuacuuagagggcacgug

SEQ ID NO: 654661 - RNA, 19 nt, Artificial Sequence
  Description of Artificial Sequence: Synthetic oligonucleotide
gacuuacuuagagggcacg

SEQ ID NO: 654662 - RNA, 19 nt, Artificial Sequence
  Description of Artificial Sequence: Synthetic oligonucleotide
uuaggcgugaagugcccac

SEQ ID NO: 654663 - RNA, 19 nt, Artificial Sequence
  Description of Artificial Sequence: Synthetic oligonucleotide
agcaaggcauaaccgggug

SEQ ID NO: 654664 - RNA, 19 nt, Artificial Sequence
  Description of Artificial Sequence: Synthetic oligonucleotide
aggaccgucagaacuucac

SEQ ID NO: 654665 - RNA, 19 nt, Artificial Sequence
  Description of Artificial Sequence: Synthetic oligonucleotide
uggugugugugugugugug

SEQ ID NO: 654666 - RNA, 19 nt, Artificial Sequence
  Description of Artificial Sequence: Synthetic oligonucleotide
cauaaccgggugugaauac

SEQ ID NO: 654667 - RNA, 19 nt, Artificial Sequence
  Description of Artificial Sequence: Synthetic oligonucleotide
guuggaauucccggcgccg

SEQ ID NO: 654668 - RNA, 19 nt, Artificial Sequence
  Description of Artificial Sequence: Synthetic oligonucleotide
gcuacaaauugcaacccag

SEQ ID NO: 654669 - RNA, 19 nt, Artificial Sequence
  Description of Artificial Sequence: Synthetic oligonucleotide
gagcuuaaguguaacugga

SEQ ID NO: 654670 - RNA, 19 nt, Artificial Sequence
  Description of Artificial Sequence: Synthetic oligonucleotide
ggauacaacugcuuucuga

SEQ ID NO: 654671 - RNA, 19 nt, Artificial Sequence
  Description of Artificial Sequence: Synthetic oligonucleotide
auuucccuauagagcaugg

SEQ ID NO: 654672 - RNA, 19 nt, Artificial Sequence
  Description of Artificial Sequence: Synthetic oligonucleotide
gugugaauacgaaugcuga

SEQ ID NO: 654673 - RNA, 19 nt, Artificial Sequence
  Description of Artificial Sequence: Synthetic oligonucleotide
uuacccuggaaggugacuu

SEQ ID NO: 654674 - RNA, 19 nt, Artificial Sequence
  Description of Artificial Sequence: Synthetic oligonucleotide
gguacuauuuguguucuca

SEQ ID NO: 654675 - RNA, 19 nt, Artificial Sequence
  Description of Artificial Sequence: Synthetic oligonucleotide
gcucauguauuaccaaggc

SEQ ID NO: 654676 - RNA, 19 nt, Artificial Sequence
  Description of Artificial Sequence: Synthetic oligonucleotide
uguguguguguguguguga

SEQ ID NO: 654677 - RNA, 19 nt, Artificial Sequence
  Description of Artificial Sequence: Synthetic oligonucleotide
uggauacaacugcuuucug

SEQ ID NO: 654678 - RNA, 19 nt, Artificial Sequence
  Description of Artificial Sequence: Synthetic oligonucleotide
accccuuaggcgugaagug

SEQ ID NO: 654679 - RNA, 19 nt, Artificial Sequence
  Description of Artificial Sequence: Synthetic oligonucleotide
guauuaccaaggcaagaaa

SEQ ID NO: 654680 - RNA, 19 nt, Artificial Sequence
  Description of Artificial Sequence: Synthetic oligonucleotide
ucgcuacaaauugcaaccc

SEQ ID NO: 654681 - RNA, 19 nt, Artificial Sequence
  Description of Artificial Sequence: Synthetic oligonucleotide
aggacuagauguagaacca

SEQ ID NO: 654682 - RNA, 19 nt, Artificial Sequence
  Description of Artificial Sequence: Synthetic oligonucleotide
ugugugugugugugugugu

SEQ ID NO: 654683 - RNA, 19 nt, Artificial Sequence
  Description of Artificial Sequence: Synthetic oligonucleotide
acuuacuuagagggcacgu

SEQ ID NO: 654684 - RNA, 19 nt, Artificial Sequence
  Description of Artificial Sequence: Synthetic oligonucleotide
auccgaacagaagcccucg

SEQ ID NO: 654685 - RNA, 19 nt, Artificial Sequence
  Description of Artificial Sequence: Synthetic oligonucleotide
auguauuaccaaggcaaga

SEQ ID NO: 654686 - RNA, 19 nt, Artificial Sequence
  Description of Artificial Sequence: Synthetic oligonucleotide
cauccgaacagaagcccuc

SEQ ID NO: 654687 - RNA, 19 nt, Artificial Sequence
  Description of Artificial Sequence: Synthetic oligonucleotide
uggaggcuucaauuuaaua

SEQ ID NO: 654688 - RNA, 19 nt, Artificial Sequence
  Description of Artificial Sequence: Synthetic oligonucleotide
gaacagaagcccucgaauu

SEQ ID NO: 654689 - RNA, 19 nt, Artificial Sequence
  Description of Artificial Sequence: Synthetic oligonucleotide
uggcuuacccuggaaggug

SEQ ID NO: 654690 - RNA, 19 nt, Artificial Sequence
  Description of Artificial Sequence: Synthetic oligonucleotide
gugugugugugugugugug

SEQ ID NO: 654691 - RNA, 19 nt, Artificial Sequence
  Description of Artificial Sequence: Synthetic oligonucleotide
gaucauucguugguaugca

SEQ ID NO: 654692 - RNA, 19 nt, Artificial Sequence
  Description of Artificial Sequence: Synthetic oligonucleotide
uacugcuacucuggaacca

SEQ ID NO: 654693 - RNA, 19 nt, Artificial Sequence
  Description of Artificial Sequence: Synthetic oligonucleotide
aaauugcaacccagaguca

SEQ ID NO: 654694 - RNA, 19 nt, Artificial Sequence
  Description of Artificial Sequence: Synthetic oligonucleotide
ugccaucaacuugucacca

SEQ ID NO: 654695 - RNA, 19 nt, Artificial Sequence
  Description of Artificial Sequence: Synthetic oligonucleotide
gugcauggguucauacagg

SEQ ID NO: 654696 - RNA, 19 nt, Artificial Sequence
  Description of Artificial Sequence: Synthetic oligonucleotide
agggaauaugaagcuucuc

SEQ ID NO: 654697 - RNA, 19 nt, Artificial Sequence
  Description of Artificial Sequence: Synthetic oligonucleotide
ccucgaauuuggcuuaccc

SEQ ID NO: 654698 - RNA, 19 nt, Artificial Sequence
  Description of Artificial Sequence: Synthetic oligonucleotide
ugcucggccagguacuauu

SEQ ID NO: 654699 - RNA, 19 nt, Artificial Sequence
  Description of Artificial Sequence: Synthetic oligonucleotide
uccgaacagaagcccucga

SEQ ID NO: 654700 - RNA, 19 nt, Artificial Sequence
  Description of Artificial Sequence: Synthetic oligonucleotide
acuuagagggcacgugcuu

SEQ ID NO: 654701 - RNA, 19 nt, Artificial Sequence
  Description of Artificial Sequence: Synthetic oligonucleotide
cacgggucauuacacucac

SEQ ID NO: 654702 - RNA, 19 nt, Artificial Sequence
  Description of Artificial Sequence: Synthetic oligonucleotide
cagaggaccccuuaggcgu

SEQ ID NO: 654703 - RNA, 19 nt, Artificial Sequence
  Description of Artificial Sequence: Synthetic oligonucleotide
cucgaauuuggcuuacccu

SEQ ID NO: 654704 - RNA, 19 nt, Artificial Sequence
  Description of Artificial Sequence: Synthetic oligonucleotide
ggcacggguaucaaaugcc

SEQ ID NO: 654705 - RNA, 19 nt, Artificial Sequence
  Description of Artificial Sequence: Synthetic oligonucleotide
aaggcauaaccggguguga

SEQ ID NO: 654706 - RNA, 19 nt, Artificial Sequence
  Description of Artificial Sequence: Synthetic oligonucleotide
auuggacuacaugucuuaa

SEQ ID NO: 654707 - RNA, 19 nt, Artificial Sequence
  Description of Artificial Sequence: Synthetic oligonucleotide
gugugugugugugaaggca

SEQ ID NO: 654708 - RNA, 19 nt, Artificial Sequence
  Description of Artificial Sequence: Synthetic oligonucleotide
cccuuaggcgugaagugcc

SEQ ID NO: 654709 - RNA, 19 nt, Artificial Sequence
  Description of Artificial Sequence: Synthetic oligonucleotide
aauucccggcgccggucgu

SEQ ID NO: 654710 - RNA, 19 nt, Artificial Sequence
  Description of Artificial Sequence: Synthetic oligonucleotide
gaccccuuaggcgugaagu

SEQ ID NO: 654711 - RNA, 19 nt, Artificial Sequence
  Description of Artificial Sequence: Synthetic oligonucleotide
guagaaccauucagguaug

SEQ ID NO: 654712 - RNA, 19 nt, Artificial Sequence
  Description of Artificial Sequence: Synthetic oligonucleotide
guuaggcacgggucauuac

SEQ ID NO: 654713 - RNA, 19 nt, Artificial Sequence
  Description of Artificial Sequence: Synthetic oligonucleotide
cucgagucuccaccauccc

SEQ ID NO: 654714 - RNA, 19 nt, Artificial Sequence
  Description of Artificial Sequence: Synthetic oligonucleotide
ggcacgggucauuacacuc

SEQ ID NO: 654715 - RNA, 19 nt, Artificial Sequence
  Description of Artificial Sequence: Synthetic oligonucleotide
acugcuacucuggaaccaa

SEQ ID NO: 654716 - RNA, 19 nt, Artificial Sequence
  Description of Artificial Sequence: Synthetic oligonucleotide
agucacguuucaaaugguu

SEQ ID NO: 654717 - RNA, 19 nt, Artificial Sequence
  Description of Artificial Sequence: Synthetic oligonucleotide
auggugugugugugugugu

SEQ ID NO: 654718 - RNA, 19 nt, Artificial Sequence
  Description of Artificial Sequence: Synthetic oligonucleotide
ggcauucuguauaccacug

SEQ ID NO: 654719 - RNA, 19 nt, Artificial Sequence
  Description of Artificial Sequence: Synthetic oligonucleotide
aguuaggcacgggucauua

SEQ ID NO: 654720 - RNA, 19 nt, Artificial Sequence
  Description of Artificial Sequence: Synthetic oligonucleotide
uuaggacacccugucucau

SEQ ID NO: 654721 - RNA, 19 nt, Artificial Sequence
  Description of Artificial Sequence: Synthetic oligonucleotide
guaccaauguggucuuucu

SEQ ID NO: 654722 - RNA, 19 nt, Artificial Sequence
  Description of Artificial Sequence: Synthetic oligonucleotide
gguaccaauguggucuuuc

SEQ ID NO: 654723 - RNA, 19 nt, Artificial Sequence
  Description of Artificial Sequence: Synthetic oligonucleotide
uacccuggaaggugacuua

SEQ ID NO: 654724 - RNA, 19 nt, Artificial Sequence
  Description of Artificial Sequence: Synthetic oligonucleotide
gugugugugugugugugaa

SEQ ID NO: 654725 - RNA, 19 nt, Artificial Sequence
  Description of Artificial Sequence: Synthetic oligonucleotide
acgggucauuacacucacc

SEQ ID NO: 654726 - RNA, 19 nt, Artificial Sequence
  Description of Artificial Sequence: Synthetic oligonucleotide
aaggaccgucagaacuuca

SEQ ID NO: 654727 - RNA, 19 nt, Artificial Sequence
  Description of Artificial Sequence: Synthetic oligonucleotide
aggcauaaccgggugugaa

SEQ ID NO: 654728 - RNA, 19 nt, Artificial Sequence
  Description of Artificial Sequence: Synthetic oligonucleotide
gaauggugugugugugugu

SEQ ID NO: 654729 - RNA, 19 nt, Artificial Sequence
  Description of Artificial Sequence: Synthetic oligonucleotide
uucccggcgccggucguag

SEQ ID NO: 654730 - RNA, 19 nt, Artificial Sequence
  Description of Artificial Sequence: Synthetic oligonucleotide
gcugcaucuaacaacacuu

SEQ ID NO: 654731 - RNA, 19 nt, Artificial Sequence
  Description of Artificial Sequence: Synthetic oligonucleotide
cucagaauauguggaguua

SEQ ID NO: 654732 - RNA, 19 nt, Artificial Sequence
  Description of Artificial Sequence: Synthetic oligonucleotide
caucccacaaggcuuuuau

SEQ ID NO: 654733 - RNA, 19 nt, Artificial Sequence
  Description of Artificial Sequence: Synthetic oligonucleotide
gggguuuugccuaaaugua

SEQ ID NO: 654734 - RNA, 19 nt, Artificial Sequence
  Description of Artificial Sequence: Synthetic oligonucleotide
cgggugugaauacgaaugc

SEQ ID NO: 654735 - RNA, 19 nt, Artificial Sequence
  Description of Artificial Sequence: Synthetic oligonucleotide
ccuuaggcgugaagugccc

SEQ ID NO: 654736 - RNA, 19 nt, Artificial Sequence
  Description of Artificial Sequence: Synthetic oligonucleotide
cuuaggcgugaagugccca

SEQ ID NO: 654737 - RNA, 19 nt, Artificial Sequence
  Description of Artificial Sequence: Synthetic oligonucleotide
cacuugugugaucauucgu

SEQ ID NO: 654738 - RNA, 19 nt, Artificial Sequence
  Description of Artificial Sequence: Synthetic oligonucleotide
gguaacagagcggcuucuc

SEQ ID NO: 654739 - RNA, 19 nt, Artificial Sequence
  Description of Artificial Sequence: Synthetic oligonucleotide
gcauaaccgggugugaaua

SEQ ID NO: 654740 - RNA, 19 nt, Artificial Sequence
  Description of Artificial Sequence: Synthetic oligonucleotide
uagggugcauggguucaua

SEQ ID NO: 654741 - RNA, 19 nt, Artificial Sequence
  Description of Artificial Sequence: Synthetic oligonucleotide
agcaccaauuugagggauu

SEQ ID NO: 654742 - RNA, 19 nt, Artificial Sequence
  Description of Artificial Sequence: Synthetic oligonucleotide
gcacggguaucaaaugcca

SEQ ID NO: 654743 - RNA, 19 nt, Artificial Sequence
  Description of Artificial Sequence: Synthetic oligonucleotide
ccgucagaacuucacucuc

SEQ ID NO: 654744 - RNA, 19 nt, Artificial Sequence
  Description of Artificial Sequence: Synthetic oligonucleotide
gcacgggucauuacacuca

SEQ ID NO: 654745 - RNA, 19 nt, Artificial Sequence
  Description of Artificial Sequence: Synthetic oligonucleotide
cagagcggcuucucuaggu

SEQ ID NO: 654746 - RNA, 19 nt, Artificial Sequence
  Description of Artificial Sequence: Synthetic oligonucleotide
ggaccccuuaggcgugaag

SEQ ID NO: 654747 - RNA, 19 nt, Artificial Sequence
  Description of Artificial Sequence: Synthetic oligonucleotide
ggaccgucagaacuucacu

SEQ ID NO: 654748 - RNA, 19 nt, Artificial Sequence
  Description of Artificial Sequence: Synthetic oligonucleotide
cuuagagggcacgugcuuu

SEQ ID NO: 654749 - RNA, 19 nt, Artificial Sequence
  Description of Artificial Sequence: Synthetic oligonucleotide
gagucacguuucaaauggu

SEQ ID NO: 654750 - RNA, 19 nt, Artificial Sequence
  Description of Artificial Sequence: Synthetic oligonucleotide
ccgcauaacuuagacauua

SEQ ID NO: 654751 - RNA, 19 nt, Artificial Sequence
  Description of Artificial Sequence: Synthetic oligonucleotide
accgcauaacuuagacauu

SEQ ID NO: 654752 - RNA, 19 nt, Artificial Sequence
  Description of Artificial Sequence: Synthetic oligonucleotide
gccggucguaggcauucug

SEQ ID NO: 654753 - RNA, 19 nt, Artificial Sequence
  Description of Artificial Sequence: Synthetic oligonucleotide
cggguaucaaaugccauca

SEQ ID NO: 654754 - RNA, 19 nt, Artificial Sequence
  Description of Artificial Sequence: Synthetic oligonucleotide
ggcauaaccgggugugaau

SEQ ID NO: 654755 - RNA, 19 nt, Artificial Sequence
  Description of Artificial Sequence: Synthetic oligonucleotide
ggaguuaugcuaaccccau

SEQ ID NO: 654756 - RNA, 19 nt, Artificial Sequence
  Description of Artificial Sequence: Synthetic oligonucleotide
caaagccgguccccacaga

SEQ ID NO: 654757 - RNA, 19 nt, Artificial Sequence
  Description of Artificial Sequence: Synthetic oligonucleotide
gcaaggcauaaccgggugu

SEQ ID NO: 654758 - RNA, 19 nt, Artificial Sequence
  Description of Artificial Sequence: Synthetic oligonucleotide
ggugugugugugugugugu

SEQ ID NO: 654759 - RNA, 19 nt, Artificial Sequence
  Description of Artificial Sequence: Synthetic oligonucleotide
ccgaacagaagcccucgaa

SEQ ID NO: 654760 - RNA, 19 nt, Artificial Sequence
  Description of Artificial Sequence: Synthetic oligonucleotide
cgcuacaaauugcaaccca

SEQ ID NO: 654761 - RNA, 19 nt, Artificial Sequence
  Description of Artificial Sequence: Synthetic oligonucleotide
ccauccgaacagaagcccu

SEQ ID NO: 654762 - RNA, 19 nt, Artificial Sequence
  Description of Artificial Sequence: Synthetic oligonucleotide
ccacagagcuuaaguguaa

SEQ ID NO: 654763 - RNA, 19 nt, Artificial Sequence
  Description of Artificial Sequence: Synthetic oligonucleotide
ggacuagauguagaaccau

SEQ ID NO: 654764 - RNA, 19 nt, Artificial Sequence
  Description of Artificial Sequence: Synthetic oligonucleotide
cgaacagaagcccucgaau

SEQ ID NO: 654765 - RNA, 19 nt, Artificial Sequence
  Description of Artificial Sequence: Synthetic oligonucleotide
ccggucguaggcauucugu

SEQ ID NO: 654766 - RNA, 19 nt, Artificial Sequence
  Description of Artificial Sequence: Synthetic oligonucleotide
cccuauagagcaugggcuu

SEQ ID NO: 654767 - RNA, 19 nt, Artificial Sequence
  Description of Artificial Sequence: Synthetic oligonucleotide
gaguuaggcacgggucauu

SEQ ID NO: 654768 - RNA, 19 nt, Artificial Sequence
  Description of Artificial Sequence: Synthetic oligonucleotide
cccucgaauuuggcuuacc

SEQ ID NO: 654769 - RNA, 19 nt, Artificial Sequence
  Description of Artificial Sequence: Synthetic oligonucleotide
caucuaccagcacccucau

SEQ ID NO: 654770 - RNA, 19 nt, Artificial Sequence
  Description of Artificial Sequence: Synthetic oligonucleotide
guagggugcauggguucau

SEQ ID NO: 654771 - RNA, 19 nt, Artificial Sequence
  Description of Artificial Sequence: Synthetic oligonucleotide
aggaccccuuaggcgugaa

SEQ ID NO: 654772 - RNA, 19 nt, Artificial Sequence
  Description of Artificial Sequence: Synthetic oligonucleotide
gggucuaauuugugauguu

SEQ ID NO: 654773 - RNA, 19 nt, Artificial Sequence
  Description of Artificial Sequence: Synthetic oligonucleotide
cgcauaacuuagacauuau

SEQ ID NO: 654774 - RNA, 19 nt, Artificial Sequence
  Description of Artificial Sequence: Synthetic oligonucleotide
cgccggucguaggcauucu

SEQ ID NO: 654775 - RNA, 19 nt, Artificial Sequence
  Description of Artificial Sequence: Synthetic oligonucleotide
cgguaccaauguggucuuu

SEQ ID NO: 654776 - RNA, 19 nt, Artificial Sequence
  Description of Artificial Sequence: Synthetic oligonucleotide
aauuaaacaguagaaagac

SEQ ID NO: 654777 - RNA, 19 nt, Artificial Sequence
  Description of Artificial Sequence: Synthetic oligonucleotide
ugaauaauugcucauugca

SEQ ID NO: 654778 - RNA, 19 nt, Artificial Sequence
  Description of Artificial Sequence: Synthetic oligonucleotide
aaggagacgaccuucuggg

SEQ ID NO: 654779 - RNA, 19 nt, Artificial Sequence
  Description of Artificial Sequence: Synthetic oligonucleotide
cuuuagaucagccugcagg

SEQ ID NO: 654780 - RNA, 19 nt, Artificial Sequence
  Description of Artificial Sequence: Synthetic oligonucleotide
uaugcauuggucucugucg

SEQ ID NO: 654781 - RNA, 19 nt, Artificial Sequence
  Description of Artificial Sequence: Synthetic oligonucleotide
aaagacagcaggcacugag

SEQ ID NO: 654782 - RNA, 19 nt, Artificial Sequence
  Description of Artificial Sequence: Synthetic oligonucleotide
augacaaaggguuaggacu

SEQ ID NO: 654783 - RNA, 19 nt, Artificial Sequence
  Description of Artificial Sequence: Synthetic oligonucleotide
uccccaaugcgcuugaacg

SEQ ID NO: 654784 - RNA, 19 nt, Artificial Sequence
  Description of Artificial Sequence: Synthetic oligonucleotide
uuuagaucagccugcaggc

SEQ ID NO: 654785 - RNA, 19 nt, Artificial Sequence
  Description of Artificial Sequence: Synthetic oligonucleotide
accacaaguccucagcacc

SEQ ID NO: 654786 - RNA, 19 nt, Artificial Sequence
  Description of Artificial Sequence: Synthetic oligonucleotide
cucuugagaagaaaugucc

SEQ ID NO: 654787 - RNA, 19 nt, Artificial Sequence
  Description of Artificial Sequence: Synthetic oligonucleotide
acucaaauagcugugggag

SEQ ID NO: 654788 - RNA, 19 nt, Artificial Sequence
  Description of Artificial Sequence: Synthetic oligonucleotide
aaccuauccacccaucccu

SEQ ID NO: 654789 - RNA, 19 nt, Artificial Sequence
  Description of Artificial Sequence: Synthetic oligonucleotide
uuuaagugguccagcauga

SEQ ID NO: 654790 - RNA, 19 nt, Artificial Sequence
  Description of Artificial Sequence: Synthetic oligonucleotide
ucagcaccaaaugagcugg

SEQ ID NO: 654791 - RNA, 19 nt, Artificial Sequence
  Description of Artificial Sequence: Synthetic oligonucleotide
cuugcuaggcccaagccag

SEQ ID NO: 654792 - RNA, 19 nt, Artificial Sequence
  Description of Artificial Sequence: Synthetic oligonucleotide
ugacucaaagucccgcugg

SEQ ID NO: 654793 - RNA, 19 nt, Artificial Sequence
  Description of Artificial Sequence: Synthetic oligonucleotide
caaggaugcagcugcaugg

SEQ ID NO: 654794 - RNA, 19 nt, Artificial Sequence
  Description of Artificial Sequence: Synthetic oligonucleotide
ugcugcuucaagccgaaag

SEQ ID NO: 654795 - RNA, 19 nt, Artificial Sequence
  Description of Artificial Sequence: Synthetic oligonucleotide
aaauagcugugggagaauc

SEQ ID NO: 654796 - RNA, 19 nt, Artificial Sequence
  Description of Artificial Sequence: Synthetic oligonucleotide
ucugggguaaguguguggg

SEQ ID NO: 654797 - RNA, 19 nt, Artificial Sequence
  Description of Artificial Sequence: Synthetic oligonucleotide
agaagggaaagcccucacc

SEQ ID NO: 654798 - RNA, 19 nt, Artificial Sequence
  Description of Artificial Sequence: Synthetic oligonucleotide
agcgcgauggucccguucc

SEQ ID NO: 654799 - RNA, 19 nt, Artificial Sequence
  Description of Artificial Sequence: Synthetic oligonucleotide
aguguggagagcuugcucu

SEQ ID NO: 654800 - RNA, 19 nt, Artificial Sequence
  Description of Artificial Sequence: Synthetic oligonucleotide
aaagauuagcugucucucu

SEQ ID NO: 654801 - RNA, 19 nt, Artificial Sequence
  Description of Artificial Sequence: Synthetic oligonucleotide
ucaaggaugcagcugcaug

SEQ ID NO: 654802 - RNA, 19 nt, Artificial Sequence
  Description of Artificial Sequence: Synthetic oligonucleotide
acguaauacuccaacaagg

SEQ ID NO: 654803 - RNA, 19 nt, Artificial Sequence
  Description of Artificial Sequence: Synthetic oligonucleotide
accggcgccaugcacagcc

SEQ ID NO: 654804 - RNA, 19 nt, Artificial Sequence
  Description of Artificial Sequence: Synthetic oligonucleotide
cuugcaaguccccaaugcg

SEQ ID NO: 654805 - RNA, 19 nt, Artificial Sequence
  Description of Artificial Sequence: Synthetic oligonucleotide
uucucgaacuccaggcgcg

SEQ ID NO: 654806 - RNA, 19 nt, Artificial Sequence
  Description of Artificial Sequence: Synthetic oligonucleotide
ugacaaaggguuaggacuc

SEQ ID NO: 654807 - RNA, 19 nt, Artificial Sequence
  Description of Artificial Sequence: Synthetic oligonucleotide
aagauggugggaagauucc

SEQ ID NO: 654808 - RNA, 19 nt, Artificial Sequence
  Description of Artificial Sequence: Synthetic oligonucleotide
aagugugugggaaccaggg

SEQ ID NO: 654809 - RNA, 19 nt, Artificial Sequence
  Description of Artificial Sequence: Synthetic oligonucleotide
aauagcugugggagaaucg

SEQ ID NO: 654810 - RNA, 19 nt, Artificial Sequence
  Description of Artificial Sequence: Synthetic oligonucleotide
uaaccuauccacccauccc

SEQ ID NO: 654811 - RNA, 19 nt, Artificial Sequence
  Description of Artificial Sequence: Synthetic oligonucleotide
ucuaccauggacugcucca

SEQ ID NO: 654812 - RNA, 19 nt, Artificial Sequence
  Description of Artificial Sequence: Synthetic oligonucleotide
auagcugugggagaaucgg

SEQ ID NO: 654813 - RNA, 19 nt, Artificial Sequence
  Description of Artificial Sequence: Synthetic oligonucleotide
cuugagaagaaauguccug

SEQ ID NO: 654814 - RNA, 19 nt, Artificial Sequence
  Description of Artificial Sequence: Synthetic oligonucleotide
uggacucuugagaagaaau

SEQ ID NO: 654815 - RNA, 19 nt, Artificial Sequence
  Description of Artificial Sequence: Synthetic oligonucleotide
cacguaauacuccaacaag

SEQ ID NO: 654816 - RNA, 19 nt, Artificial Sequence
  Description of Artificial Sequence: Synthetic oligonucleotide
uuugguuagcggcuuccag

SEQ ID NO: 654817 - RNA, 19 nt, Artificial Sequence
  Description of Artificial Sequence: Synthetic oligonucleotide
caugaucugggcaucugcc

SEQ ID NO: 654818 - RNA, 19 nt, Artificial Sequence
  Description of Artificial Sequence: Synthetic oligonucleotide
ucaagccgaaagauuagcu

SEQ ID NO: 654819 - RNA, 19 nt, Artificial Sequence
  Description of Artificial Sequence: Synthetic oligonucleotide
caaggagacgaccuucugg

SEQ ID NO: 654820 - RNA, 19 nt, Artificial Sequence
  Description of Artificial Sequence: Synthetic oligonucleotide
agacgcuucacuugggucu

SEQ ID NO: 654821 - RNA, 19 nt, Artificial Sequence
  Description of Artificial Sequence: Synthetic oligonucleotide
ugaguaaggaccgcuggag

SEQ ID NO: 654822 - RNA, 19 nt, Artificial Sequence
  Description of Artificial Sequence: Synthetic oligonucleotide
caugaguaaggaccgcugg

SEQ ID NO: 654823 - RNA, 19 nt, Artificial Sequence
  Description of Artificial Sequence: Synthetic oligonucleotide
ucauugcacguaauacucc

SEQ ID NO: 654824 - RNA, 19 nt, Artificial Sequence
  Description of Artificial Sequence: Synthetic oligonucleotide
ugucacucaaauagcugug

SEQ ID NO: 654825 - RNA, 19 nt, Artificial Sequence
  Description of Artificial Sequence: Synthetic oligonucleotide
ucaugaguaaggaccgcug

SEQ ID NO: 654826 - RNA, 19 nt, Artificial Sequence
  Description of Artificial Sequence: Synthetic oligonucleotide
aagauuagcugucucucua

SEQ ID NO: 654827 - RNA, 19 nt, Artificial Sequence
  Description of Artificial Sequence: Synthetic oligonucleotide
gaaagauuagcugucucuc

SEQ ID NO: 654828 - RNA, 19 nt, Artificial Sequence
  Description of Artificial Sequence: Synthetic oligonucleotide
caccaaaugagcuggcuac

SEQ ID NO: 654829 - RNA, 19 nt, Artificial Sequence
  Description of Artificial Sequence: Synthetic oligonucleotide
gaguaaggaccgcuggagg

SEQ ID NO: 654830 - RNA, 19 nt, Artificial Sequence
  Description of Artificial Sequence: Synthetic oligonucleotide
uuuccuugagccgauuagc

SEQ ID NO: 654831 - RNA, 19 nt, Artificial Sequence
  Description of Artificial Sequence: Synthetic oligonucleotide
ugcaaguccccaaugcgcu

SEQ ID NO: 654832 - RNA, 19 nt, Artificial Sequence
  Description of Artificial Sequence: Synthetic oligonucleotide
uugauaagguccucauucu

SEQ ID NO: 654833 - RNA, 19 nt, Artificial Sequence
  Description of Artificial Sequence: Synthetic oligonucleotide
aguaaggaccgcuggagga

SEQ ID NO: 654834 - RNA, 19 nt, Artificial Sequence
  Description of Artificial Sequence: Synthetic oligonucleotide
ggcguuguucuuuaagugg

SEQ ID NO: 654835 - RNA, 19 nt, Artificial Sequence
  Description of Artificial Sequence: Synthetic oligonucleotide
gacuugaccccgucgaccc

SEQ ID NO: 654836 - RNA, 19 nt, Artificial Sequence
  Description of Artificial Sequence: Synthetic oligonucleotide
gauuagcugucucucuagc

SEQ ID NO: 654837 - RNA, 19 nt, Artificial Sequence
  Description of Artificial Sequence: Synthetic oligonucleotide
ugcacguaauacuccaaca

SEQ ID NO: 654838 - RNA, 19 nt, Artificial Sequence
  Description of Artificial Sequence: Synthetic oligonucleotide
agauuagcugucucucuag

SEQ ID NO: 654839 - RNA, 19 nt, Artificial Sequence
  Description of Artificial Sequence: Synthetic oligonucleotide
uccuuagugucccggagcu

SEQ ID NO: 654840 - RNA, 19 nt, Artificial Sequence
  Description of Artificial Sequence: Synthetic oligonucleotide
caaaggguuaggacucugg

SEQ ID NO: 654841 - RNA, 19 nt, Artificial Sequence
  Description of Artificial Sequence: Synthetic oligonucleotide
agaaucggggucuggaggu

SEQ ID NO: 654842 - RNA, 19 nt, Artificial Sequence
  Description of Artificial Sequence: Synthetic oligonucleotide
ugcucauugcacguaauac

SEQ ID NO: 654843 - RNA, 19 nt, Artificial Sequence
  Description of Artificial Sequence: Synthetic oligonucleotide
uuugacaaccaggacuuga

SEQ ID NO: 654844 - RNA, 19 nt, Artificial Sequence
  Description of Artificial Sequence: Synthetic oligonucleotide
guuagcggcuuccagacuc

SEQ ID NO: 654845 - RNA, 19 nt, Artificial Sequence
  Description of Artificial Sequence: Synthetic oligonucleotide
aaucggggucuggaggugc

SEQ ID NO: 654846 - RNA, 19 nt, Artificial Sequence
  Description of Artificial Sequence: Synthetic oligonucleotide
gaacgccagcuuuagauca

SEQ ID NO: 654847 - RNA, 19 nt, Artificial Sequence
  Description of Artificial Sequence: Synthetic oligonucleotide
aaccccgcaauguccaugu

SEQ ID NO: 654848 - RNA, 19 nt, Artificial Sequence
  Description of Artificial Sequence: Synthetic oligonucleotide
agagaucagcucuugaaua

SEQ ID NO: 654849 - RNA, 19 nt, Artificial Sequence
  Description of Artificial Sequence: Synthetic oligonucleotide
auuagcugucucucuagca

SEQ ID NO: 654850 - RNA, 19 nt, Artificial Sequence
  Description of Artificial Sequence: Synthetic oligonucleotide
ugauaagguccucauucuc

SEQ ID NO: 654851 - RNA, 19 nt, Artificial Sequence
  Description of Artificial Sequence: Synthetic oligonucleotide
ugacaaccaggacuugacc

SEQ ID NO: 654852 - RNA, 19 nt, Artificial Sequence
  Description of Artificial Sequence: Synthetic oligonucleotide
ucuggguaaaccccgcaau

SEQ ID NO: 654853 - RNA, 19 nt, Artificial Sequence
  Description of Artificial Sequence: Synthetic oligonucleotide
ugguuagcggcuuccagac

SEQ ID NO: 654854 - RNA, 19 nt, Artificial Sequence
  Description of Artificial Sequence: Synthetic oligonucleotide
agcagguaaccuauccacc

SEQ ID NO: 654855 - RNA, 19 nt, Artificial Sequence
  Description of Artificial Sequence: Synthetic oligonucleotide
ugacaagggacuugucuac

SEQ ID NO: 654856 - RNA, 19 nt, Artificial Sequence
  Description of Artificial Sequence: Synthetic oligonucleotide
uucaagccgaaagauuagc

SEQ ID NO: 654857 - RNA, 19 nt, Artificial Sequence
  Description of Artificial Sequence: Synthetic oligonucleotide
uccagugacugguugggcu

SEQ ID NO: 654858 - RNA, 19 nt, Artificial Sequence
  Description of Artificial Sequence: Synthetic oligonucleotide
aggggcuaugcauuggucu

SEQ ID NO: 654859 - RNA, 19 nt, Artificial Sequence
  Description of Artificial Sequence: Synthetic oligonucleotide
cuucaagccgaaagauuag

SEQ ID NO: 654860 - RNA, 19 nt, Artificial Sequence
  Description of Artificial Sequence: Synthetic oligonucleotide
cacugagaagggaaagccc

SEQ ID NO: 654861 - RNA, 19 nt, Artificial Sequence
  Description of Artificial Sequence: Synthetic oligonucleotide
ugaacgccagcuuuagauc

SEQ ID NO: 654862 - RNA, 19 nt, Artificial Sequence
  Description of Artificial Sequence: Synthetic oligonucleotide
gagaucagcucuugaauaa

SEQ ID NO: 654863 - RNA, 19 nt, Artificial Sequence
  Description of Artificial Sequence: Synthetic oligonucleotide
uuucuugcggcuggccucg

SEQ ID NO: 654864 - RNA, 19 nt, Artificial Sequence
  Description of Artificial Sequence: Synthetic oligonucleotide
cuuugcgcaaccucuuuuc

SEQ ID NO: 654865 - RNA, 19 nt, Artificial Sequence
  Description of Artificial Sequence: Synthetic oligonucleotide
guugguauucuucuagucu

SEQ ID NO: 654866 - RNA, 19 nt, Artificial Sequence
  Description of Artificial Sequence: Synthetic oligonucleotide
ugucgcuggagccucuugu

SEQ ID NO: 654867 - RNA, 19 nt, Artificial Sequence
  Description of Artificial Sequence: Synthetic oligonucleotide
cucgucacgacucuccauc

SEQ ID NO: 654868 - RNA, 19 nt, Artificial Sequence
  Description of Artificial Sequence: Synthetic oligonucleotide
ugguauucuucuagucuga

SEQ ID NO: 654869 - RNA, 19 nt, Artificial Sequence
  Description of Artificial Sequence: Synthetic oligonucleotide
uggagguuuggguauuuaa

SEQ ID NO: 654870 - RNA, 19 nt, Artificial Sequence
  Description of Artificial Sequence: Synthetic oligonucleotide
ggaaacauccaccuuccac

SEQ ID NO: 654871 - RNA, 19 nt, Artificial Sequence
  Description of Artificial Sequence: Synthetic oligonucleotide
gucacucaaauagcugugg

SEQ ID NO: 654872 - RNA, 19 nt, Artificial Sequence
  Description of Artificial Sequence: Synthetic oligonucleotide
cucuuaagagccagggcuc

SEQ ID NO: 654873 - RNA, 19 nt, Artificial Sequence
  Description of Artificial Sequence: Synthetic oligonucleotide
gguuuggguauuuaaauua

SEQ ID NO: 654874 - RNA, 19 nt, Artificial Sequence
  Description of Artificial Sequence: Synthetic oligonucleotide
cauugcacguaauacucca

SEQ ID NO: 654875 - RNA, 19 nt, Artificial Sequence
  Description of Artificial Sequence: Synthetic oligonucleotide
agagccaaggggcuaugca

SEQ ID NO: 654876 - RNA, 19 nt, Artificial Sequence
  Description of Artificial Sequence: Synthetic oligonucleotide
aggacuugaccccgucgac

SEQ ID NO: 654877 - RNA, 19 nt, Artificial Sequence
  Description of Artificial Sequence: Synthetic oligonucleotide
guaagugugugggaaccag

SEQ ID NO: 654878 - RNA, 19 nt, Artificial Sequence
  Description of Artificial Sequence: Synthetic oligonucleotide
uucugacucaaagucccgc

SEQ ID NO: 654879 - RNA, 19 nt, Artificial Sequence
  Description of Artificial Sequence: Synthetic oligonucleotide
gagguuuggguauuuaaau

SEQ ID NO: 654880 - RNA, 19 nt, Artificial Sequence
  Description of Artificial Sequence: Synthetic oligonucleotide
acuguugauaagguccuca

SEQ ID NO: 654881 - RNA, 19 nt, Artificial Sequence
  Description of Artificial Sequence: Synthetic oligonucleotide
gcaggcuuugguuagcggc

SEQ ID NO: 654882 - RNA, 19 nt, Artificial Sequence
  Description of Artificial Sequence: Synthetic oligonucleotide
aggggcguuguucuuuaag

SEQ ID NO: 654883 - RNA, 19 nt, Artificial Sequence
  Description of Artificial Sequence: Synthetic oligonucleotide
acaagggacuugucuacca

SEQ ID NO: 654884 - RNA, 19 nt, Artificial Sequence
  Description of Artificial Sequence: Synthetic oligonucleotide
uggguaaaccccgcaaugu

SEQ ID NO: 654885 - RNA, 19 nt, Artificial Sequence
  Description of Artificial Sequence: Synthetic oligonucleotide
uguugauaagguccucauu

SEQ ID NO: 654886 - RNA, 19 nt, Artificial Sequence
  Description of Artificial Sequence: Synthetic oligonucleotide
cuauccacccaucccugag

SEQ ID NO: 654887 - RNA, 19 nt, Artificial Sequence
  Description of Artificial Sequence: Synthetic oligonucleotide
cuggguaaaccccgcaaug

SEQ ID NO: 654888 - RNA, 19 nt, Artificial Sequence
  Description of Artificial Sequence: Synthetic oligonucleotide
cuccuuagugucccggagc

SEQ ID NO: 654889 - RNA, 19 nt, Artificial Sequence
  Description of Artificial Sequence: Synthetic oligonucleotide
gauggugggaagauuccca

SEQ ID NO: 654890 - RNA, 19 nt, Artificial Sequence
  Description of Artificial Sequence: Synthetic oligonucleotide
gagacgaccuucuggguaa

SEQ ID NO: 654891 - RNA, 19 nt, Artificial Sequence
  Description of Artificial Sequence: Synthetic oligonucleotide
acugccucuuaagagccag

SEQ ID NO: 654892 - RNA, 19 nt, Artificial Sequence
  Description of Artificial Sequence: Synthetic oligonucleotide
guaaggaccgcuggaggag

SEQ ID NO: 654893 - RNA, 19 nt, Artificial Sequence
  Description of Artificial Sequence: Synthetic oligonucleotide
ucaggggcgagggacuucc

SEQ ID NO: 654894 - RNA, 19 nt, Artificial Sequence
  Description of Artificial Sequence: Synthetic oligonucleotide
uccugacucccaugggucc

SEQ ID NO: 654895 - RNA, 19 nt, Artificial Sequence
  Description of Artificial Sequence: Synthetic oligonucleotide
ggacuugucuaccauggac

SEQ ID NO: 654896 - RNA, 19 nt, Artificial Sequence
  Description of Artificial Sequence: Synthetic oligonucleotide
cugacaagggacuugucua

SEQ ID NO: 654897 - RNA, 19 nt, Artificial Sequence
  Description of Artificial Sequence: Synthetic oligonucleotide
ugggguaagugugugggaa

SEQ ID NO: 654898 - RNA, 19 nt, Artificial Sequence
  Description of Artificial Sequence: Synthetic oligonucleotide
ucacgacucuccaucuccu

SEQ ID NO: 654899 - RNA, 19 nt, Artificial Sequence
  Description of Artificial Sequence: Synthetic oligonucleotide
guaauacuccaacaaggcu

SEQ ID NO: 654900 - RNA, 19 nt, Artificial Sequence
  Description of Artificial Sequence: Synthetic oligonucleotide
uccagacgcuucacuuggg

SEQ ID NO: 654901 - RNA, 19 nt, Artificial Sequence
  Description of Artificial Sequence: Synthetic oligonucleotide
ucugugucgcugucacuca

SEQ ID NO: 654902 - RNA, 19 nt, Artificial Sequence
  Description of Artificial Sequence: Synthetic oligonucleotide
aaggggcuaugcauugguc

SEQ ID NO: 654903 - RNA, 19 nt, Artificial Sequence
  Description of Artificial Sequence: Synthetic oligonucleotide
cacuuguugcugugucugg

SEQ ID NO: 654904 - RNA, 19 nt, Artificial Sequence
  Description of Artificial Sequence: Synthetic oligonucleotide
uuagcggcuuccagacucu

SEQ ID NO: 654905 - RNA, 19 nt, Artificial Sequence
  Description of Artificial Sequence: Synthetic oligonucleotide
gguaaaccccgcaaugucc

SEQ ID NO: 654906 - RNA, 19 nt, Artificial Sequence
  Description of Artificial Sequence: Synthetic oligonucleotide
acuaccggcgccaugcaca

SEQ ID NO: 654907 - RNA, 19 nt, Artificial Sequence
  Description of Artificial Sequence: Synthetic oligonucleotide
cuccugacucccauggguc

SEQ ID NO: 654908 - RNA, 19 nt, Artificial Sequence
  Description of Artificial Sequence: Synthetic oligonucleotide
aacgccagcuuuagaucag

SEQ ID NO: 654909 - RNA, 19 nt, Artificial Sequence
  Description of Artificial Sequence: Synthetic oligonucleotide
ucucugucggcuuggccuc

SEQ ID NO: 654910 - RNA, 19 nt, Artificial Sequence
  Description of Artificial Sequence: Synthetic oligonucleotide
ugugucgcugucacucaaa

SEQ ID NO: 654911 - RNA, 19 nt, Artificial Sequence
  Description of Artificial Sequence: Synthetic oligonucleotide
auguuucuugcggcuggcc

SEQ ID NO: 654912 - RNA, 19 nt, Artificial Sequence
  Description of Artificial Sequence: Synthetic oligonucleotide
gaagcugccuuggaagguc

SEQ ID NO: 654913 - RNA, 19 nt, Artificial Sequence
  Description of Artificial Sequence: Synthetic oligonucleotide
accgcuggaggagugaaga

SEQ ID NO: 654914 - RNA, 19 nt, Artificial Sequence
  Description of Artificial Sequence: Synthetic oligonucleotide
gagaagggaaagcccucac

SEQ ID NO: 654915 - RNA, 19 nt, Artificial Sequence
  Description of Artificial Sequence: Synthetic oligonucleotide
cuugaccccgucgacccgg

SEQ ID NO: 654916 - RNA, 19 nt, Artificial Sequence
  Description of Artificial Sequence: Synthetic oligonucleotide
ugccuuggaaggucccuug

SEQ ID NO: 654917 - RNA, 19 nt, Artificial Sequence
  Description of Artificial Sequence: Synthetic oligonucleotide
cucaaauagcugugggaga

SEQ ID NO: 654918 - RNA, 19 nt, Artificial Sequence
  Description of Artificial Sequence: Synthetic oligonucleotide
uguugcugugucuggggua

SEQ ID NO: 654919 - RNA, 19 nt, Artificial Sequence
  Description of Artificial Sequence: Synthetic oligonucleotide
cuaccauggacugcuccag

SEQ ID NO: 654920 - RNA, 19 nt, Artificial Sequence
  Description of Artificial Sequence: Synthetic oligonucleotide
ggacucuugagaagaaaug

SEQ ID NO: 654921 - RNA, 19 nt, Artificial Sequence
  Description of Artificial Sequence: Synthetic oligonucleotide
cagacgcuucacuuggguc

SEQ ID NO: 654922 - RNA, 19 nt, Artificial Sequence
  Description of Artificial Sequence: Synthetic oligonucleotide
uuagaucagccugcaggcu

SEQ ID NO: 654923 - RNA, 19 nt, Artificial Sequence
  Description of Artificial Sequence: Synthetic oligonucleotide
cuaccggcgccaugcacag

SEQ ID NO: 654924 - RNA, 19 nt, Artificial Sequence
  Description of Artificial Sequence: Synthetic oligonucleotide
caggacuugaccccgucga

SEQ ID NO: 654925 - RNA, 19 nt, Artificial Sequence
  Description of Artificial Sequence: Synthetic oligonucleotide
uagugucccggagcugucg

SEQ ID NO: 654926 - RNA, 19 nt, Artificial Sequence
  Description of Artificial Sequence: Synthetic oligonucleotide
ucgucacgacucuccaucu

SEQ ID NO: 654927 - RNA, 19 nt, Artificial Sequence
  Description of Artificial Sequence: Synthetic oligonucleotide
ucgaacuccaggcgcguuu

SEQ ID NO: 654928 - RNA, 19 nt, Artificial Sequence
  Description of Artificial Sequence: Synthetic oligonucleotide
acgccagcuuuagaucagc

SEQ ID NO: 654929 - RNA, 19 nt, Artificial Sequence
  Description of Artificial Sequence: Synthetic oligonucleotide
caaugcgcuugaacgccag

SEQ ID NO: 654930 - RNA, 19 nt, Artificial Sequence
  Description of Artificial Sequence: Synthetic oligonucleotide
ccgguucucagcugcagcg

SEQ ID NO: 654931 - RNA, 19 nt, Artificial Sequence
  Description of Artificial Sequence: Synthetic oligonucleotide
ggaccauucucaucaucug

SEQ ID NO: 654932 - RNA, 19 nt, Artificial Sequence
  Description of Artificial Sequence: Synthetic oligonucleotide
cuccaggcgcguuuccagc

SEQ ID NO: 654933 - RNA, 19 nt, Artificial Sequence
  Description of Artificial Sequence: Synthetic oligonucleotide
cagaccacuuguugcugug

SEQ ID NO: 654934 - RNA, 19 nt, Artificial Sequence
  Description of Artificial Sequence: Synthetic oligonucleotide
agagucucccucacuguug

SEQ ID NO: 654935 - RNA, 19 nt, Artificial Sequence
  Description of Artificial Sequence: Synthetic oligonucleotide
cgaccuucuggguaaaccc

SEQ ID NO: 654936 - RNA, 19 nt, Artificial Sequence
  Description of Artificial Sequence: Synthetic oligonucleotide
ugagccgauuagccaggcu

SEQ ID NO: 654937 - RNA, 19 nt, Artificial Sequence
  Description of Artificial Sequence: Synthetic oligonucleotide
acuugaccccgucgacccg

SEQ ID NO: 654938 - RNA, 19 nt, Artificial Sequence
  Description of Artificial Sequence: Synthetic oligonucleotide
uaaggaccgcuggaggagu

SEQ ID NO: 654939 - RNA, 19 nt, Artificial Sequence
  Description of Artificial Sequence: Synthetic oligonucleotide
gcuugcuaggcccaagcca

SEQ ID NO: 654940 - RNA, 19 nt, Artificial Sequence
  Description of Artificial Sequence: Synthetic oligonucleotide
agcugcgacagcaaccccu

SEQ ID NO: 654941 - RNA, 19 nt, Artificial Sequence
  Description of Artificial Sequence: Synthetic oligonucleotide
uuagugucccggagcuguc

SEQ ID NO: 654942 - RNA, 19 nt, Artificial Sequence
  Description of Artificial Sequence: Synthetic oligonucleotide
ugucgcugucacucaaaua

SEQ ID NO: 654943 - RNA, 19 nt, Artificial Sequence
  Description of Artificial Sequence: Synthetic oligonucleotide
cuucaugaguaaggaccgc

SEQ ID NO: 654944 - RNA, 19 nt, Artificial Sequence
  Description of Artificial Sequence: Synthetic oligonucleotide
cuuagugucccggagcugu

SEQ ID NO: 654945 - RNA, 19 nt, Artificial Sequence
  Description of Artificial Sequence: Synthetic oligonucleotide
agccauggacuggugcagg

SEQ ID NO: 654946 - RNA, 19 nt, Artificial Sequence
  Description of Artificial Sequence: Synthetic oligonucleotide
gagccaaggggcuaugcau

SEQ ID NO: 654947 - RNA, 19 nt, Artificial Sequence
  Description of Artificial Sequence: Synthetic oligonucleotide
ggagugguccagcagguaa

SEQ ID NO: 654948 - RNA, 19 nt, Artificial Sequence
  Description of Artificial Sequence: Synthetic oligonucleotide
ggggcuaugcauuggucuc

SEQ ID NO: 654949 - RNA, 19 nt, Artificial Sequence
  Description of Artificial Sequence: Synthetic oligonucleotide
auacuccaacaaggcuugc

SEQ ID NO: 654950 - RNA, 19 nt, Artificial Sequence
  Description of Artificial Sequence: Synthetic oligonucleotide
uuaggacucuggucuggua

SEQ ID NO: 654951 - RNA, 19 nt, Artificial Sequence
  Description of Artificial Sequence: Synthetic oligonucleotide
uccacccaucccugagcag

SEQ ID NO: 654952 - RNA, 19 nt, Artificial Sequence
  Description of Artificial Sequence: Synthetic oligonucleotide
ccucuuaagagccagggcu

SEQ ID NO: 654953 - RNA, 19 nt, Artificial Sequence
  Description of Artificial Sequence: Synthetic oligonucleotide
aggagugaagaugguggga

SEQ ID NO: 654954 - RNA, 19 nt, Artificial Sequence
  Description of Artificial Sequence: Synthetic oligonucleotide
gcucauugcacguaauacu

SEQ ID NO: 654955 - RNA, 19 nt, Artificial Sequence
  Description of Artificial Sequence: Synthetic oligonucleotide
cagugacugguugggcugg

SEQ ID NO: 654956 - RNA, 19 nt, Artificial Sequence
  Description of Artificial Sequence: Synthetic oligonucleotide
ggguaaaccccgcaauguc

SEQ ID NO: 654957 - RNA, 19 nt, Artificial Sequence
  Description of Artificial Sequence: Synthetic oligonucleotide
agccgauuagccaggcucu

SEQ ID NO: 654958 - RNA, 19 nt, Artificial Sequence
  Description of Artificial Sequence: Synthetic oligonucleotide
caggcgcguuuccagcucc

SEQ ID NO: 654959 - RNA, 19 nt, Artificial Sequence
  Description of Artificial Sequence: Synthetic oligonucleotide
cuccaaggagacgaccuuc

SEQ ID NO: 654960 - RNA, 19 nt, Artificial Sequence
  Description of Artificial Sequence: Synthetic oligonucleotide
accccgucgacccgguccu

SEQ ID NO: 654961 - RNA, 19 nt, Artificial Sequence
  Description of Artificial Sequence: Synthetic oligonucleotide
ggacccgggcagaagaaag

SEQ ID NO: 654962 - RNA, 19 nt, Artificial Sequence
  Description of Artificial Sequence: Synthetic oligonucleotide
gacagcaaccccucccgcu

SEQ ID NO: 654963 - RNA, 19 nt, Artificial Sequence
  Description of Artificial Sequence: Synthetic oligonucleotide
uugcuaggcccaagccaga

SEQ ID NO: 654964 - RNA, 19 nt, Artificial Sequence
  Description of Artificial Sequence: Synthetic oligonucleotide
gagguccacuaccggcgcc

SEQ ID NO: 654965 - RNA, 19 nt, Artificial Sequence
  Description of Artificial Sequence: Synthetic oligonucleotide
cagguaaccuauccaccca

SEQ ID NO: 654966 - RNA, 19 nt, Artificial Sequence
  Description of Artificial Sequence: Synthetic oligonucleotide
gaaucggggucuggaggug

SEQ ID NO: 654967 - RNA, 19 nt, Artificial Sequence
  Description of Artificial Sequence: Synthetic oligonucleotide
aggagacgaccuucugggu

SEQ ID NO: 654968 - RNA, 19 nt, Artificial Sequence
  Description of Artificial Sequence: Synthetic oligonucleotide
gcugucuacaggaccauuc

SEQ ID NO: 654969 - RNA, 19 nt, Artificial Sequence
  Description of Artificial Sequence: Synthetic oligonucleotide
ccccaaugcgcuugaacgc

SEQ ID NO: 654970 - RNA, 19 nt, Artificial Sequence
  Description of Artificial Sequence: Synthetic oligonucleotide
uugagccgauuagccaggc

SEQ ID NO: 654971 - RNA, 19 nt, Artificial Sequence
  Description of Artificial Sequence: Synthetic oligonucleotide
gugugggaaccagggaccc

SEQ ID NO: 654972 - RNA, 19 nt, Artificial Sequence
  Description of Artificial Sequence: Synthetic oligonucleotide
accuccucgucacgacucu

SEQ ID NO: 654973 - RNA, 19 nt, Artificial Sequence
  Description of Artificial Sequence: Synthetic oligonucleotide
ggacuugaccccgucgacc

SEQ ID NO: 654974 - RNA, 19 nt, Artificial Sequence
  Description of Artificial Sequence: Synthetic oligonucleotide
gucuggaggugcugucuac

SEQ ID NO: 654975 - RNA, 19 nt, Artificial Sequence
  Description of Artificial Sequence: Synthetic oligonucleotide
caggaccauucucaucauc

SEQ ID NO: 654976 - RNA, 19 nt, Artificial Sequence
  Description of Artificial Sequence: Synthetic oligonucleotide
cugacucccauggguccgg

SEQ ID NO: 654977 - RNA, 19 nt, Artificial Sequence
  Description of Artificial Sequence: Synthetic oligonucleotide
aaggaccgcuggaggagug

SEQ ID NO: 654978 - RNA, 19 nt, Artificial Sequence
  Description of Artificial Sequence: Synthetic oligonucleotide
cugguucaccuggucacug

SEQ ID NO: 654979 - RNA, 19 nt, Artificial Sequence
  Description of Artificial Sequence: Synthetic oligonucleotide
ggagacgaccuucugggua

SEQ ID NO: 654980 - RNA, 19 nt, Artificial Sequence
  Description of Artificial Sequence: Synthetic oligonucleotide
cccaaugcgcuugaacgcc

SEQ ID NO: 654981 - RNA, 19 nt, Artificial Sequence
  Description of Artificial Sequence: Synthetic oligonucleotide
gccucuuaagagccagggc

SEQ ID NO: 654982 - RNA, 19 nt, Artificial Sequence
  Description of Artificial Sequence: Synthetic oligonucleotide
caggcuuugguuagcggcu

SEQ ID NO: 654983 - RNA, 19 nt, Artificial Sequence
  Description of Artificial Sequence: Synthetic oligonucleotide
accuauccacccaucccug

SEQ ID NO: 654984 - RNA, 19 nt, Artificial Sequence
  Description of Artificial Sequence: Synthetic oligonucleotide
ccgcucucaaggaugcagc

SEQ ID NO: 654985 - RNA, 19 nt, Artificial Sequence
  Description of Artificial Sequence: Synthetic oligonucleotide
ugucuaccauggacugcuc

SEQ ID NO: 654986 - RNA, 19 nt, Artificial Sequence
  Description of Artificial Sequence: Synthetic oligonucleotide
auugcacguaauacuccaa

SEQ ID NO: 654987 - RNA, 19 nt, Artificial Sequence
  Description of Artificial Sequence: Synthetic oligonucleotide
cagcaccaaaugagcuggc

SEQ ID NO: 654988 - RNA, 19 nt, Artificial Sequence
  Description of Artificial Sequence: Synthetic oligonucleotide
gcuuuagaucagccugcag

SEQ ID NO: 654989 - RNA, 19 nt, Artificial Sequence
  Description of Artificial Sequence: Synthetic oligonucleotide
gaccgcuggaggagugaag

SEQ ID NO: 654990 - RNA, 19 nt, Artificial Sequence
  Description of Artificial Sequence: Synthetic oligonucleotide
cuugaacgccagcuuuaga

SEQ ID NO: 654991 - RNA, 19 nt, Artificial Sequence
  Description of Artificial Sequence: Synthetic oligonucleotide
gcuuugguuagcggcuucc

SEQ ID NO: 654992 - RNA, 19 nt, Artificial Sequence
  Description of Artificial Sequence: Synthetic oligonucleotide
uggucccguuccucaguca

SEQ ID NO: 654993 - RNA, 19 nt, Artificial Sequence
  Description of Artificial Sequence: Synthetic oligonucleotide
cugugucugggguaagugu

SEQ ID NO: 654994 - RNA, 19 nt, Artificial Sequence
  Description of Artificial Sequence: Synthetic oligonucleotide
gcugcagcgcgaugguccc

SEQ ID NO: 654995 - RNA, 19 nt, Artificial Sequence
  Description of Artificial Sequence: Synthetic oligonucleotide
cacuaccggcgccaugcac

SEQ ID NO: 654996 - RNA, 19 nt, Artificial Sequence
  Description of Artificial Sequence: Synthetic oligonucleotide
cucagccuccaaggagacg

SEQ ID NO: 654997 - RNA, 19 nt, Artificial Sequence
  Description of Artificial Sequence: Synthetic oligonucleotide
ggcuugcaaguccccaaug

SEQ ID NO: 654998 - RNA, 19 nt, Artificial Sequence
  Description of Artificial Sequence: Synthetic oligonucleotide
gagaagccucauccuugga

SEQ ID NO: 654999 - RNA, 19 nt, Artificial Sequence
  Description of Artificial Sequence: Synthetic oligonucleotide
cuuugacaaccaggacuug

SEQ ID NO: 655000 - RNA, 19 nt, Artificial Sequence
  Description of Artificial Sequence: Synthetic oligonucleotide
gcugcauggagguuugggu

SEQ ID NO: 655001 - RNA, 19 nt, Artificial Sequence
  Description of Artificial Sequence: Synthetic oligonucleotide
ccucccgcucucaaggaug

SEQ ID NO: 655002 - RNA, 19 nt, Artificial Sequence
  Description of Artificial Sequence: Synthetic oligonucleotide
auugcucauugcacguaau

SEQ ID NO: 655003 - RNA, 19 nt, Artificial Sequence
  Description of Artificial Sequence: Synthetic oligonucleotide
cugacagagccaaggggcu

SEQ ID NO: 655004 - RNA, 19 nt, Artificial Sequence
  Description of Artificial Sequence: Synthetic oligonucleotide
uugaccccgucgacccggu

SEQ ID NO: 655005 - RNA, 19 nt, Artificial Sequence
  Description of Artificial Sequence: Synthetic oligonucleotide
ccauggguccggcagcuug

SEQ ID NO: 655006 - RNA, 19 nt, Artificial Sequence
  Description of Artificial Sequence: Synthetic oligonucleotide
ccccugacagagccaaggg

SEQ ID NO: 655007 - RNA, 19 nt, Artificial Sequence
  Description of Artificial Sequence: Synthetic oligonucleotide
aggcgcguuuccagcuccc

SEQ ID NO: 655008 - RNA, 19 nt, Artificial Sequence
  Description of Artificial Sequence: Synthetic oligonucleotide
cugggguaaguguguggga

SEQ ID NO: 655009 - RNA, 19 nt, Artificial Sequence
  Description of Artificial Sequence: Synthetic oligonucleotide
gaaagacagcaggcacuga

SEQ ID NO: 655010 - RNA, 19 nt, Artificial Sequence
  Description of Artificial Sequence: Synthetic oligonucleotide
gcgauggucccguuccuca

SEQ ID NO: 655011 - RNA, 19 nt, Artificial Sequence
  Description of Artificial Sequence: Synthetic oligonucleotide
guccucaauggcggcuugc

SEQ ID NO: 655012 - RNA, 19 nt, Artificial Sequence
  Description of Artificial Sequence: Synthetic oligonucleotide
agcccucaccccagcagag

SEQ ID NO: 655013 - RNA, 19 nt, Artificial Sequence
  Description of Artificial Sequence: Synthetic oligonucleotide
gcucucaaggaugcagcug

SEQ ID NO: 655014 - RNA, 19 nt, Artificial Sequence
  Description of Artificial Sequence: Synthetic oligonucleotide
cugucgcuggagccucuug

SEQ ID NO: 655015 - RNA, 19 nt, Artificial Sequence
  Description of Artificial Sequence: Synthetic oligonucleotide
cuuaagagccagggcucca

SEQ ID NO: 655016 - RNA, 19 nt, Artificial Sequence
  Description of Artificial Sequence: Synthetic oligonucleotide
gguaagugugugggaacca

SEQ ID NO: 655017 - RNA, 19 nt, Artificial Sequence
  Description of Artificial Sequence: Synthetic oligonucleotide
accccgcaauguccauguc

SEQ ID NO: 655018 - RNA, 19 nt, Artificial Sequence
  Description of Artificial Sequence: Synthetic oligonucleotide
ccgaaagauuagcugucuc

SEQ ID NO: 655019 - RNA, 19 nt, Artificial Sequence
  Description of Artificial Sequence: Synthetic oligonucleotide
aaccaggacuugaccccgu

SEQ ID NO: 655020 - RNA, 19 nt, Artificial Sequence
  Description of Artificial Sequence: Synthetic oligonucleotide
cagccuccaaggagacgac

SEQ ID NO: 655021 - RNA, 19 nt, Artificial Sequence
  Description of Artificial Sequence: Synthetic oligonucleotide
cccgcucucaaggaugcag

SEQ ID NO: 655022 - RNA, 19 nt, Artificial Sequence
  Description of Artificial Sequence: Synthetic oligonucleotide
ggcuaugcauuggucucug

SEQ ID NO: 655023 - RNA, 19 nt, Artificial Sequence
  Description of Artificial Sequence: Synthetic oligonucleotide
cugcgacagcaaccccucc

SEQ ID NO: 655024 - RNA, 19 nt, Artificial Sequence
  Description of Artificial Sequence: Synthetic oligonucleotide
gacucccauggguccggca

SEQ ID NO: 655025 - RNA, 19 nt, Artificial Sequence
  Description of Artificial Sequence: Synthetic oligonucleotide
ugcugucuacaggaccauu

SEQ ID NO: 655026 - RNA, 19 nt, Artificial Sequence
  Description of Artificial Sequence: Synthetic oligonucleotide
uugcugugucugggguaag

SEQ ID NO: 655027 - RNA, 19 nt, Artificial Sequence
  Description of Artificial Sequence: Synthetic oligonucleotide
uuggugcgcuucaggucuu

SEQ ID NO: 655028 - RNA, 19 nt, Artificial Sequence
  Description of Artificial Sequence: Synthetic oligonucleotide
auggagguuuggguauuua

SEQ ID NO: 655029 - RNA, 19 nt, Artificial Sequence
  Description of Artificial Sequence: Synthetic oligonucleotide
ucggggucuggaggugcug

SEQ ID NO: 655030 - RNA, 19 nt, Artificial Sequence
  Description of Artificial Sequence: Synthetic oligonucleotide
aggaccgcuggaggaguga

SEQ ID NO: 655031 - RNA, 19 nt, Artificial Sequence
  Description of Artificial Sequence: Synthetic oligonucleotide
accuuccacugggcccacc

SEQ ID NO: 655032 - RNA, 19 nt, Artificial Sequence
  Description of Artificial Sequence: Synthetic oligonucleotide
ggaugcucccagccuguuc

SEQ ID NO: 655033 - RNA, 19 nt, Artificial Sequence
  Description of Artificial Sequence: Synthetic oligonucleotide
gggacuugucuaccaugga

SEQ ID NO: 655034 - RNA, 19 nt, Artificial Sequence
  Description of Artificial Sequence: Synthetic oligonucleotide
ccaaggagacgaccuucug

SEQ ID NO: 655035 - RNA, 19 nt, Artificial Sequence
  Description of Artificial Sequence: Synthetic oligonucleotide
gcgcguuuccagcucccug

SEQ ID NO: 655036 - RNA, 19 nt, Artificial Sequence
  Description of Artificial Sequence: Synthetic oligonucleotide
cagcgcgauggucccguuc

SEQ ID NO: 655037 - RNA, 19 nt, Artificial Sequence
  Description of Artificial Sequence: Synthetic oligonucleotide
guccacuaccggcgccaug

SEQ ID NO: 655038 - RNA, 19 nt, Artificial Sequence
  Description of Artificial Sequence: Synthetic oligonucleotide
gcugcgacagcaaccccuc

SEQ ID NO: 655039 - RNA, 19 nt, Artificial Sequence
  Description of Artificial Sequence: Synthetic oligonucleotide
cugcuucaagccgaaagau

SEQ ID NO: 655040 - RNA, 19 nt, Artificial Sequence
  Description of Artificial Sequence: Synthetic oligonucleotide
ccgauuagccaggcucucc

SEQ ID NO: 655041 - RNA, 19 nt, Artificial Sequence
  Description of Artificial Sequence: Synthetic oligonucleotide
gugucugggguaagugugu

SEQ ID NO: 655042 - RNA, 19 nt, Artificial Sequence
  Description of Artificial Sequence: Synthetic oligonucleotide
gcccaccacaaguccucag

SEQ ID NO: 655043 - RNA, 19 nt, Artificial Sequence
  Description of Artificial Sequence: Synthetic oligonucleotide
gcgcaaccucuuuucugac

SEQ ID NO: 655044 - RNA, 19 nt, Artificial Sequence
  Description of Artificial Sequence: Synthetic oligonucleotide
ccuggaggggcguuguucu

SEQ ID NO: 655045 - RNA, 19 nt, Artificial Sequence
  Description of Artificial Sequence: Synthetic oligonucleotide
gcggcuugcaaguccccaa

SEQ ID NO: 655046 - RNA, 19 nt, Artificial Sequence
  Description of Artificial Sequence: Synthetic oligonucleotide
ugaccccgucgacccgguc

SEQ ID NO: 655047 - RNA, 19 nt, Artificial Sequence
  Description of Artificial Sequence: Synthetic oligonucleotide
ucccgcucucaaggaugca

SEQ ID NO: 655048 - RNA, 19 nt, Artificial Sequence
  Description of Artificial Sequence: Synthetic oligonucleotide
ccuauccacccaucccuga

SEQ ID NO: 655049 - RNA, 19 nt, Artificial Sequence
  Description of Artificial Sequence: Synthetic oligonucleotide
gucaggggcgagggacuuc

SEQ ID NO: 655050 - RNA, 19 nt, Artificial Sequence
  Description of Artificial Sequence: Synthetic oligonucleotide
caaauagcugugggagaau

SEQ ID NO: 655051 - RNA, 19 nt, Artificial Sequence
  Description of Artificial Sequence: Synthetic oligonucleotide
uaccggcgccaugcacagc

SEQ ID NO: 655052 - RNA, 19 nt, Artificial Sequence
  Description of Artificial Sequence: Synthetic oligonucleotide
ggaccgcuggaggagugaa

SEQ ID NO: 655053 - RNA, 19 nt, Artificial Sequence
  Description of Artificial Sequence: Synthetic oligonucleotide
gugacugguugggcuggaa

SEQ ID NO: 655054 - RNA, 19 nt, Artificial Sequence
  Description of Artificial Sequence: Synthetic oligonucleotide
uggugcgcuucaggucuuu

SEQ ID NO: 655055 - RNA, 19 nt, Artificial Sequence
  Description of Artificial Sequence: Synthetic oligonucleotide
cucaaggaugcagcugcau

SEQ ID NO: 655056 - RNA, 19 nt, Artificial Sequence
  Description of Artificial Sequence: Synthetic oligonucleotide
gccgaaagauuagcugucu

SEQ ID NO: 655057 - RNA, 19 nt, Artificial Sequence
  Description of Artificial Sequence: Synthetic oligonucleotide
ccuuagugucccggagcug

SEQ ID NO: 655058 - RNA, 19 nt, Artificial Sequence
  Description of Artificial Sequence: Synthetic oligonucleotide
cccgucgacccgguccucc

SEQ ID NO: 655059 - RNA, 19 nt, Artificial Sequence
  Description of Artificial Sequence: Synthetic oligonucleotide
ccccgcaauguccaugucu

SEQ ID NO: 655060 - RNA, 19 nt, Artificial Sequence
  Description of Artificial Sequence: Synthetic oligonucleotide
gggacccgggcagaagaaa

SEQ ID NO: 655061 - RNA, 19 nt, Artificial Sequence
  Description of Artificial Sequence: Synthetic oligonucleotide
gguuagcggcuuccagacu

SEQ ID NO: 655062 - RNA, 19 nt, Artificial Sequence
  Description of Artificial Sequence: Synthetic oligonucleotide
cgucacgacucuccaucuc

SEQ ID NO: 655063 - RNA, 19 nt, Artificial Sequence
  Description of Artificial Sequence: Synthetic oligonucleotide
gggcuaugcauuggucucu

SEQ ID NO: 655064 - RNA, 19 nt, Artificial Sequence
  Description of Artificial Sequence: Synthetic oligonucleotide
cagcaugaucugggcaucu

SEQ ID NO: 655065 - RNA, 19 nt, Artificial Sequence
  Description of Artificial Sequence: Synthetic oligonucleotide
cacugaguguggagagcuu

SEQ ID NO: 655066 - RNA, 19 nt, Artificial Sequence
  Description of Artificial Sequence: Synthetic oligonucleotide
gcuaugcauuggucucugu

SEQ ID NO: 655067 - RNA, 19 nt, Artificial Sequence
  Description of Artificial Sequence: Synthetic oligonucleotide
caggggcgagggacuucca

SEQ ID NO: 655068 - RNA, 19 nt, Artificial Sequence
  Description of Artificial Sequence: Synthetic oligonucleotide
cugccuuggaaggucccuu

SEQ ID NO: 655069 - RNA, 19 nt, Artificial Sequence
  Description of Artificial Sequence: Synthetic oligonucleotide
cguuuccagcucccugauc

SEQ ID NO: 655070 - RNA, 19 nt, Artificial Sequence
  Description of Artificial Sequence: Synthetic oligonucleotide
cauggagguuuggguauuu

SEQ ID NO: 655071 - RNA, 19 nt, Artificial Sequence
  Description of Artificial Sequence: Synthetic oligonucleotide
caccuuccacugggcccac

SEQ ID NO: 655072 - RNA, 19 nt, Artificial Sequence
  Description of Artificial Sequence: Synthetic oligonucleotide
caugacugccgggccuccu

SEQ ID NO: 655073 - RNA, 19 nt, Artificial Sequence
  Description of Artificial Sequence: Synthetic oligonucleotide
gcaaguccccaaugcgcuu

SEQ ID NO: 655074 - RNA, 19 nt, Artificial Sequence
  Description of Artificial Sequence: Synthetic oligonucleotide
cugucggcuuggccucugu

SEQ ID NO: 655075 - RNA, 19 nt, Artificial Sequence
  Description of Artificial Sequence: Synthetic oligonucleotide
ccgucgacccgguccucca

SEQ ID NO: 655076 - RNA, 19 nt, Artificial Sequence
  Description of Artificial Sequence: Synthetic oligonucleotide
cggcgccaugcacagccug

SEQ ID NO: 655077 - RNA, 19 nt, Artificial Sequence
  Description of Artificial Sequence: Synthetic oligonucleotide
cgcucucaaggaugcagcu

SEQ ID NO: 655078 - RNA, 19 nt, Artificial Sequence
  Description of Artificial Sequence: Synthetic oligonucleotide
ccacuaccggcgccaugca

SEQ ID NO: 655079 - RNA, 19 nt, Artificial Sequence
  Description of Artificial Sequence: Synthetic oligonucleotide
cugcugcuucaagccgaaa

SEQ ID NO: 655080 - RNA, 19 nt, Artificial Sequence
  Description of Artificial Sequence: Synthetic oligonucleotide
ggcgcguuuccagcucccu

SEQ ID NO: 655081 - RNA, 19 nt, Artificial Sequence
  Description of Artificial Sequence: Synthetic oligonucleotide
gcauggagguuuggguauu

SEQ ID NO: 655082 - RNA, 19 nt, Artificial Sequence
  Description of Artificial Sequence: Synthetic oligonucleotide
ccuuggcaugggucugucu

SEQ ID NO: 655083 - RNA, 19 nt, Artificial Sequence
  Description of Artificial Sequence: Synthetic oligonucleotide
ccucgucacgacucuccau

SEQ ID NO: 655084 - RNA, 19 nt, Artificial Sequence
  Description of Artificial Sequence: Synthetic oligonucleotide
gcgcgauggucccguuccu

SEQ ID NO: 655085 - RNA, 19 nt, Artificial Sequence
  Description of Artificial Sequence: Synthetic oligonucleotide
ccgcuggaggagugaagau

SEQ ID NO: 655086 - RNA, 19 nt, Artificial Sequence
  Description of Artificial Sequence: Synthetic oligonucleotide
gguccacuaccggcgccau

SEQ ID NO: 655087 - RNA, 19 nt, Artificial Sequence
  Description of Artificial Sequence: Synthetic oligonucleotide
ccggcgccaugcacagccu

SEQ ID NO: 655088 - RNA, 19 nt, Artificial Sequence
  Description of Artificial Sequence: Synthetic oligonucleotide
ccccgucgacccgguccuc

SEQ ID NO: 655089 - RNA, 19 nt, Artificial Sequence
  Description of Artificial Sequence: Synthetic oligonucleotide
aauagugucagauuguucc

SEQ ID NO: 655090 - RNA, 19 nt, Artificial Sequence
  Description of Artificial Sequence: Synthetic oligonucleotide
uaaaucuaaauccugaugc

SEQ ID NO: 655091 - RNA, 19 nt, Artificial Sequence
  Description of Artificial Sequence: Synthetic oligonucleotide
ugucucauuacucugaggg

SEQ ID NO: 655092 - RNA, 19 nt, Artificial Sequence
  Description of Artificial Sequence: Synthetic oligonucleotide
aaacaccaaacccaauucc

SEQ ID NO: 655093 - RNA, 19 nt, Artificial Sequence
  Description of Artificial Sequence: Synthetic oligonucleotide
ucuauucucagacuuaagc

SEQ ID NO: 655094 - RNA, 19 nt, Artificial Sequence
  Description of Artificial Sequence: Synthetic oligonucleotide
uaaacuugcaacuaacuga

SEQ ID NO: 655095 - RNA, 19 nt, Artificial Sequence
  Description of Artificial Sequence: Synthetic oligonucleotide
acauuaacuagcuuuauug

SEQ ID NO: 655096 - RNA, 19 nt, Artificial Sequence
  Description of Artificial Sequence: Synthetic oligonucleotide
aauggaugccauuaguaag

SEQ ID NO: 655097 - RNA, 19 nt, Artificial Sequence
  Description of Artificial Sequence: Synthetic oligonucleotide
uccucaauaaauaguaaag

SEQ ID NO: 655098 - RNA, 19 nt, Artificial Sequence
  Description of Artificial Sequence: Synthetic oligonucleotide
aauaguaaagacugcacau

SEQ ID NO: 655099 - RNA, 19 nt, Artificial Sequence
  Description of Artificial Sequence: Synthetic oligonucleotide
aguacauagagccaaguug

SEQ ID NO: 655100 - RNA, 19 nt, Artificial Sequence
  Description of Artificial Sequence: Synthetic oligonucleotide
uucuuaugcacacagucag

SEQ ID NO: 655101 - RNA, 19 nt, Artificial Sequence
  Description of Artificial Sequence: Synthetic oligonucleotide
aauaaauaguaaagacugc

SEQ ID NO: 655102 - RNA, 19 nt, Artificial Sequence
  Description of Artificial Sequence: Synthetic oligonucleotide
agugaguagagacacuugg

SEQ ID NO: 655103 - RNA, 19 nt, Artificial Sequence
  Description of Artificial Sequence: Synthetic oligonucleotide
aagagcagugcaaugaugg

SEQ ID NO: 655104 - RNA, 19 nt, Artificial Sequence
  Description of Artificial Sequence: Synthetic oligonucleotide
ugaguuuuacuucuauucc

SEQ ID NO: 655105 - RNA, 19 nt, Artificial Sequence
  Description of Artificial Sequence: Synthetic oligonucleotide
ucauaauuaacuugaacuc

SEQ ID NO: 655106 - RNA, 19 nt, Artificial Sequence
  Description of Artificial Sequence: Synthetic oligonucleotide
auaaaagcguuuugcaagg

SEQ ID NO: 655107 - RNA, 19 nt, Artificial Sequence
  Description of Artificial Sequence: Synthetic oligonucleotide
uaugacuguacccaagagc

SEQ ID NO: 655108 - RNA, 19 nt, Artificial Sequence
  Description of Artificial Sequence: Synthetic oligonucleotide
aguagagacacuuggcuuc

SEQ ID NO: 655109 - RNA, 19 nt, Artificial Sequence
  Description of Artificial Sequence: Synthetic oligonucleotide
uuauguaccaugucccacg

SEQ ID NO: 655110 - RNA, 19 nt, Artificial Sequence
  Description of Artificial Sequence: Synthetic oligonucleotide
auuaacaggguuuguuuac

SEQ ID NO: 655111 - RNA, 19 nt, Artificial Sequence
  Description of Artificial Sequence: Synthetic oligonucleotide
aucccuagugaguagagac

SEQ ID NO: 655112 - RNA, 19 nt, Artificial Sequence
  Description of Artificial Sequence: Synthetic oligonucleotide
uuuacuucuauuccauuac

SEQ ID NO: 655113 - RNA, 19 nt, Artificial Sequence
  Description of Artificial Sequence: Synthetic oligonucleotide
uugcuuauguaccaugucc

SEQ ID NO: 655114 - RNA, 19 nt, Artificial Sequence
  Description of Artificial Sequence: Synthetic oligonucleotide
uguagucuggucaacuucc

SEQ ID NO: 655115 - RNA, 19 nt, Artificial Sequence
  Description of Artificial Sequence: Synthetic oligonucleotide
aauguguaaacagucucuc

SEQ ID NO: 655116 - RNA, 19 nt, Artificial Sequence
  Description of Artificial Sequence: Synthetic oligonucleotide
ugugcuugcauguagucug

SEQ ID NO: 655117 - RNA, 19 nt, Artificial Sequence
  Description of Artificial Sequence: Synthetic oligonucleotide
gaucgcacaggaaagauag

SEQ ID NO: 655118 - RNA, 19 nt, Artificial Sequence
  Description of Artificial Sequence: Synthetic oligonucleotide
acugacauuaacuagcuuu

SEQ ID NO: 655119 - RNA, 19 nt, Artificial Sequence
  Description of Artificial Sequence: Synthetic oligonucleotide
uccauuacaagaagugaag

SEQ ID NO: 655120 - RNA, 19 nt, Artificial Sequence
  Description of Artificial Sequence: Synthetic oligonucleotide
uaagcuaugacuguaccca

SEQ ID NO: 655121 - RNA, 19 nt, Artificial Sequence
  Description of Artificial Sequence: Synthetic oligonucleotide
aaauggaugccauuaguaa

SEQ ID NO: 655122 - RNA, 19 nt, Artificial Sequence
  Description of Artificial Sequence: Synthetic oligonucleotide
auagacgacacccaauuug

SEQ ID NO: 655123 - RNA, 19 nt, Artificial Sequence
  Description of Artificial Sequence: Synthetic oligonucleotide
aaauagacgacacccaauu

SEQ ID NO: 655124 - RNA, 19 nt, Artificial Sequence
  Description of Artificial Sequence: Synthetic oligonucleotide
acuucuauuccauuacaag

SEQ ID NO: 655125 - RNA, 19 nt, Artificial Sequence
  Description of Artificial Sequence: Synthetic oligonucleotide
cacuacagcauccagagac

SEQ ID NO: 655126 - RNA, 19 nt, Artificial Sequence
  Description of Artificial Sequence: Synthetic oligonucleotide
ucuacuaugguguuccuuc

SEQ ID NO: 655127 - RNA, 19 nt, Artificial Sequence
  Description of Artificial Sequence: Synthetic oligonucleotide
gacgauaucacuuccuuca

SEQ ID NO: 655128 - RNA, 19 nt, Artificial Sequence
  Description of Artificial Sequence: Synthetic oligonucleotide
uccaagaccgcucuguccc

SEQ ID NO: 655129 - RNA, 19 nt, Artificial Sequence
  Description of Artificial Sequence: Synthetic oligonucleotide
ucucuugaaaucccuagug

SEQ ID NO: 655130 - RNA, 19 nt, Artificial Sequence
  Description of Artificial Sequence: Synthetic oligonucleotide
cauuaacuagcuuuauugc

SEQ ID NO: 655131 - RNA, 19 nt, Artificial Sequence
  Description of Artificial Sequence: Synthetic oligonucleotide
ucuauuccauuacaagaag

SEQ ID NO: 655132 - RNA, 19 nt, Artificial Sequence
  Description of Artificial Sequence: Synthetic oligonucleotide
gccauuauaguacauagag

SEQ ID NO: 655133 - RNA, 19 nt, Artificial Sequence
  Description of Artificial Sequence: Synthetic oligonucleotide
aauuaacuugaacuccucu

SEQ ID NO: 655134 - RNA, 19 nt, Artificial Sequence
  Description of Artificial Sequence: Synthetic oligonucleotide
ugcuuauguaccauguccc

SEQ ID NO: 655135 - RNA, 19 nt, Artificial Sequence
  Description of Artificial Sequence: Synthetic oligonucleotide
ugaguagagacacuuggcu

SEQ ID NO: 655136 - RNA, 19 nt, Artificial Sequence
  Description of Artificial Sequence: Synthetic oligonucleotide
aacgaaucuguacaucucu

SEQ ID NO: 655137 - RNA, 19 nt, Artificial Sequence
  Description of Artificial Sequence: Synthetic oligonucleotide
aacuaacugaguuuuccca

SEQ ID NO: 655138 - RNA, 19 nt, Artificial Sequence
  Description of Artificial Sequence: Synthetic oligonucleotide
uuccauuacaagaagugaa

SEQ ID NO: 655139 - RNA, 19 nt, Artificial Sequence
  Description of Artificial Sequence: Synthetic oligonucleotide
ugccuguaagcuaugacug

SEQ ID NO: 655140 - RNA, 19 nt, Artificial Sequence
  Description of Artificial Sequence: Synthetic oligonucleotide
cuucagaauacaucuuucc

SEQ ID NO: 655141 - RNA, 19 nt, Artificial Sequence
  Description of Artificial Sequence: Synthetic oligonucleotide
guacauagagccaaguugc

SEQ ID NO: 655142 - RNA, 19 nt, Artificial Sequence
  Description of Artificial Sequence: Synthetic oligonucleotide
uguaagcuaugacuguacc

SEQ ID NO: 655143 - RNA, 19 nt, Artificial Sequence
  Description of Artificial Sequence: Synthetic oligonucleotide
uuauaguacauagagccaa

SEQ ID NO: 655144 - RNA, 19 nt, Artificial Sequence
  Description of Artificial Sequence: Synthetic oligonucleotide
cagucuucgaggaagaguc

SEQ ID NO: 655145 - RNA, 19 nt, Artificial Sequence
  Description of Artificial Sequence: Synthetic oligonucleotide
uauaguacauagagccaag

SEQ ID NO: 655146 - RNA, 19 nt, Artificial Sequence
  Description of Artificial Sequence: Synthetic oligonucleotide
agguaggccauuccaagac

SEQ ID NO: 655147 - RNA, 19 nt, Artificial Sequence
  Description of Artificial Sequence: Synthetic oligonucleotide
ugucccacgagcaggaaga

SEQ ID NO: 655148 - RNA, 19 nt, Artificial Sequence
  Description of Artificial Sequence: Synthetic oligonucleotide
aaagcguuuugcaagguga

SEQ ID NO: 655149 - RNA, 19 nt, Artificial Sequence
  Description of Artificial Sequence: Synthetic oligonucleotide
augacuguacccaagagca

SEQ ID NO: 655150 - RNA, 19 nt, Artificial Sequence
  Description of Artificial Sequence: Synthetic oligonucleotide
ucgucccugaaaaggaagg

SEQ ID NO: 655151 - RNA, 19 nt, Artificial Sequence
  Description of Artificial Sequence: Synthetic oligonucleotide
auaguaaagacugcacauc

SEQ ID NO: 655152 - RNA, 19 nt, Artificial Sequence
  Description of Artificial Sequence: Synthetic oligonucleotide
ucuaucuguaaaucuaaau

SEQ ID NO: 655153 - RNA, 19 nt, Artificial Sequence
  Description of Artificial Sequence: Synthetic oligonucleotide
agaaacaccaaacccaauu

SEQ ID NO: 655154 - RNA, 19 nt, Artificial Sequence
  Description of Artificial Sequence: Synthetic oligonucleotide
uauaggaaaccgcucagua

SEQ ID NO: 655155 - RNA, 19 nt, Artificial Sequence
  Description of Artificial Sequence: Synthetic oligonucleotide
auugcgugugaauugccag

SEQ ID NO: 655156 - RNA, 19 nt, Artificial Sequence
  Description of Artificial Sequence: Synthetic oligonucleotide
aagugccaaaugugugugc

SEQ ID NO: 655157 - RNA, 19 nt, Artificial Sequence
  Description of Artificial Sequence: Synthetic oligonucleotide
acacaauuauaauacacuu

SEQ ID NO: 655158 - RNA, 19 nt, Artificial Sequence
  Description of Artificial Sequence: Synthetic oligonucleotide
uaugugagugcaaggaguc

SEQ ID NO: 655159 - RNA, 19 nt, Artificial Sequence
  Description of Artificial Sequence: Synthetic oligonucleotide
aauauucgcuucccguaug

SEQ ID NO: 655160 - RNA, 19 nt, Artificial Sequence
  Description of Artificial Sequence: Synthetic oligonucleotide
gacgacacccaauuugcag

SEQ ID NO: 655161 - RNA, 19 nt, Artificial Sequence
  Description of Artificial Sequence: Synthetic oligonucleotide
agcauccagagacagacca

SEQ ID NO: 655162 - RNA, 19 nt, Artificial Sequence
  Description of Artificial Sequence: Synthetic oligonucleotide
ucucauuacucugagggac

SEQ ID NO: 655163 - RNA, 19 nt, Artificial Sequence
  Description of Artificial Sequence: Synthetic oligonucleotide
aauacacuucaccagccuu

SEQ ID NO: 655164 - RNA, 19 nt, Artificial Sequence
  Description of Artificial Sequence: Synthetic oligonucleotide
uagucaaaugcucucuggu

SEQ ID NO: 655165 - RNA, 19 nt, Artificial Sequence
  Description of Artificial Sequence: Synthetic oligonucleotide
aguauaggaaaccgcucag

SEQ ID NO: 655166 - RNA, 19 nt, Artificial Sequence
  Description of Artificial Sequence: Synthetic oligonucleotide
auaaaggucccuucuuaug

SEQ ID NO: 655167 - RNA, 19 nt, Artificial Sequence
  Description of Artificial Sequence: Synthetic oligonucleotide
uauuaacaggguuuguuua

SEQ ID NO: 655168 - RNA, 19 nt, Artificial Sequence
  Description of Artificial Sequence: Synthetic oligonucleotide
augacaaaaggaucgcaca

SEQ ID NO: 655169 - RNA, 19 nt, Artificial Sequence
  Description of Artificial Sequence: Synthetic oligonucleotide
aauacaucuuucccaggaa

SEQ ID NO: 655170 - RNA, 19 nt, Artificial Sequence
  Description of Artificial Sequence: Synthetic oligonucleotide
gucgucaggaccguaaagg

SEQ ID NO: 655171 - RNA, 19 nt, Artificial Sequence
  Description of Artificial Sequence: Synthetic oligonucleotide
ucgaauauucgcuucccgu

SEQ ID NO: 655172 - RNA, 19 nt, Artificial Sequence
  Description of Artificial Sequence: Synthetic oligonucleotide
ucauugguauaccugguua

SEQ ID NO: 655173 - RNA, 19 nt, Artificial Sequence
  Description of Artificial Sequence: Synthetic oligonucleotide
guagucaaaugcucucugg

SEQ ID NO: 655174 - RNA, 19 nt, Artificial Sequence
  Description of Artificial Sequence: Synthetic oligonucleotide
ucugcuacgaagugucaca

SEQ ID NO: 655175 - RNA, 19 nt, Artificial Sequence
  Description of Artificial Sequence: Synthetic oligonucleotide
uucgcuucccguauguacu

SEQ ID NO: 655176 - RNA, 19 nt, Artificial Sequence
  Description of Artificial Sequence: Synthetic oligonucleotide
ucagauuguuccucaauaa

SEQ ID NO: 655177 - RNA, 19 nt, Artificial Sequence
  Description of Artificial Sequence: Synthetic oligonucleotide
uuacacgcacugaaggaug

SEQ ID NO: 655178 - RNA, 19 nt, Artificial Sequence
  Description of Artificial Sequence: Synthetic oligonucleotide
agucaaaugcucucuggug

SEQ ID NO: 655179 - RNA, 19 nt, Artificial Sequence
  Description of Artificial Sequence: Synthetic oligonucleotide
ccguaaaggacacugaugc

SEQ ID NO: 655180 - RNA, 19 nt, Artificial Sequence
  Description of Artificial Sequence: Synthetic oligonucleotide
aaagucuacuaugguguuc

SEQ ID NO: 655181 - RNA, 19 nt, Artificial Sequence
  Description of Artificial Sequence: Synthetic oligonucleotide
uacuucuauuccauuacaa

SEQ ID NO: 655182 - RNA, 19 nt, Artificial Sequence
  Description of Artificial Sequence: Synthetic oligonucleotide
cuugcauguagucugguca

SEQ ID NO: 655183 - RNA, 19 nt, Artificial Sequence
  Description of Artificial Sequence: Synthetic oligonucleotide
auuccuaugugagugcaag

SEQ ID NO: 655184 - RNA, 19 nt, Artificial Sequence
  Description of Artificial Sequence: Synthetic oligonucleotide
aaacgaaucuguacaucuc

SEQ ID NO: 655185 - RNA, 19 nt, Artificial Sequence
  Description of Artificial Sequence: Synthetic oligonucleotide
uacucgucccugaaaagga

SEQ ID NO: 655186 - RNA, 19 nt, Artificial Sequence
  Description of Artificial Sequence: Synthetic oligonucleotide
cucauuacucugagggacg

SEQ ID NO: 655187 - RNA, 19 nt, Artificial Sequence
  Description of Artificial Sequence: Synthetic oligonucleotide
uuaguaaguacugugcauu

SEQ ID NO: 655188 - RNA, 19 nt, Artificial Sequence
  Description of Artificial Sequence: Synthetic oligonucleotide
auuaguaaguacugugcau

SEQ ID NO: 655189 - RNA, 19 nt, Artificial Sequence
  Description of Artificial Sequence: Synthetic oligonucleotide
gcuaaauugaaguagucaa

SEQ ID NO: 655190 - RNA, 19 nt, Artificial Sequence
  Description of Artificial Sequence: Synthetic oligonucleotide
cuacucgucccugaaaagg

SEQ ID NO: 655191 - RNA, 19 nt, Artificial Sequence
  Description of Artificial Sequence: Synthetic oligonucleotide
guacuguaagaaauagacg

SEQ ID NO: 655192 - RNA, 19 nt, Artificial Sequence
  Description of Artificial Sequence: Synthetic oligonucleotide
cagaucauugguauaccug

SEQ ID NO: 655193 - RNA, 19 nt, Artificial Sequence
  Description of Artificial Sequence: Synthetic oligonucleotide
aguagucaaaugcucucug

SEQ ID NO: 655194 - RNA, 19 nt, Artificial Sequence
  Description of Artificial Sequence: Synthetic oligonucleotide
gaaaccgcucaguaauccc

SEQ ID NO: 655195 - RNA, 19 nt, Artificial Sequence
  Description of Artificial Sequence: Synthetic oligonucleotide
aagagucugcuacgaagug

SEQ ID NO: 655196 - RNA, 19 nt, Artificial Sequence
  Description of Artificial Sequence: Synthetic oligonucleotide
aaauuccuaugugagugca

SEQ ID NO: 655197 - RNA, 19 nt, Artificial Sequence
  Description of Artificial Sequence: Synthetic oligonucleotide
cacaaguuucaagauacag

SEQ ID NO: 655198 - RNA, 19 nt, Artificial Sequence
  Description of Artificial Sequence: Synthetic oligonucleotide
aaacagucucucuaagaua

SEQ ID NO: 655199 - RNA, 19 nt, Artificial Sequence
  Description of Artificial Sequence: Synthetic oligonucleotide
aagagaccgggagcaaagc

SEQ ID NO: 655200 - RNA, 19 nt, Artificial Sequence
  Description of Artificial Sequence: Synthetic oligonucleotide
acacucuaucuguaaaucu

SEQ ID NO: 655201 - RNA, 19 nt, Artificial Sequence
  Description of Artificial Sequence: Synthetic oligonucleotide
aaagcuacugagagcuguc

SEQ ID NO: 655202 - RNA, 19 nt, Artificial Sequence
  Description of Artificial Sequence: Synthetic oligonucleotide
gcaaauuccuaugugagug

SEQ ID NO: 655203 - RNA, 19 nt, Artificial Sequence
  Description of Artificial Sequence: Synthetic oligonucleotide
aagaaauagacgacaccca

SEQ ID NO: 655204 - RNA, 19 nt, Artificial Sequence
  Description of Artificial Sequence: Synthetic oligonucleotide
acgacacccaauuugcaga

SEQ ID NO: 655205 - RNA, 19 nt, Artificial Sequence
  Description of Artificial Sequence: Synthetic oligonucleotide
ucgacgaguagagugguca

SEQ ID NO: 655206 - RNA, 19 nt, Artificial Sequence
  Description of Artificial Sequence: Synthetic oligonucleotide
aguuuucccaggucgucag

SEQ ID NO: 655207 - RNA, 19 nt, Artificial Sequence
  Description of Artificial Sequence: Synthetic oligonucleotide
cauuaguaaguacugugca

SEQ ID NO: 655208 - RNA, 19 nt, Artificial Sequence
  Description of Artificial Sequence: Synthetic oligonucleotide
ugccauuauaguacauaga

SEQ ID NO: 655209 - RNA, 19 nt, Artificial Sequence
  Description of Artificial Sequence: Synthetic oligonucleotide
aaaagucuacuaugguguu

SEQ ID NO: 655210 - RNA, 19 nt, Artificial Sequence
  Description of Artificial Sequence: Synthetic oligonucleotide
acaaaacgaaucuguacau

SEQ ID NO: 655211 - RNA, 19 nt, Artificial Sequence
  Description of Artificial Sequence: Synthetic oligonucleotide
aggaccguaaaggacacug

SEQ ID NO: 655212 - RNA, 19 nt, Artificial Sequence
  Description of Artificial Sequence: Synthetic oligonucleotide
ugagggacgauaucacuuc

SEQ ID NO: 655213 - RNA, 19 nt, Artificial Sequence
  Description of Artificial Sequence: Synthetic oligonucleotide
uccagcgagagcuacucgu

SEQ ID NO: 655214 - RNA, 19 nt, Artificial Sequence
  Description of Artificial Sequence: Synthetic oligonucleotide
ucccguauguacuguaaga

SEQ ID NO: 655215 - RNA, 19 nt, Artificial Sequence
  Description of Artificial Sequence: Synthetic oligonucleotide
ugaugcuaaaacuccugaa

SEQ ID NO: 655216 - RNA, 19 nt, Artificial Sequence
  Description of Artificial Sequence: Synthetic oligonucleotide
acagaucauugguauaccu

SEQ ID NO: 655217 - RNA, 19 nt, Artificial Sequence
  Description of Artificial Sequence: Synthetic oligonucleotide
gaagagaccgggagcaaag

SEQ ID NO: 655218 - RNA, 19 nt, Artificial Sequence
  Description of Artificial Sequence: Synthetic oligonucleotide
ugcugucucugccuguaag

SEQ ID NO: 655219 - RNA, 19 nt, Artificial Sequence
  Description of Artificial Sequence: Synthetic oligonucleotide
gguauaccugguuauuucc

SEQ ID NO: 655220 - RNA, 19 nt, Artificial Sequence
  Description of Artificial Sequence: Synthetic oligonucleotide
ucgccaguauaggaaaccg

SEQ ID NO: 655221 - RNA, 19 nt, Artificial Sequence
  Description of Artificial Sequence: Synthetic oligonucleotide
agauuguuccucaauaaau

SEQ ID NO: 655222 - RNA, 19 nt, Artificial Sequence
  Description of Artificial Sequence: Synthetic oligonucleotide
uucuauucucagacuuaag

SEQ ID NO: 655223 - RNA, 19 nt, Artificial Sequence
  Description of Artificial Sequence: Synthetic oligonucleotide
agcaaauuccuaugugagu

SEQ ID NO: 655224 - RNA, 19 nt, Artificial Sequence
  Description of Artificial Sequence: Synthetic oligonucleotide
ugguauaccugguuauuuc

SEQ ID NO: 655225 - RNA, 19 nt, Artificial Sequence
  Description of Artificial Sequence: Synthetic oligonucleotide
aauagacgacacccaauuu

SEQ ID NO: 655226 - RNA, 19 nt, Artificial Sequence
  Description of Artificial Sequence: Synthetic oligonucleotide
uugcgugugaauugccagc

SEQ ID NO: 655227 - RNA, 19 nt, Artificial Sequence
  Description of Artificial Sequence: Synthetic oligonucleotide
uuggcguaaugucacugac

SEQ ID NO: 655228 - RNA, 19 nt, Artificial Sequence
  Description of Artificial Sequence: Synthetic oligonucleotide
auaguugggcacaguagac

SEQ ID NO: 655229 - RNA, 19 nt, Artificial Sequence
  Description of Artificial Sequence: Synthetic oligonucleotide
aaugcucucuggugauucu

SEQ ID NO: 655230 - RNA, 19 nt, Artificial Sequence
  Description of Artificial Sequence: Synthetic oligonucleotide
ucccuagugaguagagaca

SEQ ID NO: 655231 - RNA, 19 nt, Artificial Sequence
  Description of Artificial Sequence: Synthetic oligonucleotide
uuacucugagggacgauau

SEQ ID NO: 655232 - RNA, 19 nt, Artificial Sequence
  Description of Artificial Sequence: Synthetic oligonucleotide
cuaaauugaaguagucaaa

SEQ ID NO: 655233 - RNA, 19 nt, Artificial Sequence
  Description of Artificial Sequence: Synthetic oligonucleotide
gaaagauaguugggcacag

SEQ ID NO: 655234 - RNA, 19 nt, Artificial Sequence
  Description of Artificial Sequence: Synthetic oligonucleotide
ucgaguguguuguguaugu

SEQ ID NO: 655235 - RNA, 19 nt, Artificial Sequence
  Description of Artificial Sequence: Synthetic oligonucleotide
auaggaaaccgcucaguaa

SEQ ID NO: 655236 - RNA, 19 nt, Artificial Sequence
  Description of Artificial Sequence: Synthetic oligonucleotide
agauaguugggcacaguag

SEQ ID NO: 655237 - RNA, 19 nt, Artificial Sequence
  Description of Artificial Sequence: Synthetic oligonucleotide
uagugaguagagacacuug

SEQ ID NO: 655238 - RNA, 19 nt, Artificial Sequence
  Description of Artificial Sequence: Synthetic oligonucleotide
ucugagggacgauaucacu

SEQ ID NO: 655239 - RNA, 19 nt, Artificial Sequence
  Description of Artificial Sequence: Synthetic oligonucleotide
agaaagugccaaaugugug

SEQ ID NO: 655240 - RNA, 19 nt, Artificial Sequence
  Description of Artificial Sequence: Synthetic oligonucleotide
cucgaauauucgcuucccg

SEQ ID NO: 655241 - RNA, 19 nt, Artificial Sequence
  Description of Artificial Sequence: Synthetic oligonucleotide
auuugcuuauguaccaugu

SEQ ID NO: 655242 - RNA, 19 nt, Artificial Sequence
  Description of Artificial Sequence: Synthetic oligonucleotide
ugagugccaggucauaauu

SEQ ID NO: 655243 - RNA, 19 nt, Artificial Sequence
  Description of Artificial Sequence: Synthetic oligonucleotide
cuaugacuguacccaagag

SEQ ID NO: 655244 - RNA, 19 nt, Artificial Sequence
  Description of Artificial Sequence: Synthetic oligonucleotide
uacacgcacugaaggauga

SEQ ID NO: 655245 - RNA, 19 nt, Artificial Sequence
  Description of Artificial Sequence: Synthetic oligonucleotide
cacgagcaggaagagaccg

SEQ ID NO: 655246 - RNA, 19 nt, Artificial Sequence
  Description of Artificial Sequence: Synthetic oligonucleotide
gucaggaccguaaaggaca

SEQ ID NO: 655247 - RNA, 19 nt, Artificial Sequence
  Description of Artificial Sequence: Synthetic oligonucleotide
gggaucuuuauuucacaag

SEQ ID NO: 655248 - RNA, 19 nt, Artificial Sequence
  Description of Artificial Sequence: Synthetic oligonucleotide
auauucgcuucccguaugu

SEQ ID NO: 655249 - RNA, 19 nt, Artificial Sequence
  Description of Artificial Sequence: Synthetic oligonucleotide
guagacaugacucgagugu

SEQ ID NO: 655250 - RNA, 19 nt, Artificial Sequence
  Description of Artificial Sequence: Synthetic oligonucleotide
uaacaggguuuguuuacac

SEQ ID NO: 655251 - RNA, 19 nt, Artificial Sequence
  Description of Artificial Sequence: Synthetic oligonucleotide
ggaucuuuauuucacaagu

SEQ ID NO: 655252 - RNA, 19 nt, Artificial Sequence
  Description of Artificial Sequence: Synthetic oligonucleotide
acgauaucacuuccuucag

SEQ ID NO: 655253 - RNA, 19 nt, Artificial Sequence
  Description of Artificial Sequence: Synthetic oligonucleotide
auccaguugggugaauguc

SEQ ID NO: 655254 - RNA, 19 nt, Artificial Sequence
  Description of Artificial Sequence: Synthetic oligonucleotide
uugcauguagucuggucaa

SEQ ID NO: 655255 - RNA, 19 nt, Artificial Sequence
  Description of Artificial Sequence: Synthetic oligonucleotide
ugacuguacccaagagcag

SEQ ID NO: 655256 - RNA, 19 nt, Artificial Sequence
  Description of Artificial Sequence: Synthetic oligonucleotide
uaaaggucccacucagguc

SEQ ID NO: 655257 - RNA, 19 nt, Artificial Sequence
  Description of Artificial Sequence: Synthetic oligonucleotide
agaaauagugucagauugu

SEQ ID NO: 655258 - RNA, 19 nt, Artificial Sequence
  Description of Artificial Sequence: Synthetic oligonucleotide
agugccaaaugugugugcu

SEQ ID NO: 655259 - RNA, 19 nt, Artificial Sequence
  Description of Artificial Sequence: Synthetic oligonucleotide
guacaucucucuauuaaca

SEQ ID NO: 655260 - RNA, 19 nt, Artificial Sequence
  Description of Artificial Sequence: Synthetic oligonucleotide
uggcguaaugucacugaca

SEQ ID NO: 655261 - RNA, 19 nt, Artificial Sequence
  Description of Artificial Sequence: Synthetic oligonucleotide
uugcaacuaacugaguuuu

SEQ ID NO: 655262 - RNA, 19 nt, Artificial Sequence
  Description of Artificial Sequence: Synthetic oligonucleotide
cccacgagcaggaagagac

SEQ ID NO: 655263 - RNA, 19 nt, Artificial Sequence
  Description of Artificial Sequence: Synthetic oligonucleotide
ucugggcuagccucggcug

SEQ ID NO: 655264 - RNA, 19 nt, Artificial Sequence
  Description of Artificial Sequence: Synthetic oligonucleotide
gccuagaaugccauuauag

SEQ ID NO: 655265 - RNA, 19 nt, Artificial Sequence
  Description of Artificial Sequence: Synthetic oligonucleotide
cuuauguaccaugucccac

SEQ ID NO: 655266 - RNA, 19 nt, Artificial Sequence
  Description of Artificial Sequence: Synthetic oligonucleotide
aaggccauugcgugugaau

SEQ ID NO: 655267 - RNA, 19 nt, Artificial Sequence
  Description of Artificial Sequence: Synthetic oligonucleotide
uacagaucauugguauacc

SEQ ID NO: 655268 - RNA, 19 nt, Artificial Sequence
  Description of Artificial Sequence: Synthetic oligonucleotide
uugggugaaugucucgaau

SEQ ID NO: 655269 - RNA, 19 nt, Artificial Sequence
  Description of Artificial Sequence: Synthetic oligonucleotide
ggagcaaagcauuuugaga

SEQ ID NO: 655270 - RNA, 19 nt, Artificial Sequence
  Description of Artificial Sequence: Synthetic oligonucleotide
agagaccgggagcaaagca

SEQ ID NO: 655271 - RNA, 19 nt, Artificial Sequence
  Description of Artificial Sequence: Synthetic oligonucleotide
ucaggaccguaaaggacac

SEQ ID NO: 655272 - RNA, 19 nt, Artificial Sequence
  Description of Artificial Sequence: Synthetic oligonucleotide
ugcgugugaauugccagca

SEQ ID NO: 655273 - RNA, 19 nt, Artificial Sequence
  Description of Artificial Sequence: Synthetic oligonucleotide
acaagaagugaaguucaca

SEQ ID NO: 655274 - RNA, 19 nt, Artificial Sequence
  Description of Artificial Sequence: Synthetic oligonucleotide
ucucgaauauucgcuuccc

SEQ ID NO: 655275 - RNA, 19 nt, Artificial Sequence
  Description of Artificial Sequence: Synthetic oligonucleotide
cugacauuaacuagcuuua

SEQ ID NO: 655276 - RNA, 19 nt, Artificial Sequence
  Description of Artificial Sequence: Synthetic oligonucleotide
acacacccugaagacgucc

SEQ ID NO: 655277 - RNA, 19 nt, Artificial Sequence
  Description of Artificial Sequence: Synthetic oligonucleotide
ugucucgaauauucgcuuc

SEQ ID NO: 655278 - RNA, 19 nt, Artificial Sequence
  Description of Artificial Sequence: Synthetic oligonucleotide
aaggaucgcacaggaaaga

SEQ ID NO: 655279 - RNA, 19 nt, Artificial Sequence
  Description of Artificial Sequence: Synthetic oligonucleotide
gagggacgauaucacuucc

SEQ ID NO: 655280 - RNA, 19 nt, Artificial Sequence
  Description of Artificial Sequence: Synthetic oligonucleotide
aggugaauauccuguuuaa

SEQ ID NO: 655281 - RNA, 19 nt, Artificial Sequence
  Description of Artificial Sequence: Synthetic oligonucleotide
ucgcacaggaaagauaguu

SEQ ID NO: 655282 - RNA, 19 nt, Artificial Sequence
  Description of Artificial Sequence: Synthetic oligonucleotide
cacacucuaucuguaaauc

SEQ ID NO: 655283 - RNA, 19 nt, Artificial Sequence
  Description of Artificial Sequence: Synthetic oligonucleotide
agcuuucuaaauguguaaa

SEQ ID NO: 655284 - RNA, 19 nt, Artificial Sequence
  Description of Artificial Sequence: Synthetic oligonucleotide
ucccacacacccugaagac

SEQ ID NO: 655285 - RNA, 19 nt, Artificial Sequence
  Description of Artificial Sequence: Synthetic oligonucleotide
auuacucugagggacgaua

SEQ ID NO: 655286 - RNA, 19 nt, Artificial Sequence
  Description of Artificial Sequence: Synthetic oligonucleotide
guuggcguaaugucacuga

SEQ ID NO: 655287 - RNA, 19 nt, Artificial Sequence
  Description of Artificial Sequence: Synthetic oligonucleotide
gugaguagagacacuuggc

SEQ ID NO: 655288 - RNA, 19 nt, Artificial Sequence
  Description of Artificial Sequence: Synthetic oligonucleotide
gaagagucugcuacgaagu

SEQ ID NO: 655289 - RNA, 19 nt, Artificial Sequence
  Description of Artificial Sequence: Synthetic oligonucleotide
acgaaucuguacaucucuc

SEQ ID NO: 655290 - RNA, 19 nt, Artificial Sequence
  Description of Artificial Sequence: Synthetic oligonucleotide
ucauuacucugagggacga

SEQ ID NO: 655291 - RNA, 19 nt, Artificial Sequence
  Description of Artificial Sequence: Synthetic oligonucleotide
caaaacgaaucuguacauc

SEQ ID NO: 655292 - RNA, 19 nt, Artificial Sequence
  Description of Artificial Sequence: Synthetic oligonucleotide
cuaugugagugcaaggagu

SEQ ID NO: 655293 - RNA, 19 nt, Artificial Sequence
  Description of Artificial Sequence: Synthetic oligonucleotide
aaagauaguugggcacagu

SEQ ID NO: 655294 - RNA, 19 nt, Artificial Sequence
  Description of Artificial Sequence: Synthetic oligonucleotide
augccauuaguaaguacug

SEQ ID NO: 655295 - RNA, 19 nt, Artificial Sequence
  Description of Artificial Sequence: Synthetic oligonucleotide
aguuggcguaaugucacug

SEQ ID NO: 655296 - RNA, 19 nt, Artificial Sequence
  Description of Artificial Sequence: Synthetic oligonucleotide
gaucccacacggaggcugg

SEQ ID NO: 655297 - RNA, 19 nt, Artificial Sequence
  Description of Artificial Sequence: Synthetic oligonucleotide
cugucucauuacucugagg

SEQ ID NO: 655298 - RNA, 19 nt, Artificial Sequence
  Description of Artificial Sequence: Synthetic oligonucleotide
auaguacauagagccaagu

SEQ ID NO: 655299 - RNA, 19 nt, Artificial Sequence
  Description of Artificial Sequence: Synthetic oligonucleotide
augucucgaauauucgcuu

SEQ ID NO: 655300 - RNA, 19 nt, Artificial Sequence
  Description of Artificial Sequence: Synthetic oligonucleotide
cauugcgugugaauugcca

SEQ ID NO: 655301 - RNA, 19 nt, Artificial Sequence
  Description of Artificial Sequence: Synthetic oligonucleotide
ggagcuuacacgcacugaa

SEQ ID NO: 655302 - RNA, 19 nt, Artificial Sequence
  Description of Artificial Sequence: Synthetic oligonucleotide
acccaauuccuauuugcuu

SEQ ID NO: 655303 - RNA, 19 nt, Artificial Sequence
  Description of Artificial Sequence: Synthetic oligonucleotide
guucuauucucagacuuaa

SEQ ID NO: 655304 - RNA, 19 nt, Artificial Sequence
  Description of Artificial Sequence: Synthetic oligonucleotide
caggcaaguucuauucuca

SEQ ID NO: 655305 - RNA, 19 nt, Artificial Sequence
  Description of Artificial Sequence: Synthetic oligonucleotide
gucuucgaggaagagucug

SEQ ID NO: 655306 - RNA, 19 nt, Artificial Sequence
  Description of Artificial Sequence: Synthetic oligonucleotide
ugcaacuaacugaguuuuc

SEQ ID NO: 655307 - RNA, 19 nt, Artificial Sequence
  Description of Artificial Sequence: Synthetic oligonucleotide
cagauuguuccucaauaaa

SEQ ID NO: 655308 - RNA, 19 nt, Artificial Sequence
  Description of Artificial Sequence: Synthetic oligonucleotide
accguaaaggacacugaug

SEQ ID NO: 655309 - RNA, 19 nt, Artificial Sequence
  Description of Artificial Sequence: Synthetic oligonucleotide
gucgccaguauaggaaacc

SEQ ID NO: 655310 - RNA, 19 nt, Artificial Sequence
  Description of Artificial Sequence: Synthetic oligonucleotide
gaauauucgcuucccguau

SEQ ID NO: 655311 - RNA, 19 nt, Artificial Sequence
  Description of Artificial Sequence: Synthetic oligonucleotide
ugccuagaaugccauuaua

SEQ ID NO: 655312 - RNA, 19 nt, Artificial Sequence
  Description of Artificial Sequence: Synthetic oligonucleotide
augccuagaaugccauuau

SEQ ID NO: 655313 - RNA, 19 nt, Artificial Sequence
  Description of Artificial Sequence: Synthetic oligonucleotide
ucggcugccaugucauaaa

SEQ ID NO: 655314 - RNA, 19 nt, Artificial Sequence
  Description of Artificial Sequence: Synthetic oligonucleotide
ucgcuucccguauguacug

SEQ ID NO: 655315 - RNA, 19 nt, Artificial Sequence
  Description of Artificial Sequence: Synthetic oligonucleotide
guauaccugguuauuucca

SEQ ID NO: 655316 - RNA, 19 nt, Artificial Sequence
  Description of Artificial Sequence: Synthetic oligonucleotide
uaaaagcguuuugcaaggu

SEQ ID NO: 655317 - RNA, 19 nt, Artificial Sequence
  Description of Artificial Sequence: Synthetic oligonucleotide
gguaggccauuccaagacc

SEQ ID NO: 655318 - RNA, 19 nt, Artificial Sequence
  Description of Artificial Sequence: Synthetic oligonucleotide
ggaaagauaguugggcaca

SEQ ID NO: 655319 - RNA, 19 nt, Artificial Sequence
  Description of Artificial Sequence: Synthetic oligonucleotide
cugcuacgaagugucacag

SEQ ID NO: 655320 - RNA, 19 nt, Artificial Sequence
  Description of Artificial Sequence: Synthetic oligonucleotide
gacauuaacuagcuuuauu

SEQ ID NO: 655321 - RNA, 19 nt, Artificial Sequence
  Description of Artificial Sequence: Synthetic oligonucleotide
agucgccaguauaggaaac

SEQ ID NO: 655322 - RNA, 19 nt, Artificial Sequence
  Description of Artificial Sequence: Synthetic oligonucleotide
cucgaguguguuguguaug

SEQ ID NO: 655323 - RNA, 19 nt, Artificial Sequence
  Description of Artificial Sequence: Synthetic oligonucleotide
gacucgaguguguugugua

SEQ ID NO: 655324 - RNA, 19 nt, Artificial Sequence
  Description of Artificial Sequence: Synthetic oligonucleotide
uagugucagauuguuccuc

SEQ ID NO: 655325 - RNA, 19 nt, Artificial Sequence
  Description of Artificial Sequence: Synthetic oligonucleotide
cccaguuacugcauuuccc

SEQ ID NO: 655326 - RNA, 19 nt, Artificial Sequence
  Description of Artificial Sequence: Synthetic oligonucleotide
aagcguuuugcaaggugaa

SEQ ID NO: 655327 - RNA, 19 nt, Artificial Sequence
  Description of Artificial Sequence: Synthetic oligonucleotide
aauuccuaugugagugcaa

SEQ ID NO: 655328 - RNA, 19 nt, Artificial Sequence
  Description of Artificial Sequence: Synthetic oligonucleotide
cuuaugcacacagucagcu

SEQ ID NO: 655329 - RNA, 19 nt, Artificial Sequence
  Description of Artificial Sequence: Synthetic oligonucleotide
ggaaaccgcucaguaaucc

SEQ ID NO: 655330 - RNA, 19 nt, Artificial Sequence
  Description of Artificial Sequence: Synthetic oligonucleotide
ggaguuggcguaaugucac

SEQ ID NO: 655331 - RNA, 19 nt, Artificial Sequence
  Description of Artificial Sequence: Synthetic oligonucleotide
ugcuacgaagugucacagu

SEQ ID NO: 655332 - RNA, 19 nt, Artificial Sequence
  Description of Artificial Sequence: Synthetic oligonucleotide
auugguauaccugguuauu

SEQ ID NO: 655333 - RNA, 19 nt, Artificial Sequence
  Description of Artificial Sequence: Synthetic oligonucleotide
agugaagugcugucucauu

SEQ ID NO: 655334 - RNA, 19 nt, Artificial Sequence
  Description of Artificial Sequence: Synthetic oligonucleotide
cccucgacgaguagagugg

SEQ ID NO: 655335 - RNA, 19 nt, Artificial Sequence
  Description of Artificial Sequence: Synthetic oligonucleotide
aggaaaccgcucaguaauc

SEQ ID NO: 655336 - RNA, 19 nt, Artificial Sequence
  Description of Artificial Sequence: Synthetic oligonucleotide
ugacauuaacuagcuuuau

SEQ ID NO: 655337 - RNA, 19 nt, Artificial Sequence
  Description of Artificial Sequence: Synthetic oligonucleotide
caugacucgaguguguugu

SEQ ID NO: 655338 - RNA, 19 nt, Artificial Sequence
  Description of Artificial Sequence: Synthetic oligonucleotide
cuugcaacuaacugaguuu

SEQ ID NO: 655339 - RNA, 19 nt, Artificial Sequence
  Description of Artificial Sequence: Synthetic oligonucleotide
ggcguaaugucacugacau

SEQ ID NO: 655340 - RNA, 19 nt, Artificial Sequence
  Description of Artificial Sequence: Synthetic oligonucleotide
gacuguacccaagagcagu

SEQ ID NO: 655341 - RNA, 19 nt, Artificial Sequence
  Description of Artificial Sequence: Synthetic oligonucleotide
agcuaugacuguacccaag

SEQ ID NO: 655342 - RNA, 19 nt, Artificial Sequence
  Description of Artificial Sequence: Synthetic oligonucleotide
gaguagagacacuuggcuu

SEQ ID NO: 655343 - RNA, 19 nt, Artificial Sequence
  Description of Artificial Sequence: Synthetic oligonucleotide
acgaagugucacagucgcc

SEQ ID NO: 655344 - RNA, 19 nt, Artificial Sequence
  Description of Artificial Sequence: Synthetic oligonucleotide
cuacuaugguguuccuuca

SEQ ID NO: 655345 - RNA, 19 nt, Artificial Sequence
  Description of Artificial Sequence: Synthetic oligonucleotide
cauuugcugcuaaauugaa

SEQ ID NO: 655346 - RNA, 19 nt, Artificial Sequence
  Description of Artificial Sequence: Synthetic oligonucleotide
gagagcuacucgucccuga

SEQ ID NO: 655347 - RNA, 19 nt, Artificial Sequence
  Description of Artificial Sequence: Synthetic oligonucleotide
gaccguaaaggacacugau

SEQ ID NO: 655348 - RNA, 19 nt, Artificial Sequence
  Description of Artificial Sequence: Synthetic oligonucleotide
gaugggcuacagagagagg

SEQ ID NO: 655349 - RNA, 19 nt, Artificial Sequence
  Description of Artificial Sequence: Synthetic oligonucleotide
ccaguuacugcauuuccca

SEQ ID NO: 655350 - RNA, 19 nt, Artificial Sequence
  Description of Artificial Sequence: Synthetic oligonucleotide
cugggcuagccucggcugc

SEQ ID NO: 655351 - RNA, 19 nt, Artificial Sequence
  Description of Artificial Sequence: Synthetic oligonucleotide
augacucgaguguguugug

SEQ ID NO: 655352 - RNA, 19 nt, Artificial Sequence
  Description of Artificial Sequence: Synthetic oligonucleotide
gcuacucgucccugaaaag

SEQ ID NO: 655353 - RNA, 19 nt, Artificial Sequence
  Description of Artificial Sequence: Synthetic oligonucleotide
acgcacugaaggaugacaa

SEQ ID NO: 655354 - RNA, 19 nt, Artificial Sequence
  Description of Artificial Sequence: Synthetic oligonucleotide
ggcaaguucuauucucaga

SEQ ID NO: 655355 - RNA, 19 nt, Artificial Sequence
  Description of Artificial Sequence: Synthetic oligonucleotide
gacgaguagaguggucaca

SEQ ID NO: 655356 - RNA, 19 nt, Artificial Sequence
  Description of Artificial Sequence: Synthetic oligonucleotide
aggaucgcacaggaaagau

SEQ ID NO: 655357 - RNA, 19 nt, Artificial Sequence
  Description of Artificial Sequence: Synthetic oligonucleotide
acacgcacugaaggaugac

SEQ ID NO: 655358 - RNA, 19 nt, Artificial Sequence
  Description of Artificial Sequence: Synthetic oligonucleotide
cauugguauaccugguuau

SEQ ID NO: 655359 - RNA, 19 nt, Artificial Sequence
  Description of Artificial Sequence: Synthetic oligonucleotide
gugcuugcauguagucugg

SEQ ID NO: 655360 - RNA, 19 nt, Artificial Sequence
  Description of Artificial Sequence: Synthetic oligonucleotide
agccacacucuaucuguaa

SEQ ID NO: 655361 - RNA, 19 nt, Artificial Sequence
  Description of Artificial Sequence: Synthetic oligonucleotide
ggggaucuuuauuucacaa

SEQ ID NO: 655362 - RNA, 19 nt, Artificial Sequence
  Description of Artificial Sequence: Synthetic oligonucleotide
aggucgucaggaccguaaa

SEQ ID NO: 655363 - RNA, 19 nt, Artificial Sequence
  Description of Artificial Sequence: Synthetic oligonucleotide
cccuagugaguagagacac

SEQ ID NO: 655364 - RNA, 19 nt, Artificial Sequence
  Description of Artificial Sequence: Synthetic oligonucleotide
ggacgauaucacuuccuuc

SEQ ID NO: 655365 - RNA, 19 nt, Artificial Sequence
  Description of Artificial Sequence: Synthetic oligonucleotide
caauucucuugaaaucccu

SEQ ID NO: 655366 - RNA, 19 nt, Artificial Sequence
  Description of Artificial Sequence: Synthetic oligonucleotide
auauccuguuuaaugccua

SEQ ID NO: 655367 - RNA, 19 nt, Artificial Sequence
  Description of Artificial Sequence: Synthetic oligonucleotide
ggaucccacacggaggcug

SEQ ID NO: 655368 - RNA, 19 nt, Artificial Sequence
  Description of Artificial Sequence: Synthetic oligonucleotide
agucuacuaugguguuccu

SEQ ID NO: 655369 - RNA, 19 nt, Artificial Sequence
  Description of Artificial Sequence: Synthetic oligonucleotide
ccaguauaggaaaccgcuc

SEQ ID NO: 655370 - RNA, 19 nt, Artificial Sequence
  Description of Artificial Sequence: Synthetic oligonucleotide
cuggguacuggcauauccu

SEQ ID NO: 655371 - RNA, 19 nt, Artificial Sequence
  Description of Artificial Sequence: Synthetic oligonucleotide
cuagugaguagagacacuu

SEQ ID NO: 655372 - RNA, 19 nt, Artificial Sequence
  Description of Artificial Sequence: Synthetic oligonucleotide
gcucccuacaaggaaauaa

SEQ ID NO: 655373 - RNA, 19 nt, Artificial Sequence
  Description of Artificial Sequence: Synthetic oligonucleotide
augugagugcaaggaguca

SEQ ID NO: 655374 - RNA, 19 nt, Artificial Sequence
  Description of Artificial Sequence: Synthetic oligonucleotide
cuuacacgcacugaaggau

SEQ ID NO: 655375 - RNA, 19 nt, Artificial Sequence
  Description of Artificial Sequence: Synthetic oligonucleotide
uauucgcuucccguaugua

SEQ ID NO: 655376 - RNA, 19 nt, Artificial Sequence
  Description of Artificial Sequence: Synthetic oligonucleotide
ggaugccauuaguaaguac

SEQ ID NO: 655377 - RNA, 19 nt, Artificial Sequence
  Description of Artificial Sequence: Synthetic oligonucleotide
cacgcacugaaggaugaca

SEQ ID NO: 655378 - RNA, 19 nt, Artificial Sequence
  Description of Artificial Sequence: Synthetic oligonucleotide
gagaccgggagcaaagcau

SEQ ID NO: 655379 - RNA, 19 nt, Artificial Sequence
  Description of Artificial Sequence: Synthetic oligonucleotide
gaucauugguauaccuggu

SEQ ID NO: 655380 - RNA, 19 nt, Artificial Sequence
  Description of Artificial Sequence: Synthetic oligonucleotide
aggagcuuacacgcacuga

SEQ ID NO: 655381 - RNA, 19 nt, Artificial Sequence
  Description of Artificial Sequence: Synthetic oligonucleotide
ccgggagcaaagcauuuug

SEQ ID NO: 655382 - RNA, 19 nt, Artificial Sequence
  Description of Artificial Sequence: Synthetic oligonucleotide
gcuugcauguagucugguc

SEQ ID NO: 655383 - RNA, 19 nt, Artificial Sequence
  Description of Artificial Sequence: Synthetic oligonucleotide
caggucgucaggaccguaa

SEQ ID NO: 655384 - RNA, 19 nt, Artificial Sequence
  Description of Artificial Sequence: Synthetic oligonucleotide
cucgacgaguagagugguc

SEQ ID NO: 655385 - RNA, 19 nt, Artificial Sequence
  Description of Artificial Sequence: Synthetic oligonucleotide
guauaggaaaccgcucagu

SEQ ID NO: 655386 - RNA, 19 nt, Artificial Sequence
  Description of Artificial Sequence: Synthetic oligonucleotide
ugcuugcauguagucuggu

SEQ ID NO: 655387 - RNA, 19 nt, Artificial Sequence
  Description of Artificial Sequence: Synthetic oligonucleotide
aggucccuucuuaugcaca

SEQ ID NO: 655388 - RNA, 19 nt, Artificial Sequence
  Description of Artificial Sequence: Synthetic oligonucleotide
agacgacacccaauuugca

SEQ ID NO: 655389 - RNA, 19 nt, Artificial Sequence
  Description of Artificial Sequence: Synthetic oligonucleotide
gugugaauugccagcauuu

SEQ ID NO: 655390 - RNA, 19 nt, Artificial Sequence
  Description of Artificial Sequence: Synthetic oligonucleotide
caguagacaugacucgagu

SEQ ID NO: 655391 - RNA, 19 nt, Artificial Sequence
  Description of Artificial Sequence: Synthetic oligonucleotide
agucuucgaggaagagucu

SEQ ID NO: 655392 - RNA, 19 nt, Artificial Sequence
  Description of Artificial Sequence: Synthetic oligonucleotide
cuagccucggcugccaugu

SEQ ID NO: 655393 - RNA, 19 nt, Artificial Sequence
  Description of Artificial Sequence: Synthetic oligonucleotide
cucggcugccaugucauaa

SEQ ID NO: 655394 - RNA, 19 nt, Artificial Sequence
  Description of Artificial Sequence: Synthetic oligonucleotide
acucgucccugaaaaggaa

SEQ ID NO: 655395 - RNA, 19 nt, Artificial Sequence
  Description of Artificial Sequence: Synthetic oligonucleotide
cgucaggaccguaaaggac

SEQ ID NO: 655396 - RNA, 19 nt, Artificial Sequence
  Description of Artificial Sequence: Synthetic oligonucleotide
cacacacccugaagacguc

SEQ ID NO: 655397 - RNA, 19 nt, Artificial Sequence
  Description of Artificial Sequence: Synthetic oligonucleotide
ccagcgagagcuacucguc

SEQ ID NO: 655398 - RNA, 19 nt, Artificial Sequence
  Description of Artificial Sequence: Synthetic oligonucleotide
ccguauguacuguaagaaa

SEQ ID NO: 655399 - RNA, 19 nt, Artificial Sequence
  Description of Artificial Sequence: Synthetic oligonucleotide
accgcucaguaaucccuuu

SEQ ID NO: 655400 - RNA, 19 nt, Artificial Sequence
  Description of Artificial Sequence: Synthetic oligonucleotide
guagagacacuuggcuucu

SEQ ID NO: 655401 - RNA, 19 nt, Artificial Sequence
  Description of Artificial Sequence: Synthetic oligonucleotide
gaguuggcguaaugucacu

SEQ ID NO: 655402 - RNA, 19 nt, Artificial Sequence
  Description of Artificial Sequence: Synthetic oligonucleotide
cgccaguauaggaaaccgc

SEQ ID NO: 655403 - RNA, 19 nt, Artificial Sequence
  Description of Artificial Sequence: Synthetic oligonucleotide
gcuagccucggcugccaug

SEQ ID NO: 655404 - RNA, 19 nt, Artificial Sequence
  Description of Artificial Sequence: Synthetic oligonucleotide
gaaggccauugcgugugaa

SEQ ID NO: 655405 - RNA, 19 nt, Artificial Sequence
  Description of Artificial Sequence: Synthetic oligonucleotide
cagcauuugcugcuaaauu

SEQ ID NO: 655406 - RNA, 19 nt, Artificial Sequence
  Description of Artificial Sequence: Synthetic oligonucleotide
cacacccugaagacguccu

SEQ ID NO: 655407 - RNA, 19 nt, Artificial Sequence
  Description of Artificial Sequence: Synthetic oligonucleotide
cgaauauucgcuucccgua

SEQ ID NO: 655408 - RNA, 19 nt, Artificial Sequence
  Description of Artificial Sequence: Synthetic oligonucleotide
aucgcacaggaaagauagu

SEQ ID NO: 655409 - RNA, 19 nt, Artificial Sequence
  Description of Artificial Sequence: Synthetic oligonucleotide
ggcauauccuggugcuguc

SEQ ID NO: 655410 - RNA, 19 nt, Artificial Sequence
  Description of Artificial Sequence: Synthetic oligonucleotide
cccguauguacuguaagaa

SEQ ID NO: 655411 - RNA, 19 nt, Artificial Sequence
  Description of Artificial Sequence: Synthetic oligonucleotide
ggaaagcuacugagagcug

SEQ ID NO: 655412 - RNA, 19 nt, Artificial Sequence
  Description of Artificial Sequence: Synthetic oligonucleotide
gcauccagagacagaccac

SEQ ID NO: 655413 - RNA, 19 nt, Artificial Sequence
  Description of Artificial Sequence: Synthetic oligonucleotide
ugcccauguccgcggcuuu

SEQ ID NO: 655414 - RNA, 19 nt, Artificial Sequence
  Description of Artificial Sequence: Synthetic oligonucleotide
ggaccguaaaggacacuga

SEQ ID NO: 655415 - RNA, 19 nt, Artificial Sequence
  Description of Artificial Sequence: Synthetic oligonucleotide
ggaucgcacaggaaagaua

SEQ ID NO: 655416 - RNA, 19 nt, Artificial Sequence
  Description of Artificial Sequence: Synthetic oligonucleotide
gugagugcaaggagucagu

SEQ ID NO: 655417 - RNA, 19 nt, Artificial Sequence
  Description of Artificial Sequence: Synthetic oligonucleotide
cgacgaguagaguggucac

SEQ ID NO: 655418 - RNA, 19 nt, Artificial Sequence
  Description of Artificial Sequence: Synthetic oligonucleotide
ccauuacaagaagugaagu

SEQ ID NO: 655419 - RNA, 19 nt, Artificial Sequence
  Description of Artificial Sequence: Synthetic oligonucleotide
gccuggaguuggcguaaug

SEQ ID NO: 655420 - RNA, 19 nt, Artificial Sequence
  Description of Artificial Sequence: Synthetic oligonucleotide
ccuggaguuggcguaaugu

SEQ ID NO: 655421 - RNA, 19 nt, Artificial Sequence
  Description of Artificial Sequence: Synthetic oligonucleotide
gccuguaagcuaugacugu

SEQ ID NO: 655422 - RNA, 19 nt, Artificial Sequence
  Description of Artificial Sequence: Synthetic oligonucleotide
gacacccaauuugcagagu

SEQ ID NO: 655423 - RNA, 19 nt, Artificial Sequence
  Description of Artificial Sequence: Synthetic oligonucleotide
gucuacuaugguguuccuu

SEQ ID NO: 655424 - RNA, 19 nt, Artificial Sequence
  Description of Artificial Sequence: Synthetic oligonucleotide
ccacacucuaucuguaaau

SEQ ID NO: 655425 - RNA, 19 nt, Artificial Sequence
  Description of Artificial Sequence: Synthetic oligonucleotide
ccauuccaagaccgcucug

SEQ ID NO: 655426 - RNA, 19 nt, Artificial Sequence
  Description of Artificial Sequence: Synthetic oligonucleotide
gccaugucauaaaagcguu

SEQ ID NO: 655427 - RNA, 19 nt, Artificial Sequence
  Description of Artificial Sequence: Synthetic oligonucleotide
agccuggaguuggcguaau

SEQ ID NO: 655428 - RNA, 19 nt, Artificial Sequence
  Description of Artificial Sequence: Synthetic oligonucleotide
caaaugcucucuggugauu

SEQ ID NO: 655429 - RNA, 19 nt, Artificial Sequence
  Description of Artificial Sequence: Synthetic oligonucleotide
cauuacucugagggacgau

SEQ ID NO: 655430 - RNA, 19 nt, Artificial Sequence
  Description of Artificial Sequence: Synthetic oligonucleotide
cgagagcuacucgucccug

SEQ ID NO: 655431 - RNA, 19 nt, Artificial Sequence
  Description of Artificial Sequence: Synthetic oligonucleotide
ccuuuacacugcauuccau

SEQ ID NO: 655432 - RNA, 19 nt, Artificial Sequence
  Description of Artificial Sequence: Synthetic oligonucleotide
cgugugaauugccagcauu

SEQ ID NO: 655433 - RNA, 19 nt, Artificial Sequence
  Description of Artificial Sequence: Synthetic oligonucleotide
cacaucuggguggcucccu

SEQ ID NO: 655434 - RNA, 19 nt, Artificial Sequence
  Description of Artificial Sequence: Synthetic oligonucleotide
ggcucccuacaaggaaaua

SEQ ID NO: 655435 - RNA, 19 nt, Artificial Sequence
  Description of Artificial Sequence: Synthetic oligonucleotide
gggcuagccucggcugcca

SEQ ID NO: 655436 - RNA, 19 nt, Artificial Sequence
  Description of Artificial Sequence: Synthetic oligonucleotide
gcguaaugucacugacauu

SEQ ID NO: 655437 - RNA, 19 nt, Artificial Sequence
  Description of Artificial Sequence: Synthetic oligonucleotide
caggaccguaaaggacacu

SEQ ID NO: 655438 - RNA, 19 nt, Artificial Sequence
  Description of Artificial Sequence: Synthetic oligonucleotide
ccacacggaggcuggccgu

SEQ ID NO: 655439 - RNA, 19 nt, Artificial Sequence
  Description of Artificial Sequence: Synthetic oligonucleotide
ccucgacgaguagaguggu

SEQ ID NO: 655440 - RNA, 19 nt, Artificial Sequence
  Description of Artificial Sequence: Synthetic oligonucleotide
ggcuagccucggcugccau

SEQ ID NO: 655441 - RNA, 19 nt, Artificial Sequence
  Description of Artificial Sequence: Synthetic oligonucleotide
ccgcucaguaaucccuuuu

SEQ ID NO: 655442 - RNA, 19 nt, Artificial Sequence
  Description of Artificial Sequence: Synthetic oligonucleotide
ccaggucgucaggaccgua

SEQ ID NO: 655443 - RNA, 19 nt, Artificial Sequence
  Description of Artificial Sequence: Synthetic oligonucleotide
aagacggugacacagcggc

SEQ ID NO: 655444 - RNA, 19 nt, Artificial Sequence
  Description of Artificial Sequence: Synthetic oligonucleotide
aauauauagggguuggucu

SEQ ID NO: 655445 - RNA, 19 nt, Artificial Sequence
  Description of Artificial Sequence: Synthetic oligonucleotide
aaauauguugagcagguca

SEQ ID NO: 655446 - RNA, 19 nt, Artificial Sequence
  Description of Artificial Sequence: Synthetic oligonucleotide
uugacuuacaauaaugacu

SEQ ID NO: 655447 - RNA, 19 nt, Artificial Sequence
  Description of Artificial Sequence: Synthetic oligonucleotide
uguacuaggaucugguagg

SEQ ID NO: 655448 - RNA, 19 nt, Artificial Sequence
  Description of Artificial Sequence: Synthetic oligonucleotide
uugggguucaaaucgaugg

SEQ ID NO: 655449 - RNA, 19 nt, Artificial Sequence
  Description of Artificial Sequence: Synthetic oligonucleotide
ucaaacaccucacugaaga

SEQ ID NO: 655450 - RNA, 19 nt, Artificial Sequence
  Description of Artificial Sequence: Synthetic oligonucleotide
gucgccauuaaauauauag

SEQ ID NO: 655451 - RNA, 19 nt, Artificial Sequence
  Description of Artificial Sequence: Synthetic oligonucleotide
aauagcuggaggugggccc

SEQ ID NO: 655452 - RNA, 19 nt, Artificial Sequence
  Description of Artificial Sequence: Synthetic oligonucleotide
aaauauauagggguugguc

SEQ ID NO: 655453 - RNA, 19 nt, Artificial Sequence
  Description of Artificial Sequence: Synthetic oligonucleotide
uaugguaaggcccuauugc

SEQ ID NO: 655454 - RNA, 19 nt, Artificial Sequence
  Description of Artificial Sequence: Synthetic oligonucleotide
ugacuuacaauaaugacuu

SEQ ID NO: 655455 - RNA, 19 nt, Artificial Sequence
  Description of Artificial Sequence: Synthetic oligonucleotide
ucgccauuaaauauauagg

SEQ ID NO: 655456 - RNA, 19 nt, Artificial Sequence
  Description of Artificial Sequence: Synthetic oligonucleotide
agcucaaauauguugagca

SEQ ID NO: 655457 - RNA, 19 nt, Artificial Sequence
  Description of Artificial Sequence: Synthetic oligonucleotide
ugcaugaucaguacuuugc

SEQ ID NO: 655458 - RNA, 19 nt, Artificial Sequence
  Description of Artificial Sequence: Synthetic oligonucleotide
ucaaauauguugagcaggu

SEQ ID NO: 655459 - RNA, 19 nt, Artificial Sequence
  Description of Artificial Sequence: Synthetic oligonucleotide
auauauagggguuggucuc

SEQ ID NO: 655460 - RNA, 19 nt, Artificial Sequence
  Description of Artificial Sequence: Synthetic oligonucleotide
guagguuugacuuacaaua

SEQ ID NO: 655461 - RNA, 19 nt, Artificial Sequence
  Description of Artificial Sequence: Synthetic oligonucleotide
aucugguaggcacacuucc

SEQ ID NO: 655462 - RNA, 19 nt, Artificial Sequence
  Description of Artificial Sequence: Synthetic oligonucleotide
uguguauuuggccuucacc

SEQ ID NO: 655463 - RNA, 19 nt, Artificial Sequence
  Description of Artificial Sequence: Synthetic oligonucleotide
gaauugguggaacuggggc

SEQ ID NO: 655464 - RNA, 19 nt, Artificial Sequence
  Description of Artificial Sequence: Synthetic oligonucleotide
aaauagcuggaggugggcc

SEQ ID NO: 655465 - RNA, 19 nt, Artificial Sequence
  Description of Artificial Sequence: Synthetic oligonucleotide
aucgccaugccgcaaagcg

SEQ ID NO: 655466 - RNA, 19 nt, Artificial Sequence
  Description of Artificial Sequence: Synthetic oligonucleotide
aaccguugagcucaaauau

SEQ ID NO: 655467 - RNA, 19 nt, Artificial Sequence
  Description of Artificial Sequence: Synthetic oligonucleotide
aagguaaaccguugagcuc

SEQ ID NO: 655468 - RNA, 19 nt, Artificial Sequence
  Description of Artificial Sequence: Synthetic oligonucleotide
uucccuauaccacugcaug

SEQ ID NO: 655469 - RNA, 19 nt, Artificial Sequence
  Description of Artificial Sequence: Synthetic oligonucleotide
cucaaauauguugagcagg

SEQ ID NO: 655470 - RNA, 19 nt, Artificial Sequence
  Description of Artificial Sequence: Synthetic oligonucleotide
gaacauaaaauagcuggag

SEQ ID NO: 655471 - RNA, 19 nt, Artificial Sequence
  Description of Artificial Sequence: Synthetic oligonucleotide
uugucguuaggcuucaccu

SEQ ID NO: 655472 - RNA, 19 nt, Artificial Sequence
  Description of Artificial Sequence: Synthetic oligonucleotide
uuuccuaugguaaggcccu

SEQ ID NO: 655473 - RNA, 19 nt, Artificial Sequence
  Description of Artificial Sequence: Synthetic oligonucleotide
ugaagguaaaccguugagc

SEQ ID NO: 655474 - RNA, 19 nt, Artificial Sequence
  Description of Artificial Sequence: Synthetic oligonucleotide
aaaccguugagcucaaaua

SEQ ID NO: 655475 - RNA, 19 nt, Artificial Sequence
  Description of Artificial Sequence: Synthetic oligonucleotide
aaagugaucuggguacagg

SEQ ID NO: 655476 - RNA, 19 nt, Artificial Sequence
  Description of Artificial Sequence: Synthetic oligonucleotide
uugucaagcucgauggccc

SEQ ID NO: 655477 - RNA, 19 nt, Artificial Sequence
  Description of Artificial Sequence: Synthetic oligonucleotide
ucugaagguaaaccguuga

SEQ ID NO: 655478 - RNA, 19 nt, Artificial Sequence
  Description of Artificial Sequence: Synthetic oligonucleotide
acuggcaacucacaccccg

SEQ ID NO: 655479 - RNA, 19 nt, Artificial Sequence
  Description of Artificial Sequence: Synthetic oligonucleotide
ucgguaguagccuuugaug

SEQ ID NO: 655480 - RNA, 19 nt, Artificial Sequence
  Description of Artificial Sequence: Synthetic oligonucleotide
gaagguaaaccguugagcu

SEQ ID NO: 655481 - RNA, 19 nt, Artificial Sequence
  Description of Artificial Sequence: Synthetic oligonucleotide
ucuugcuacacucuuggua

SEQ ID NO: 655482 - RNA, 19 nt, Artificial Sequence
  Description of Artificial Sequence: Synthetic oligonucleotide
uaaaccguugagcucaaau

SEQ ID NO: 655483 - RNA, 19 nt, Artificial Sequence
  Description of Artificial Sequence: Synthetic oligonucleotide
accaccgucucguagucac

SEQ ID NO: 655484 - RNA, 19 nt, Artificial Sequence
  Description of Artificial Sequence: Synthetic oligonucleotide
uaggaucacuucaacggag

SEQ ID NO: 655485 - RNA, 19 nt, Artificial Sequence
  Description of Artificial Sequence: Synthetic oligonucleotide
ugguacuucaucuuagcau

SEQ ID NO: 655486 - RNA, 19 nt, Artificial Sequence
  Description of Artificial Sequence: Synthetic oligonucleotide
guugccucgaagaagauga

SEQ ID NO: 655487 - RNA, 19 nt, Artificial Sequence
  Description of Artificial Sequence: Synthetic oligonucleotide
aauauguugagcaggucau

SEQ ID NO: 655488 - RNA, 19 nt, Artificial Sequence
  Description of Artificial Sequence: Synthetic oligonucleotide
auuccgcucaaucuuccgg

SEQ ID NO: 655489 - RNA, 19 nt, Artificial Sequence
  Description of Artificial Sequence: Synthetic oligonucleotide
gacacagcggccaccaugg

SEQ ID NO: 655490 - RNA, 19 nt, Artificial Sequence
  Description of Artificial Sequence: Synthetic oligonucleotide
cuuaacuucauggcugcgg

SEQ ID NO: 655491 - RNA, 19 nt, Artificial Sequence
  Description of Artificial Sequence: Synthetic oligonucleotide
auaguagauagcauuguug

SEQ ID NO: 655492 - RNA, 19 nt, Artificial Sequence
  Description of Artificial Sequence: Synthetic oligonucleotide
aacccguagaucugguuca

SEQ ID NO: 655493 - RNA, 19 nt, Artificial Sequence
  Description of Artificial Sequence: Synthetic oligonucleotide
cucguagucacguagggca

SEQ ID NO: 655494 - RNA, 19 nt, Artificial Sequence
  Description of Artificial Sequence: Synthetic oligonucleotide
gguacuucaucuuagcauc

SEQ ID NO: 655495 - RNA, 19 nt, Artificial Sequence
  Description of Artificial Sequence: Synthetic oligonucleotide
acaaagucgccauuaaaua

SEQ ID NO: 655496 - RNA, 19 nt, Artificial Sequence
  Description of Artificial Sequence: Synthetic oligonucleotide
gaguccacaacagaacgcc

SEQ ID NO: 655497 - RNA, 19 nt, Artificial Sequence
  Description of Artificial Sequence: Synthetic oligonucleotide
uagauagcauuguuggggu

SEQ ID NO: 655498 - RNA, 19 nt, Artificial Sequence
  Description of Artificial Sequence: Synthetic oligonucleotide
agaggguuaggaucacuuc

SEQ ID NO: 655499 - RNA, 19 nt, Artificial Sequence
  Description of Artificial Sequence: Synthetic oligonucleotide
ugagcucaaauauguugag

SEQ ID NO: 655500 - RNA, 19 nt, Artificial Sequence
  Description of Artificial Sequence: Synthetic oligonucleotide
cuugguacuucaucuuagc

SEQ ID NO: 655501 - RNA, 19 nt, Artificial Sequence
  Description of Artificial Sequence: Synthetic oligonucleotide
gugauugucacuuugccgu

SEQ ID NO: 655502 - RNA, 19 nt, Artificial Sequence
  Description of Artificial Sequence: Synthetic oligonucleotide
agguaaaccguugagcuca

SEQ ID NO: 655503 - RNA, 19 nt, Artificial Sequence
  Description of Artificial Sequence: Synthetic oligonucleotide
uagguuugacuuacaauaa

SEQ ID NO: 655504 - RNA, 19 nt, Artificial Sequence
  Description of Artificial Sequence: Synthetic oligonucleotide
ggugauugucacuuugccg

SEQ ID NO: 655505 - RNA, 19 nt, Artificial Sequence
  Description of Artificial Sequence: Synthetic oligonucleotide
aaagucgccauuaaauaua

SEQ ID NO: 655506 - RNA, 19 nt, Artificial Sequence
  Description of Artificial Sequence: Synthetic oligonucleotide
cuugucguuaggcuucacc

SEQ ID NO: 655507 - RNA, 19 nt, Artificial Sequence
  Description of Artificial Sequence: Synthetic oligonucleotide
agcucgauggcccgagugg

SEQ ID NO: 655508 - RNA, 19 nt, Artificial Sequence
  Description of Artificial Sequence: Synthetic oligonucleotide
guauucaucuucaaugguc

SEQ ID NO: 655509 - RNA, 19 nt, Artificial Sequence
  Description of Artificial Sequence: Synthetic oligonucleotide
acguagggcagcucggaac

SEQ ID NO: 655510 - RNA, 19 nt, Artificial Sequence
  Description of Artificial Sequence: Synthetic oligonucleotide
cuugacguuggggugaggc

SEQ ID NO: 655511 - RNA, 19 nt, Artificial Sequence
  Description of Artificial Sequence: Synthetic oligonucleotide
uguucccuauaccacugca

SEQ ID NO: 655512 - RNA, 19 nt, Artificial Sequence
  Description of Artificial Sequence: Synthetic oligonucleotide
gccauugaugcacugagcc

SEQ ID NO: 655513 - RNA, 19 nt, Artificial Sequence
  Description of Artificial Sequence: Synthetic oligonucleotide
cuaugguaaggcccuauug

SEQ ID NO: 655514 - RNA, 19 nt, Artificial Sequence
  Description of Artificial Sequence: Synthetic oligonucleotide
uucagagcgccgucggccg

SEQ ID NO: 655515 - RNA, 19 nt, Artificial Sequence
  Description of Artificial Sequence: Synthetic oligonucleotide
uucgaacccguagaucugg

SEQ ID NO: 655516 - RNA, 19 nt, Artificial Sequence
  Description of Artificial Sequence: Synthetic oligonucleotide
uccaacguugccguggggc

SEQ ID NO: 655517 - RNA, 19 nt, Artificial Sequence
  Description of Artificial Sequence: Synthetic oligonucleotide
acacuuccggugcaguuuc

SEQ ID NO: 655518 - RNA, 19 nt, Artificial Sequence
  Description of Artificial Sequence: Synthetic oligonucleotide
gauuccgcucaaucuuccg

SEQ ID NO: 655519 - RNA, 19 nt, Artificial Sequence
  Description of Artificial Sequence: Synthetic oligonucleotide
acacaggccgaaccgucgc

SEQ ID NO: 655520 - RNA, 19 nt, Artificial Sequence
  Description of Artificial Sequence: Synthetic oligonucleotide
gaaggcagggccaucgagc

SEQ ID NO: 655521 - RNA, 19 nt, Artificial Sequence
  Description of Artificial Sequence: Synthetic oligonucleotide
ucagcgucgucuccacuag

SEQ ID NO: 655522 - RNA, 19 nt, Artificial Sequence
  Description of Artificial Sequence: Synthetic oligonucleotide
guuuuccuaugguaaggcc

SEQ ID NO: 655523 - RNA, 19 nt, Artificial Sequence
  Description of Artificial Sequence: Synthetic oligonucleotide
uguaaucuucucugucucu

SEQ ID NO: 655524 - RNA, 19 nt, Artificial Sequence
  Description of Artificial Sequence: Synthetic oligonucleotide
agaacgccggugcucgucg

SEQ ID NO: 655525 - RNA, 19 nt, Artificial Sequence
  Description of Artificial Sequence: Synthetic oligonucleotide
gauggccugacuguaguac

SEQ ID NO: 655526 - RNA, 19 nt, Artificial Sequence
  Description of Artificial Sequence: Synthetic oligonucleotide
agggccaucgagcugggca

SEQ ID NO: 655527 - RNA, 19 nt, Artificial Sequence
  Description of Artificial Sequence: Synthetic oligonucleotide
ugucaagcucgauggcccg

SEQ ID NO: 655528 - RNA, 19 nt, Artificial Sequence
  Description of Artificial Sequence: Synthetic oligonucleotide
ucuugucaagcucgauggc

SEQ ID NO: 655529 - RNA, 19 nt, Artificial Sequence
  Description of Artificial Sequence: Synthetic oligonucleotide
ucugguucauguugucugu

SEQ ID NO: 655530 - RNA, 19 nt, Artificial Sequence
  Description of Artificial Sequence: Synthetic oligonucleotide
ucguagucacguagggcag

SEQ ID NO: 655531 - RNA, 19 nt, Artificial Sequence
  Description of Artificial Sequence: Synthetic oligonucleotide
gaaccgucgcgaaggagcg

SEQ ID NO: 655532 - RNA, 19 nt, Artificial Sequence
  Description of Artificial Sequence: Synthetic oligonucleotide
aaggagcgccgagugaccg

SEQ ID NO: 655533 - RNA, 19 nt, Artificial Sequence
  Description of Artificial Sequence: Synthetic oligonucleotide
ucccuauaccacugcauga

SEQ ID NO: 655534 - RNA, 19 nt, Artificial Sequence
  Description of Artificial Sequence: Synthetic oligonucleotide
agggcauagccguagcacu

SEQ ID NO: 655535 - RNA, 19 nt, Artificial Sequence
  Description of Artificial Sequence: Synthetic oligonucleotide
ugccgauuccgcucaaucu

SEQ ID NO: 655536 - RNA, 19 nt, Artificial Sequence
  Description of Artificial Sequence: Synthetic oligonucleotide
auauuuaauuacagaacau

SEQ ID NO: 655537 - RNA, 19 nt, Artificial Sequence
  Description of Artificial Sequence: Synthetic oligonucleotide
uucucguaguccuuggcuu

SEQ ID NO: 655538 - RNA, 19 nt, Artificial Sequence
  Description of Artificial Sequence: Synthetic oligonucleotide
augcaugaucaguacuuug

SEQ ID NO: 655539 - RNA, 19 nt, Artificial Sequence
  Description of Artificial Sequence: Synthetic oligonucleotide
cagcucacaucauuccuag

SEQ ID NO: 655540 - RNA, 19 nt, Artificial Sequence
  Description of Artificial Sequence: Synthetic oligonucleotide
cucugcaaccuaaagggga

SEQ ID NO: 655541 - RNA, 19 nt, Artificial Sequence
  Description of Artificial Sequence: Synthetic oligonucleotide
ugguucauguugucugucu

SEQ ID NO: 655542 - RNA, 19 nt, Artificial Sequence
  Description of Artificial Sequence: Synthetic oligonucleotide
guccacaacagaacgccgg

SEQ ID NO: 655543 - RNA, 19 nt, Artificial Sequence
  Description of Artificial Sequence: Synthetic oligonucleotide
cagcguguuggcauaggcc

SEQ ID NO: 655544 - RNA, 19 nt, Artificial Sequence
  Description of Artificial Sequence: Synthetic oligonucleotide
gaagacggugacacagcgg

SEQ ID NO: 655545 - RNA, 19 nt, Artificial Sequence
  Description of Artificial Sequence: Synthetic oligonucleotide
ggcccuauugcuuucccag

SEQ ID NO: 655546 - RNA, 19 nt, Artificial Sequence
  Description of Artificial Sequence: Synthetic oligonucleotide
gaaagugaucuggguacag

SEQ ID NO: 655547 - RNA, 19 nt, Artificial Sequence
  Description of Artificial Sequence: Synthetic oligonucleotide
gccaaagaggguuaggauc

SEQ ID NO: 655548 - RNA, 19 nt, Artificial Sequence
  Description of Artificial Sequence: Synthetic oligonucleotide
cuugcugacggagcgcccg

SEQ ID NO: 655549 - RNA, 19 nt, Artificial Sequence
  Description of Artificial Sequence: Synthetic oligonucleotide
aacguugccguggggcggg

SEQ ID NO: 655550 - RNA, 19 nt, Artificial Sequence
  Description of Artificial Sequence: Synthetic oligonucleotide
auaggccaugggcuugacg

SEQ ID NO: 655551 - RNA, 19 nt, Artificial Sequence
  Description of Artificial Sequence: Synthetic oligonucleotide
caucgagcugggcaggccc

SEQ ID NO: 655552 - RNA, 19 nt, Artificial Sequence
  Description of Artificial Sequence: Synthetic oligonucleotide
ucugucucgugguugccuc

SEQ ID NO: 655553 - RNA, 19 nt, Artificial Sequence
  Description of Artificial Sequence: Synthetic oligonucleotide
acaacagaacgccggugcu

SEQ ID NO: 655554 - RNA, 19 nt, Artificial Sequence
  Description of Artificial Sequence: Synthetic oligonucleotide
cacacaggccgaaccgucg

SEQ ID NO: 655555 - RNA, 19 nt, Artificial Sequence
  Description of Artificial Sequence: Synthetic oligonucleotide
caacggagaaggagccucg

SEQ ID NO: 655556 - RNA, 19 nt, Artificial Sequence
  Description of Artificial Sequence: Synthetic oligonucleotide
guugcuggccgcccgucgg

SEQ ID NO: 655557 - RNA, 19 nt, Artificial Sequence
  Description of Artificial Sequence: Synthetic oligonucleotide
uccuagcugcagcagcgug

SEQ ID NO: 655558 - RNA, 19 nt, Artificial Sequence
  Description of Artificial Sequence: Synthetic oligonucleotide
aagucgccauuaaauauau

SEQ ID NO: 655559 - RNA, 19 nt, Artificial Sequence
  Description of Artificial Sequence: Synthetic oligonucleotide
ugcgguugccauaguagau

SEQ ID NO: 655560 - RNA, 19 nt, Artificial Sequence
  Description of Artificial Sequence: Synthetic oligonucleotide
ucguuaggcuucaccuuca

SEQ ID NO: 655561 - RNA, 19 nt, Artificial Sequence
  Description of Artificial Sequence: Synthetic oligonucleotide
ucgugguugccucgaagaa

SEQ ID NO: 655562 - RNA, 19 nt, Artificial Sequence
  Description of Artificial Sequence: Synthetic oligonucleotide
ucgccaugccgcaaagcga

SEQ ID NO: 655563 - RNA, 19 nt, Artificial Sequence
  Description of Artificial Sequence: Synthetic oligonucleotide
aaguagucguuggccugcg

SEQ ID NO: 655564 - RNA, 19 nt, Artificial Sequence
  Description of Artificial Sequence: Synthetic oligonucleotide
cugugaauugguggaacug

SEQ ID NO: 655565 - RNA, 19 nt, Artificial Sequence
  Description of Artificial Sequence: Synthetic oligonucleotide
acaccccgcuugcugacgg

SEQ ID NO: 655566 - RNA, 19 nt, Artificial Sequence
  Description of Artificial Sequence: Synthetic oligonucleotide
auacaucugggcuguguau

SEQ ID NO: 655567 - RNA, 19 nt, Artificial Sequence
  Description of Artificial Sequence: Synthetic oligonucleotide
agcgggagccacucaaaca

SEQ ID NO: 655568 - RNA, 19 nt, Artificial Sequence
  Description of Artificial Sequence: Synthetic oligonucleotide
aggagcgccgagugaccgc

SEQ ID NO: 655569 - RNA, 19 nt, Artificial Sequence
  Description of Artificial Sequence: Synthetic oligonucleotide
ugauugucacuuugccguc

SEQ ID NO: 655570 - RNA, 19 nt, Artificial Sequence
  Description of Artificial Sequence: Synthetic oligonucleotide
ugucguuaggcuucaccuu

SEQ ID NO: 655571 - RNA, 19 nt, Artificial Sequence
  Description of Artificial Sequence: Synthetic oligonucleotide
uccccgcacacuguaaucu

SEQ ID NO: 655572 - RNA, 19 nt, Artificial Sequence
  Description of Artificial Sequence: Synthetic oligonucleotide
cgaaccgucgcgaaggagc

SEQ ID NO: 655573 - RNA, 19 nt, Artificial Sequence
  Description of Artificial Sequence: Synthetic oligonucleotide
guagcacucggugcgcagg

SEQ ID NO: 655574 - RNA, 19 nt, Artificial Sequence
  Description of Artificial Sequence: Synthetic oligonucleotide
caucgcccagggcauagcc

SEQ ID NO: 655575 - RNA, 19 nt, Artificial Sequence
  Description of Artificial Sequence: Synthetic oligonucleotide
cuucgaacccguagaucug

SEQ ID NO: 655576 - RNA, 19 nt, Artificial Sequence
  Description of Artificial Sequence: Synthetic oligonucleotide
gcucggcacacucagcccg

SEQ ID NO: 655577 - RNA, 19 nt, Artificial Sequence
  Description of Artificial Sequence: Synthetic oligonucleotide
agcgucgucuccacuagag

SEQ ID NO: 655578 - RNA, 19 nt, Artificial Sequence
  Description of Artificial Sequence: Synthetic oligonucleotide
cuuucagcgucgucuccac

SEQ ID NO: 655579 - RNA, 19 nt, Artificial Sequence
  Description of Artificial Sequence: Synthetic oligonucleotide
gguucaaaucgauggccug

SEQ ID NO: 655580 - RNA, 19 nt, Artificial Sequence
  Description of Artificial Sequence: Synthetic oligonucleotide
ugcugugaauugguggaac

SEQ ID NO: 655581 - RNA, 19 nt, Artificial Sequence
  Description of Artificial Sequence: Synthetic oligonucleotide
caggcugcgguugccauag

SEQ ID NO: 655582 - RNA, 19 nt, Artificial Sequence
  Description of Artificial Sequence: Synthetic oligonucleotide
aacuggcaacucacacccc

SEQ ID NO: 655583 - RNA, 19 nt, Artificial Sequence
  Description of Artificial Sequence: Synthetic oligonucleotide
accguugagcucaaauaug

SEQ ID NO: 655584 - RNA, 19 nt, Artificial Sequence
  Description of Artificial Sequence: Synthetic oligonucleotide
ugacggagcgcccguucug

SEQ ID NO: 655585 - RNA, 19 nt, Artificial Sequence
  Description of Artificial Sequence: Synthetic oligonucleotide
ucucguaguccuuggcuuu

SEQ ID NO: 655586 - RNA, 19 nt, Artificial Sequence
  Description of Artificial Sequence: Synthetic oligonucleotide
caaagucgccauuaaauau

SEQ ID NO: 655587 - RNA, 19 nt, Artificial Sequence
  Description of Artificial Sequence: Synthetic oligonucleotide
uaaggcccuauugcuuucc

SEQ ID NO: 655588 - RNA, 19 nt, Artificial Sequence
  Description of Artificial Sequence: Synthetic oligonucleotide
guaggaggcuuuguuuccc

SEQ ID NO: 655589 - RNA, 19 nt, Artificial Sequence
  Description of Artificial Sequence: Synthetic oligonucleotide
ggcagcucggaacuugccc

SEQ ID NO: 655590 - RNA, 19 nt, Artificial Sequence
  Description of Artificial Sequence: Synthetic oligonucleotide
agaaggagccucgguccac

SEQ ID NO: 655591 - RNA, 19 nt, Artificial Sequence
  Description of Artificial Sequence: Synthetic oligonucleotide
gguccaacguugccguggg

SEQ ID NO: 655592 - RNA, 19 nt, Artificial Sequence
  Description of Artificial Sequence: Synthetic oligonucleotide
accuguacuaggaucuggu

SEQ ID NO: 655593 - RNA, 19 nt, Artificial Sequence
  Description of Artificial Sequence: Synthetic oligonucleotide
guacuuugccauugaugca

SEQ ID NO: 655594 - RNA, 19 nt, Artificial Sequence
  Description of Artificial Sequence: Synthetic oligonucleotide
gaucugguaggcacacuuc

SEQ ID NO: 655595 - RNA, 19 nt, Artificial Sequence
  Description of Artificial Sequence: Synthetic oligonucleotide
ccaacguugccguggggcg

SEQ ID NO: 655596 - RNA, 19 nt, Artificial Sequence
  Description of Artificial Sequence: Synthetic oligonucleotide
cccuauugcuuucccaggg

SEQ ID NO: 655597 - RNA, 19 nt, Artificial Sequence
  Description of Artificial Sequence: Synthetic oligonucleotide
gggguucaaaucgauggcc

SEQ ID NO: 655598 - RNA, 19 nt, Artificial Sequence
  Description of Artificial Sequence: Synthetic oligonucleotide
gguucauguugucugucuc

SEQ ID NO: 655599 - RNA, 19 nt, Artificial Sequence
  Description of Artificial Sequence: Synthetic oligonucleotide
gccaccaugggccaccuca

SEQ ID NO: 655600 - RNA, 19 nt, Artificial Sequence
  Description of Artificial Sequence: Synthetic oligonucleotide
gccuuaacuucauggcugc

SEQ ID NO: 655601 - RNA, 19 nt, Artificial Sequence
  Description of Artificial Sequence: Synthetic oligonucleotide
caccuguacuaggaucugg

SEQ ID NO: 655602 - RNA, 19 nt, Artificial Sequence
  Description of Artificial Sequence: Synthetic oligonucleotide
guuggggugaggcacugcu

SEQ ID NO: 655603 - RNA, 19 nt, Artificial Sequence
  Description of Artificial Sequence: Synthetic oligonucleotide
ucgucuccacuagagugcu

SEQ ID NO: 655604 - RNA, 19 nt, Artificial Sequence
  Description of Artificial Sequence: Synthetic oligonucleotide
ggccgaaccgucgcgaagg

SEQ ID NO: 655605 - RNA, 19 nt, Artificial Sequence
  Description of Artificial Sequence: Synthetic oligonucleotide
ucgaacccguagaucuggu

SEQ ID NO: 655606 - RNA, 19 nt, Artificial Sequence
  Description of Artificial Sequence: Synthetic oligonucleotide
ucaccuguacuaggaucug

SEQ ID NO: 655607 - RNA, 19 nt, Artificial Sequence
  Description of Artificial Sequence: Synthetic oligonucleotide
gggccaucgagcugggcag

SEQ ID NO: 655608 - RNA, 19 nt, Artificial Sequence
  Description of Artificial Sequence: Synthetic oligonucleotide
gccugaugauccucuuugg

SEQ ID NO: 655609 - RNA, 19 nt, Artificial Sequence
  Description of Artificial Sequence: Synthetic oligonucleotide
uggcccgaguggcaucgcc

SEQ ID NO: 655610 - RNA, 19 nt, Artificial Sequence
  Description of Artificial Sequence: Synthetic oligonucleotide
uggccugacuguaguacuu

SEQ ID NO: 655611 - RNA, 19 nt, Artificial Sequence
  Description of Artificial Sequence: Synthetic oligonucleotide
ccuucgaacccguagaucu

SEQ ID NO: 655612 - RNA, 19 nt, Artificial Sequence
  Description of Artificial Sequence: Synthetic oligonucleotide
agacggugacacagcggcc

SEQ ID NO: 655613 - RNA, 19 nt, Artificial Sequence
  Description of Artificial Sequence: Synthetic oligonucleotide
acgccggugcucgucgccc

SEQ ID NO: 655614 - RNA, 19 nt, Artificial Sequence
  Description of Artificial Sequence: Synthetic oligonucleotide
gcagcguguuggcauaggc

SEQ ID NO: 655615 - RNA, 19 nt, Artificial Sequence
  Description of Artificial Sequence: Synthetic oligonucleotide
ggagcgcccguucuguggc

SEQ ID NO: 655616 - RNA, 19 nt, Artificial Sequence
  Description of Artificial Sequence: Synthetic oligonucleotide
cccuauaccacugcaugag

SEQ ID NO: 655617 - RNA, 19 nt, Artificial Sequence
  Description of Artificial Sequence: Synthetic oligonucleotide
gggaccugagucugguggc

SEQ ID NO: 655618 - RNA, 19 nt, Artificial Sequence
  Description of Artificial Sequence: Synthetic oligonucleotide
ggguccaacguugccgugg

SEQ ID NO: 655619 - RNA, 19 nt, Artificial Sequence
  Description of Artificial Sequence: Synthetic oligonucleotide
ccuauaccacugcaugagc

SEQ ID NO: 655620 - RNA, 19 nt, Artificial Sequence
  Description of Artificial Sequence: Synthetic oligonucleotide
gcccuauugcuuucccagg

SEQ ID NO: 655621 - RNA, 19 nt, Artificial Sequence
  Description of Artificial Sequence: Synthetic oligonucleotide
gucgcgaaggagcgccgag

SEQ ID NO: 655622 - RNA, 19 nt, Artificial Sequence
  Description of Artificial Sequence: Synthetic oligonucleotide
caacguugccguggggcgg

SEQ ID NO: 655623 - RNA, 19 nt, Artificial Sequence
  Description of Artificial Sequence: Synthetic oligonucleotide
ugcccuacccggucucaac

SEQ ID NO: 655624 - RNA, 19 nt, Artificial Sequence
  Description of Artificial Sequence: Synthetic oligonucleotide
caaccuaaaggggaauaaa

SEQ ID NO: 655625 - RNA, 19 nt, Artificial Sequence
  Description of Artificial Sequence: Synthetic oligonucleotide
ucguuggccugcgucuuga

SEQ ID NO: 655626 - RNA, 19 nt, Artificial Sequence
  Description of Artificial Sequence: Synthetic oligonucleotide
guaaggcccuauugcuuuc

SEQ ID NO: 655627 - RNA, 19 nt, Artificial Sequence
  Description of Artificial Sequence: Synthetic oligonucleotide
gucgguaguagccuuugau

SEQ ID NO: 655628 - RNA, 19 nt, Artificial Sequence
  Description of Artificial Sequence: Synthetic oligonucleotide
gguugccucgaagaagaug

SEQ ID NO: 655629 - RNA, 19 nt, Artificial Sequence
  Description of Artificial Sequence: Synthetic oligonucleotide
cucguaguccuuggcuuug

SEQ ID NO: 655630 - RNA, 19 nt, Artificial Sequence
  Description of Artificial Sequence: Synthetic oligonucleotide
ucgauggcccgaguggcau

SEQ ID NO: 655631 - RNA, 19 nt, Artificial Sequence
  Description of Artificial Sequence: Synthetic oligonucleotide
cgucucguagucacguagg

SEQ ID NO: 655632 - RNA, 19 nt, Artificial Sequence
  Description of Artificial Sequence: Synthetic oligonucleotide
ccuacccggucucaacucc

SEQ ID NO: 655633 - RNA, 19 nt, Artificial Sequence
  Description of Artificial Sequence: Synthetic oligonucleotide
uugcugacggagcgcccgu

SEQ ID NO: 655634 - RNA, 19 nt, Artificial Sequence
  Description of Artificial Sequence: Synthetic oligonucleotide
cccgcuugcugacggagcg

SEQ ID NO: 655635 - RNA, 19 nt, Artificial Sequence
  Description of Artificial Sequence: Synthetic oligonucleotide
gccgaaggcagggccaucg

SEQ ID NO: 655636 - RNA, 19 nt, Artificial Sequence
  Description of Artificial Sequence: Synthetic oligonucleotide
augggaccugagucuggug

SEQ ID NO: 655637 - RNA, 19 nt, Artificial Sequence
  Description of Artificial Sequence: Synthetic oligonucleotide
caucaggcccaaacuggca

SEQ ID NO: 655638 - RNA, 19 nt, Artificial Sequence
  Description of Artificial Sequence: Synthetic oligonucleotide
acaugggaccugagucugg

SEQ ID NO: 655639 - RNA, 19 nt, Artificial Sequence
  Description of Artificial Sequence: Synthetic oligonucleotide
uccuaugguaaggcccuau

SEQ ID NO: 655640 - RNA, 19 nt, Artificial Sequence
  Description of Artificial Sequence: Synthetic oligonucleotide
gugcucgucgcccgcgaug

SEQ ID NO: 655641 - RNA, 19 nt, Artificial Sequence
  Description of Artificial Sequence: Synthetic oligonucleotide
ccgucucguagucacguag

SEQ ID NO: 655642 - RNA, 19 nt, Artificial Sequence
  Description of Artificial Sequence: Synthetic oligonucleotide
gaacgccggugcucgucgc

SEQ ID NO: 655643 - RNA, 19 nt, Artificial Sequence
  Description of Artificial Sequence: Synthetic oligonucleotide
uucccaggggaggagccau

SEQ ID NO: 655644 - RNA, 19 nt, Artificial Sequence
  Description of Artificial Sequence: Synthetic oligonucleotide
ucguaguccuuggcuuuga

SEQ ID NO: 655645 - RNA, 19 nt, Artificial Sequence
  Description of Artificial Sequence: Synthetic oligonucleotide
acaggccgaaccgucgcga

SEQ ID NO: 655646 - RNA, 19 nt, Artificial Sequence
  Description of Artificial Sequence: Synthetic oligonucleotide
accccgcuugcugacggag

SEQ ID NO: 655647 - RNA, 19 nt, Artificial Sequence
  Description of Artificial Sequence: Synthetic oligonucleotide
caucgccaugccgcaaagc

SEQ ID NO: 655648 - RNA, 19 nt, Artificial Sequence
  Description of Artificial Sequence: Synthetic oligonucleotide
gcuugggcccacuguauuc

SEQ ID NO: 655649 - RNA, 19 nt, Artificial Sequence
  Description of Artificial Sequence: Synthetic oligonucleotide
uacccggucucaacuccuu

SEQ ID NO: 655650 - RNA, 19 nt, Artificial Sequence
  Description of Artificial Sequence: Synthetic oligonucleotide
guccccgcacacuguaauc

SEQ ID NO: 655651 - RNA, 19 nt, Artificial Sequence
  Description of Artificial Sequence: Synthetic oligonucleotide
uugccguggggcggggcag

SEQ ID NO: 655652 - RNA, 19 nt, Artificial Sequence
  Description of Artificial Sequence: Synthetic oligonucleotide
ggaucacuucaacggagaa

SEQ ID NO: 655653 - RNA, 19 nt, Artificial Sequence
  Description of Artificial Sequence: Synthetic oligonucleotide
ccgcucgcggcacacaggc

SEQ ID NO: 655654 - RNA, 19 nt, Artificial Sequence
  Description of Artificial Sequence: Synthetic oligonucleotide
ggagcgccgagugaccgcc

SEQ ID NO: 655655 - RNA, 19 nt, Artificial Sequence
  Description of Artificial Sequence: Synthetic oligonucleotide
ggcaacggccgcucgcggc

SEQ ID NO: 655656 - RNA, 19 nt, Artificial Sequence
  Description of Artificial Sequence: Synthetic oligonucleotide
gguuggucucugaagguaa

SEQ ID NO: 655657 - RNA, 19 nt, Artificial Sequence
  Description of Artificial Sequence: Synthetic oligonucleotide
cacacucagcccgcucgcc

SEQ ID NO: 655658 - RNA, 19 nt, Artificial Sequence
  Description of Artificial Sequence: Synthetic oligonucleotide
ccgauuccgcucaaucuuc

SEQ ID NO: 655659 - RNA, 19 nt, Artificial Sequence
  Description of Artificial Sequence: Synthetic oligonucleotide
gcugugggcagcucacauc

SEQ ID NO: 655660 - RNA, 19 nt, Artificial Sequence
  Description of Artificial Sequence: Synthetic oligonucleotide
acggagcgcccguucugug

SEQ ID NO: 655661 - RNA, 19 nt, Artificial Sequence
  Description of Artificial Sequence: Synthetic oligonucleotide
cacaccccgcuugcugacg

SEQ ID NO: 655662 - RNA, 19 nt, Artificial Sequence
  Description of Artificial Sequence: Synthetic oligonucleotide
ggcucggcacacucagccc

SEQ ID NO: 655663 - RNA, 19 nt, Artificial Sequence
  Description of Artificial Sequence: Synthetic oligonucleotide
guccaacguugccgugggg

SEQ ID NO: 655664 - RNA, 19 nt, Artificial Sequence
  Description of Artificial Sequence: Synthetic oligonucleotide
ccguugagcucaaauaugu

SEQ ID NO: 655665 - RNA, 19 nt, Artificial Sequence
  Description of Artificial Sequence: Synthetic oligonucleotide
uccgccccacacugaggcu

SEQ ID NO: 655666 - RNA, 19 nt, Artificial Sequence
  Description of Artificial Sequence: Synthetic oligonucleotide
cagagcgccgucggccggg

SEQ ID NO: 655667 - RNA, 19 nt, Artificial Sequence
  Description of Artificial Sequence: Synthetic oligonucleotide
ccaugccgcaaagcgaccc

SEQ ID NO: 655668 - RNA, 19 nt, Artificial Sequence
  Description of Artificial Sequence: Synthetic oligonucleotide
augcacugagccagcggga

SEQ ID NO: 655669 - RNA, 19 nt, Artificial Sequence
  Description of Artificial Sequence: Synthetic oligonucleotide
gaggaggcggggccuccuc

SEQ ID NO: 655670 - RNA, 19 nt, Artificial Sequence
  Description of Artificial Sequence: Synthetic oligonucleotide
cgauuccgcucaaucuucc

SEQ ID NO: 655671 - RNA, 19 nt, Artificial Sequence
  Description of Artificial Sequence: Synthetic oligonucleotide
auggcccgaguggcaucgc

SEQ ID NO: 655672 - RNA, 19 nt, Artificial Sequence
  Description of Artificial Sequence: Synthetic oligonucleotide
gcaacggccgcucgcggca

SEQ ID NO: 655673 - RNA, 19 nt, Artificial Sequence
  Description of Artificial Sequence: Synthetic oligonucleotide
guagucacguagggcagcu

SEQ ID NO: 655674 - RNA, 19 nt, Artificial Sequence
  Description of Artificial Sequence: Synthetic oligonucleotide
guucccuauaccacugcau

SEQ ID NO: 655675 - RNA, 19 nt, Artificial Sequence
  Description of Artificial Sequence: Synthetic oligonucleotide
accgucucguagucacgua

SEQ ID NO: 655676 - RNA, 19 nt, Artificial Sequence
  Description of Artificial Sequence: Synthetic oligonucleotide
agcgcccguucuguggcug

SEQ ID NO: 655677 - RNA, 19 nt, Artificial Sequence
  Description of Artificial Sequence: Synthetic oligonucleotide
ggcaucgcccagggcauag

SEQ ID NO: 655678 - RNA, 19 nt, Artificial Sequence
  Description of Artificial Sequence: Synthetic oligonucleotide
cccgcacacuguaaucuuc

SEQ ID NO: 655679 - RNA, 19 nt, Artificial Sequence
  Description of Artificial Sequence: Synthetic oligonucleotide
cuggguacaggagcuuaaa

SEQ ID NO: 655680 - RNA, 19 nt, Artificial Sequence
  Description of Artificial Sequence: Synthetic oligonucleotide
cgcgauggcccgcucaaag

SEQ ID NO: 655681 - RNA, 19 nt, Artificial Sequence
  Description of Artificial Sequence: Synthetic oligonucleotide
acguuggggugaggcacug

SEQ ID NO: 655682 - RNA, 19 nt, Artificial Sequence
  Description of Artificial Sequence: Synthetic oligonucleotide
ggguucaaaucgauggccu

SEQ ID NO: 655683 - RNA, 19 nt, Artificial Sequence
  Description of Artificial Sequence: Synthetic oligonucleotide
ccgaguggcaucgcccagg

SEQ ID NO: 655684 - RNA, 19 nt, Artificial Sequence
  Description of Artificial Sequence: Synthetic oligonucleotide
gguguccccgcacacugua

SEQ ID NO: 655685 - RNA, 19 nt, Artificial Sequence
  Description of Artificial Sequence: Synthetic oligonucleotide
ggcccgaguggcaucgccc

SEQ ID NO: 655686 - RNA, 19 nt, Artificial Sequence
  Description of Artificial Sequence: Synthetic oligonucleotide
cgaaggcagggccaucgag

SEQ ID NO: 655687 - RNA, 19 nt, Artificial Sequence
  Description of Artificial Sequence: Synthetic oligonucleotide
cuacccggucucaacuccu

SEQ ID NO: 655688 - RNA, 19 nt, Artificial Sequence
  Description of Artificial Sequence: Synthetic oligonucleotide
gcccgaguggcaucgccca

SEQ ID NO: 655689 - RNA, 19 nt, Artificial Sequence
  Description of Artificial Sequence: Synthetic oligonucleotide
cauagccguagcacucggu

SEQ ID NO: 655690 - RNA, 19 nt, Artificial Sequence
  Description of Artificial Sequence: Synthetic oligonucleotide
ucggcacacucagcccgcu

SEQ ID NO: 655691 - RNA, 19 nt, Artificial Sequence
  Description of Artificial Sequence: Synthetic oligonucleotide
caugggaccugagucuggu

SEQ ID NO: 655692 - RNA, 19 nt, Artificial Sequence
  Description of Artificial Sequence: Synthetic oligonucleotide
gcgguugccauaguagaua

SEQ ID NO: 655693 - RNA, 19 nt, Artificial Sequence
  Description of Artificial Sequence: Synthetic oligonucleotide
ggguuggucucugaaggua

SEQ ID NO: 655694 - RNA, 19 nt, Artificial Sequence
  Description of Artificial Sequence: Synthetic oligonucleotide
uuccuaugguaaggcccua

SEQ ID NO: 655695 - RNA, 19 nt, Artificial Sequence
  Description of Artificial Sequence: Synthetic oligonucleotide
gagcgccgagugaccgccg

SEQ ID NO: 655696 - RNA, 19 nt, Artificial Sequence
  Description of Artificial Sequence: Synthetic oligonucleotide
gccaucgccaugccgcaaa

SEQ ID NO: 655697 - RNA, 19 nt, Artificial Sequence
  Description of Artificial Sequence: Synthetic oligonucleotide
cgcgaaggagcgccgagug

SEQ ID NO: 655698 - RNA, 19 nt, Artificial Sequence
  Description of Artificial Sequence: Synthetic oligonucleotide
cggagcgcccguucugugg

SEQ ID NO: 655699 - RNA, 19 nt, Artificial Sequence
  Description of Artificial Sequence: Synthetic oligonucleotide
ggccaucgagcugggcagg

SEQ ID NO: 655700 - RNA, 19 nt, Artificial Sequence
  Description of Artificial Sequence: Synthetic oligonucleotide
cugacggagcgcccguucu

SEQ ID NO: 655701 - RNA, 19 nt, Artificial Sequence
  Description of Artificial Sequence: Synthetic oligonucleotide
cccuacccggucucaacuc

SEQ ID NO: 655702 - RNA, 19 nt, Artificial Sequence
  Description of Artificial Sequence: Synthetic oligonucleotide
ccgaaugcccaggcugugc

SEQ ID NO: 655703 - RNA, 19 nt, Artificial Sequence
  Description of Artificial Sequence: Synthetic oligonucleotide
gcuuaaagccaaagagggu

SEQ ID NO: 655704 - RNA, 19 nt, Artificial Sequence
  Description of Artificial Sequence: Synthetic oligonucleotide
caggccgaaccgucgcgaa

SEQ ID NO: 655705 - RNA, 19 nt, Artificial Sequence
  Description of Artificial Sequence: Synthetic oligonucleotide
gcacacaggccgaaccguc

SEQ ID NO: 655706 - RNA, 19 nt, Artificial Sequence
  Description of Artificial Sequence: Synthetic oligonucleotide
cguagcacucggugcgcag

SEQ ID NO: 655707 - RNA, 19 nt, Artificial Sequence
  Description of Artificial Sequence: Synthetic oligonucleotide
caccgucucguagucacgu

SEQ ID NO: 655708 - RNA, 19 nt, Artificial Sequence
  Description of Artificial Sequence: Synthetic oligonucleotide
cguagucacguagggcagc

SEQ ID NO: 655709 - RNA, 19 nt, Artificial Sequence
  Description of Artificial Sequence: Synthetic oligonucleotide
agucgccauuaaauauaua

SEQ ID NO: 655710 - RNA, 19 nt, Artificial Sequence
  Description of Artificial Sequence: Synthetic oligonucleotide
gcgaaggagcgccgaguga

SEQ ID NO: 655711 - RNA, 19 nt, Artificial Sequence
  Description of Artificial Sequence: Synthetic oligonucleotide
ccuguacuaggaucuggua

SEQ ID NO: 655712 - RNA, 19 nt, Artificial Sequence
  Description of Artificial Sequence: Synthetic oligonucleotide
cagcgucgucuccacuaga

SEQ ID NO: 655713 - RNA, 19 nt, Artificial Sequence
  Description of Artificial Sequence: Synthetic oligonucleotide
ugcugacggagcgcccguu

SEQ ID NO: 655714 - RNA, 19 nt, Artificial Sequence
  Description of Artificial Sequence: Synthetic oligonucleotide
gcccguucuguggcugggg

SEQ ID NO: 655715 - RNA, 19 nt, Artificial Sequence
  Description of Artificial Sequence: Synthetic oligonucleotide
ccaucgagcugggcaggcc

SEQ ID NO: 655716 - RNA, 19 nt, Artificial Sequence
  Description of Artificial Sequence: Synthetic oligonucleotide
caggcccaaacuggcaacu

SEQ ID NO: 655717 - RNA, 19 nt, Artificial Sequence
  Description of Artificial Sequence: Synthetic oligonucleotide
gccgcccgucgguaguagc

SEQ ID NO: 655718 - RNA, 19 nt, Artificial Sequence
  Description of Artificial Sequence: Synthetic oligonucleotide
gggguccaacguugccgug

SEQ ID NO: 655719 - RNA, 19 nt, Artificial Sequence
  Description of Artificial Sequence: Synthetic oligonucleotide
gcccuacccggucucaacu

SEQ ID NO: 655720 - RNA, 19 nt, Artificial Sequence
  Description of Artificial Sequence: Synthetic oligonucleotide
cguagggcagcucggaacu

SEQ ID NO: 655721 - RNA, 19 nt, Artificial Sequence
  Description of Artificial Sequence: Synthetic oligonucleotide
guaaaccguugagcucaaa

SEQ ID NO: 655722 - RNA, 19 nt, Artificial Sequence
  Description of Artificial Sequence: Synthetic oligonucleotide
caacggccgcucgcggcac

SEQ ID NO: 655723 - RNA, 19 nt, Artificial Sequence
  Description of Artificial Sequence: Synthetic oligonucleotide
ccagggcauagccguagca

SEQ ID NO: 655724 - RNA, 19 nt, Artificial Sequence
  Description of Artificial Sequence: Synthetic oligonucleotide
gccgcucgcggcacacagg

SEQ ID NO: 655725 - RNA, 19 nt, Artificial Sequence
  Description of Artificial Sequence: Synthetic oligonucleotide
ccgucgguaguagccuuug

SEQ ID NO: 655726 - RNA, 19 nt, Artificial Sequence
  Description of Artificial Sequence: Synthetic oligonucleotide
uggccgcccgucgguagua

SEQ ID NO: 655727 - RNA, 19 nt, Artificial Sequence
  Description of Artificial Sequence: Synthetic oligonucleotide
gcuugcugacggagcgccc

SEQ ID NO: 655728 - RNA, 19 nt, Artificial Sequence
  Description of Artificial Sequence: Synthetic oligonucleotide
gccguagcacucggugcgc

SEQ ID NO: 655729 - RNA, 19 nt, Artificial Sequence
  Description of Artificial Sequence: Synthetic oligonucleotide
ccgucgcgaaggagcgccg

SEQ ID NO: 655730 - RNA, 19 nt, Artificial Sequence
  Description of Artificial Sequence: Synthetic oligonucleotide
gguaaaccguugagcucaa

SEQ ID NO: 655731 - RNA, 19 nt, Artificial Sequence
  Description of Artificial Sequence: Synthetic oligonucleotide
gcaucgcccagggcauagc

SEQ ID NO: 655732 - RNA, 19 nt, Artificial Sequence
  Description of Artificial Sequence: Synthetic oligonucleotide
uggcaucgcccagggcaua

SEQ ID NO: 655733 - RNA, 19 nt, Artificial Sequence
  Description of Artificial Sequence: Synthetic oligonucleotide
gccgaaccgucgcgaagga

SEQ ID NO: 655734 - RNA, 19 nt, Artificial Sequence
  Description of Artificial Sequence: Synthetic oligonucleotide
gcgucgucuccacuagagu

SEQ ID NO: 655735 - RNA, 19 nt, Artificial Sequence
  Description of Artificial Sequence: Synthetic oligonucleotide
gugcccuacccggucucaa

SEQ ID NO: 655736 - RNA, 19 nt, Artificial Sequence
  Description of Artificial Sequence: Synthetic oligonucleotide
gucgcccgcgauggcccgc

SEQ ID NO: 655737 - RNA, 19 nt, Artificial Sequence
  Description of Artificial Sequence: Synthetic oligonucleotide
gccaugccgcaaagcgacc

SEQ ID NO: 655738 - RNA, 19 nt, Artificial Sequence
  Description of Artificial Sequence: Synthetic oligonucleotide
ccgaaccgucgcgaaggag

SEQ ID NO: 655739 - RNA, 19 nt, Artificial Sequence
  Description of Artificial Sequence: Synthetic oligonucleotide
cagcuccgccccacacuga

SEQ ID NO: 655740 - RNA, 19 nt, Artificial Sequence
  Description of Artificial Sequence: Synthetic oligonucleotide
ggcaacucacaccccgcuu

SEQ ID NO: 655741 - RNA, 19 nt, Artificial Sequence
  Description of Artificial Sequence: Synthetic oligonucleotide
gagcgcccguucuguggcu

SEQ ID NO: 655742 - RNA, 19 nt, Artificial Sequence
  Description of Artificial Sequence: Synthetic oligonucleotide
gcuugacguuggggugagg

SEQ ID NO: 655743 - RNA, 19 nt, Artificial Sequence
  Description of Artificial Sequence: Synthetic oligonucleotide
cccuggcaacggccgcucg

SEQ ID NO: 655744 - RNA, 19 nt, Artificial Sequence
  Description of Artificial Sequence: Synthetic oligonucleotide
caagcucgauggcccgagu

SEQ ID NO: 655745 - RNA, 19 nt, Artificial Sequence
  Description of Artificial Sequence: Synthetic oligonucleotide
gcccgcgauggcccgcuca

SEQ ID NO: 655746 - RNA, 19 nt, Artificial Sequence
  Description of Artificial Sequence: Synthetic oligonucleotide
ccuaugguaaggcccuauu

SEQ ID NO: 655747 - RNA, 19 nt, Artificial Sequence
  Description of Artificial Sequence: Synthetic oligonucleotide
cugcaaccuaaaggggaau

SEQ ID NO: 655748 - RNA, 19 nt, Artificial Sequence
  Description of Artificial Sequence: Synthetic oligonucleotide
cccgcgauggcccgcucaa

SEQ ID NO: 655749 - RNA, 19 nt, Artificial Sequence
  Description of Artificial Sequence: Synthetic oligonucleotide
ggccgcccgucgguaguag

SEQ ID NO: 655750 - RNA, 19 nt, Artificial Sequence
  Description of Artificial Sequence: Synthetic oligonucleotide
ccgaaggcagggccaucga

SEQ ID NO: 655751 - RNA, 19 nt, Artificial Sequence
  Description of Artificial Sequence: Synthetic oligonucleotide
cgucgcccgcgauggcccg

SEQ ID NO: 655752 - RNA, 19 nt, Artificial Sequence
  Description of Artificial Sequence: Synthetic oligonucleotide
cgauggcccgaguggcauc

SEQ ID NO: 655753 - RNA, 19 nt, Artificial Sequence
  Description of Artificial Sequence: Synthetic oligonucleotide
ggugcucgucgcccgcgau

SEQ ID NO: 655754 - RNA, 19 nt, Artificial Sequence
  Description of Artificial Sequence: Synthetic oligonucleotide
gcccgcuucagagcgccgu

SEQ ID NO: 655755 - RNA, 19 nt, Artificial Sequence
  Description of Artificial Sequence: Synthetic oligonucleotide
cgauggccugacuguagua

SEQ ID NO: 655756 - RNA, 19 nt, Artificial Sequence
  Description of Artificial Sequence: Synthetic oligonucleotide
cguugagcucaaauauguu

SEQ ID NO: 655757 - RNA, 19 nt, Artificial Sequence
  Description of Artificial Sequence: Synthetic oligonucleotide
ccguagcacucggugcgca

SEQ ID NO: 655758 - RNA, 19 nt, Artificial Sequence
  Description of Artificial Sequence: Synthetic oligonucleotide
gcguguuggcauaggccau

SEQ ID NO: 655759 - RNA, 19 nt, Artificial Sequence
  Description of Artificial Sequence: Synthetic oligonucleotide
ccguucuguggcuggggau

SEQ ID NO: 655760 - RNA, 19 nt, Artificial Sequence
  Description of Artificial Sequence: Synthetic oligonucleotide
ggccgaaggcagggccauc

SEQ ID NO: 655761 - RNA, 19 nt, Artificial Sequence
  Description of Artificial Sequence: Synthetic oligonucleotide
cgcccgcuucagagcgccg

SEQ ID NO: 655762 - RNA, 19 nt, Artificial Sequence
  Description of Artificial Sequence: Synthetic oligonucleotide
gcccgucgguaguagccuu

SEQ ID NO: 655763 - RNA, 19 nt, Artificial Sequence
  Description of Artificial Sequence: Synthetic oligonucleotide
ccgagugaccgccgccgcu

SEQ ID NO: 655764 - RNA, 19 nt, Artificial Sequence
  Description of Artificial Sequence: Synthetic oligonucleotide
cgucgcgaaggagcgccga

SEQ ID NO: 655765 - RNA, 19 nt, Artificial Sequence
  Description of Artificial Sequence: Synthetic oligonucleotide
cgcccgucgguaguagccu

SEQ ID NO: 655766 - RNA, 19 nt, Artificial Sequence
  Description of Artificial Sequence: Synthetic oligonucleotide
ccgcgauggcccgcucaaa

SEQ ID NO: 655767 - RNA, 19 nt, Artificial Sequence
  Description of Artificial Sequence: Synthetic oligonucleotide
cgccaucgccaugccgcaa

SEQ ID NO: 655768 - RNA, 19 nt, Artificial Sequence
  Description of Artificial Sequence: Synthetic oligonucleotide
uuuauaagcaaacaaguca

SEQ ID NO: 655769 - RNA, 19 nt, Artificial Sequence
  Description of Artificial Sequence: Synthetic oligonucleotide
aaacauguaguucauuuac

SEQ ID NO: 655770 - RNA, 19 nt, Artificial Sequence
  Description of Artificial Sequence: Synthetic oligonucleotide
gauugaaccacuuccaagg

SEQ ID NO: 655771 - RNA, 19 nt, Artificial Sequence
  Description of Artificial Sequence: Synthetic oligonucleotide
aacaugauuguuuugcauc

SEQ ID NO: 655772 - RNA, 19 nt, Artificial Sequence
  Description of Artificial Sequence: Synthetic oligonucleotide
uauauuucagaucugcugc

SEQ ID NO: 655773 - RNA, 19 nt, Artificial Sequence
  Description of Artificial Sequence: Synthetic oligonucleotide
acagagauacacuaaauuc

SEQ ID NO: 655774 - RNA, 19 nt, Artificial Sequence
  Description of Artificial Sequence: Synthetic oligonucleotide
aacaagcuaucuaugaucc

SEQ ID NO: 655775 - RNA, 19 nt, Artificial Sequence
  Description of Artificial Sequence: Synthetic oligonucleotide
ugagcaaugacacugcaug

SEQ ID NO: 655776 - RNA, 19 nt, Artificial Sequence
  Description of Artificial Sequence: Synthetic oligonucleotide
auaucagacagacacuggc

SEQ ID NO: 655777 - RNA, 19 nt, Artificial Sequence
  Description of Artificial Sequence: Synthetic oligonucleotide
aauccaggcucauaaauag

SEQ ID NO: 655778 - RNA, 19 nt, Artificial Sequence
  Description of Artificial Sequence: Synthetic oligonucleotide
aauugacaacauuuaaauc

SEQ ID NO: 655779 - RNA, 19 nt, Artificial Sequence
  Description of Artificial Sequence: Synthetic oligonucleotide
uuccggaagauucagagcc

SEQ ID NO: 655780 - RNA, 19 nt, Artificial Sequence
  Description of Artificial Sequence: Synthetic oligonucleotide
cuaauguagauacuggagg

SEQ ID NO: 655781 - RNA, 19 nt, Artificial Sequence
  Description of Artificial Sequence: Synthetic oligonucleotide
auaacaagggcaugggcgc

SEQ ID NO: 655782 - RNA, 19 nt, Artificial Sequence
  Description of Artificial Sequence: Synthetic oligonucleotide
uuacuguuuaauaucagac

SEQ ID NO: 655783 - RNA, 19 nt, Artificial Sequence
  Description of Artificial Sequence: Synthetic oligonucleotide
agugaaaugacguaucaca

SEQ ID NO: 655784 - RNA, 19 nt, Artificial Sequence
  Description of Artificial Sequence: Synthetic oligonucleotide
ucauaaauaggaaggguug

SEQ ID NO: 655785 - RNA, 19 nt, Artificial Sequence
  Description of Artificial Sequence: Synthetic oligonucleotide
aauccguucauaauccagc

SEQ ID NO: 655786 - RNA, 19 nt, Artificial Sequence
  Description of Artificial Sequence: Synthetic oligonucleotide
aaauaucuagacuuugggu

SEQ ID NO: 655787 - RNA, 19 nt, Artificial Sequence
  Description of Artificial Sequence: Synthetic oligonucleotide
uguauuauuaaagugcagu

SEQ ID NO: 655788 - RNA, 19 nt, Artificial Sequence
  Description of Artificial Sequence: Synthetic oligonucleotide
aaauauacggcggaugcuc

SEQ ID NO: 655789 - RNA, 19 nt, Artificial Sequence
  Description of Artificial Sequence: Synthetic oligonucleotide
uuauucuagauucauaauu

SEQ ID NO: 655790 - RNA, 19 nt, Artificial Sequence
  Description of Artificial Sequence: Synthetic oligonucleotide
ugauucuugacucauugac

SEQ ID NO: 655791 - RNA, 19 nt, Artificial Sequence
  Description of Artificial Sequence: Synthetic oligonucleotide
auagcuaucuucuuaucag

SEQ ID NO: 655792 - RNA, 19 nt, Artificial Sequence
  Description of Artificial Sequence: Synthetic oligonucleotide
gauucagagccucacagag

SEQ ID NO: 655793 - RNA, 19 nt, Artificial Sequence
  Description of Artificial Sequence: Synthetic oligonucleotide
acccauuugaguuuugcac

SEQ ID NO: 655794 - RNA, 19 nt, Artificial Sequence
  Description of Artificial Sequence: Synthetic oligonucleotide
aacuuuaaccagcccauag

SEQ ID NO: 655795 - RNA, 19 nt, Artificial Sequence
  Description of Artificial Sequence: Synthetic oligonucleotide
uaagcaaacaagucaacac

SEQ ID NO: 655796 - RNA, 19 nt, Artificial Sequence
  Description of Artificial Sequence: Synthetic oligonucleotide
uguagcuaguauaaauuug

SEQ ID NO: 655797 - RNA, 19 nt, Artificial Sequence
  Description of Artificial Sequence: Synthetic oligonucleotide
uguucguucggacagcgcc

SEQ ID NO: 655798 - RNA, 19 nt, Artificial Sequence
  Description of Artificial Sequence: Synthetic oligonucleotide
uuacuaccaagcccgaagg

SEQ ID NO: 655799 - RNA, 19 nt, Artificial Sequence
  Description of Artificial Sequence: Synthetic oligonucleotide
ucuagauucauaauuccua

SEQ ID NO: 655800 - RNA, 19 nt, Artificial Sequence
  Description of Artificial Sequence: Synthetic oligonucleotide
uuugaaugcaaaccccaag

SEQ ID NO: 655801 - RNA, 19 nt, Artificial Sequence
  Description of Artificial Sequence: Synthetic oligonucleotide
agauuccuaauuccuaaac

SEQ ID NO: 655802 - RNA, 19 nt, Artificial Sequence
  Description of Artificial Sequence: Synthetic oligonucleotide
uaauaucagacagacacug

SEQ ID NO: 655803 - RNA, 19 nt, Artificial Sequence
  Description of Artificial Sequence: Synthetic oligonucleotide
aaauaggaaggguuggaga

SEQ ID NO: 655804 - RNA, 19 nt, Artificial Sequence
  Description of Artificial Sequence: Synthetic oligonucleotide
augcauugauucuugacuc

SEQ ID NO: 655805 - RNA, 19 nt, Artificial Sequence
  Description of Artificial Sequence: Synthetic oligonucleotide
ugauccucgaagcaaaccu

SEQ ID NO: 655806 - RNA, 19 nt, Artificial Sequence
  Description of Artificial Sequence: Synthetic oligonucleotide
cuauucauguuaagcaggg

SEQ ID NO: 655807 - RNA, 19 nt, Artificial Sequence
  Description of Artificial Sequence: Synthetic oligonucleotide
uaauguagauacuggagga

SEQ ID NO: 655808 - RNA, 19 nt, Artificial Sequence
  Description of Artificial Sequence: Synthetic oligonucleotide
aauguagauacuggaggac

SEQ ID NO: 655809 - RNA, 19 nt, Artificial Sequence
  Description of Artificial Sequence: Synthetic oligonucleotide
aagauagcuaucuucuuau

SEQ ID NO: 655810 - RNA, 19 nt, Artificial Sequence
  Description of Artificial Sequence: Synthetic oligonucleotide
cuagauucauaauuccuag

SEQ ID NO: 655811 - RNA, 19 nt, Artificial Sequence
  Description of Artificial Sequence: Synthetic oligonucleotide
ucaaccaugauugaaccac

SEQ ID NO: 655812 - RNA, 19 nt, Artificial Sequence
  Description of Artificial Sequence: Synthetic oligonucleotide
uucaaguugggcuuugugu

SEQ ID NO: 655813 - RNA, 19 nt, Artificial Sequence
  Description of Artificial Sequence: Synthetic oligonucleotide
uaucuaugauccucgaagc

SEQ ID NO: 655814 - RNA, 19 nt, Artificial Sequence
  Description of Artificial Sequence: Synthetic oligonucleotide
ucuaccacuuccuuuaauc

SEQ ID NO: 655815 - RNA, 19 nt, Artificial Sequence
  Description of Artificial Sequence: Synthetic oligonucleotide
aaugacguaucacauuaaa

SEQ ID NO: 655816 - RNA, 19 nt, Artificial Sequence
  Description of Artificial Sequence: Synthetic oligonucleotide
uacuguuuaauaucagaca

SEQ ID NO: 655817 - RNA, 19 nt, Artificial Sequence
  Description of Artificial Sequence: Synthetic oligonucleotide
uuaauccaggcucauaaau

SEQ ID NO: 655818 - RNA, 19 nt, Artificial Sequence
  Description of Artificial Sequence: Synthetic oligonucleotide
agauaacaagggcaugggc

SEQ ID NO: 655819 - RNA, 19 nt, Artificial Sequence
  Description of Artificial Sequence: Synthetic oligonucleotide
ugauugaaccacuuccaag

SEQ ID NO: 655820 - RNA, 19 nt, Artificial Sequence
  Description of Artificial Sequence: Synthetic oligonucleotide
gauagcuaucuucuuauca

SEQ ID NO: 655821 - RNA, 19 nt, Artificial Sequence
  Description of Artificial Sequence: Synthetic oligonucleotide
ugaagacuaaacuuuggaa

SEQ ID NO: 655822 - RNA, 19 nt, Artificial Sequence
  Description of Artificial Sequence: Synthetic oligonucleotide
guuagguggauccugaaga

SEQ ID NO: 655823 - RNA, 19 nt, Artificial Sequence
  Description of Artificial Sequence: Synthetic oligonucleotide
cuuacuaccaagcccgaag

SEQ ID NO: 655824 - RNA, 19 nt, Artificial Sequence
  Description of Artificial Sequence: Synthetic oligonucleotide
acuguauuaaacaagcuau

SEQ ID NO: 655825 - RNA, 19 nt, Artificial Sequence
  Description of Artificial Sequence: Synthetic oligonucleotide
ucaacaacuguuacccuga

SEQ ID NO: 655826 - RNA, 19 nt, Artificial Sequence
  Description of Artificial Sequence: Synthetic oligonucleotide
uguuagguggauccugaag

SEQ ID NO: 655827 - RNA, 19 nt, Artificial Sequence
  Description of Artificial Sequence: Synthetic oligonucleotide
cuuugguccaucccaauag

SEQ ID NO: 655828 - RNA, 19 nt, Artificial Sequence
  Description of Artificial Sequence: Synthetic oligonucleotide
accaaugcaacagaucuuc

SEQ ID NO: 655829 - RNA, 19 nt, Artificial Sequence
  Description of Artificial Sequence: Synthetic oligonucleotide
gucacuguauuaaacaagc

SEQ ID NO: 655830 - RNA, 19 nt, Artificial Sequence
  Description of Artificial Sequence: Synthetic oligonucleotide
aauacuaggucagcuucuc

SEQ ID NO: 655831 - RNA, 19 nt, Artificial Sequence
  Description of Artificial Sequence: Synthetic oligonucleotide
acuuuggaauuucaccagg

SEQ ID NO: 655832 - RNA, 19 nt, Artificial Sequence
  Description of Artificial Sequence: Synthetic oligonucleotide
aacuauuuguucccugggu

SEQ ID NO: 655833 - RNA, 19 nt, Artificial Sequence
  Description of Artificial Sequence: Synthetic oligonucleotide
aauaacucagaggacaaua

SEQ ID NO: 655834 - RNA, 19 nt, Artificial Sequence
  Description of Artificial Sequence: Synthetic oligonucleotide
uuggaaagcucugaggacc

SEQ ID NO: 655835 - RNA, 19 nt, Artificial Sequence
  Description of Artificial Sequence: Synthetic oligonucleotide
agcuaguauaaauuugaug

SEQ ID NO: 655836 - RNA, 19 nt, Artificial Sequence
  Description of Artificial Sequence: Synthetic oligonucleotide
acuauucauguuaagcagg

SEQ ID NO: 655837 - RNA, 19 nt, Artificial Sequence
  Description of Artificial Sequence: Synthetic oligonucleotide
cagagauacacuaaauuca

SEQ ID NO: 655838 - RNA, 19 nt, Artificial Sequence
  Description of Artificial Sequence: Synthetic oligonucleotide
aguaacgagcuacuuccgg

SEQ ID NO: 655839 - RNA, 19 nt, Artificial Sequence
  Description of Artificial Sequence: Synthetic oligonucleotide
ugcuaauguagauacugga

SEQ ID NO: 655840 - RNA, 19 nt, Artificial Sequence
  Description of Artificial Sequence: Synthetic oligonucleotide
agcgccuuacuaccaagcc

SEQ ID NO: 655841 - RNA, 19 nt, Artificial Sequence
  Description of Artificial Sequence: Synthetic oligonucleotide
gauaaaggcugguuucagc

SEQ ID NO: 655842 - RNA, 19 nt, Artificial Sequence
  Description of Artificial Sequence: Synthetic oligonucleotide
ucauaauccagcuccuuaa

SEQ ID NO: 655843 - RNA, 19 nt, Artificial Sequence
  Description of Artificial Sequence: Synthetic oligonucleotide
cucgaagcaaaccuccucc

SEQ ID NO: 655844 - RNA, 19 nt, Artificial Sequence
  Description of Artificial Sequence: Synthetic oligonucleotide
cacugaaacaccuggauga

SEQ ID NO: 655845 - RNA, 19 nt, Artificial Sequence
  Description of Artificial Sequence: Synthetic oligonucleotide
caggcucauaaauaggaag

SEQ ID NO: 655846 - RNA, 19 nt, Artificial Sequence
  Description of Artificial Sequence: Synthetic oligonucleotide
aagcuaucuaugauccucg

SEQ ID NO: 655847 - RNA, 19 nt, Artificial Sequence
  Description of Artificial Sequence: Synthetic oligonucleotide
ucauguuaagcaggggagg

SEQ ID NO: 655848 - RNA, 19 nt, Artificial Sequence
  Description of Artificial Sequence: Synthetic oligonucleotide
ucccuuguauuauuaaagu

SEQ ID NO: 655849 - RNA, 19 nt, Artificial Sequence
  Description of Artificial Sequence: Synthetic oligonucleotide
ccaguaacgagcuacuucc

SEQ ID NO: 655850 - RNA, 19 nt, Artificial Sequence
  Description of Artificial Sequence: Synthetic oligonucleotide
acuuugggaucauauauau

SEQ ID NO: 655851 - RNA, 19 nt, Artificial Sequence
  Description of Artificial Sequence: Synthetic oligonucleotide
aaacccauguagcuaguau

SEQ ID NO: 655852 - RNA, 19 nt, Artificial Sequence
  Description of Artificial Sequence: Synthetic oligonucleotide
ugcaguucauuguggaggc

SEQ ID NO: 655853 - RNA, 19 nt, Artificial Sequence
  Description of Artificial Sequence: Synthetic oligonucleotide
aaucaggacucugucuggg

SEQ ID NO: 655854 - RNA, 19 nt, Artificial Sequence
  Description of Artificial Sequence: Synthetic oligonucleotide
uccuugggaacccagugcu

SEQ ID NO: 655855 - RNA, 19 nt, Artificial Sequence
  Description of Artificial Sequence: Synthetic oligonucleotide
cuuuaauccaggcucauaa

SEQ ID NO: 655856 - RNA, 19 nt, Artificial Sequence
  Description of Artificial Sequence: Synthetic oligonucleotide
aacccauguagcuaguaua

SEQ ID NO: 655857 - RNA, 19 nt, Artificial Sequence
  Description of Artificial Sequence: Synthetic oligonucleotide
cugcaguucauuguggagg

SEQ ID NO: 655858 - RNA, 19 nt, Artificial Sequence
  Description of Artificial Sequence: Synthetic oligonucleotide
aacuguuacccugauuuca

SEQ ID NO: 655859 - RNA, 19 nt, Artificial Sequence
  Description of Artificial Sequence: Synthetic oligonucleotide
guuacccugauuucagggc

SEQ ID NO: 655860 - RNA, 19 nt, Artificial Sequence
  Description of Artificial Sequence: Synthetic oligonucleotide
guagcuaguauaaauuuga

SEQ ID NO: 655861 - RNA, 19 nt, Artificial Sequence
  Description of Artificial Sequence: Synthetic oligonucleotide
uguagauacuggaggacuc

SEQ ID NO: 655862 - RNA, 19 nt, Artificial Sequence
  Description of Artificial Sequence: Synthetic oligonucleotide
gucuggguucuuuaggucc

SEQ ID NO: 655863 - RNA, 19 nt, Artificial Sequence
  Description of Artificial Sequence: Synthetic oligonucleotide
uuuggaaagcucugaggac

SEQ ID NO: 655864 - RNA, 19 nt, Artificial Sequence
  Description of Artificial Sequence: Synthetic oligonucleotide
cucagucacgauuuuguac

SEQ ID NO: 655865 - RNA, 19 nt, Artificial Sequence
  Description of Artificial Sequence: Synthetic oligonucleotide
ccaugauugaaccacuucc

SEQ ID NO: 655866 - RNA, 19 nt, Artificial Sequence
  Description of Artificial Sequence: Synthetic oligonucleotide
uccuaauuccuaaacccau

SEQ ID NO: 655867 - RNA, 19 nt, Artificial Sequence
  Description of Artificial Sequence: Synthetic oligonucleotide
gaauccguucauaauccag

SEQ ID NO: 655868 - RNA, 19 nt, Artificial Sequence
  Description of Artificial Sequence: Synthetic oligonucleotide
cuucuuaucagucacugua

SEQ ID NO: 655869 - RNA, 19 nt, Artificial Sequence
  Description of Artificial Sequence: Synthetic oligonucleotide
uuagguggauccugaagac

SEQ ID NO: 655870 - RNA, 19 nt, Artificial Sequence
  Description of Artificial Sequence: Synthetic oligonucleotide
gaucauauauauggaggug

SEQ ID NO: 655871 - RNA, 19 nt, Artificial Sequence
  Description of Artificial Sequence: Synthetic oligonucleotide
aacgagcuacuuccggaag

SEQ ID NO: 655872 - RNA, 19 nt, Artificial Sequence
  Description of Artificial Sequence: Synthetic oligonucleotide
auacuggaggacucucugg

SEQ ID NO: 655873 - RNA, 19 nt, Artificial Sequence
  Description of Artificial Sequence: Synthetic oligonucleotide
uuccuaaacccauguagcu

SEQ ID NO: 655874 - RNA, 19 nt, Artificial Sequence
  Description of Artificial Sequence: Synthetic oligonucleotide
acuauuuguucccugggua

SEQ ID NO: 655875 - RNA, 19 nt, Artificial Sequence
  Description of Artificial Sequence: Synthetic oligonucleotide
ugggguuucauccccucca

SEQ ID NO: 655876 - RNA, 19 nt, Artificial Sequence
  Description of Artificial Sequence: Synthetic oligonucleotide
ugacaucaacaacuguuac

SEQ ID NO: 655877 - RNA, 19 nt, Artificial Sequence
  Description of Artificial Sequence: Synthetic oligonucleotide
auaucuagacuuuggguuu

SEQ ID NO: 655878 - RNA, 19 nt, Artificial Sequence
  Description of Artificial Sequence: Synthetic oligonucleotide
acgauuuuguacccauuug

SEQ ID NO: 655879 - RNA, 19 nt, Artificial Sequence
  Description of Artificial Sequence: Synthetic oligonucleotide
uguggacaguuuguaaugc

SEQ ID NO: 655880 - RNA, 19 nt, Artificial Sequence
  Description of Artificial Sequence: Synthetic oligonucleotide
uuuaauccaggcucauaaa

SEQ ID NO: 655881 - RNA, 19 nt, Artificial Sequence
  Description of Artificial Sequence: Synthetic oligonucleotide
uucaaucuggaagccaaug

SEQ ID NO: 655882 - RNA, 19 nt, Artificial Sequence
  Description of Artificial Sequence: Synthetic oligonucleotide
ucggacagcgccuuacuac

SEQ ID NO: 655883 - RNA, 19 nt, Artificial Sequence
  Description of Artificial Sequence: Synthetic oligonucleotide
aaacacagauaaaauggaa

SEQ ID NO: 655884 - RNA, 19 nt, Artificial Sequence
  Description of Artificial Sequence: Synthetic oligonucleotide
aaagcucugaggaccaagu

SEQ ID NO: 655885 - RNA, 19 nt, Artificial Sequence
  Description of Artificial Sequence: Synthetic oligonucleotide
ugaaaugacguaucacauu

SEQ ID NO: 655886 - RNA, 19 nt, Artificial Sequence
  Description of Artificial Sequence: Synthetic oligonucleotide
caugauugaaccacuucca

SEQ ID NO: 655887 - RNA, 19 nt, Artificial Sequence
  Description of Artificial Sequence: Synthetic oligonucleotide
ccuaaacccauguagcuag

SEQ ID NO: 655888 - RNA, 19 nt, Artificial Sequence
  Description of Artificial Sequence: Synthetic oligonucleotide
cucgacaggauucuaccac

SEQ ID NO: 655889 - RNA, 19 nt, Artificial Sequence
  Description of Artificial Sequence: Synthetic oligonucleotide
uggacaguuuguaaugcua

SEQ ID NO: 655890 - RNA, 19 nt, Artificial Sequence
  Description of Artificial Sequence: Synthetic oligonucleotide
cauuguggaggccauccag

SEQ ID NO: 655891 - RNA, 19 nt, Artificial Sequence
  Description of Artificial Sequence: Synthetic oligonucleotide
uggauccugaagacuaaac

SEQ ID NO: 655892 - RNA, 19 nt, Artificial Sequence
  Description of Artificial Sequence: Synthetic oligonucleotide
ucuuguuagguggauccug

SEQ ID NO: 655893 - RNA, 19 nt, Artificial Sequence
  Description of Artificial Sequence: Synthetic oligonucleotide
acguaucacauuaaaauaa

SEQ ID NO: 655894 - RNA, 19 nt, Artificial Sequence
  Description of Artificial Sequence: Synthetic oligonucleotide
gacgcgucguccaucaaag

SEQ ID NO: 655895 - RNA, 19 nt, Artificial Sequence
  Description of Artificial Sequence: Synthetic oligonucleotide
ucacuguauuaaacaagcu

SEQ ID NO: 655896 - RNA, 19 nt, Artificial Sequence
  Description of Artificial Sequence: Synthetic oligonucleotide
ucgacaggauucuaccacu

SEQ ID NO: 655897 - RNA, 19 nt, Artificial Sequence
  Description of Artificial Sequence: Synthetic oligonucleotide
aagggcaugggcgccauca

SEQ ID NO: 655898 - RNA, 19 nt, Artificial Sequence
  Description of Artificial Sequence: Synthetic oligonucleotide
acuaccaagcccgaaggcu

SEQ ID NO: 655899 - RNA, 19 nt, Artificial Sequence
  Description of Artificial Sequence: Synthetic oligonucleotide
cugaagacuaaacuuugga

SEQ ID NO: 655900 - RNA, 19 nt, Artificial Sequence
  Description of Artificial Sequence: Synthetic oligonucleotide
agcacugauggaguuaaug

SEQ ID NO: 655901 - RNA, 19 nt, Artificial Sequence
  Description of Artificial Sequence: Synthetic oligonucleotide
cuaccaagcccgaaggcuc

SEQ ID NO: 655902 - RNA, 19 nt, Artificial Sequence
  Description of Artificial Sequence: Synthetic oligonucleotide
uacuaccaagcccgaaggc

SEQ ID NO: 655903 - RNA, 19 nt, Artificial Sequence
  Description of Artificial Sequence: Synthetic oligonucleotide
guaacgagcuacuuccgga

SEQ ID NO: 655904 - RNA, 19 nt, Artificial Sequence
  Description of Artificial Sequence: Synthetic oligonucleotide
ugggcccaccaacauagcc

SEQ ID NO: 655905 - RNA, 19 nt, Artificial Sequence
  Description of Artificial Sequence: Synthetic oligonucleotide
ucuaugaccugcugccagu

SEQ ID NO: 655906 - RNA, 19 nt, Artificial Sequence
  Description of Artificial Sequence: Synthetic oligonucleotide
uuccaaggcgggagcacgg

SEQ ID NO: 655907 - RNA, 19 nt, Artificial Sequence
  Description of Artificial Sequence: Synthetic oligonucleotide
agcaaugacacugcaugug

SEQ ID NO: 655908 - RNA, 19 nt, Artificial Sequence
  Description of Artificial Sequence: Synthetic oligonucleotide
acuguuacccugauuucag

SEQ ID NO: 655909 - RNA, 19 nt, Artificial Sequence
  Description of Artificial Sequence: Synthetic oligonucleotide
auauacggcggaugcucuc

SEQ ID NO: 655910 - RNA, 19 nt, Artificial Sequence
  Description of Artificial Sequence: Synthetic oligonucleotide
caaucaggacucugucugg

SEQ ID NO: 655911 - RNA, 19 nt, Artificial Sequence
  Description of Artificial Sequence: Synthetic oligonucleotide
gucuaugaccugcugccag

SEQ ID NO: 655912 - RNA, 19 nt, Artificial Sequence
  Description of Artificial Sequence: Synthetic oligonucleotide
uaacgagcuacuuccggaa

SEQ ID NO: 655913 - RNA, 19 nt, Artificial Sequence
  Description of Artificial Sequence: Synthetic oligonucleotide
cauaguagcacagugauuu

SEQ ID NO: 655914 - RNA, 19 nt, Artificial Sequence
  Description of Artificial Sequence: Synthetic oligonucleotide
cacuguauuaaacaagcua

SEQ ID NO: 655915 - RNA, 19 nt, Artificial Sequence
  Description of Artificial Sequence: Synthetic oligonucleotide
uaguagcacagugauuuca

SEQ ID NO: 655916 - RNA, 19 nt, Artificial Sequence
  Description of Artificial Sequence: Synthetic oligonucleotide
gcacauaugagcaaugaca

SEQ ID NO: 655917 - RNA, 19 nt, Artificial Sequence
  Description of Artificial Sequence: Synthetic oligonucleotide
ucuucuuaucagucacugu

SEQ ID NO: 655918 - RNA, 19 nt, Artificial Sequence
  Description of Artificial Sequence: Synthetic oligonucleotide
cagagugaaaugacguauc

SEQ ID NO: 655919 - RNA, 19 nt, Artificial Sequence
  Description of Artificial Sequence: Synthetic oligonucleotide
aaaaccgacacuggcuuuu

SEQ ID NO: 655920 - RNA, 19 nt, Artificial Sequence
  Description of Artificial Sequence: Synthetic oligonucleotide
ugauuguuuugcauccauu

SEQ ID NO: 655921 - RNA, 19 nt, Artificial Sequence
  Description of Artificial Sequence: Synthetic oligonucleotide
cugguagucauucaugucu

SEQ ID NO: 655922 - RNA, 19 nt, Artificial Sequence
  Description of Artificial Sequence: Synthetic oligonucleotide
uagauuccuaauuccuaaa

SEQ ID NO: 655923 - RNA, 19 nt, Artificial Sequence
  Description of Artificial Sequence: Synthetic oligonucleotide
cuuuaaccagcccauagua

SEQ ID NO: 655924 - RNA, 19 nt, Artificial Sequence
  Description of Artificial Sequence: Synthetic oligonucleotide
ugcagagugaaaugacgua

SEQ ID NO: 655925 - RNA, 19 nt, Artificial Sequence
  Description of Artificial Sequence: Synthetic oligonucleotide
accgacacuggcuuuuaga

SEQ ID NO: 655926 - RNA, 19 nt, Artificial Sequence
  Description of Artificial Sequence: Synthetic oligonucleotide
ucauuguggaggccaucca

SEQ ID NO: 655927 - RNA, 19 nt, Artificial Sequence
  Description of Artificial Sequence: Synthetic oligonucleotide
cuuguuagguggauccuga

SEQ ID NO: 655928 - RNA, 19 nt, Artificial Sequence
  Description of Artificial Sequence: Synthetic oligonucleotide
caccagucuggacacuugg

SEQ ID NO: 655929 - RNA, 19 nt, Artificial Sequence
  Description of Artificial Sequence: Synthetic oligonucleotide
gcuucauauggauccuugg

SEQ ID NO: 655930 - RNA, 19 nt, Artificial Sequence
  Description of Artificial Sequence: Synthetic oligonucleotide
cuguuacccugauuucagg

SEQ ID NO: 655931 - RNA, 19 nt, Artificial Sequence
  Description of Artificial Sequence: Synthetic oligonucleotide
aaaguacagagaacuuuaa

SEQ ID NO: 655932 - RNA, 19 nt, Artificial Sequence
  Description of Artificial Sequence: Synthetic oligonucleotide
cuaugauccucgaagcaaa

SEQ ID NO: 655933 - RNA, 19 nt, Artificial Sequence
  Description of Artificial Sequence: Synthetic oligonucleotide
ucccaauagcuguugccac

SEQ ID NO: 655934 - RNA, 19 nt, Artificial Sequence
  Description of Artificial Sequence: Synthetic oligonucleotide
aggaccaaguguugguggu

SEQ ID NO: 655935 - RNA, 19 nt, Artificial Sequence
  Description of Artificial Sequence: Synthetic oligonucleotide
uaauuccuagauuccuaau

SEQ ID NO: 655936 - RNA, 19 nt, Artificial Sequence
  Description of Artificial Sequence: Synthetic oligonucleotide
cucauaaauaggaaggguu

SEQ ID NO: 655937 - RNA, 19 nt, Artificial Sequence
  Description of Artificial Sequence: Synthetic oligonucleotide
cauacacagcacagagcgc

SEQ ID NO: 655938 - RNA, 19 nt, Artificial Sequence
  Description of Artificial Sequence: Synthetic oligonucleotide
ucccucgacaggauucuac

SEQ ID NO: 655939 - RNA, 19 nt, Artificial Sequence
  Description of Artificial Sequence: Synthetic oligonucleotide
auuucaccaggaguguaug

SEQ ID NO: 655940 - RNA, 19 nt, Artificial Sequence
  Description of Artificial Sequence: Synthetic oligonucleotide
accaaaaccgacacuggcu

SEQ ID NO: 655941 - RNA, 19 nt, Artificial Sequence
  Description of Artificial Sequence: Synthetic oligonucleotide
gacuaaacuuuggaauuuc

SEQ ID NO: 655942 - RNA, 19 nt, Artificial Sequence
  Description of Artificial Sequence: Synthetic oligonucleotide
uauacggcggaugcucucu

SEQ ID NO: 655943 - RNA, 19 nt, Artificial Sequence
  Description of Artificial Sequence: Synthetic oligonucleotide
augcaaaccccaagauagc

SEQ ID NO: 655944 - RNA, 19 nt, Artificial Sequence
  Description of Artificial Sequence: Synthetic oligonucleotide
caagauagcuaucuucuua

SEQ ID NO: 655945 - RNA, 19 nt, Artificial Sequence
  Description of Artificial Sequence: Synthetic oligonucleotide
caugggcgccaucacacgc

SEQ ID NO: 655946 - RNA, 19 nt, Artificial Sequence
  Description of Artificial Sequence: Synthetic oligonucleotide
uaaugcugcugauccucug

SEQ ID NO: 655947 - RNA, 19 nt, Artificial Sequence
  Description of Artificial Sequence: Synthetic oligonucleotide
ggaucauauauauggaggu

SEQ ID NO: 655948 - RNA, 19 nt, Artificial Sequence
  Description of Artificial Sequence: Synthetic oligonucleotide
aacaacuguuacccugauu

SEQ ID NO: 655949 - RNA, 19 nt, Artificial Sequence
  Description of Artificial Sequence: Synthetic oligonucleotide
acuaaacuuuggaauuuca

SEQ ID NO: 655950 - RNA, 19 nt, Artificial Sequence
  Description of Artificial Sequence: Synthetic oligonucleotide
caguaacgagcuacuuccg

SEQ ID NO: 655951 - RNA, 19 nt, Artificial Sequence
  Description of Artificial Sequence: Synthetic oligonucleotide
acagcgccuuacuaccaag

SEQ ID NO: 655952 - RNA, 19 nt, Artificial Sequence
  Description of Artificial Sequence: Synthetic oligonucleotide
uccggaagauucagagccu

SEQ ID NO: 655953 - RNA, 19 nt, Artificial Sequence
  Description of Artificial Sequence: Synthetic oligonucleotide
caaggcgggagcacggcug

SEQ ID NO: 655954 - RNA, 19 nt, Artificial Sequence
  Description of Artificial Sequence: Synthetic oligonucleotide
uccuaaacccauguagcua

SEQ ID NO: 655955 - RNA, 19 nt, Artificial Sequence
  Description of Artificial Sequence: Synthetic oligonucleotide
gauccucgaagcaaaccuc

SEQ ID NO: 655956 - RNA, 19 nt, Artificial Sequence
  Description of Artificial Sequence: Synthetic oligonucleotide
acugcaugugggcccacca

SEQ ID NO: 655957 - RNA, 19 nt, Artificial Sequence
  Description of Artificial Sequence: Synthetic oligonucleotide
augacguaucacauuaaaa

SEQ ID NO: 655958 - RNA, 19 nt, Artificial Sequence
  Description of Artificial Sequence: Synthetic oligonucleotide
cagcgccuuacuaccaagc

SEQ ID NO: 655959 - RNA, 19 nt, Artificial Sequence
  Description of Artificial Sequence: Synthetic oligonucleotide
cagucacgauuuuguaccc

SEQ ID NO: 655960 - RNA, 19 nt, Artificial Sequence
  Description of Artificial Sequence: Synthetic oligonucleotide
acaagacugccuuucccuu

SEQ ID NO: 655961 - RNA, 19 nt, Artificial Sequence
  Description of Artificial Sequence: Synthetic oligonucleotide
ggaaggguuggagaauucc

SEQ ID NO: 655962 - RNA, 19 nt, Artificial Sequence
  Description of Artificial Sequence: Synthetic oligonucleotide
aacucaggguuggacagua

SEQ ID NO: 655963 - RNA, 19 nt, Artificial Sequence
  Description of Artificial Sequence: Synthetic oligonucleotide
gugcucauacacagcacag

SEQ ID NO: 655964 - RNA, 19 nt, Artificial Sequence
  Description of Artificial Sequence: Synthetic oligonucleotide
auacuaggucagcuucucu

SEQ ID NO: 655965 - RNA, 19 nt, Artificial Sequence
  Description of Artificial Sequence: Synthetic oligonucleotide
guaucacauuaaaauaaaa

SEQ ID NO: 655966 - RNA, 19 nt, Artificial Sequence
  Description of Artificial Sequence: Synthetic oligonucleotide
ggacaguaccugcaaauuc

SEQ ID NO: 655967 - RNA, 19 nt, Artificial Sequence
  Description of Artificial Sequence: Synthetic oligonucleotide
cuugggaacccagugcuca

SEQ ID NO: 655968 - RNA, 19 nt, Artificial Sequence
  Description of Artificial Sequence: Synthetic oligonucleotide
cuacuuccggaagauucag

SEQ ID NO: 655969 - RNA, 19 nt, Artificial Sequence
  Description of Artificial Sequence: Synthetic oligonucleotide
cauguuaagcaggggagga

SEQ ID NO: 655970 - RNA, 19 nt, Artificial Sequence
  Description of Artificial Sequence: Synthetic oligonucleotide
uaugaccugcugccaguaa

SEQ ID NO: 655971 - RNA, 19 nt, Artificial Sequence
  Description of Artificial Sequence: Synthetic oligonucleotide
uucggacagcgccuuacua

SEQ ID NO: 655972 - RNA, 19 nt, Artificial Sequence
  Description of Artificial Sequence: Synthetic oligonucleotide
agacuaaacuuuggaauuu

SEQ ID NO: 655973 - RNA, 19 nt, Artificial Sequence
  Description of Artificial Sequence: Synthetic oligonucleotide
accaaguguuggugguaag

SEQ ID NO: 655974 - RNA, 19 nt, Artificial Sequence
  Description of Artificial Sequence: Synthetic oligonucleotide
gcuacucugaaguaccaaa

SEQ ID NO: 655975 - RNA, 19 nt, Artificial Sequence
  Description of Artificial Sequence: Synthetic oligonucleotide
uggacaguaccugcaaauu

SEQ ID NO: 655976 - RNA, 19 nt, Artificial Sequence
  Description of Artificial Sequence: Synthetic oligonucleotide
ccuaauuccuaaacccaug

SEQ ID NO: 655977 - RNA, 19 nt, Artificial Sequence
  Description of Artificial Sequence: Synthetic oligonucleotide
uucuuguuagguggauccu

SEQ ID NO: 655978 - RNA, 19 nt, Artificial Sequence
  Description of Artificial Sequence: Synthetic oligonucleotide
ggauccugaagacuaaacu

SEQ ID NO: 655979 - RNA, 19 nt, Artificial Sequence
  Description of Artificial Sequence: Synthetic oligonucleotide
agagcgcccgcacagcuuu

SEQ ID NO: 655980 - RNA, 19 nt, Artificial Sequence
  Description of Artificial Sequence: Synthetic oligonucleotide
uaacaagggcaugggcgcc

SEQ ID NO: 655981 - RNA, 19 nt, Artificial Sequence
  Description of Artificial Sequence: Synthetic oligonucleotide
caggguuggacaguaccug

SEQ ID NO: 655982 - RNA, 19 nt, Artificial Sequence
  Description of Artificial Sequence: Synthetic oligonucleotide
agcuaucuaugauccucga

SEQ ID NO: 655983 - RNA, 19 nt, Artificial Sequence
  Description of Artificial Sequence: Synthetic oligonucleotide
ggcccaccaacauagccug

SEQ ID NO: 655984 - RNA, 19 nt, Artificial Sequence
  Description of Artificial Sequence: Synthetic oligonucleotide
cccucugccaagaacucag

SEQ ID NO: 655985 - RNA, 19 nt, Artificial Sequence
  Description of Artificial Sequence: Synthetic oligonucleotide
uaaacccauguagcuagua

SEQ ID NO: 655986 - RNA, 19 nt, Artificial Sequence
  Description of Artificial Sequence: Synthetic oligonucleotide
cacagagauacacuaaauu

SEQ ID NO: 655987 - RNA, 19 nt, Artificial Sequence
  Description of Artificial Sequence: Synthetic oligonucleotide
guuggacaguaccugcaaa

SEQ ID NO: 655988 - RNA, 19 nt, Artificial Sequence
  Description of Artificial Sequence: Synthetic oligonucleotide
gagcaaugacacugcaugu

SEQ ID NO: 655989 - RNA, 19 nt, Artificial Sequence
  Description of Artificial Sequence: Synthetic oligonucleotide
gaccaaguguuggugguaa

SEQ ID NO: 655990 - RNA, 19 nt, Artificial Sequence
  Description of Artificial Sequence: Synthetic oligonucleotide
gcgccuuacuaccaagccc

SEQ ID NO: 655991 - RNA, 19 nt, Artificial Sequence
  Description of Artificial Sequence: Synthetic oligonucleotide
aaccacuuccaaggcggga

SEQ ID NO: 655992 - RNA, 19 nt, Artificial Sequence
  Description of Artificial Sequence: Synthetic oligonucleotide
aaccaugauugaaccacuu

SEQ ID NO: 655993 - RNA, 19 nt, Artificial Sequence
  Description of Artificial Sequence: Synthetic oligonucleotide
cccaauagcuguugccacc

SEQ ID NO: 655994 - RNA, 19 nt, Artificial Sequence
  Description of Artificial Sequence: Synthetic oligonucleotide
gacagcgccuuacuaccaa

SEQ ID NO: 655995 - RNA, 19 nt, Artificial Sequence
  Description of Artificial Sequence: Synthetic oligonucleotide
gcacagagcgcccgcacag

SEQ ID NO: 655996 - RNA, 19 nt, Artificial Sequence
  Description of Artificial Sequence: Synthetic oligonucleotide
auacggcggaugcucucug

SEQ ID NO: 655997 - RNA, 19 nt, Artificial Sequence
  Description of Artificial Sequence: Synthetic oligonucleotide
cuguucguucggacagcgc

SEQ ID NO: 655998 - RNA, 19 nt, Artificial Sequence
  Description of Artificial Sequence: Synthetic oligonucleotide
ccccaagauagcuaucuuc

SEQ ID NO: 655999 - RNA, 19 nt, Artificial Sequence
  Description of Artificial Sequence: Synthetic oligonucleotide
cacaaugcgucgagcacaa

SEQ ID NO: 656000 - RNA, 19 nt, Artificial Sequence
  Description of Artificial Sequence: Synthetic oligonucleotide
gugaaaugacguaucacau

SEQ ID NO: 656001 - RNA, 19 nt, Artificial Sequence
  Description of Artificial Sequence: Synthetic oligonucleotide
aggaaggguuggagaauuc

SEQ ID NO: 656002 - RNA, 19 nt, Artificial Sequence
  Description of Artificial Sequence: Synthetic oligonucleotide
ccaccaaaaccgacacugg

SEQ ID NO: 656003 - RNA, 19 nt, Artificial Sequence
  Description of Artificial Sequence: Synthetic oligonucleotide
cccaagauagcuaucuucu

SEQ ID NO: 656004 - RNA, 19 nt, Artificial Sequence
  Description of Artificial Sequence: Synthetic oligonucleotide
ugccgcucggguccuguuc

SEQ ID NO: 656005 - RNA, 19 nt, Artificial Sequence
  Description of Artificial Sequence: Synthetic oligonucleotide
augugggcccaccaacaua

SEQ ID NO: 656006 - RNA, 19 nt, Artificial Sequence
  Description of Artificial Sequence: Synthetic oligonucleotide
auguuaagcaggggaggaa

SEQ ID NO: 656007 - RNA, 19 nt, Artificial Sequence
  Description of Artificial Sequence: Synthetic oligonucleotide
ggagaauuccaugcauuga

SEQ ID NO: 656008 - RNA, 19 nt, Artificial Sequence
  Description of Artificial Sequence: Synthetic oligonucleotide
aucacacgcuucauaugga

SEQ ID NO: 656009 - RNA, 19 nt, Artificial Sequence
  Description of Artificial Sequence: Synthetic oligonucleotide
caggacgcgucguccauca

SEQ ID NO: 656010 - RNA, 19 nt, Artificial Sequence
  Description of Artificial Sequence: Synthetic oligonucleotide
cacgauuuuguacccauuu

SEQ ID NO: 656011 - RNA, 19 nt, Artificial Sequence
  Description of Artificial Sequence: Synthetic oligonucleotide
caugauuguuuugcaucca

SEQ ID NO: 656012 - RNA, 19 nt, Artificial Sequence
  Description of Artificial Sequence: Synthetic oligonucleotide
gcuacuuccggaagauuca

SEQ ID NO: 656013 - RNA, 19 nt, Artificial Sequence
  Description of Artificial Sequence: Synthetic oligonucleotide
aaaccgacacuggcuuuua

SEQ ID NO: 656014 - RNA, 19 nt, Artificial Sequence
  Description of Artificial Sequence: Synthetic oligonucleotide
gcaugggcgccaucacacg

SEQ ID NO: 656015 - RNA, 19 nt, Artificial Sequence
  Description of Artificial Sequence: Synthetic oligonucleotide
ccgacacuggcuuuuagaa

SEQ ID NO: 656016 - RNA, 19 nt, Artificial Sequence
  Description of Artificial Sequence: Synthetic oligonucleotide
augcgucgagcacaagcuu

SEQ ID NO: 656017 - RNA, 19 nt, Artificial Sequence
  Description of Artificial Sequence: Synthetic oligonucleotide
aucuagacuuuggguuucu

SEQ ID NO: 656018 - RNA, 19 nt, Artificial Sequence
  Description of Artificial Sequence: Synthetic oligonucleotide
gcuaucuaugauccucgaa

SEQ ID NO: 656019 - RNA, 19 nt, Artificial Sequence
  Description of Artificial Sequence: Synthetic oligonucleotide
caaccaugauugaaccacu

SEQ ID NO: 656020 - RNA, 19 nt, Artificial Sequence
  Description of Artificial Sequence: Synthetic oligonucleotide
gaacuuuaaccagcccaua

SEQ ID NO: 656021 - RNA, 19 nt, Artificial Sequence
  Description of Artificial Sequence: Synthetic oligonucleotide
uucguucggacagcgccuu

SEQ ID NO: 656022 - RNA, 19 nt, Artificial Sequence
  Description of Artificial Sequence: Synthetic oligonucleotide
cacagagcgcccgcacagc

SEQ ID NO: 656023 - RNA, 19 nt, Artificial Sequence
  Description of Artificial Sequence: Synthetic oligonucleotide
ggacgcgucguccaucaaa

SEQ ID NO: 656024 - RNA, 19 nt, Artificial Sequence
  Description of Artificial Sequence: Synthetic oligonucleotide
gcaacagaucuucuuaauu

SEQ ID NO: 656025 - RNA, 19 nt, Artificial Sequence
  Description of Artificial Sequence: Synthetic oligonucleotide
cacugcaugugggcccacc

SEQ ID NO: 656026 - RNA, 19 nt, Artificial Sequence
  Description of Artificial Sequence: Synthetic oligonucleotide
caaauauacggcggaugcu

SEQ ID NO: 656027 - RNA, 19 nt, Artificial Sequence
  Description of Artificial Sequence: Synthetic oligonucleotide
acccugauuucagggcaca

SEQ ID NO: 656028 - RNA, 19 nt, Artificial Sequence
  Description of Artificial Sequence: Synthetic oligonucleotide
augucccauucagugcaga

SEQ ID NO: 656029 - RNA, 19 nt, Artificial Sequence
  Description of Artificial Sequence: Synthetic oligonucleotide
acgcgucguccaucaaaga

SEQ ID NO: 656030 - RNA, 19 nt, Artificial Sequence
  Description of Artificial Sequence: Synthetic oligonucleotide
gcagagugaaaugacguau

SEQ ID NO: 656031 - RNA, 19 nt, Artificial Sequence
  Description of Artificial Sequence: Synthetic oligonucleotide
caacauagccugcaccaau

SEQ ID NO: 656032 - RNA, 19 nt, Artificial Sequence
  Description of Artificial Sequence: Synthetic oligonucleotide
ugccaguaacgagcuacuu

SEQ ID NO: 656033 - RNA, 19 nt, Artificial Sequence
  Description of Artificial Sequence: Synthetic oligonucleotide
ggauucuaccacuuccuuu

SEQ ID NO: 656034 - RNA, 19 nt, Artificial Sequence
  Description of Artificial Sequence: Synthetic oligonucleotide
guggauccugaagacuaaa

SEQ ID NO: 656035 - RNA, 19 nt, Artificial Sequence
  Description of Artificial Sequence: Synthetic oligonucleotide
gcucggguccuguucguuc

SEQ ID NO: 656036 - RNA, 19 nt, Artificial Sequence
  Description of Artificial Sequence: Synthetic oligonucleotide
gcucauaaauaggaagggu

SEQ ID NO: 656037 - RNA, 19 nt, Artificial Sequence
  Description of Artificial Sequence: Synthetic oligonucleotide
auauggaggugugcaccuu

SEQ ID NO: 656038 - RNA, 19 nt, Artificial Sequence
  Description of Artificial Sequence: Synthetic oligonucleotide
guucggacagcgccuuacu

SEQ ID NO: 656039 - RNA, 19 nt, Artificial Sequence
  Description of Artificial Sequence: Synthetic oligonucleotide
ggaacccagugcucauaca

SEQ ID NO: 656040 - RNA, 19 nt, Artificial Sequence
  Description of Artificial Sequence: Synthetic oligonucleotide
gcggaugcucucugcugcc

SEQ ID NO: 656041 - RNA, 19 nt, Artificial Sequence
  Description of Artificial Sequence: Synthetic oligonucleotide
cugccaguaacgagcuacu

SEQ ID NO: 656042 - RNA, 19 nt, Artificial Sequence
  Description of Artificial Sequence: Synthetic oligonucleotide
guucguucggacagcgccu

SEQ ID NO: 656043 - RNA, 19 nt, Artificial Sequence
  Description of Artificial Sequence: Synthetic oligonucleotide
cuaaacccauguagcuagu

SEQ ID NO: 656044 - RNA, 19 nt, Artificial Sequence
  Description of Artificial Sequence: Synthetic oligonucleotide
gccccuguugcuucacaca

SEQ ID NO: 656045 - RNA, 19 nt, Artificial Sequence
  Description of Artificial Sequence: Synthetic oligonucleotide
gaacucaggguuggacagu

SEQ ID NO: 656046 - RNA, 19 nt, Artificial Sequence
  Description of Artificial Sequence: Synthetic oligonucleotide
ggguuggacaguaccugca

SEQ ID NO: 656047 - RNA, 19 nt, Artificial Sequence
  Description of Artificial Sequence: Synthetic oligonucleotide
ucguucggacagcgccuua

SEQ ID NO: 656048 - RNA, 19 nt, Artificial Sequence
  Description of Artificial Sequence: Synthetic oligonucleotide
gcaaaccccaagauagcua

SEQ ID NO: 656049 - RNA, 19 nt, Artificial Sequence
  Description of Artificial Sequence: Synthetic oligonucleotide
gcgucgagcacaagcuuca

SEQ ID NO: 656050 - RNA, 19 nt, Artificial Sequence
  Description of Artificial Sequence: Synthetic oligonucleotide
cccgcacagcuuucuggcc

SEQ ID NO: 656051 - RNA, 19 nt, Artificial Sequence
  Description of Artificial Sequence: Synthetic oligonucleotide
ccggaagauucagagccuc

SEQ ID NO: 656052 - RNA, 19 nt, Artificial Sequence
  Description of Artificial Sequence: Synthetic oligonucleotide
ggaguguaugggauucucu

SEQ ID NO: 656053 - RNA, 19 nt, Artificial Sequence
  Description of Artificial Sequence: Synthetic oligonucleotide
caugugggcccaccaacau

SEQ ID NO: 656054 - RNA, 19 nt, Artificial Sequence
  Description of Artificial Sequence: Synthetic oligonucleotide
ccaaaaccgacacuggcuu

SEQ ID NO: 656055 - RNA, 19 nt, Artificial Sequence
  Description of Artificial Sequence: Synthetic oligonucleotide
uucccucgacaggauucua

SEQ ID NO: 656056 - RNA, 19 nt, Artificial Sequence
  Description of Artificial Sequence: Synthetic oligonucleotide
caaaaccgacacuggcuuu

SEQ ID NO: 656057 - RNA, 19 nt, Artificial Sequence
  Description of Artificial Sequence: Synthetic oligonucleotide
gguagucauucaugucuau

SEQ ID NO: 656058 - RNA, 19 nt, Artificial Sequence
  Description of Artificial Sequence: Synthetic oligonucleotide
cguucggacagcgccuuac

SEQ ID NO: 656059 - RNA, 19 nt, Artificial Sequence
  Description of Artificial Sequence: Synthetic oligonucleotide
aggacgcgucguccaucaa

SEQ ID NO: 656060 - RNA, 19 nt, Artificial Sequence
  Description of Artificial Sequence: Synthetic oligonucleotide
ggacagcgccuuacuacca

SEQ ID NO: 656061 - RNA, 19 nt, Artificial Sequence
  Description of Artificial Sequence: Synthetic oligonucleotide
cauuugaguuuugcacaau

SEQ ID NO: 656062 - RNA, 19 nt, Artificial Sequence
  Description of Artificial Sequence: Synthetic oligonucleotide
ccaacauagccugcaccaa

SEQ ID NO: 656063 - RNA, 19 nt, Artificial Sequence
  Description of Artificial Sequence: Synthetic oligonucleotide
ccaaugcaacagaucuucu

SEQ ID NO: 656064 - RNA, 19 nt, Artificial Sequence
  Description of Artificial Sequence: Synthetic oligonucleotide
ccuuuaauccaggcucaua

SEQ ID NO: 656065 - RNA, 19 nt, Artificial Sequence
  Description of Artificial Sequence: Synthetic oligonucleotide
gagcuacuuccggaagauu

SEQ ID NO: 656066 - RNA, 19 nt, Artificial Sequence
  Description of Artificial Sequence: Synthetic oligonucleotide
gagcgcccgcacagcuuuc

SEQ ID NO: 656067 - RNA, 19 nt, Artificial Sequence
  Description of Artificial Sequence: Synthetic oligonucleotide
ccaggacgcgucguccauc

SEQ ID NO: 656068 - RNA, 19 nt, Artificial Sequence
  Description of Artificial Sequence: Synthetic oligonucleotide
ccaagaacucaggguugga

SEQ ID NO: 656069 - RNA, 19 nt, Artificial Sequence
  Description of Artificial Sequence: Synthetic oligonucleotide
gccuuacuaccaagcccga

SEQ ID NO: 656070 - RNA, 19 nt, Artificial Sequence
  Description of Artificial Sequence: Synthetic oligonucleotide
cagagcgcccgcacagcuu

SEQ ID NO: 656071 - RNA, 19 nt, Artificial Sequence
  Description of Artificial Sequence: Synthetic oligonucleotide
ccauaguagcacagugauu

SEQ ID NO: 656072 - RNA, 19 nt, Artificial Sequence
  Description of Artificial Sequence: Synthetic oligonucleotide
cccgcacagggacugugcu

SEQ ID NO: 656073 - RNA, 19 nt, Artificial Sequence
  Description of Artificial Sequence: Synthetic oligonucleotide
ccaaggcgggagcacggcu

SEQ ID NO: 656074 - RNA, 19 nt, Artificial Sequence
  Description of Artificial Sequence: Synthetic oligonucleotide
gggcgccaucacacgcuuc

SEQ ID NO: 656075 - RNA, 19 nt, Artificial Sequence
  Description of Artificial Sequence: Synthetic oligonucleotide
cggguccuguucguucgga

SEQ ID NO: 656076 - RNA, 19 nt, Artificial Sequence
  Description of Artificial Sequence: Synthetic oligonucleotide
cugcccgcacagggacugu

SEQ ID NO: 656077 - RNA, 19 nt, Artificial Sequence
  Description of Artificial Sequence: Synthetic oligonucleotide
cgucgagcacaagcuucaa

SEQ ID NO: 656078 - RNA, 19 nt, Artificial Sequence
  Description of Artificial Sequence: Synthetic oligonucleotide
gcgccaucacacgcuucau

SEQ ID NO: 656079 - RNA, 19 nt, Artificial Sequence
  Description of Artificial Sequence: Synthetic oligonucleotide
ccgcucggguccuguucgu

SEQ ID NO: 656080 - RNA, 19 nt, Artificial Sequence
  Description of Artificial Sequence: Synthetic oligonucleotide
cgcucggguccuguucguu

SEQ ID NO: 656081 - RNA, 19 nt, Artificial Sequence
  Description of Artificial Sequence: Synthetic oligonucleotide
acuacugucaaacaguagc

SEQ ID NO: 656082 - RNA, 19 nt, Artificial Sequence
  Description of Artificial Sequence: Synthetic oligonucleotide
agauauuucgaauagagug

SEQ ID NO: 656083 - RNA, 19 nt, Artificial Sequence
  Description of Artificial Sequence: Synthetic oligonucleotide
aucacauugguccugaugg

SEQ ID NO: 656084 - RNA, 19 nt, Artificial Sequence
  Description of Artificial Sequence: Synthetic oligonucleotide
acacaaaauggccauaacc

SEQ ID NO: 656085 - RNA, 19 nt, Artificial Sequence
  Description of Artificial Sequence: Synthetic oligonucleotide
aaagugucuaauugguuac

SEQ ID NO: 656086 - RNA, 19 nt, Artificial Sequence
  Description of Artificial Sequence: Synthetic oligonucleotide
ugaguuucagcacacgagg

SEQ ID NO: 656087 - RNA, 19 nt, Artificial Sequence
  Description of Artificial Sequence: Synthetic oligonucleotide
aaugcacucaucucacuac

SEQ ID NO: 656088 - RNA, 19 nt, Artificial Sequence
  Description of Artificial Sequence: Synthetic oligonucleotide
gauauuucgaauagagugg

SEQ ID NO: 656089 - RNA, 19 nt, Artificial Sequence
  Description of Artificial Sequence: Synthetic oligonucleotide
uuucuggauagauauuucg

SEQ ID NO: 656090 - RNA, 19 nt, Artificial Sequence
  Description of Artificial Sequence: Synthetic oligonucleotide
agagaauugauucacuggu

SEQ ID NO: 656091 - RNA, 19 nt, Artificial Sequence
  Description of Artificial Sequence: Synthetic oligonucleotide
caacuugucccuaacaugc

SEQ ID NO: 656092 - RNA, 19 nt, Artificial Sequence
  Description of Artificial Sequence: Synthetic oligonucleotide
agaauugauucacugguag

SEQ ID NO: 656093 - RNA, 19 nt, Artificial Sequence
  Description of Artificial Sequence: Synthetic oligonucleotide
auagauauuucgaauagag

SEQ ID NO: 656094 - RNA, 19 nt, Artificial Sequence
  Description of Artificial Sequence: Synthetic oligonucleotide
uguagaaaguucuggaaga

SEQ ID NO: 656095 - RNA, 19 nt, Artificial Sequence
  Description of Artificial Sequence: Synthetic oligonucleotide
gagagaauugauucacugg

SEQ ID NO: 656096 - RNA, 19 nt, Artificial Sequence
  Description of Artificial Sequence: Synthetic oligonucleotide
uugacauccauguagccug

SEQ ID NO: 656097 - RNA, 19 nt, Artificial Sequence
  Description of Artificial Sequence: Synthetic oligonucleotide
uuucgaauagaguggauca

SEQ ID NO: 656098 - RNA, 19 nt, Artificial Sequence
  Description of Artificial Sequence: Synthetic oligonucleotide
ugaagugucuucaggcugg

SEQ ID NO: 656099 - RNA, 19 nt, Artificial Sequence
  Description of Artificial Sequence: Synthetic oligonucleotide
gagccuaagaggcaguugg

SEQ ID NO: 656100 - RNA, 19 nt, Artificial Sequence
  Description of Artificial Sequence: Synthetic oligonucleotide
ucgagaacaaagcaguaca

SEQ ID NO: 656101 - RNA, 19 nt, Artificial Sequence
  Description of Artificial Sequence: Synthetic oligonucleotide
uuguucaucguucugcgug

SEQ ID NO: 656102 - RNA, 19 nt, Artificial Sequence
  Description of Artificial Sequence: Synthetic oligonucleotide
agggguccgacucaaaggc

SEQ ID NO: 656103 - RNA, 19 nt, Artificial Sequence
  Description of Artificial Sequence: Synthetic oligonucleotide
uugaguuucagcacacgag

SEQ ID NO: 656104 - RNA, 19 nt, Artificial Sequence
  Description of Artificial Sequence: Synthetic oligonucleotide
auaauuagaacaguaaaau

SEQ ID NO: 656105 - RNA, 19 nt, Artificial Sequence
  Description of Artificial Sequence: Synthetic oligonucleotide
uaaagugucuaauugguua

SEQ ID NO: 656106 - RNA, 19 nt, Artificial Sequence
  Description of Artificial Sequence: Synthetic oligonucleotide
cacuaaagugucuaauugg

SEQ ID NO: 656107 - RNA, 19 nt, Artificial Sequence
  Description of Artificial Sequence: Synthetic oligonucleotide
aagugggcccaccaugugc

SEQ ID NO: 656108 - RNA, 19 nt, Artificial Sequence
  Description of Artificial Sequence: Synthetic oligonucleotide
accaggaccacaaagcacc

SEQ ID NO: 656109 - RNA, 19 nt, Artificial Sequence
  Description of Artificial Sequence: Synthetic oligonucleotide
uagauaauuagaacaguaa

SEQ ID NO: 656110 - RNA, 19 nt, Artificial Sequence
  Description of Artificial Sequence: Synthetic oligonucleotide
uguuacauuugcaugucac

SEQ ID NO: 656111 - RNA, 19 nt, Artificial Sequence
  Description of Artificial Sequence: Synthetic oligonucleotide
uguagcucuggauacaaac

SEQ ID NO: 656112 - RNA, 19 nt, Artificial Sequence
  Description of Artificial Sequence: Synthetic oligonucleotide
agugcuggcagacagcaag

SEQ ID NO: 656113 - RNA, 19 nt, Artificial Sequence
  Description of Artificial Sequence: Synthetic oligonucleotide
auugagugaacguaaggca

SEQ ID NO: 656114 - RNA, 19 nt, Artificial Sequence
  Description of Artificial Sequence: Synthetic oligonucleotide
gaagcagugguggugauag

SEQ ID NO: 656115 - RNA, 19 nt, Artificial Sequence
  Description of Artificial Sequence: Synthetic oligonucleotide
ucugucuaaggauggagcc

SEQ ID NO: 656116 - RNA, 19 nt, Artificial Sequence
  Description of Artificial Sequence: Synthetic oligonucleotide
aauaaaacgggaaggggcu

SEQ ID NO: 656117 - RNA, 19 nt, Artificial Sequence
  Description of Artificial Sequence: Synthetic oligonucleotide
uaauugguuacuuguggcc

SEQ ID NO: 656118 - RNA, 19 nt, Artificial Sequence
  Description of Artificial Sequence: Synthetic oligonucleotide
uagucacuauuguucaucg

SEQ ID NO: 656119 - RNA, 19 nt, Artificial Sequence
  Description of Artificial Sequence: Synthetic oligonucleotide
cuaagaggcaguuggacac

SEQ ID NO: 656120 - RNA, 19 nt, Artificial Sequence
  Description of Artificial Sequence: Synthetic oligonucleotide
uuaaacacggggauuuccu

SEQ ID NO: 656121 - RNA, 19 nt, Artificial Sequence
  Description of Artificial Sequence: Synthetic oligonucleotide
cucuugacgagccuaagag

SEQ ID NO: 656122 - RNA, 19 nt, Artificial Sequence
  Description of Artificial Sequence: Synthetic oligonucleotide
gauggagcccuuaugagcc

SEQ ID NO: 656123 - RNA, 19 nt, Artificial Sequence
  Description of Artificial Sequence: Synthetic oligonucleotide
uucuggauagauauuucga

SEQ ID NO: 656124 - RNA, 19 nt, Artificial Sequence
  Description of Artificial Sequence: Synthetic oligonucleotide
aauagauaauuagaacagu

SEQ ID NO: 656125 - RNA, 19 nt, Artificial Sequence
  Description of Artificial Sequence: Synthetic oligonucleotide
aaccucaguccucaugagg

SEQ ID NO: 656126 - RNA, 19 nt, Artificial Sequence
  Description of Artificial Sequence: Synthetic oligonucleotide
auuaaacacggggauuucc

SEQ ID NO: 656127 - RNA, 19 nt, Artificial Sequence
  Description of Artificial Sequence: Synthetic oligonucleotide
ucuugacgagccuaagagg

SEQ ID NO: 656128 - RNA, 19 nt, Artificial Sequence
  Description of Artificial Sequence: Synthetic oligonucleotide
uacgagguagucacuauug

SEQ ID NO: 656129 - RNA, 19 nt, Artificial Sequence
  Description of Artificial Sequence: Synthetic oligonucleotide
acaccaauguuccucugac

SEQ ID NO: 656130 - RNA, 19 nt, Artificial Sequence
  Description of Artificial Sequence: Synthetic oligonucleotide
cuguagaaaguucuggaag

SEQ ID NO: 656131 - RNA, 19 nt, Artificial Sequence
  Description of Artificial Sequence: Synthetic oligonucleotide
ugaacguaaggcaugugaa

SEQ ID NO: 656132 - RNA, 19 nt, Artificial Sequence
  Description of Artificial Sequence: Synthetic oligonucleotide
ugggcguugaucacauugg

SEQ ID NO: 656133 - RNA, 19 nt, Artificial Sequence
  Description of Artificial Sequence: Synthetic oligonucleotide
ucuggauagauauuucgaa

SEQ ID NO: 656134 - RNA, 19 nt, Artificial Sequence
  Description of Artificial Sequence: Synthetic oligonucleotide
auuuucaccacucucuuuu

SEQ ID NO: 656135 - RNA, 19 nt, Artificial Sequence
  Description of Artificial Sequence: Synthetic oligonucleotide
uguucaucguucugcgugg

SEQ ID NO: 656136 - RNA, 19 nt, Artificial Sequence
  Description of Artificial Sequence: Synthetic oligonucleotide
acgggaaggggcuggaacc

SEQ ID NO: 656137 - RNA, 19 nt, Artificial Sequence
  Description of Artificial Sequence: Synthetic oligonucleotide
cuauuguucaucguucugc

SEQ ID NO: 656138 - RNA, 19 nt, Artificial Sequence
  Description of Artificial Sequence: Synthetic oligonucleotide
agaugggucucccugaugu

SEQ ID NO: 656139 - RNA, 19 nt, Artificial Sequence
  Description of Artificial Sequence: Synthetic oligonucleotide
uggauagauauuucgaaua

SEQ ID NO: 656140 - RNA, 19 nt, Artificial Sequence
  Description of Artificial Sequence: Synthetic oligonucleotide
ucucuuuuggggacugccg

SEQ ID NO: 656141 - RNA, 19 nt, Artificial Sequence
  Description of Artificial Sequence: Synthetic oligonucleotide
ugcuacaggcccauucugg

SEQ ID NO: 656142 - RNA, 19 nt, Artificial Sequence
  Description of Artificial Sequence: Synthetic oligonucleotide
aauugguuacuuguggccu

SEQ ID NO: 656143 - RNA, 19 nt, Artificial Sequence
  Description of Artificial Sequence: Synthetic oligonucleotide
cuuucacaagcacauugcg

SEQ ID NO: 656144 - RNA, 19 nt, Artificial Sequence
  Description of Artificial Sequence: Synthetic oligonucleotide
uagauauuucgaauagagu

SEQ ID NO: 656145 - RNA, 19 nt, Artificial Sequence
  Description of Artificial Sequence: Synthetic oligonucleotide
aaaugcacucaucucacua

SEQ ID NO: 656146 - RNA, 19 nt, Artificial Sequence
  Description of Artificial Sequence: Synthetic oligonucleotide
uuuaacugucucuucucca

SEQ ID NO: 656147 - RNA, 19 nt, Artificial Sequence
  Description of Artificial Sequence: Synthetic oligonucleotide
gcguugaucacauuggucc

SEQ ID NO: 656148 - RNA, 19 nt, Artificial Sequence
  Description of Artificial Sequence: Synthetic oligonucleotide
uugcucaugcccacuaaag

SEQ ID NO: 656149 - RNA, 19 nt, Artificial Sequence
  Description of Artificial Sequence: Synthetic oligonucleotide
aguuucagcacacgaggag

SEQ ID NO: 656150 - RNA, 19 nt, Artificial Sequence
  Description of Artificial Sequence: Synthetic oligonucleotide
uugagugaacguaaggcau

SEQ ID NO: 656151 - RNA, 19 nt, Artificial Sequence
  Description of Artificial Sequence: Synthetic oligonucleotide
cuugucccuaacaugcugc

SEQ ID NO: 656152 - RNA, 19 nt, Artificial Sequence
  Description of Artificial Sequence: Synthetic oligonucleotide
cacaagguuuucuggauag

SEQ ID NO: 656153 - RNA, 19 nt, Artificial Sequence
  Description of Artificial Sequence: Synthetic oligonucleotide
ucacugguagcugagauuc

SEQ ID NO: 656154 - RNA, 19 nt, Artificial Sequence
  Description of Artificial Sequence: Synthetic oligonucleotide
uggaagaugacaccaggau

SEQ ID NO: 656155 - RNA, 19 nt, Artificial Sequence
  Description of Artificial Sequence: Synthetic oligonucleotide
gagguagucacuauuguuc

SEQ ID NO: 656156 - RNA, 19 nt, Artificial Sequence
  Description of Artificial Sequence: Synthetic oligonucleotide
aucgagaacaaagcaguac

SEQ ID NO: 656157 - RNA, 19 nt, Artificial Sequence
  Description of Artificial Sequence: Synthetic oligonucleotide
ggauagauauuucgaauag

SEQ ID NO: 656158 - RNA, 19 nt, Artificial Sequence
  Description of Artificial Sequence: Synthetic oligonucleotide
ugauagucugucuaaggau

SEQ ID NO: 656159 - RNA, 19 nt, Artificial Sequence
  Description of Artificial Sequence: Synthetic oligonucleotide
agggagagaauugauucac

SEQ ID NO: 656160 - RNA, 19 nt, Artificial Sequence
  Description of Artificial Sequence: Synthetic oligonucleotide
guuucagcacacgaggagg

SEQ ID NO: 656161 - RNA, 19 nt, Artificial Sequence
  Description of Artificial Sequence: Synthetic oligonucleotide
ccauguagccugaagaugg

SEQ ID NO: 656162 - RNA, 19 nt, Artificial Sequence
  Description of Artificial Sequence: Synthetic oligonucleotide
ucgcccaccagacuucagg

SEQ ID NO: 656163 - RNA, 19 nt, Artificial Sequence
  Description of Artificial Sequence: Synthetic oligonucleotide
auuagaacaguaaaauaaa

SEQ ID NO: 656164 - RNA, 19 nt, Artificial Sequence
  Description of Artificial Sequence: Synthetic oligonucleotide
caauguuccucugacagug

SEQ ID NO: 656165 - RNA, 19 nt, Artificial Sequence
  Description of Artificial Sequence: Synthetic oligonucleotide
cccuuaugagccaagaggg

SEQ ID NO: 656166 - RNA, 19 nt, Artificial Sequence
  Description of Artificial Sequence: Synthetic oligonucleotide
gaucacauugguccugaug

SEQ ID NO: 656167 - RNA, 19 nt, Artificial Sequence
  Description of Artificial Sequence: Synthetic oligonucleotide
uaaucuucgugcuccuuca

SEQ ID NO: 656168 - RNA, 19 nt, Artificial Sequence
  Description of Artificial Sequence: Synthetic oligonucleotide
uugagaacagaaagcucca

SEQ ID NO: 656169 - RNA, 19 nt, Artificial Sequence
  Description of Artificial Sequence: Synthetic oligonucleotide
ucaucguucugcgugggag

SEQ ID NO: 656170 - RNA, 19 nt, Artificial Sequence
  Description of Artificial Sequence: Synthetic oligonucleotide
acauuugcaugucaccuga

SEQ ID NO: 656171 - RNA, 19 nt, Artificial Sequence
  Description of Artificial Sequence: Synthetic oligonucleotide
aaaagagggcacaagguuu

SEQ ID NO: 656172 - RNA, 19 nt, Artificial Sequence
  Description of Artificial Sequence: Synthetic oligonucleotide
cucaaacccaaacacgcac

SEQ ID NO: 656173 - RNA, 19 nt, Artificial Sequence
  Description of Artificial Sequence: Synthetic oligonucleotide
acccacaagcaccaaagug

SEQ ID NO: 656174 - RNA, 19 nt, Artificial Sequence
  Description of Artificial Sequence: Synthetic oligonucleotide
gagaagugggcccaccaug

SEQ ID NO: 656175 - RNA, 19 nt, Artificial Sequence
  Description of Artificial Sequence: Synthetic oligonucleotide
caagugugcauuauuuuca

SEQ ID NO: 656176 - RNA, 19 nt, Artificial Sequence
  Description of Artificial Sequence: Synthetic oligonucleotide
agcugcacccuuuauguca

SEQ ID NO: 656177 - RNA, 19 nt, Artificial Sequence
  Description of Artificial Sequence: Synthetic oligonucleotide
ugccaguauugagugaacg

SEQ ID NO: 656178 - RNA, 19 nt, Artificial Sequence
  Description of Artificial Sequence: Synthetic oligonucleotide
ucucaacuugucccuaaca

SEQ ID NO: 656179 - RNA, 19 nt, Artificial Sequence
  Description of Artificial Sequence: Synthetic oligonucleotide
augugaacguccaugucgg

SEQ ID NO: 656180 - RNA, 19 nt, Artificial Sequence
  Description of Artificial Sequence: Synthetic oligonucleotide
gugaacguaaggcauguga

SEQ ID NO: 656181 - RNA, 19 nt, Artificial Sequence
  Description of Artificial Sequence: Synthetic oligonucleotide
uguaguuguuccucuggcu

SEQ ID NO: 656182 - RNA, 19 nt, Artificial Sequence
  Description of Artificial Sequence: Synthetic oligonucleotide
cugggcguugaucacauug

SEQ ID NO: 656183 - RNA, 19 nt, Artificial Sequence
  Description of Artificial Sequence: Synthetic oligonucleotide
ucacuacugucaaacagua

SEQ ID NO: 656184 - RNA, 19 nt, Artificial Sequence
  Description of Artificial Sequence: Synthetic oligonucleotide
auagauaauuagaacagua

SEQ ID NO: 656185 - RNA, 19 nt, Artificial Sequence
  Description of Artificial Sequence: Synthetic oligonucleotide
gagggcacaagguuuucug

SEQ ID NO: 656186 - RNA, 19 nt, Artificial Sequence
  Description of Artificial Sequence: Synthetic oligonucleotide
auauuucgaauagagugga

SEQ ID NO: 656187 - RNA, 19 nt, Artificial Sequence
  Description of Artificial Sequence: Synthetic oligonucleotide
aucucaacuugucccuaac

SEQ ID NO: 656188 - RNA, 19 nt, Artificial Sequence
  Description of Artificial Sequence: Synthetic oligonucleotide
aaacacggggauuuccuuu

SEQ ID NO: 656189 - RNA, 19 nt, Artificial Sequence
  Description of Artificial Sequence: Synthetic oligonucleotide
ucuauccuggcugucugag

SEQ ID NO: 656190 - RNA, 19 nt, Artificial Sequence
  Description of Artificial Sequence: Synthetic oligonucleotide
acuauuguucaucguucug

SEQ ID NO: 656191 - RNA, 19 nt, Artificial Sequence
  Description of Artificial Sequence: Synthetic oligonucleotide
augcugcaaacccaagcuc

SEQ ID NO: 656192 - RNA, 19 nt, Artificial Sequence
  Description of Artificial Sequence: Synthetic oligonucleotide
aggauggagcccuuaugag

SEQ ID NO: 656193 - RNA, 19 nt, Artificial Sequence
  Description of Artificial Sequence: Synthetic oligonucleotide
ugaacguccaugucggauu

SEQ ID NO: 656194 - RNA, 19 nt, Artificial Sequence
  Description of Artificial Sequence: Synthetic oligonucleotide
ugcauggugguuuccugug

SEQ ID NO: 656195 - RNA, 19 nt, Artificial Sequence
  Description of Artificial Sequence: Synthetic oligonucleotide
ucgaauagaguggaucacu

SEQ ID NO: 656196 - RNA, 19 nt, Artificial Sequence
  Description of Artificial Sequence: Synthetic oligonucleotide
uggcugauaggccuacugu

SEQ ID NO: 656197 - RNA, 19 nt, Artificial Sequence
  Description of Artificial Sequence: Synthetic oligonucleotide
aacacggggauuuccuuuu

SEQ ID NO: 656198 - RNA, 19 nt, Artificial Sequence
  Description of Artificial Sequence: Synthetic oligonucleotide
aguauugagugaacguaag

SEQ ID NO: 656199 - RNA, 19 nt, Artificial Sequence
  Description of Artificial Sequence: Synthetic oligonucleotide
cuaacaugcugcaaaccca

SEQ ID NO: 656200 - RNA, 19 nt, Artificial Sequence
  Description of Artificial Sequence: Synthetic oligonucleotide
ucuuuuggggacugccggc

SEQ ID NO: 656201 - RNA, 19 nt, Artificial Sequence
  Description of Artificial Sequence: Synthetic oligonucleotide
acauccauguagccugaag

SEQ ID NO: 656202 - RNA, 19 nt, Artificial Sequence
  Description of Artificial Sequence: Synthetic oligonucleotide
aagcccuguucugccaugc

SEQ ID NO: 656203 - RNA, 19 nt, Artificial Sequence
  Description of Artificial Sequence: Synthetic oligonucleotide
aggaacaggguggugagug

SEQ ID NO: 656204 - RNA, 19 nt, Artificial Sequence
  Description of Artificial Sequence: Synthetic oligonucleotide
auagaguggaucacuggag

SEQ ID NO: 656205 - RNA, 19 nt, Artificial Sequence
  Description of Artificial Sequence: Synthetic oligonucleotide
cagauuauucugaauugga

SEQ ID NO: 656206 - RNA, 19 nt, Artificial Sequence
  Description of Artificial Sequence: Synthetic oligonucleotide
uuuggggaauggcuccuug

SEQ ID NO: 656207 - RNA, 19 nt, Artificial Sequence
  Description of Artificial Sequence: Synthetic oligonucleotide
cuggcacucagaucugggg

SEQ ID NO: 656208 - RNA, 19 nt, Artificial Sequence
  Description of Artificial Sequence: Synthetic oligonucleotide
ggaaccucaguccucauga

SEQ ID NO: 656209 - RNA, 19 nt, Artificial Sequence
  Description of Artificial Sequence: Synthetic oligonucleotide
cuacugucaaacaguagca

SEQ ID NO: 656210 - RNA, 19 nt, Artificial Sequence
  Description of Artificial Sequence: Synthetic oligonucleotide
uuguuacauuugcauguca

SEQ ID NO: 656211 - RNA, 19 nt, Artificial Sequence
  Description of Artificial Sequence: Synthetic oligonucleotide
ugacgagccuaagaggcag

SEQ ID NO: 656212 - RNA, 19 nt, Artificial Sequence
  Description of Artificial Sequence: Synthetic oligonucleotide
gggguuacgagguagucac

SEQ ID NO: 656213 - RNA, 19 nt, Artificial Sequence
  Description of Artificial Sequence: Synthetic oligonucleotide
cacccuuuaugucacucag

SEQ ID NO: 656214 - RNA, 19 nt, Artificial Sequence
  Description of Artificial Sequence: Synthetic oligonucleotide
cauguagccugaagauggg

SEQ ID NO: 656215 - RNA, 19 nt, Artificial Sequence
  Description of Artificial Sequence: Synthetic oligonucleotide
uuacgagguagucacuauu

SEQ ID NO: 656216 - RNA, 19 nt, Artificial Sequence
  Description of Artificial Sequence: Synthetic oligonucleotide
agaaagcuccagaucacag

SEQ ID NO: 656217 - RNA, 19 nt, Artificial Sequence
  Description of Artificial Sequence: Synthetic oligonucleotide
agucugucuaaggauggag

SEQ ID NO: 656218 - RNA, 19 nt, Artificial Sequence
  Description of Artificial Sequence: Synthetic oligonucleotide
uccagggagagaauugauu

SEQ ID NO: 656219 - RNA, 19 nt, Artificial Sequence
  Description of Artificial Sequence: Synthetic oligonucleotide
guggaaagggguccgacuc

SEQ ID NO: 656220 - RNA, 19 nt, Artificial Sequence
  Description of Artificial Sequence: Synthetic oligonucleotide
uugacgagccuaagaggca

SEQ ID NO: 656221 - RNA, 19 nt, Artificial Sequence
  Description of Artificial Sequence: Synthetic oligonucleotide
uuggggaauggcuccuugc

SEQ ID NO: 656222 - RNA, 19 nt, Artificial Sequence
  Description of Artificial Sequence: Synthetic oligonucleotide
gucucccugauguuugacc

SEQ ID NO: 656223 - RNA, 19 nt, Artificial Sequence
  Description of Artificial Sequence: Synthetic oligonucleotide
acguccaugucggauuugg

SEQ ID NO: 656224 - RNA, 19 nt, Artificial Sequence
  Description of Artificial Sequence: Synthetic oligonucleotide
ggagucucuccucuugacg

SEQ ID NO: 656225 - RNA, 19 nt, Artificial Sequence
  Description of Artificial Sequence: Synthetic oligonucleotide
ggcaucgagaacaaagcag

SEQ ID NO: 656226 - RNA, 19 nt, Artificial Sequence
  Description of Artificial Sequence: Synthetic oligonucleotide
agauuauucugaauuggaa

SEQ ID NO: 656227 - RNA, 19 nt, Artificial Sequence
  Description of Artificial Sequence: Synthetic oligonucleotide
aaacaguagcagccagggu

SEQ ID NO: 656228 - RNA, 19 nt, Artificial Sequence
  Description of Artificial Sequence: Synthetic oligonucleotide
uccaagugugcauuauuuu

SEQ ID NO: 656229 - RNA, 19 nt, Artificial Sequence
  Description of Artificial Sequence: Synthetic oligonucleotide
uggugauagucugucuaag

SEQ ID NO: 656230 - RNA, 19 nt, Artificial Sequence
  Description of Artificial Sequence: Synthetic oligonucleotide
cugcgugggagacagcgag

SEQ ID NO: 656231 - RNA, 19 nt, Artificial Sequence
  Description of Artificial Sequence: Synthetic oligonucleotide
guagucacuauuguucauc

SEQ ID NO: 656232 - RNA, 19 nt, Artificial Sequence
  Description of Artificial Sequence: Synthetic oligonucleotide
gucugucuaaggauggagc

SEQ ID NO: 656233 - RNA, 19 nt, Artificial Sequence
  Description of Artificial Sequence: Synthetic oligonucleotide
guuacuuguggccugcugu

SEQ ID NO: 656234 - RNA, 19 nt, Artificial Sequence
  Description of Artificial Sequence: Synthetic oligonucleotide
ggaagaugacaccaggauc

SEQ ID NO: 656235 - RNA, 19 nt, Artificial Sequence
  Description of Artificial Sequence: Synthetic oligonucleotide
uucgaauagaguggaucac

SEQ ID NO: 656236 - RNA, 19 nt, Artificial Sequence
  Description of Artificial Sequence: Synthetic oligonucleotide
aucguucugcgugggagac

SEQ ID NO: 656237 - RNA, 19 nt, Artificial Sequence
  Description of Artificial Sequence: Synthetic oligonucleotide
uguagggaugcccuccauu

SEQ ID NO: 656238 - RNA, 19 nt, Artificial Sequence
  Description of Artificial Sequence: Synthetic oligonucleotide
uccaacuucuuguuacauu

SEQ ID NO: 656239 - RNA, 19 nt, Artificial Sequence
  Description of Artificial Sequence: Synthetic oligonucleotide
ggauuuggggaauggcucc

SEQ ID NO: 656240 - RNA, 19 nt, Artificial Sequence
  Description of Artificial Sequence: Synthetic oligonucleotide
gaaccucaguccucaugag

SEQ ID NO: 656241 - RNA, 19 nt, Artificial Sequence
  Description of Artificial Sequence: Synthetic oligonucleotide
acgagguagucacuauugu

SEQ ID NO: 656242 - RNA, 19 nt, Artificial Sequence
  Description of Artificial Sequence: Synthetic oligonucleotide
aagugucuaauugguuacu

SEQ ID NO: 656243 - RNA, 19 nt, Artificial Sequence
  Description of Artificial Sequence: Synthetic oligonucleotide
cucacuacugucaaacagu

SEQ ID NO: 656244 - RNA, 19 nt, Artificial Sequence
  Description of Artificial Sequence: Synthetic oligonucleotide
aguggaucacuggagcaug

SEQ ID NO: 656245 - RNA, 19 nt, Artificial Sequence
  Description of Artificial Sequence: Synthetic oligonucleotide
cuuguuacauuugcauguc

SEQ ID NO: 656246 - RNA, 19 nt, Artificial Sequence
  Description of Artificial Sequence: Synthetic oligonucleotide
caguauugagugaacguaa

SEQ ID NO: 656247 - RNA, 19 nt, Artificial Sequence
  Description of Artificial Sequence: Synthetic oligonucleotide
ugggaauccuguguaggga

SEQ ID NO: 656248 - RNA, 19 nt, Artificial Sequence
  Description of Artificial Sequence: Synthetic oligonucleotide
uucacugguagcugagauu

SEQ ID NO: 656249 - RNA, 19 nt, Artificial Sequence
  Description of Artificial Sequence: Synthetic oligonucleotide
ugacaguguucuguggcca

SEQ ID NO: 656250 - RNA, 19 nt, Artificial Sequence
  Description of Artificial Sequence: Synthetic oligonucleotide
gugcgugcaucucaacuug

SEQ ID NO: 656251 - RNA, 19 nt, Artificial Sequence
  Description of Artificial Sequence: Synthetic oligonucleotide
gucacuauuguucaucguu

SEQ ID NO: 656252 - RNA, 19 nt, Artificial Sequence
  Description of Artificial Sequence: Synthetic oligonucleotide
gauaggccuacuguggaaa

SEQ ID NO: 656253 - RNA, 19 nt, Artificial Sequence
  Description of Artificial Sequence: Synthetic oligonucleotide
uggugguuuccuguggcug

SEQ ID NO: 656254 - RNA, 19 nt, Artificial Sequence
  Description of Artificial Sequence: Synthetic oligonucleotide
uauuucgaauagaguggau

SEQ ID NO: 656255 - RNA, 19 nt, Artificial Sequence
  Description of Artificial Sequence: Synthetic oligonucleotide
ugauaggccuacuguggaa

SEQ ID NO: 656256 - RNA, 19 nt, Artificial Sequence
  Description of Artificial Sequence: Synthetic oligonucleotide
uaaacacggggauuuccuu

SEQ ID NO: 656257 - RNA, 19 nt, Artificial Sequence
  Description of Artificial Sequence: Synthetic oligonucleotide
aguuuccauaugcugcuuu

SEQ ID NO: 656258 - RNA, 19 nt, Artificial Sequence
  Description of Artificial Sequence: Synthetic oligonucleotide
gcaugugaaggguugcagc

SEQ ID NO: 656259 - RNA, 19 nt, Artificial Sequence
  Description of Artificial Sequence: Synthetic oligonucleotide
uuuccauaugcugcuuuaa

SEQ ID NO: 656260 - RNA, 19 nt, Artificial Sequence
  Description of Artificial Sequence: Synthetic oligonucleotide
ucugcgugggagacagcga

SEQ ID NO: 656261 - RNA, 19 nt, Artificial Sequence
  Description of Artificial Sequence: Synthetic oligonucleotide
uccauugcauggugguuuc

SEQ ID NO: 656262 - RNA, 19 nt, Artificial Sequence
  Description of Artificial Sequence: Synthetic oligonucleotide
uguugcucaugcccacuaa

SEQ ID NO: 656263 - RNA, 19 nt, Artificial Sequence
  Description of Artificial Sequence: Synthetic oligonucleotide
ucccagaacccuccucucu

SEQ ID NO: 656264 - RNA, 19 nt, Artificial Sequence
  Description of Artificial Sequence: Synthetic oligonucleotide
cuucaggcugggaauccug

SEQ ID NO: 656265 - RNA, 19 nt, Artificial Sequence
  Description of Artificial Sequence: Synthetic oligonucleotide
aaacccaagcucaggcccu

SEQ ID NO: 656266 - RNA, 19 nt, Artificial Sequence
  Description of Artificial Sequence: Synthetic oligonucleotide
cacuacugucaaacaguag

SEQ ID NO: 656267 - RNA, 19 nt, Artificial Sequence
  Description of Artificial Sequence: Synthetic oligonucleotide
caacaugaaguccaagugu

SEQ ID NO: 656268 - RNA, 19 nt, Artificial Sequence
  Description of Artificial Sequence: Synthetic oligonucleotide
uugguuacuuguggccugc

SEQ ID NO: 656269 - RNA, 19 nt, Artificial Sequence
  Description of Artificial Sequence: Synthetic oligonucleotide
gguuuccuguggcugggcg

SEQ ID NO: 656270 - RNA, 19 nt, Artificial Sequence
  Description of Artificial Sequence: Synthetic oligonucleotide
agucacuauuguucaucgu

SEQ ID NO: 656271 - RNA, 19 nt, Artificial Sequence
  Description of Artificial Sequence: Synthetic oligonucleotide
aaaacgggaaggggcugga

SEQ ID NO: 656272 - RNA, 19 nt, Artificial Sequence
  Description of Artificial Sequence: Synthetic oligonucleotide
uacuuguggccugcuguag

SEQ ID NO: 656273 - RNA, 19 nt, Artificial Sequence
  Description of Artificial Sequence: Synthetic oligonucleotide
gaaggguugcagcuugucu

SEQ ID NO: 656274 - RNA, 19 nt, Artificial Sequence
  Description of Artificial Sequence: Synthetic oligonucleotide
aggcaguuggacacugcac

SEQ ID NO: 656275 - RNA, 19 nt, Artificial Sequence
  Description of Artificial Sequence: Synthetic oligonucleotide
uggaucacuggagcaugcc

SEQ ID NO: 656276 - RNA, 19 nt, Artificial Sequence
  Description of Artificial Sequence: Synthetic oligonucleotide
ugcgugggagacagcgagc

SEQ ID NO: 656277 - RNA, 19 nt, Artificial Sequence
  Description of Artificial Sequence: Synthetic oligonucleotide
gaagugggcccaccaugug

SEQ ID NO: 656278 - RNA, 19 nt, Artificial Sequence
  Description of Artificial Sequence: Synthetic oligonucleotide
acacagcucugucccgggg

SEQ ID NO: 656279 - RNA, 19 nt, Artificial Sequence
  Description of Artificial Sequence: Synthetic oligonucleotide
guuuccauaugcugcuuua

SEQ ID NO: 656280 - RNA, 19 nt, Artificial Sequence
  Description of Artificial Sequence: Synthetic oligonucleotide
ugcgugcaucucaacuugu

SEQ ID NO: 656281 - RNA, 19 nt, Artificial Sequence
  Description of Artificial Sequence: Synthetic oligonucleotide
guggugauagucugucuaa

SEQ ID NO: 656282 - RNA, 19 nt, Artificial Sequence
  Description of Artificial Sequence: Synthetic oligonucleotide
cugauaggccuacugugga

SEQ ID NO: 656283 - RNA, 19 nt, Artificial Sequence
  Description of Artificial Sequence: Synthetic oligonucleotide
cucaacuugucccuaacau

SEQ ID NO: 656284 - RNA, 19 nt, Artificial Sequence
  Description of Artificial Sequence: Synthetic oligonucleotide
cauugcgcccacagcugcc

SEQ ID NO: 656285 - RNA, 19 nt, Artificial Sequence
  Description of Artificial Sequence: Synthetic oligonucleotide
uccgacucaaaggcucuca

SEQ ID NO: 656286 - RNA, 19 nt, Artificial Sequence
  Description of Artificial Sequence: Synthetic oligonucleotide
gcugagauucccagaaccc

SEQ ID NO: 656287 - RNA, 19 nt, Artificial Sequence
  Description of Artificial Sequence: Synthetic oligonucleotide
ucaucucacuacugucaaa

SEQ ID NO: 656288 - RNA, 19 nt, Artificial Sequence
  Description of Artificial Sequence: Synthetic oligonucleotide
ggggcaucgagaacaaagc

SEQ ID NO: 656289 - RNA, 19 nt, Artificial Sequence
  Description of Artificial Sequence: Synthetic oligonucleotide
aaguccaagugugcauuau

SEQ ID NO: 656290 - RNA, 19 nt, Artificial Sequence
  Description of Artificial Sequence: Synthetic oligonucleotide
acucagagaagugggccca

SEQ ID NO: 656291 - RNA, 19 nt, Artificial Sequence
  Description of Artificial Sequence: Synthetic oligonucleotide
guggugagugacccacaag

SEQ ID NO: 656292 - RNA, 19 nt, Artificial Sequence
  Description of Artificial Sequence: Synthetic oligonucleotide
cauuugcaugucaccugac

SEQ ID NO: 656293 - RNA, 19 nt, Artificial Sequence
  Description of Artificial Sequence: Synthetic oligonucleotide
gguggugauagucugucua

SEQ ID NO: 656294 - RNA, 19 nt, Artificial Sequence
  Description of Artificial Sequence: Synthetic oligonucleotide
gacugccggcuucuauucc

SEQ ID NO: 656295 - RNA, 19 nt, Artificial Sequence
  Description of Artificial Sequence: Synthetic oligonucleotide
gagucucgucagcugcacc

SEQ ID NO: 656296 - RNA, 19 nt, Artificial Sequence
  Description of Artificial Sequence: Synthetic oligonucleotide
cccaugaggaaaagagggc

SEQ ID NO: 656297 - RNA, 19 nt, Artificial Sequence
  Description of Artificial Sequence: Synthetic oligonucleotide
uagucugucuaaggaugga

SEQ ID NO: 656298 - RNA, 19 nt, Artificial Sequence
  Description of Artificial Sequence: Synthetic oligonucleotide
cucaucucacuacugucaa

SEQ ID NO: 656299 - RNA, 19 nt, Artificial Sequence
  Description of Artificial Sequence: Synthetic oligonucleotide
gauucacugguagcugaga

SEQ ID NO: 656300 - RNA, 19 nt, Artificial Sequence
  Description of Artificial Sequence: Synthetic oligonucleotide
cacaccaauguuccucuga

SEQ ID NO: 656301 - RNA, 19 nt, Artificial Sequence
  Description of Artificial Sequence: Synthetic oligonucleotide
acaaagcaccagaagcagu

SEQ ID NO: 656302 - RNA, 19 nt, Artificial Sequence
  Description of Artificial Sequence: Synthetic oligonucleotide
cuggauagauauuucgaau

SEQ ID NO: 656303 - RNA, 19 nt, Artificial Sequence
  Description of Artificial Sequence: Synthetic oligonucleotide
ggggaauggcuccuugcag

SEQ ID NO: 656304 - RNA, 19 nt, Artificial Sequence
  Description of Artificial Sequence: Synthetic oligonucleotide
acacgaggagggcuaggcu

SEQ ID NO: 656305 - RNA, 19 nt, Artificial Sequence
  Description of Artificial Sequence: Synthetic oligonucleotide
cuaggcuggcacucagauc

SEQ ID NO: 656306 - RNA, 19 nt, Artificial Sequence
  Description of Artificial Sequence: Synthetic oligonucleotide
uggccauaaccugggaaaa

SEQ ID NO: 656307 - RNA, 19 nt, Artificial Sequence
  Description of Artificial Sequence: Synthetic oligonucleotide
uguguugcucaugcccacu

SEQ ID NO: 656308 - RNA, 19 nt, Artificial Sequence
  Description of Artificial Sequence: Synthetic oligonucleotide
gagaauugauucacuggua

SEQ ID NO: 656309 - RNA, 19 nt, Artificial Sequence
  Description of Artificial Sequence: Synthetic oligonucleotide
caggcguggcccugguggg

SEQ ID NO: 656310 - RNA, 19 nt, Artificial Sequence
  Description of Artificial Sequence: Synthetic oligonucleotide
ugugaacguccaugucgga

SEQ ID NO: 656311 - RNA, 19 nt, Artificial Sequence
  Description of Artificial Sequence: Synthetic oligonucleotide
caguuggacacugcaccag

SEQ ID NO: 656312 - RNA, 19 nt, Artificial Sequence
  Description of Artificial Sequence: Synthetic oligonucleotide
gcauggugguuuccugugg

SEQ ID NO: 656313 - RNA, 19 nt, Artificial Sequence
  Description of Artificial Sequence: Synthetic oligonucleotide
guucaucguucugcguggg

SEQ ID NO: 656314 - RNA, 19 nt, Artificial Sequence
  Description of Artificial Sequence: Synthetic oligonucleotide
aguggauuucauggauggu

SEQ ID NO: 656315 - RNA, 19 nt, Artificial Sequence
  Description of Artificial Sequence: Synthetic oligonucleotide
caucguucugcgugggaga

SEQ ID NO: 656316 - RNA, 19 nt, Artificial Sequence
  Description of Artificial Sequence: Synthetic oligonucleotide
gguuacuuguggccugcug

SEQ ID NO: 656317 - RNA, 19 nt, Artificial Sequence
  Description of Artificial Sequence: Synthetic oligonucleotide
gggcacaagguuuucugga

SEQ ID NO: 656318 - RNA, 19 nt, Artificial Sequence
  Description of Artificial Sequence: Synthetic oligonucleotide
ucccagcuagcccucccuc

SEQ ID NO: 656319 - RNA, 19 nt, Artificial Sequence
  Description of Artificial Sequence: Synthetic oligonucleotide
uuuuggggacugccggcuu

SEQ ID NO: 656320 - RNA, 19 nt, Artificial Sequence
  Description of Artificial Sequence: Synthetic oligonucleotide
cgugcaucucaacuugucc

SEQ ID NO: 656321 - RNA, 19 nt, Artificial Sequence
  Description of Artificial Sequence: Synthetic oligonucleotide
cugccaguauugagugaac

SEQ ID NO: 656322 - RNA, 19 nt, Artificial Sequence
  Description of Artificial Sequence: Synthetic oligonucleotide
acaguguucuguggccaug

SEQ ID NO: 656323 - RNA, 19 nt, Artificial Sequence
  Description of Artificial Sequence: Synthetic oligonucleotide
gcaucgagaacaaagcagu

SEQ ID NO: 656324 - RNA, 19 nt, Artificial Sequence
  Description of Artificial Sequence: Synthetic oligonucleotide
gggcaucgagaacaaagca

SEQ ID NO: 656325 - RNA, 19 nt, Artificial Sequence
  Description of Artificial Sequence: Synthetic oligonucleotide
cacuauuguucaucguucu

SEQ ID NO: 656326 - RNA, 19 nt, Artificial Sequence
  Description of Artificial Sequence: Synthetic oligonucleotide
gcugccaguauugagugaa

SEQ ID NO: 656327 - RNA, 19 nt, Artificial Sequence
  Description of Artificial Sequence: Synthetic oligonucleotide
aacguccaugucggauuug

SEQ ID NO: 656328 - RNA, 19 nt, Artificial Sequence
  Description of Artificial Sequence: Synthetic oligonucleotide
gcuugucugguggucaaug

SEQ ID NO: 656329 - RNA, 19 nt, Artificial Sequence
  Description of Artificial Sequence: Synthetic oligonucleotide
guggaucacuggagcaugc

SEQ ID NO: 656330 - RNA, 19 nt, Artificial Sequence
  Description of Artificial Sequence: Synthetic oligonucleotide
agugaacguaaggcaugug

SEQ ID NO: 656331 - RNA, 19 nt, Artificial Sequence
  Description of Artificial Sequence: Synthetic oligonucleotide
gcuagcccucccucaaacc

SEQ ID NO: 656332 - RNA, 19 nt, Artificial Sequence
  Description of Artificial Sequence: Synthetic oligonucleotide
cacucgcccaccagacuuc

SEQ ID NO: 656333 - RNA, 19 nt, Artificial Sequence
  Description of Artificial Sequence: Synthetic oligonucleotide
augucggauuuggggaaug

SEQ ID NO: 656334 - RNA, 19 nt, Artificial Sequence
  Description of Artificial Sequence: Synthetic oligonucleotide
ccaugaggaaaagagggca

SEQ ID NO: 656335 - RNA, 19 nt, Artificial Sequence
  Description of Artificial Sequence: Synthetic oligonucleotide
caucgagaacaaagcagua

SEQ ID NO: 656336 - RNA, 19 nt, Artificial Sequence
  Description of Artificial Sequence: Synthetic oligonucleotide
agcacacgaggagggcuag

SEQ ID NO: 656337 - RNA, 19 nt, Artificial Sequence
  Description of Artificial Sequence: Synthetic oligonucleotide
ggaaaauggggcuguaguu

SEQ ID NO: 656338 - RNA, 19 nt, Artificial Sequence
  Description of Artificial Sequence: Synthetic oligonucleotide
agagggccacaaaugcacu

SEQ ID NO: 656339 - RNA, 19 nt, Artificial Sequence
  Description of Artificial Sequence: Synthetic oligonucleotide
gguuacgagguagucacua

SEQ ID NO: 656340 - RNA, 19 nt, Artificial Sequence
  Description of Artificial Sequence: Synthetic oligonucleotide
ggacugccggcuucuauuc

SEQ ID NO: 656341 - RNA, 19 nt, Artificial Sequence
  Description of Artificial Sequence: Synthetic oligonucleotide
guuacgagguagucacuau

SEQ ID NO: 656342 - RNA, 19 nt, Artificial Sequence
  Description of Artificial Sequence: Synthetic oligonucleotide
guuuccuguggcugggcgu

SEQ ID NO: 656343 - RNA, 19 nt, Artificial Sequence
  Description of Artificial Sequence: Synthetic oligonucleotide
cuaaggauggagcccuuau

SEQ ID NO: 656344 - RNA, 19 nt, Artificial Sequence
  Description of Artificial Sequence: Synthetic oligonucleotide
cguucugcgugggagacag

SEQ ID NO: 656345 - RNA, 19 nt, Artificial Sequence
  Description of Artificial Sequence: Synthetic oligonucleotide
ccugaugguggaacagcac

SEQ ID NO: 656346 - RNA, 19 nt, Artificial Sequence
  Description of Artificial Sequence: Synthetic oligonucleotide
ugaucacauugguccugau

SEQ ID NO: 656347 - RNA, 19 nt, Artificial Sequence
  Description of Artificial Sequence: Synthetic oligonucleotide
uggagcccuuaugagccaa

SEQ ID NO: 656348 - RNA, 19 nt, Artificial Sequence
  Description of Artificial Sequence: Synthetic oligonucleotide
agagggcccaugaggaaaa

SEQ ID NO: 656349 - RNA, 19 nt, Artificial Sequence
  Description of Artificial Sequence: Synthetic oligonucleotide
gaguggaucacuggagcau

SEQ ID NO: 656350 - RNA, 19 nt, Artificial Sequence
  Description of Artificial Sequence: Synthetic oligonucleotide
gcacccuuuaugucacuca

SEQ ID NO: 656351 - RNA, 19 nt, Artificial Sequence
  Description of Artificial Sequence: Synthetic oligonucleotide
cugagauucccagaacccu

SEQ ID NO: 656352 - RNA, 19 nt, Artificial Sequence
  Description of Artificial Sequence: Synthetic oligonucleotide
gccaguauugagugaacgu

SEQ ID NO: 656353 - RNA, 19 nt, Artificial Sequence
  Description of Artificial Sequence: Synthetic oligonucleotide
ccucaugagggcaggcgug

SEQ ID NO: 656354 - RNA, 19 nt, Artificial Sequence
  Description of Artificial Sequence: Synthetic oligonucleotide
gguggugagugacccacaa

SEQ ID NO: 656355 - RNA, 19 nt, Artificial Sequence
  Description of Artificial Sequence: Synthetic oligonucleotide
aaacgggaaggggcuggaa

SEQ ID NO: 656356 - RNA, 19 nt, Artificial Sequence
  Description of Artificial Sequence: Synthetic oligonucleotide
cacucucuuuuggggacug

SEQ ID NO: 656357 - RNA, 19 nt, Artificial Sequence
  Description of Artificial Sequence: Synthetic oligonucleotide
ucacuggagcaugcccaga

SEQ ID NO: 656358 - RNA, 19 nt, Artificial Sequence
  Description of Artificial Sequence: Synthetic oligonucleotide
agcccuguucugccaugcu

SEQ ID NO: 656359 - RNA, 19 nt, Artificial Sequence
  Description of Artificial Sequence: Synthetic oligonucleotide
cauugcauggugguuuccu

SEQ ID NO: 656360 - RNA, 19 nt, Artificial Sequence
  Description of Artificial Sequence: Synthetic oligonucleotide
ccaguauugagugaacgua

SEQ ID NO: 656361 - RNA, 19 nt, Artificial Sequence
  Description of Artificial Sequence: Synthetic oligonucleotide
gaacguccaugucggauuu

SEQ ID NO: 656362 - RNA, 19 nt, Artificial Sequence
  Description of Artificial Sequence: Synthetic oligonucleotide
agccuaagaggcaguugga

SEQ ID NO: 656363 - RNA, 19 nt, Artificial Sequence
  Description of Artificial Sequence: Synthetic oligonucleotide
cagagggcccaugaggaaa

SEQ ID NO: 656364 - RNA, 19 nt, Artificial Sequence
  Description of Artificial Sequence: Synthetic oligonucleotide
ggaacaggguggugaguga

SEQ ID NO: 656365 - RNA, 19 nt, Artificial Sequence
  Description of Artificial Sequence: Synthetic oligonucleotide
ucguucugcgugggagaca

SEQ ID NO: 656366 - RNA, 19 nt, Artificial Sequence
  Description of Artificial Sequence: Synthetic oligonucleotide
gagggcccaugaggaaaag

SEQ ID NO: 656367 - RNA, 19 nt, Artificial Sequence
  Description of Artificial Sequence: Synthetic oligonucleotide
cugcaccccacagaacuca

SEQ ID NO: 656368 - RNA, 19 nt, Artificial Sequence
  Description of Artificial Sequence: Synthetic oligonucleotide
ggcguugaucacauugguc

SEQ ID NO: 656369 - RNA, 19 nt, Artificial Sequence
  Description of Artificial Sequence: Synthetic oligonucleotide
cucagagaagugggcccac

SEQ ID NO: 656370 - RNA, 19 nt, Artificial Sequence
  Description of Artificial Sequence: Synthetic oligonucleotide
cccugauguuugaccagcc

SEQ ID NO: 656371 - RNA, 19 nt, Artificial Sequence
  Description of Artificial Sequence: Synthetic oligonucleotide
ccacgaagcccuguucugc

SEQ ID NO: 656372 - RNA, 19 nt, Artificial Sequence
  Description of Artificial Sequence: Synthetic oligonucleotide
ggcuggcacucagaucugg

SEQ ID NO: 656373 - RNA, 19 nt, Artificial Sequence
  Description of Artificial Sequence: Synthetic oligonucleotide
cuacaggcccauucuggcu

SEQ ID NO: 656374 - RNA, 19 nt, Artificial Sequence
  Description of Artificial Sequence: Synthetic oligonucleotide
ugguuacuuguggccugcu

SEQ ID NO: 656375 - RNA, 19 nt, Artificial Sequence
  Description of Artificial Sequence: Synthetic oligonucleotide
aacccaagcucaggcccuu

SEQ ID NO: 656376 - RNA, 19 nt, Artificial Sequence
  Description of Artificial Sequence: Synthetic oligonucleotide
guggaacagcaccuccucu

SEQ ID NO: 656377 - RNA, 19 nt, Artificial Sequence
  Description of Artificial Sequence: Synthetic oligonucleotide
acgagccuaagaggcaguu

SEQ ID NO: 656378 - RNA, 19 nt, Artificial Sequence
  Description of Artificial Sequence: Synthetic oligonucleotide
gggaauccuguguagggau

SEQ ID NO: 656379 - RNA, 19 nt, Artificial Sequence
  Description of Artificial Sequence: Synthetic oligonucleotide
cucgcccaccagacuucag

SEQ ID NO: 656380 - RNA, 19 nt, Artificial Sequence
  Description of Artificial Sequence: Synthetic oligonucleotide
gccggcuucuauuccuuuc

SEQ ID NO: 656381 - RNA, 19 nt, Artificial Sequence
  Description of Artificial Sequence: Synthetic oligonucleotide
auuuggggaauggcuccuu

SEQ ID NO: 656382 - RNA, 19 nt, Artificial Sequence
  Description of Artificial Sequence: Synthetic oligonucleotide
gcuaggcuggcacucagau

SEQ ID NO: 656383 - RNA, 19 nt, Artificial Sequence
  Description of Artificial Sequence: Synthetic oligonucleotide
aggcguggcccuggugggg

SEQ ID NO: 656384 - RNA, 19 nt, Artificial Sequence
  Description of Artificial Sequence: Synthetic oligonucleotide
ccuuuaugucacucagaga

SEQ ID NO: 656385 - RNA, 19 nt, Artificial Sequence
  Description of Artificial Sequence: Synthetic oligonucleotide
ugccggcuucuauuccuuu

SEQ ID NO: 656386 - RNA, 19 nt, Artificial Sequence
  Description of Artificial Sequence: Synthetic oligonucleotide
ggaccacaaagcaccagaa

SEQ ID NO: 656387 - RNA, 19 nt, Artificial Sequence
  Description of Artificial Sequence: Synthetic oligonucleotide
cuccauugcauggugguuu

SEQ ID NO: 656388 - RNA, 19 nt, Artificial Sequence
  Description of Artificial Sequence: Synthetic oligonucleotide
cauucuggcugccccgacu

SEQ ID NO: 656389 - RNA, 19 nt, Artificial Sequence
  Description of Artificial Sequence: Synthetic oligonucleotide
ugccccgacucugcccucu

SEQ ID NO: 656390 - RNA, 19 nt, Artificial Sequence
  Description of Artificial Sequence: Synthetic oligonucleotide
ccucuugacgagccuaaga

SEQ ID NO: 656391 - RNA, 19 nt, Artificial Sequence
  Description of Artificial Sequence: Synthetic oligonucleotide
guccaugugcgugcaucuc

SEQ ID NO: 656392 - RNA, 19 nt, Artificial Sequence
  Description of Artificial Sequence: Synthetic oligonucleotide
gaugggucucccugauguu

SEQ ID NO: 656393 - RNA, 19 nt, Artificial Sequence
  Description of Artificial Sequence: Synthetic oligonucleotide
ggagcccuuaugagccaag

SEQ ID NO: 656394 - RNA, 19 nt, Artificial Sequence
  Description of Artificial Sequence: Synthetic oligonucleotide
cacuggagcaugcccagau

SEQ ID NO: 656395 - RNA, 19 nt, Artificial Sequence
  Description of Artificial Sequence: Synthetic oligonucleotide
cguccaugucggauuuggg

SEQ ID NO: 656396 - RNA, 19 nt, Artificial Sequence
  Description of Artificial Sequence: Synthetic oligonucleotide
gcugccccgacucugcccu

SEQ ID NO: 656397 - RNA, 19 nt, Artificial Sequence
  Description of Artificial Sequence: Synthetic oligonucleotide
ggccaacaugaaguccaag

SEQ ID NO: 656398 - RNA, 19 nt, Artificial Sequence
  Description of Artificial Sequence: Synthetic oligonucleotide
agcgagcagguggagccuu

SEQ ID NO: 656399 - RNA, 19 nt, Artificial Sequence
  Description of Artificial Sequence: Synthetic oligonucleotide
ccaugugcgugcaucucaa

SEQ ID NO: 656400 - RNA, 19 nt, Artificial Sequence
  Description of Artificial Sequence: Synthetic oligonucleotide
caguaaucuucgugcuccu

SEQ ID NO: 656401 - RNA, 19 nt, Artificial Sequence
  Description of Artificial Sequence: Synthetic oligonucleotide
gguagucacuauuguucau

SEQ ID NO: 656402 - RNA, 19 nt, Artificial Sequence
  Description of Artificial Sequence: Synthetic oligonucleotide
gggcguugaucacauuggu

SEQ ID NO: 656403 - RNA, 19 nt, Artificial Sequence
  Description of Artificial Sequence: Synthetic oligonucleotide
accagacuucagggugagu

SEQ ID NO: 656404 - RNA, 19 nt, Artificial Sequence
  Description of Artificial Sequence: Synthetic oligonucleotide
gcacacgaggagggcuagg

SEQ ID NO: 656405 - RNA, 19 nt, Artificial Sequence
  Description of Artificial Sequence: Synthetic oligonucleotide
gucucgucagcugcacccu

SEQ ID NO: 656406 - RNA, 19 nt, Artificial Sequence
  Description of Artificial Sequence: Synthetic oligonucleotide
caaacacgcacagcacaau

SEQ ID NO: 656407 - RNA, 19 nt, Artificial Sequence
  Description of Artificial Sequence: Synthetic oligonucleotide
gggagagaauugauucacu

SEQ ID NO: 656408 - RNA, 19 nt, Artificial Sequence
  Description of Artificial Sequence: Synthetic oligonucleotide
ggagggcuaggcuggcacu

SEQ ID NO: 656409 - RNA, 19 nt, Artificial Sequence
  Description of Artificial Sequence: Synthetic oligonucleotide
ccauugcauggugguuucc

SEQ ID NO: 656410 - RNA, 19 nt, Artificial Sequence
  Description of Artificial Sequence: Synthetic oligonucleotide
cgagccuaagaggcaguug

SEQ ID NO: 656411 - RNA, 19 nt, Artificial Sequence
  Description of Artificial Sequence: Synthetic oligonucleotide
caugucggauuuggggaau

SEQ ID NO: 656412 - RNA, 19 nt, Artificial Sequence
  Description of Artificial Sequence: Synthetic oligonucleotide
gguccgacucaaaggcucu

SEQ ID NO: 656413 - RNA, 19 nt, Artificial Sequence
  Description of Artificial Sequence: Synthetic oligonucleotide
cggggcaccacaguaaucu

SEQ ID NO: 656414 - RNA, 19 nt, Artificial Sequence
  Description of Artificial Sequence: Synthetic oligonucleotide
ccccacgaagcccuguucu

SEQ ID NO: 656415 - RNA, 19 nt, Artificial Sequence
  Description of Artificial Sequence: Synthetic oligonucleotide
uggggacugccggcuucua

SEQ ID NO: 656416 - RNA, 19 nt, Artificial Sequence
  Description of Artificial Sequence: Synthetic oligonucleotide
guguagggaugcccuccau

SEQ ID NO: 656417 - RNA, 19 nt, Artificial Sequence
  Description of Artificial Sequence: Synthetic oligonucleotide
gggccacaaaugcacucau

SEQ ID NO: 656418 - RNA, 19 nt, Artificial Sequence
  Description of Artificial Sequence: Synthetic oligonucleotide
cugccccgacucugcccuc

SEQ ID NO: 656419 - RNA, 19 nt, Artificial Sequence
  Description of Artificial Sequence: Synthetic oligonucleotide
cugccggcuucuauuccuu

SEQ ID NO: 656420 - RNA, 19 nt, Artificial Sequence
  Description of Artificial Sequence: Synthetic oligonucleotide
cgagguagucacuauuguu

SEQ ID NO: 656421 - RNA, 19 nt, Artificial Sequence
  Description of Artificial Sequence: Synthetic oligonucleotide
gggccaacaugaaguccaa

SEQ ID NO: 656422 - RNA, 19 nt, Artificial Sequence
  Description of Artificial Sequence: Synthetic oligonucleotide
caggaacaggguggugagu

SEQ ID NO: 656423 - RNA, 19 nt, Artificial Sequence
  Description of Artificial Sequence: Synthetic oligonucleotide
gggaugcccuccauugcau

SEQ ID NO: 656424 - RNA, 19 nt, Artificial Sequence
  Description of Artificial Sequence: Synthetic oligonucleotide
gggguccgacucaaaggcu

SEQ ID NO: 656425 - RNA, 19 nt, Artificial Sequence
  Description of Artificial Sequence: Synthetic oligonucleotide
cugcacccuuuaugucacu

SEQ ID NO: 656426 - RNA, 19 nt, Artificial Sequence
  Description of Artificial Sequence: Synthetic oligonucleotide
caguuuccauaugcugcuu

SEQ ID NO: 656427 - RNA, 19 nt, Artificial Sequence
  Description of Artificial Sequence: Synthetic oligonucleotide
gucuaaggauggagcccuu

SEQ ID NO: 656428 - RNA, 19 nt, Artificial Sequence
  Description of Artificial Sequence: Synthetic oligonucleotide
ggguuacgagguagucacu

SEQ ID NO: 656429 - RNA, 19 nt, Artificial Sequence
  Description of Artificial Sequence: Synthetic oligonucleotide
cccggggcaccacaguaau

SEQ ID NO: 656430 - RNA, 19 nt, Artificial Sequence
  Description of Artificial Sequence: Synthetic oligonucleotide
cagaugcuacaggcccauu

SEQ ID NO: 656431 - RNA, 19 nt, Artificial Sequence
  Description of Artificial Sequence: Synthetic oligonucleotide
gcgagcagguggagccuuu

SEQ ID NO: 656432 - RNA, 19 nt, Artificial Sequence
  Description of Artificial Sequence: Synthetic oligonucleotide
ccccgacucugcccucuau

SEQ ID NO: 656433 - RNA, 19 nt, Artificial Sequence
  Description of Artificial Sequence: Synthetic oligonucleotide
gcacucccagagggcccau

SEQ ID NO: 656434 - RNA, 19 nt, Artificial Sequence
  Description of Artificial Sequence: Synthetic oligonucleotide
auuaaucuuucuuagaugc

SEQ ID NO: 656435 - RNA, 19 nt, Artificial Sequence
  Description of Artificial Sequence: Synthetic oligonucleotide
uuaaugauaaacauaaaca

SEQ ID NO: 656436 - RNA, 19 nt, Artificial Sequence
  Description of Artificial Sequence: Synthetic oligonucleotide
aguaguacaaauuagcuuc

SEQ ID NO: 656437 - RNA, 19 nt, Artificial Sequence
  Description of Artificial Sequence: Synthetic oligonucleotide
aaguauaaaggauggaggc

SEQ ID NO: 656438 - RNA, 19 nt, Artificial Sequence
  Description of Artificial Sequence: Synthetic oligonucleotide
auacauaucacugagaaac

SEQ ID NO: 656439 - RNA, 19 nt, Artificial Sequence
  Description of Artificial Sequence: Synthetic oligonucleotide
uguacuuuaaugauaaaca

SEQ ID NO: 656440 - RNA, 19 nt, Artificial Sequence
  Description of Artificial Sequence: Synthetic oligonucleotide
ucuaaugucuuucaaaugu

SEQ ID NO: 656441 - RNA, 19 nt, Artificial Sequence
  Description of Artificial Sequence: Synthetic oligonucleotide
uauguaagauaaaaugggg

SEQ ID NO: 656442 - RNA, 19 nt, Artificial Sequence
  Description of Artificial Sequence: Synthetic oligonucleotide
uuauaauagaaaaccuugg

SEQ ID NO: 656443 - RNA, 19 nt, Artificial Sequence
  Description of Artificial Sequence: Synthetic oligonucleotide
aaguguagaguccuuauag

SEQ ID NO: 656444 - RNA, 19 nt, Artificial Sequence
  Description of Artificial Sequence: Synthetic oligonucleotide
uagaauacggaaaaguuga

SEQ ID NO: 656445 - RNA, 19 nt, Artificial Sequence
  Description of Artificial Sequence: Synthetic oligonucleotide
auauguuuggacuagagau

SEQ ID NO: 656446 - RNA, 19 nt, Artificial Sequence
  Description of Artificial Sequence: Synthetic oligonucleotide
ucaguuucaaccauuugcc

SEQ ID NO: 656447 - RNA, 19 nt, Artificial Sequence
  Description of Artificial Sequence: Synthetic oligonucleotide
agaaccuaaaagcugggac

SEQ ID NO: 656448 - RNA, 19 nt, Artificial Sequence
  Description of Artificial Sequence: Synthetic oligonucleotide
auauguaagauaaaauggg

SEQ ID NO: 656449 - RNA, 19 nt, Artificial Sequence
  Description of Artificial Sequence: Synthetic oligonucleotide
uguuguucaacacauuaca

SEQ ID NO: 656450 - RNA, 19 nt, Artificial Sequence
  Description of Artificial Sequence: Synthetic oligonucleotide
gaaguauaaaggauggagg

SEQ ID NO: 656451 - RNA, 19 nt, Artificial Sequence
  Description of Artificial Sequence: Synthetic oligonucleotide
uguuguacuuuaaugauaa

SEQ ID NO: 656452 - RNA, 19 nt, Artificial Sequence
  Description of Artificial Sequence: Synthetic oligonucleotide
uguaagauaaaauggggaa

SEQ ID NO: 656453 - RNA, 19 nt, Artificial Sequence
  Description of Artificial Sequence: Synthetic oligonucleotide
cagguuaucacguagcagc

SEQ ID NO: 656454 - RNA, 19 nt, Artificial Sequence
  Description of Artificial Sequence: Synthetic oligonucleotide
aauauguuuggacuagaga

SEQ ID NO: 656455 - RNA, 19 nt, Artificial Sequence
  Description of Artificial Sequence: Synthetic oligonucleotide
ugaacuguuaccagcacca

SEQ ID NO: 656456 - RNA, 19 nt, Artificial Sequence
  Description of Artificial Sequence: Synthetic oligonucleotide
agaaguauaaaggauggag

SEQ ID NO: 656457 - RNA, 19 nt, Artificial Sequence
  Description of Artificial Sequence: Synthetic oligonucleotide
auugguauaaaacaauuua

SEQ ID NO: 656458 - RNA, 19 nt, Artificial Sequence
  Description of Artificial Sequence: Synthetic oligonucleotide
aauucugagaccaaacgug

SEQ ID NO: 656459 - RNA, 19 nt, Artificial Sequence
  Description of Artificial Sequence: Synthetic oligonucleotide
ugauuguuguacuuuaaug

SEQ ID NO: 656460 - RNA, 19 nt, Artificial Sequence
  Description of Artificial Sequence: Synthetic oligonucleotide
aguacauccagaaugucac

SEQ ID NO: 656461 - RNA, 19 nt, Artificial Sequence
  Description of Artificial Sequence: Synthetic oligonucleotide
ucugucaucgcaaugucac

SEQ ID NO: 656462 - RNA, 19 nt, Artificial Sequence
  Description of Artificial Sequence: Synthetic oligonucleotide
gaaccuaaaagcugggacc

SEQ ID NO: 656463 - RNA, 19 nt, Artificial Sequence
  Description of Artificial Sequence: Synthetic oligonucleotide
uugguauaaaacaauuuaa

SEQ ID NO: 656464 - RNA, 19 nt, Artificial Sequence
  Description of Artificial Sequence: Synthetic oligonucleotide
uguucaaugcugcugauua

SEQ ID NO: 656465 - RNA, 19 nt, Artificial Sequence
  Description of Artificial Sequence: Synthetic oligonucleotide
uacggaaaaguugagagca

SEQ ID NO: 656466 - RNA, 19 nt, Artificial Sequence
  Description of Artificial Sequence: Synthetic oligonucleotide
uuauucuccaggaugcucu

SEQ ID NO: 656467 - RNA, 19 nt, Artificial Sequence
  Description of Artificial Sequence: Synthetic oligonucleotide
auucagacaaacaauacug

SEQ ID NO: 656468 - RNA, 19 nt, Artificial Sequence
  Description of Artificial Sequence: Synthetic oligonucleotide
gauuaaucuuucuuagaug

SEQ ID NO: 656469 - RNA, 19 nt, Artificial Sequence
  Description of Artificial Sequence: Synthetic oligonucleotide
acuagcagcuuuguaagcc

SEQ ID NO: 656470 - RNA, 19 nt, Artificial Sequence
  Description of Artificial Sequence: Synthetic oligonucleotide
aacacauuacagaacuuuc

SEQ ID NO: 656471 - RNA, 19 nt, Artificial Sequence
  Description of Artificial Sequence: Synthetic oligonucleotide
ggaaccuaaauucugagac

SEQ ID NO: 656472 - RNA, 19 nt, Artificial Sequence
  Description of Artificial Sequence: Synthetic oligonucleotide
agucuaaugucuuucaaau

SEQ ID NO: 656473 - RNA, 19 nt, Artificial Sequence
  Description of Artificial Sequence: Synthetic oligonucleotide
aaaagcugggaccaguaaa

SEQ ID NO: 656474 - RNA, 19 nt, Artificial Sequence
  Description of Artificial Sequence: Synthetic oligonucleotide
uuucaguaagaacaauaca

SEQ ID NO: 656475 - RNA, 19 nt, Artificial Sequence
  Description of Artificial Sequence: Synthetic oligonucleotide
uggacuagagauuuuauuu

SEQ ID NO: 656476 - RNA, 19 nt, Artificial Sequence
  Description of Artificial Sequence: Synthetic oligonucleotide
aacaaaagagguugagcga

SEQ ID NO: 656477 - RNA, 19 nt, Artificial Sequence
  Description of Artificial Sequence: Synthetic oligonucleotide
accuaaacgaauggggugc

SEQ ID NO: 656478 - RNA, 19 nt, Artificial Sequence
  Description of Artificial Sequence: Synthetic oligonucleotide
caugauaaguguagagucc

SEQ ID NO: 656479 - RNA, 19 nt, Artificial Sequence
  Description of Artificial Sequence: Synthetic oligonucleotide
uguguugcuaacugguuug

SEQ ID NO: 656480 - RNA, 19 nt, Artificial Sequence
  Description of Artificial Sequence: Synthetic oligonucleotide
ugucacaacagauuaacuu

SEQ ID NO: 656481 - RNA, 19 nt, Artificial Sequence
  Description of Artificial Sequence: Synthetic oligonucleotide
agaaugucacaacagauua

SEQ ID NO: 656482 - RNA, 19 nt, Artificial Sequence
  Description of Artificial Sequence: Synthetic oligonucleotide
aagucuaaugucuuucaaa

SEQ ID NO: 656483 - RNA, 19 nt, Artificial Sequence
  Description of Artificial Sequence: Synthetic oligonucleotide
ggaggcguaauauauuugg

SEQ ID NO: 656484 - RNA, 19 nt, Artificial Sequence
  Description of Artificial Sequence: Synthetic oligonucleotide
auuguuguacuuuaaugau

SEQ ID NO: 656485 - RNA, 19 nt, Artificial Sequence
  Description of Artificial Sequence: Synthetic oligonucleotide
gauggaagcggauagcguc

SEQ ID NO: 656486 - RNA, 19 nt, Artificial Sequence
  Description of Artificial Sequence: Synthetic oligonucleotide
aacgugaaagucaaauuug

SEQ ID NO: 656487 - RNA, 19 nt, Artificial Sequence
  Description of Artificial Sequence: Synthetic oligonucleotide
aguauaaaggauggaggcg

SEQ ID NO: 656488 - RNA, 19 nt, Artificial Sequence
  Description of Artificial Sequence: Synthetic oligonucleotide
aucgcaaugucacuagcag

SEQ ID NO: 656489 - RNA, 19 nt, Artificial Sequence
  Description of Artificial Sequence: Synthetic oligonucleotide
guagaauacggaaaaguug

SEQ ID NO: 656490 - RNA, 19 nt, Artificial Sequence
  Description of Artificial Sequence: Synthetic oligonucleotide
gagaguggaacacgcaugc

SEQ ID NO: 656491 - RNA, 19 nt, Artificial Sequence
  Description of Artificial Sequence: Synthetic oligonucleotide
ucccgaaucaucuuuaguu

SEQ ID NO: 656492 - RNA, 19 nt, Artificial Sequence
  Description of Artificial Sequence: Synthetic oligonucleotide
aaacgaauggggugcguug

SEQ ID NO: 656493 - RNA, 19 nt, Artificial Sequence
  Description of Artificial Sequence: Synthetic oligonucleotide
uacuguguugcuaacuggu

SEQ ID NO: 656494 - RNA, 19 nt, Artificial Sequence
  Description of Artificial Sequence: Synthetic oligonucleotide
aaauggcggcgcuucaauc

SEQ ID NO: 656495 - RNA, 19 nt, Artificial Sequence
  Description of Artificial Sequence: Synthetic oligonucleotide
accuucaaugcuaaccugc

SEQ ID NO: 656496 - RNA, 19 nt, Artificial Sequence
  Description of Artificial Sequence: Synthetic oligonucleotide
guaaagaaccuaaaagcug

SEQ ID NO: 656497 - RNA, 19 nt, Artificial Sequence
  Description of Artificial Sequence: Synthetic oligonucleotide
ucacugagaaacaaaugau

SEQ ID NO: 656498 - RNA, 19 nt, Artificial Sequence
  Description of Artificial Sequence: Synthetic oligonucleotide
ugucuuucaaaugucauuu

SEQ ID NO: 656499 - RNA, 19 nt, Artificial Sequence
  Description of Artificial Sequence: Synthetic oligonucleotide
ucagagauguguucucuug

SEQ ID NO: 656500 - RNA, 19 nt, Artificial Sequence
  Description of Artificial Sequence: Synthetic oligonucleotide
acauccagaaugucacaac

SEQ ID NO: 656501 - RNA, 19 nt, Artificial Sequence
  Description of Artificial Sequence: Synthetic oligonucleotide
uuuaguuuguccucuccuc

SEQ ID NO: 656502 - RNA, 19 nt, Artificial Sequence
  Description of Artificial Sequence: Synthetic oligonucleotide
guaaucuacugacuuguug

SEQ ID NO: 656503 - RNA, 19 nt, Artificial Sequence
  Description of Artificial Sequence: Synthetic oligonucleotide
aguuuaaacauugguauaa

SEQ ID NO: 656504 - RNA, 19 nt, Artificial Sequence
  Description of Artificial Sequence: Synthetic oligonucleotide
gacggauggaagcggauag

SEQ ID NO: 656505 - RNA, 19 nt, Artificial Sequence
  Description of Artificial Sequence: Synthetic oligonucleotide
gcuaaccugcuucagaggg

SEQ ID NO: 656506 - RNA, 19 nt, Artificial Sequence
  Description of Artificial Sequence: Synthetic oligonucleotide
aaauuuggugguucucagu

SEQ ID NO: 656507 - RNA, 19 nt, Artificial Sequence
  Description of Artificial Sequence: Synthetic oligonucleotide
uaacacccaauuaaguuua

SEQ ID NO: 656508 - RNA, 19 nt, Artificial Sequence
  Description of Artificial Sequence: Synthetic oligonucleotide
acagauuaacuugaguuca

SEQ ID NO: 656509 - RNA, 19 nt, Artificial Sequence
  Description of Artificial Sequence: Synthetic oligonucleotide
gucacuagcagcuuuguaa

SEQ ID NO: 656510 - RNA, 19 nt, Artificial Sequence
  Description of Artificial Sequence: Synthetic oligonucleotide
aacgaauggggugcguugg

SEQ ID NO: 656511 - RNA, 19 nt, Artificial Sequence
  Description of Artificial Sequence: Synthetic oligonucleotide
aagcuaacacccaauuaag

SEQ ID NO: 656512 - RNA, 19 nt, Artificial Sequence
  Description of Artificial Sequence: Synthetic oligonucleotide
aagagguugagcgagcgaa

SEQ ID NO: 656513 - RNA, 19 nt, Artificial Sequence
  Description of Artificial Sequence: Synthetic oligonucleotide
uccaguucugcaauugcgu

SEQ ID NO: 656514 - RNA, 19 nt, Artificial Sequence
  Description of Artificial Sequence: Synthetic oligonucleotide
aggcguaauauauuuggca

SEQ ID NO: 656515 - RNA, 19 nt, Artificial Sequence
  Description of Artificial Sequence: Synthetic oligonucleotide
aggacauguaaucuacuga

SEQ ID NO: 656516 - RNA, 19 nt, Artificial Sequence
  Description of Artificial Sequence: Synthetic oligonucleotide
ugacaauggggacuuccag

SEQ ID NO: 656517 - RNA, 19 nt, Artificial Sequence
  Description of Artificial Sequence: Synthetic oligonucleotide
cuuuugccaaccugcaggc

SEQ ID NO: 656518 - RNA, 19 nt, Artificial Sequence
  Description of Artificial Sequence: Synthetic oligonucleotide
auagaaaaccuuggacucg

SEQ ID NO: 656519 - RNA, 19 nt, Artificial Sequence
  Description of Artificial Sequence: Synthetic oligonucleotide
aacauugguauaaaacaau

SEQ ID NO: 656520 - RNA, 19 nt, Artificial Sequence
  Description of Artificial Sequence: Synthetic oligonucleotide
gaccuaaacgaauggggug

SEQ ID NO: 656521 - RNA, 19 nt, Artificial Sequence
  Description of Artificial Sequence: Synthetic oligonucleotide
acucgccaguguuagcugc

SEQ ID NO: 656522 - RNA, 19 nt, Artificial Sequence
  Description of Artificial Sequence: Synthetic oligonucleotide
cacagaaauucacucuugc

SEQ ID NO: 656523 - RNA, 19 nt, Artificial Sequence
  Description of Artificial Sequence: Synthetic oligonucleotide
ucccgaucauccauagcgg

SEQ ID NO: 656524 - RNA, 19 nt, Artificial Sequence
  Description of Artificial Sequence: Synthetic oligonucleotide
uucaacugucagcuccacg

SEQ ID NO: 656525 - RNA, 19 nt, Artificial Sequence
  Description of Artificial Sequence: Synthetic oligonucleotide
aguggaacacgcaugcagg

SEQ ID NO: 656526 - RNA, 19 nt, Artificial Sequence
  Description of Artificial Sequence: Synthetic oligonucleotide
aaaauggcggcgcuucaau

SEQ ID NO: 656527 - RNA, 19 nt, Artificial Sequence
  Description of Artificial Sequence: Synthetic oligonucleotide
aggaaguucugucaucgca

SEQ ID NO: 656528 - RNA, 19 nt, Artificial Sequence
  Description of Artificial Sequence: Synthetic oligonucleotide
gcuuuauuaugucucacug

SEQ ID NO: 656529 - RNA, 19 nt, Artificial Sequence
  Description of Artificial Sequence: Synthetic oligonucleotide
ucaaccauuugccgguacu

SEQ ID NO: 656530 - RNA, 19 nt, Artificial Sequence
  Description of Artificial Sequence: Synthetic oligonucleotide
cugagaccaaacgugaaag

SEQ ID NO: 656531 - RNA, 19 nt, Artificial Sequence
  Description of Artificial Sequence: Synthetic oligonucleotide
aguuacacauacugaacaa

SEQ ID NO: 656532 - RNA, 19 nt, Artificial Sequence
  Description of Artificial Sequence: Synthetic oligonucleotide
acgugaaagucaaauuugg

SEQ ID NO: 656533 - RNA, 19 nt, Artificial Sequence
  Description of Artificial Sequence: Synthetic oligonucleotide
agcugggaccaguaaaauc

SEQ ID NO: 656534 - RNA, 19 nt, Artificial Sequence
  Description of Artificial Sequence: Synthetic oligonucleotide
auaucacugagaaacaaau

SEQ ID NO: 656535 - RNA, 19 nt, Artificial Sequence
  Description of Artificial Sequence: Synthetic oligonucleotide
guuguucaacacauuacag

SEQ ID NO: 656536 - RNA, 19 nt, Artificial Sequence
  Description of Artificial Sequence: Synthetic oligonucleotide
aaagcugggaccaguaaaa

SEQ ID NO: 656537 - RNA, 19 nt, Artificial Sequence
  Description of Artificial Sequence: Synthetic oligonucleotide
uuguuguacuuuaaugaua

SEQ ID NO: 656538 - RNA, 19 nt, Artificial Sequence
  Description of Artificial Sequence: Synthetic oligonucleotide
uuguaagccacgaggcugu

SEQ ID NO: 656539 - RNA, 19 nt, Artificial Sequence
  Description of Artificial Sequence: Synthetic oligonucleotide
auguaagauaaaaugggga

SEQ ID NO: 656540 - RNA, 19 nt, Artificial Sequence
  Description of Artificial Sequence: Synthetic oligonucleotide
auaaguguagaguccuuau

SEQ ID NO: 656541 - RNA, 19 nt, Artificial Sequence
  Description of Artificial Sequence: Synthetic oligonucleotide
aaaggauggaggcguaaua

SEQ ID NO: 656542 - RNA, 19 nt, Artificial Sequence
  Description of Artificial Sequence: Synthetic oligonucleotide
gagucggcaagaaugagca

SEQ ID NO: 656543 - RNA, 19 nt, Artificial Sequence
  Description of Artificial Sequence: Synthetic oligonucleotide
uucaagcuaacacccaauu

SEQ ID NO: 656544 - RNA, 19 nt, Artificial Sequence
  Description of Artificial Sequence: Synthetic oligonucleotide
uguaucuguggcuccaguc

SEQ ID NO: 656545 - RNA, 19 nt, Artificial Sequence
  Description of Artificial Sequence: Synthetic oligonucleotide
augauuguuguacuuuaau

SEQ ID NO: 656546 - RNA, 19 nt, Artificial Sequence
  Description of Artificial Sequence: Synthetic oligonucleotide
caagaaugagcagccacgg

SEQ ID NO: 656547 - RNA, 19 nt, Artificial Sequence
  Description of Artificial Sequence: Synthetic oligonucleotide
gaagcggauagcgucuccg

SEQ ID NO: 656548 - RNA, 19 nt, Artificial Sequence
  Description of Artificial Sequence: Synthetic oligonucleotide
ugcuaacugguuugaaaga

SEQ ID NO: 656549 - RNA, 19 nt, Artificial Sequence
  Description of Artificial Sequence: Synthetic oligonucleotide
acauaaauacuguguugcu

SEQ ID NO: 656550 - RNA, 19 nt, Artificial Sequence
  Description of Artificial Sequence: Synthetic oligonucleotide
ggaggagucggcaagaaug

SEQ ID NO: 656551 - RNA, 19 nt, Artificial Sequence
  Description of Artificial Sequence: Synthetic oligonucleotide
agcgucuccgacucucggc

SEQ ID NO: 656552 - RNA, 19 nt, Artificial Sequence
  Description of Artificial Sequence: Synthetic oligonucleotide
gagaccaaacgugaaaguc

SEQ ID NO: 656553 - RNA, 19 nt, Artificial Sequence
  Description of Artificial Sequence: Synthetic oligonucleotide
augauaaguguagaguccu

SEQ ID NO: 656554 - RNA, 19 nt, Artificial Sequence
  Description of Artificial Sequence: Synthetic oligonucleotide
uuuggacuagagauuuuau

SEQ ID NO: 656555 - RNA, 19 nt, Artificial Sequence
  Description of Artificial Sequence: Synthetic oligonucleotide
gcaugauaaguguagaguc

SEQ ID NO: 656556 - RNA, 19 nt, Artificial Sequence
  Description of Artificial Sequence: Synthetic oligonucleotide
cuaaccugcuucagagggg

SEQ ID NO: 656557 - RNA, 19 nt, Artificial Sequence
  Description of Artificial Sequence: Synthetic oligonucleotide
ugcaucaccuagaagucua

SEQ ID NO: 656558 - RNA, 19 nt, Artificial Sequence
  Description of Artificial Sequence: Synthetic oligonucleotide
caguuucaaccauuugccg

SEQ ID NO: 656559 - RNA, 19 nt, Artificial Sequence
  Description of Artificial Sequence: Synthetic oligonucleotide
uaacuugaguucaguuuca

SEQ ID NO: 656560 - RNA, 19 nt, Artificial Sequence
  Description of Artificial Sequence: Synthetic oligonucleotide
uaaguguagaguccuuaua

SEQ ID NO: 656561 - RNA, 19 nt, Artificial Sequence
  Description of Artificial Sequence: Synthetic oligonucleotide
guaucuguggcuccaguca

SEQ ID NO: 656562 - RNA, 19 nt, Artificial Sequence
  Description of Artificial Sequence: Synthetic oligonucleotide
uuggacuagagauuuuauu

SEQ ID NO: 656563 - RNA, 19 nt, Artificial Sequence
  Description of Artificial Sequence: Synthetic oligonucleotide
agucaaauuuggugguucu

SEQ ID NO: 656564 - RNA, 19 nt, Artificial Sequence
  Description of Artificial Sequence: Synthetic oligonucleotide
agccagauaccugugguag

SEQ ID NO: 656565 - RNA, 19 nt, Artificial Sequence
  Description of Artificial Sequence: Synthetic oligonucleotide
agcaagaccuaaacgaaug

SEQ ID NO: 656566 - RNA, 19 nt, Artificial Sequence
  Description of Artificial Sequence: Synthetic oligonucleotide
ggauuguugaacuguuacc

SEQ ID NO: 656567 - RNA, 19 nt, Artificial Sequence
  Description of Artificial Sequence: Synthetic oligonucleotide
aggaaccuaaauucugaga

SEQ ID NO: 656568 - RNA, 19 nt, Artificial Sequence
  Description of Artificial Sequence: Synthetic oligonucleotide
aaagagguugagcgagcga

SEQ ID NO: 656569 - RNA, 19 nt, Artificial Sequence
  Description of Artificial Sequence: Synthetic oligonucleotide
auggaggcguaauauauuu

SEQ ID NO: 656570 - RNA, 19 nt, Artificial Sequence
  Description of Artificial Sequence: Synthetic oligonucleotide
uaaaagcugggaccaguaa

SEQ ID NO: 656571 - RNA, 19 nt, Artificial Sequence
  Description of Artificial Sequence: Synthetic oligonucleotide
acuucaagcuaacacccaa

SEQ ID NO: 656572 - RNA, 19 nt, Artificial Sequence
  Description of Artificial Sequence: Synthetic oligonucleotide
ucaauccgggacuuccgcc

SEQ ID NO: 656573 - RNA, 19 nt, Artificial Sequence
  Description of Artificial Sequence: Synthetic oligonucleotide
ugagaccaaacgugaaagu

SEQ ID NO: 656574 - RNA, 19 nt, Artificial Sequence
  Description of Artificial Sequence: Synthetic oligonucleotide
ucaucgcaaugucacuagc

SEQ ID NO: 656575 - RNA, 19 nt, Artificial Sequence
  Description of Artificial Sequence: Synthetic oligonucleotide
gaaugagguguuuguccag

SEQ ID NO: 656576 - RNA, 19 nt, Artificial Sequence
  Description of Artificial Sequence: Synthetic oligonucleotide
aagauaaaauggggaauau

SEQ ID NO: 656577 - RNA, 19 nt, Artificial Sequence
  Description of Artificial Sequence: Synthetic oligonucleotide
uggaggcguaauauauuug

SEQ ID NO: 656578 - RNA, 19 nt, Artificial Sequence
  Description of Artificial Sequence: Synthetic oligonucleotide
auugcgucaucaaaagcug

SEQ ID NO: 656579 - RNA, 19 nt, Artificial Sequence
  Description of Artificial Sequence: Synthetic oligonucleotide
gucaucgcaaugucacuag

SEQ ID NO: 656580 - RNA, 19 nt, Artificial Sequence
  Description of Artificial Sequence: Synthetic oligonucleotide
ucaugugauuaaucuuucu

SEQ ID NO: 656581 - RNA, 19 nt, Artificial Sequence
  Description of Artificial Sequence: Synthetic oligonucleotide
ugcgcgacggauggaagcg

SEQ ID NO: 656582 - RNA, 19 nt, Artificial Sequence
  Description of Artificial Sequence: Synthetic oligonucleotide
ugcaggcacggucagggga

SEQ ID NO: 656583 - RNA, 19 nt, Artificial Sequence
  Description of Artificial Sequence: Synthetic oligonucleotide
uugcgucaucaaaagcugc

SEQ ID NO: 656584 - RNA, 19 nt, Artificial Sequence
  Description of Artificial Sequence: Synthetic oligonucleotide
augucuuucaaaugucauu

SEQ ID NO: 656585 - RNA, 19 nt, Artificial Sequence
  Description of Artificial Sequence: Synthetic oligonucleotide
cagauuaacuugaguucag

SEQ ID NO: 656586 - RNA, 19 nt, Artificial Sequence
  Description of Artificial Sequence: Synthetic oligonucleotide
cagauauccaguaguacaa

SEQ ID NO: 656587 - RNA, 19 nt, Artificial Sequence
  Description of Artificial Sequence: Synthetic oligonucleotide
uguguucucuuguuggcuu

SEQ ID NO: 656588 - RNA, 19 nt, Artificial Sequence
  Description of Artificial Sequence: Synthetic oligonucleotide
agaccuaaacgaauggggu

SEQ ID NO: 656589 - RNA, 19 nt, Artificial Sequence
  Description of Artificial Sequence: Synthetic oligonucleotide
gagucuguaucuguggcuc

SEQ ID NO: 656590 - RNA, 19 nt, Artificial Sequence
  Description of Artificial Sequence: Synthetic oligonucleotide
gaggcguaauauauuuggc

SEQ ID NO: 656591 - RNA, 19 nt, Artificial Sequence
  Description of Artificial Sequence: Synthetic oligonucleotide
ggggaauauuuucacauuc

SEQ ID NO: 656592 - RNA, 19 nt, Artificial Sequence
  Description of Artificial Sequence: Synthetic oligonucleotide
uuugccgguacucccgaau

SEQ ID NO: 656593 - RNA, 19 nt, Artificial Sequence
  Description of Artificial Sequence: Synthetic oligonucleotide
gaagucuaaugucuuucaa

SEQ ID NO: 656594 - RNA, 19 nt, Artificial Sequence
  Description of Artificial Sequence: Synthetic oligonucleotide
aauccgggacuuccgccug

SEQ ID NO: 656595 - RNA, 19 nt, Artificial Sequence
  Description of Artificial Sequence: Synthetic oligonucleotide
uccuuauagcuuucuucac

SEQ ID NO: 656596 - RNA, 19 nt, Artificial Sequence
  Description of Artificial Sequence: Synthetic oligonucleotide
uauaaaggauggaggcgua

SEQ ID NO: 656597 - RNA, 19 nt, Artificial Sequence
  Description of Artificial Sequence: Synthetic oligonucleotide
guuucaaccauuugccggu

SEQ ID NO: 656598 - RNA, 19 nt, Artificial Sequence
  Description of Artificial Sequence: Synthetic oligonucleotide
agcuucgccugguacacca

SEQ ID NO: 656599 - RNA, 19 nt, Artificial Sequence
  Description of Artificial Sequence: Synthetic oligonucleotide
uccgcguccgagcaguaaa

SEQ ID NO: 656600 - RNA, 19 nt, Artificial Sequence
  Description of Artificial Sequence: Synthetic oligonucleotide
agagaguggaacacgcaug

SEQ ID NO: 656601 - RNA, 19 nt, Artificial Sequence
  Description of Artificial Sequence: Synthetic oligonucleotide
uaaaggauggaggcguaau

SEQ ID NO: 656602 - RNA, 19 nt, Artificial Sequence
  Description of Artificial Sequence: Synthetic oligonucleotide
gcuuuguaagccacgaggc

SEQ ID NO: 656603 - RNA, 19 nt, Artificial Sequence
  Description of Artificial Sequence: Synthetic oligonucleotide
agccacggauuguugaacu

SEQ ID NO: 656604 - RNA, 19 nt, Artificial Sequence
  Description of Artificial Sequence: Synthetic oligonucleotide
gauaaguguagaguccuua

SEQ ID NO: 656605 - RNA, 19 nt, Artificial Sequence
  Description of Artificial Sequence: Synthetic oligonucleotide
gguugagcgagcgaaggag

SEQ ID NO: 656606 - RNA, 19 nt, Artificial Sequence
  Description of Artificial Sequence: Synthetic oligonucleotide
cuaacacccaauuaaguuu

SEQ ID NO: 656607 - RNA, 19 nt, Artificial Sequence
  Description of Artificial Sequence: Synthetic oligonucleotide
gucagguuaucacguagca

SEQ ID NO: 656608 - RNA, 19 nt, Artificial Sequence
  Description of Artificial Sequence: Synthetic oligonucleotide
caucgcaaugucacuagca

SEQ ID NO: 656609 - RNA, 19 nt, Artificial Sequence
  Description of Artificial Sequence: Synthetic oligonucleotide
auauccaguaguacaaauu

SEQ ID NO: 656610 - RNA, 19 nt, Artificial Sequence
  Description of Artificial Sequence: Synthetic oligonucleotide
agauuaacuugaguucagu

SEQ ID NO: 656611 - RNA, 19 nt, Artificial Sequence
  Description of Artificial Sequence: Synthetic oligonucleotide
uaaacgaauggggugcguu

SEQ ID NO: 656612 - RNA, 19 nt, Artificial Sequence
  Description of Artificial Sequence: Synthetic oligonucleotide
auuaugucucacugauuuu

SEQ ID NO: 656613 - RNA, 19 nt, Artificial Sequence
  Description of Artificial Sequence: Synthetic oligonucleotide
ucaacacauuacagaacuu

SEQ ID NO: 656614 - RNA, 19 nt, Artificial Sequence
  Description of Artificial Sequence: Synthetic oligonucleotide
agaauacggaaaaguugag

SEQ ID NO: 656615 - RNA, 19 nt, Artificial Sequence
  Description of Artificial Sequence: Synthetic oligonucleotide
uggggugcguuggaggaag

SEQ ID NO: 656616 - RNA, 19 nt, Artificial Sequence
  Description of Artificial Sequence: Synthetic oligonucleotide
gcuaacugguuugaaagac

SEQ ID NO: 656617 - RNA, 19 nt, Artificial Sequence
  Description of Artificial Sequence: Synthetic oligonucleotide
uacucccgaaucaucuuua

SEQ ID NO: 656618 - RNA, 19 nt, Artificial Sequence
  Description of Artificial Sequence: Synthetic oligonucleotide
uaguguuguaaagaaccua

SEQ ID NO: 656619 - RNA, 19 nt, Artificial Sequence
  Description of Artificial Sequence: Synthetic oligonucleotide
ugcguuggaggaaguucug

SEQ ID NO: 656620 - RNA, 19 nt, Artificial Sequence
  Description of Artificial Sequence: Synthetic oligonucleotide
gaccaaacgugaaagucaa

SEQ ID NO: 656621 - RNA, 19 nt, Artificial Sequence
  Description of Artificial Sequence: Synthetic oligonucleotide
ugacagcacauaugccucu

SEQ ID NO: 656622 - RNA, 19 nt, Artificial Sequence
  Description of Artificial Sequence: Synthetic oligonucleotide
uaucgcucggccugcucug

SEQ ID NO: 656623 - RNA, 19 nt, Artificial Sequence
  Description of Artificial Sequence: Synthetic oligonucleotide
uucaaccauuugccgguac

SEQ ID NO: 656624 - RNA, 19 nt, Artificial Sequence
  Description of Artificial Sequence: Synthetic oligonucleotide
cacuagcagcuuuguaagc

SEQ ID NO: 656625 - RNA, 19 nt, Artificial Sequence
  Description of Artificial Sequence: Synthetic oligonucleotide
cugcgcgacggauggaagc

SEQ ID NO: 656626 - RNA, 19 nt, Artificial Sequence
  Description of Artificial Sequence: Synthetic oligonucleotide
uucuuagaugcaucaccua

SEQ ID NO: 656627 - RNA, 19 nt, Artificial Sequence
  Description of Artificial Sequence: Synthetic oligonucleotide
aggauggaggcguaauaua

SEQ ID NO: 656628 - RNA, 19 nt, Artificial Sequence
  Description of Artificial Sequence: Synthetic oligonucleotide
aggaggaggaggagggagg

SEQ ID NO: 656629 - RNA, 19 nt, Artificial Sequence
  Description of Artificial Sequence: Synthetic oligonucleotide
ucuaugcaguccuguuagu

SEQ ID NO: 656630 - RNA, 19 nt, Artificial Sequence
  Description of Artificial Sequence: Synthetic oligonucleotide
acggucaggggaauuaaga

SEQ ID NO: 656631 - RNA, 19 nt, Artificial Sequence
  Description of Artificial Sequence: Synthetic oligonucleotide
ugauaaguguagaguccuu

SEQ ID NO: 656632 - RNA, 19 nt, Artificial Sequence
  Description of Artificial Sequence: Synthetic oligonucleotide
acgaggcuguucucugcgg

SEQ ID NO: 656633 - RNA, 19 nt, Artificial Sequence
  Description of Artificial Sequence: Synthetic oligonucleotide
gacucgccaguguuagcug

SEQ ID NO: 656634 - RNA, 19 nt, Artificial Sequence
  Description of Artificial Sequence: Synthetic oligonucleotide
aacuugaguucaguuucaa

SEQ ID NO: 656635 - RNA, 19 nt, Artificial Sequence
  Description of Artificial Sequence: Synthetic oligonucleotide
ugccucuaucaugugauua

SEQ ID NO: 656636 - RNA, 19 nt, Artificial Sequence
  Description of Artificial Sequence: Synthetic oligonucleotide
agguugagcgagcgaagga

SEQ ID NO: 656637 - RNA, 19 nt, Artificial Sequence
  Description of Artificial Sequence: Synthetic oligonucleotide
gggucugcgcgacggaugg

SEQ ID NO: 656638 - RNA, 19 nt, Artificial Sequence
  Description of Artificial Sequence: Synthetic oligonucleotide
agcuaacacccaauuaagu

SEQ ID NO: 656639 - RNA, 19 nt, Artificial Sequence
  Description of Artificial Sequence: Synthetic oligonucleotide
cuaaaagcugggaccagua

SEQ ID NO: 656640 - RNA, 19 nt, Artificial Sequence
  Description of Artificial Sequence: Synthetic oligonucleotide
ggagucggcaagaaugagc

SEQ ID NO: 656641 - RNA, 19 nt, Artificial Sequence
  Description of Artificial Sequence: Synthetic oligonucleotide
cagcacauaugccucuauc

SEQ ID NO: 656642 - RNA, 19 nt, Artificial Sequence
  Description of Artificial Sequence: Synthetic oligonucleotide
caugugauuaaucuuucuu

SEQ ID NO: 656643 - RNA, 19 nt, Artificial Sequence
  Description of Artificial Sequence: Synthetic oligonucleotide
agucagauauccaguagua

SEQ ID NO: 656644 - RNA, 19 nt, Artificial Sequence
  Description of Artificial Sequence: Synthetic oligonucleotide
gaaugucacaacagauuaa

SEQ ID NO: 656645 - RNA, 19 nt, Artificial Sequence
  Description of Artificial Sequence: Synthetic oligonucleotide
aguugagagcaagaccuaa

SEQ ID NO: 656646 - RNA, 19 nt, Artificial Sequence
  Description of Artificial Sequence: Synthetic oligonucleotide
gaagagaguggaacacgca

SEQ ID NO: 656647 - RNA, 19 nt, Artificial Sequence
  Description of Artificial Sequence: Synthetic oligonucleotide
ccgaaucaucuuuaguuug

SEQ ID NO: 656648 - RNA, 19 nt, Artificial Sequence
  Description of Artificial Sequence: Synthetic oligonucleotide
guaagauaaaauggggaau

SEQ ID NO: 656649 - RNA, 19 nt, Artificial Sequence
  Description of Artificial Sequence: Synthetic oligonucleotide
ggcguaauauauuuggcau

SEQ ID NO: 656650 - RNA, 19 nt, Artificial Sequence
  Description of Artificial Sequence: Synthetic oligonucleotide
cagucagauauccaguagu

SEQ ID NO: 656651 - RNA, 19 nt, Artificial Sequence
  Description of Artificial Sequence: Synthetic oligonucleotide
ccaccauuucgucguaucg

SEQ ID NO: 656652 - RNA, 19 nt, Artificial Sequence
  Description of Artificial Sequence: Synthetic oligonucleotide
auagcgucuccgacucucg

SEQ ID NO: 656653 - RNA, 19 nt, Artificial Sequence
  Description of Artificial Sequence: Synthetic oligonucleotide
cauugguauaaaacaauuu

SEQ ID NO: 656654 - RNA, 19 nt, Artificial Sequence
  Description of Artificial Sequence: Synthetic oligonucleotide
uucucuuguuggcuuuauu

SEQ ID NO: 656655 - RNA, 19 nt, Artificial Sequence
  Description of Artificial Sequence: Synthetic oligonucleotide
cugcagcgcuucuuuauuc

SEQ ID NO: 656656 - RNA, 19 nt, Artificial Sequence
  Description of Artificial Sequence: Synthetic oligonucleotide
agucggcaagaaugagcag

SEQ ID NO: 656657 - RNA, 19 nt, Artificial Sequence
  Description of Artificial Sequence: Synthetic oligonucleotide
uccauagcggcagcggcuc

SEQ ID NO: 656658 - RNA, 19 nt, Artificial Sequence
  Description of Artificial Sequence: Synthetic oligonucleotide
agagguugagcgagcgaag

SEQ ID NO: 656659 - RNA, 19 nt, Artificial Sequence
  Description of Artificial Sequence: Synthetic oligonucleotide
uguuuggacuagagauuuu

SEQ ID NO: 656660 - RNA, 19 nt, Artificial Sequence
  Description of Artificial Sequence: Synthetic oligonucleotide
aagcugggaccaguaaaau

SEQ ID NO: 656661 - RNA, 19 nt, Artificial Sequence
  Description of Artificial Sequence: Synthetic oligonucleotide
agguuaucacguagcagcu

SEQ ID NO: 656662 - RNA, 19 nt, Artificial Sequence
  Description of Artificial Sequence: Synthetic oligonucleotide
auggaagcggauagcgucu

SEQ ID NO: 656663 - RNA, 19 nt, Artificial Sequence
  Description of Artificial Sequence: Synthetic oligonucleotide
uggcggcgcuucaauccgg

SEQ ID NO: 656664 - RNA, 19 nt, Artificial Sequence
  Description of Artificial Sequence: Synthetic oligonucleotide
cggauuguugaacuguuac

SEQ ID NO: 656665 - RNA, 19 nt, Artificial Sequence
  Description of Artificial Sequence: Synthetic oligonucleotide
gcuaacacccaauuaaguu

SEQ ID NO: 656666 - RNA, 19 nt, Artificial Sequence
  Description of Artificial Sequence: Synthetic oligonucleotide
gcgucagguuaucacguag

SEQ ID NO: 656667 - RNA, 19 nt, Artificial Sequence
  Description of Artificial Sequence: Synthetic oligonucleotide
caaauauguuuggacuaga

SEQ ID NO: 656668 - RNA, 19 nt, Artificial Sequence
  Description of Artificial Sequence: Synthetic oligonucleotide
auaaaggauggaggcguaa

SEQ ID NO: 656669 - RNA, 19 nt, Artificial Sequence
  Description of Artificial Sequence: Synthetic oligonucleotide
caggggaauuaagaauuuc

SEQ ID NO: 656670 - RNA, 19 nt, Artificial Sequence
  Description of Artificial Sequence: Synthetic oligonucleotide
acgaauggggugcguugga

SEQ ID NO: 656671 - RNA, 19 nt, Artificial Sequence
  Description of Artificial Sequence: Synthetic oligonucleotide
auagcggcagcggcuccgg

SEQ ID NO: 656672 - RNA, 19 nt, Artificial Sequence
  Description of Artificial Sequence: Synthetic oligonucleotide
ggugcguuggaggaaguuc

SEQ ID NO: 656673 - RNA, 19 nt, Artificial Sequence
  Description of Artificial Sequence: Synthetic oligonucleotide
aggagucggcaagaaugag

SEQ ID NO: 656674 - RNA, 19 nt, Artificial Sequence
  Description of Artificial Sequence: Synthetic oligonucleotide
cgucagguuaucacguagc

SEQ ID NO: 656675 - RNA, 19 nt, Artificial Sequence
  Description of Artificial Sequence: Synthetic oligonucleotide
aaguugagagcaagaccua

SEQ ID NO: 656676 - RNA, 19 nt, Artificial Sequence
  Description of Artificial Sequence: Synthetic oligonucleotide
acuuccgccugcgcacgcg

SEQ ID NO: 656677 - RNA, 19 nt, Artificial Sequence
  Description of Artificial Sequence: Synthetic oligonucleotide
cacuucaagcuaacaccca

SEQ ID NO: 656678 - RNA, 19 nt, Artificial Sequence
  Description of Artificial Sequence: Synthetic oligonucleotide
cccgaucauccauagcggc

SEQ ID NO: 656679 - RNA, 19 nt, Artificial Sequence
  Description of Artificial Sequence: Synthetic oligonucleotide
ggcuuuauuaugucucacu

SEQ ID NO: 656680 - RNA, 19 nt, Artificial Sequence
  Description of Artificial Sequence: Synthetic oligonucleotide
agccacgaggcuguucucu

SEQ ID NO: 656681 - RNA, 19 nt, Artificial Sequence
  Description of Artificial Sequence: Synthetic oligonucleotide
ccaaccugcaggcacgguc

SEQ ID NO: 656682 - RNA, 19 nt, Artificial Sequence
  Description of Artificial Sequence: Synthetic oligonucleotide
ggacuagagauuuuauuuu

SEQ ID NO: 656683 - RNA, 19 nt, Artificial Sequence
  Description of Artificial Sequence: Synthetic oligonucleotide
accuaaaagcugggaccag

SEQ ID NO: 656684 - RNA, 19 nt, Artificial Sequence
  Description of Artificial Sequence: Synthetic oligonucleotide
ggggacuuccaggggaggg

SEQ ID NO: 656685 - RNA, 19 nt, Artificial Sequence
  Description of Artificial Sequence: Synthetic oligonucleotide
cuucgccugguacaccaga

SEQ ID NO: 656686 - RNA, 19 nt, Artificial Sequence
  Description of Artificial Sequence: Synthetic oligonucleotide
acacccaauuaaguuuaaa

SEQ ID NO: 656687 - RNA, 19 nt, Artificial Sequence
  Description of Artificial Sequence: Synthetic oligonucleotide
caauccgggacuuccgccu

SEQ ID NO: 656688 - RNA, 19 nt, Artificial Sequence
  Description of Artificial Sequence: Synthetic oligonucleotide
cacccugcaugucugaggu

SEQ ID NO: 656689 - RNA, 19 nt, Artificial Sequence
  Description of Artificial Sequence: Synthetic oligonucleotide
cauuugccgguacucccga

SEQ ID NO: 656690 - RNA, 19 nt, Artificial Sequence
  Description of Artificial Sequence: Synthetic oligonucleotide
acuguguugcuaacugguu

SEQ ID NO: 656691 - RNA, 19 nt, Artificial Sequence
  Description of Artificial Sequence: Synthetic oligonucleotide
aggcuguucucugcggccu

SEQ ID NO: 656692 - RNA, 19 nt, Artificial Sequence
  Description of Artificial Sequence: Synthetic oligonucleotide
gguuaucacguagcagcug

SEQ ID NO: 656693 - RNA, 19 nt, Artificial Sequence
  Description of Artificial Sequence: Synthetic oligonucleotide
ccuaaacgaauggggugcg

SEQ ID NO: 656694 - RNA, 19 nt, Artificial Sequence
  Description of Artificial Sequence: Synthetic oligonucleotide
uuucaaccauuugccggua

SEQ ID NO: 656695 - RNA, 19 nt, Artificial Sequence
  Description of Artificial Sequence: Synthetic oligonucleotide
ccagauaccugugguaguc

SEQ ID NO: 656696 - RNA, 19 nt, Artificial Sequence
  Description of Artificial Sequence: Synthetic oligonucleotide
cagccacggauuguugaac

SEQ ID NO: 656697 - RNA, 19 nt, Artificial Sequence
  Description of Artificial Sequence: Synthetic oligonucleotide
gauggaggcguaauauauu

SEQ ID NO: 656698 - RNA, 19 nt, Artificial Sequence
  Description of Artificial Sequence: Synthetic oligonucleotide
cucgcuccgcguccgagca

SEQ ID NO: 656699 - RNA, 19 nt, Artificial Sequence
  Description of Artificial Sequence: Synthetic oligonucleotide
cuucaagcuaacacccaau

SEQ ID NO: 656700 - RNA, 19 nt, Artificial Sequence
  Description of Artificial Sequence: Synthetic oligonucleotide
gacuuccgccugcgcacgc

SEQ ID NO: 656701 - RNA, 19 nt, Artificial Sequence
  Description of Artificial Sequence: Synthetic oligonucleotide
uaccaccuucaaugcuaac

SEQ ID NO: 656702 - RNA, 19 nt, Artificial Sequence
  Description of Artificial Sequence: Synthetic oligonucleotide
ccauuacaacaaacucccc

SEQ ID NO: 656703 - RNA, 19 nt, Artificial Sequence
  Description of Artificial Sequence: Synthetic oligonucleotide
guguugcuaacugguuuga

SEQ ID NO: 656704 - RNA, 19 nt, Artificial Sequence
  Description of Artificial Sequence: Synthetic oligonucleotide
auuugccgguacucccgaa

SEQ ID NO: 656705 - RNA, 19 nt, Artificial Sequence
  Description of Artificial Sequence: Synthetic oligonucleotide
gagcaagaccuaaacgaau

SEQ ID NO: 656706 - RNA, 19 nt, Artificial Sequence
  Description of Artificial Sequence: Synthetic oligonucleotide
ggauggaggcguaauauau

SEQ ID NO: 656707 - RNA, 19 nt, Artificial Sequence
  Description of Artificial Sequence: Synthetic oligonucleotide
cuguguugcuaacugguuu

SEQ ID NO: 656708 - RNA, 19 nt, Artificial Sequence
  Description of Artificial Sequence: Synthetic oligonucleotide
uccagagcgucagguuauc

SEQ ID NO: 656709 - RNA, 19 nt, Artificial Sequence
  Description of Artificial Sequence: Synthetic oligonucleotide
ggccccaaauacauaucac

SEQ ID NO: 656710 - RNA, 19 nt, Artificial Sequence
  Description of Artificial Sequence: Synthetic oligonucleotide
ggacucgccaguguuagcu

SEQ ID NO: 656711 - RNA, 19 nt, Artificial Sequence
  Description of Artificial Sequence: Synthetic oligonucleotide
acggaaaaguugagagcaa

SEQ ID NO: 656712 - RNA, 19 nt, Artificial Sequence
  Description of Artificial Sequence: Synthetic oligonucleotide
gcagccacggauuguugaa

SEQ ID NO: 656713 - RNA, 19 nt, Artificial Sequence
  Description of Artificial Sequence: Synthetic oligonucleotide
ccaaacgugaaagucaaau

SEQ ID NO: 656714 - RNA, 19 nt, Artificial Sequence
  Description of Artificial Sequence: Synthetic oligonucleotide
caauacugucaaauauguu

SEQ ID NO: 656715 - RNA, 19 nt, Artificial Sequence
  Description of Artificial Sequence: Synthetic oligonucleotide
ccgaucauccauagcggca

SEQ ID NO: 656716 - RNA, 19 nt, Artificial Sequence
  Description of Artificial Sequence: Synthetic oligonucleotide
ccagcuucgccugguacac

SEQ ID NO: 656717 - RNA, 19 nt, Artificial Sequence
  Description of Artificial Sequence: Synthetic oligonucleotide
ggacuuccgccugcgcacg

SEQ ID NO: 656718 - RNA, 19 nt, Artificial Sequence
  Description of Artificial Sequence: Synthetic oligonucleotide
cacggauuguugaacuguu

SEQ ID NO: 656719 - RNA, 19 nt, Artificial Sequence
  Description of Artificial Sequence: Synthetic oligonucleotide
acggauuguugaacuguua

SEQ ID NO: 656720 - RNA, 19 nt, Artificial Sequence
  Description of Artificial Sequence: Synthetic oligonucleotide
gcugauuauucuccaggau

SEQ ID NO: 656721 - RNA, 19 nt, Artificial Sequence
  Description of Artificial Sequence: Synthetic oligonucleotide
gcggauagcgucuccgacu

SEQ ID NO: 656722 - RNA, 19 nt, Artificial Sequence
  Description of Artificial Sequence: Synthetic oligonucleotide
cugucaucgcaaugucacu

SEQ ID NO: 656723 - RNA, 19 nt, Artificial Sequence
  Description of Artificial Sequence: Synthetic oligonucleotide
gcguaauauauuuggcauu

SEQ ID NO: 656724 - RNA, 19 nt, Artificial Sequence
  Description of Artificial Sequence: Synthetic oligonucleotide
cggcgcuucaauccgggac

SEQ ID NO: 656725 - RNA, 19 nt, Artificial Sequence
  Description of Artificial Sequence: Synthetic oligonucleotide
gcuguucucugcggccucc

SEQ ID NO: 656726 - RNA, 19 nt, Artificial Sequence
  Description of Artificial Sequence: Synthetic oligonucleotide
gcgucuccgacucucggcu

SEQ ID NO: 656727 - RNA, 19 nt, Artificial Sequence
  Description of Artificial Sequence: Synthetic oligonucleotide
ggcacggucaggggaauua

SEQ ID NO: 656728 - RNA, 19 nt, Artificial Sequence
  Description of Artificial Sequence: Synthetic oligonucleotide
accaaacgugaaagucaaa

SEQ ID NO: 656729 - RNA, 19 nt, Artificial Sequence
  Description of Artificial Sequence: Synthetic oligonucleotide
cguaauauauuuggcauuu

SEQ ID NO: 656730 - RNA, 19 nt, Artificial Sequence
  Description of Artificial Sequence: Synthetic oligonucleotide
cccgaaucaucuuuaguuu

SEQ ID NO: 656731 - RNA, 19 nt, Artificial Sequence
  Description of Artificial Sequence: Synthetic oligonucleotide
guccagagcgucagguuau

SEQ ID NO: 656732 - RNA, 19 nt, Artificial Sequence
  Description of Artificial Sequence: Synthetic oligonucleotide
guguuucaguaagaacaau

SEQ ID NO: 656733 - RNA, 19 nt, Artificial Sequence
  Description of Artificial Sequence: Synthetic oligonucleotide
cgugaaagucaaauuuggu

SEQ ID NO: 656734 - RNA, 19 nt, Artificial Sequence
  Description of Artificial Sequence: Synthetic oligonucleotide
gcgcgacggauggaagcgg

SEQ ID NO: 656735 - RNA, 19 nt, Artificial Sequence
  Description of Artificial Sequence: Synthetic oligonucleotide
gcgagcgaaggaggaggag

SEQ ID NO: 656736 - RNA, 19 nt, Artificial Sequence
  Description of Artificial Sequence: Synthetic oligonucleotide
cuaaacgaauggggugcgu

SEQ ID NO: 656737 - RNA, 19 nt, Artificial Sequence
  Description of Artificial Sequence: Synthetic oligonucleotide
cuguucaaugcugcugauu

SEQ ID NO: 656738 - RNA, 19 nt, Artificial Sequence
  Description of Artificial Sequence: Synthetic oligonucleotide
cugcggccuccuuccuguc

SEQ ID NO: 656739 - RNA, 19 nt, Artificial Sequence
  Description of Artificial Sequence: Synthetic oligonucleotide
gcguuggaggaaguucugu

SEQ ID NO: 656740 - RNA, 19 nt, Artificial Sequence
  Description of Artificial Sequence: Synthetic oligonucleotide
cgcgacggauggaagcgga

SEQ ID NO: 656741 - RNA, 19 nt, Artificial Sequence
  Description of Artificial Sequence: Synthetic oligonucleotide
ccagagcgucagguuauca

SEQ ID NO: 656742 - RNA, 19 nt, Artificial Sequence
  Description of Artificial Sequence: Synthetic oligonucleotide
ccgcguccgagcaguaaaa

SEQ ID NO: 656743 - RNA, 19 nt, Artificial Sequence
  Description of Artificial Sequence: Synthetic oligonucleotide
gcggcgcuucaauccggga

SEQ ID NO: 656744 - RNA, 19 nt, Artificial Sequence
  Description of Artificial Sequence: Synthetic oligonucleotide
ggauagcgucuccgacucu

SEQ ID NO: 656745 - RNA, 19 nt, Artificial Sequence
  Description of Artificial Sequence: Synthetic oligonucleotide
cgacggauggaagcggaua

SEQ ID NO: 656746 - RNA, 19 nt, Artificial Sequence
  Description of Artificial Sequence: Synthetic oligonucleotide
ggucugcgcgacggaugga

SEQ ID NO: 656747 - RNA, 19 nt, Artificial Sequence
  Description of Artificial Sequence: Synthetic oligonucleotide
gggugcguuggaggaaguu

SEQ ID NO: 656748 - RNA, 19 nt, Artificial Sequence
  Description of Artificial Sequence: Synthetic oligonucleotide
gcgacggauggaagcggau

SEQ ID NO: 656749 - RNA, 19 nt, Artificial Sequence
  Description of Artificial Sequence: Synthetic oligonucleotide
caggcacggucaggggaau

SEQ ID NO: 656750 - RNA, 19 nt, Artificial Sequence
  Description of Artificial Sequence: Synthetic oligonucleotide
ggggugcguuggaggaagu

SEQ ID NO: 656751 - RNA, 19 nt, Artificial Sequence
  Description of Artificial Sequence: Synthetic oligonucleotide
gcgcuucaauccgggacuu

SEQ ID NO: 656752 - RNA, 19 nt, Artificial Sequence
  Description of Artificial Sequence: Synthetic oligonucleotide
cgucuccgacucucggcuu

SEQ ID NO: 656753 - RNA, 19 nt, Artificial Sequence
  Description of Artificial Sequence: Synthetic oligonucleotide
aaucguaacagcaagcugc

SEQ ID NO: 656754 - RNA, 19 nt, Artificial Sequence
  Description of Artificial Sequence: Synthetic oligonucleotide
aacggcacuaaacugagac

SEQ ID NO: 656755 - RNA, 19 nt, Artificial Sequence
  Description of Artificial Sequence: Synthetic oligonucleotide
ucguaaaccacaaugaccc

SEQ ID NO: 656756 - RNA, 19 nt, Artificial Sequence
  Description of Artificial Sequence: Synthetic oligonucleotide
aaacugguuaaucaguccg

SEQ ID NO: 656757 - RNA, 19 nt, Artificial Sequence
  Description of Artificial Sequence: Synthetic oligonucleotide
aaaccuguuggccaaaagg

SEQ ID NO: 656758 - RNA, 19 nt, Artificial Sequence
  Description of Artificial Sequence: Synthetic oligonucleotide
uaaauaacggcacuaaacu

SEQ ID NO: 656759 - RNA, 19 nt, Artificial Sequence
  Description of Artificial Sequence: Synthetic oligonucleotide
aauacugaacccaaagugg

SEQ ID NO: 656760 - RNA, 19 nt, Artificial Sequence
  Description of Artificial Sequence: Synthetic oligonucleotide
ucauauauuacccugguuu

SEQ ID NO: 656761 - RNA, 19 nt, Artificial Sequence
  Description of Artificial Sequence: Synthetic oligonucleotide
ugucaguaauguaaaaccg

SEQ ID NO: 656762 - RNA, 19 nt, Artificial Sequence
  Description of Artificial Sequence: Synthetic oligonucleotide
ucucaagaaaauaaaugag

SEQ ID NO: 656763 - RNA, 19 nt, Artificial Sequence
  Description of Artificial Sequence: Synthetic oligonucleotide
uaaucauauauuacccugg

SEQ ID NO: 656764 - RNA, 19 nt, Artificial Sequence
  Description of Artificial Sequence: Synthetic oligonucleotide
acuaaaacaggucugucag

SEQ ID NO: 656765 - RNA, 19 nt, Artificial Sequence
  Description of Artificial Sequence: Synthetic oligonucleotide
ucaguaauguaaaaccgcc

SEQ ID NO: 656766 - RNA, 19 nt, Artificial Sequence
  Description of Artificial Sequence: Synthetic oligonucleotide
uaauacguagaggugaugg

SEQ ID NO: 656767 - RNA, 19 nt, Artificial Sequence
  Description of Artificial Sequence: Synthetic oligonucleotide
aaccuguuggccaaaaggc

SEQ ID NO: 656768 - RNA, 19 nt, Artificial Sequence
  Description of Artificial Sequence: Synthetic oligonucleotide
gauucuuuaaauaacggca

SEQ ID NO: 656769 - RNA, 19 nt, Artificial Sequence
  Description of Artificial Sequence: Synthetic oligonucleotide
uguagagugcacuccaugg

SEQ ID NO: 656770 - RNA, 19 nt, Artificial Sequence
  Description of Artificial Sequence: Synthetic oligonucleotide
ugcuauuaagccaaacaag

SEQ ID NO: 656771 - RNA, 19 nt, Artificial Sequence
  Description of Artificial Sequence: Synthetic oligonucleotide
guuacgugauccuuuaagg

SEQ ID NO: 656772 - RNA, 19 nt, Artificial Sequence
  Description of Artificial Sequence: Synthetic oligonucleotide
uuauugcccacuaauauuc

SEQ ID NO: 656773 - RNA, 19 nt, Artificial Sequence
  Description of Artificial Sequence: Synthetic oligonucleotide
ggaguaaucauauauuacc

SEQ ID NO: 656774 - RNA, 19 nt, Artificial Sequence
  Description of Artificial Sequence: Synthetic oligonucleotide
ucguccaacaccuucuugg

SEQ ID NO: 656775 - RNA, 19 nt, Artificial Sequence
  Description of Artificial Sequence: Synthetic oligonucleotide
uuacgugauccuuuaaggg

SEQ ID NO: 656776 - RNA, 19 nt, Artificial Sequence
  Description of Artificial Sequence: Synthetic oligonucleotide
uugauuuggcuucauucgg

SEQ ID NO: 656777 - RNA, 19 nt, Artificial Sequence
  Description of Artificial Sequence: Synthetic oligonucleotide
guaaucauauauuacccug

SEQ ID NO: 656778 - RNA, 19 nt, Artificial Sequence
  Description of Artificial Sequence: Synthetic oligonucleotide
ugucuguuaaauuaaugcu

SEQ ID NO: 656779 - RNA, 19 nt, Artificial Sequence
  Description of Artificial Sequence: Synthetic oligonucleotide
ugaacagaagccauacacc

SEQ ID NO: 656780 - RNA, 19 nt, Artificial Sequence
  Description of Artificial Sequence: Synthetic oligonucleotide
ugcaaaucguaacagcaag

SEQ ID NO: 656781 - RNA, 19 nt, Artificial Sequence
  Description of Artificial Sequence: Synthetic oligonucleotide
uaagacaugagguuggcuc

SEQ ID NO: 656782 - RNA, 19 nt, Artificial Sequence
  Description of Artificial Sequence: Synthetic oligonucleotide
uacccuaccuuucugcugg

SEQ ID NO: 656783 - RNA, 19 nt, Artificial Sequence
  Description of Artificial Sequence: Synthetic oligonucleotide
aguuacgugauccuuuaag

SEQ ID NO: 656784 - RNA, 19 nt, Artificial Sequence
  Description of Artificial Sequence: Synthetic oligonucleotide
ugguuaaucaguccgcuca

SEQ ID NO: 656785 - RNA, 19 nt, Artificial Sequence
  Description of Artificial Sequence: Synthetic oligonucleotide
aaacaugauggguaaguga

SEQ ID NO: 656786 - RNA, 19 nt, Artificial Sequence
  Description of Artificial Sequence: Synthetic oligonucleotide
auauucggcacacaucauc

SEQ ID NO: 656787 - RNA, 19 nt, Artificial Sequence
  Description of Artificial Sequence: Synthetic oligonucleotide
acaaugaccccgugggucc

SEQ ID NO: 656788 - RNA, 19 nt, Artificial Sequence
  Description of Artificial Sequence: Synthetic oligonucleotide
uauucggcacacaucauca

SEQ ID NO: 656789 - RNA, 19 nt, Artificial Sequence
  Description of Artificial Sequence: Synthetic oligonucleotide
ucuuauugcccacuaauau

SEQ ID NO: 656790 - RNA, 19 nt, Artificial Sequence
  Description of Artificial Sequence: Synthetic oligonucleotide
aaucauauauuacccuggu

SEQ ID NO: 656791 - RNA, 19 nt, Artificial Sequence
  Description of Artificial Sequence: Synthetic oligonucleotide
agggucgucauucuuauug

SEQ ID NO: 656792 - RNA, 19 nt, Artificial Sequence
  Description of Artificial Sequence: Synthetic oligonucleotide
cuucuuggcacucacgggg

SEQ ID NO: 656793 - RNA, 19 nt, Artificial Sequence
  Description of Artificial Sequence: Synthetic oligonucleotide
acuaauauucggcacacau

SEQ ID NO: 656794 - RNA, 19 nt, Artificial Sequence
  Description of Artificial Sequence: Synthetic oligonucleotide
ugcuacgcuacaaaguagc

SEQ ID NO: 656795 - RNA, 19 nt, Artificial Sequence
  Description of Artificial Sequence: Synthetic oligonucleotide
aaaucguaacagcaagcug

SEQ ID NO: 656796 - RNA, 19 nt, Artificial Sequence
  Description of Artificial Sequence: Synthetic oligonucleotide
ugcucguagaaccagcucu

SEQ ID NO: 656797 - RNA, 19 nt, Artificial Sequence
  Description of Artificial Sequence: Synthetic oligonucleotide
aauugaaacaugaugggua

SEQ ID NO: 656798 - RNA, 19 nt, Artificial Sequence
  Description of Artificial Sequence: Synthetic oligonucleotide
gaguaaucauauauuaccc

SEQ ID NO: 656799 - RNA, 19 nt, Artificial Sequence
  Description of Artificial Sequence: Synthetic oligonucleotide
auuaagccaaacaagucuc

SEQ ID NO: 656800 - RNA, 19 nt, Artificial Sequence
  Description of Artificial Sequence: Synthetic oligonucleotide
uacgugauccuuuaaggga

SEQ ID NO: 656801 - RNA, 19 nt, Artificial Sequence
  Description of Artificial Sequence: Synthetic oligonucleotide
aguaaucauauauuacccu

SEQ ID NO: 656802 - RNA, 19 nt, Artificial Sequence
  Description of Artificial Sequence: Synthetic oligonucleotide
gauuucaugaagccaucgc

SEQ ID NO: 656803 - RNA, 19 nt, Artificial Sequence
  Description of Artificial Sequence: Synthetic oligonucleotide
acacauaaggaacaagggu

SEQ ID NO: 656804 - RNA, 19 nt, Artificial Sequence
  Description of Artificial Sequence: Synthetic oligonucleotide
aguggacugggccauuagc

SEQ ID NO: 656805 - RNA, 19 nt, Artificial Sequence
  Description of Artificial Sequence: Synthetic oligonucleotide
ucggcacacaucaucacag

SEQ ID NO: 656806 - RNA, 19 nt, Artificial Sequence
  Description of Artificial Sequence: Synthetic oligonucleotide
aauacguagaggugauggu

SEQ ID NO: 656807 - RNA, 19 nt, Artificial Sequence
  Description of Artificial Sequence: Synthetic oligonucleotide
aaccacaaugaccccgugg

SEQ ID NO: 656808 - RNA, 19 nt, Artificial Sequence
  Description of Artificial Sequence: Synthetic oligonucleotide
ucgcuugacauugacaaag

SEQ ID NO: 656809 - RNA, 19 nt, Artificial Sequence
  Description of Artificial Sequence: Synthetic oligonucleotide
aacugguuaaucaguccgc

SEQ ID NO: 656810 - RNA, 19 nt, Artificial Sequence
  Description of Artificial Sequence: Synthetic oligonucleotide
ugcuggaauugaaacauga

SEQ ID NO: 656811 - RNA, 19 nt, Artificial Sequence
  Description of Artificial Sequence: Synthetic oligonucleotide
aguaauguaaaaccgccua

SEQ ID NO: 656812 - RNA, 19 nt, Artificial Sequence
  Description of Artificial Sequence: Synthetic oligonucleotide
ugaacaaggguacccuacc

SEQ ID NO: 656813 - RNA, 19 nt, Artificial Sequence
  Description of Artificial Sequence: Synthetic oligonucleotide
cuauauacaaacugguuaa

SEQ ID NO: 656814 - RNA, 19 nt, Artificial Sequence
  Description of Artificial Sequence: Synthetic oligonucleotide
uguuucgccaaguuguccu

SEQ ID NO: 656815 - RNA, 19 nt, Artificial Sequence
  Description of Artificial Sequence: Synthetic oligonucleotide
ugauuuggcuucauucggc

SEQ ID NO: 656816 - RNA, 19 nt, Artificial Sequence
  Description of Artificial Sequence: Synthetic oligonucleotide
ugaaacaugauggguaagu

SEQ ID NO: 656817 - RNA, 19 nt, Artificial Sequence
  Description of Artificial Sequence: Synthetic oligonucleotide
cuggaaaucgccuaggaaa

SEQ ID NO: 656818 - RNA, 19 nt, Artificial Sequence
  Description of Artificial Sequence: Synthetic oligonucleotide
acugaacccaaaguggaac

SEQ ID NO: 656819 - RNA, 19 nt, Artificial Sequence
  Description of Artificial Sequence: Synthetic oligonucleotide
cucagcacuagugacgucg

SEQ ID NO: 656820 - RNA, 19 nt, Artificial Sequence
  Description of Artificial Sequence: Synthetic oligonucleotide
uguuaacauggaaaaucug

SEQ ID NO: 656821 - RNA, 19 nt, Artificial Sequence
  Description of Artificial Sequence: Synthetic oligonucleotide
uugcccacuaauauucggc

SEQ ID NO: 656822 - RNA, 19 nt, Artificial Sequence
  Description of Artificial Sequence: Synthetic oligonucleotide
ucuagaaggcagaaugaaa

SEQ ID NO: 656823 - RNA, 19 nt, Artificial Sequence
  Description of Artificial Sequence: Synthetic oligonucleotide
uaaaccacaaugaccccgu

SEQ ID NO: 656824 - RNA, 19 nt, Artificial Sequence
  Description of Artificial Sequence: Synthetic oligonucleotide
ucggcugucuguuaaauua

SEQ ID NO: 656825 - RNA, 19 nt, Artificial Sequence
  Description of Artificial Sequence: Synthetic oligonucleotide
auugaaacaugauggguaa

SEQ ID NO: 656826 - RNA, 19 nt, Artificial Sequence
  Description of Artificial Sequence: Synthetic oligonucleotide
uggaaaucgccuaggaaaa

SEQ ID NO: 656827 - RNA, 19 nt, Artificial Sequence
  Description of Artificial Sequence: Synthetic oligonucleotide
caaauuuguaggcaucuuc

SEQ ID NO: 656828 - RNA, 19 nt, Artificial Sequence
  Description of Artificial Sequence: Synthetic oligonucleotide
guagagugcacuccauggg

SEQ ID NO: 656829 - RNA, 19 nt, Artificial Sequence
  Description of Artificial Sequence: Synthetic oligonucleotide
auugcccacuaauauucgg

SEQ ID NO: 656830 - RNA, 19 nt, Artificial Sequence
  Description of Artificial Sequence: Synthetic oligonucleotide
aagguguugucugcaaauc

SEQ ID NO: 656831 - RNA, 19 nt, Artificial Sequence
  Description of Artificial Sequence: Synthetic oligonucleotide
uguagaagaaagccccagu

SEQ ID NO: 656832 - RNA, 19 nt, Artificial Sequence
  Description of Artificial Sequence: Synthetic oligonucleotide
gaacagucauaacuuuugc

SEQ ID NO: 656833 - RNA, 19 nt, Artificial Sequence
  Description of Artificial Sequence: Synthetic oligonucleotide
ugagaaaccugauucguuu

SEQ ID NO: 656834 - RNA, 19 nt, Artificial Sequence
  Description of Artificial Sequence: Synthetic oligonucleotide
cuauuaagccaaacaaguc

SEQ ID NO: 656835 - RNA, 19 nt, Artificial Sequence
  Description of Artificial Sequence: Synthetic oligonucleotide
cuaauauucggcacacauc

SEQ ID NO: 656836 - RNA, 19 nt, Artificial Sequence
  Description of Artificial Sequence: Synthetic oligonucleotide
gaacugcaggccuagggcc

SEQ ID NO: 656837 - RNA, 19 nt, Artificial Sequence
  Description of Artificial Sequence: Synthetic oligonucleotide
ggcccuugcacacauaagg

SEQ ID NO: 656838 - RNA, 19 nt, Artificial Sequence
  Description of Artificial Sequence: Synthetic oligonucleotide
caucgcuugacauugacaa

SEQ ID NO: 656839 - RNA, 19 nt, Artificial Sequence
  Description of Artificial Sequence: Synthetic oligonucleotide
gucaguaauguaaaaccgc

SEQ ID NO: 656840 - RNA, 19 nt, Artificial Sequence
  Description of Artificial Sequence: Synthetic oligonucleotide
auagucccgggccauggcg

SEQ ID NO: 656841 - RNA, 19 nt, Artificial Sequence
  Description of Artificial Sequence: Synthetic oligonucleotide
auagcagaggcaucuagaa

SEQ ID NO: 656842 - RNA, 19 nt, Artificial Sequence
  Description of Artificial Sequence: Synthetic oligonucleotide
cuugccuacaccgcugucg

SEQ ID NO: 656843 - RNA, 19 nt, Artificial Sequence
  Description of Artificial Sequence: Synthetic oligonucleotide
gucguaaaccacaaugacc

SEQ ID NO: 656844 - RNA, 19 nt, Artificial Sequence
  Description of Artificial Sequence: Synthetic oligonucleotide
uaauguaaaaccgccuauc

SEQ ID NO: 656845 - RNA, 19 nt, Artificial Sequence
  Description of Artificial Sequence: Synthetic oligonucleotide
acuuuugcuauuaagccaa

SEQ ID NO: 656846 - RNA, 19 nt, Artificial Sequence
  Description of Artificial Sequence: Synthetic oligonucleotide
aaaacguggagagauucuu

SEQ ID NO: 656847 - RNA, 19 nt, Artificial Sequence
  Description of Artificial Sequence: Synthetic oligonucleotide
uugccuacaccgcugucgc

SEQ ID NO: 656848 - RNA, 19 nt, Artificial Sequence
  Description of Artificial Sequence: Synthetic oligonucleotide
aacaagggugcaaagcccu

SEQ ID NO: 656849 - RNA, 19 nt, Artificial Sequence
  Description of Artificial Sequence: Synthetic oligonucleotide
aacaaggguacccuaccuu

SEQ ID NO: 656850 - RNA, 19 nt, Artificial Sequence
  Description of Artificial Sequence: Synthetic oligonucleotide
uuuucgugagcuucaccac

SEQ ID NO: 656851 - RNA, 19 nt, Artificial Sequence
  Description of Artificial Sequence: Synthetic oligonucleotide
ucgccuaggaaaagaaauc

SEQ ID NO: 656852 - RNA, 19 nt, Artificial Sequence
  Description of Artificial Sequence: Synthetic oligonucleotide
cuuugcucguagaaccagc

SEQ ID NO: 656853 - RNA, 19 nt, Artificial Sequence
  Description of Artificial Sequence: Synthetic oligonucleotide
ugcccacuaauauucggca

SEQ ID NO: 656854 - RNA, 19 nt, Artificial Sequence
  Description of Artificial Sequence: Synthetic oligonucleotide
uggugcuacgcuacaaagu

SEQ ID NO: 656855 - RNA, 19 nt, Artificial Sequence
  Description of Artificial Sequence: Synthetic oligonucleotide
agagugcacuccaugggcc

SEQ ID NO: 656856 - RNA, 19 nt, Artificial Sequence
  Description of Artificial Sequence: Synthetic oligonucleotide
aaccgccuaucccagcuug

SEQ ID NO: 656857 - RNA, 19 nt, Artificial Sequence
  Description of Artificial Sequence: Synthetic oligonucleotide
ucauucggcugucuguuaa

SEQ ID NO: 656858 - RNA, 19 nt, Artificial Sequence
  Description of Artificial Sequence: Synthetic oligonucleotide
auucggcacacaucaucac

SEQ ID NO: 656859 - RNA, 19 nt, Artificial Sequence
  Description of Artificial Sequence: Synthetic oligonucleotide
auaacggcacuaaacugag

SEQ ID NO: 656860 - RNA, 19 nt, Artificial Sequence
  Description of Artificial Sequence: Synthetic oligonucleotide
aguaaucugugaugauugu

SEQ ID NO: 656861 - RNA, 19 nt, Artificial Sequence
  Description of Artificial Sequence: Synthetic oligonucleotide
aaaccugauucguuugauu

SEQ ID NO: 656862 - RNA, 19 nt, Artificial Sequence
  Description of Artificial Sequence: Synthetic oligonucleotide
auguagagugcacuccaug

SEQ ID NO: 656863 - RNA, 19 nt, Artificial Sequence
  Description of Artificial Sequence: Synthetic oligonucleotide
acuccgauuguggugaugu

SEQ ID NO: 656864 - RNA, 19 nt, Artificial Sequence
  Description of Artificial Sequence: Synthetic oligonucleotide
gaacaagggugcaaagccc

SEQ ID NO: 656865 - RNA, 19 nt, Artificial Sequence
  Description of Artificial Sequence: Synthetic oligonucleotide
ucuuugcucguagaaccag

SEQ ID NO: 656866 - RNA, 19 nt, Artificial Sequence
  Description of Artificial Sequence: Synthetic oligonucleotide
gaaaucgccuaggaaaaga

SEQ ID NO: 656867 - RNA, 19 nt, Artificial Sequence
  Description of Artificial Sequence: Synthetic oligonucleotide
aucgccuaggaaaagaaau

SEQ ID NO: 656868 - RNA, 19 nt, Artificial Sequence
  Description of Artificial Sequence: Synthetic oligonucleotide
ucgccgaugaugagcagcu

SEQ ID NO: 656869 - RNA, 19 nt, Artificial Sequence
  Description of Artificial Sequence: Synthetic oligonucleotide
acaaggguacccuaccuuu

SEQ ID NO: 656870 - RNA, 19 nt, Artificial Sequence
  Description of Artificial Sequence: Synthetic oligonucleotide
aaaucgccuaggaaaagaa

SEQ ID NO: 656871 - RNA, 19 nt, Artificial Sequence
  Description of Artificial Sequence: Synthetic oligonucleotide
auacugaacccaaagugga

SEQ ID NO: 656872 - RNA, 19 nt, Artificial Sequence
  Description of Artificial Sequence: Synthetic oligonucleotide
ggaacagucauaacuuuug

SEQ ID NO: 656873 - RNA, 19 nt, Artificial Sequence
  Description of Artificial Sequence: Synthetic oligonucleotide
uuaagggaaagggaaccaa

SEQ ID NO: 656874 - RNA, 19 nt, Artificial Sequence
  Description of Artificial Sequence: Synthetic oligonucleotide
agacucagcuaagacauga

SEQ ID NO: 656875 - RNA, 19 nt, Artificial Sequence
  Description of Artificial Sequence: Synthetic oligonucleotide
gguacggaagcguucuugc

SEQ ID NO: 656876 - RNA, 19 nt, Artificial Sequence
  Description of Artificial Sequence: Synthetic oligonucleotide
ugugccuggaaaucgccua

SEQ ID NO: 656877 - RNA, 19 nt, Artificial Sequence
  Description of Artificial Sequence: Synthetic oligonucleotide
uaccuuucugcuggaauug

SEQ ID NO: 656878 - RNA, 19 nt, Artificial Sequence
  Description of Artificial Sequence: Synthetic oligonucleotide
uucgugagcuucaccacau

SEQ ID NO: 656879 - RNA, 19 nt, Artificial Sequence
  Description of Artificial Sequence: Synthetic oligonucleotide
uucuuggcacucacgggga

SEQ ID NO: 656880 - RNA, 19 nt, Artificial Sequence
  Description of Artificial Sequence: Synthetic oligonucleotide
ugcacacauaaggaacaag

SEQ ID NO: 656881 - RNA, 19 nt, Artificial Sequence
  Description of Artificial Sequence: Synthetic oligonucleotide
agcggggaagggcaggcuc

SEQ ID NO: 656882 - RNA, 19 nt, Artificial Sequence
  Description of Artificial Sequence: Synthetic oligonucleotide
uacugaacccaaaguggaa

SEQ ID NO: 656883 - RNA, 19 nt, Artificial Sequence
  Description of Artificial Sequence: Synthetic oligonucleotide
agcugguuaaugcaauaua

SEQ ID NO: 656884 - RNA, 19 nt, Artificial Sequence
  Description of Artificial Sequence: Synthetic oligonucleotide
ucagcacuagugacgucgu

SEQ ID NO: 656885 - RNA, 19 nt, Artificial Sequence
  Description of Artificial Sequence: Synthetic oligonucleotide
ccauugaucuccacagucc

SEQ ID NO: 656886 - RNA, 19 nt, Artificial Sequence
  Description of Artificial Sequence: Synthetic oligonucleotide
acaucguucuguugcugcu

SEQ ID NO: 656887 - RNA, 19 nt, Artificial Sequence
  Description of Artificial Sequence: Synthetic oligonucleotide
agcuccccuggguuuauag

SEQ ID NO: 656888 - RNA, 19 nt, Artificial Sequence
  Description of Artificial Sequence: Synthetic oligonucleotide
ggugcuacgcuacaaagua

SEQ ID NO: 656889 - RNA, 19 nt, Artificial Sequence
  Description of Artificial Sequence: Synthetic oligonucleotide
ccugauucguuugauuugg

SEQ ID NO: 656890 - RNA, 19 nt, Artificial Sequence
  Description of Artificial Sequence: Synthetic oligonucleotide
aucuagaaggcagaaugaa

SEQ ID NO: 656891 - RNA, 19 nt, Artificial Sequence
  Description of Artificial Sequence: Synthetic oligonucleotide
aaugaccccgugggucccc

SEQ ID NO: 656892 - RNA, 19 nt, Artificial Sequence
  Description of Artificial Sequence: Synthetic oligonucleotide
agggaaccaagugucuggg

SEQ ID NO: 656893 - RNA, 19 nt, Artificial Sequence
  Description of Artificial Sequence: Synthetic oligonucleotide
guaaucugugaugauuguc

SEQ ID NO: 656894 - RNA, 19 nt, Artificial Sequence
  Description of Artificial Sequence: Synthetic oligonucleotide
ugguacggaagcguucuug

SEQ ID NO: 656895 - RNA, 19 nt, Artificial Sequence
  Description of Artificial Sequence: Synthetic oligonucleotide
cacaaugaccccguggguc

SEQ ID NO: 656896 - RNA, 19 nt, Artificial Sequence
  Description of Artificial Sequence: Synthetic oligonucleotide
uaaaaccgccuaucccagc

SEQ ID NO: 656897 - RNA, 19 nt, Artificial Sequence
  Description of Artificial Sequence: Synthetic oligonucleotide
acugguuaaucaguccgcu

SEQ ID NO: 656898 - RNA, 19 nt, Artificial Sequence
  Description of Artificial Sequence: Synthetic oligonucleotide
ggacugacuuucucugugg

SEQ ID NO: 656899 - RNA, 19 nt, Artificial Sequence
  Description of Artificial Sequence: Synthetic oligonucleotide
gaagguguugucugcaaau

SEQ ID NO: 656900 - RNA, 19 nt, Artificial Sequence
  Description of Artificial Sequence: Synthetic oligonucleotide
acggcacuaaacugagacu

SEQ ID NO: 656901 - RNA, 19 nt, Artificial Sequence
  Description of Artificial Sequence: Synthetic oligonucleotide
gggaaugggucaauacugg

SEQ ID NO: 656902 - RNA, 19 nt, Artificial Sequence
  Description of Artificial Sequence: Synthetic oligonucleotide
agcacuagugacgucguaa

SEQ ID NO: 656903 - RNA, 19 nt, Artificial Sequence
  Description of Artificial Sequence: Synthetic oligonucleotide
aaucgccuaggaaaagaaa

SEQ ID NO: 656904 - RNA, 19 nt, Artificial Sequence
  Description of Artificial Sequence: Synthetic oligonucleotide
guacggaagcguucuugcc

SEQ ID NO: 656905 - RNA, 19 nt, Artificial Sequence
  Description of Artificial Sequence: Synthetic oligonucleotide
aucauauauuacccugguu

SEQ ID NO: 656906 - RNA, 19 nt, Artificial Sequence
  Description of Artificial Sequence: Synthetic oligonucleotide
acucacggggaacggggag

SEQ ID NO: 656907 - RNA, 19 nt, Artificial Sequence
  Description of Artificial Sequence: Synthetic oligonucleotide
ggaacggggaggaagugcc

SEQ ID NO: 656908 - RNA, 19 nt, Artificial Sequence
  Description of Artificial Sequence: Synthetic oligonucleotide
auacguagaggugauggua

SEQ ID NO: 656909 - RNA, 19 nt, Artificial Sequence
  Description of Artificial Sequence: Synthetic oligonucleotide
cucgccagguccaggugcc

SEQ ID NO: 656910 - RNA, 19 nt, Artificial Sequence
  Description of Artificial Sequence: Synthetic oligonucleotide
cugauucguuugauuuggc

SEQ ID NO: 656911 - RNA, 19 nt, Artificial Sequence
  Description of Artificial Sequence: Synthetic oligonucleotide
guggacugggccauuagca

SEQ ID NO: 656912 - RNA, 19 nt, Artificial Sequence
  Description of Artificial Sequence: Synthetic oligonucleotide
aagccccaguuuuauugau

SEQ ID NO: 656913 - RNA, 19 nt, Artificial Sequence
  Description of Artificial Sequence: Synthetic oligonucleotide
ggucaauacuggcugcccc

SEQ ID NO: 656914 - RNA, 19 nt, Artificial Sequence
  Description of Artificial Sequence: Synthetic oligonucleotide
cugcaguaaucugugauga

SEQ ID NO: 656915 - RNA, 19 nt, Artificial Sequence
  Description of Artificial Sequence: Synthetic oligonucleotide
ccuuuaagggaaagggaac

SEQ ID NO: 656916 - RNA, 19 nt, Artificial Sequence
  Description of Artificial Sequence: Synthetic oligonucleotide
ggaaaaucugcaguaaucu

SEQ ID NO: 656917 - RNA, 19 nt, Artificial Sequence
  Description of Artificial Sequence: Synthetic oligonucleotide
auaaggaacaagggugcaa

SEQ ID NO: 656918 - RNA, 19 nt, Artificial Sequence
  Description of Artificial Sequence: Synthetic oligonucleotide
ggggaguaaucauauauua

SEQ ID NO: 656919 - RNA, 19 nt, Artificial Sequence
  Description of Artificial Sequence: Synthetic oligonucleotide
cccgauaauacguagaggu

SEQ ID NO: 656920 - RNA, 19 nt, Artificial Sequence
  Description of Artificial Sequence: Synthetic oligonucleotide
uucguuugauuuggcuuca

SEQ ID NO: 656921 - RNA, 19 nt, Artificial Sequence
  Description of Artificial Sequence: Synthetic oligonucleotide
acggggaacggggaggaag

SEQ ID NO: 656922 - RNA, 19 nt, Artificial Sequence
  Description of Artificial Sequence: Synthetic oligonucleotide
caaaucguaacagcaagcu

SEQ ID NO: 656923 - RNA, 19 nt, Artificial Sequence
  Description of Artificial Sequence: Synthetic oligonucleotide
acgugauccuuuaagggaa

SEQ ID NO: 656924 - RNA, 19 nt, Artificial Sequence
  Description of Artificial Sequence: Synthetic oligonucleotide
uccagucaggacugugccu

SEQ ID NO: 656925 - RNA, 19 nt, Artificial Sequence
  Description of Artificial Sequence: Synthetic oligonucleotide
cuuauugcccacuaauauu

SEQ ID NO: 656926 - RNA, 19 nt, Artificial Sequence
  Description of Artificial Sequence: Synthetic oligonucleotide
gggaguaaucauauauuac

SEQ ID NO: 656927 - RNA, 19 nt, Artificial Sequence
  Description of Artificial Sequence: Synthetic oligonucleotide
gucgccgaugaugagcagc

SEQ ID NO: 656928 - RNA, 19 nt, Artificial Sequence
  Description of Artificial Sequence: Synthetic oligonucleotide
uuuauagcagaggcaucua

SEQ ID NO: 656929 - RNA, 19 nt, Artificial Sequence
  Description of Artificial Sequence: Synthetic oligonucleotide
ugggagggucuguugcagc

SEQ ID NO: 656930 - RNA, 19 nt, Artificial Sequence
  Description of Artificial Sequence: Synthetic oligonucleotide
cuggaugcccaucugccca

SEQ ID NO: 656931 - RNA, 19 nt, Artificial Sequence
  Description of Artificial Sequence: Synthetic oligonucleotide
gauaauacguagaggugau

SEQ ID NO: 656932 - RNA, 19 nt, Artificial Sequence
  Description of Artificial Sequence: Synthetic oligonucleotide
cugcaaaucguaacagcaa

SEQ ID NO: 656933 - RNA, 19 nt, Artificial Sequence
  Description of Artificial Sequence: Synthetic oligonucleotide
agugccgauggcgccuccc

SEQ ID NO: 656934 - RNA, 19 nt, Artificial Sequence
  Description of Artificial Sequence: Synthetic oligonucleotide
auaauacguagaggugaug

SEQ ID NO: 656935 - RNA, 19 nt, Artificial Sequence
  Description of Artificial Sequence: Synthetic oligonucleotide
guaauguaaaaccgccuau

SEQ ID NO: 656936 - RNA, 19 nt, Artificial Sequence
  Description of Artificial Sequence: Synthetic oligonucleotide
cuggcaagcguccucgcca

SEQ ID NO: 656937 - RNA, 19 nt, Artificial Sequence
  Description of Artificial Sequence: Synthetic oligonucleotide
cugguuaaucaguccgcuc

SEQ ID NO: 656938 - RNA, 19 nt, Artificial Sequence
  Description of Artificial Sequence: Synthetic oligonucleotide
ugcaguaaucugugaugau

SEQ ID NO: 656939 - RNA, 19 nt, Artificial Sequence
  Description of Artificial Sequence: Synthetic oligonucleotide
aaacguggagagauucuuu

SEQ ID NO: 656940 - RNA, 19 nt, Artificial Sequence
  Description of Artificial Sequence: Synthetic oligonucleotide
aauauucggcacacaucau

SEQ ID NO: 656941 - RNA, 19 nt, Artificial Sequence
  Description of Artificial Sequence: Synthetic oligonucleotide
acguggagagauucuuuaa

SEQ ID NO: 656942 - RNA, 19 nt, Artificial Sequence
  Description of Artificial Sequence: Synthetic oligonucleotide
gggaagggcaggcucgucc

SEQ ID NO: 656943 - RNA, 19 nt, Artificial Sequence
  Description of Artificial Sequence: Synthetic oligonucleotide
caccuucuuggcacucacg

SEQ ID NO: 656944 - RNA, 19 nt, Artificial Sequence
  Description of Artificial Sequence: Synthetic oligonucleotide
caccuuccgcucagggucg

SEQ ID NO: 656945 - RNA, 19 nt, Artificial Sequence
  Description of Artificial Sequence: Synthetic oligonucleotide
gguugauuucaugaagcca

SEQ ID NO: 656946 - RNA, 19 nt, Artificial Sequence
  Description of Artificial Sequence: Synthetic oligonucleotide
aucgcuugacauugacaaa

SEQ ID NO: 656947 - RNA, 19 nt, Artificial Sequence
  Description of Artificial Sequence: Synthetic oligonucleotide
gugauccuuuaagggaaag

SEQ ID NO: 656948 - RNA, 19 nt, Artificial Sequence
  Description of Artificial Sequence: Synthetic oligonucleotide
gaacaaggguacccuaccu

SEQ ID NO: 656949 - RNA, 19 nt, Artificial Sequence
  Description of Artificial Sequence: Synthetic oligonucleotide
gaacggggaggaagugccg

SEQ ID NO: 656950 - RNA, 19 nt, Artificial Sequence
  Description of Artificial Sequence: Synthetic oligonucleotide
cuguuucgccaaguugucc

SEQ ID NO: 656951 - RNA, 19 nt, Artificial Sequence
  Description of Artificial Sequence: Synthetic oligonucleotide
ccgauaauacguagaggug

SEQ ID NO: 656952 - RNA, 19 nt, Artificial Sequence
  Description of Artificial Sequence: Synthetic oligonucleotide
acaccgcugucgccgauga

SEQ ID NO: 656953 - RNA, 19 nt, Artificial Sequence
  Description of Artificial Sequence: Synthetic oligonucleotide
gcugccguugagaugggag

SEQ ID NO: 656954 - RNA, 19 nt, Artificial Sequence
  Description of Artificial Sequence: Synthetic oligonucleotide
gugcuacgcuacaaaguag

SEQ ID NO: 656955 - RNA, 19 nt, Artificial Sequence
  Description of Artificial Sequence: Synthetic oligonucleotide
aucaguccgcucagcuggc

SEQ ID NO: 656956 - RNA, 19 nt, Artificial Sequence
  Description of Artificial Sequence: Synthetic oligonucleotide
agagguggucauagucccg

SEQ ID NO: 656957 - RNA, 19 nt, Artificial Sequence
  Description of Artificial Sequence: Synthetic oligonucleotide
uacaccgcugucgccgaug

SEQ ID NO: 656958 - RNA, 19 nt, Artificial Sequence
  Description of Artificial Sequence: Synthetic oligonucleotide
gcugucgccgaugaugagc

SEQ ID NO: 656959 - RNA, 19 nt, Artificial Sequence
  Description of Artificial Sequence: Synthetic oligonucleotide
auucggcugucuguuaaau

SEQ ID NO: 656960 - RNA, 19 nt, Artificial Sequence
  Description of Artificial Sequence: Synthetic oligonucleotide
gcacucacggggaacgggg

SEQ ID NO: 656961 - RNA, 19 nt, Artificial Sequence
  Description of Artificial Sequence: Synthetic oligonucleotide
gauggcgccucccgauaca

SEQ ID NO: 656962 - RNA, 19 nt, Artificial Sequence
  Description of Artificial Sequence: Synthetic oligonucleotide
cuaccuuucugcuggaauu

SEQ ID NO: 656963 - RNA, 19 nt, Artificial Sequence
  Description of Artificial Sequence: Synthetic oligonucleotide
gggaaccaagugucugggg

SEQ ID NO: 656964 - RNA, 19 nt, Artificial Sequence
  Description of Artificial Sequence: Synthetic oligonucleotide
gacaaaggacucagcacua

SEQ ID NO: 656965 - RNA, 19 nt, Artificial Sequence
  Description of Artificial Sequence: Synthetic oligonucleotide
gugauacaguugaacaucu

SEQ ID NO: 656966 - RNA, 19 nt, Artificial Sequence
  Description of Artificial Sequence: Synthetic oligonucleotide
cggcacuaaacugagacug

SEQ ID NO: 656967 - RNA, 19 nt, Artificial Sequence
  Description of Artificial Sequence: Synthetic oligonucleotide
ggaaaucgccuaggaaaag

SEQ ID NO: 656968 - RNA, 19 nt, Artificial Sequence
  Description of Artificial Sequence: Synthetic oligonucleotide
cccacuaauauucggcaca

SEQ ID NO: 656969 - RNA, 19 nt, Artificial Sequence
  Description of Artificial Sequence: Synthetic oligonucleotide
ucuugccuacaccgcuguc

SEQ ID NO: 656970 - RNA, 19 nt, Artificial Sequence
  Description of Artificial Sequence: Synthetic oligonucleotide
caguaauguaaaaccgccu

SEQ ID NO: 656971 - RNA, 19 nt, Artificial Sequence
  Description of Artificial Sequence: Synthetic oligonucleotide
ugccuggugcuacgcuaca

SEQ ID NO: 656972 - RNA, 19 nt, Artificial Sequence
  Description of Artificial Sequence: Synthetic oligonucleotide
cgauaauacguagagguga

SEQ ID NO: 656973 - RNA, 19 nt, Artificial Sequence
  Description of Artificial Sequence: Synthetic oligonucleotide
ucgugagcuucaccacauc

SEQ ID NO: 656974 - RNA, 19 nt, Artificial Sequence
  Description of Artificial Sequence: Synthetic oligonucleotide
cgucguaaaccacaaugac

SEQ ID NO: 656975 - RNA, 19 nt, Artificial Sequence
  Description of Artificial Sequence: Synthetic oligonucleotide
cuaaaacaggucugucagu

SEQ ID NO: 656976 - RNA, 19 nt, Artificial Sequence
  Description of Artificial Sequence: Synthetic oligonucleotide
uuguccuucuuugcucgua

SEQ ID NO: 656977 - RNA, 19 nt, Artificial Sequence
  Description of Artificial Sequence: Synthetic oligonucleotide
gaaaccugauucguuugau

SEQ ID NO: 656978 - RNA, 19 nt, Artificial Sequence
  Description of Artificial Sequence: Synthetic oligonucleotide
gcacuagugacgucguaaa

SEQ ID NO: 656979 - RNA, 19 nt, Artificial Sequence
  Description of Artificial Sequence: Synthetic oligonucleotide
ccaagugucuggggaaggg

SEQ ID NO: 656980 - RNA, 19 nt, Artificial Sequence
  Description of Artificial Sequence: Synthetic oligonucleotide
gugauguagcugccugaga

SEQ ID NO: 656981 - RNA, 19 nt, Artificial Sequence
  Description of Artificial Sequence: Synthetic oligonucleotide
uuccucccaccuucauacu

SEQ ID NO: 656982 - RNA, 19 nt, Artificial Sequence
  Description of Artificial Sequence: Synthetic oligonucleotide
uuccgcucagggucgucau

SEQ ID NO: 656983 - RNA, 19 nt, Artificial Sequence
  Description of Artificial Sequence: Synthetic oligonucleotide
gcucguagaaccagcucug

SEQ ID NO: 656984 - RNA, 19 nt, Artificial Sequence
  Description of Artificial Sequence: Synthetic oligonucleotide
accgccuaucccagcuugg

SEQ ID NO: 656985 - RNA, 19 nt, Artificial Sequence
  Description of Artificial Sequence: Synthetic oligonucleotide
gagccugaccccacaguga

SEQ ID NO: 656986 - RNA, 19 nt, Artificial Sequence
  Description of Artificial Sequence: Synthetic oligonucleotide
guccgcucagcuggcaagc

SEQ ID NO: 656987 - RNA, 19 nt, Artificial Sequence
  Description of Artificial Sequence: Synthetic oligonucleotide
gggaacggggaggaagugc

SEQ ID NO: 656988 - RNA, 19 nt, Artificial Sequence
  Description of Artificial Sequence: Synthetic oligonucleotide
ccacuaauauucggcacac

SEQ ID NO: 656989 - RNA, 19 nt, Artificial Sequence
  Description of Artificial Sequence: Synthetic oligonucleotide
cauucggcugucuguuaaa

SEQ ID NO: 656990 - RNA, 19 nt, Artificial Sequence
  Description of Artificial Sequence: Synthetic oligonucleotide
gcccacuaauauucggcac

SEQ ID NO: 656991 - RNA, 19 nt, Artificial Sequence
  Description of Artificial Sequence: Synthetic oligonucleotide
gugccuggugcuacgcuac

SEQ ID NO: 656992 - RNA, 19 nt, Artificial Sequence
  Description of Artificial Sequence: Synthetic oligonucleotide
acggggaggaagugccgau

SEQ ID NO: 656993 - RNA, 19 nt, Artificial Sequence
  Description of Artificial Sequence: Synthetic oligonucleotide
cuuuugcuauuaagccaaa

SEQ ID NO: 656994 - RNA, 19 nt, Artificial Sequence
  Description of Artificial Sequence: Synthetic oligonucleotide
gaagugccgauggcgccuc

SEQ ID NO: 656995 - RNA, 19 nt, Artificial Sequence
  Description of Artificial Sequence: Synthetic oligonucleotide
caaugaccccguggguccc

SEQ ID NO: 656996 - RNA, 19 nt, Artificial Sequence
  Description of Artificial Sequence: Synthetic oligonucleotide
ccccacugccacuucuucc

SEQ ID NO: 656997 - RNA, 19 nt, Artificial Sequence
  Description of Artificial Sequence: Synthetic oligonucleotide
gguuuauagcagaggcauc

SEQ ID NO: 656998 - RNA, 19 nt, Artificial Sequence
  Description of Artificial Sequence: Synthetic oligonucleotide
ucgccaaguuguccuucuu

SEQ ID NO: 656999 - RNA, 19 nt, Artificial Sequence
  Description of Artificial Sequence: Synthetic oligonucleotide
ucaguccgcucagcuggca

SEQ ID NO: 657000 - RNA, 19 nt, Artificial Sequence
  Description of Artificial Sequence: Synthetic oligonucleotide
gcagcguuucuuucguuua

SEQ ID NO: 657001 - RNA, 19 nt, Artificial Sequence
  Description of Artificial Sequence: Synthetic oligonucleotide
ggugugcagcugguuaaug

SEQ ID NO: 657002 - RNA, 19 nt, Artificial Sequence
  Description of Artificial Sequence: Synthetic oligonucleotide
caggacugugccuggaaau

SEQ ID NO: 657003 - RNA, 19 nt, Artificial Sequence
  Description of Artificial Sequence: Synthetic oligonucleotide
cacucacggggaacgggga

SEQ ID NO: 657004 - RNA, 19 nt, Artificial Sequence
  Description of Artificial Sequence: Synthetic oligonucleotide
auggcgccucccgauacaa

SEQ ID NO: 657005 - RNA, 19 nt, Artificial Sequence
  Description of Artificial Sequence: Synthetic oligonucleotide
ccccgauaauacguagagg

SEQ ID NO: 657006 - RNA, 19 nt, Artificial Sequence
  Description of Artificial Sequence: Synthetic oligonucleotide
ccaagaaaucuuccuccca

SEQ ID NO: 657007 - RNA, 19 nt, Artificial Sequence
  Description of Artificial Sequence: Synthetic oligonucleotide
cuucauucggcugucuguu

SEQ ID NO: 657008 - RNA, 19 nt, Artificial Sequence
  Description of Artificial Sequence: Synthetic oligonucleotide
ccaucgcuugacauugaca

SEQ ID NO: 657009 - RNA, 19 nt, Artificial Sequence
  Description of Artificial Sequence: Synthetic oligonucleotide
ggccaaagacucagcuaag

SEQ ID NO: 657010 - RNA, 19 nt, Artificial Sequence
  Description of Artificial Sequence: Synthetic oligonucleotide
ucguaacagcaagcugcuc

SEQ ID NO: 657011 - RNA, 19 nt, Artificial Sequence
  Description of Artificial Sequence: Synthetic oligonucleotide
cugugccuggaaaucgccu

SEQ ID NO: 657012 - RNA, 19 nt, Artificial Sequence
  Description of Artificial Sequence: Synthetic oligonucleotide
gguuggccaaagacucagc

SEQ ID NO: 657013 - RNA, 19 nt, Artificial Sequence
  Description of Artificial Sequence: Synthetic oligonucleotide
cauguagagugcacuccau

SEQ ID NO: 657014 - RNA, 19 nt, Artificial Sequence
  Description of Artificial Sequence: Synthetic oligonucleotide
agccccaguuuuauugauu

SEQ ID NO: 657015 - RNA, 19 nt, Artificial Sequence
  Description of Artificial Sequence: Synthetic oligonucleotide
acgcuacaaaguagcucca

SEQ ID NO: 657016 - RNA, 19 nt, Artificial Sequence
  Description of Artificial Sequence: Synthetic oligonucleotide
gcuguuucgccaaguuguc

SEQ ID NO: 657017 - RNA, 19 nt, Artificial Sequence
  Description of Artificial Sequence: Synthetic oligonucleotide
cacuaauauucggcacaca

SEQ ID NO: 657018 - RNA, 19 nt, Artificial Sequence
  Description of Artificial Sequence: Synthetic oligonucleotide
ccaguuacgugauccuuua

SEQ ID NO: 657019 - RNA, 19 nt, Artificial Sequence
  Description of Artificial Sequence: Synthetic oligonucleotide
cacuccgauuguggugaug

SEQ ID NO: 657020 - RNA, 19 nt, Artificial Sequence
  Description of Artificial Sequence: Synthetic oligonucleotide
cucuugccuacaccgcugu

SEQ ID NO: 657021 - RNA, 19 nt, Artificial Sequence
  Description of Artificial Sequence: Synthetic oligonucleotide
ggcaagcguccucgccagg

SEQ ID NO: 657022 - RNA, 19 nt, Artificial Sequence
  Description of Artificial Sequence: Synthetic oligonucleotide
caguccgcucagcuggcaa

SEQ ID NO: 657023 - RNA, 19 nt, Artificial Sequence
  Description of Artificial Sequence: Synthetic oligonucleotide
ccgcucagggucgucauuc

SEQ ID NO: 657024 - RNA, 19 nt, Artificial Sequence
  Description of Artificial Sequence: Synthetic oligonucleotide
caguuacgugauccuuuaa

SEQ ID NO: 657025 - RNA, 19 nt, Artificial Sequence
  Description of Artificial Sequence: Synthetic oligonucleotide
ccguugagaugggagagga

SEQ ID NO: 657026 - RNA, 19 nt, Artificial Sequence
  Description of Artificial Sequence: Synthetic oligonucleotide
cacagcuccccuggguuua

SEQ ID NO: 657027 - RNA, 19 nt, Artificial Sequence
  Description of Artificial Sequence: Synthetic oligonucleotide
gcuacgcuacaaaguagcu

SEQ ID NO: 657028 - RNA, 19 nt, Artificial Sequence
  Description of Artificial Sequence: Synthetic oligonucleotide
ggggaacggggaggaagug

SEQ ID NO: 657029 - RNA, 19 nt, Artificial Sequence
  Description of Artificial Sequence: Synthetic oligonucleotide
ccccuggguuuauagcaga

SEQ ID NO: 657030 - RNA, 19 nt, Artificial Sequence
  Description of Artificial Sequence: Synthetic oligonucleotide
ccuacaccgcugucgccga

SEQ ID NO: 657031 - RNA, 19 nt, Artificial Sequence
  Description of Artificial Sequence: Synthetic oligonucleotide
cgccuaggaaaagaaaucu

SEQ ID NO: 657032 - RNA, 19 nt, Artificial Sequence
  Description of Artificial Sequence: Synthetic oligonucleotide
gcuguauggcaggagccau

SEQ ID NO: 657033 - RNA, 19 nt, Artificial Sequence
  Description of Artificial Sequence: Synthetic oligonucleotide
cagcacuagugacgucgua

SEQ ID NO: 657034 - RNA, 19 nt, Artificial Sequence
  Description of Artificial Sequence: Synthetic oligonucleotide
cgugauccuuuaagggaaa

SEQ ID NO: 657035 - RNA, 19 nt, Artificial Sequence
  Description of Artificial Sequence: Synthetic oligonucleotide
gggccauuagcagcagcgu

SEQ ID NO: 657036 - RNA, 19 nt, Artificial Sequence
  Description of Artificial Sequence: Synthetic oligonucleotide
caucacaguucugguugau

SEQ ID NO: 657037 - RNA, 19 nt, Artificial Sequence
  Description of Artificial Sequence: Synthetic oligonucleotide
gcaguggacugggccauua

SEQ ID NO: 657038 - RNA, 19 nt, Artificial Sequence
  Description of Artificial Sequence: Synthetic oligonucleotide
cgauuguggugauguagcu

SEQ ID NO: 657039 - RNA, 19 nt, Artificial Sequence
  Description of Artificial Sequence: Synthetic oligonucleotide
gguguccaaaucaguucuu

SEQ ID NO: 657040 - RNA, 19 nt, Artificial Sequence
  Description of Artificial Sequence: Synthetic oligonucleotide
ccgccuaucccagcuugga

SEQ ID NO: 657041 - RNA, 19 nt, Artificial Sequence
  Description of Artificial Sequence: Synthetic oligonucleotide
cggggaacggggaggaagu

SEQ ID NO: 657042 - RNA, 19 nt, Artificial Sequence
  Description of Artificial Sequence: Synthetic oligonucleotide
gggucuguugcagcagguu

SEQ ID NO: 657043 - RNA, 19 nt, Artificial Sequence
  Description of Artificial Sequence: Synthetic oligonucleotide
gggugugcagcugguuaau

SEQ ID NO: 657044 - RNA, 19 nt, Artificial Sequence
  Description of Artificial Sequence: Synthetic oligonucleotide
cagcagcguuucuuucguu

SEQ ID NO: 657045 - RNA, 19 nt, Artificial Sequence
  Description of Artificial Sequence: Synthetic oligonucleotide
cguuugauuuggcuucauu

SEQ ID NO: 657046 - RNA, 19 nt, Artificial Sequence
  Description of Artificial Sequence: Synthetic oligonucleotide
cccaccccacugccacuuc

SEQ ID NO: 657047 - RNA, 19 nt, Artificial Sequence
  Description of Artificial Sequence: Synthetic oligonucleotide
cuacaccgcugucgccgau

SEQ ID NO: 657048 - RNA, 19 nt, Artificial Sequence
  Description of Artificial Sequence: Synthetic oligonucleotide
caggcucguccaacaccuu

SEQ ID NO: 657049 - RNA, 19 nt, Artificial Sequence
  Description of Artificial Sequence: Synthetic oligonucleotide
ccgcucagcuggcaagcgu

SEQ ID NO: 657050 - RNA, 19 nt, Artificial Sequence
  Description of Artificial Sequence: Synthetic oligonucleotide
cagcuccccuggguuuaua

SEQ ID NO: 657051 - RNA, 19 nt, Artificial Sequence
  Description of Artificial Sequence: Synthetic oligonucleotide
caccgcugucgccgaugau

SEQ ID NO: 657052 - RNA, 19 nt, Artificial Sequence
  Description of Artificial Sequence: Synthetic oligonucleotide
ccccaggugccuggugcua

SEQ ID NO: 657053 - RNA, 19 nt, Artificial Sequence
  Description of Artificial Sequence: Synthetic oligonucleotide
ccacuccgauuguggugau

SEQ ID NO: 657054 - RNA, 19 nt, Artificial Sequence
  Description of Artificial Sequence: Synthetic oligonucleotide
ccccaccccacugccacuu

SEQ ID NO: 657055 - RNA, 19 nt, Artificial Sequence
  Description of Artificial Sequence: Synthetic oligonucleotide
uuaauaauaauaauaauaa

SEQ ID NO: 657056 - RNA, 19 nt, Artificial Sequence
  Description of Artificial Sequence: Synthetic oligonucleotide
uuuaauaauaauaauaaua

SEQ ID NO: 657057 - RNA, 19 nt, Artificial Sequence
  Description of Artificial Sequence: Synthetic oligonucleotide
aauaauaauaauaauauaa

SEQ ID NO: 657058 - RNA, 19 nt, Artificial Sequence
  Description of Artificial Sequence: Synthetic oligonucleotide
aauaauaauaauaauaaua

SEQ ID NO: 657059 - RNA, 19 nt, Artificial Sequence
  Description of Artificial Sequence: Synthetic oligonucleotide
ucgaauuuaauaauaauaa

SEQ ID NO: 657060 - RNA, 19 nt, Artificial Sequence
  Description of Artificial Sequence: Synthetic oligonucleotide
uguacaacgugcaaaagug

SEQ ID NO: 657061 - RNA, 19 nt, Artificial Sequence
  Description of Artificial Sequence: Synthetic oligonucleotide
auaauaauaauaauaauaa

SEQ ID NO: 657062 - RNA, 19 nt, Artificial Sequence
  Description of Artificial Sequence: Synthetic oligonucleotide
auaauaauaauaauaauau

SEQ ID NO: 657063 - RNA, 19 nt, Artificial Sequence
  Description of Artificial Sequence: Synthetic oligonucleotide
uucgaauuuaauaauaaua

SEQ ID NO: 657064 - RNA, 19 nt, Artificial Sequence
  Description of Artificial Sequence: Synthetic oligonucleotide
gaugacuuuguuuaggcug

SEQ ID NO: 657065 - RNA, 19 nt, Artificial Sequence
  Description of Artificial Sequence: Synthetic oligonucleotide
gagaauucgaauuuaauaa

SEQ ID NO: 657066 - RNA, 19 nt, Artificial Sequence
  Description of Artificial Sequence: Synthetic oligonucleotide
aaacccaucaucaagccag

SEQ ID NO: 657067 - RNA, 19 nt, Artificial Sequence
  Description of Artificial Sequence: Synthetic oligonucleotide
ucaaaugaugcauuagccc

SEQ ID NO: 657068 - RNA, 19 nt, Artificial Sequence
  Description of Artificial Sequence: Synthetic oligonucleotide
gaugcauuagcccuuugcc

SEQ ID NO: 657069 - RNA, 19 nt, Artificial Sequence
  Description of Artificial Sequence: Synthetic oligonucleotide
ugucaacucuucaucaggg

SEQ ID NO: 657070 - RNA, 19 nt, Artificial Sequence
  Description of Artificial Sequence: Synthetic oligonucleotide
guuucagucgacuguacgg

SEQ ID NO: 657071 - RNA, 19 nt, Artificial Sequence
  Description of Artificial Sequence: Synthetic oligonucleotide
gacguagccauucccaacg

SEQ ID NO: 657072 - RNA, 19 nt, Artificial Sequence
  Description of Artificial Sequence: Synthetic oligonucleotide
  modified_base (2)..(2): a, c, u, g, unknown or other
cncaaacccaucaucaagc

SEQ ID NO: 657073 - RNA, 19 nt, Artificial Sequence
  Description of Artificial Sequence: Synthetic oligonucleotide
ugcacuagcaggucgcugg

SEQ ID NO: 657074 - RNA, 19 nt, Artificial Sequence
  Description of Artificial Sequence: Synthetic oligonucleotide
uaagcgaguggguagacug

SEQ ID NO: 657075 - RNA, 19 nt, Artificial Sequence
  Description of Artificial Sequence: Synthetic oligonucleotide
ucuaaagcgagaauucgaa

SEQ ID NO: 657076 - RNA, 19 nt, Artificial Sequence
  Description of Artificial Sequence: Synthetic oligonucleotide
cuuucccgcaauaaaagag

SEQ ID NO: 657077 - RNA, 19 nt, Artificial Sequence
  Description of Artificial Sequence: Synthetic oligonucleotide
agucacauagcacacucag

SEQ ID NO: 657078 - RNA, 19 nt, Artificial Sequence
  Description of Artificial Sequence: Synthetic oligonucleotide
auaauaauaauaauauaau

SEQ ID NO: 657079 - RNA, 19 nt, Artificial Sequence
  Description of Artificial Sequence: Synthetic oligonucleotide
aaagcgagaauucgaauuu

SEQ ID NO: 657080 - RNA, 19 nt, Artificial Sequence
  Description of Artificial Sequence: Synthetic oligonucleotide
uaauaauaauaauaauaau

SEQ ID NO: 657081 - RNA, 19 nt, Artificial Sequence
  Description of Artificial Sequence: Synthetic oligonucleotide
agauacggggaccaagugg

SEQ ID NO: 657082 - RNA, 19 nt, Artificial Sequence
  Description of Artificial Sequence: Synthetic oligonucleotide
caaucucgcagucacauag

SEQ ID NO: 657083 - RNA, 19 nt, Artificial Sequence
  Description of Artificial Sequence: Synthetic oligonucleotide
uaauaauaauaauaauaua

SEQ ID NO: 657084 - RNA, 19 nt, Artificial Sequence
  Description of Artificial Sequence: Synthetic oligonucleotide
ugaugcauuagcccuuugc

SEQ ID NO: 657085 - RNA, 19 nt, Artificial Sequence
  Description of Artificial Sequence: Synthetic oligonucleotide
cuuuaauguccaaguaucc

SEQ ID NO: 657086 - RNA, 19 nt, Artificial Sequence
  Description of Artificial Sequence: Synthetic oligonucleotide
  modified_base (3)..(3): a, c, u, g, unknown or other
acncaaacccaucaucaag

SEQ ID NO: 657087 - RNA, 19 nt, Artificial Sequence
  Description of Artificial Sequence: Synthetic oligonucleotide
aauucgaauuuaauaauaa

SEQ ID NO: 657088 - RNA, 19 nt, Artificial Sequence
  Description of Artificial Sequence: Synthetic oligonucleotide
auagcucugcacuggauag

SEQ ID NO: 657089 - RNA, 19 nt, Artificial Sequence
  Description of Artificial Sequence: Synthetic oligonucleotide
caucccucucucuaaagcg

SEQ ID NO: 657090 - RNA, 19 nt, Artificial Sequence
  Description of Artificial Sequence: Synthetic oligonucleotide
ucucuaaagcgagaauucg

SEQ ID NO: 657091 - RNA, 19 nt, Artificial Sequence
  Description of Artificial Sequence: Synthetic oligonucleotide
gauucgcuggaucugaauc

SEQ ID NO: 657092 - RNA, 19 nt, Artificial Sequence
  Description of Artificial Sequence: Synthetic oligonucleotide
uguaaccaucaacaggaca

SEQ ID NO: 657093 - RNA, 19 nt, Artificial Sequence
  Description of Artificial Sequence: Synthetic oligonucleotide
aaccgucacuuuaaugucc

SEQ ID NO: 657094 - RNA, 19 nt, Artificial Sequence
  Description of Artificial Sequence: Synthetic oligonucleotide
uucccaacgggacuggggc

SEQ ID NO: 657095 - RNA, 19 nt, Artificial Sequence
  Description of Artificial Sequence: Synthetic oligonucleotide
acaacgugcaaaagugucc

SEQ ID NO: 657096 - RNA, 19 nt, Artificial Sequence
  Description of Artificial Sequence: Synthetic oligonucleotide
ugagguugcugagagauac

SEQ ID NO: 657097 - RNA, 19 nt, Artificial Sequence
  Description of Artificial Sequence: Synthetic oligonucleotide
uucccgcaauaaaagagag

SEQ ID NO: 657098 - RNA, 19 nt, Artificial Sequence
  Description of Artificial Sequence: Synthetic oligonucleotide
ugcauuagcccuuugccuc

SEQ ID NO: 657099 - RNA, 19 nt, Artificial Sequence
  Description of Artificial Sequence: Synthetic oligonucleotide
ugaaacagcuuguuagagu

SEQ ID NO: 657100 - RNA, 19 nt, Artificial Sequence
  Description of Artificial Sequence: Synthetic oligonucleotide
gcagcauauguguacaacg

SEQ ID NO: 657101 - RNA, 19 nt, Artificial Sequence
  Description of Artificial Sequence: Synthetic oligonucleotide
ugcugagaccuucaccagg

SEQ ID NO: 657102 - RNA, 19 nt, Artificial Sequence
  Description of Artificial Sequence: Synthetic oligonucleotide
aacgugcaaaagugucccc

SEQ ID NO: 657103 - RNA, 19 nt, Artificial Sequence
  Description of Artificial Sequence: Synthetic oligonucleotide
cucgcagucacauagcaca

SEQ ID NO: 657104 - RNA, 19 nt, Artificial Sequence
  Description of Artificial Sequence: Synthetic oligonucleotide
aaacuugguguugccacgg

SEQ ID NO: 657105 - RNA, 19 nt, Artificial Sequence
  Description of Artificial Sequence: Synthetic oligonucleotide
ggugcuggcauacugaaac

SEQ ID NO: 657106 - RNA, 19 nt, Artificial Sequence
  Description of Artificial Sequence: Synthetic oligonucleotide
auucgaauuuaauaauaau

SEQ ID NO: 657107 - RNA, 19 nt, Artificial Sequence
  Description of Artificial Sequence: Synthetic oligonucleotide
ucguaggccuucuucauca

SEQ ID NO: 657108 - RNA, 19 nt, Artificial Sequence
  Description of Artificial Sequence: Synthetic oligonucleotide
  modified_base (7)..(7): a, c, u, g, unknown or other
ugagacncaaacccaucau

SEQ ID NO: 657109 - RNA, 19 nt, Artificial Sequence
  Description of Artificial Sequence: Synthetic oligonucleotide
ugcgguucguuguacuccg

SEQ ID NO: 657110 - RNA, 19 nt, Artificial Sequence
  Description of Artificial Sequence: Synthetic oligonucleotide
guugccacggaaaccaccg

SEQ ID NO: 657111 - RNA, 19 nt, Artificial Sequence
  Description of Artificial Sequence: Synthetic oligonucleotide
augagugcaaucucgcagu

SEQ ID NO: 657112 - RNA, 19 nt, Artificial Sequence
  Description of Artificial Sequence: Synthetic oligonucleotide
augaugagugcaaucucgc

SEQ ID NO: 657113 - RNA, 19 nt, Artificial Sequence
  Description of Artificial Sequence: Synthetic oligonucleotide
agcauauguguacaacgug

SEQ ID NO: 657114 - RNA, 19 nt, Artificial Sequence
  Description of Artificial Sequence: Synthetic oligonucleotide
acccauagcgccugaagag

SEQ ID NO: 657115 - RNA, 19 nt, Artificial Sequence
  Description of Artificial Sequence: Synthetic oligonucleotide
  modified_base (6)..(6): a, c, u, g, unknown or other
gagacncaaacccaucauc

SEQ ID NO: 657116 - RNA, 19 nt, Artificial Sequence
  Description of Artificial Sequence: Synthetic oligonucleotide
auugccuagugccagcccu

SEQ ID NO: 657117 - RNA, 19 nt, Artificial Sequence
  Description of Artificial Sequence: Synthetic oligonucleotide
uccguaagggaugauguca

SEQ ID NO: 657118 - RNA, 19 nt, Artificial Sequence
  Description of Artificial Sequence: Synthetic oligonucleotide
cucucuaaagcgagaauuc

SEQ ID NO: 657119 - RNA, 19 nt, Artificial Sequence
  Description of Artificial Sequence: Synthetic oligonucleotide
ugucacagccguugaaacc

SEQ ID NO: 657120 - RNA, 19 nt, Artificial Sequence
  Description of Artificial Sequence: Synthetic oligonucleotide
uagacugggagaccccaag

SEQ ID NO: 657121 - RNA, 19 nt, Artificial Sequence
  Description of Artificial Sequence: Synthetic oligonucleotide
ggaaccgucacuuuaaugu

SEQ ID NO: 657122 - RNA, 19 nt, Artificial Sequence
  Description of Artificial Sequence: Synthetic oligonucleotide
uugguguugccacggaaac

SEQ ID NO: 657123 - RNA, 19 nt, Artificial Sequence
  Description of Artificial Sequence: Synthetic oligonucleotide
ugacccauagcgccugaag

SEQ ID NO: 657124 - RNA, 19 nt, Artificial Sequence
  Description of Artificial Sequence: Synthetic oligonucleotide
  modified_base (5)..(5): a, c, u, g, unknown or other
agacncaaacccaucauca

SEQ ID NO: 657125 - RNA, 19 nt, Artificial Sequence
  Description of Artificial Sequence: Synthetic oligonucleotide
gguucuuuacaccugucug

SEQ ID NO: 657126 - RNA, 19 nt, Artificial Sequence
  Description of Artificial Sequence: Synthetic oligonucleotide
uggcugaguaaacuuggug

SEQ ID NO: 657127 - RNA, 19 nt, Artificial Sequence
  Description of Artificial Sequence: Synthetic oligonucleotide
aacugcauggagcucugau

SEQ ID NO: 657128 - RNA, 19 nt, Artificial Sequence
  Description of Artificial Sequence: Synthetic oligonucleotide
uguacuccguguacuugag

SEQ ID NO: 657129 - RNA, 19 nt, Artificial Sequence
  Description of Artificial Sequence: Synthetic oligonucleotide
uuggugaaugucaccuggc

SEQ ID NO: 657130 - RNA, 19 nt, Artificial Sequence
  Description of Artificial Sequence: Synthetic oligonucleotide
uggugcggcucucaugcgg

SEQ ID NO: 657131 - RNA, 19 nt, Artificial Sequence
  Description of Artificial Sequence: Synthetic oligonucleotide
cacuguuucucuguagugc

SEQ ID NO: 657132 - RNA, 19 nt, Artificial Sequence
  Description of Artificial Sequence: Synthetic oligonucleotide
caacgugcaaaaguguccc

SEQ ID NO: 657133 - RNA, 19 nt, Artificial Sequence
  Description of Artificial Sequence: Synthetic oligonucleotide
augcgguucguuguacucc

SEQ ID NO: 657134 - RNA, 19 nt, Artificial Sequence
  Description of Artificial Sequence: Synthetic oligonucleotide
ugcacuggauagcugguaa

SEQ ID NO: 657135 - RNA, 19 nt, Artificial Sequence
  Description of Artificial Sequence: Synthetic oligonucleotide
uucguuguacuccguguac

SEQ ID NO: 657136 - RNA, 19 nt, Artificial Sequence
  Description of Artificial Sequence: Synthetic oligonucleotide
gauagcucugcacuggaua

SEQ ID NO: 657137 - RNA, 19 nt, Artificial Sequence
  Description of Artificial Sequence: Synthetic oligonucleotide
cauauguguacaacgugca

SEQ ID NO: 657138 - RNA, 19 nt, Artificial Sequence
  Description of Artificial Sequence: Synthetic oligonucleotide
gaauucgaauuuaauaaua

SEQ ID NO: 657139 - RNA, 19 nt, Artificial Sequence
  Description of Artificial Sequence: Synthetic oligonucleotide
gaaccgucacuuuaauguc

SEQ ID NO: 657140 - RNA, 19 nt, Artificial Sequence
  Description of Artificial Sequence: Synthetic oligonucleotide
cuagugccagcccugcagg

SEQ ID NO: 657141 - RNA, 19 nt, Artificial Sequence
  Description of Artificial Sequence: Synthetic oligonucleotide
uccugcacuagcaggucgc

SEQ ID NO: 657142 - RNA, 19 nt, Artificial Sequence
  Description of Artificial Sequence: Synthetic oligonucleotide
uggguagacugggagaccc

SEQ ID NO: 657143 - RNA, 19 nt, Artificial Sequence
  Description of Artificial Sequence: Synthetic oligonucleotide
ugucggugcuggcauacug

SEQ ID NO: 657144 - RNA, 19 nt, Artificial Sequence
  Description of Artificial Sequence: Synthetic oligonucleotide
gacccauagcgccugaaga

SEQ ID NO: 657145 - RNA, 19 nt, Artificial Sequence
  Description of Artificial Sequence: Synthetic oligonucleotide
uuguuuaggcuguugccau

SEQ ID NO: 657146 - RNA, 19 nt, Artificial Sequence
  Description of Artificial Sequence: Synthetic oligonucleotide
gguuucagucgacuguacg

SEQ ID NO: 657147 - RNA, 19 nt, Artificial Sequence
  Description of Artificial Sequence: Synthetic oligonucleotide
agggaugacuuuguuuagg

SEQ ID NO: 657148 - RNA, 19 nt, Artificial Sequence
  Description of Artificial Sequence: Synthetic oligonucleotide
acacuguuucucuguagug

SEQ ID NO: 657149 - RNA, 19 nt, Artificial Sequence
  Description of Artificial Sequence: Synthetic oligonucleotide
guaaccaucaacaggacau

SEQ ID NO: 657150 - RNA, 19 nt, Artificial Sequence
  Description of Artificial Sequence: Synthetic oligonucleotide
aguauccagccgcauccuc

SEQ ID NO: 657151 - RNA, 19 nt, Artificial Sequence
  Description of Artificial Sequence: Synthetic oligonucleotide
aacccaucaucaagccagc

SEQ ID NO: 657152 - RNA, 19 nt, Artificial Sequence
  Description of Artificial Sequence: Synthetic oligonucleotide
uacggguuucaguuguugu

SEQ ID NO: 657153 - RNA, 19 nt, Artificial Sequence
  Description of Artificial Sequence: Synthetic oligonucleotide
cccgcaauaaaagagaguc

SEQ ID NO: 657154 - RNA, 19 nt, Artificial Sequence
  Description of Artificial Sequence: Synthetic oligonucleotide
guaggcagugggcauggag

SEQ ID NO: 657155 - RNA, 19 nt, Artificial Sequence
  Description of Artificial Sequence: Synthetic oligonucleotide
augucagcauuggugcggc

SEQ ID NO: 657156 - RNA, 19 nt, Artificial Sequence
  Description of Artificial Sequence: Synthetic oligonucleotide
gagagauacggggaccaag

SEQ ID NO: 657157 - RNA, 19 nt, Artificial Sequence
  Description of Artificial Sequence: Synthetic oligonucleotide
aucagcccaaacuuccgcu

SEQ ID NO: 657158 - RNA, 19 nt, Artificial Sequence
  Description of Artificial Sequence: Synthetic oligonucleotide
aucucgcagucacauagca

SEQ ID NO: 657159 - RNA, 19 nt, Artificial Sequence
  Description of Artificial Sequence: Synthetic oligonucleotide
  modified_base (4)..(4): a, c, u, g, unknown or other
gacncaaacccaucaucaa

SEQ ID NO: 657160 - RNA, 19 nt, Artificial Sequence
  Description of Artificial Sequence: Synthetic oligonucleotide
cugucacagccguugaaac

SEQ ID NO: 657161 - RNA, 19 nt, Artificial Sequence
  Description of Artificial Sequence: Synthetic oligonucleotide
agcucgggcacugacguag

SEQ ID NO: 657162 - RNA, 19 nt, Artificial Sequence
  Description of Artificial Sequence: Synthetic oligonucleotide
gaaaccaccggggugguaa

SEQ ID NO: 657163 - RNA, 19 nt, Artificial Sequence
  Description of Artificial Sequence: Synthetic oligonucleotide
gacuguacggguuucaguu

SEQ ID NO: 657164 - RNA, 19 nt, Artificial Sequence
  Description of Artificial Sequence: Synthetic oligonucleotide
gucucauaggauccuccag

SEQ ID NO: 657165 - RNA, 19 nt, Artificial Sequence
  Description of Artificial Sequence: Synthetic oligonucleotide
agugggaaccgucacuuua

SEQ ID NO: 657166 - RNA, 19 nt, Artificial Sequence
  Description of Artificial Sequence: Synthetic oligonucleotide
acuguacggguuucaguug

SEQ ID NO: 657167 - RNA, 19 nt, Artificial Sequence
  Description of Artificial Sequence: Synthetic oligonucleotide
agcccaaacuuccgcuugg

SEQ ID NO: 657168 - RNA, 19 nt, Artificial Sequence
  Description of Artificial Sequence: Synthetic oligonucleotide
agagauacggggaccaagu

SEQ ID NO: 657169 - RNA, 19 nt, Artificial Sequence
  Description of Artificial Sequence: Synthetic oligonucleotide
ucucgcagucacauagcac

SEQ ID NO: 657170 - RNA, 19 nt, Artificial Sequence
  Description of Artificial Sequence: Synthetic oligonucleotide
uccccggucucauaggauc

SEQ ID NO: 657171 - RNA, 19 nt, Artificial Sequence
  Description of Artificial Sequence: Synthetic oligonucleotide
ugcguucgcggcuugggga

SEQ ID NO: 657172 - RNA, 19 nt, Artificial Sequence
  Description of Artificial Sequence: Synthetic oligonucleotide
caucagcccaaacuuccgc

SEQ ID NO: 657173 - RNA, 19 nt, Artificial Sequence
  Description of Artificial Sequence: Synthetic oligonucleotide
guaagggaugaugucacca

SEQ ID NO: 657174 - RNA, 19 nt, Artificial Sequence
  Description of Artificial Sequence: Synthetic oligonucleotide
gagccguggguccguaagg

SEQ ID NO: 657175 - RNA, 19 nt, Artificial Sequence
  Description of Artificial Sequence: Synthetic oligonucleotide
guguacaacgugcaaaagu

SEQ ID NO: 657176 - RNA, 19 nt, Artificial Sequence
  Description of Artificial Sequence: Synthetic oligonucleotide
uuugggguuucagucgacu

SEQ ID NO: 657177 - RNA, 19 nt, Artificial Sequence
  Description of Artificial Sequence: Synthetic oligonucleotide
ugacguagccauucccaac

SEQ ID NO: 657178 - RNA, 19 nt, Artificial Sequence
  Description of Artificial Sequence: Synthetic oligonucleotide
  modified_base (8)..(8): a, c, u, g, unknown or other
cugagacncaaacccauca

SEQ ID NO: 657179 - RNA, 19 nt, Artificial Sequence
  Description of Artificial Sequence: Synthetic oligonucleotide
uuacaccugucugggaaug

SEQ ID NO: 657180 - RNA, 19 nt, Artificial Sequence
  Description of Artificial Sequence: Synthetic oligonucleotide
aaaugaugcauuagcccuu

SEQ ID NO: 657181 - RNA, 19 nt, Artificial Sequence
  Description of Artificial Sequence: Synthetic oligonucleotide
gguguugccacggaaacca

SEQ ID NO: 657182 - RNA, 19 nt, Artificial Sequence
  Description of Artificial Sequence: Synthetic oligonucleotide
cauagcgccugaagagccc

SEQ ID NO: 657183 - RNA, 19 nt, Artificial Sequence
  Description of Artificial Sequence: Synthetic oligonucleotide
cuccguguacuugagcagc

SEQ ID NO: 657184 - RNA, 19 nt, Artificial Sequence
  Description of Artificial Sequence: Synthetic oligonucleotide
ucgacuguacggguuucag

SEQ ID NO: 657185 - RNA, 19 nt, Artificial Sequence
  Description of Artificial Sequence: Synthetic oligonucleotide
ucccgcaauaaaagagagu

SEQ ID NO: 657186 - RNA, 19 nt, Artificial Sequence
  Description of Artificial Sequence: Synthetic oligonucleotide
ucccugggaagugaugacc

SEQ ID NO: 657187 - RNA, 19 nt, Artificial Sequence
  Description of Artificial Sequence: Synthetic oligonucleotide
aaugaugcauuagcccuuu

SEQ ID NO: 657188 - RNA, 19 nt, Artificial Sequence
  Description of Artificial Sequence: Synthetic oligonucleotide
accaccggggugguaagcg

SEQ ID NO: 657189 - RNA, 19 nt, Artificial Sequence
  Description of Artificial Sequence: Synthetic oligonucleotide
agcaucccucucucuaaag

SEQ ID NO: 657190 - RNA, 19 nt, Artificial Sequence
  Description of Artificial Sequence: Synthetic oligonucleotide
gaucuaccucuuccugucc

SEQ ID NO: 657191 - RNA, 19 nt, Artificial Sequence
  Description of Artificial Sequence: Synthetic oligonucleotide
aacuuccgcuuggugaaug

SEQ ID NO: 657192 - RNA, 19 nt, Artificial Sequence
  Description of Artificial Sequence: Synthetic oligonucleotide
ggagugaccagagagccac

SEQ ID NO: 657193 - RNA, 19 nt, Artificial Sequence
  Description of Artificial Sequence: Synthetic oligonucleotide
ggcugaguaaacuuggugu

SEQ ID NO: 657194 - RNA, 19 nt, Artificial Sequence
  Description of Artificial Sequence: Synthetic oligonucleotide
caugcgguucguuguacuc

SEQ ID NO: 657195 - RNA, 19 nt, Artificial Sequence
  Description of Artificial Sequence: Synthetic oligonucleotide
ucguuguacuccguguacu

SEQ ID NO: 657196 - RNA, 19 nt, Artificial Sequence
  Description of Artificial Sequence: Synthetic oligonucleotide
uugccuagugccagcccug

SEQ ID NO: 657197 - RNA, 19 nt, Artificial Sequence
  Description of Artificial Sequence: Synthetic oligonucleotide
ucagucgacuguacggguu

SEQ ID NO: 657198 - RNA, 19 nt, Artificial Sequence
  Description of Artificial Sequence: Synthetic oligonucleotide
ugguaagcgaguggguaga

SEQ ID NO: 657199 - RNA, 19 nt, Artificial Sequence
  Description of Artificial Sequence: Synthetic oligonucleotide
acggguuucaguuguugua

SEQ ID NO: 657200 - RNA, 19 nt, Artificial Sequence
  Description of Artificial Sequence: Synthetic oligonucleotide
ucgcagucacauagcacac

SEQ ID NO: 657201 - RNA, 19 nt, Artificial Sequence
  Description of Artificial Sequence: Synthetic oligonucleotide
agugagagcagcacccaca

SEQ ID NO: 657202 - RNA, 19 nt, Artificial Sequence
  Description of Artificial Sequence: Synthetic oligonucleotide
ucucaugcgguucguugua

SEQ ID NO: 657203 - RNA, 19 nt, Artificial Sequence
  Description of Artificial Sequence: Synthetic oligonucleotide
ucggugcuggcauacugaa

SEQ ID NO: 657204 - RNA, 19 nt, Artificial Sequence
  Description of Artificial Sequence: Synthetic oligonucleotide
gcaucccucucucuaaagc

SEQ ID NO: 657205 - RNA, 19 nt, Artificial Sequence
  Description of Artificial Sequence: Synthetic oligonucleotide
ggaggauagcucugcacug

SEQ ID NO: 657206 - RNA, 19 nt, Artificial Sequence
  Description of Artificial Sequence: Synthetic oligonucleotide
ugauucgcuggaucugaau

SEQ ID NO: 657207 - RNA, 19 nt, Artificial Sequence
  Description of Artificial Sequence: Synthetic oligonucleotide
agccguggguccguaaggg

SEQ ID NO: 657208 - RNA, 19 nt, Artificial Sequence
  Description of Artificial Sequence: Synthetic oligonucleotide
gcauuguucaaaugaugca

SEQ ID NO: 657209 - RNA, 19 nt, Artificial Sequence
  Description of Artificial Sequence: Synthetic oligonucleotide
acagccguugaaacccuuc

SEQ ID NO: 657210 - RNA, 19 nt, Artificial Sequence
  Description of Artificial Sequence: Synthetic oligonucleotide
gacuuuguuuaggcuguug

SEQ ID NO: 657211 - RNA, 19 nt, Artificial Sequence
  Description of Artificial Sequence: Synthetic oligonucleotide
auguaaccaucaacaggac

SEQ ID NO: 657212 - RNA, 19 nt, Artificial Sequence
  Description of Artificial Sequence: Synthetic oligonucleotide
gccguugaaacccuucuuc

SEQ ID NO: 657213 - RNA, 19 nt, Artificial Sequence
  Description of Artificial Sequence: Synthetic oligonucleotide
uugguucuuuacaccuguc

SEQ ID NO: 657214 - RNA, 19 nt, Artificial Sequence
  Description of Artificial Sequence: Synthetic oligonucleotide
uccgcucaucagugauucg

SEQ ID NO: 657215 - RNA, 19 nt, Artificial Sequence
  Description of Artificial Sequence: Synthetic oligonucleotide
ggagccguggguccguaag

SEQ ID NO: 657216 - RNA, 19 nt, Artificial Sequence
  Description of Artificial Sequence: Synthetic oligonucleotide
ggaagcucgggcacugacg

SEQ ID NO: 657217 - RNA, 19 nt, Artificial Sequence
  Description of Artificial Sequence: Synthetic oligonucleotide
caccggggugguaagcgag

SEQ ID NO: 657218 - RNA, 19 nt, Artificial Sequence
  Description of Artificial Sequence: Synthetic oligonucleotide
gccauuagccacagggagg

SEQ ID NO: 657219 - RNA, 19 nt, Artificial Sequence
  Description of Artificial Sequence: Synthetic oligonucleotide
caggcggugacauugccua

SEQ ID NO: 657220 - RNA, 19 nt, Artificial Sequence
  Description of Artificial Sequence: Synthetic oligonucleotide
gcaauaaaagagagucccc

SEQ ID NO: 657221 - RNA, 19 nt, Artificial Sequence
  Description of Artificial Sequence: Synthetic oligonucleotide
gcucucaugcgguucguug

SEQ ID NO: 657222 - RNA, 19 nt, Artificial Sequence
  Description of Artificial Sequence: Synthetic oligonucleotide
aagcgagaauucgaauuua

SEQ ID NO: 657223 - RNA, 19 nt, Artificial Sequence
  Description of Artificial Sequence: Synthetic oligonucleotide
gugagauugucaacucuuc

SEQ ID NO: 657224 - RNA, 19 nt, Artificial Sequence
  Description of Artificial Sequence: Synthetic oligonucleotide
cauugccuagugccagccc

SEQ ID NO: 657225 - RNA, 19 nt, Artificial Sequence
  Description of Artificial Sequence: Synthetic oligonucleotide
accgucacuuuaaugucca

SEQ ID NO: 657226 - RNA, 19 nt, Artificial Sequence
  Description of Artificial Sequence: Synthetic oligonucleotide
cugcguucgcggcuugggg

SEQ ID NO: 657227 - RNA, 19 nt, Artificial Sequence
  Description of Artificial Sequence: Synthetic oligonucleotide
ugggaaccgucacuuuaau

SEQ ID NO: 657228 - RNA, 19 nt, Artificial Sequence
  Description of Artificial Sequence: Synthetic oligonucleotide
agaugacccauagcgccug

SEQ ID NO: 657229 - RNA, 19 nt, Artificial Sequence
  Description of Artificial Sequence: Synthetic oligonucleotide
ugccaggcggugacauugc

SEQ ID NO: 657230 - RNA, 19 nt, Artificial Sequence
  Description of Artificial Sequence: Synthetic oligonucleotide
uguuuaggcuguugccauu

SEQ ID NO: 657231 - RNA, 19 nt, Artificial Sequence
  Description of Artificial Sequence: Synthetic oligonucleotide
ucgagcgggaggagcccag

SEQ ID NO: 657232 - RNA, 19 nt, Artificial Sequence
  Description of Artificial Sequence: Synthetic oligonucleotide
guacggguuucaguuguug

SEQ ID NO: 657233 - RNA, 19 nt, Artificial Sequence
  Description of Artificial Sequence: Synthetic oligonucleotide
guacuccguguacuugagc

SEQ ID NO: 657234 - RNA, 19 nt, Artificial Sequence
  Description of Artificial Sequence: Synthetic oligonucleotide
uucgcuggaucugaaucuu

SEQ ID NO: 657235 - RNA, 19 nt, Artificial Sequence
  Description of Artificial Sequence: Synthetic oligonucleotide
agcgagaauucgaauuuaa

SEQ ID NO: 657236 - RNA, 19 nt, Artificial Sequence
  Description of Artificial Sequence: Synthetic oligonucleotide
gcauuagcccuuugccucc

SEQ ID NO: 657237 - RNA, 19 nt, Artificial Sequence
  Description of Artificial Sequence: Synthetic oligonucleotide
ggaucgagcgggaggagcc

SEQ ID NO: 657238 - RNA, 19 nt, Artificial Sequence
  Description of Artificial Sequence: Synthetic oligonucleotide
ggucucauaggauccucca

SEQ ID NO: 657239 - RNA, 19 nt, Artificial Sequence
  Description of Artificial Sequence: Synthetic oligonucleotide
cugagagauacggggacca

SEQ ID NO: 657240 - RNA, 19 nt, Artificial Sequence
  Description of Artificial Sequence: Synthetic oligonucleotide
gggaaccgucacuuuaaug

SEQ ID NO: 657241 - RNA, 19 nt, Artificial Sequence
  Description of Artificial Sequence: Synthetic oligonucleotide
ccgcaauaaaagagagucc

SEQ ID NO: 657242 - RNA, 19 nt, Artificial Sequence
  Description of Artificial Sequence: Synthetic oligonucleotide
gcaggcuccauuagcacug

SEQ ID NO: 657243 - RNA, 19 nt, Artificial Sequence
  Description of Artificial Sequence: Synthetic oligonucleotide
ucccaacgggacuggggca

SEQ ID NO: 657244 - RNA, 19 nt, Artificial Sequence
  Description of Artificial Sequence: Synthetic oligonucleotide
uguacggguuucaguuguu

SEQ ID NO: 657245 - RNA, 19 nt, Artificial Sequence
  Description of Artificial Sequence: Synthetic oligonucleotide
cugacguagccauucccaa

SEQ ID NO: 657246 - RNA, 19 nt, Artificial Sequence
  Description of Artificial Sequence: Synthetic oligonucleotide
agucgacuguacggguuuc

SEQ ID NO: 657247 - RNA, 19 nt, Artificial Sequence
  Description of Artificial Sequence: Synthetic oligonucleotide
ccguaagggaugaugucac

SEQ ID NO: 657248 - RNA, 19 nt, Artificial Sequence
  Description of Artificial Sequence: Synthetic oligonucleotide
gguaaggaggauagcucug

SEQ ID NO: 657249 - RNA, 19 nt, Artificial Sequence
  Description of Artificial Sequence: Synthetic oligonucleotide
cuggcgguuccgcucauca

SEQ ID NO: 657250 - RNA, 19 nt, Artificial Sequence
  Description of Artificial Sequence: Synthetic oligonucleotide
gaucgagcgggaggagccc

SEQ ID NO: 657251 - RNA, 19 nt, Artificial Sequence
  Description of Artificial Sequence: Synthetic oligonucleotide
ugaaugucaccuggcgguu

SEQ ID NO: 657252 - RNA, 19 nt, Artificial Sequence
  Description of Artificial Sequence: Synthetic oligonucleotide
agcgccugaagagcccauc

SEQ ID NO: 657253 - RNA, 19 nt, Artificial Sequence
  Description of Artificial Sequence: Synthetic oligonucleotide
cucggcaccuguccuuuuc

SEQ ID NO: 657254 - RNA, 19 nt, Artificial Sequence
  Description of Artificial Sequence: Synthetic oligonucleotide
agccguugaaacccuucuu

SEQ ID NO: 657255 - RNA, 19 nt, Artificial Sequence
  Description of Artificial Sequence: Synthetic oligonucleotide
ggguccguaagggaugaug

SEQ ID NO: 657256 - RNA, 19 nt, Artificial Sequence
  Description of Artificial Sequence: Synthetic oligonucleotide
gggcauuguucaaaugaug

SEQ ID NO: 657257 - RNA, 19 nt, Artificial Sequence
  Description of Artificial Sequence: Synthetic oligonucleotide
ugagagauacggggaccaa

SEQ ID NO: 657258 - RNA, 19 nt, Artificial Sequence
  Description of Artificial Sequence: Synthetic oligonucleotide
ugccuagugccagcccugc

SEQ ID NO: 657259 - RNA, 19 nt, Artificial Sequence
  Description of Artificial Sequence: Synthetic oligonucleotide
augaugcauuagcccuuug

SEQ ID NO: 657260 - RNA, 19 nt, Artificial Sequence
  Description of Artificial Sequence: Synthetic oligonucleotide
cuagugugggccccaaagu

SEQ ID NO: 657261 - RNA, 19 nt, Artificial Sequence
  Description of Artificial Sequence: Synthetic oligonucleotide
cagucacauagcacacuca

SEQ ID NO: 657262 - RNA, 19 nt, Artificial Sequence
  Description of Artificial Sequence: Synthetic oligonucleotide
cuaaagcgagaauucgaau

SEQ ID NO: 657263 - RNA, 19 nt, Artificial Sequence
  Description of Artificial Sequence: Synthetic oligonucleotide
gucggugcuggcauacuga

SEQ ID NO: 657264 - RNA, 19 nt, Artificial Sequence
  Description of Artificial Sequence: Synthetic oligonucleotide
cuguacggguuucaguugu

SEQ ID NO: 657265 - RNA, 19 nt, Artificial Sequence
  Description of Artificial Sequence: Synthetic oligonucleotide
cucgggcacugacguagcc

SEQ ID NO: 657266 - RNA, 19 nt, Artificial Sequence
  Description of Artificial Sequence: Synthetic oligonucleotide
cucaugcgguucguuguac

SEQ ID NO: 657267 - RNA, 19 nt, Artificial Sequence
  Description of Artificial Sequence: Synthetic oligonucleotide
aaacuuccgcuuggugaau

SEQ ID NO: 657268 - RNA, 19 nt, Artificial Sequence
  Description of Artificial Sequence: Synthetic oligonucleotide
cuuccgcuuggugaauguc

SEQ ID NO: 657269 - RNA, 19 nt, Artificial Sequence
  Description of Artificial Sequence: Synthetic oligonucleotide
cgaguggguagacugggag

SEQ ID NO: 657270 - RNA, 19 nt, Artificial Sequence
  Description of Artificial Sequence: Synthetic oligonucleotide
gcugagagauacggggacc

SEQ ID NO: 657271 - RNA, 19 nt, Artificial Sequence
  Description of Artificial Sequence: Synthetic oligonucleotide
ucgcuggaucugaaucuuu

SEQ ID NO: 657272 - RNA, 19 nt, Artificial Sequence
  Description of Artificial Sequence: Synthetic oligonucleotide
uccaaguauccagccgcau

SEQ ID NO: 657273 - RNA, 19 nt, Artificial Sequence
  Description of Artificial Sequence: Synthetic oligonucleotide
gguucguuguacuccgugu

SEQ ID NO: 657274 - RNA, 19 nt, Artificial Sequence
  Description of Artificial Sequence: Synthetic oligonucleotide
ggcggugagauugucaacu

SEQ ID NO: 657275 - RNA, 19 nt, Artificial Sequence
  Description of Artificial Sequence: Synthetic oligonucleotide
  modified_base (9)..(9): a, c, u, g, unknown or other
ccugagacncaaacccauc

SEQ ID NO: 657276 - RNA, 19 nt, Artificial Sequence
  Description of Artificial Sequence: Synthetic oligonucleotide
ccuuucccgcaauaaaaga

SEQ ID NO: 657277 - RNA, 19 nt, Artificial Sequence
  Description of Artificial Sequence: Synthetic oligonucleotide
ggugguaagcgagugggua

SEQ ID NO: 657278 - RNA, 19 nt, Artificial Sequence
  Description of Artificial Sequence: Synthetic oligonucleotide
ccauuagccacagggagga

SEQ ID NO: 657279 - RNA, 19 nt, Artificial Sequence
  Description of Artificial Sequence: Synthetic oligonucleotide
agcaggucgcuggggcagg

SEQ ID NO: 657280 - RNA, 19 nt, Artificial Sequence
  Description of Artificial Sequence: Synthetic oligonucleotide
gcggugacauugccuagug

SEQ ID NO: 657281 - RNA, 19 nt, Artificial Sequence
  Description of Artificial Sequence: Synthetic oligonucleotide
uggcccgccgguacuuguc

SEQ ID NO: 657282 - RNA, 19 nt, Artificial Sequence
  Description of Artificial Sequence: Synthetic oligonucleotide
guacaacgugcaaaagugu

SEQ ID NO: 657283 - RNA, 19 nt, Artificial Sequence
  Description of Artificial Sequence: Synthetic oligonucleotide
gcugaguaaacuugguguu

SEQ ID NO: 657284 - RNA, 19 nt, Artificial Sequence
  Description of Artificial Sequence: Synthetic oligonucleotide
gguccccggucucauagga

SEQ ID NO: 657285 - RNA, 19 nt, Artificial Sequence
  Description of Artificial Sequence: Synthetic oligonucleotide
gcugcguucgcggcuuggg

SEQ ID NO: 657286 - RNA, 19 nt, Artificial Sequence
  Description of Artificial Sequence: Synthetic oligonucleotide
ggcgguuccgcucaucagu

SEQ ID NO: 657287 - RNA, 19 nt, Artificial Sequence
  Description of Artificial Sequence: Synthetic oligonucleotide
ggaugacuuuguuuaggcu

SEQ ID NO: 657288 - RNA, 19 nt, Artificial Sequence
  Description of Artificial Sequence: Synthetic oligonucleotide
ccccggucucauaggaucc

SEQ ID NO: 657289 - RNA, 19 nt, Artificial Sequence
  Description of Artificial Sequence: Synthetic oligonucleotide
cagaugacccauagcgccu

SEQ ID NO: 657290 - RNA, 19 nt, Artificial Sequence
  Description of Artificial Sequence: Synthetic oligonucleotide
aucgagcgggaggagccca

SEQ ID NO: 657291 - RNA, 19 nt, Artificial Sequence
  Description of Artificial Sequence: Synthetic oligonucleotide
cugcacuagcaggucgcug

SEQ ID NO: 657292 - RNA, 19 nt, Artificial Sequence
  Description of Artificial Sequence: Synthetic oligonucleotide
gcguucgcggcuuggggac

SEQ ID NO: 657293 - RNA, 19 nt, Artificial Sequence
  Description of Artificial Sequence: Synthetic oligonucleotide
ccccuuucccgcaauaaaa

SEQ ID NO: 657294 - RNA, 19 nt, Artificial Sequence
  Description of Artificial Sequence: Synthetic oligonucleotide
caccuggcgguuccgcuca

SEQ ID NO: 657295 - RNA, 19 nt, Artificial Sequence
  Description of Artificial Sequence: Synthetic oligonucleotide
gcgguuccgcucaucagug

SEQ ID NO: 657296 - RNA, 19 nt, Artificial Sequence
  Description of Artificial Sequence: Synthetic oligonucleotide
cauuagccacagggaggag

SEQ ID NO: 657297 - RNA, 19 nt, Artificial Sequence
  Description of Artificial Sequence: Synthetic oligonucleotide
gucgacuguacggguuuca

SEQ ID NO: 657298 - RNA, 19 nt, Artificial Sequence
  Description of Artificial Sequence: Synthetic oligonucleotide
caacgggacuggggcaggc

SEQ ID NO: 657299 - RNA, 19 nt, Artificial Sequence
  Description of Artificial Sequence: Synthetic oligonucleotide
gcggugagauugucaacuc

SEQ ID NO: 657300 - RNA, 19 nt, Artificial Sequence
  Description of Artificial Sequence: Synthetic oligonucleotide
cggucucauaggauccucc

SEQ ID NO: 657301 - RNA, 19 nt, Artificial Sequence
  Description of Artificial Sequence: Synthetic oligonucleotide
gugggcggugagauuguca

SEQ ID NO: 657302 - RNA, 19 nt, Artificial Sequence
  Description of Artificial Sequence: Synthetic oligonucleotide
gguuccgcucaucagugau

SEQ ID NO: 657303 - RNA, 19 nt, Artificial Sequence
  Description of Artificial Sequence: Synthetic oligonucleotide
cugggcgcagcaggccuag

SEQ ID NO: 657304 - RNA, 19 nt, Artificial Sequence
  Description of Artificial Sequence: Synthetic oligonucleotide
ccucccugggaagugauga

SEQ ID NO: 657305 - RNA, 19 nt, Artificial Sequence
  Description of Artificial Sequence: Synthetic oligonucleotide
cccaacgggacuggggcag

SEQ ID NO: 657306 - RNA, 19 nt, Artificial Sequence
  Description of Artificial Sequence: Synthetic oligonucleotide
ggcccgccgguacuugucc

SEQ ID NO: 657307 - RNA, 19 nt, Artificial Sequence
  Description of Artificial Sequence: Synthetic oligonucleotide
guaagcgaguggguagacu

SEQ ID NO: 657308 - RNA, 19 nt, Artificial Sequence
  Description of Artificial Sequence: Synthetic oligonucleotide
gguaagcgaguggguagac

SEQ ID NO: 657309 - RNA, 19 nt, Artificial Sequence
  Description of Artificial Sequence: Synthetic oligonucleotide
guucgcggcuuggggacac

SEQ ID NO: 657310 - RNA, 19 nt, Artificial Sequence
  Description of Artificial Sequence: Synthetic oligonucleotide
augucggugcuggcauacu

SEQ ID NO: 657311 - RNA, 19 nt, Artificial Sequence
  Description of Artificial Sequence: Synthetic oligonucleotide
ggaccaaguggggcuguug

SEQ ID NO: 657312 - RNA, 19 nt, Artificial Sequence
  Description of Artificial Sequence: Synthetic oligonucleotide
caucccgguccccggucuc

SEQ ID NO: 657313 - RNA, 19 nt, Artificial Sequence
  Description of Artificial Sequence: Synthetic oligonucleotide
gccaggcggugacauugcc

SEQ ID NO: 657314 - RNA, 19 nt, Artificial Sequence
  Description of Artificial Sequence: Synthetic oligonucleotide
ccucucucuaaagcgagaa

SEQ ID NO: 657315 - RNA, 19 nt, Artificial Sequence
  Description of Artificial Sequence: Synthetic oligonucleotide
gcugguaaucuguguugua

SEQ ID NO: 657316 - RNA, 19 nt, Artificial Sequence
  Description of Artificial Sequence: Synthetic oligonucleotide
gggcggugagauugucaac

SEQ ID NO: 657317 - RNA, 19 nt, Artificial Sequence
  Description of Artificial Sequence: Synthetic oligonucleotide
cgguucguuguacuccgug

SEQ ID NO: 657318 - RNA, 19 nt, Artificial Sequence
  Description of Artificial Sequence: Synthetic oligonucleotide
gcaaucucgcagucacaua

SEQ ID NO: 657319 - RNA, 19 nt, Artificial Sequence
  Description of Artificial Sequence: Synthetic oligonucleotide
cagucgacuguacggguuu

SEQ ID NO: 657320 - RNA, 19 nt, Artificial Sequence
  Description of Artificial Sequence: Synthetic oligonucleotide
gccguggguccguaaggga

SEQ ID NO: 657321 - RNA, 19 nt, Artificial Sequence
  Description of Artificial Sequence: Synthetic oligonucleotide
cucuguagugcuggcugcu

SEQ ID NO: 657322 - RNA, 19 nt, Artificial Sequence
  Description of Artificial Sequence: Synthetic oligonucleotide
caucaucccgguccccggu

SEQ ID NO: 657323 - RNA, 19 nt, Artificial Sequence
  Description of Artificial Sequence: Synthetic oligonucleotide
uucgcggcuuggggacacu

SEQ ID NO: 657324 - RNA, 19 nt, Artificial Sequence
  Description of Artificial Sequence: Synthetic oligonucleotide
gcgagaauucgaauuuaau

SEQ ID NO: 657325 - RNA, 19 nt, Artificial Sequence
  Description of Artificial Sequence: Synthetic oligonucleotide
ccgccgguacuuguccucc

SEQ ID NO: 657326 - RNA, 19 nt, Artificial Sequence
  Description of Artificial Sequence: Synthetic oligonucleotide
cguugaaacccuucuuccu

SEQ ID NO: 657327 - RNA, 19 nt, Artificial Sequence
  Description of Artificial Sequence: Synthetic oligonucleotide
cugagaccuucaccaggcu

SEQ ID NO: 657328 - RNA, 19 nt, Artificial Sequence
  Description of Artificial Sequence: Synthetic oligonucleotide
ggcggugacauugccuagu

SEQ ID NO: 657329 - RNA, 19 nt, Artificial Sequence
  Description of Artificial Sequence: Synthetic oligonucleotide
ccguguacuugagcagcac

SEQ ID NO: 657330 - RNA, 19 nt, Artificial Sequence
  Description of Artificial Sequence: Synthetic oligonucleotide
gcucgggcacugacguagc

SEQ ID NO: 657331 - RNA, 19 nt, Artificial Sequence
  Description of Artificial Sequence: Synthetic oligonucleotide
cccucucucuaaagcgaga

SEQ ID NO: 657332 - RNA, 19 nt, Artificial Sequence
  Description of Artificial Sequence: Synthetic oligonucleotide
cccaaggcgcugggcauug

SEQ ID NO: 657333 - RNA, 19 nt, Artificial Sequence
  Description of Artificial Sequence: Synthetic oligonucleotide
cgguccccggucucauagg

SEQ ID NO: 657334 - RNA, 19 nt, Artificial Sequence
  Description of Artificial Sequence: Synthetic oligonucleotide
ggcccuggcugaguaaacu

SEQ ID NO: 657335 - RNA, 19 nt, Artificial Sequence
  Description of Artificial Sequence: Synthetic oligonucleotide
ggugggcggugagauuguc

SEQ ID NO: 657336 - RNA, 19 nt, Artificial Sequence
  Description of Artificial Sequence: Synthetic oligonucleotide
ccaccggggugguaagcga

SEQ ID NO: 657337 - RNA, 19 nt, Artificial Sequence
  Description of Artificial Sequence: Synthetic oligonucleotide
ccggucucauaggauccuc

SEQ ID NO: 657338 - RNA, 19 nt, Artificial Sequence
  Description of Artificial Sequence: Synthetic oligonucleotide
caucagugauucgcuggau

SEQ ID NO: 657339 - RNA, 19 nt, Artificial Sequence
  Description of Artificial Sequence: Synthetic oligonucleotide
gccuagugccagcccugca

SEQ ID NO: 657340 - RNA, 19 nt, Artificial Sequence
  Description of Artificial Sequence: Synthetic oligonucleotide
cuggcccgccgguacuugu

SEQ ID NO: 657341 - RNA, 19 nt, Artificial Sequence
  Description of Artificial Sequence: Synthetic oligonucleotide
ugggcgcagcaggccuagu

SEQ ID NO: 657342 - RNA, 19 nt, Artificial Sequence
  Description of Artificial Sequence: Synthetic oligonucleotide
ggauagcucugcacuggau

SEQ ID NO: 657343 - RNA, 19 nt, Artificial Sequence
  Description of Artificial Sequence: Synthetic oligonucleotide
guccccggucucauaggau

SEQ ID NO: 657344 - RNA, 19 nt, Artificial Sequence
  Description of Artificial Sequence: Synthetic oligonucleotide
cggguuucaguuguuguau

SEQ ID NO: 657345 - RNA, 19 nt, Artificial Sequence
  Description of Artificial Sequence: Synthetic oligonucleotide
cggugagauugucaacucu

SEQ ID NO: 657346 - RNA, 19 nt, Artificial Sequence
  Description of Artificial Sequence: Synthetic oligonucleotide
cgguuccgcucaucaguga

SEQ ID NO: 657347 - RNA, 19 nt, Artificial Sequence
  Description of Artificial Sequence: Synthetic oligonucleotide
caggagccguggguccgua

SEQ ID NO: 657348 - RNA, 19 nt, Artificial Sequence
  Description of Artificial Sequence: Synthetic oligonucleotide
ccugcacuagcaggucgcu

SEQ ID NO: 657349 - RNA, 19 nt, Artificial Sequence
  Description of Artificial Sequence: Synthetic oligonucleotide
gggugggcggugagauugu

SEQ ID NO: 657350 - RNA, 19 nt, Artificial Sequence
  Description of Artificial Sequence: Synthetic oligonucleotide
cacuggcccgccgguacuu

SEQ ID NO: 657351 - RNA, 19 nt, Artificial Sequence
  Description of Artificial Sequence: Synthetic oligonucleotide
ggcucucaugcgguucguu

SEQ ID NO: 657352 - RNA, 19 nt, Artificial Sequence
  Description of Artificial Sequence: Synthetic oligonucleotide
cccggucucauaggauccu

SEQ ID NO: 657353 - RNA, 19 nt, Artificial Sequence
  Description of Artificial Sequence: Synthetic oligonucleotide
gggaccaaguggggcuguu

SEQ ID NO: 657354 - RNA, 19 nt, Artificial Sequence
  Description of Artificial Sequence: Synthetic oligonucleotide
cguucgcggcuuggggaca

SEQ ID NO: 657355 - RNA, 19 nt, Artificial Sequence
  Description of Artificial Sequence: Synthetic oligonucleotide
gcgguucguuguacuccgu

SEQ ID NO: 657356 - RNA, 19 nt, Artificial Sequence
  Description of Artificial Sequence: Synthetic oligonucleotide
ccccaaggcgcugggcauu

SEQ ID NO: 657357 - RNA, 19 nt, Artificial Sequence
  Description of Artificial Sequence: Synthetic oligonucleotide
ccaaggcgcugggcauugu

SEQ ID NO: 657358 - RNA, 19 nt, Artificial Sequence
  Description of Artificial Sequence: Synthetic oligonucleotide
uguguuauuaaacauauga

SEQ ID NO: 657359 - RNA, 19 nt, Artificial Sequence
  Description of Artificial Sequence: Synthetic oligonucleotide
acaauaauccaauuguauc

SEQ ID NO: 657360 - RNA, 19 nt, Artificial Sequence
  Description of Artificial Sequence: Synthetic oligonucleotide
auuuuaggcggcuugaagg

SEQ ID NO: 657361 - RNA, 19 nt, Artificial Sequence
  Description of Artificial Sequence: Synthetic oligonucleotide
ucuaucaugauuuguaacu

SEQ ID NO: 657362 - RNA, 19 nt, Artificial Sequence
  Description of Artificial Sequence: Synthetic oligonucleotide
uuuccuauacagaaugcgg

SEQ ID NO: 657363 - RNA, 19 nt, Artificial Sequence
  Description of Artificial Sequence: Synthetic oligonucleotide
uaagauguguuauuaaaca

SEQ ID NO: 657364 - RNA, 19 nt, Artificial Sequence
  Description of Artificial Sequence: Synthetic oligonucleotide
aacauaugaggcuaacuug

SEQ ID NO: 657365 - RNA, 19 nt, Artificial Sequence
  Description of Artificial Sequence: Synthetic oligonucleotide
cacaaagcauucuagaagc

SEQ ID NO: 657366 - RNA, 19 nt, Artificial Sequence
  Description of Artificial Sequence: Synthetic oligonucleotide
acucauuauauaaacagac

SEQ ID NO: 657367 - RNA, 19 nt, Artificial Sequence
  Description of Artificial Sequence: Synthetic oligonucleotide
cuugucaagaugcugauac

SEQ ID NO: 657368 - RNA, 19 nt, Artificial Sequence
  Description of Artificial Sequence: Synthetic oligonucleotide
cuaucuaaaaugaucuagc

SEQ ID NO: 657369 - RNA, 19 nt, Artificial Sequence
  Description of Artificial Sequence: Synthetic oligonucleotide
aauaaggugacaccaaguu

SEQ ID NO: 657370 - RNA, 19 nt, Artificial Sequence
  Description of Artificial Sequence: Synthetic oligonucleotide
ugucaauacaagauaacac

SEQ ID NO: 657371 - RNA, 19 nt, Artificial Sequence
  Description of Artificial Sequence: Synthetic oligonucleotide
aucagaauaaggugacacc

SEQ ID NO: 657372 - RNA, 19 nt, Artificial Sequence
  Description of Artificial Sequence: Synthetic oligonucleotide
ugggacaucuauuuuaggc

SEQ ID NO: 657373 - RNA, 19 nt, Artificial Sequence
  Description of Artificial Sequence: Synthetic oligonucleotide
ucaauacaagauaacacaa

SEQ ID NO: 657374 - RNA, 19 nt, Artificial Sequence
  Description of Artificial Sequence: Synthetic oligonucleotide
ugagauuauggguucgagg

SEQ ID NO: 657375 - RNA, 19 nt, Artificial Sequence
  Description of Artificial Sequence: Synthetic oligonucleotide
gauuauggguucgaggugg

SEQ ID NO: 657376 - RNA, 19 nt, Artificial Sequence
  Description of Artificial Sequence: Synthetic oligonucleotide
acuaucuaaaaugaucuag

SEQ ID NO: 657377 - RNA, 19 nt, Artificial Sequence
  Description of Artificial Sequence: Synthetic oligonucleotide
gucaauacaagauaacaca

SEQ ID NO: 657378 - RNA, 19 nt, Artificial Sequence
  Description of Artificial Sequence: Synthetic oligonucleotide
uuaacuacaucacuccuau

SEQ ID NO: 657379 - RNA, 19 nt, Artificial Sequence
  Description of Artificial Sequence: Synthetic oligonucleotide
agauaacacaaauaaauua

SEQ ID NO: 657380 - RNA, 19 nt, Artificial Sequence
  Description of Artificial Sequence: Synthetic oligonucleotide
uguugaucaaaggaaaaca

SEQ ID NO: 657381 - RNA, 19 nt, Artificial Sequence
  Description of Artificial Sequence: Synthetic oligonucleotide
ucagaauaaggugacacca

SEQ ID NO: 657382 - RNA, 19 nt, Artificial Sequence
  Description of Artificial Sequence: Synthetic oligonucleotide
aacuaaaagcuaaagcaug

SEQ ID NO: 657383 - RNA, 19 nt, Artificial Sequence
  Description of Artificial Sequence: Synthetic oligonucleotide
aguaagauguguuauuaaa

SEQ ID NO: 657384 - RNA, 19 nt, Artificial Sequence
  Description of Artificial Sequence: Synthetic oligonucleotide
uuugugaucagggaauuca

SEQ ID NO: 657385 - RNA, 19 nt, Artificial Sequence
  Description of Artificial Sequence: Synthetic oligonucleotide
auaaggugacaccaaguuc

SEQ ID NO: 657386 - RNA, 19 nt, Artificial Sequence
  Description of Artificial Sequence: Synthetic oligonucleotide
acuccgacacuaaagaggc

SEQ ID NO: 657387 - RNA, 19 nt, Artificial Sequence
  Description of Artificial Sequence: Synthetic oligonucleotide
ugaucuagcaagcgaaugu

SEQ ID NO: 657388 - RNA, 19 nt, Artificial Sequence
  Description of Artificial Sequence: Synthetic oligonucleotide
uauuuuaggcggcuugaag

SEQ ID NO: 657389 - RNA, 19 nt, Artificial Sequence
  Description of Artificial Sequence: Synthetic oligonucleotide
uuucucucacacaaggaca

SEQ ID NO: 657390 - RNA, 19 nt, Artificial Sequence
  Description of Artificial Sequence: Synthetic oligonucleotide
acauaugaggcuaacuugg

SEQ ID NO: 657391 - RNA, 19 nt, Artificial Sequence
  Description of Artificial Sequence: Synthetic oligonucleotide
ucaagaugcugauacuugc

SEQ ID NO: 657392 - RNA, 19 nt, Artificial Sequence
  Description of Artificial Sequence: Synthetic oligonucleotide
uguuuugugaucagggaau

SEQ ID NO: 657393 - RNA, 19 nt, Artificial Sequence
  Description of Artificial Sequence: Synthetic oligonucleotide
uuccuauacagaaugcgga

SEQ ID NO: 657394 - RNA, 19 nt, Artificial Sequence
  Description of Artificial Sequence: Synthetic oligonucleotide
agaaugcggaguucagucc

SEQ ID NO: 657395 - RNA, 19 nt, Artificial Sequence
  Description of Artificial Sequence: Synthetic oligonucleotide
agaagcuuaagcugggugu

SEQ ID NO: 657396 - RNA, 19 nt, Artificial Sequence
  Description of Artificial Sequence: Synthetic oligonucleotide
aaucugcacaaugucacuc

SEQ ID NO: 657397 - RNA, 19 nt, Artificial Sequence
  Description of Artificial Sequence: Synthetic oligonucleotide
cacuauuuacccaggagag

SEQ ID NO: 657398 - RNA, 19 nt, Artificial Sequence
  Description of Artificial Sequence: Synthetic oligonucleotide
accagcacuauuuacccag

SEQ ID NO: 657399 - RNA, 19 nt, Artificial Sequence
  Description of Artificial Sequence: Synthetic oligonucleotide
caagauaacacaaauaaau

SEQ ID NO: 657400 - RNA, 19 nt, Artificial Sequence
  Description of Artificial Sequence: Synthetic oligonucleotide
uagcaagcgaaugugacag

SEQ ID NO: 657401 - RNA, 19 nt, Artificial Sequence
  Description of Artificial Sequence: Synthetic oligonucleotide
ugagaaaguuaacucauua

SEQ ID NO: 657402 - RNA, 19 nt, Artificial Sequence
  Description of Artificial Sequence: Synthetic oligonucleotide
ucacuccuaugucagagcc

SEQ ID NO: 657403 - RNA, 19 nt, Artificial Sequence
  Description of Artificial Sequence: Synthetic oligonucleotide
ucuagcaagcgaaugugac

SEQ ID NO: 657404 - RNA, 19 nt, Artificial Sequence
  Description of Artificial Sequence: Synthetic oligonucleotide
uggacacaaagcauucuag

SEQ ID NO: 657405 - RNA, 19 nt, Artificial Sequence
  Description of Artificial Sequence: Synthetic oligonucleotide
uuuggggcaccuuuguaag

SEQ ID NO: 657406 - RNA, 19 nt, Artificial Sequence
  Description of Artificial Sequence: Synthetic oligonucleotide
uucaugugaaucugaagac

SEQ ID NO: 657407 - RNA, 19 nt, Artificial Sequence
  Description of Artificial Sequence: Synthetic oligonucleotide
gagauuauggguucgaggu

SEQ ID NO: 657408 - RNA, 19 nt, Artificial Sequence
  Description of Artificial Sequence: Synthetic oligonucleotide
gagagcaagggucaaaguc

SEQ ID NO: 657409 - RNA, 19 nt, Artificial Sequence
  Description of Artificial Sequence: Synthetic oligonucleotide
agcaauccaaaaugguuuc

SEQ ID NO: 657410 - RNA, 19 nt, Artificial Sequence
  Description of Artificial Sequence: Synthetic oligonucleotide
cuguuaacuacaucacucc

SEQ ID NO: 657411 - RNA, 19 nt, Artificial Sequence
  Description of Artificial Sequence: Synthetic oligonucleotide
uaacugcucguguugauca

SEQ ID NO: 657412 - RNA, 19 nt, Artificial Sequence
  Description of Artificial Sequence: Synthetic oligonucleotide
gaaugcggaguucaguccc

SEQ ID NO: 657413 - RNA, 19 nt, Artificial Sequence
  Description of Artificial Sequence: Synthetic oligonucleotide
aaugacgcgggacuaugcu

SEQ ID NO: 657414 - RNA, 19 nt, Artificial Sequence
  Description of Artificial Sequence: Synthetic oligonucleotide
uuugcuuaguaagaugugu

SEQ ID NO: 657415 - RNA, 19 nt, Artificial Sequence
  Description of Artificial Sequence: Synthetic oligonucleotide
uuuguaagccuggacagca

SEQ ID NO: 657416 - RNA, 19 nt, Artificial Sequence
  Description of Artificial Sequence: Synthetic oligonucleotide
uucuuuacucuaacagaag

SEQ ID NO: 657417 - RNA, 19 nt, Artificial Sequence
  Description of Artificial Sequence: Synthetic oligonucleotide
uuuacccaggagagcaagg

SEQ ID NO: 657418 - RNA, 19 nt, Artificial Sequence
  Description of Artificial Sequence: Synthetic oligonucleotide
uuuuaggcggcuugaaggu

SEQ ID NO: 657419 - RNA, 19 nt, Artificial Sequence
  Description of Artificial Sequence: Synthetic oligonucleotide
uguuaacuacaucacuccu

SEQ ID NO: 657420 - RNA, 19 nt, Artificial Sequence
  Description of Artificial Sequence: Synthetic oligonucleotide
ucucuaggauaaaugauua

SEQ ID NO: 657421 - RNA, 19 nt, Artificial Sequence
  Description of Artificial Sequence: Synthetic oligonucleotide
auagcugaaugcccggcgg

SEQ ID NO: 657422 - RNA, 19 nt, Artificial Sequence
  Description of Artificial Sequence: Synthetic oligonucleotide
caagaugcugauacuugcg

SEQ ID NO: 657423 - RNA, 19 nt, Artificial Sequence
  Description of Artificial Sequence: Synthetic oligonucleotide
ugauuuguaacugcucgug

SEQ ID NO: 657424 - RNA, 19 nt, Artificial Sequence
  Description of Artificial Sequence: Synthetic oligonucleotide
agcacuauuuacccaggag

SEQ ID NO: 657425 - RNA, 19 nt, Artificial Sequence
  Description of Artificial Sequence: Synthetic oligonucleotide
uacucuaacagaagcuuaa

SEQ ID NO: 657426 - RNA, 19 nt, Artificial Sequence
  Description of Artificial Sequence: Synthetic oligonucleotide
uuaggcggcuugaagguug

SEQ ID NO: 657427 - RNA, 19 nt, Artificial Sequence
  Description of Artificial Sequence: Synthetic oligonucleotide
acuauuuacccaggagagc

SEQ ID NO: 657428 - RNA, 19 nt, Artificial Sequence
  Description of Artificial Sequence: Synthetic oligonucleotide
ggacaucuauuuuaggcgg

SEQ ID NO: 657429 - RNA, 19 nt, Artificial Sequence
  Description of Artificial Sequence: Synthetic oligonucleotide
aucuaaaaugaucuagcaa

SEQ ID NO: 657430 - RNA, 19 nt, Artificial Sequence
  Description of Artificial Sequence: Synthetic oligonucleotide
agaauccauggugugaggg

SEQ ID NO: 657431 - RNA, 19 nt, Artificial Sequence
  Description of Artificial Sequence: Synthetic oligonucleotide
uucucucacacaaggacaa

SEQ ID NO: 657432 - RNA, 19 nt, Artificial Sequence
  Description of Artificial Sequence: Synthetic oligonucleotide
aaaugacgcgggacuaugc

SEQ ID NO: 657433 - RNA, 19 nt, Artificial Sequence
  Description of Artificial Sequence: Synthetic oligonucleotide
uaauccaauuguaucuguc

SEQ ID NO: 657434 - RNA, 19 nt, Artificial Sequence
  Description of Artificial Sequence: Synthetic oligonucleotide
ugacgcgggacuaugcuga

SEQ ID NO: 657435 - RNA, 19 nt, Artificial Sequence
  Description of Artificial Sequence: Synthetic oligonucleotide
ucguguugaucaaaggaaa

SEQ ID NO: 657436 - RNA, 19 nt, Artificial Sequence
  Description of Artificial Sequence: Synthetic oligonucleotide
gaugcugauacuugcgcuc

SEQ ID NO: 657437 - RNA, 19 nt, Artificial Sequence
  Description of Artificial Sequence: Synthetic oligonucleotide
cagaaugcggaguucaguc

SEQ ID NO: 657438 - RNA, 19 nt, Artificial Sequence
  Description of Artificial Sequence: Synthetic oligonucleotide
aaacacaccagcacuauuu

SEQ ID NO: 657439 - RNA, 19 nt, Artificial Sequence
  Description of Artificial Sequence: Synthetic oligonucleotide
cauuagcuccauaggagag

SEQ ID NO: 657440 - RNA, 19 nt, Artificial Sequence
  Description of Artificial Sequence: Synthetic oligonucleotide
auuagcuccauaggagagg

SEQ ID NO: 657441 - RNA, 19 nt, Artificial Sequence
  Description of Artificial Sequence: Synthetic oligonucleotide
ucaugugaaucugaagaca

SEQ ID NO: 657442 - RNA, 19 nt, Artificial Sequence
  Description of Artificial Sequence: Synthetic oligonucleotide
gaucuagcaagcgaaugug

SEQ ID NO: 657443 - RNA, 19 nt, Artificial Sequence
  Description of Artificial Sequence: Synthetic oligonucleotide
cacuaaagaggcuccgggg

SEQ ID NO: 657444 - RNA, 19 nt, Artificial Sequence
  Description of Artificial Sequence: Synthetic oligonucleotide
ucuauuuuaggcggcuuga

SEQ ID NO: 657445 - RNA, 19 nt, Artificial Sequence
  Description of Artificial Sequence: Synthetic oligonucleotide
uccuguuaacuacaucacu

SEQ ID NO: 657446 - RNA, 19 nt, Artificial Sequence
  Description of Artificial Sequence: Synthetic oligonucleotide
accaacccgaaagcaaucc

SEQ ID NO: 657447 - RNA, 19 nt, Artificial Sequence
  Description of Artificial Sequence: Synthetic oligonucleotide
ucuagaagccagugggugu

SEQ ID NO: 657448 - RNA, 19 nt, Artificial Sequence
  Description of Artificial Sequence: Synthetic oligonucleotide
auaugaggcuaacuuggug

SEQ ID NO: 657449 - RNA, 19 nt, Artificial Sequence
  Description of Artificial Sequence: Synthetic oligonucleotide
acgcauuagcuccauagga

SEQ ID NO: 657450 - RNA, 19 nt, Artificial Sequence
  Description of Artificial Sequence: Synthetic oligonucleotide
gguagcuuuagccuucacc

SEQ ID NO: 657451 - RNA, 19 nt, Artificial Sequence
  Description of Artificial Sequence: Synthetic oligonucleotide
cuaucaugauuuguaacug

SEQ ID NO: 657452 - RNA, 19 nt, Artificial Sequence
  Description of Artificial Sequence: Synthetic oligonucleotide
uuacucuaacagaagcuua

SEQ ID NO: 657453 - RNA, 19 nt, Artificial Sequence
  Description of Artificial Sequence: Synthetic oligonucleotide
agcuuuagccuucaccaca

SEQ ID NO: 657454 - RNA, 19 nt, Artificial Sequence
  Description of Artificial Sequence: Synthetic oligonucleotide
uacagaaugcggaguucag

SEQ ID NO: 657455 - RNA, 19 nt, Artificial Sequence
  Description of Artificial Sequence: Synthetic oligonucleotide
agguugcugggucuucacc

SEQ ID NO: 657456 - RNA, 19 nt, Artificial Sequence
  Description of Artificial Sequence: Synthetic oligonucleotide
aaacgcuggaugcucuccu

SEQ ID NO: 657457 - RNA, 19 nt, Artificial Sequence
  Description of Artificial Sequence: Synthetic oligonucleotide
cacgcauuagcuccauagg

SEQ ID NO: 657458 - RNA, 19 nt, Artificial Sequence
  Description of Artificial Sequence: Synthetic oligonucleotide
gaagcuuaagcugggugug

SEQ ID NO: 657459 - RNA, 19 nt, Artificial Sequence
  Description of Artificial Sequence: Synthetic oligonucleotide
auuuguaacugcucguguu

SEQ ID NO: 657460 - RNA, 19 nt, Artificial Sequence
  Description of Artificial Sequence: Synthetic oligonucleotide
uguaagccuggacagcaaa

SEQ ID NO: 657461 - RNA, 19 nt, Artificial Sequence
  Description of Artificial Sequence: Synthetic oligonucleotide
agaugcugauacuugcgcu

SEQ ID NO: 657462 - RNA, 19 nt, Artificial Sequence
  Description of Artificial Sequence: Synthetic oligonucleotide
acggacagaugguagugag

SEQ ID NO: 657463 - RNA, 19 nt, Artificial Sequence
  Description of Artificial Sequence: Synthetic oligonucleotide
cuuaaguuuuggaaacaca

SEQ ID NO: 657464 - RNA, 19 nt, Artificial Sequence
  Description of Artificial Sequence: Synthetic oligonucleotide
uugcuuaguaagauguguu

SEQ ID NO: 657465 - RNA, 19 nt, Artificial Sequence
  Description of Artificial Sequence: Synthetic oligonucleotide
gacacuaaagaggcuccgg

SEQ ID NO: 657466 - RNA, 19 nt, Artificial Sequence
  Description of Artificial Sequence: Synthetic oligonucleotide
augauuuguaacugcucgu

SEQ ID NO: 657467 - RNA, 19 nt, Artificial Sequence
  Description of Artificial Sequence: Synthetic oligonucleotide
caugugaaucugaagacaa

SEQ ID NO: 657468 - RNA, 19 nt, Artificial Sequence
  Description of Artificial Sequence: Synthetic oligonucleotide
uuaguuuguggagugcuuc

SEQ ID NO: 657469 - RNA, 19 nt, Artificial Sequence
  Description of Artificial Sequence: Synthetic oligonucleotide
agauuauggguucgaggug

SEQ ID NO: 657470 - RNA, 19 nt, Artificial Sequence
  Description of Artificial Sequence: Synthetic oligonucleotide
cucguguugaucaaaggaa

SEQ ID NO: 657471 - RNA, 19 nt, Artificial Sequence
  Description of Artificial Sequence: Synthetic oligonucleotide
ugcucguguugaucaaagg

SEQ ID NO: 657472 - RNA, 19 nt, Artificial Sequence
  Description of Artificial Sequence: Synthetic oligonucleotide
ccgaaagcaauccaaaaug

SEQ ID NO: 657473 - RNA, 19 nt, Artificial Sequence
  Description of Artificial Sequence: Synthetic oligonucleotide
cuuugcuuaguaagaugug

SEQ ID NO: 657474 - RNA, 19 nt, Artificial Sequence
  Description of Artificial Sequence: Synthetic oligonucleotide
ugcuuaguaagauguguua

SEQ ID NO: 657475 - RNA, 19 nt, Artificial Sequence
  Description of Artificial Sequence: Synthetic oligonucleotide
cagugugcaagaccaacag

SEQ ID NO: 657476 - RNA, 19 nt, Artificial Sequence
  Description of Artificial Sequence: Synthetic oligonucleotide
uaguaagauguguuauuaa

SEQ ID NO: 657477 - RNA, 19 nt, Artificial Sequence
  Description of Artificial Sequence: Synthetic oligonucleotide
auguuuucuaccaacccga

SEQ ID NO: 657478 - RNA, 19 nt, Artificial Sequence
  Description of Artificial Sequence: Synthetic oligonucleotide
uuugagauuauggguucga

SEQ ID NO: 657479 - RNA, 19 nt, Artificial Sequence
  Description of Artificial Sequence: Synthetic oligonucleotide
cacggagaaaugacgcggg

SEQ ID NO: 657480 - RNA, 19 nt, Artificial Sequence
  Description of Artificial Sequence: Synthetic oligonucleotide
ugagucuacugagagaguu

SEQ ID NO: 657481 - RNA, 19 nt, Artificial Sequence
  Description of Artificial Sequence: Synthetic oligonucleotide
uugagauuauggguucgag

SEQ ID NO: 657482 - RNA, 19 nt, Artificial Sequence
  Description of Artificial Sequence: Synthetic oligonucleotide
gguagugaggagcauugcc

SEQ ID NO: 657483 - RNA, 19 nt, Artificial Sequence
  Description of Artificial Sequence: Synthetic oligonucleotide
gagagcgcgacacacgcuc

SEQ ID NO: 657484 - RNA, 19 nt, Artificial Sequence
  Description of Artificial Sequence: Synthetic oligonucleotide
uggggcaccuuuguaagcc

SEQ ID NO: 657485 - RNA, 19 nt, Artificial Sequence
  Description of Artificial Sequence: Synthetic oligonucleotide
ugacauggguagcuuuagc

SEQ ID NO: 657486 - RNA, 19 nt, Artificial Sequence
  Description of Artificial Sequence: Synthetic oligonucleotide
ugucaagaugcugauacuu

SEQ ID NO: 657487 - RNA, 19 nt, Artificial Sequence
  Description of Artificial Sequence: Synthetic oligonucleotide
acgggguuugagauuaugg

SEQ ID NO: 657488 - RNA, 19 nt, Artificial Sequence
  Description of Artificial Sequence: Synthetic oligonucleotide
cuccuguuaacuacaucac

SEQ ID NO: 657489 - RNA, 19 nt, Artificial Sequence
  Description of Artificial Sequence: Synthetic oligonucleotide
gaaaugacgcgggacuaug

SEQ ID NO: 657490 - RNA, 19 nt, Artificial Sequence
  Description of Artificial Sequence: Synthetic oligonucleotide
auuuacccaggagagcaag

SEQ ID NO: 657491 - RNA, 19 nt, Artificial Sequence
  Description of Artificial Sequence: Synthetic oligonucleotide
cuacaucacuccuauguca

SEQ ID NO: 657492 - RNA, 19 nt, Artificial Sequence
  Description of Artificial Sequence: Synthetic oligonucleotide
acaggggucuugucugaac

SEQ ID NO: 657493 - RNA, 19 nt, Artificial Sequence
  Description of Artificial Sequence: Synthetic oligonucleotide
cugggcaccucuaucauga

SEQ ID NO: 657494 - RNA, 19 nt, Artificial Sequence
  Description of Artificial Sequence: Synthetic oligonucleotide
acuaugcugacggacagau

SEQ ID NO: 657495 - RNA, 19 nt, Artificial Sequence
  Description of Artificial Sequence: Synthetic oligonucleotide
gucaagaugcugauacuug

SEQ ID NO: 657496 - RNA, 19 nt, Artificial Sequence
  Description of Artificial Sequence: Synthetic oligonucleotide
aauccauggugugaggguu

SEQ ID NO: 657497 - RNA, 19 nt, Artificial Sequence
  Description of Artificial Sequence: Synthetic oligonucleotide
gcggcuugaagguugcugg

SEQ ID NO: 657498 - RNA, 19 nt, Artificial Sequence
  Description of Artificial Sequence: Synthetic oligonucleotide
uucuaccaacccgaaagca

SEQ ID NO: 657499 - RNA, 19 nt, Artificial Sequence
  Description of Artificial Sequence: Synthetic oligonucleotide
agcgaaugugacagugugc

SEQ ID NO: 657500 - RNA, 19 nt, Artificial Sequence
  Description of Artificial Sequence: Synthetic oligonucleotide
ccuuuguaagccuggacag

SEQ ID NO: 657501 - RNA, 19 nt, Artificial Sequence
  Description of Artificial Sequence: Synthetic oligonucleotide
cugcucguguugaucaaag

SEQ ID NO: 657502 - RNA, 19 nt, Artificial Sequence
  Description of Artificial Sequence: Synthetic oligonucleotide
uguuuucuaccaacccgaa

SEQ ID NO: 657503 - RNA, 19 nt, Artificial Sequence
  Description of Artificial Sequence: Synthetic oligonucleotide
augacgcgggacuaugcug

SEQ ID NO: 657504 - RNA, 19 nt, Artificial Sequence
  Description of Artificial Sequence: Synthetic oligonucleotide
caucgugagagcgcgacac

SEQ ID NO: 657505 - RNA, 19 nt, Artificial Sequence
  Description of Artificial Sequence: Synthetic oligonucleotide
ccagguaaggcuguggagg

SEQ ID NO: 657506 - RNA, 19 nt, Artificial Sequence
  Description of Artificial Sequence: Synthetic oligonucleotide
acacacaacuaaaagcuaa

SEQ ID NO: 657507 - RNA, 19 nt, Artificial Sequence
  Description of Artificial Sequence: Synthetic oligonucleotide
cuguuuugugaucagggaa

SEQ ID NO: 657508 - RNA, 19 nt, Artificial Sequence
  Description of Artificial Sequence: Synthetic oligonucleotide
ugacggacagaugguagug

SEQ ID NO: 657509 - RNA, 19 nt, Artificial Sequence
  Description of Artificial Sequence: Synthetic oligonucleotide
cuuuguaagccuggacagc

SEQ ID NO: 657510 - RNA, 19 nt, Artificial Sequence
  Description of Artificial Sequence: Synthetic oligonucleotide
uggugaggcccuugugagg

SEQ ID NO: 657511 - RNA, 19 nt, Artificial Sequence
  Description of Artificial Sequence: Synthetic oligonucleotide
gcucguguugaucaaagga

SEQ ID NO: 657512 - RNA, 19 nt, Artificial Sequence
  Description of Artificial Sequence: Synthetic oligonucleotide
cugugaacaaugagaagaa

SEQ ID NO: 657513 - RNA, 19 nt, Artificial Sequence
  Description of Artificial Sequence: Synthetic oligonucleotide
ugaugguguaugccuuuaa

SEQ ID NO: 657514 - RNA, 19 nt, Artificial Sequence
  Description of Artificial Sequence: Synthetic oligonucleotide
accucuaucaugauuugua

SEQ ID NO: 657515 - RNA, 19 nt, Artificial Sequence
  Description of Artificial Sequence: Synthetic oligonucleotide
uagcuuuagccuucaccac

SEQ ID NO: 657516 - RNA, 19 nt, Artificial Sequence
  Description of Artificial Sequence: Synthetic oligonucleotide
ugaugacauggguagcuuu

SEQ ID NO: 657517 - RNA, 19 nt, Artificial Sequence
  Description of Artificial Sequence: Synthetic oligonucleotide
gauuuguaacugcucgugu

SEQ ID NO: 657518 - RNA, 19 nt, Artificial Sequence
  Description of Artificial Sequence: Synthetic oligonucleotide
ggaaugcugcccauguccg

SEQ ID NO: 657519 - RNA, 19 nt, Artificial Sequence
  Description of Artificial Sequence: Synthetic oligonucleotide
ggacacaaagcauucuaga

SEQ ID NO: 657520 - RNA, 19 nt, Artificial Sequence
  Description of Artificial Sequence: Synthetic oligonucleotide
cugggacaucuauuuuagg

SEQ ID NO: 657521 - RNA, 19 nt, Artificial Sequence
  Description of Artificial Sequence: Synthetic oligonucleotide
cacuccuaugucagagccc

SEQ ID NO: 657522 - RNA, 19 nt, Artificial Sequence
  Description of Artificial Sequence: Synthetic oligonucleotide
gaugacauggguagcuuua

SEQ ID NO: 657523 - RNA, 19 nt, Artificial Sequence
  Description of Artificial Sequence: Synthetic oligonucleotide
gacuaucuaaaaugaucua

SEQ ID NO: 657524 - RNA, 19 nt, Artificial Sequence
  Description of Artificial Sequence: Synthetic oligonucleotide
cucucacacaaggacaauc

SEQ ID NO: 657525 - RNA, 19 nt, Artificial Sequence
  Description of Artificial Sequence: Synthetic oligonucleotide
cugcccauguccgauggag

SEQ ID NO: 657526 - RNA, 19 nt, Artificial Sequence
  Description of Artificial Sequence: Synthetic oligonucleotide
guuaacuacaucacuccua

SEQ ID NO: 657527 - RNA, 19 nt, Artificial Sequence
  Description of Artificial Sequence: Synthetic oligonucleotide
gaauccauggugugagggu

SEQ ID NO: 657528 - RNA, 19 nt, Artificial Sequence
  Description of Artificial Sequence: Synthetic oligonucleotide
ggagucacagcaagggaag

SEQ ID NO: 657529 - RNA, 19 nt, Artificial Sequence
  Description of Artificial Sequence: Synthetic oligonucleotide
uuuugugaucagggaauuc

SEQ ID NO: 657530 - RNA, 19 nt, Artificial Sequence
  Description of Artificial Sequence: Synthetic oligonucleotide
ucgugagagcgcgacacac

SEQ ID NO: 657531 - RNA, 19 nt, Artificial Sequence
  Description of Artificial Sequence: Synthetic oligonucleotide
caucccgaugggcagggac

SEQ ID NO: 657532 - RNA, 19 nt, Artificial Sequence
  Description of Artificial Sequence: Synthetic oligonucleotide
gcauuagcuccauaggaga

SEQ ID NO: 657533 - RNA, 19 nt, Artificial Sequence
  Description of Artificial Sequence: Synthetic oligonucleotide
gaugguguaugccuuuaau

SEQ ID NO: 657534 - RNA, 19 nt, Artificial Sequence
  Description of Artificial Sequence: Synthetic oligonucleotide
gguuugagauuauggguuc

SEQ ID NO: 657535 - RNA, 19 nt, Artificial Sequence
  Description of Artificial Sequence: Synthetic oligonucleotide
ugggcgcaagagcaggcac

SEQ ID NO: 657536 - RNA, 19 nt, Artificial Sequence
  Description of Artificial Sequence: Synthetic oligonucleotide
gcgaaugugacagugugca

SEQ ID NO: 657537 - RNA, 19 nt, Artificial Sequence
  Description of Artificial Sequence: Synthetic oligonucleotide
uaccaacccgaaagcaauc

SEQ ID NO: 657538 - RNA, 19 nt, Artificial Sequence
  Description of Artificial Sequence: Synthetic oligonucleotide
caacccgaaagcaauccaa

SEQ ID NO: 657539 - RNA, 19 nt, Artificial Sequence
  Description of Artificial Sequence: Synthetic oligonucleotide
uaacuacaucacuccuaug

SEQ ID NO: 657540 - RNA, 19 nt, Artificial Sequence
  Description of Artificial Sequence: Synthetic oligonucleotide
ugccaccacggagaaauga

SEQ ID NO: 657541 - RNA, 19 nt, Artificial Sequence
  Description of Artificial Sequence: Synthetic oligonucleotide
ggacuaugcugacggacag

SEQ ID NO: 657542 - RNA, 19 nt, Artificial Sequence
  Description of Artificial Sequence: Synthetic oligonucleotide
ccgaacuccgacacuaaag

SEQ ID NO: 657543 - RNA, 19 nt, Artificial Sequence
  Description of Artificial Sequence: Synthetic oligonucleotide
gaggcuaacuugguggaaa

SEQ ID NO: 657544 - RNA, 19 nt, Artificial Sequence
  Description of Artificial Sequence: Synthetic oligonucleotide
ggugugaugguguaugccu

SEQ ID NO: 657545 - RNA, 19 nt, Artificial Sequence
  Description of Artificial Sequence: Synthetic oligonucleotide
gaauaaggugacaccaagu

SEQ ID NO: 657546 - RNA, 19 nt, Artificial Sequence
  Description of Artificial Sequence: Synthetic oligonucleotide
uuguaagccuggacagcaa

SEQ ID NO: 657547 - RNA, 19 nt, Artificial Sequence
  Description of Artificial Sequence: Synthetic oligonucleotide
acaacaaucuugggcucca

SEQ ID NO: 657548 - RNA, 19 nt, Artificial Sequence
  Description of Artificial Sequence: Synthetic oligonucleotide
cugcaaauuagcaaagcuu

SEQ ID NO: 657549 - RNA, 19 nt, Artificial Sequence
  Description of Artificial Sequence: Synthetic oligonucleotide
cgcauuagcuccauaggag

SEQ ID NO: 657550 - RNA, 19 nt, Artificial Sequence
  Description of Artificial Sequence: Synthetic oligonucleotide
cagaauaaggugacaccaa

SEQ ID NO: 657551 - RNA, 19 nt, Artificial Sequence
  Description of Artificial Sequence: Synthetic oligonucleotide
ugcggaguucagucccugc

SEQ ID NO: 657552 - RNA, 19 nt, Artificial Sequence
  Description of Artificial Sequence: Synthetic oligonucleotide
gcaagcgaaugugacagug

SEQ ID NO: 657553 - RNA, 19 nt, Artificial Sequence
  Description of Artificial Sequence: Synthetic oligonucleotide
aagcuuaagcuggguguga

SEQ ID NO: 657554 - RNA, 19 nt, Artificial Sequence
  Description of Artificial Sequence: Synthetic oligonucleotide
ggcacaucccgaugggcag

SEQ ID NO: 657555 - RNA, 19 nt, Artificial Sequence
  Description of Artificial Sequence: Synthetic oligonucleotide
cuuaguaagauguguuauu

SEQ ID NO: 657556 - RNA, 19 nt, Artificial Sequence
  Description of Artificial Sequence: Synthetic oligonucleotide
agcgcgacacacgcucccc

SEQ ID NO: 657557 - RNA, 19 nt, Artificial Sequence
  Description of Artificial Sequence: Synthetic oligonucleotide
gggaaaguugcagacccug

SEQ ID NO: 657558 - RNA, 19 nt, Artificial Sequence
  Description of Artificial Sequence: Synthetic oligonucleotide
agagcgcgacacacgcucc

SEQ ID NO: 657559 - RNA, 19 nt, Artificial Sequence
  Description of Artificial Sequence: Synthetic oligonucleotide
aucuagcaagcgaauguga

SEQ ID NO: 657560 - RNA, 19 nt, Artificial Sequence
  Description of Artificial Sequence: Synthetic oligonucleotide
gucacgggguuugagauua

SEQ ID NO: 657561 - RNA, 19 nt, Artificial Sequence
  Description of Artificial Sequence: Synthetic oligonucleotide
guuuucuaccaacccgaaa

SEQ ID NO: 657562 - RNA, 19 nt, Artificial Sequence
  Description of Artificial Sequence: Synthetic oligonucleotide
gagcgcgacacacgcuccc

SEQ ID NO: 657563 - RNA, 19 nt, Artificial Sequence
  Description of Artificial Sequence: Synthetic oligonucleotide
acuggccgcuccuuccucu

SEQ ID NO: 657564 - RNA, 19 nt, Artificial Sequence
  Description of Artificial Sequence: Synthetic oligonucleotide
cucuaggauaaaugauuaa

SEQ ID NO: 657565 - RNA, 19 nt, Artificial Sequence
  Description of Artificial Sequence: Synthetic oligonucleotide
acggagaaaugacgcggga

SEQ ID NO: 657566 - RNA, 19 nt, Artificial Sequence
  Description of Artificial Sequence: Synthetic oligonucleotide
ccacggagaaaugacgcgg

SEQ ID NO: 657567 - RNA, 19 nt, Artificial Sequence
  Description of Artificial Sequence: Synthetic oligonucleotide
cuaugcugacggacagaug

SEQ ID NO: 657568 - RNA, 19 nt, Artificial Sequence
  Description of Artificial Sequence: Synthetic oligonucleotide
uggagugcuucugccacuc

SEQ ID NO: 657569 - RNA, 19 nt, Artificial Sequence
  Description of Artificial Sequence: Synthetic oligonucleotide
uuauggguucgagguggug

SEQ ID NO: 657570 - RNA, 19 nt, Artificial Sequence
  Description of Artificial Sequence: Synthetic oligonucleotide
cgcgggacuaugcugacgg

SEQ ID NO: 657571 - RNA, 19 nt, Artificial Sequence
  Description of Artificial Sequence: Synthetic oligonucleotide
aucgugagagcgcgacaca

SEQ ID NO: 657572 - RNA, 19 nt, Artificial Sequence
  Description of Artificial Sequence: Synthetic oligonucleotide
cugagagaguuccagccua

SEQ ID NO: 657573 - RNA, 19 nt, Artificial Sequence
  Description of Artificial Sequence: Synthetic oligonucleotide
ccgacacuaaagaggcucc

SEQ ID NO: 657574 - RNA, 19 nt, Artificial Sequence
  Description of Artificial Sequence: Synthetic oligonucleotide
ccauguccgauggaggagg

SEQ ID NO: 657575 - RNA, 19 nt, Artificial Sequence
  Description of Artificial Sequence: Synthetic oligonucleotide
gacggacagaugguaguga

SEQ ID NO: 657576 - RNA, 19 nt, Artificial Sequence
  Description of Artificial Sequence: Synthetic oligonucleotide
gagaaaugacgcgggacua

SEQ ID NO: 657577 - RNA, 19 nt, Artificial Sequence
  Description of Artificial Sequence: Synthetic oligonucleotide
gcaagggucaaaguccuuc

SEQ ID NO: 657578 - RNA, 19 nt, Artificial Sequence
  Description of Artificial Sequence: Synthetic oligonucleotide
agcaagcgaaugugacagu

SEQ ID NO: 657579 - RNA, 19 nt, Artificial Sequence
  Description of Artificial Sequence: Synthetic oligonucleotide
gcgcucuggaaucacuggc

SEQ ID NO: 657580 - RNA, 19 nt, Artificial Sequence
  Description of Artificial Sequence: Synthetic oligonucleotide
uuuaggcggcuugaagguu

SEQ ID NO: 657581 - RNA, 19 nt, Artificial Sequence
  Description of Artificial Sequence: Synthetic oligonucleotide
cucuuguggccugggcacg

SEQ ID NO: 657582 - RNA, 19 nt, Artificial Sequence
  Description of Artificial Sequence: Synthetic oligonucleotide
uacuugcgcucuggaauca

SEQ ID NO: 657583 - RNA, 19 nt, Artificial Sequence
  Description of Artificial Sequence: Synthetic oligonucleotide
gccagguaaggcuguggag

SEQ ID NO: 657584 - RNA, 19 nt, Artificial Sequence
  Description of Artificial Sequence: Synthetic oligonucleotide
guaagccuggacagcaaaa

SEQ ID NO: 657585 - RNA, 19 nt, Artificial Sequence
  Description of Artificial Sequence: Synthetic oligonucleotide
agcugaaugcccggcggca

SEQ ID NO: 657586 - RNA, 19 nt, Artificial Sequence
  Description of Artificial Sequence: Synthetic oligonucleotide
cgaacuccgacacuaaaga

SEQ ID NO: 657587 - RNA, 19 nt, Artificial Sequence
  Description of Artificial Sequence: Synthetic oligonucleotide
cauaugaggcuaacuuggu

SEQ ID NO: 657588 - RNA, 19 nt, Artificial Sequence
  Description of Artificial Sequence: Synthetic oligonucleotide
gguuugggccagguaaggc

SEQ ID NO: 657589 - RNA, 19 nt, Artificial Sequence
  Description of Artificial Sequence: Synthetic oligonucleotide
auuauggguucgagguggu

SEQ ID NO: 657590 - RNA, 19 nt, Artificial Sequence
  Description of Artificial Sequence: Synthetic oligonucleotide
gggacuaugcugacggaca

SEQ ID NO: 657591 - RNA, 19 nt, Artificial Sequence
  Description of Artificial Sequence: Synthetic oligonucleotide
uggguagcuuuagccuuca

SEQ ID NO: 657592 - RNA, 19 nt, Artificial Sequence
  Description of Artificial Sequence: Synthetic oligonucleotide
gagcaagggucaaaguccu

SEQ ID NO: 657593 - RNA, 19 nt, Artificial Sequence
  Description of Artificial Sequence: Synthetic oligonucleotide
gacuaugcugacggacaga

SEQ ID NO: 657594 - RNA, 19 nt, Artificial Sequence
  Description of Artificial Sequence: Synthetic oligonucleotide
ugaaugcccggcggcacau

SEQ ID NO: 657595 - RNA, 19 nt, Artificial Sequence
  Description of Artificial Sequence: Synthetic oligonucleotide
ccugccuguuguucaaaac

SEQ ID NO: 657596 - RNA, 19 nt, Artificial Sequence
  Description of Artificial Sequence: Synthetic oligonucleotide
gacgcgggacuaugcugac

SEQ ID NO: 657597 - RNA, 19 nt, Artificial Sequence
  Description of Artificial Sequence: Synthetic oligonucleotide
cuauuuuaggcggcuugaa

SEQ ID NO: 657598 - RNA, 19 nt, Artificial Sequence
  Description of Artificial Sequence: Synthetic oligonucleotide
cacgggguuugagauuaug

SEQ ID NO: 657599 - RNA, 19 nt, Artificial Sequence
  Description of Artificial Sequence: Synthetic oligonucleotide
ggcggcacaucccgauggg

SEQ ID NO: 657600 - RNA, 19 nt, Artificial Sequence
  Description of Artificial Sequence: Synthetic oligonucleotide
uagcuccauaggagagggu

SEQ ID NO: 657601 - RNA, 19 nt, Artificial Sequence
  Description of Artificial Sequence: Synthetic oligonucleotide
cagcacuauuuacccagga

SEQ ID NO: 657602 - RNA, 19 nt, Artificial Sequence
  Description of Artificial Sequence: Synthetic oligonucleotide
cauguccgauggaggagga

SEQ ID NO: 657603 - RNA, 19 nt, Artificial Sequence
  Description of Artificial Sequence: Synthetic oligonucleotide
uccggggcuccagacggcu

SEQ ID NO: 657604 - RNA, 19 nt, Artificial Sequence
  Description of Artificial Sequence: Synthetic oligonucleotide
cugcucgggguggacuggg

SEQ ID NO: 657605 - RNA, 19 nt, Artificial Sequence
  Description of Artificial Sequence: Synthetic oligonucleotide
gcaccucuaucaugauuug

SEQ ID NO: 657606 - RNA, 19 nt, Artificial Sequence
  Description of Artificial Sequence: Synthetic oligonucleotide
caaucugcacaaugucacu

SEQ ID NO: 657607 - RNA, 19 nt, Artificial Sequence
  Description of Artificial Sequence: Synthetic oligonucleotide
cugaaugcccggcggcaca

SEQ ID NO: 657608 - RNA, 19 nt, Artificial Sequence
  Description of Artificial Sequence: Synthetic oligonucleotide
ccucuaucaugauuuguaa

SEQ ID NO: 657609 - RNA, 19 nt, Artificial Sequence
  Description of Artificial Sequence: Synthetic oligonucleotide
cacugauguuuucuaccaa

SEQ ID NO: 657610 - RNA, 19 nt, Artificial Sequence
  Description of Artificial Sequence: Synthetic oligonucleotide
cuccuaugucagagcccag

SEQ ID NO: 657611 - RNA, 19 nt, Artificial Sequence
  Description of Artificial Sequence: Synthetic oligonucleotide
ggauccaggugcuuuuccu

SEQ ID NO: 657612 - RNA, 19 nt, Artificial Sequence
  Description of Artificial Sequence: Synthetic oligonucleotide
gcuuaguaagauguguuau

SEQ ID NO: 657613 - RNA, 19 nt, Artificial Sequence
  Description of Artificial Sequence: Synthetic oligonucleotide
acgcgggacuaugcugacg

SEQ ID NO: 657614 - RNA, 19 nt, Artificial Sequence
  Description of Artificial Sequence: Synthetic oligonucleotide
augcggaguucagucccug

SEQ ID NO: 657615 - RNA, 19 nt, Artificial Sequence
  Description of Artificial Sequence: Synthetic oligonucleotide
caggugcuuuuccuauaca

SEQ ID NO: 657616 - RNA, 19 nt, Artificial Sequence
  Description of Artificial Sequence: Synthetic oligonucleotide
gccaucgugagagcgcgac

SEQ ID NO: 657617 - RNA, 19 nt, Artificial Sequence
  Description of Artificial Sequence: Synthetic oligonucleotide
gcggcccgaacuccgacac

SEQ ID NO: 657618 - RNA, 19 nt, Artificial Sequence
  Description of Artificial Sequence: Synthetic oligonucleotide
gguggaaaauggccucaaa

SEQ ID NO: 657619 - RNA, 19 nt, Artificial Sequence
  Description of Artificial Sequence: Synthetic oligonucleotide
gcucgagaggcugcggggc

SEQ ID NO: 657620 - RNA, 19 nt, Artificial Sequence
  Description of Artificial Sequence: Synthetic oligonucleotide
ugggcaccucuaucaugau

SEQ ID NO: 657621 - RNA, 19 nt, Artificial Sequence
  Description of Artificial Sequence: Synthetic oligonucleotide
guuuugugaucagggaauu

SEQ ID NO: 657622 - RNA, 19 nt, Artificial Sequence
  Description of Artificial Sequence: Synthetic oligonucleotide
gcgcgacacacgcuccccg

SEQ ID NO: 657623 - RNA, 19 nt, Artificial Sequence
  Description of Artificial Sequence: Synthetic oligonucleotide
gggaaccaaccucuggacu

SEQ ID NO: 657624 - RNA, 19 nt, Artificial Sequence
  Description of Artificial Sequence: Synthetic oligonucleotide
ucacgggguuugagauuau

SEQ ID NO: 657625 - RNA, 19 nt, Artificial Sequence
  Description of Artificial Sequence: Synthetic oligonucleotide
cugcggcccgaacuccgac

SEQ ID NO: 657626 - RNA, 19 nt, Artificial Sequence
  Description of Artificial Sequence: Synthetic oligonucleotide
ggccgaugcagguggcuuc

SEQ ID NO: 657627 - RNA, 19 nt, Artificial Sequence
  Description of Artificial Sequence: Synthetic oligonucleotide
cguguugaucaaaggaaaa

SEQ ID NO: 657628 - RNA, 19 nt, Artificial Sequence
  Description of Artificial Sequence: Synthetic oligonucleotide
gccuagaggcccacugggc

SEQ ID NO: 657629 - RNA, 19 nt, Artificial Sequence
  Description of Artificial Sequence: Synthetic oligonucleotide
cggcuugaagguugcuggg

SEQ ID NO: 657630 - RNA, 19 nt, Artificial Sequence
  Description of Artificial Sequence: Synthetic oligonucleotide
cacuggccgcuccuuccuc

SEQ ID NO: 657631 - RNA, 19 nt, Artificial Sequence
  Description of Artificial Sequence: Synthetic oligonucleotide
gcugaaugcccggcggcac

SEQ ID NO: 657632 - RNA, 19 nt, Artificial Sequence
  Description of Artificial Sequence: Synthetic oligonucleotide
guggagugcuucugccacu

SEQ ID NO: 657633 - RNA, 19 nt, Artificial Sequence
  Description of Artificial Sequence: Synthetic oligonucleotide
ggcccgaacuccgacacua

SEQ ID NO: 657634 - RNA, 19 nt, Artificial Sequence
  Description of Artificial Sequence: Synthetic oligonucleotide
gcgacacacgcuccccgac

SEQ ID NO: 657635 - RNA, 19 nt, Artificial Sequence
  Description of Artificial Sequence: Synthetic oligonucleotide
ggagaggguuuuggggcac

SEQ ID NO: 657636 - RNA, 19 nt, Artificial Sequence
  Description of Artificial Sequence: Synthetic oligonucleotide
gccuccuguuaacuacauc

SEQ ID NO: 657637 - RNA, 19 nt, Artificial Sequence
  Description of Artificial Sequence: Synthetic oligonucleotide
cgggacuaugcugacggac

SEQ ID NO: 657638 - RNA, 19 nt, Artificial Sequence
  Description of Artificial Sequence: Synthetic oligonucleotide
caccucuaucaugauuugu

SEQ ID NO: 657639 - RNA, 19 nt, Artificial Sequence
  Description of Artificial Sequence: Synthetic oligonucleotide
ccuauacagaaugcggagu

SEQ ID NO: 657640 - RNA, 19 nt, Artificial Sequence
  Description of Artificial Sequence: Synthetic oligonucleotide
cuuguggccugggcacgca

SEQ ID NO: 657641 - RNA, 19 nt, Artificial Sequence
  Description of Artificial Sequence: Synthetic oligonucleotide
gccuagcuaaggcuacaua

SEQ ID NO: 657642 - RNA, 19 nt, Artificial Sequence
  Description of Artificial Sequence: Synthetic oligonucleotide
gcggcacaucccgaugggc

SEQ ID NO: 657643 - RNA, 19 nt, Artificial Sequence
  Description of Artificial Sequence: Synthetic oligonucleotide
cucgagaggcugcggggcu

SEQ ID NO: 657644 - RNA, 19 nt, Artificial Sequence
  Description of Artificial Sequence: Synthetic oligonucleotide
ccauggugugaggguuugg

SEQ ID NO: 657645 - RNA, 19 nt, Artificial Sequence
  Description of Artificial Sequence: Synthetic oligonucleotide
gccuguuguucaaaacgcu

SEQ ID NO: 657646 - RNA, 19 nt, Artificial Sequence
  Description of Artificial Sequence: Synthetic oligonucleotide
gccgagccaucgugagagc

SEQ ID NO: 657647 - RNA, 19 nt, Artificial Sequence
  Description of Artificial Sequence: Synthetic oligonucleotide
acaucccgaugggcaggga

SEQ ID NO: 657648 - RNA, 19 nt, Artificial Sequence
  Description of Artificial Sequence: Synthetic oligonucleotide
cccgaacuccgacacuaaa

SEQ ID NO: 657649 - RNA, 19 nt, Artificial Sequence
  Description of Artificial Sequence: Synthetic oligonucleotide
cuccgacacuaaagaggcu

SEQ ID NO: 657650 - RNA, 19 nt, Artificial Sequence
  Description of Artificial Sequence: Synthetic oligonucleotide
ccaucgugagagcgcgaca

SEQ ID NO: 657651 - RNA, 19 nt, Artificial Sequence
  Description of Artificial Sequence: Synthetic oligonucleotide
agccaucgugagagcgcga

SEQ ID NO: 657652 - RNA, 19 nt, Artificial Sequence
  Description of Artificial Sequence: Synthetic oligonucleotide
gaggguuuuggggcaccuu

SEQ ID NO: 657653 - RNA, 19 nt, Artificial Sequence
  Description of Artificial Sequence: Synthetic oligonucleotide
gggcgcaagagcaggcacu

SEQ ID NO: 657654 - RNA, 19 nt, Artificial Sequence
  Description of Artificial Sequence: Synthetic oligonucleotide
gcgggacuaugcugacgga

SEQ ID NO: 657655 - RNA, 19 nt, Artificial Sequence
  Description of Artificial Sequence: Synthetic oligonucleotide
gggcaccucuaucaugauu

SEQ ID NO: 657656 - RNA, 19 nt, Artificial Sequence
  Description of Artificial Sequence: Synthetic oligonucleotide
ggcuaacuugguggaaaau

SEQ ID NO: 657657 - RNA, 19 nt, Artificial Sequence
  Description of Artificial Sequence: Synthetic oligonucleotide
cgacacacgcuccccgaca

SEQ ID NO: 657658 - RNA, 19 nt, Artificial Sequence
  Description of Artificial Sequence: Synthetic oligonucleotide
cgcgacacacgcuccccga

SEQ ID NO: 657659 - RNA, 19 nt, Artificial Sequence
  Description of Artificial Sequence: Synthetic oligonucleotide
gggcuccaaagaggcucca

SEQ ID NO: 657660 - RNA, 19 nt, Artificial Sequence
  Description of Artificial Sequence: Synthetic oligonucleotide
gcccgaacuccgacacuaa

SEQ ID NO: 657661 - RNA, 19 nt, Artificial Sequence
  Description of Artificial Sequence: Synthetic oligonucleotide
ccagacggcucgagaggcu

SEQ ID NO: 657662 - RNA, 19 nt, Artificial Sequence
  Description of Artificial Sequence: Synthetic oligonucleotide
ggccuccuguuaacuacau

SEQ ID NO: 657663 - RNA, 19 nt, Artificial Sequence
  Description of Artificial Sequence: Synthetic oligonucleotide
ccacugggacaucuauuuu

SEQ ID NO: 657664 - RNA, 19 nt, Artificial Sequence
  Description of Artificial Sequence: Synthetic oligonucleotide
cgccugcggcccgaacucc

SEQ ID NO: 657665 - RNA, 19 nt, Artificial Sequence
  Description of Artificial Sequence: Synthetic oligonucleotide
cccggcggcacaucccgau

SEQ ID NO: 657666 - RNA, 19 nt, Artificial Sequence
  Description of Artificial Sequence: Synthetic oligonucleotide
aaaaucguaauugaugacc

SEQ ID NO: 657667 - RNA, 19 nt, Artificial Sequence
  Description of Artificial Sequence: Synthetic oligonucleotide
aagaauaucaaacuucuug

SEQ ID NO: 657668 - RNA, 19 nt, Artificial Sequence
  Description of Artificial Sequence: Synthetic oligonucleotide
agaauaucaaacuucuugg

SEQ ID NO: 657669 - RNA, 19 nt, Artificial Sequence
  Description of Artificial Sequence: Synthetic oligonucleotide
aacaguaacgacauugucc

SEQ ID NO: 657670 - RNA, 19 nt, Artificial Sequence
  Description of Artificial Sequence: Synthetic oligonucleotide
augacguccacauuaauac

SEQ ID NO: 657671 - RNA, 19 nt, Artificial Sequence
  Description of Artificial Sequence: Synthetic oligonucleotide
aguguuaucucgcugcugc

SEQ ID NO: 657672 - RNA, 19 nt, Artificial Sequence
  Description of Artificial Sequence: Synthetic oligonucleotide
aaaccuuuuauguauucag

SEQ ID NO: 657673 - RNA, 19 nt, Artificial Sequence
  Description of Artificial Sequence: Synthetic oligonucleotide
auuuuaccugcucugaagc

SEQ ID NO: 657674 - RNA, 19 nt, Artificial Sequence
  Description of Artificial Sequence: Synthetic oligonucleotide
ucuguauucaggcagaaau

SEQ ID NO: 657675 - RNA, 19 nt, Artificial Sequence
  Description of Artificial Sequence: Synthetic oligonucleotide
uuuggaguuguacuaaugc

SEQ ID NO: 657676 - RNA, 19 nt, Artificial Sequence
  Description of Artificial Sequence: Synthetic oligonucleotide
ucagaaccgacaaagagca

SEQ ID NO: 657677 - RNA, 19 nt, Artificial Sequence
  Description of Artificial Sequence: Synthetic oligonucleotide
ugcucuaagaaauauuuug

SEQ ID NO: 657678 - RNA, 19 nt, Artificial Sequence
  Description of Artificial Sequence: Synthetic oligonucleotide
uguaaguuuaguuucuucu

SEQ ID NO: 657679 - RNA, 19 nt, Artificial Sequence
  Description of Artificial Sequence: Synthetic oligonucleotide
uuaauaacggcuuaucauc

SEQ ID NO: 657680 - RNA, 19 nt, Artificial Sequence
  Description of Artificial Sequence: Synthetic oligonucleotide
acacuugucaggucuaucc

SEQ ID NO: 657681 - RNA, 19 nt, Artificial Sequence
  Description of Artificial Sequence: Synthetic oligonucleotide
uauucaggcagaaauguca

SEQ ID NO: 657682 - RNA, 19 nt, Artificial Sequence
  Description of Artificial Sequence: Synthetic oligonucleotide
uguucaacagucucgacug

SEQ ID NO: 657683 - RNA, 19 nt, Artificial Sequence
  Description of Artificial Sequence: Synthetic oligonucleotide
ucaacuaccagccauucaa

SEQ ID NO: 657684 - RNA, 19 nt, Artificial Sequence
  Description of Artificial Sequence: Synthetic oligonucleotide
ucuauaagaaguaucucuc

SEQ ID NO: 657685 - RNA, 19 nt, Artificial Sequence
  Description of Artificial Sequence: Synthetic oligonucleotide
acaguaacgacauugucca

SEQ ID NO: 657686 - RNA, 19 nt, Artificial Sequence
  Description of Artificial Sequence: Synthetic oligonucleotide
uagcaauugggucaggaag

SEQ ID NO: 657687 - RNA, 19 nt, Artificial Sequence
  Description of Artificial Sequence: Synthetic oligonucleotide
uuaauaccuucauauauga

SEQ ID NO: 657688 - RNA, 19 nt, Artificial Sequence
  Description of Artificial Sequence: Synthetic oligonucleotide
uucacgucgaacuuggcgc

SEQ ID NO: 657689 - RNA, 19 nt, Artificial Sequence
  Description of Artificial Sequence: Synthetic oligonucleotide
aaagucaaucccucuugcg

SEQ ID NO: 657690 - RNA, 19 nt, Artificial Sequence
  Description of Artificial Sequence: Synthetic oligonucleotide
uucaacacuugucaggucu

SEQ ID NO: 657691 - RNA, 19 nt, Artificial Sequence
  Description of Artificial Sequence: Synthetic oligonucleotide
aaguagaucagucgauuug

SEQ ID NO: 657692 - RNA, 19 nt, Artificial Sequence
  Description of Artificial Sequence: Synthetic oligonucleotide
ucgaguuggggauauaacc

SEQ ID NO: 657693 - RNA, 19 nt, Artificial Sequence
  Description of Artificial Sequence: Synthetic oligonucleotide
aaacaguaacgacauuguc

SEQ ID NO: 657694 - RNA, 19 nt, Artificial Sequence
  Description of Artificial Sequence: Synthetic oligonucleotide
uguuauuuccauuguauaa

SEQ ID NO: 657695 - RNA, 19 nt, Artificial Sequence
  Description of Artificial Sequence: Synthetic oligonucleotide
aguucgaccuauccuaugg

SEQ ID NO: 657696 - RNA, 19 nt, Artificial Sequence
  Description of Artificial Sequence: Synthetic oligonucleotide
cucagaaccgacaaagagc

SEQ ID NO: 657697 - RNA, 19 nt, Artificial Sequence
  Description of Artificial Sequence: Synthetic oligonucleotide
caacacuucuuaauaacgg

SEQ ID NO: 657698 - RNA, 19 nt, Artificial Sequence
  Description of Artificial Sequence: Synthetic oligonucleotide
agaucagucgauuuggagu

SEQ ID NO: 657699 - RNA, 19 nt, Artificial Sequence
  Description of Artificial Sequence: Synthetic oligonucleotide
ucauauaugagcucaugaa

SEQ ID NO: 657700 - RNA, 19 nt, Artificial Sequence
  Description of Artificial Sequence: Synthetic oligonucleotide
gggcuuauaaauuacacug

SEQ ID NO: 657701 - RNA, 19 nt, Artificial Sequence
  Description of Artificial Sequence: Synthetic oligonucleotide
uaauugaugaccagguuua

SEQ ID NO: 657702 - RNA, 19 nt, Artificial Sequence
  Description of Artificial Sequence: Synthetic oligonucleotide
aguaauucugaaaucaucu

SEQ ID NO: 657703 - RNA, 19 nt, Artificial Sequence
  Description of Artificial Sequence: Synthetic oligonucleotide
aacuucuuggaugauuuag

SEQ ID NO: 657704 - RNA, 19 nt, Artificial Sequence
  Description of Artificial Sequence: Synthetic oligonucleotide
uucaccuacaaggugaagc

SEQ ID NO: 657705 - RNA, 19 nt, Artificial Sequence
  Description of Artificial Sequence: Synthetic oligonucleotide
cuguuaaauaauccaagag

SEQ ID NO: 657706 - RNA, 19 nt, Artificial Sequence
  Description of Artificial Sequence: Synthetic oligonucleotide
uccagguuuagcuugcacc

SEQ ID NO: 657707 - RNA, 19 nt, Artificial Sequence
  Description of Artificial Sequence: Synthetic oligonucleotide
aguagaucagucgauuugg

SEQ ID NO: 657708 - RNA, 19 nt, Artificial Sequence
  Description of Artificial Sequence: Synthetic oligonucleotide
acuaaugcucucccuuucc

SEQ ID NO: 657709 - RNA, 19 nt, Artificial Sequence
  Description of Artificial Sequence: Synthetic oligonucleotide
uuuagcuugcaccacugcu

SEQ ID NO: 657710 - RNA, 19 nt, Artificial Sequence
  Description of Artificial Sequence: Synthetic oligonucleotide
cacaagaauaucaaacuuc

SEQ ID NO: 657711 - RNA, 19 nt, Artificial Sequence
  Description of Artificial Sequence: Synthetic oligonucleotide
cacgugaagggcaaaaccc

SEQ ID NO: 657712 - RNA, 19 nt, Artificial Sequence
  Description of Artificial Sequence: Synthetic oligonucleotide
uuuccuaccuggaaucgag

SEQ ID NO: 657713 - RNA, 19 nt, Artificial Sequence
  Description of Artificial Sequence: Synthetic oligonucleotide
aaaguugcgcugaacauug

SEQ ID NO: 657714 - RNA, 19 nt, Artificial Sequence
  Description of Artificial Sequence: Synthetic oligonucleotide
cucgaaagccuuuauuugc

SEQ ID NO: 657715 - RNA, 19 nt, Artificial Sequence
  Description of Artificial Sequence: Synthetic oligonucleotide
ugcauuaaaaugggaaugc

SEQ ID NO: 657716 - RNA, 19 nt, Artificial Sequence
  Description of Artificial Sequence: Synthetic oligonucleotide
augaaugacguccacauua

SEQ ID NO: 657717 - RNA, 19 nt, Artificial Sequence
  Description of Artificial Sequence: Synthetic oligonucleotide
auaacggcuuaucaucuuc

SEQ ID NO: 657718 - RNA, 19 nt, Artificial Sequence
  Description of Artificial Sequence: Synthetic oligonucleotide
gaggauguccacuguauag

SEQ ID NO: 657719 - RNA, 19 nt, Artificial Sequence
  Description of Artificial Sequence: Synthetic oligonucleotide
aguaacgacauuguccagg

SEQ ID NO: 657720 - RNA, 19 nt, Artificial Sequence
  Description of Artificial Sequence: Synthetic oligonucleotide
aaccgcuucacgucgaacu

SEQ ID NO: 657721 - RNA, 19 nt, Artificial Sequence
  Description of Artificial Sequence: Synthetic oligonucleotide
uggaucauauguauccuga

SEQ ID NO: 657722 - RNA, 19 nt, Artificial Sequence
  Description of Artificial Sequence: Synthetic oligonucleotide
agucucagaaccgacaaag

SEQ ID NO: 657723 - RNA, 19 nt, Artificial Sequence
  Description of Artificial Sequence: Synthetic oligonucleotide
aaaucguaauugaugacca

SEQ ID NO: 657724 - RNA, 19 nt, Artificial Sequence
  Description of Artificial Sequence: Synthetic oligonucleotide
augauuuaggcccgaaucu

SEQ ID NO: 657725 - RNA, 19 nt, Artificial Sequence
  Description of Artificial Sequence: Synthetic oligonucleotide
cuucuuggaugauuuaggc

SEQ ID NO: 657726 - RNA, 19 nt, Artificial Sequence
  Description of Artificial Sequence: Synthetic oligonucleotide
aaaccccuaagaguucacc

SEQ ID NO: 657727 - RNA, 19 nt, Artificial Sequence
  Description of Artificial Sequence: Synthetic oligonucleotide
uuagcucuuucaauggacu

SEQ ID NO: 657728 - RNA, 19 nt, Artificial Sequence
  Description of Artificial Sequence: Synthetic oligonucleotide
uuccuaacuuuccuguaag

SEQ ID NO: 657729 - RNA, 19 nt, Artificial Sequence
  Description of Artificial Sequence: Synthetic oligonucleotide
auaugcaaaaguugcgcug

SEQ ID NO: 657730 - RNA, 19 nt, Artificial Sequence
  Description of Artificial Sequence: Synthetic oligonucleotide
ucucuuagcugcuauugca

SEQ ID NO: 657731 - RNA, 19 nt, Artificial Sequence
  Description of Artificial Sequence: Synthetic oligonucleotide
aguauguuccuaacuuucc

SEQ ID NO: 657732 - RNA, 19 nt, Artificial Sequence
  Description of Artificial Sequence: Synthetic oligonucleotide
auaacauuggcaacacuuc

SEQ ID NO: 657733 - RNA, 19 nt, Artificial Sequence
  Description of Artificial Sequence: Synthetic oligonucleotide
uuaggcccgaaucucuuag

SEQ ID NO: 657734 - RNA, 19 nt, Artificial Sequence
  Description of Artificial Sequence: Synthetic oligonucleotide
aguagucacaagaauauca

SEQ ID NO: 657735 - RNA, 19 nt, Artificial Sequence
  Description of Artificial Sequence: Synthetic oligonucleotide
uccgaagaagucuagcccu

SEQ ID NO: 657736 - RNA, 19 nt, Artificial Sequence
  Description of Artificial Sequence: Synthetic oligonucleotide
uaacauuggcaacacuucu

SEQ ID NO: 657737 - RNA, 19 nt, Artificial Sequence
  Description of Artificial Sequence: Synthetic oligonucleotide
cuucacgucgaacuuggcg

SEQ ID NO: 657738 - RNA, 19 nt, Artificial Sequence
  Description of Artificial Sequence: Synthetic oligonucleotide
acaaggugaagcuugcccu

SEQ ID NO: 657739 - RNA, 19 nt, Artificial Sequence
  Description of Artificial Sequence: Synthetic oligonucleotide
uuuguuugcuuaauaguuu

SEQ ID NO: 657740 - RNA, 19 nt, Artificial Sequence
  Description of Artificial Sequence: Synthetic oligonucleotide
uuguuucgaaagaaguugu

SEQ ID NO: 657741 - RNA, 19 nt, Artificial Sequence
  Description of Artificial Sequence: Synthetic oligonucleotide
uguauccugaaucccguac

SEQ ID NO: 657742 - RNA, 19 nt, Artificial Sequence
  Description of Artificial Sequence: Synthetic oligonucleotide
ucgacugcagaauuccuug

SEQ ID NO: 657743 - RNA, 19 nt, Artificial Sequence
  Description of Artificial Sequence: Synthetic oligonucleotide
uaagaaguaucucucugua

SEQ ID NO: 657744 - RNA, 19 nt, Artificial Sequence
  Description of Artificial Sequence: Synthetic oligonucleotide
aaccccuaagaguucacca

SEQ ID NO: 657745 - RNA, 19 nt, Artificial Sequence
  Description of Artificial Sequence: Synthetic oligonucleotide
uaugcaaaaguugcgcuga

SEQ ID NO: 657746 - RNA, 19 nt, Artificial Sequence
  Description of Artificial Sequence: Synthetic oligonucleotide
guaagcuaggacuauuuuc

SEQ ID NO: 657747 - RNA, 19 nt, Artificial Sequence
  Description of Artificial Sequence: Synthetic oligonucleotide
uuggaguuguacuaaugcu

SEQ ID NO: 657748 - RNA, 19 nt, Artificial Sequence
  Description of Artificial Sequence: Synthetic oligonucleotide
ucaccuacaaggugaagcu

SEQ ID NO: 657749 - RNA, 19 nt, Artificial Sequence
  Description of Artificial Sequence: Synthetic oligonucleotide
uauccugaaucccguaccc

SEQ ID NO: 657750 - RNA, 19 nt, Artificial Sequence
  Description of Artificial Sequence: Synthetic oligonucleotide
ucgaccuauccuauggaug

SEQ ID NO: 657751 - RNA, 19 nt, Artificial Sequence
  Description of Artificial Sequence: Synthetic oligonucleotide
ugcuuaauaguuucuggaa

SEQ ID NO: 657752 - RNA, 19 nt, Artificial Sequence
  Description of Artificial Sequence: Synthetic oligonucleotide
aguaucucucuguauucag

SEQ ID NO: 657753 - RNA, 19 nt, Artificial Sequence
  Description of Artificial Sequence: Synthetic oligonucleotide
uauguauccugaaucccgu

SEQ ID NO: 657754 - RNA, 19 nt, Artificial Sequence
  Description of Artificial Sequence: Synthetic oligonucleotide
aacuaccagccauucaaca

SEQ ID NO: 657755 - RNA, 19 nt, Artificial Sequence
  Description of Artificial Sequence: Synthetic oligonucleotide
ucugaauuggcgugggcac

SEQ ID NO: 657756 - RNA, 19 nt, Artificial Sequence
  Description of Artificial Sequence: Synthetic oligonucleotide
cuggaaucgagcagcgucg

SEQ ID NO: 657757 - RNA, 19 nt, Artificial Sequence
  Description of Artificial Sequence: Synthetic oligonucleotide
gaauaucaaacuucuugga

SEQ ID NO: 657758 - RNA, 19 nt, Artificial Sequence
  Description of Artificial Sequence: Synthetic oligonucleotide
accccuaagaguucaccac

SEQ ID NO: 657759 - RNA, 19 nt, Artificial Sequence
  Description of Artificial Sequence: Synthetic oligonucleotide
uagaucagucgauuuggag

SEQ ID NO: 657760 - RNA, 19 nt, Artificial Sequence
  Description of Artificial Sequence: Synthetic oligonucleotide
ugcuaaaagccaaagucuu

SEQ ID NO: 657761 - RNA, 19 nt, Artificial Sequence
  Description of Artificial Sequence: Synthetic oligonucleotide
uuggguguuauuucaacau

SEQ ID NO: 657762 - RNA, 19 nt, Artificial Sequence
  Description of Artificial Sequence: Synthetic oligonucleotide
uguaaugcuccacacucau

SEQ ID NO: 657763 - RNA, 19 nt, Artificial Sequence
  Description of Artificial Sequence: Synthetic oligonucleotide
uuuaccugcucugaagcug

SEQ ID NO: 657764 - RNA, 19 nt, Artificial Sequence
  Description of Artificial Sequence: Synthetic oligonucleotide
uuggaaaaucguaauugau

SEQ ID NO: 657765 - RNA, 19 nt, Artificial Sequence
  Description of Artificial Sequence: Synthetic oligonucleotide
ugcaucaguaagcuaggac

SEQ ID NO: 657766 - RNA, 19 nt, Artificial Sequence
  Description of Artificial Sequence: Synthetic oligonucleotide
auuggcaacacuucuuaau

SEQ ID NO: 657767 - RNA, 19 nt, Artificial Sequence
  Description of Artificial Sequence: Synthetic oligonucleotide
ucuuagcugcuauugcagc

SEQ ID NO: 657768 - RNA, 19 nt, Artificial Sequence
  Description of Artificial Sequence: Synthetic oligonucleotide
auauaugagcucaugaaaa

SEQ ID NO: 657769 - RNA, 19 nt, Artificial Sequence
  Description of Artificial Sequence: Synthetic oligonucleotide
uuuauguauucaggcacag

SEQ ID NO: 657770 - RNA, 19 nt, Artificial Sequence
  Description of Artificial Sequence: Synthetic oligonucleotide
aaugacguccacauuaaua

SEQ ID NO: 657771 - RNA, 19 nt, Artificial Sequence
  Description of Artificial Sequence: Synthetic oligonucleotide
gaaucgagcagcgucggcc

SEQ ID NO: 657772 - RNA, 19 nt, Artificial Sequence
  Description of Artificial Sequence: Synthetic oligonucleotide
ucgauuuggaguagucaca

SEQ ID NO: 657773 - RNA, 19 nt, Artificial Sequence
  Description of Artificial Sequence: Synthetic oligonucleotide
gaucagucgauuuggagua

SEQ ID NO: 657774 - RNA, 19 nt, Artificial Sequence
  Description of Artificial Sequence: Synthetic oligonucleotide
agaaccgacaaagagcagu

SEQ ID NO: 657775 - RNA, 19 nt, Artificial Sequence
  Description of Artificial Sequence: Synthetic oligonucleotide
cuguauucaggcagaaaug

SEQ ID NO: 657776 - RNA, 19 nt, Artificial Sequence
  Description of Artificial Sequence: Synthetic oligonucleotide
auguuccuaacuuuccugu

SEQ ID NO: 657777 - RNA, 19 nt, Artificial Sequence
  Description of Artificial Sequence: Synthetic oligonucleotide
guauccugaaucccguacc

SEQ ID NO: 657778 - RNA, 19 nt, Artificial Sequence
  Description of Artificial Sequence: Synthetic oligonucleotide
gcucuaagaaauauuuugg

SEQ ID NO: 657779 - RNA, 19 nt, Artificial Sequence
  Description of Artificial Sequence: Synthetic oligonucleotide
uugcgcugaacauugcucu

SEQ ID NO: 657780 - RNA, 19 nt, Artificial Sequence
  Description of Artificial Sequence: Synthetic oligonucleotide
acucccuuccaaccaggcc

SEQ ID NO: 657781 - RNA, 19 nt, Artificial Sequence
  Description of Artificial Sequence: Synthetic oligonucleotide
acgugaagggcaaaacccc

SEQ ID NO: 657782 - RNA, 19 nt, Artificial Sequence
  Description of Artificial Sequence: Synthetic oligonucleotide
ugaugaccagguuuacacc

SEQ ID NO: 657783 - RNA, 19 nt, Artificial Sequence
  Description of Artificial Sequence: Synthetic oligonucleotide
cuaccuggaaucgagcagc

SEQ ID NO: 657784 - RNA, 19 nt, Artificial Sequence
  Description of Artificial Sequence: Synthetic oligonucleotide
ugcaucugaauuggcgugg

SEQ ID NO: 657785 - RNA, 19 nt, Artificial Sequence
  Description of Artificial Sequence: Synthetic oligonucleotide
aucccguacccucagauau

SEQ ID NO: 657786 - RNA, 19 nt, Artificial Sequence
  Description of Artificial Sequence: Synthetic oligonucleotide
agcaaucgagaacugauuu

SEQ ID NO: 657787 - RNA, 19 nt, Artificial Sequence
  Description of Artificial Sequence: Synthetic oligonucleotide
cuuacucccuuccaaccag

SEQ ID NO: 657788 - RNA, 19 nt, Artificial Sequence
  Description of Artificial Sequence: Synthetic oligonucleotide
cuuguaguauguuccuaac

SEQ ID NO: 657789 - RNA, 19 nt, Artificial Sequence
  Description of Artificial Sequence: Synthetic oligonucleotide
uuuuaccugcucugaagcu

SEQ ID NO: 657790 - RNA, 19 nt, Artificial Sequence
  Description of Artificial Sequence: Synthetic oligonucleotide
uugagcaguaauucugaaa

SEQ ID NO: 657791 - RNA, 19 nt, Artificial Sequence
  Description of Artificial Sequence: Synthetic oligonucleotide
augcuaaaagccaaagucu

SEQ ID NO: 657792 - RNA, 19 nt, Artificial Sequence
  Description of Artificial Sequence: Synthetic oligonucleotide
uccuaccuggaaucgagca

SEQ ID NO: 657793 - RNA, 19 nt, Artificial Sequence
  Description of Artificial Sequence: Synthetic oligonucleotide
uuacucccuuccaaccagg

SEQ ID NO: 657794 - RNA, 19 nt, Artificial Sequence
  Description of Artificial Sequence: Synthetic oligonucleotide
aaguucccguccaugcagc

SEQ ID NO: 657795 - RNA, 19 nt, Artificial Sequence
  Description of Artificial Sequence: Synthetic oligonucleotide
aaguaucucucuguauuca

SEQ ID NO: 657796 - RNA, 19 nt, Artificial Sequence
  Description of Artificial Sequence: Synthetic oligonucleotide
uccagucucagaaccgaca

SEQ ID NO: 657797 - RNA, 19 nt, Artificial Sequence
  Description of Artificial Sequence: Synthetic oligonucleotide
cuauccuauggauguauuc

SEQ ID NO: 657798 - RNA, 19 nt, Artificial Sequence
  Description of Artificial Sequence: Synthetic oligonucleotide
uuguuuccgaagaagucua

SEQ ID NO: 657799 - RNA, 19 nt, Artificial Sequence
  Description of Artificial Sequence: Synthetic oligonucleotide
uaaccagggcucgaaagcc

SEQ ID NO: 657800 - RNA, 19 nt, Artificial Sequence
  Description of Artificial Sequence: Synthetic oligonucleotide
gcaacacuucuuaauaacg

SEQ ID NO: 657801 - RNA, 19 nt, Artificial Sequence
  Description of Artificial Sequence: Synthetic oligonucleotide
cuuaauaacggcuuaucau

SEQ ID NO: 657802 - RNA, 19 nt, Artificial Sequence
  Description of Artificial Sequence: Synthetic oligonucleotide
ugacguccacauuaauacc

SEQ ID NO: 657803 - RNA, 19 nt, Artificial Sequence
  Description of Artificial Sequence: Synthetic oligonucleotide
uguagcaauugggucagga

SEQ ID NO: 657804 - RNA, 19 nt, Artificial Sequence
  Description of Artificial Sequence: Synthetic oligonucleotide
accuuuaaagucaaucccu

SEQ ID NO: 657805 - RNA, 19 nt, Artificial Sequence
  Description of Artificial Sequence: Synthetic oligonucleotide
uggauguauuccacugagc

SEQ ID NO: 657806 - RNA, 19 nt, Artificial Sequence
  Description of Artificial Sequence: Synthetic oligonucleotide
cuuuugaccuugugggaug

SEQ ID NO: 657807 - RNA, 19 nt, Artificial Sequence
  Description of Artificial Sequence: Synthetic oligonucleotide
uugcgagcaaggcuguaca

SEQ ID NO: 657808 - RNA, 19 nt, Artificial Sequence
  Description of Artificial Sequence: Synthetic oligonucleotide
uccuauggauguauuccac

SEQ ID NO: 657809 - RNA, 19 nt, Artificial Sequence
  Description of Artificial Sequence: Synthetic oligonucleotide
aucugaauuggcgugggca

SEQ ID NO: 657810 - RNA, 19 nt, Artificial Sequence
  Description of Artificial Sequence: Synthetic oligonucleotide
auguucugcagcaaucgag

SEQ ID NO: 657811 - RNA, 19 nt, Artificial Sequence
  Description of Artificial Sequence: Synthetic oligonucleotide
ugauuuaggcccgaaucuc

SEQ ID NO: 657812 - RNA, 19 nt, Artificial Sequence
  Description of Artificial Sequence: Synthetic oligonucleotide
guugcugaaauguagcaau

SEQ ID NO: 657813 - RNA, 19 nt, Artificial Sequence
  Description of Artificial Sequence: Synthetic oligonucleotide
aguugcgcugaacauugcu

SEQ ID NO: 657814 - RNA, 19 nt, Artificial Sequence
  Description of Artificial Sequence: Synthetic oligonucleotide
uccugaaucccguacccuc

SEQ ID NO: 657815 - RNA, 19 nt, Artificial Sequence
  Description of Artificial Sequence: Synthetic oligonucleotide
cauuaaaaugggaaugcua

SEQ ID NO: 657816 - RNA, 19 nt, Artificial Sequence
  Description of Artificial Sequence: Synthetic oligonucleotide
auuuuggaguuguacuaau

SEQ ID NO: 657817 - RNA, 19 nt, Artificial Sequence
  Description of Artificial Sequence: Synthetic oligonucleotide
agcaauugggucaggaaga

SEQ ID NO: 657818 - RNA, 19 nt, Artificial Sequence
  Description of Artificial Sequence: Synthetic oligonucleotide
guggaucauauguauccug

SEQ ID NO: 657819 - RNA, 19 nt, Artificial Sequence
  Description of Artificial Sequence: Synthetic oligonucleotide
uguggaucauauguauccu

SEQ ID NO: 657820 - RNA, 19 nt, Artificial Sequence
  Description of Artificial Sequence: Synthetic oligonucleotide
ucacgucgaacuuggcgcc

SEQ ID NO: 657821 - RNA, 19 nt, Artificial Sequence
  Description of Artificial Sequence: Synthetic oligonucleotide
gaagaaucaggauugcauu

SEQ ID NO: 657822 - RNA, 19 nt, Artificial Sequence
  Description of Artificial Sequence: Synthetic oligonucleotide
uucgaccuauccuauggau

SEQ ID NO: 657823 - RNA, 19 nt, Artificial Sequence
  Description of Artificial Sequence: Synthetic oligonucleotide
cucgaguuggggauauaac

SEQ ID NO: 657824 - RNA, 19 nt, Artificial Sequence
  Description of Artificial Sequence: Synthetic oligonucleotide
aguaagcuaggacuauuuu

SEQ ID NO: 657825 - RNA, 19 nt, Artificial Sequence
  Description of Artificial Sequence: Synthetic oligonucleotide
uacuaaugcucucccuuuc

SEQ ID NO: 657826 - RNA, 19 nt, Artificial Sequence
  Description of Artificial Sequence: Synthetic oligonucleotide
agguuuagcuugcaccacu

SEQ ID NO: 657827 - RNA, 19 nt, Artificial Sequence
  Description of Artificial Sequence: Synthetic oligonucleotide
ggcaacacuucuuaauaac

SEQ ID NO: 657828 - RNA, 19 nt, Artificial Sequence
  Description of Artificial Sequence: Synthetic oligonucleotide
gguuguuucagcugcauua

SEQ ID NO: 657829 - RNA, 19 nt, Artificial Sequence
  Description of Artificial Sequence: Synthetic oligonucleotide
ggauguauuccacugagcu

SEQ ID NO: 657830 - RNA, 19 nt, Artificial Sequence
  Description of Artificial Sequence: Synthetic oligonucleotide
agcagcgucggccgagaac

SEQ ID NO: 657831 - RNA, 19 nt, Artificial Sequence
  Description of Artificial Sequence: Synthetic oligonucleotide
ucaaacuucuuggaugauu

SEQ ID NO: 657832 - RNA, 19 nt, Artificial Sequence
  Description of Artificial Sequence: Synthetic oligonucleotide
gguggauccugcuuuaaca

SEQ ID NO: 657833 - RNA, 19 nt, Artificial Sequence
  Description of Artificial Sequence: Synthetic oligonucleotide
gcaucaguaagcuaggacu

SEQ ID NO: 657834 - RNA, 19 nt, Artificial Sequence
  Description of Artificial Sequence: Synthetic oligonucleotide
cuccuuacucccuuccaac

SEQ ID NO: 657835 - RNA, 19 nt, Artificial Sequence
  Description of Artificial Sequence: Synthetic oligonucleotide
uuuuccuaccuggaaucga

SEQ ID NO: 657836 - RNA, 19 nt, Artificial Sequence
  Description of Artificial Sequence: Synthetic oligonucleotide
uugcucuaagaaauauuuu

SEQ ID NO: 657837 - RNA, 19 nt, Artificial Sequence
  Description of Artificial Sequence: Synthetic oligonucleotide
aaucccguacccucagaua

SEQ ID NO: 657838 - RNA, 19 nt, Artificial Sequence
  Description of Artificial Sequence: Synthetic oligonucleotide
aagcuguggacaguguuau

SEQ ID NO: 657839 - RNA, 19 nt, Artificial Sequence
  Description of Artificial Sequence: Synthetic oligonucleotide
gauccaguaggagcagaag

SEQ ID NO: 657840 - RNA, 19 nt, Artificial Sequence
  Description of Artificial Sequence: Synthetic oligonucleotide
gaaacaguaacgacauugu

SEQ ID NO: 657841 - RNA, 19 nt, Artificial Sequence
  Description of Artificial Sequence: Synthetic oligonucleotide
ugguggauccugcuuuaac

SEQ ID NO: 657842 - RNA, 19 nt, Artificial Sequence
  Description of Artificial Sequence: Synthetic oligonucleotide
gucucgacugcagaauucc

SEQ ID NO: 657843 - RNA, 19 nt, Artificial Sequence
  Description of Artificial Sequence: Synthetic oligonucleotide
gauauaaccagggcucgaa

SEQ ID NO: 657844 - RNA, 19 nt, Artificial Sequence
  Description of Artificial Sequence: Synthetic oligonucleotide
guagucacaagaauaucaa

SEQ ID NO: 657845 - RNA, 19 nt, Artificial Sequence
  Description of Artificial Sequence: Synthetic oligonucleotide
uuggcgugggcacuuggaa

SEQ ID NO: 657846 - RNA, 19 nt, Artificial Sequence
  Description of Artificial Sequence: Synthetic oligonucleotide
ucaacacuugucaggucua

SEQ ID NO: 657847 - RNA, 19 nt, Artificial Sequence
  Description of Artificial Sequence: Synthetic oligonucleotide
uacucccuuccaaccaggc

SEQ ID NO: 657848 - RNA, 19 nt, Artificial Sequence
  Description of Artificial Sequence: Synthetic oligonucleotide
gauguccacuguauaguac

SEQ ID NO: 657849 - RNA, 19 nt, Artificial Sequence
  Description of Artificial Sequence: Synthetic oligonucleotide
agucgauuuggaguaguca

SEQ ID NO: 657850 - RNA, 19 nt, Artificial Sequence
  Description of Artificial Sequence: Synthetic oligonucleotide
gaucauauguauccugaau

SEQ ID NO: 657851 - RNA, 19 nt, Artificial Sequence
  Description of Artificial Sequence: Synthetic oligonucleotide
uuccuaccuggaaucgagc

SEQ ID NO: 657852 - RNA, 19 nt, Artificial Sequence
  Description of Artificial Sequence: Synthetic oligonucleotide
ccagcuggucucuaaaccc

SEQ ID NO: 657853 - RNA, 19 nt, Artificial Sequence
  Description of Artificial Sequence: Synthetic oligonucleotide
gcucgaaagccuuuauuug

SEQ ID NO: 657854 - RNA, 19 nt, Artificial Sequence
  Description of Artificial Sequence: Synthetic oligonucleotide
aaccgacaaagagcaguuc

SEQ ID NO: 657855 - RNA, 19 nt, Artificial Sequence
  Description of Artificial Sequence: Synthetic oligonucleotide
cuauucccugcucuuccag

SEQ ID NO: 657856 - RNA, 19 nt, Artificial Sequence
  Description of Artificial Sequence: Synthetic oligonucleotide
aucaacuaccagccauuca

SEQ ID NO: 657857 - RNA, 19 nt, Artificial Sequence
  Description of Artificial Sequence: Synthetic oligonucleotide
auuacacuguggggauagc

SEQ ID NO: 657858 - RNA, 19 nt, Artificial Sequence
  Description of Artificial Sequence: Synthetic oligonucleotide
uguuccuaacuuuccugua

SEQ ID NO: 657859 - RNA, 19 nt, Artificial Sequence
  Description of Artificial Sequence: Synthetic oligonucleotide
gucaaucccucuugcgagc

SEQ ID NO: 657860 - RNA, 19 nt, Artificial Sequence
  Description of Artificial Sequence: Synthetic oligonucleotide
auauaaccagggcucgaaa

SEQ ID NO: 657861 - RNA, 19 nt, Artificial Sequence
  Description of Artificial Sequence: Synthetic oligonucleotide
ucucgacugcagaauuccu

SEQ ID NO: 657862 - RNA, 19 nt, Artificial Sequence
  Description of Artificial Sequence: Synthetic oligonucleotide
augcugggcuuauaaauua

SEQ ID NO: 657863 - RNA, 19 nt, Artificial Sequence
  Description of Artificial Sequence: Synthetic oligonucleotide
caucaguaagcuaggacua

SEQ ID NO: 657864 - RNA, 19 nt, Artificial Sequence
  Description of Artificial Sequence: Synthetic oligonucleotide
gcagcgucggccgagaacc

SEQ ID NO: 657865 - RNA, 19 nt, Artificial Sequence
  Description of Artificial Sequence: Synthetic oligonucleotide
gacguccacauuaauaccu

SEQ ID NO: 657866 - RNA, 19 nt, Artificial Sequence
  Description of Artificial Sequence: Synthetic oligonucleotide
guagcaauugggucaggaa

SEQ ID NO: 657867 - RNA, 19 nt, Artificial Sequence
  Description of Artificial Sequence: Synthetic oligonucleotide
ggggauauaaccagggcuc

SEQ ID NO: 657868 - RNA, 19 nt, Artificial Sequence
  Description of Artificial Sequence: Synthetic oligonucleotide
cuugcgagcaaggcuguac

SEQ ID NO: 657869 - RNA, 19 nt, Artificial Sequence
  Description of Artificial Sequence: Synthetic oligonucleotide
ucaaucccucuugcgagca

SEQ ID NO: 657870 - RNA, 19 nt, Artificial Sequence
  Description of Artificial Sequence: Synthetic oligonucleotide
agucucgacugcagaauuc

SEQ ID NO: 657871 - RNA, 19 nt, Artificial Sequence
  Description of Artificial Sequence: Synthetic oligonucleotide
gcccugaugcaucaguaag

SEQ ID NO: 657872 - RNA, 19 nt, Artificial Sequence
  Description of Artificial Sequence: Synthetic oligonucleotide
cauaugcaaaaguugcgcu

SEQ ID NO: 657873 - RNA, 19 nt, Artificial Sequence
  Description of Artificial Sequence: Synthetic oligonucleotide
uuuaggcccgaaucucuua

SEQ ID NO: 657874 - RNA, 19 nt, Artificial Sequence
  Description of Artificial Sequence: Synthetic oligonucleotide
guaacgacauuguccaggu

SEQ ID NO: 657875 - RNA, 19 nt, Artificial Sequence
  Description of Artificial Sequence: Synthetic oligonucleotide
ucgaaagaaguuguaccuu

SEQ ID NO: 657876 - RNA, 19 nt, Artificial Sequence
  Description of Artificial Sequence: Synthetic oligonucleotide
cuauaagaaguaucucucu

SEQ ID NO: 657877 - RNA, 19 nt, Artificial Sequence
  Description of Artificial Sequence: Synthetic oligonucleotide
ccuggaaucgagcagcguc

SEQ ID NO: 657878 - RNA, 19 nt, Artificial Sequence
  Description of Artificial Sequence: Synthetic oligonucleotide
cuaggacuauuuucuucuc

SEQ ID NO: 657879 - RNA, 19 nt, Artificial Sequence
  Description of Artificial Sequence: Synthetic oligonucleotide
ucagucgauuuggaguagu

SEQ ID NO: 657880 - RNA, 19 nt, Artificial Sequence
  Description of Artificial Sequence: Synthetic oligonucleotide
ugaaucccguacccucaga

SEQ ID NO: 657881 - RNA, 19 nt, Artificial Sequence
  Description of Artificial Sequence: Synthetic oligonucleotide
cuuuguggaucauauguau

SEQ ID NO: 657882 - RNA, 19 nt, Artificial Sequence
  Description of Artificial Sequence: Synthetic oligonucleotide
ugaccagguuuacaccuuu

SEQ ID NO: 657883 - RNA, 19 nt, Artificial Sequence
  Description of Artificial Sequence: Synthetic oligonucleotide
guauucaggcagaaauguc

SEQ ID NO: 657884 - RNA, 19 nt, Artificial Sequence
  Description of Artificial Sequence: Synthetic oligonucleotide
cuggcaaguucucgaguug

SEQ ID NO: 657885 - RNA, 19 nt, Artificial Sequence
  Description of Artificial Sequence: Synthetic oligonucleotide
cccugaugcaucaguaagc

SEQ ID NO: 657886 - RNA, 19 nt, Artificial Sequence
  Description of Artificial Sequence: Synthetic oligonucleotide
gggauauaaccagggcucg

SEQ ID NO: 657887 - RNA, 19 nt, Artificial Sequence
  Description of Artificial Sequence: Synthetic oligonucleotide
gaguuguacuaaugcucuc

SEQ ID NO: 657888 - RNA, 19 nt, Artificial Sequence
  Description of Artificial Sequence: Synthetic oligonucleotide
agcuugcucuaagaaauau

SEQ ID NO: 657889 - RNA, 19 nt, Artificial Sequence
  Description of Artificial Sequence: Synthetic oligonucleotide
gaaucccguacccucagau

SEQ ID NO: 657890 - RNA, 19 nt, Artificial Sequence
  Description of Artificial Sequence: Synthetic oligonucleotide
gauuuaggcccgaaucucu

SEQ ID NO: 657891 - RNA, 19 nt, Artificial Sequence
  Description of Artificial Sequence: Synthetic oligonucleotide
guucucucauggccagaag

SEQ ID NO: 657892 - RNA, 19 nt, Artificial Sequence
  Description of Artificial Sequence: Synthetic oligonucleotide
guucgaccuauccuaugga

SEQ ID NO: 657893 - RNA, 19 nt, Artificial Sequence
  Description of Artificial Sequence: Synthetic oligonucleotide
guaauucugaaaucaucuu

SEQ ID NO: 657894 - RNA, 19 nt, Artificial Sequence
  Description of Artificial Sequence: Synthetic oligonucleotide
ugcgagcaaggcuguacaa

SEQ ID NO: 657895 - RNA, 19 nt, Artificial Sequence
  Description of Artificial Sequence: Synthetic oligonucleotide
agcgucggccgagaaccgc

SEQ ID NO: 657896 - RNA, 19 nt, Artificial Sequence
  Description of Artificial Sequence: Synthetic oligonucleotide
aaccagggcucgaaagccu

SEQ ID NO: 657897 - RNA, 19 nt, Artificial Sequence
  Description of Artificial Sequence: Synthetic oligonucleotide
ugaauuggcgugggcacuu

SEQ ID NO: 657898 - RNA, 19 nt, Artificial Sequence
  Description of Artificial Sequence: Synthetic oligonucleotide
cucaucaacuaccagccau

SEQ ID NO: 657899 - RNA, 19 nt, Artificial Sequence
  Description of Artificial Sequence: Synthetic oligonucleotide
caucugaauuggcgugggc

SEQ ID NO: 657900 - RNA, 19 nt, Artificial Sequence
  Description of Artificial Sequence: Synthetic oligonucleotide
ucccucuugcgagcaaggc

SEQ ID NO: 657901 - RNA, 19 nt, Artificial Sequence
  Description of Artificial Sequence: Synthetic oligonucleotide
ccuaccuggaaucgagcag

SEQ ID NO: 657902 - RNA, 19 nt, Artificial Sequence
  Description of Artificial Sequence: Synthetic oligonucleotide
aucuuguguuuguuucgaa

SEQ ID NO: 657903 - RNA, 19 nt, Artificial Sequence
  Description of Artificial Sequence: Synthetic oligonucleotide
gcacuuggaagccugcauc

SEQ ID NO: 657904 - RNA, 19 nt, Artificial Sequence
  Description of Artificial Sequence: Synthetic oligonucleotide
cuacaaggugaagcuugcc

SEQ ID NO: 657905 - RNA, 19 nt, Artificial Sequence
  Description of Artificial Sequence: Synthetic oligonucleotide
cuugugggaugugcaggcc

SEQ ID NO: 657906 - RNA, 19 nt, Artificial Sequence
  Description of Artificial Sequence: Synthetic oligonucleotide
gcugcauuaaaaugggaau

SEQ ID NO: 657907 - RNA, 19 nt, Artificial Sequence
  Description of Artificial Sequence: Synthetic oligonucleotide
ggucucuaaacccaguuuu

SEQ ID NO: 657908 - RNA, 19 nt, Artificial Sequence
  Description of Artificial Sequence: Synthetic oligonucleotide
accuauccuauggauguau

SEQ ID NO: 657909 - RNA, 19 nt, Artificial Sequence
  Description of Artificial Sequence: Synthetic oligonucleotide
aucaguaagcuaggacuau

SEQ ID NO: 657910 - RNA, 19 nt, Artificial Sequence
  Description of Artificial Sequence: Synthetic oligonucleotide
caguucgaccuauccuaug

SEQ ID NO: 657911 - RNA, 19 nt, Artificial Sequence
  Description of Artificial Sequence: Synthetic oligonucleotide
aucccucuugcgagcaagg

SEQ ID NO: 657912 - RNA, 19 nt, Artificial Sequence
  Description of Artificial Sequence: Synthetic oligonucleotide
ggcucgaaagccuuuauuu

SEQ ID NO: 657913 - RNA, 19 nt, Artificial Sequence
  Description of Artificial Sequence: Synthetic oligonucleotide
auuggcgugggcacuugga

SEQ ID NO: 657914 - RNA, 19 nt, Artificial Sequence
  Description of Artificial Sequence: Synthetic oligonucleotide
caccuccgaagaaucagga

SEQ ID NO: 657915 - RNA, 19 nt, Artificial Sequence
  Description of Artificial Sequence: Synthetic oligonucleotide
agcugguuggaaaaucgua

SEQ ID NO: 657916 - RNA, 19 nt, Artificial Sequence
  Description of Artificial Sequence: Synthetic oligonucleotide
guagaucagucgauuugga

SEQ ID NO: 657917 - RNA, 19 nt, Artificial Sequence
  Description of Artificial Sequence: Synthetic oligonucleotide
cuaucccugguggauccug

SEQ ID NO: 657918 - RNA, 19 nt, Artificial Sequence
  Description of Artificial Sequence: Synthetic oligonucleotide
gggauagccuucuaaggua

SEQ ID NO: 657919 - RNA, 19 nt, Artificial Sequence
  Description of Artificial Sequence: Synthetic oligonucleotide
aucagucgauuuggaguag

SEQ ID NO: 657920 - RNA, 19 nt, Artificial Sequence
  Description of Artificial Sequence: Synthetic oligonucleotide
gcaccuccgaagaaucagg

SEQ ID NO: 657921 - RNA, 19 nt, Artificial Sequence
  Description of Artificial Sequence: Synthetic oligonucleotide
acgacauuguccagguuua

SEQ ID NO: 657922 - RNA, 19 nt, Artificial Sequence
  Description of Artificial Sequence: Synthetic oligonucleotide
acgucgaacuuggcgccgg

SEQ ID NO: 657923 - RNA, 19 nt, Artificial Sequence
  Description of Artificial Sequence: Synthetic oligonucleotide
caguaacgacauuguccag

SEQ ID NO: 657924 - RNA, 19 nt, Artificial Sequence
  Description of Artificial Sequence: Synthetic oligonucleotide
cgagaaccgcuucacgucg

SEQ ID NO: 657925 - RNA, 19 nt, Artificial Sequence
  Description of Artificial Sequence: Synthetic oligonucleotide
aucccugguggauccugcu

SEQ ID NO: 657926 - RNA, 19 nt, Artificial Sequence
  Description of Artificial Sequence: Synthetic oligonucleotide
agaaccgcuucacgucgaa

SEQ ID NO: 657927 - RNA, 19 nt, Artificial Sequence
  Description of Artificial Sequence: Synthetic oligonucleotide
cauuggcaacacuucuuaa

SEQ ID NO: 657928 - RNA, 19 nt, Artificial Sequence
  Description of Artificial Sequence: Synthetic oligonucleotide
cagaaccgacaaagagcag

SEQ ID NO: 657929 - RNA, 19 nt, Artificial Sequence
  Description of Artificial Sequence: Synthetic oligonucleotide
uugcagcaccuccgaagaa

SEQ ID NO: 657930 - RNA, 19 nt, Artificial Sequence
  Description of Artificial Sequence: Synthetic oligonucleotide
gcuguggacaguguuaucu

SEQ ID NO: 657931 - RNA, 19 nt, Artificial Sequence
  Description of Artificial Sequence: Synthetic oligonucleotide
auuuaggcccgaaucucuu

SEQ ID NO: 657932 - RNA, 19 nt, Artificial Sequence
  Description of Artificial Sequence: Synthetic oligonucleotide
gaauuggcgugggcacuug

SEQ ID NO: 657933 - RNA, 19 nt, Artificial Sequence
  Description of Artificial Sequence: Synthetic oligonucleotide
gggcaaaaccccuaagagu

SEQ ID NO: 657934 - RNA, 19 nt, Artificial Sequence
  Description of Artificial Sequence: Synthetic oligonucleotide
auccugaaucccguacccu

SEQ ID NO: 657935 - RNA, 19 nt, Artificial Sequence
  Description of Artificial Sequence: Synthetic oligonucleotide
auguauccugaaucccgua

SEQ ID NO: 657936 - RNA, 19 nt, Artificial Sequence
  Description of Artificial Sequence: Synthetic oligonucleotide
ucccguacccucagauauu

SEQ ID NO: 657937 - RNA, 19 nt, Artificial Sequence
  Description of Artificial Sequence: Synthetic oligonucleotide
gcuaaaagccaaagucuuc

SEQ ID NO: 657938 - RNA, 19 nt, Artificial Sequence
  Description of Artificial Sequence: Synthetic oligonucleotide
uggaugauuuaggcccgaa

SEQ ID NO: 657939 - RNA, 19 nt, Artificial Sequence
  Description of Artificial Sequence: Synthetic oligonucleotide
guacuaaugcucucccuuu

SEQ ID NO: 657940 - RNA, 19 nt, Artificial Sequence
  Description of Artificial Sequence: Synthetic oligonucleotide
cagguuuagcuugcaccac

SEQ ID NO: 657941 - RNA, 19 nt, Artificial Sequence
  Description of Artificial Sequence: Synthetic oligonucleotide
gcaucugaauuggcguggg

SEQ ID NO: 657942 - RNA, 19 nt, Artificial Sequence
  Description of Artificial Sequence: Synthetic oligonucleotide
ggauccugcuuuaacaagu

SEQ ID NO: 657943 - RNA, 19 nt, Artificial Sequence
  Description of Artificial Sequence: Synthetic oligonucleotide
cuugcccugaugcaucagu

SEQ ID NO: 657944 - RNA, 19 nt, Artificial Sequence
  Description of Artificial Sequence: Synthetic oligonucleotide
guaaugcuccacacucauc

SEQ ID NO: 657945 - RNA, 19 nt, Artificial Sequence
  Description of Artificial Sequence: Synthetic oligonucleotide
gaaccgcuucacgucgaac

SEQ ID NO: 657946 - RNA, 19 nt, Artificial Sequence
  Description of Artificial Sequence: Synthetic oligonucleotide
caauugggucaggaagauc

SEQ ID NO: 657947 - RNA, 19 nt, Artificial Sequence
  Description of Artificial Sequence: Synthetic oligonucleotide
gaaccgacaaagagcaguu

SEQ ID NO: 657948 - RNA, 19 nt, Artificial Sequence
  Description of Artificial Sequence: Synthetic oligonucleotide
cacgucgaacuuggcgccg

SEQ ID NO: 657949 - RNA, 19 nt, Artificial Sequence
  Description of Artificial Sequence: Synthetic oligonucleotide
ggccgagaaccgcuucacg

SEQ ID NO: 657950 - RNA, 19 nt, Artificial Sequence
  Description of Artificial Sequence: Synthetic oligonucleotide
caggucuaucccuggugga

SEQ ID NO: 657951 - RNA, 19 nt, Artificial Sequence
  Description of Artificial Sequence: Synthetic oligonucleotide
ccuucuaagguaucuauuu

SEQ ID NO: 657952 - RNA, 19 nt, Artificial Sequence
  Description of Artificial Sequence: Synthetic oligonucleotide
ggaaucgagcagcgucggc

SEQ ID NO: 657953 - RNA, 19 nt, Artificial Sequence
  Description of Artificial Sequence: Synthetic oligonucleotide
caguaagcuaggacuauuu

SEQ ID NO: 657954 - RNA, 19 nt, Artificial Sequence
  Description of Artificial Sequence: Synthetic oligonucleotide
cagcgucggccgagaaccg

SEQ ID NO: 657955 - RNA, 19 nt, Artificial Sequence
  Description of Artificial Sequence: Synthetic oligonucleotide
gccgagaaccgcuucacgu

SEQ ID NO: 657956 - RNA, 19 nt, Artificial Sequence
  Description of Artificial Sequence: Synthetic oligonucleotide
augugcaggccaggaaaau

SEQ ID NO: 657957 - RNA, 19 nt, Artificial Sequence
  Description of Artificial Sequence: Synthetic oligonucleotide
gagaaccgcuucacgucga

SEQ ID NO: 657958 - RNA, 19 nt, Artificial Sequence
  Description of Artificial Sequence: Synthetic oligonucleotide
aucgagcagcgucggccga

SEQ ID NO: 657959 - RNA, 19 nt, Artificial Sequence
  Description of Artificial Sequence: Synthetic oligonucleotide
agguggauugaaacccuuu

SEQ ID NO: 657960 - RNA, 19 nt, Artificial Sequence
  Description of Artificial Sequence: Synthetic oligonucleotide
gagcugguuggaaaaucgu

SEQ ID NO: 657961 - RNA, 19 nt, Artificial Sequence
  Description of Artificial Sequence: Synthetic oligonucleotide
cucgacugcagaauuccuu

SEQ ID NO: 657962 - RNA, 19 nt, Artificial Sequence
  Description of Artificial Sequence: Synthetic oligonucleotide
augaccagguuuacaccuu

SEQ ID NO: 657963 - RNA, 19 nt, Artificial Sequence
  Description of Artificial Sequence: Synthetic oligonucleotide
cguacccucagauauuuua

SEQ ID NO: 657964 - RNA, 19 nt, Artificial Sequence
  Description of Artificial Sequence: Synthetic oligonucleotide
auguagcaauugggucagg

SEQ ID NO: 657965 - RNA, 19 nt, Artificial Sequence
  Description of Artificial Sequence: Synthetic oligonucleotide
gcuggcaaguucucgaguu

SEQ ID NO: 657966 - RNA, 19 nt, Artificial Sequence
  Description of Artificial Sequence: Synthetic oligonucleotide
ccccuaagaguucaccaca

SEQ ID NO: 657967 - RNA, 19 nt, Artificial Sequence
  Description of Artificial Sequence: Synthetic oligonucleotide
ccuccgaagaaucaggauu

SEQ ID NO: 657968 - RNA, 19 nt, Artificial Sequence
  Description of Artificial Sequence: Synthetic oligonucleotide
cagucucagaaccgacaaa

SEQ ID NO: 657969 - RNA, 19 nt, Artificial Sequence
  Description of Artificial Sequence: Synthetic oligonucleotide
ggauauaaccagggcucga

SEQ ID NO: 657970 - RNA, 19 nt, Artificial Sequence
  Description of Artificial Sequence: Synthetic oligonucleotide
cgaccuauccuauggaugu

SEQ ID NO: 657971 - RNA, 19 nt, Artificial Sequence
  Description of Artificial Sequence: Synthetic oligonucleotide
gcugcuauugcagcuuugu

SEQ ID NO: 657972 - RNA, 19 nt, Artificial Sequence
  Description of Artificial Sequence: Synthetic oligonucleotide
ucuugcgagcaaggcugua

SEQ ID NO: 657973 - RNA, 19 nt, Artificial Sequence
  Description of Artificial Sequence: Synthetic oligonucleotide
guguuaucucgcugcugcu

SEQ ID NO: 657974 - RNA, 19 nt, Artificial Sequence
  Description of Artificial Sequence: Synthetic oligonucleotide
accuggaaucgagcagcgu

SEQ ID NO: 657975 - RNA, 19 nt, Artificial Sequence
  Description of Artificial Sequence: Synthetic oligonucleotide
cagcaaucgagaacugauu

SEQ ID NO: 657976 - RNA, 19 nt, Artificial Sequence
  Description of Artificial Sequence: Synthetic oligonucleotide
ggacaugaaucuuguguuu

SEQ ID NO: 657977 - RNA, 19 nt, Artificial Sequence
  Description of Artificial Sequence: Synthetic oligonucleotide
gcaaaaccccuaagaguuc

SEQ ID NO: 657978 - RNA, 19 nt, Artificial Sequence
  Description of Artificial Sequence: Synthetic oligonucleotide
gaccuauccuauggaugua

SEQ ID NO: 657979 - RNA, 19 nt, Artificial Sequence
  Description of Artificial Sequence: Synthetic oligonucleotide
gcgagcaaggcuguacaaa

SEQ ID NO: 657980 - RNA, 19 nt, Artificial Sequence
  Description of Artificial Sequence: Synthetic oligonucleotide
ccuauucccugcucuucca

SEQ ID NO: 657981 - RNA, 19 nt, Artificial Sequence
  Description of Artificial Sequence: Synthetic oligonucleotide
cacacucaucugagacaga

SEQ ID NO: 657982 - RNA, 19 nt, Artificial Sequence
  Description of Artificial Sequence: Synthetic oligonucleotide
ggaagccugcaucuagaau

SEQ ID NO: 657983 - RNA, 19 nt, Artificial Sequence
  Description of Artificial Sequence: Synthetic oligonucleotide
cugaauuggcgugggcacu

SEQ ID NO: 657984 - RNA, 19 nt, Artificial Sequence
  Description of Artificial Sequence: Synthetic oligonucleotide
cagucucgacugcagaauu

SEQ ID NO: 657985 - RNA, 19 nt, Artificial Sequence
  Description of Artificial Sequence: Synthetic oligonucleotide
gcucaacaucauaugcaaa

SEQ ID NO: 657986 - RNA, 19 nt, Artificial Sequence
  Description of Artificial Sequence: Synthetic oligonucleotide
cagccugcuggauaacauu

SEQ ID NO: 657987 - RNA, 19 nt, Artificial Sequence
  Description of Artificial Sequence: Synthetic oligonucleotide
gagcagcgucggccgagaa

SEQ ID NO: 657988 - RNA, 19 nt, Artificial Sequence
  Description of Artificial Sequence: Synthetic oligonucleotide
gcuugcucuaagaaauauu

SEQ ID NO: 657989 - RNA, 19 nt, Artificial Sequence
  Description of Artificial Sequence: Synthetic oligonucleotide
caccacauuuggguguuau

SEQ ID NO: 657990 - RNA, 19 nt, Artificial Sequence
  Description of Artificial Sequence: Synthetic oligonucleotide
cagguggauugaaacccuu

SEQ ID NO: 657991 - RNA, 19 nt, Artificial Sequence
  Description of Artificial Sequence: Synthetic oligonucleotide
gacaaccagccugcuggau

SEQ ID NO: 657992 - RNA, 19 nt, Artificial Sequence
  Description of Artificial Sequence: Synthetic oligonucleotide
gcaauugggucaggaagau

SEQ ID NO: 657993 - RNA, 19 nt, Artificial Sequence
  Description of Artificial Sequence: Synthetic oligonucleotide
ccguccaugcagcaugacu

SEQ ID NO: 657994 - RNA, 19 nt, Artificial Sequence
  Description of Artificial Sequence: Synthetic oligonucleotide
agccugcaucuagaauguu

SEQ ID NO: 657995 - RNA, 19 nt, Artificial Sequence
  Description of Artificial Sequence: Synthetic oligonucleotide
cccuaagaguucaccacau

SEQ ID NO: 657996 - RNA, 19 nt, Artificial Sequence
  Description of Artificial Sequence: Synthetic oligonucleotide
gccuucuaagguaucuauu

SEQ ID NO: 657997 - RNA, 19 nt, Artificial Sequence
  Description of Artificial Sequence: Synthetic oligonucleotide
ccuauccuauggauguauu

SEQ ID NO: 657998 - RNA, 19 nt, Artificial Sequence
  Description of Artificial Sequence: Synthetic oligonucleotide
caccuacaaggugaagcuu

SEQ ID NO: 657999 - RNA, 19 nt, Artificial Sequence
  Description of Artificial Sequence: Synthetic oligonucleotide
ccuaagaguucaccacauu

SEQ ID NO: 658000 - RNA, 19 nt, Artificial Sequence
  Description of Artificial Sequence: Synthetic oligonucleotide
cccgaaucucuuagcugcu

SEQ ID NO: 658001 - RNA, 19 nt, Artificial Sequence
  Description of Artificial Sequence: Synthetic oligonucleotide
cggccgagaaccgcuucac

SEQ ID NO: 658002 - RNA, 19 nt, Artificial Sequence
  Description of Artificial Sequence: Synthetic oligonucleotide
gcgcugaacauugcucuuu

SEQ ID NO: 658003 - RNA, 19 nt, Artificial Sequence
  Description of Artificial Sequence: Synthetic oligonucleotide
cccguacccucagauauuu

SEQ ID NO: 658004 - RNA, 19 nt, Artificial Sequence
  Description of Artificial Sequence: Synthetic oligonucleotide
cgagcagcgucggccgaga

SEQ ID NO: 658005 - RNA, 19 nt, Artificial Sequence
  Description of Artificial Sequence: Synthetic oligonucleotide
ccguacccucagauauuuu

SEQ ID NO: 658006 - RNA, 19 nt, Artificial Sequence
  Description of Artificial Sequence: Synthetic oligonucleotide
aagucuaagaagcugaggc

SEQ ID NO: 658007 - RNA, 19 nt, Artificial Sequence
  Description of Artificial Sequence: Synthetic oligonucleotide
aaauccaaggcauuaaagc

SEQ ID NO: 658008 - RNA, 19 nt, Artificial Sequence
  Description of Artificial Sequence: Synthetic oligonucleotide
aauccaaggcauuaaagcg

SEQ ID NO: 658009 - RNA, 19 nt, Artificial Sequence
  Description of Artificial Sequence: Synthetic oligonucleotide
aaagcguuaaagugaaucg

SEQ ID NO: 658010 - RNA, 19 nt, Artificial Sequence
  Description of Artificial Sequence: Synthetic oligonucleotide
aauauauauauauacuuuu

SEQ ID NO: 658011 - RNA, 19 nt, Artificial Sequence
  Description of Artificial Sequence: Synthetic oligonucleotide
aagugaaucgagaagaagg

SEQ ID NO: 658012 - RNA, 19 nt, Artificial Sequence
  Description of Artificial Sequence: Synthetic oligonucleotide
uauauauauauacuuuucu

SEQ ID NO: 658013 - RNA, 19 nt, Artificial Sequence
  Description of Artificial Sequence: Synthetic oligonucleotide
gauuauacuugauaccccg

SEQ ID NO: 658014 - RNA, 19 nt, Artificial Sequence
  Description of Artificial Sequence: Synthetic oligonucleotide
uuaaagugaaucgagaaga

SEQ ID NO: 658015 - RNA, 19 nt, Artificial Sequence
  Description of Artificial Sequence: Synthetic oligonucleotide
aacccaaauauauauauau

SEQ ID NO: 658016 - RNA, 19 nt, Artificial Sequence
  Description of Artificial Sequence: Synthetic oligonucleotide
ucaucguaaagcaucacag

SEQ ID NO: 658017 - RNA, 19 nt, Artificial Sequence
  Description of Artificial Sequence: Synthetic oligonucleotide
auuuauucagcgaaggccc

SEQ ID NO: 658018 - RNA, 19 nt, Artificial Sequence
  Description of Artificial Sequence: Synthetic oligonucleotide
uaaagcaucacaguggccc

SEQ ID NO: 658019 - RNA, 19 nt, Artificial Sequence
  Description of Artificial Sequence: Synthetic oligonucleotide
aaaaguuagagaaucugag

SEQ ID NO: 658020 - RNA, 19 nt, Artificial Sequence
  Description of Artificial Sequence: Synthetic oligonucleotide
gauuuauucagcgaaggcc

SEQ ID NO: 658021 - RNA, 19 nt, Artificial Sequence
  Description of Artificial Sequence: Synthetic oligonucleotide
aaguuagagaaucugaguu

SEQ ID NO: 658022 - RNA, 19 nt, Artificial Sequence
  Description of Artificial Sequence: Synthetic oligonucleotide
gaaucugaguuccucauag

SEQ ID NO: 658023 - RNA, 19 nt, Artificial Sequence
  Description of Artificial Sequence: Synthetic oligonucleotide
ucguaaagcaucacagugg

SEQ ID NO: 658024 - RNA, 19 nt, Artificial Sequence
  Description of Artificial Sequence: Synthetic oligonucleotide
cugauuauacuugauaccc

SEQ ID NO: 658025 - RNA, 19 nt, Artificial Sequence
  Description of Artificial Sequence: Synthetic oligonucleotide
aaaguuagagaaucugagu

SEQ ID NO: 658026 - RNA, 19 nt, Artificial Sequence
  Description of Artificial Sequence: Synthetic oligonucleotide
cuuacugugggguuacugg

SEQ ID NO: 658027 - RNA, 19 nt, Artificial Sequence
  Description of Artificial Sequence: Synthetic oligonucleotide
guuaaagugaaucgagaag

SEQ ID NO: 658028 - RNA, 19 nt, Artificial Sequence
  Description of Artificial Sequence: Synthetic oligonucleotide
aguuagagaaucugaguuc

SEQ ID NO: 658029 - RNA, 19 nt, Artificial Sequence
  Description of Artificial Sequence: Synthetic oligonucleotide
aaguugaggccccagaccu

SEQ ID NO: 658030 - RNA, 19 nt, Artificial Sequence
  Description of Artificial Sequence: Synthetic oligonucleotide
aucguaaagcaucacagug

SEQ ID NO: 658031 - RNA, 19 nt, Artificial Sequence
  Description of Artificial Sequence: Synthetic oligonucleotide
ugaaucgagaagaagggaa

SEQ ID NO: 658032 - RNA, 19 nt, Artificial Sequence
  Description of Artificial Sequence: Synthetic oligonucleotide
ucugguguacucuugguca

SEQ ID NO: 658033 - RNA, 19 nt, Artificial Sequence
  Description of Artificial Sequence: Synthetic oligonucleotide
aauuaugucuucuuucauu

SEQ ID NO: 658034 - RNA, 19 nt, Artificial Sequence
  Description of Artificial Sequence: Synthetic oligonucleotide
aaauauauauauauacuuu

SEQ ID NO: 658035 - RNA, 19 nt, Artificial Sequence
  Description of Artificial Sequence: Synthetic oligonucleotide
ucgcuuauuggugucaucg

SEQ ID NO: 658036 - RNA, 19 nt, Artificial Sequence
  Description of Artificial Sequence: Synthetic oligonucleotide
auauauauauauacuuuuc

SEQ ID NO: 658037 - RNA, 19 nt, Artificial Sequence
  Description of Artificial Sequence: Synthetic oligonucleotide
agagccaucgcuuauuggu

SEQ ID NO: 658038 - RNA, 19 nt, Artificial Sequence
  Description of Artificial Sequence: Synthetic oligonucleotide
auaaccaccuccugguccg

SEQ ID NO: 658039 - RNA, 19 nt, Artificial Sequence
  Description of Artificial Sequence: Synthetic oligonucleotide
aauccuaacccaaauaaaa

SEQ ID NO: 658040 - RNA, 19 nt, Artificial Sequence
  Description of Artificial Sequence: Synthetic oligonucleotide
uaaagcguuaaagugaauc

SEQ ID NO: 658041 - RNA, 19 nt, Artificial Sequence
  Description of Artificial Sequence: Synthetic oligonucleotide
aacggaagauuuauucagc

SEQ ID NO: 658042 - RNA, 19 nt, Artificial Sequence
  Description of Artificial Sequence: Synthetic oligonucleotide
cauuaaagcguuaaaguga

SEQ ID NO: 658043 - RNA, 19 nt, Artificial Sequence
  Description of Artificial Sequence: Synthetic oligonucleotide
agucuaagaagcugaggcg

SEQ ID NO: 658044 - RNA, 19 nt, Artificial Sequence
  Description of Artificial Sequence: Synthetic oligonucleotide
cuugcggccaacaacucgg

SEQ ID NO: 658045 - RNA, 19 nt, Artificial Sequence
  Description of Artificial Sequence: Synthetic oligonucleotide
uacuugauaccccggauga

SEQ ID NO: 658046 - RNA, 19 nt, Artificial Sequence
  Description of Artificial Sequence: Synthetic oligonucleotide
acggaagauuuauucagcg

SEQ ID NO: 658047 - RNA, 19 nt, Artificial Sequence
  Description of Artificial Sequence: Synthetic oligonucleotide
gauaaccaccuccuggucc

SEQ ID NO: 658048 - RNA, 19 nt, Artificial Sequence
  Description of Artificial Sequence: Synthetic oligonucleotide
ugauuauacuugauacccc

SEQ ID NO: 658049 - RNA, 19 nt, Artificial Sequence
  Description of Artificial Sequence: Synthetic oligonucleotide
aggcccaagucuaagaagc

SEQ ID NO: 658050 - RNA, 19 nt, Artificial Sequence
  Description of Artificial Sequence: Synthetic oligonucleotide
aaagugaaucgagaagaag

SEQ ID NO: 658051 - RNA, 19 nt, Artificial Sequence
  Description of Artificial Sequence: Synthetic oligonucleotide
cccaaauauauauauauac

SEQ ID NO: 658052 - RNA, 19 nt, Artificial Sequence
  Description of Artificial Sequence: Synthetic oligonucleotide
agggucuccguacagguuc

SEQ ID NO: 658053 - RNA, 19 nt, Artificial Sequence
  Description of Artificial Sequence: Synthetic oligonucleotide
ucgagaagaagggaaggcg

SEQ ID NO: 658054 - RNA, 19 nt, Artificial Sequence
  Description of Artificial Sequence: Synthetic oligonucleotide
uggacaaaggcuucaauua

SEQ ID NO: 658055 - RNA, 19 nt, Artificial Sequence
  Description of Artificial Sequence: Synthetic oligonucleotide
aacguugugcuguucuucu

SEQ ID NO: 658056 - RNA, 19 nt, Artificial Sequence
  Description of Artificial Sequence: Synthetic oligonucleotide
uuuuauagcugccuccaau

SEQ ID NO: 658057 - RNA, 19 nt, Artificial Sequence
  Description of Artificial Sequence: Synthetic oligonucleotide
ucuugcggccaacaacucg

SEQ ID NO: 658058 - RNA, 19 nt, Artificial Sequence
  Description of Artificial Sequence: Synthetic oligonucleotide
gcauuaaagcguuaaagug

SEQ ID NO: 658059 - RNA, 19 nt, Artificial Sequence
  Description of Artificial Sequence: Synthetic oligonucleotide
uuccaaguggagacagucg

SEQ ID NO: 658060 - RNA, 19 nt, Artificial Sequence
  Description of Artificial Sequence: Synthetic oligonucleotide
gaagauuuauucagcgaag

SEQ ID NO: 658061 - RNA, 19 nt, Artificial Sequence
  Description of Artificial Sequence: Synthetic oligonucleotide
aucgagaagaagggaaggc

SEQ ID NO: 658062 - RNA, 19 nt, Artificial Sequence
  Description of Artificial Sequence: Synthetic oligonucleotide
gaaucgagaagaagggaag

SEQ ID NO: 658063 - RNA, 19 nt, Artificial Sequence
  Description of Artificial Sequence: Synthetic oligonucleotide
aucuggacgcggcugaagg

SEQ ID NO: 658064 - RNA, 19 nt, Artificial Sequence
  Description of Artificial Sequence: Synthetic oligonucleotide
ugaaauccuaacccaaaua

SEQ ID NO: 658065 - RNA, 19 nt, Artificial Sequence
  Description of Artificial Sequence: Synthetic oligonucleotide
cuuuccugaguuuggcucc

SEQ ID NO: 658066 - RNA, 19 nt, Artificial Sequence
  Description of Artificial Sequence: Synthetic oligonucleotide
acagguucacucugggcgg

SEQ ID NO: 658067 - RNA, 19 nt, Artificial Sequence
  Description of Artificial Sequence: Synthetic oligonucleotide
ugaggcuuccuccuugcug

SEQ ID NO: 658068 - RNA, 19 nt, Artificial Sequence
  Description of Artificial Sequence: Synthetic oligonucleotide
aaggcuucaauuaugucuu

SEQ ID NO: 658069 - RNA, 19 nt, Artificial Sequence
  Description of Artificial Sequence: Synthetic oligonucleotide
caaauauauauauauacuu

SEQ ID NO: 658070 - RNA, 19 nt, Artificial Sequence
  Description of Artificial Sequence: Synthetic oligonucleotide
ucuccguacagguucacuc

SEQ ID NO: 658071 - RNA, 19 nt, Artificial Sequence
  Description of Artificial Sequence: Synthetic oligonucleotide
ucaaguugaggcagggaaa

SEQ ID NO: 658072 - RNA, 19 nt, Artificial Sequence
  Description of Artificial Sequence: Synthetic oligonucleotide
aagcguuaaagugaaucga

SEQ ID NO: 658073 - RNA, 19 nt, Artificial Sequence
  Description of Artificial Sequence: Synthetic oligonucleotide
auuaaagcguuaaagugaa

SEQ ID NO: 658074 - RNA, 19 nt, Artificial Sequence
  Description of Artificial Sequence: Synthetic oligonucleotide
aaagcaggcgccaggcggg

SEQ ID NO: 658075 - RNA, 19 nt, Artificial Sequence
  Description of Artificial Sequence: Synthetic oligonucleotide
gucaaguugaggcagggaa

SEQ ID NO: 658076 - RNA, 19 nt, Artificial Sequence
  Description of Artificial Sequence: Synthetic oligonucleotide
gaugggaguggccugauua

SEQ ID NO: 658077 - RNA, 19 nt, Artificial Sequence
  Description of Artificial Sequence: Synthetic oligonucleotide
uuauuggugucaucguaaa

SEQ ID NO: 658078 - RNA, 19 nt, Artificial Sequence
  Description of Artificial Sequence: Synthetic oligonucleotide
gccugauuauacuugauac

SEQ ID NO: 658079 - RNA, 19 nt, Artificial Sequence
  Description of Artificial Sequence: Synthetic oligonucleotide
uuuauucagcgaaggccca

SEQ ID NO: 658080 - RNA, 19 nt, Artificial Sequence
  Description of Artificial Sequence: Synthetic oligonucleotide
uccugcauuggagacgcgg

SEQ ID NO: 658081 - RNA, 19 nt, Artificial Sequence
  Description of Artificial Sequence: Synthetic oligonucleotide
gaccguuucacucauggcu

SEQ ID NO: 658082 - RNA, 19 nt, Artificial Sequence
  Description of Artificial Sequence: Synthetic oligonucleotide
agcguuaaagugaaucgag

SEQ ID NO: 658083 - RNA, 19 nt, Artificial Sequence
  Description of Artificial Sequence: Synthetic oligonucleotide
cuugauaccccggaugaug

SEQ ID NO: 658084 - RNA, 19 nt, Artificial Sequence
  Description of Artificial Sequence: Synthetic oligonucleotide
gacgcggcguuccaggugc

SEQ ID NO: 658085 - RNA, 19 nt, Artificial Sequence
  Description of Artificial Sequence: Synthetic oligonucleotide
agagucaucgcuggaacug

SEQ ID NO: 658086 - RNA, 19 nt, Artificial Sequence
  Description of Artificial Sequence: Synthetic oligonucleotide
accagugccaacagagagc

SEQ ID NO: 658087 - RNA, 19 nt, Artificial Sequence
  Description of Artificial Sequence: Synthetic oligonucleotide
cuuauuggugucaucguaa

SEQ ID NO: 658088 - RNA, 19 nt, Artificial Sequence
  Description of Artificial Sequence: Synthetic oligonucleotide
auuauacuugauaccccgg

SEQ ID NO: 658089 - RNA, 19 nt, Artificial Sequence
  Description of Artificial Sequence: Synthetic oligonucleotide
cauggcugcgcgcugggcg

SEQ ID NO: 658090 - RNA, 19 nt, Artificial Sequence
  Description of Artificial Sequence: Synthetic oligonucleotide
uagaucuggacgcggcuga

SEQ ID NO: 658091 - RNA, 19 nt, Artificial Sequence
  Description of Artificial Sequence: Synthetic oligonucleotide
gagacagucggggaguaug

SEQ ID NO: 658092 - RNA, 19 nt, Artificial Sequence
  Description of Artificial Sequence: Synthetic oligonucleotide
aacagagagccaucgcuua

SEQ ID NO: 658093 - RNA, 19 nt, Artificial Sequence
  Description of Artificial Sequence: Synthetic oligonucleotide
ucggaggucgucacagcag

SEQ ID NO: 658094 - RNA, 19 nt, Artificial Sequence
  Description of Artificial Sequence: Synthetic oligonucleotide
ugggauaccucccucuuuu

SEQ ID NO: 658095 - RNA, 19 nt, Artificial Sequence
  Description of Artificial Sequence: Synthetic oligonucleotide
uaagaagcugaggcguggg

SEQ ID NO: 658096 - RNA, 19 nt, Artificial Sequence
  Description of Artificial Sequence: Synthetic oligonucleotide
uggccgacucaucuuuggg

SEQ ID NO: 658097 - RNA, 19 nt, Artificial Sequence
  Description of Artificial Sequence: Synthetic oligonucleotide
aggcgggaagugcagagag

SEQ ID NO: 658098 - RNA, 19 nt, Artificial Sequence
  Description of Artificial Sequence: Synthetic oligonucleotide
uccguacagguucacucug

SEQ ID NO: 658099 - RNA, 19 nt, Artificial Sequence
  Description of Artificial Sequence: Synthetic oligonucleotide
gaggucgucacagcagagg

SEQ ID NO: 658100 - RNA, 19 nt, Artificial Sequence
  Description of Artificial Sequence: Synthetic oligonucleotide
ccugauuauacuugauacc

SEQ ID NO: 658101 - RNA, 19 nt, Artificial Sequence
  Description of Artificial Sequence: Synthetic oligonucleotide
agagagccaucgcuuauug

SEQ ID NO: 658102 - RNA, 19 nt, Artificial Sequence
  Description of Artificial Sequence: Synthetic oligonucleotide
aggucgucacagcagagga

SEQ ID NO: 658103 - RNA, 19 nt, Artificial Sequence
  Description of Artificial Sequence: Synthetic oligonucleotide
aaggccucuagagcacugg

SEQ ID NO: 658104 - RNA, 19 nt, Artificial Sequence
  Description of Artificial Sequence: Synthetic oligonucleotide
augggaagugcaggggugc

SEQ ID NO: 658105 - RNA, 19 nt, Artificial Sequence
  Description of Artificial Sequence: Synthetic oligonucleotide
guagaguccggcuuccuga

SEQ ID NO: 658106 - RNA, 19 nt, Artificial Sequence
  Description of Artificial Sequence: Synthetic oligonucleotide
uucagcgaaggcccaaguc

SEQ ID NO: 658107 - RNA, 19 nt, Artificial Sequence
  Description of Artificial Sequence: Synthetic oligonucleotide
auagcugccuccaauggga

SEQ ID NO: 658108 - RNA, 19 nt, Artificial Sequence
  Description of Artificial Sequence: Synthetic oligonucleotide
guugugcuguucuucuccc

SEQ ID NO: 658109 - RNA, 19 nt, Artificial Sequence
  Description of Artificial Sequence: Synthetic oligonucleotide
gagagccaucgcuuauugg

SEQ ID NO: 658110 - RNA, 19 nt, Artificial Sequence
  Description of Artificial Sequence: Synthetic oligonucleotide
aaguggagacagucgggga

SEQ ID NO: 658111 - RNA, 19 nt, Artificial Sequence
  Description of Artificial Sequence: Synthetic oligonucleotide
uagaguccggcuuccugag

SEQ ID NO: 658112 - RNA, 19 nt, Artificial Sequence
  Description of Artificial Sequence: Synthetic oligonucleotide
ucuagagcacuggccaugc

SEQ ID NO: 658113 - RNA, 19 nt, Artificial Sequence
  Description of Artificial Sequence: Synthetic oligonucleotide
uccccucacgucaucuucc

SEQ ID NO: 658114 - RNA, 19 nt, Artificial Sequence
  Description of Artificial Sequence: Synthetic oligonucleotide
acagucggggaguaugccu

SEQ ID NO: 658115 - RNA, 19 nt, Artificial Sequence
  Description of Artificial Sequence: Synthetic oligonucleotide
accaacggggcccugugcu

SEQ ID NO: 658116 - RNA, 19 nt, Artificial Sequence
  Description of Artificial Sequence: Synthetic oligonucleotide
ccuuccaaggccucuagag

SEQ ID NO: 658117 - RNA, 19 nt, Artificial Sequence
  Description of Artificial Sequence: Synthetic oligonucleotide
gaguccggcuuccugagga

SEQ ID NO: 658118 - RNA, 19 nt, Artificial Sequence
  Description of Artificial Sequence: Synthetic oligonucleotide
cugcauuggagacgcggcg

SEQ ID NO: 658119 - RNA, 19 nt, Artificial Sequence
  Description of Artificial Sequence: Synthetic oligonucleotide
ucuggacgcggcugaaggc

SEQ ID NO: 658120 - RNA, 19 nt, Artificial Sequence
  Description of Artificial Sequence: Synthetic oligonucleotide
aaaauggucuggacccuga

SEQ ID NO: 658121 - RNA, 19 nt, Artificial Sequence
  Description of Artificial Sequence: Synthetic oligonucleotide
gggaguaugccuucuggug

SEQ ID NO: 658122 - RNA, 19 nt, Artificial Sequence
  Description of Artificial Sequence: Synthetic oligonucleotide
aaauggucuggacccugaa

SEQ ID NO: 658123 - RNA, 19 nt, Artificial Sequence
  Description of Artificial Sequence: Synthetic oligonucleotide
ucuaguggguccugugguc

SEQ ID NO: 658124 - RNA, 19 nt, Artificial Sequence
  Description of Artificial Sequence: Synthetic oligonucleotide
uggguacauccccagcaga

SEQ ID NO: 658125 - RNA, 19 nt, Artificial Sequence
  Description of Artificial Sequence: Synthetic oligonucleotide
accguuucacucauggcug

SEQ ID NO: 658126 - RNA, 19 nt, Artificial Sequence
  Description of Artificial Sequence: Synthetic oligonucleotide
agcagaugaccguuucacu

SEQ ID NO: 658127 - RNA, 19 nt, Artificial Sequence
  Description of Artificial Sequence: Synthetic oligonucleotide
gggguugugguagaucugg

SEQ ID NO: 658128 - RNA, 19 nt, Artificial Sequence
  Description of Artificial Sequence: Synthetic oligonucleotide
cagaugaccguuucacuca

SEQ ID NO: 658129 - RNA, 19 nt, Artificial Sequence
  Description of Artificial Sequence: Synthetic oligonucleotide
uacuggguacauccccagc

SEQ ID NO: 658130 - RNA, 19 nt, Artificial Sequence
  Description of Artificial Sequence: Synthetic oligonucleotide
cuggccgacucaucuuugg

SEQ ID NO: 658131 - RNA, 19 nt, Artificial Sequence
  Description of Artificial Sequence: Synthetic oligonucleotide
gaccucagccaaucagcag

SEQ ID NO: 658132 - RNA, 19 nt, Artificial Sequence
  Description of Artificial Sequence: Synthetic oligonucleotide
ugcugggauaccucccucu

SEQ ID NO: 658133 - RNA, 19 nt, Artificial Sequence
  Description of Artificial Sequence: Synthetic oligonucleotide
aucgcuuauuggugucauc

SEQ ID NO: 658134 - RNA, 19 nt, Artificial Sequence
  Description of Artificial Sequence: Synthetic oligonucleotide
ugauaaccaccuccugguc

SEQ ID NO: 658135 - RNA, 19 nt, Artificial Sequence
  Description of Artificial Sequence: Synthetic oligonucleotide
cuggacgcggcugaaggcc

SEQ ID NO: 658136 - RNA, 19 nt, Artificial Sequence
  Description of Artificial Sequence: Synthetic oligonucleotide
guacagguucacucugggc

SEQ ID NO: 658137 - RNA, 19 nt, Artificial Sequence
  Description of Artificial Sequence: Synthetic oligonucleotide
acucuuggucaaguugagg

SEQ ID NO: 658138 - RNA, 19 nt, Artificial Sequence
  Description of Artificial Sequence: Synthetic oligonucleotide
uggagcagaugaccguuuc

SEQ ID NO: 658139 - RNA, 19 nt, Artificial Sequence
  Description of Artificial Sequence: Synthetic oligonucleotide
uccuucuccgggcaagcau

SEQ ID NO: 658140 - RNA, 19 nt, Artificial Sequence
  Description of Artificial Sequence: Synthetic oligonucleotide
ucuuuuccccucacgucau

SEQ ID NO: 658141 - RNA, 19 nt, Artificial Sequence
  Description of Artificial Sequence: Synthetic oligonucleotide
ccucacgucaucuucccag

SEQ ID NO: 658142 - RNA, 19 nt, Artificial Sequence
  Description of Artificial Sequence: Synthetic oligonucleotide
gcucuaguggguccugugg

SEQ ID NO: 658143 - RNA, 19 nt, Artificial Sequence
  Description of Artificial Sequence: Synthetic oligonucleotide
ggagacgcggcguuccagg

SEQ ID NO: 658144 - RNA, 19 nt, Artificial Sequence
  Description of Artificial Sequence: Synthetic oligonucleotide
caaugggacaggccuggag

SEQ ID NO: 658145 - RNA, 19 nt, Artificial Sequence
  Description of Artificial Sequence: Synthetic oligonucleotide
ggucuggacccugaaaucc

SEQ ID NO: 658146 - RNA, 19 nt, Artificial Sequence
  Description of Artificial Sequence: Synthetic oligonucleotide
agaaucugaguuccucaua

SEQ ID NO: 658147 - RNA, 19 nt, Artificial Sequence
  Description of Artificial Sequence: Synthetic oligonucleotide
guagaucuggacgcggcug

SEQ ID NO: 658148 - RNA, 19 nt, Artificial Sequence
  Description of Artificial Sequence: Synthetic oligonucleotide
ugauaccccggaugauggc

SEQ ID NO: 658149 - RNA, 19 nt, Artificial Sequence
  Description of Artificial Sequence: Synthetic oligonucleotide
ccaaauauauauauauacu

SEQ ID NO: 658150 - RNA, 19 nt, Artificial Sequence
  Description of Artificial Sequence: Synthetic oligonucleotide
acguugugcuguucuucuc

SEQ ID NO: 658151 - RNA, 19 nt, Artificial Sequence
  Description of Artificial Sequence: Synthetic oligonucleotide
uccuuccaaggccucuaga

SEQ ID NO: 658152 - RNA, 19 nt, Artificial Sequence
  Description of Artificial Sequence: Synthetic oligonucleotide
gaggccuuuucuguuguuc

SEQ ID NO: 658153 - RNA, 19 nt, Artificial Sequence
  Description of Artificial Sequence: Synthetic oligonucleotide
gaagaagggaaggcgaggu

SEQ ID NO: 658154 - RNA, 19 nt, Artificial Sequence
  Description of Artificial Sequence: Synthetic oligonucleotide
aguaugccuucugguguac

SEQ ID NO: 658155 - RNA, 19 nt, Artificial Sequence
  Description of Artificial Sequence: Synthetic oligonucleotide
gguacauccccagcagagg

SEQ ID NO: 658156 - RNA, 19 nt, Artificial Sequence
  Description of Artificial Sequence: Synthetic oligonucleotide
guuucacucauggcugcgc

SEQ ID NO: 658157 - RNA, 19 nt, Artificial Sequence
  Description of Artificial Sequence: Synthetic oligonucleotide
agaugaccguuucacucau

SEQ ID NO: 658158 - RNA, 19 nt, Artificial Sequence
  Description of Artificial Sequence: Synthetic oligonucleotide
ggaaucuuccaaguggaga

SEQ ID NO: 658159 - RNA, 19 nt, Artificial Sequence
  Description of Artificial Sequence: Synthetic oligonucleotide
auucagcgaaggcccaagu

SEQ ID NO: 658160 - RNA, 19 nt, Artificial Sequence
  Description of Artificial Sequence: Synthetic oligonucleotide
cuccaaugggacaggccug

SEQ ID NO: 658161 - RNA, 19 nt, Artificial Sequence
  Description of Artificial Sequence: Synthetic oligonucleotide
ucggggaguaugccuucug

SEQ ID NO: 658162 - RNA, 19 nt, Artificial Sequence
  Description of Artificial Sequence: Synthetic oligonucleotide
caccccaguuuaucaaaac

SEQ ID NO: 658163 - RNA, 19 nt, Artificial Sequence
  Description of Artificial Sequence: Synthetic oligonucleotide
cugggcggggacucggacc

SEQ ID NO: 658164 - RNA, 19 nt, Artificial Sequence
  Description of Artificial Sequence: Synthetic oligonucleotide
uuaaagcguuaaagugaau

SEQ ID NO: 658165 - RNA, 19 nt, Artificial Sequence
  Description of Artificial Sequence: Synthetic oligonucleotide
agaguccggcuuccugagg

SEQ ID NO: 658166 - RNA, 19 nt, Artificial Sequence
  Description of Artificial Sequence: Synthetic oligonucleotide
gagaaucugaguuccucau

SEQ ID NO: 658167 - RNA, 19 nt, Artificial Sequence
  Description of Artificial Sequence: Synthetic oligonucleotide
caagcauggcguucaucuc

SEQ ID NO: 658168 - RNA, 19 nt, Artificial Sequence
  Description of Artificial Sequence: Synthetic oligonucleotide
ccugcauuggagacgcggc

SEQ ID NO: 658169 - RNA, 19 nt, Artificial Sequence
  Description of Artificial Sequence: Synthetic oligonucleotide
gcugccgaaguugaggccc

SEQ ID NO: 658170 - RNA, 19 nt, Artificial Sequence
  Description of Artificial Sequence: Synthetic oligonucleotide
acagagagccaucgcuuau

SEQ ID NO: 658171 - RNA, 19 nt, Artificial Sequence
  Description of Artificial Sequence: Synthetic oligonucleotide
gucuaagaagcugaggcgu

SEQ ID NO: 658172 - RNA, 19 nt, Artificial Sequence
  Description of Artificial Sequence: Synthetic oligonucleotide
caaggcauuaaagcguuaa

SEQ ID NO: 658173 - RNA, 19 nt, Artificial Sequence
  Description of Artificial Sequence: Synthetic oligonucleotide
aaacucccacaccccaguu

SEQ ID NO: 658174 - RNA, 19 nt, Artificial Sequence
  Description of Artificial Sequence: Synthetic oligonucleotide
aguccggcuuccugaggag

SEQ ID NO: 658175 - RNA, 19 nt, Artificial Sequence
  Description of Artificial Sequence: Synthetic oligonucleotide
cugugaggcuuccuccuug

SEQ ID NO: 658176 - RNA, 19 nt, Artificial Sequence
  Description of Artificial Sequence: Synthetic oligonucleotide
gaguaugccuucuggugua

SEQ ID NO: 658177 - RNA, 19 nt, Artificial Sequence
  Description of Artificial Sequence: Synthetic oligonucleotide
ggguacauccccagcagag

SEQ ID NO: 658178 - RNA, 19 nt, Artificial Sequence
  Description of Artificial Sequence: Synthetic oligonucleotide
gcgccaggaagccacaccc

SEQ ID NO: 658179 - RNA, 19 nt, Artificial Sequence
  Description of Artificial Sequence: Synthetic oligonucleotide
caacucggaaggaguuggc

SEQ ID NO: 658180 - RNA, 19 nt, Artificial Sequence
  Description of Artificial Sequence: Synthetic oligonucleotide
gccggcugcaaacugugag

SEQ ID NO: 658181 - RNA, 19 nt, Artificial Sequence
  Description of Artificial Sequence: Synthetic oligonucleotide
uuauucagcgaaggcccaa

SEQ ID NO: 658182 - RNA, 19 nt, Artificial Sequence
  Description of Artificial Sequence: Synthetic oligonucleotide
gggaccucagccaaucagc

SEQ ID NO: 658183 - RNA, 19 nt, Artificial Sequence
  Description of Artificial Sequence: Synthetic oligonucleotide
uggaggaccgguucuucuu

SEQ ID NO: 658184 - RNA, 19 nt, Artificial Sequence
  Description of Artificial Sequence: Synthetic oligonucleotide
cauccccagcagaggaacc

SEQ ID NO: 658185 - RNA, 19 nt, Artificial Sequence
  Description of Artificial Sequence: Synthetic oligonucleotide
ugguguacucuuggucaag

SEQ ID NO: 658186 - RNA, 19 nt, Artificial Sequence
  Description of Artificial Sequence: Synthetic oligonucleotide
acccaaauauauauauaua

SEQ ID NO: 658187 - RNA, 19 nt, Artificial Sequence
  Description of Artificial Sequence: Synthetic oligonucleotide
ucugggcggggacucggac

SEQ ID NO: 658188 - RNA, 19 nt, Artificial Sequence
  Description of Artificial Sequence: Synthetic oligonucleotide
gugaaucgagaagaaggga

SEQ ID NO: 658189 - RNA, 19 nt, Artificial Sequence
  Description of Artificial Sequence: Synthetic oligonucleotide
uagcugccuccaaugggac

SEQ ID NO: 658190 - RNA, 19 nt, Artificial Sequence
  Description of Artificial Sequence: Synthetic oligonucleotide
ccaaguggagacagucggg

SEQ ID NO: 658191 - RNA, 19 nt, Artificial Sequence
  Description of Artificial Sequence: Synthetic oligonucleotide
gacggcagaggggaaggac

SEQ ID NO: 658192 - RNA, 19 nt, Artificial Sequence
  Description of Artificial Sequence: Synthetic oligonucleotide
cucggaggucgucacagca

SEQ ID NO: 658193 - RNA, 19 nt, Artificial Sequence
  Description of Artificial Sequence: Synthetic oligonucleotide
ggucccgccccguagaguc

SEQ ID NO: 658194 - RNA, 19 nt, Artificial Sequence
  Description of Artificial Sequence: Synthetic oligonucleotide
ggccguucugugcagacca

SEQ ID NO: 658195 - RNA, 19 nt, Artificial Sequence
  Description of Artificial Sequence: Synthetic oligonucleotide
uccggcaucuugcggccaa

SEQ ID NO: 658196 - RNA, 19 nt, Artificial Sequence
  Description of Artificial Sequence: Synthetic oligonucleotide
ggaguaugccuucuggugu

SEQ ID NO: 658197 - RNA, 19 nt, Artificial Sequence
  Description of Artificial Sequence: Synthetic oligonucleotide
ucccgggguggcagaaacc

SEQ ID NO: 658198 - RNA, 19 nt, Artificial Sequence
  Description of Artificial Sequence: Synthetic oligonucleotide
caucguaaagcaucacagu

SEQ ID NO: 658199 - RNA, 19 nt, Artificial Sequence
  Description of Artificial Sequence: Synthetic oligonucleotide
ucccgccccguagaguccg

SEQ ID NO: 658200 - RNA, 19 nt, Artificial Sequence
  Description of Artificial Sequence: Synthetic oligonucleotide
aaggcgagguucccuccuu

SEQ ID NO: 658201 - RNA, 19 nt, Artificial Sequence
  Description of Artificial Sequence: Synthetic oligonucleotide
uuuccccucacgucaucuu

SEQ ID NO: 658202 - RNA, 19 nt, Artificial Sequence
  Description of Artificial Sequence: Synthetic oligonucleotide
agacgcggcguuccaggug

SEQ ID NO: 658203 - RNA, 19 nt, Artificial Sequence
  Description of Artificial Sequence: Synthetic oligonucleotide
gucauggcgccaggaagcc

SEQ ID NO: 658204 - RNA, 19 nt, Artificial Sequence
  Description of Artificial Sequence: Synthetic oligonucleotide
cugugggguuacuggguac

SEQ ID NO: 658205 - RNA, 19 nt, Artificial Sequence
  Description of Artificial Sequence: Synthetic oligonucleotide
ggaggggccguucugugca

SEQ ID NO: 658206 - RNA, 19 nt, Artificial Sequence
  Description of Artificial Sequence: Synthetic oligonucleotide
ugucaucguaaagcaucac

SEQ ID NO: 658207 - RNA, 19 nt, Artificial Sequence
  Description of Artificial Sequence: Synthetic oligonucleotide
ucccuuacugugggguuac

SEQ ID NO: 658208 - RNA, 19 nt, Artificial Sequence
  Description of Artificial Sequence: Synthetic oligonucleotide
cuaguggguccugugguca

SEQ ID NO: 658209 - RNA, 19 nt, Artificial Sequence
  Description of Artificial Sequence: Synthetic oligonucleotide
guucacucugggcggggac

SEQ ID NO: 658210 - RNA, 19 nt, Artificial Sequence
  Description of Artificial Sequence: Synthetic oligonucleotide
uggagacgcggcguuccag

SEQ ID NO: 658211 - RNA, 19 nt, Artificial Sequence
  Description of Artificial Sequence: Synthetic oligonucleotide
uuggcaacguugugcuguu

SEQ ID NO: 658212 - RNA, 19 nt, Artificial Sequence
  Description of Artificial Sequence: Synthetic oligonucleotide
gggaguggccugauuauac

SEQ ID NO: 658213 - RNA, 19 nt, Artificial Sequence
  Description of Artificial Sequence: Synthetic oligonucleotide
cagaggaggacuucauccu

SEQ ID NO: 658214 - RNA, 19 nt, Artificial Sequence
  Description of Artificial Sequence: Synthetic oligonucleotide
cugaaauccuaacccaaau

SEQ ID NO: 658215 - RNA, 19 nt, Artificial Sequence
  Description of Artificial Sequence: Synthetic oligonucleotide
ucggaaggaguuggccgug

SEQ ID NO: 658216 - RNA, 19 nt, Artificial Sequence
  Description of Artificial Sequence: Synthetic oligonucleotide
ggauggcucuagugggucc

SEQ ID NO: 658217 - RNA, 19 nt, Artificial Sequence
  Description of Artificial Sequence: Synthetic oligonucleotide
ugaaggccugaggaccagu

SEQ ID NO: 658218 - RNA, 19 nt, Artificial Sequence
  Description of Artificial Sequence: Synthetic oligonucleotide
uaccccggaugauggcaca

SEQ ID NO: 658219 - RNA, 19 nt, Artificial Sequence
  Description of Artificial Sequence: Synthetic oligonucleotide
cguacagguucacucuggg

SEQ ID NO: 658220 - RNA, 19 nt, Artificial Sequence
  Description of Artificial Sequence: Synthetic oligonucleotide
gcgggaagugcagagagga

SEQ ID NO: 658221 - RNA, 19 nt, Artificial Sequence
  Description of Artificial Sequence: Synthetic oligonucleotide
ggcgagguucccuccuucc

SEQ ID NO: 658222 - RNA, 19 nt, Artificial Sequence
  Description of Artificial Sequence: Synthetic oligonucleotide
aucuugcggccaacaacuc

SEQ ID NO: 658223 - RNA, 19 nt, Artificial Sequence
  Description of Artificial Sequence: Synthetic oligonucleotide
gaugaccguuucacucaug

SEQ ID NO: 658224 - RNA, 19 nt, Artificial Sequence
  Description of Artificial Sequence: Synthetic oligonucleotide
gagcggcucgcccgcgggg

SEQ ID NO: 658225 - RNA, 19 nt, Artificial Sequence
  Description of Artificial Sequence: Synthetic oligonucleotide
cuuuuauagcugccuccaa

SEQ ID NO: 658226 - RNA, 19 nt, Artificial Sequence
  Description of Artificial Sequence: Synthetic oligonucleotide
guccuguggucaaggagac

SEQ ID NO: 658227 - RNA, 19 nt, Artificial Sequence
  Description of Artificial Sequence: Synthetic oligonucleotide
ccguacagguucacucugg

SEQ ID NO: 658228 - RNA, 19 nt, Artificial Sequence
  Description of Artificial Sequence: Synthetic oligonucleotide
ucgcgccacugauggaaga

SEQ ID NO: 658229 - RNA, 19 nt, Artificial Sequence
  Description of Artificial Sequence: Synthetic oligonucleotide
gaguggccugauuauacuu

SEQ ID NO: 658230 - RNA, 19 nt, Artificial Sequence
  Description of Artificial Sequence: Synthetic oligonucleotide
gaaggcgagguucccuccu

SEQ ID NO: 658231 - RNA, 19 nt, Artificial Sequence
  Description of Artificial Sequence: Synthetic oligonucleotide
ggaggaccgguucuucuuc

SEQ ID NO: 658232 - RNA, 19 nt, Artificial Sequence
  Description of Artificial Sequence: Synthetic oligonucleotide
cucuaguggguccuguggu

SEQ ID NO: 658233 - RNA, 19 nt, Artificial Sequence
  Description of Artificial Sequence: Synthetic oligonucleotide
ggccgugggguugugguag

SEQ ID NO: 658234 - RNA, 19 nt, Artificial Sequence
  Description of Artificial Sequence: Synthetic oligonucleotide
ugggguuacuggguacauc

SEQ ID NO: 658235 - RNA, 19 nt, Artificial Sequence
  Description of Artificial Sequence: Synthetic oligonucleotide
gaggggccguucugugcag

SEQ ID NO: 658236 - RNA, 19 nt, Artificial Sequence
  Description of Artificial Sequence: Synthetic oligonucleotide
ugccggcugcaaacuguga

SEQ ID NO: 658237 - RNA, 19 nt, Artificial Sequence
  Description of Artificial Sequence: Synthetic oligonucleotide
cagcgaaggcccaagucua

SEQ ID NO: 658238 - RNA, 19 nt, Artificial Sequence
  Description of Artificial Sequence: Synthetic oligonucleotide
aagaugggaguggccugau

SEQ ID NO: 658239 - RNA, 19 nt, Artificial Sequence
  Description of Artificial Sequence: Synthetic oligonucleotide
gucaucgcuggaacuguga

SEQ ID NO: 658240 - RNA, 19 nt, Artificial Sequence
  Description of Artificial Sequence: Synthetic oligonucleotide
caugccggcugcaaacugu

SEQ ID NO: 658241 - RNA, 19 nt, Artificial Sequence
  Description of Artificial Sequence: Synthetic oligonucleotide
ggcaacguugugcuguucu

SEQ ID NO: 658242 - RNA, 19 nt, Artificial Sequence
  Description of Artificial Sequence: Synthetic oligonucleotide
cccgcggcggccccgaugg

SEQ ID NO: 658243 - RNA, 19 nt, Artificial Sequence
  Description of Artificial Sequence: Synthetic oligonucleotide
cuccguacagguucacucu

SEQ ID NO: 658244 - RNA, 19 nt, Artificial Sequence
  Description of Artificial Sequence: Synthetic oligonucleotide
acuugauaccccggaugau

SEQ ID NO: 658245 - RNA, 19 nt, Artificial Sequence
  Description of Artificial Sequence: Synthetic oligonucleotide
gccaacagagagccaucgc

SEQ ID NO: 658246 - RNA, 19 nt, Artificial Sequence
  Description of Artificial Sequence: Synthetic oligonucleotide
ggcucuaguggguccugug

SEQ ID NO: 658247 - RNA, 19 nt, Artificial Sequence
  Description of Artificial Sequence: Synthetic oligonucleotide
caacagagagccaucgcuu

SEQ ID NO: 658248 - RNA, 19 nt, Artificial Sequence
  Description of Artificial Sequence: Synthetic oligonucleotide
ggacucggaccucuggcuc

SEQ ID NO: 658249 - RNA, 19 nt, Artificial Sequence
  Description of Artificial Sequence: Synthetic oligonucleotide
caccaacggggcccugugc

SEQ ID NO: 658250 - RNA, 19 nt, Artificial Sequence
  Description of Artificial Sequence: Synthetic oligonucleotide
cuuuuccccucacgucauc

SEQ ID NO: 658251 - RNA, 19 nt, Artificial Sequence
  Description of Artificial Sequence: Synthetic oligonucleotide
agguucacucugggcgggg

SEQ ID NO: 658252 - RNA, 19 nt, Artificial Sequence
  Description of Artificial Sequence: Synthetic oligonucleotide
gcguuaaagugaaucgaga

SEQ ID NO: 658253 - RNA, 19 nt, Artificial Sequence
  Description of Artificial Sequence: Synthetic oligonucleotide
ggucgucacagcagaggag

SEQ ID NO: 658254 - RNA, 19 nt, Artificial Sequence
  Description of Artificial Sequence: Synthetic oligonucleotide
acuggccgacucaucuuug

SEQ ID NO: 658255 - RNA, 19 nt, Artificial Sequence
  Description of Artificial Sequence: Synthetic oligonucleotide
cauuggagacgcggcguuc

SEQ ID NO: 658256 - RNA, 19 nt, Artificial Sequence
  Description of Artificial Sequence: Synthetic oligonucleotide
gcaggcgccaggcgggaag

SEQ ID NO: 658257 - RNA, 19 nt, Artificial Sequence
  Description of Artificial Sequence: Synthetic oligonucleotide
gaggaccgguucuucuucu

SEQ ID NO: 658258 - RNA, 19 nt, Artificial Sequence
  Description of Artificial Sequence: Synthetic oligonucleotide
ggaguuggccgugggguug

SEQ ID NO: 658259 - RNA, 19 nt, Artificial Sequence
  Description of Artificial Sequence: Synthetic oligonucleotide
aggaccgguucuucuucuu

SEQ ID NO: 658260 - RNA, 19 nt, Artificial Sequence
  Description of Artificial Sequence: Synthetic oligonucleotide
ccguuucacucauggcugc

SEQ ID NO: 658261 - RNA, 19 nt, Artificial Sequence
  Description of Artificial Sequence: Synthetic oligonucleotide
cuucugguguacucuuggu

SEQ ID NO: 658262 - RNA, 19 nt, Artificial Sequence
  Description of Artificial Sequence: Synthetic oligonucleotide
aacggggcccugugcugua

SEQ ID NO: 658263 - RNA, 19 nt, Artificial Sequence
  Description of Artificial Sequence: Synthetic oligonucleotide
uggcucuaguggguccugu

SEQ ID NO: 658264 - RNA, 19 nt, Artificial Sequence
  Description of Artificial Sequence: Synthetic oligonucleotide
ccaccagugcuucgacugc

SEQ ID NO: 658265 - RNA, 19 nt, Artificial Sequence
  Description of Artificial Sequence: Synthetic oligonucleotide
ggaguggccugauuauacu

SEQ ID NO: 658266 - RNA, 19 nt, Artificial Sequence
  Description of Artificial Sequence: Synthetic oligonucleotide
ggcaucuugcggccaacaa

SEQ ID NO: 658267 - RNA, 19 nt, Artificial Sequence
  Description of Artificial Sequence: Synthetic oligonucleotide
aagcaggcgccaggcggga

SEQ ID NO: 658268 - RNA, 19 nt, Artificial Sequence
  Description of Artificial Sequence: Synthetic oligonucleotide
gggagguguucccggggug

SEQ ID NO: 658269 - RNA, 19 nt, Artificial Sequence
  Description of Artificial Sequence: Synthetic oligonucleotide
gcgaaggcccaagucuaag

SEQ ID NO: 658270 - RNA, 19 nt, Artificial Sequence
  Description of Artificial Sequence: Synthetic oligonucleotide
gaggcccaccuccuuccaa

SEQ ID NO: 658271 - RNA, 19 nt, Artificial Sequence
  Description of Artificial Sequence: Synthetic oligonucleotide
ccgaugggaagugcagggg

SEQ ID NO: 658272 - RNA, 19 nt, Artificial Sequence
  Description of Artificial Sequence: Synthetic oligonucleotide
auggcucuaguggguccug

SEQ ID NO: 658273 - RNA, 19 nt, Artificial Sequence
  Description of Artificial Sequence: Synthetic oligonucleotide
ggggacggcagaggggaag

SEQ ID NO: 658274 - RNA, 19 nt, Artificial Sequence
  Description of Artificial Sequence: Synthetic oligonucleotide
gagacgcggcguuccaggu

SEQ ID NO: 658275 - RNA, 19 nt, Artificial Sequence
  Description of Artificial Sequence: Synthetic oligonucleotide
ccguucugugcagaccagg

SEQ ID NO: 658276 - RNA, 19 nt, Artificial Sequence
  Description of Artificial Sequence: Synthetic oligonucleotide
ccagaccuggcgggcaucg

SEQ ID NO: 658277 - RNA, 19 nt, Artificial Sequence
  Description of Artificial Sequence: Synthetic oligonucleotide
cacucugggcggggacucg

SEQ ID NO: 658278 - RNA, 19 nt, Artificial Sequence
  Description of Artificial Sequence: Synthetic oligonucleotide
gccaucgcuuauugguguc

SEQ ID NO: 658279 - RNA, 19 nt, Artificial Sequence
  Description of Artificial Sequence: Synthetic oligonucleotide
uccucagcuccuggacaaa

SEQ ID NO: 658280 - RNA, 19 nt, Artificial Sequence
  Description of Artificial Sequence: Synthetic oligonucleotide
cagucggggaguaugccuu

SEQ ID NO: 658281 - RNA, 19 nt, Artificial Sequence
  Description of Artificial Sequence: Synthetic oligonucleotide
agaucuggacgcggcugaa

SEQ ID NO: 658282 - RNA, 19 nt, Artificial Sequence
  Description of Artificial Sequence: Synthetic oligonucleotide
cggaagauuuauucagcga

SEQ ID NO: 658283 - RNA, 19 nt, Artificial Sequence
  Description of Artificial Sequence: Synthetic oligonucleotide
ggggccguucugugcagac

SEQ ID NO: 658284 - RNA, 19 nt, Artificial Sequence
  Description of Artificial Sequence: Synthetic oligonucleotide
agcgaaggcccaagucuaa

SEQ ID NO: 658285 - RNA, 19 nt, Artificial Sequence
  Description of Artificial Sequence: Synthetic oligonucleotide
uggcccggcuggagcagau

SEQ ID NO: 658286 - RNA, 19 nt, Artificial Sequence
  Description of Artificial Sequence: Synthetic oligonucleotide
gggacucggaccucuggcu

SEQ ID NO: 658287 - RNA, 19 nt, Artificial Sequence
  Description of Artificial Sequence: Synthetic oligonucleotide
gguguacucuuggucaagu

SEQ ID NO: 658288 - RNA, 19 nt, Artificial Sequence
  Description of Artificial Sequence: Synthetic oligonucleotide
cuggcuccucacuggccga

SEQ ID NO: 658289 - RNA, 19 nt, Artificial Sequence
  Description of Artificial Sequence: Synthetic oligonucleotide
ccaacggggcccugugcug

SEQ ID NO: 658290 - RNA, 19 nt, Artificial Sequence
  Description of Artificial Sequence: Synthetic oligonucleotide
ugccgaaguugaggcccca

SEQ ID NO: 658291 - RNA, 19 nt, Artificial Sequence
  Description of Artificial Sequence: Synthetic oligonucleotide
uggcgccaggaagccacac

SEQ ID NO: 658292 - RNA, 19 nt, Artificial Sequence
  Description of Artificial Sequence: Synthetic oligonucleotide
gccccgaugggaagugcag

SEQ ID NO: 658293 - RNA, 19 nt, Artificial Sequence
  Description of Artificial Sequence: Synthetic oligonucleotide
ccaaccuguguggcuuucc

SEQ ID NO: 658294 - RNA, 19 nt, Artificial Sequence
  Description of Artificial Sequence: Synthetic oligonucleotide
ggggucccgccccguagag

SEQ ID NO: 658295 - RNA, 19 nt, Artificial Sequence
  Description of Artificial Sequence: Synthetic oligonucleotide
gccuccaaugggacaggcc

SEQ ID NO: 658296 - RNA, 19 nt, Artificial Sequence
  Description of Artificial Sequence: Synthetic oligonucleotide
caggcgggaagugcagaga

SEQ ID NO: 658297 - RNA, 19 nt, Artificial Sequence
  Description of Artificial Sequence: Synthetic oligonucleotide
cuucccuuacugugggguu

SEQ ID NO: 658298 - RNA, 19 nt, Artificial Sequence
  Description of Artificial Sequence: Synthetic oligonucleotide
cguuucacucauggcugcg

SEQ ID NO: 658299 - RNA, 19 nt, Artificial Sequence
  Description of Artificial Sequence: Synthetic oligonucleotide
ccaugccggcugcaaacug

SEQ ID NO: 658300 - RNA, 19 nt, Artificial Sequence
  Description of Artificial Sequence: Synthetic oligonucleotide
ccugaggaccagugccaac

SEQ ID NO: 658301 - RNA, 19 nt, Artificial Sequence
  Description of Artificial Sequence: Synthetic oligonucleotide
cucugggcggggacucgga

SEQ ID NO: 658302 - RNA, 19 nt, Artificial Sequence
  Description of Artificial Sequence: Synthetic oligonucleotide
cacuggccgacucaucuuu

SEQ ID NO: 658303 - RNA, 19 nt, Artificial Sequence
  Description of Artificial Sequence: Synthetic oligonucleotide
cgaaggcccaagucuaaga

SEQ ID NO: 658304 - RNA, 19 nt, Artificial Sequence
  Description of Artificial Sequence: Synthetic oligonucleotide
ccacaccccaguuuaucaa

SEQ ID NO: 658305 - RNA, 19 nt, Artificial Sequence
  Description of Artificial Sequence: Synthetic oligonucleotide
ccaccaacggggcccugug

SEQ ID NO: 658306 - RNA, 19 nt, Artificial Sequence
  Description of Artificial Sequence: Synthetic oligonucleotide
acggggcccugugcuguag

SEQ ID NO: 658307 - RNA, 19 nt, Artificial Sequence
  Description of Artificial Sequence: Synthetic oligonucleotide
aggggccguucugugcaga

SEQ ID NO: 658308 - RNA, 19 nt, Artificial Sequence
  Description of Artificial Sequence: Synthetic oligonucleotide
ccccaaacccaaauauaua

SEQ ID NO: 658309 - RNA, 19 nt, Artificial Sequence
  Description of Artificial Sequence: Synthetic oligonucleotide
ggagccacgggaggcccac

SEQ ID NO: 658310 - RNA, 19 nt, Artificial Sequence
  Description of Artificial Sequence: Synthetic oligonucleotide
guaugccuucugguguacu

SEQ ID NO: 658311 - RNA, 19 nt, Artificial Sequence
  Description of Artificial Sequence: Synthetic oligonucleotide
caucgcuuauuggugucau

SEQ ID NO: 658312 - RNA, 19 nt, Artificial Sequence
  Description of Artificial Sequence: Synthetic oligonucleotide
ggcggagguccuggagggg

SEQ ID NO: 658313 - RNA, 19 nt, Artificial Sequence
  Description of Artificial Sequence: Synthetic oligonucleotide
ggccccgaugggaagugca

SEQ ID NO: 658314 - RNA, 19 nt, Artificial Sequence
  Description of Artificial Sequence: Synthetic oligonucleotide
gucccgccccguagagucc

SEQ ID NO: 658315 - RNA, 19 nt, Artificial Sequence
  Description of Artificial Sequence: Synthetic oligonucleotide
cggaggucgucacagcaga

SEQ ID NO: 658316 - RNA, 19 nt, Artificial Sequence
  Description of Artificial Sequence: Synthetic oligonucleotide
cccguagaguccggcuucc

SEQ ID NO: 658317 - RNA, 19 nt, Artificial Sequence
  Description of Artificial Sequence: Synthetic oligonucleotide
gggauaccucccucuuuua

SEQ ID NO: 658318 - RNA, 19 nt, Artificial Sequence
  Description of Artificial Sequence: Synthetic oligonucleotide
gccguucugugcagaccag

SEQ ID NO: 658319 - RNA, 19 nt, Artificial Sequence
  Description of Artificial Sequence: Synthetic oligonucleotide
ccuucccuuacuguggggu

SEQ ID NO: 658320 - RNA, 19 nt, Artificial Sequence
  Description of Artificial Sequence: Synthetic oligonucleotide
ccccaaggggacggcagag

SEQ ID NO: 658321 - RNA, 19 nt, Artificial Sequence
  Description of Artificial Sequence: Synthetic oligonucleotide
ggcugcaaacugugaggcu

SEQ ID NO: 658322 - RNA, 19 nt, Artificial Sequence
  Description of Artificial Sequence: Synthetic oligonucleotide
ggaggcccaccuccuucca

SEQ ID NO: 658323 - RNA, 19 nt, Artificial Sequence
  Description of Artificial Sequence: Synthetic oligonucleotide
ccaucgcuuauugguguca

SEQ ID NO: 658324 - RNA, 19 nt, Artificial Sequence
  Description of Artificial Sequence: Synthetic oligonucleotide
caacggggcccugugcugu

SEQ ID NO: 658325 - RNA, 19 nt, Artificial Sequence
  Description of Artificial Sequence: Synthetic oligonucleotide
cuucgacugcccucagcuu

SEQ ID NO: 658326 - RNA, 19 nt, Artificial Sequence
  Description of Artificial Sequence: Synthetic oligonucleotide
cugggauaccucccucuuu

SEQ ID NO: 658327 - RNA, 19 nt, Artificial Sequence
  Description of Artificial Sequence: Synthetic oligonucleotide
aggcgccaggcgggaagug

SEQ ID NO: 658328 - RNA, 19 nt, Artificial Sequence
  Description of Artificial Sequence: Synthetic oligonucleotide
gcgagguucccuccuuccu

SEQ ID NO: 658329 - RNA, 19 nt, Artificial Sequence
  Description of Artificial Sequence: Synthetic oligonucleotide
gcgccaggcgggaagugca

SEQ ID NO: 658330 - RNA, 19 nt, Artificial Sequence
  Description of Artificial Sequence: Synthetic oligonucleotide
gcugggauaccucccucuu

SEQ ID NO: 658331 - RNA, 19 nt, Artificial Sequence
  Description of Artificial Sequence: Synthetic oligonucleotide
cgagcggcucgcccgcggg

SEQ ID NO: 658332 - RNA, 19 nt, Artificial Sequence
  Description of Artificial Sequence: Synthetic oligonucleotide
cccucuuuuauagcugccu

SEQ ID NO: 658333 - RNA, 19 nt, Artificial Sequence
  Description of Artificial Sequence: Synthetic oligonucleotide
guggcccggcuggagcaga

SEQ ID NO: 658334 - RNA, 19 nt, Artificial Sequence
  Description of Artificial Sequence: Synthetic oligonucleotide
gcauuggagacgcggcguu

SEQ ID NO: 658335 - RNA, 19 nt, Artificial Sequence
  Description of Artificial Sequence: Synthetic oligonucleotide
ggcccaagucuaagaagcu

SEQ ID NO: 658336 - RNA, 19 nt, Artificial Sequence
  Description of Artificial Sequence: Synthetic oligonucleotide
gugggguuacuggguacau

SEQ ID NO: 658337 - RNA, 19 nt, Artificial Sequence
  Description of Artificial Sequence: Synthetic oligonucleotide
gccgugggguugugguaga

SEQ ID NO: 658338 - RNA, 19 nt, Artificial Sequence
  Description of Artificial Sequence: Synthetic oligonucleotide
cagggucuccguacagguu

SEQ ID NO: 658339 - RNA, 19 nt, Artificial Sequence
  Description of Artificial Sequence: Synthetic oligonucleotide
gcggccccgaugggaagug

SEQ ID NO: 658340 - RNA, 19 nt, Artificial Sequence
  Description of Artificial Sequence: Synthetic oligonucleotide
cgggcaagcauggcguuca

SEQ ID NO: 658341 - RNA, 19 nt, Artificial Sequence
  Description of Artificial Sequence: Synthetic oligonucleotide
cgcgcugggcgggcgagcg

SEQ ID NO: 658342 - RNA, 19 nt, Artificial Sequence
  Description of Artificial Sequence: Synthetic oligonucleotide
guccggcaucuugcggcca

SEQ ID NO: 658343 - RNA, 19 nt, Artificial Sequence
  Description of Artificial Sequence: Synthetic oligonucleotide
cgcuuauuggugucaucgu

SEQ ID NO: 658344 - RNA, 19 nt, Artificial Sequence
  Description of Artificial Sequence: Synthetic oligonucleotide
ccaaggcauuaaagcguua

SEQ ID NO: 658345 - RNA, 19 nt, Artificial Sequence
  Description of Artificial Sequence: Synthetic oligonucleotide
cucgcccgcggggagggcu

SEQ ID NO: 658346 - RNA, 19 nt, Artificial Sequence
  Description of Artificial Sequence: Synthetic oligonucleotide
caggcgccaggcgggaagu

SEQ ID NO: 658347 - RNA, 19 nt, Artificial Sequence
  Description of Artificial Sequence: Synthetic oligonucleotide
cccucacgucaucuuccca

SEQ ID NO: 658348 - RNA, 19 nt, Artificial Sequence
  Description of Artificial Sequence: Synthetic oligonucleotide
cucggaccucuggcuccuc

SEQ ID NO: 658349 - RNA, 19 nt, Artificial Sequence
  Description of Artificial Sequence: Synthetic oligonucleotide
cccgcggggagggcucccg

SEQ ID NO: 658350 - RNA, 19 nt, Artificial Sequence
  Description of Artificial Sequence: Synthetic oligonucleotide
cccgccccguagaguccgg

SEQ ID NO: 658351 - RNA, 19 nt, Artificial Sequence
  Description of Artificial Sequence: Synthetic oligonucleotide
acgcggcguuccaggugcu

SEQ ID NO: 658352 - RNA, 19 nt, Artificial Sequence
  Description of Artificial Sequence: Synthetic oligonucleotide
ccggcaucuugcggccaac

SEQ ID NO: 658353 - RNA, 19 nt, Artificial Sequence
  Description of Artificial Sequence: Synthetic oligonucleotide
ggaggccuuuucuguuguu

SEQ ID NO: 658354 - RNA, 19 nt, Artificial Sequence
  Description of Artificial Sequence: Synthetic oligonucleotide
ggggccggcuccagguucu

SEQ ID NO: 658355 - RNA, 19 nt, Artificial Sequence
  Description of Artificial Sequence: Synthetic oligonucleotide
ccgccccguagaguccggc

SEQ ID NO: 658356 - RNA, 19 nt, Artificial Sequence
  Description of Artificial Sequence: Synthetic oligonucleotide
ccaaugggacaggccugga

SEQ ID NO: 658357 - RNA, 19 nt, Artificial Sequence
  Description of Artificial Sequence: Synthetic oligonucleotide
ggagacagucggggaguau

SEQ ID NO: 658358 - RNA, 19 nt, Artificial Sequence
  Description of Artificial Sequence: Synthetic oligonucleotide
gggugcggggccggcucca

SEQ ID NO: 658359 - RNA, 19 nt, Artificial Sequence
  Description of Artificial Sequence: Synthetic oligonucleotide
ggcgggcgagcggcucgcc

SEQ ID NO: 658360 - RNA, 19 nt, Artificial Sequence
  Description of Artificial Sequence: Synthetic oligonucleotide
cggggucccgccccguaga

SEQ ID NO: 658361 - RNA, 19 nt, Artificial Sequence
  Description of Artificial Sequence: Synthetic oligonucleotide
ccccaccagugcuucgacu

SEQ ID NO: 658362 - RNA, 19 nt, Artificial Sequence
  Description of Artificial Sequence: Synthetic oligonucleotide
gcgcgcugggcgggcgagc

SEQ ID NO: 658363 - RNA, 19 nt, Artificial Sequence
  Description of Artificial Sequence: Synthetic oligonucleotide
gggucccgccccguagagu

SEQ ID NO: 658364 - RNA, 19 nt, Artificial Sequence
  Description of Artificial Sequence: Synthetic oligonucleotide
cgggcaucgcgccacugau

SEQ ID NO: 658365 - RNA, 19 nt, Artificial Sequence
  Description of Artificial Sequence: Synthetic oligonucleotide
cggccccgaugggaagugc

SEQ ID NO: 658366 - RNA, 19 nt, Artificial Sequence
  Description of Artificial Sequence: Synthetic oligonucleotide
ccgcggcggccccgauggg

SEQ ID NO: 658367 - RNA, 19 nt, Artificial Sequence
  Description of Artificial Sequence: Synthetic oligonucleotide
gcccgcggggagggcuccc

SEQ ID NO: 658368 - RNA, 19 nt, Artificial Sequence
  Description of Artificial Sequence: Synthetic oligonucleotide
cgcgccacugauggaagau

SEQ ID NO: 658369 - RNA, 19 nt, Artificial Sequence
  Description of Artificial Sequence: Synthetic oligonucleotide
gcucgcccgcggggagggc

SEQ ID NO: 658370 - RNA, 19 nt, Artificial Sequence
  Description of Artificial Sequence: Synthetic oligonucleotide
gggcggggacucggaccuc

SEQ ID NO: 658371 - RNA, 19 nt, Artificial Sequence
  Description of Artificial Sequence: Synthetic oligonucleotide
ggugggccucggaggucgu

SEQ ID NO: 658372 - RNA, 19 nt, Artificial Sequence
  Description of Artificial Sequence: Synthetic oligonucleotide
ccccaaccuguguggcuuu

SEQ ID NO: 658373 - RNA, 19 nt, Artificial Sequence
  Description of Artificial Sequence: Synthetic oligonucleotide
ccguagaguccggcuuccu

SEQ ID NO: 658374 - RNA, 19 nt, Artificial Sequence
  Description of Artificial Sequence: Synthetic oligonucleotide
ccccaccaacggggcccug

SEQ ID NO: 658375 - RNA, 19 nt, Artificial Sequence
  Description of Artificial Sequence: Synthetic oligonucleotide
aauuauuugccauccaucc

SEQ ID NO: 658376 - RNA, 19 nt, Artificial Sequence
  Description of Artificial Sequence: Synthetic oligonucleotide
uguaguauuauuuaagacc

SEQ ID NO: 658377 - RNA, 19 nt, Artificial Sequence
  Description of Artificial Sequence: Synthetic oligonucleotide
uacuuaauaagagagacag

SEQ ID NO: 658378 - RNA, 19 nt, Artificial Sequence
  Description of Artificial Sequence: Synthetic oligonucleotide
uuuacugagagagaaaccc

SEQ ID NO: 658379 - RNA, 19 nt, Artificial Sequence
  Description of Artificial Sequence: Synthetic oligonucleotide
uauacaauuaguaaccuuu

SEQ ID NO: 658380 - RNA, 19 nt, Artificial Sequence
  Description of Artificial Sequence: Synthetic oligonucleotide
uuuacuuaauaagagagac

SEQ ID NO: 658381 - RNA, 19 nt, Artificial Sequence
  Description of Artificial Sequence: Synthetic oligonucleotide
caaaaguguacauaugucc

SEQ ID NO: 658382 - RNA, 19 nt, Artificial Sequence
  Description of Artificial Sequence: Synthetic oligonucleotide
auuuuacugagagagaaac

SEQ ID NO: 658383 - RNA, 19 nt, Artificial Sequence
  Description of Artificial Sequence: Synthetic oligonucleotide
aaucacaugaaagagggga

SEQ ID NO: 658384 - RNA, 19 nt, Artificial Sequence
  Description of Artificial Sequence: Synthetic oligonucleotide
uuuaaagcgagagagguga

SEQ ID NO: 658385 - RNA, 19 nt, Artificial Sequence
  Description of Artificial Sequence: Synthetic oligonucleotide
ucauuaaggagagcgaugg

SEQ ID NO: 658386 - RNA, 19 nt, Artificial Sequence
  Description of Artificial Sequence: Synthetic oligonucleotide
ucacauaguucuucgaggg

SEQ ID NO: 658387 - RNA, 19 nt, Artificial Sequence
  Description of Artificial Sequence: Synthetic oligonucleotide
ucauauagauuccuggcug

SEQ ID NO: 658388 - RNA, 19 nt, Artificial Sequence
  Description of Artificial Sequence: Synthetic oligonucleotide
ugaacaucgacaagaaaga

SEQ ID NO: 658389 - RNA, 19 nt, Artificial Sequence
  Description of Artificial Sequence: Synthetic oligonucleotide
uuuuacuuaauaagagaga

SEQ ID NO: 658390 - RNA, 19 nt, Artificial Sequence
  Description of Artificial Sequence: Synthetic oligonucleotide
aacaucgacaagaaagaac

SEQ ID NO: 658391 - RNA, 19 nt, Artificial Sequence
  Description of Artificial Sequence: Synthetic oligonucleotide
aguauuauuuaagaccagg

SEQ ID NO: 658392 - RNA, 19 nt, Artificial Sequence
  Description of Artificial Sequence: Synthetic oligonucleotide
guucccuccaucuauaccc

SEQ ID NO: 658393 - RNA, 19 nt, Artificial Sequence
  Description of Artificial Sequence: Synthetic oligonucleotide
uuaauaagagagacaggcc

SEQ ID NO: 658394 - RNA, 19 nt, Artificial Sequence
  Description of Artificial Sequence: Synthetic oligonucleotide
aauagcuuacaaacuuacc

SEQ ID NO: 658395 - RNA, 19 nt, Artificial Sequence
  Description of Artificial Sequence: Synthetic oligonucleotide
aaacuuaccacuauuacuu

SEQ ID NO: 658396 - RNA, 19 nt, Artificial Sequence
  Description of Artificial Sequence: Synthetic oligonucleotide
ucgacaagaaagaacagau

SEQ ID NO: 658397 - RNA, 19 nt, Artificial Sequence
  Description of Artificial Sequence: Synthetic oligonucleotide
uccaucuauacccaagucu

SEQ ID NO: 658398 - RNA, 19 nt, Artificial Sequence
  Description of Artificial Sequence: Synthetic oligonucleotide
uuuaagaccaggcuugaau

SEQ ID NO: 658399 - RNA, 19 nt, Artificial Sequence
  Description of Artificial Sequence: Synthetic oligonucleotide
auagggaucaacccacagg

SEQ ID NO: 658400 - RNA, 19 nt, Artificial Sequence
  Description of Artificial Sequence: Synthetic oligonucleotide
gaagcgauuccucauuaag

SEQ ID NO: 658401 - RNA, 19 nt, Artificial Sequence
  Description of Artificial Sequence: Synthetic oligonucleotide
uucauauagauuccuggcu

SEQ ID NO: 658402 - RNA, 19 nt, Artificial Sequence
  Description of Artificial Sequence: Synthetic oligonucleotide
uucaguuugagagacucag

SEQ ID NO: 658403 - RNA, 19 nt, Artificial Sequence
  Description of Artificial Sequence: Synthetic oligonucleotide
guaguauuauuuaagacca

SEQ ID NO: 658404 - RNA, 19 nt, Artificial Sequence
  Description of Artificial Sequence: Synthetic oligonucleotide
uuaaggagagcgaugggcu

SEQ ID NO: 658405 - RNA, 19 nt, Artificial Sequence
  Description of Artificial Sequence: Synthetic oligonucleotide
aagaccaggcuugaaugcc

SEQ ID NO: 658406 - RNA, 19 nt, Artificial Sequence
  Description of Artificial Sequence: Synthetic oligonucleotide
gaaaugggaugccauggcg

SEQ ID NO: 658407 - RNA, 19 nt, Artificial Sequence
  Description of Artificial Sequence: Synthetic oligonucleotide
acagaucucagcaugagag

SEQ ID NO: 658408 - RNA, 19 nt, Artificial Sequence
  Description of Artificial Sequence: Synthetic oligonucleotide
aauagcaccuuugagugga

SEQ ID NO: 658409 - RNA, 19 nt, Artificial Sequence
  Description of Artificial Sequence: Synthetic oligonucleotide
ccagaguuaacuuuaaagc

SEQ ID NO: 658410 - RNA, 19 nt, Artificial Sequence
  Description of Artificial Sequence: Synthetic oligonucleotide
uuuuacugagagagaaacc

SEQ ID NO: 658411 - RNA, 19 nt, Artificial Sequence
  Description of Artificial Sequence: Synthetic oligonucleotide
uauuuagcuggagacagcc

SEQ ID NO: 658412 - RNA, 19 nt, Artificial Sequence
  Description of Artificial Sequence: Synthetic oligonucleotide
uuuagcuggagacagccau

SEQ ID NO: 658413 - RNA, 19 nt, Artificial Sequence
  Description of Artificial Sequence: Synthetic oligonucleotide
aaaugggaugccauggcgg

SEQ ID NO: 658414 - RNA, 19 nt, Artificial Sequence
  Description of Artificial Sequence: Synthetic oligonucleotide
aaauagcaccuuugagugg

SEQ ID NO: 658415 - RNA, 19 nt, Artificial Sequence
  Description of Artificial Sequence: Synthetic oligonucleotide
aagcgauuccucauuaagg

SEQ ID NO: 658416 - RNA, 19 nt, Artificial Sequence
  Description of Artificial Sequence: Synthetic oligonucleotide
uagcuuacaaacuuaccac

SEQ ID NO: 658417 - RNA, 19 nt, Artificial Sequence
  Description of Artificial Sequence: Synthetic oligonucleotide
uuacuuaauaagagagaca

SEQ ID NO: 658418 - RNA, 19 nt, Artificial Sequence
  Description of Artificial Sequence: Synthetic oligonucleotide
uauugcacagugauugaga

SEQ ID NO: 658419 - RNA, 19 nt, Artificial Sequence
  Description of Artificial Sequence: Synthetic oligonucleotide
gaggaguuaagaaauccag

SEQ ID NO: 658420 - RNA, 19 nt, Artificial Sequence
  Description of Artificial Sequence: Synthetic oligonucleotide
agaguguuuggaaaauagc

SEQ ID NO: 658421 - RNA, 19 nt, Artificial Sequence
  Description of Artificial Sequence: Synthetic oligonucleotide
cauucggacuuucaugugg

SEQ ID NO: 658422 - RNA, 19 nt, Artificial Sequence
  Description of Artificial Sequence: Synthetic oligonucleotide
gaguguuuggaaaauagca

SEQ ID NO: 658423 - RNA, 19 nt, Artificial Sequence
  Description of Artificial Sequence: Synthetic oligonucleotide
agcgauuccucauuaagga

SEQ ID NO: 658424 - RNA, 19 nt, Artificial Sequence
  Description of Artificial Sequence: Synthetic oligonucleotide
caucacauaguucuucgag

SEQ ID NO: 658425 - RNA, 19 nt, Artificial Sequence
  Description of Artificial Sequence: Synthetic oligonucleotide
uaggccaauccccaaacca

SEQ ID NO: 658426 - RNA, 19 nt, Artificial Sequence
  Description of Artificial Sequence: Synthetic oligonucleotide
aaugggaugccauggcggu

SEQ ID NO: 658427 - RNA, 19 nt, Artificial Sequence
  Description of Artificial Sequence: Synthetic oligonucleotide
ugaguggaaacugaggagu

SEQ ID NO: 658428 - RNA, 19 nt, Artificial Sequence
  Description of Artificial Sequence: Synthetic oligonucleotide
gacccaaucacaugaaaga

SEQ ID NO: 658429 - RNA, 19 nt, Artificial Sequence
  Description of Artificial Sequence: Synthetic oligonucleotide
acaaaaguguacauauguc

SEQ ID NO: 658430 - RNA, 19 nt, Artificial Sequence
  Description of Artificial Sequence: Synthetic oligonucleotide
uuugcggacaagacaugag

SEQ ID NO: 658431 - RNA, 19 nt, Artificial Sequence
  Description of Artificial Sequence: Synthetic oligonucleotide
cuccuauuuagcuggagac

SEQ ID NO: 658432 - RNA, 19 nt, Artificial Sequence
  Description of Artificial Sequence: Synthetic oligonucleotide
gagacaagauuucaagaga

SEQ ID NO: 658433 - RNA, 19 nt, Artificial Sequence
  Description of Artificial Sequence: Synthetic oligonucleotide
ucuaggcaaacacuggcuc

SEQ ID NO: 658434 - RNA, 19 nt, Artificial Sequence
  Description of Artificial Sequence: Synthetic oligonucleotide
acauauguccauaagcugu

SEQ ID NO: 658435 - RNA, 19 nt, Artificial Sequence
  Description of Artificial Sequence: Synthetic oligonucleotide
ucuauacccaagucuuugc

SEQ ID NO: 658436 - RNA, 19 nt, Artificial Sequence
  Description of Artificial Sequence: Synthetic oligonucleotide
ucuaaagaggcagggaccu

SEQ ID NO: 658437 - RNA, 19 nt, Artificial Sequence
  Description of Artificial Sequence: Synthetic oligonucleotide
aguccauaacaguauauau

SEQ ID NO: 658438 - RNA, 19 nt, Artificial Sequence
  Description of Artificial Sequence: Synthetic oligonucleotide
uugcggacaagacaugaga

SEQ ID NO: 658439 - RNA, 19 nt, Artificial Sequence
  Description of Artificial Sequence: Synthetic oligonucleotide
cuugcuaaugauggggucc

SEQ ID NO: 658440 - RNA, 19 nt, Artificial Sequence
  Description of Artificial Sequence: Synthetic oligonucleotide
caugaaagaggggagcggg

SEQ ID NO: 658441 - RNA, 19 nt, Artificial Sequence
  Description of Artificial Sequence: Synthetic oligonucleotide
agcuuacaaacuuaccacu

SEQ ID NO: 658442 - RNA, 19 nt, Artificial Sequence
  Description of Artificial Sequence: Synthetic oligonucleotide
gagacucaggucuucugag

SEQ ID NO: 658443 - RNA, 19 nt, Artificial Sequence
  Description of Artificial Sequence: Synthetic oligonucleotide
ugaguaagagaggaaccag

SEQ ID NO: 658444 - RNA, 19 nt, Artificial Sequence
  Description of Artificial Sequence: Synthetic oligonucleotide
ucaccgauucgguaggaca

SEQ ID NO: 658445 - RNA, 19 nt, Artificial Sequence
  Description of Artificial Sequence: Synthetic oligonucleotide
aauccccuuuuaccuuggc

SEQ ID NO: 658446 - RNA, 19 nt, Artificial Sequence
  Description of Artificial Sequence: Synthetic oligonucleotide
aggaguuaagaaauccagg

SEQ ID NO: 658447 - RNA, 19 nt, Artificial Sequence
  Description of Artificial Sequence: Synthetic oligonucleotide
agaauccccuuuuaccuug

SEQ ID NO: 658448 - RNA, 19 nt, Artificial Sequence
  Description of Artificial Sequence: Synthetic oligonucleotide
ugggcugacucuaucuagc

SEQ ID NO: 658449 - RNA, 19 nt, Artificial Sequence
  Description of Artificial Sequence: Synthetic oligonucleotide
cagguugagguauacggug

SEQ ID NO: 658450 - RNA, 19 nt, Artificial Sequence
  Description of Artificial Sequence: Synthetic oligonucleotide
uaguauuauuuaagaccag

SEQ ID NO: 658451 - RNA, 19 nt, Artificial Sequence
  Description of Artificial Sequence: Synthetic oligonucleotide
cccagaguuaacuuuaaag

SEQ ID NO: 658452 - RNA, 19 nt, Artificial Sequence
  Description of Artificial Sequence: Synthetic oligonucleotide
ugcggacaagacaugagaa

SEQ ID NO: 658453 - RNA, 19 nt, Artificial Sequence
  Description of Artificial Sequence: Synthetic oligonucleotide
uguugucacggcagcauga

SEQ ID NO: 658454 - RNA, 19 nt, Artificial Sequence
  Description of Artificial Sequence: Synthetic oligonucleotide
uccucaccgauucgguagg

SEQ ID NO: 658455 - RNA, 19 nt, Artificial Sequence
  Description of Artificial Sequence: Synthetic oligonucleotide
ugagguauacgguggccug

SEQ ID NO: 658456 - RNA, 19 nt, Artificial Sequence
  Description of Artificial Sequence: Synthetic oligonucleotide
ugcuaaccuuccuugcucc

SEQ ID NO: 658457 - RNA, 19 nt, Artificial Sequence
  Description of Artificial Sequence: Synthetic oligonucleotide
cauggcgguggaaaugggg

SEQ ID NO: 658458 - RNA, 19 nt, Artificial Sequence
  Description of Artificial Sequence: Synthetic oligonucleotide
aucgacaagaaagaacaga

SEQ ID NO: 658459 - RNA, 19 nt, Artificial Sequence
  Description of Artificial Sequence: Synthetic oligonucleotide
uugagccaccucucaaagg

SEQ ID NO: 658460 - RNA, 19 nt, Artificial Sequence
  Description of Artificial Sequence: Synthetic oligonucleotide
aguaaccuuugucuuuucu

SEQ ID NO: 658461 - RNA, 19 nt, Artificial Sequence
  Description of Artificial Sequence: Synthetic oligonucleotide
agaucucagcaugagagca

SEQ ID NO: 658462 - RNA, 19 nt, Artificial Sequence
  Description of Artificial Sequence: Synthetic oligonucleotide
gagaggugaagccgccugg

SEQ ID NO: 658463 - RNA, 19 nt, Artificial Sequence
  Description of Artificial Sequence: Synthetic oligonucleotide
ucccaaaauuccauugcaa

SEQ ID NO: 658464 - RNA, 19 nt, Artificial Sequence
  Description of Artificial Sequence: Synthetic oligonucleotide
aaaggcaccuggggaggcc

SEQ ID NO: 658465 - RNA, 19 nt, Artificial Sequence
  Description of Artificial Sequence: Synthetic oligonucleotide
acccaaucacaugaaagag

SEQ ID NO: 658466 - RNA, 19 nt, Artificial Sequence
  Description of Artificial Sequence: Synthetic oligonucleotide
caccuugcuaaugaugggg

SEQ ID NO: 658467 - RNA, 19 nt, Artificial Sequence
  Description of Artificial Sequence: Synthetic oligonucleotide
auauagauuccuggcuggg

SEQ ID NO: 658468 - RNA, 19 nt, Artificial Sequence
  Description of Artificial Sequence: Synthetic oligonucleotide
uaaagcgagagaggugaag

SEQ ID NO: 658469 - RNA, 19 nt, Artificial Sequence
  Description of Artificial Sequence: Synthetic oligonucleotide
aagaauccccuuuuaccuu

SEQ ID NO: 658470 - RNA, 19 nt, Artificial Sequence
  Description of Artificial Sequence: Synthetic oligonucleotide
uugcuaaccuuccuugcuc

SEQ ID NO: 658471 - RNA, 19 nt, Artificial Sequence
  Description of Artificial Sequence: Synthetic oligonucleotide
caguugcuaaccuuccuug

SEQ ID NO: 658472 - RNA, 19 nt, Artificial Sequence
  Description of Artificial Sequence: Synthetic oligonucleotide
agagcgaugggcugacucu

SEQ ID NO: 658473 - RNA, 19 nt, Artificial Sequence
  Description of Artificial Sequence: Synthetic oligonucleotide
auacaauuaguaaccuuug

SEQ ID NO: 658474 - RNA, 19 nt, Artificial Sequence
  Description of Artificial Sequence: Synthetic oligonucleotide
uccuauuuagcuggagaca

SEQ ID NO: 658475 - RNA, 19 nt, Artificial Sequence
  Description of Artificial Sequence: Synthetic oligonucleotide
ccuaaauuauuugccaucc

SEQ ID NO: 658476 - RNA, 19 nt, Artificial Sequence
  Description of Artificial Sequence: Synthetic oligonucleotide
caagauuucaagagaaccu

SEQ ID NO: 658477 - RNA, 19 nt, Artificial Sequence
  Description of Artificial Sequence: Synthetic oligonucleotide
caagaauccccuuuuaccu

SEQ ID NO: 658478 - RNA, 19 nt, Artificial Sequence
  Description of Artificial Sequence: Synthetic oligonucleotide
uacaguagagugcccgggu

SEQ ID NO: 658479 - RNA, 19 nt, Artificial Sequence
  Description of Artificial Sequence: Synthetic oligonucleotide
aggccaauccccaaaccac

SEQ ID NO: 658480 - RNA, 19 nt, Artificial Sequence
  Description of Artificial Sequence: Synthetic oligonucleotide
caccgauucgguaggacac

SEQ ID NO: 658481 - RNA, 19 nt, Artificial Sequence
  Description of Artificial Sequence: Synthetic oligonucleotide
agacaagauuucaagagaa

SEQ ID NO: 658482 - RNA, 19 nt, Artificial Sequence
  Description of Artificial Sequence: Synthetic oligonucleotide
cuauuuagcuggagacagc

SEQ ID NO: 658483 - RNA, 19 nt, Artificial Sequence
  Description of Artificial Sequence: Synthetic oligonucleotide
acuuaauaagagagacagg

SEQ ID NO: 658484 - RNA, 19 nt, Artificial Sequence
  Description of Artificial Sequence: Synthetic oligonucleotide
aaacccaccagggcgccag

SEQ ID NO: 658485 - RNA, 19 nt, Artificial Sequence
  Description of Artificial Sequence: Synthetic oligonucleotide
caaacuuaccacuauuacu

SEQ ID NO: 658486 - RNA, 19 nt, Artificial Sequence
  Description of Artificial Sequence: Synthetic oligonucleotide
aguagagugcccggguagg

SEQ ID NO: 658487 - RNA, 19 nt, Artificial Sequence
  Description of Artificial Sequence: Synthetic oligonucleotide
acuuaccacuauuacuuau

SEQ ID NO: 658488 - RNA, 19 nt, Artificial Sequence
  Description of Artificial Sequence: Synthetic oligonucleotide
cagugauugagaacuccug

SEQ ID NO: 658489 - RNA, 19 nt, Artificial Sequence
  Description of Artificial Sequence: Synthetic oligonucleotide
acaugaaagaggggagcgg

SEQ ID NO: 658490 - RNA, 19 nt, Artificial Sequence
  Description of Artificial Sequence: Synthetic oligonucleotide
cuaucuagcucuguccuuc

SEQ ID NO: 658491 - RNA, 19 nt, Artificial Sequence
  Description of Artificial Sequence: Synthetic oligonucleotide
acacuauuauacaauuagu

SEQ ID NO: 658492 - RNA, 19 nt, Artificial Sequence
  Description of Artificial Sequence: Synthetic oligonucleotide
uauagauuccuggcuggga

SEQ ID NO: 658493 - RNA, 19 nt, Artificial Sequence
  Description of Artificial Sequence: Synthetic oligonucleotide
gacaagauuucaagagaac

SEQ ID NO: 658494 - RNA, 19 nt, Artificial Sequence
  Description of Artificial Sequence: Synthetic oligonucleotide
ggugaagccgccugggaag

SEQ ID NO: 658495 - RNA, 19 nt, Artificial Sequence
  Description of Artificial Sequence: Synthetic oligonucleotide
ccauccauccauacaaagc

SEQ ID NO: 658496 - RNA, 19 nt, Artificial Sequence
  Description of Artificial Sequence: Synthetic oligonucleotide
aauuuggauuuuacugaga

SEQ ID NO: 658497 - RNA, 19 nt, Artificial Sequence
  Description of Artificial Sequence: Synthetic oligonucleotide
cugggagugccugagcagg

SEQ ID NO: 658498 - RNA, 19 nt, Artificial Sequence
  Description of Artificial Sequence: Synthetic oligonucleotide
gccaucacauaguucuucg

SEQ ID NO: 658499 - RNA, 19 nt, Artificial Sequence
  Description of Artificial Sequence: Synthetic oligonucleotide
cauagggaucaacccacag

SEQ ID NO: 658500 - RNA, 19 nt, Artificial Sequence
  Description of Artificial Sequence: Synthetic oligonucleotide
cauuaaggagagcgauggg

SEQ ID NO: 658501 - RNA, 19 nt, Artificial Sequence
  Description of Artificial Sequence: Synthetic oligonucleotide
cagcaugaguacaguagag

SEQ ID NO: 658502 - RNA, 19 nt, Artificial Sequence
  Description of Artificial Sequence: Synthetic oligonucleotide
gagagcgaugggcugacuc

SEQ ID NO: 658503 - RNA, 19 nt, Artificial Sequence
  Description of Artificial Sequence: Synthetic oligonucleotide
aggaaauggggcccuccag

SEQ ID NO: 658504 - RNA, 19 nt, Artificial Sequence
  Description of Artificial Sequence: Synthetic oligonucleotide
agugaggagcccauaggag

SEQ ID NO: 658505 - RNA, 19 nt, Artificial Sequence
  Description of Artificial Sequence: Synthetic oligonucleotide
uugaugcggaugcagcgau

SEQ ID NO: 658506 - RNA, 19 nt, Artificial Sequence
  Description of Artificial Sequence: Synthetic oligonucleotide
ggacccaaucacaugaaag

SEQ ID NO: 658507 - RNA, 19 nt, Artificial Sequence
  Description of Artificial Sequence: Synthetic oligonucleotide
caucgacaagaaagaacag

SEQ ID NO: 658508 - RNA, 19 nt, Artificial Sequence
  Description of Artificial Sequence: Synthetic oligonucleotide
cuccuguccuaggaaaugg

SEQ ID NO: 658509 - RNA, 19 nt, Artificial Sequence
  Description of Artificial Sequence: Synthetic oligonucleotide
acagugauugagaacuccu

SEQ ID NO: 658510 - RNA, 19 nt, Artificial Sequence
  Description of Artificial Sequence: Synthetic oligonucleotide
auugcaaaucaccccuaaa

SEQ ID NO: 658511 - RNA, 19 nt, Artificial Sequence
  Description of Artificial Sequence: Synthetic oligonucleotide
accguccucaccgauucgg

SEQ ID NO: 658512 - RNA, 19 nt, Artificial Sequence
  Description of Artificial Sequence: Synthetic oligonucleotide
caggagaggucguucacuc

SEQ ID NO: 658513 - RNA, 19 nt, Artificial Sequence
  Description of Artificial Sequence: Synthetic oligonucleotide
caguagagugcccggguag

SEQ ID NO: 658514 - RNA, 19 nt, Artificial Sequence
  Description of Artificial Sequence: Synthetic oligonucleotide
ugggacuauugcacaguga

SEQ ID NO: 658515 - RNA, 19 nt, Artificial Sequence
  Description of Artificial Sequence: Synthetic oligonucleotide
cuguuugcggacaagacau

SEQ ID NO: 658516 - RNA, 19 nt, Artificial Sequence
  Description of Artificial Sequence: Synthetic oligonucleotide
accuguuugcggacaagac

SEQ ID NO: 658517 - RNA, 19 nt, Artificial Sequence
  Description of Artificial Sequence: Synthetic oligonucleotide
aaucaccccuaaauuauuu

SEQ ID NO: 658518 - RNA, 19 nt, Artificial Sequence
  Description of Artificial Sequence: Synthetic oligonucleotide
agaggugaagccgccuggg

SEQ ID NO: 658519 - RNA, 19 nt, Artificial Sequence
  Description of Artificial Sequence: Synthetic oligonucleotide
ugaaugccccugaguaaga

SEQ ID NO: 658520 - RNA, 19 nt, Artificial Sequence
  Description of Artificial Sequence: Synthetic oligonucleotide
cagccgauguagcuggggc

SEQ ID NO: 658521 - RNA, 19 nt, Artificial Sequence
  Description of Artificial Sequence: Synthetic oligonucleotide
uuaaagcgagagaggugaa

SEQ ID NO: 658522 - RNA, 19 nt, Artificial Sequence
  Description of Artificial Sequence: Synthetic oligonucleotide
gggaucaacccacaggguc

SEQ ID NO: 658523 - RNA, 19 nt, Artificial Sequence
  Description of Artificial Sequence: Synthetic oligonucleotide
ucugugggcccagaguuaa

SEQ ID NO: 658524 - RNA, 19 nt, Artificial Sequence
  Description of Artificial Sequence: Synthetic oligonucleotide
agaauagcuuacaaacuua

SEQ ID NO: 658525 - RNA, 19 nt, Artificial Sequence
  Description of Artificial Sequence: Synthetic oligonucleotide
uaucuagcucuguccuuca

SEQ ID NO: 658526 - RNA, 19 nt, Artificial Sequence
  Description of Artificial Sequence: Synthetic oligonucleotide
augcggaugcagcgauagc

SEQ ID NO: 658527 - RNA, 19 nt, Artificial Sequence
  Description of Artificial Sequence: Synthetic oligonucleotide
cauaagcuguacagucuuc

SEQ ID NO: 658528 - RNA, 19 nt, Artificial Sequence
  Description of Artificial Sequence: Synthetic oligonucleotide
gaaccaucccucuuugggu

SEQ ID NO: 658529 - RNA, 19 nt, Artificial Sequence
  Description of Artificial Sequence: Synthetic oligonucleotide
ccuguccuaggaaaugggg

SEQ ID NO: 658530 - RNA, 19 nt, Artificial Sequence
  Description of Artificial Sequence: Synthetic oligonucleotide
aaccguccucaccgauucg

SEQ ID NO: 658531 - RNA, 19 nt, Artificial Sequence
  Description of Artificial Sequence: Synthetic oligonucleotide
gcucacaaauucaauaaca

SEQ ID NO: 658532 - RNA, 19 nt, Artificial Sequence
  Description of Artificial Sequence: Synthetic oligonucleotide
ccuuugaguggaaacugag

SEQ ID NO: 658533 - RNA, 19 nt, Artificial Sequence
  Description of Artificial Sequence: Synthetic oligonucleotide
ggagucuugaggagaaggc

SEQ ID NO: 658534 - RNA, 19 nt, Artificial Sequence
  Description of Artificial Sequence: Synthetic oligonucleotide
aaaggacccggaguucccu

SEQ ID NO: 658535 - RNA, 19 nt, Artificial Sequence
  Description of Artificial Sequence: Synthetic oligonucleotide
augaaagaggggagcgggg

SEQ ID NO: 658536 - RNA, 19 nt, Artificial Sequence
  Description of Artificial Sequence: Synthetic oligonucleotide
ccacccuccaaauauguuc

SEQ ID NO: 658537 - RNA, 19 nt, Artificial Sequence
  Description of Artificial Sequence: Synthetic oligonucleotide
uuugugugguucccuccau

SEQ ID NO: 658538 - RNA, 19 nt, Artificial Sequence
  Description of Artificial Sequence: Synthetic oligonucleotide
gaauccccuuuuaccuugg

SEQ ID NO: 658539 - RNA, 19 nt, Artificial Sequence
  Description of Artificial Sequence: Synthetic oligonucleotide
auucggacuuucauguggu

SEQ ID NO: 658540 - RNA, 19 nt, Artificial Sequence
  Description of Artificial Sequence: Synthetic oligonucleotide
guuugcggacaagacauga

SEQ ID NO: 658541 - RNA, 19 nt, Artificial Sequence
  Description of Artificial Sequence: Synthetic oligonucleotide
ucuugcaagugaggagccc

SEQ ID NO: 658542 - RNA, 19 nt, Artificial Sequence
  Description of Artificial Sequence: Synthetic oligonucleotide
gaccuguuugcggacaaga

SEQ ID NO: 658543 - RNA, 19 nt, Artificial Sequence
  Description of Artificial Sequence: Synthetic oligonucleotide
uggaaauggggaagcgauu

SEQ ID NO: 658544 - RNA, 19 nt, Artificial Sequence
  Description of Artificial Sequence: Synthetic oligonucleotide
auccauccauacaaagcag

SEQ ID NO: 658545 - RNA, 19 nt, Artificial Sequence
  Description of Artificial Sequence: Synthetic oligonucleotide
cuugcaagugaggagccca

SEQ ID NO: 658546 - RNA, 19 nt, Artificial Sequence
  Description of Artificial Sequence: Synthetic oligonucleotide
cuugaaugccccugaguaa

SEQ ID NO: 658547 - RNA, 19 nt, Artificial Sequence
  Description of Artificial Sequence: Synthetic oligonucleotide
gguugagguauacgguggc

SEQ ID NO: 658548 - RNA, 19 nt, Artificial Sequence
  Description of Artificial Sequence: Synthetic oligonucleotide
acuccuguccuaggaaaug

SEQ ID NO: 658549 - RNA, 19 nt, Artificial Sequence
  Description of Artificial Sequence: Synthetic oligonucleotide
cuaggaaauggggcccucc

SEQ ID NO: 658550 - RNA, 19 nt, Artificial Sequence
  Description of Artificial Sequence: Synthetic oligonucleotide
gccauggcgguggaaaugg

SEQ ID NO: 658551 - RNA, 19 nt, Artificial Sequence
  Description of Artificial Sequence: Synthetic oligonucleotide
guugcuaaccuuccuugcu

SEQ ID NO: 658552 - RNA, 19 nt, Artificial Sequence
  Description of Artificial Sequence: Synthetic oligonucleotide
gcgauuccucauuaaggag

SEQ ID NO: 658553 - RNA, 19 nt, Artificial Sequence
  Description of Artificial Sequence: Synthetic oligonucleotide
guagagugcccggguaggg

SEQ ID NO: 658554 - RNA, 19 nt, Artificial Sequence
  Description of Artificial Sequence: Synthetic oligonucleotide
gaacaucgacaagaaagaa

SEQ ID NO: 658555 - RNA, 19 nt, Artificial Sequence
  Description of Artificial Sequence: Synthetic oligonucleotide
agaauuuccugggacuauu

SEQ ID NO: 658556 - RNA, 19 nt, Artificial Sequence
  Description of Artificial Sequence: Synthetic oligonucleotide
gggacuauugcacagugau

SEQ ID NO: 658557 - RNA, 19 nt, Artificial Sequence
  Description of Artificial Sequence: Synthetic oligonucleotide
aaacacuggcucacaaauu

SEQ ID NO: 658558 - RNA, 19 nt, Artificial Sequence
  Description of Artificial Sequence: Synthetic oligonucleotide
ugugcgaagcugggagugc

SEQ ID NO: 658559 - RNA, 19 nt, Artificial Sequence
  Description of Artificial Sequence: Synthetic oligonucleotide
acgguggccuguugucacg

SEQ ID NO: 658560 - RNA, 19 nt, Artificial Sequence
  Description of Artificial Sequence: Synthetic oligonucleotide
uugcaagugaggagcccau

SEQ ID NO: 658561 - RNA, 19 nt, Artificial Sequence
  Description of Artificial Sequence: Synthetic oligonucleotide
gguagacucaggaaugaga

SEQ ID NO: 658562 - RNA, 19 nt, Artificial Sequence
  Description of Artificial Sequence: Synthetic oligonucleotide
cuccucguacaggacacag

SEQ ID NO: 658563 - RNA, 19 nt, Artificial Sequence
  Description of Artificial Sequence: Synthetic oligonucleotide
cccuaaauuauuugccauc

SEQ ID NO: 658564 - RNA, 19 nt, Artificial Sequence
  Description of Artificial Sequence: Synthetic oligonucleotide
ccugccuuacaucccaccc

SEQ ID NO: 658565 - RNA, 19 nt, Artificial Sequence
  Description of Artificial Sequence: Synthetic oligonucleotide
acaguagagugcccgggua

SEQ ID NO: 658566 - RNA, 19 nt, Artificial Sequence
  Description of Artificial Sequence: Synthetic oligonucleotide
gguucccuccaucuauacc

SEQ ID NO: 658567 - RNA, 19 nt, Artificial Sequence
  Description of Artificial Sequence: Synthetic oligonucleotide
cugugcgaagcugggagug

SEQ ID NO: 658568 - RNA, 19 nt, Artificial Sequence
  Description of Artificial Sequence: Synthetic oligonucleotide
gcggacaagacaugagaac

SEQ ID NO: 658569 - RNA, 19 nt, Artificial Sequence
  Description of Artificial Sequence: Synthetic oligonucleotide
guauacgguggccuguugu

SEQ ID NO: 658570 - RNA, 19 nt, Artificial Sequence
  Description of Artificial Sequence: Synthetic oligonucleotide
ccaagcagcucccuuuaag

SEQ ID NO: 658571 - RNA, 19 nt, Artificial Sequence
  Description of Artificial Sequence: Synthetic oligonucleotide
gagaggucguucacucuac

SEQ ID NO: 658572 - RNA, 19 nt, Artificial Sequence
  Description of Artificial Sequence: Synthetic oligonucleotide
ugcgaagcugggagugccu

SEQ ID NO: 658573 - RNA, 19 nt, Artificial Sequence
  Description of Artificial Sequence: Synthetic oligonucleotide
ucccaguguuuuccaauuu

SEQ ID NO: 658574 - RNA, 19 nt, Artificial Sequence
  Description of Artificial Sequence: Synthetic oligonucleotide
gcuaggccaauccccaaac

SEQ ID NO: 658575 - RNA, 19 nt, Artificial Sequence
  Description of Artificial Sequence: Synthetic oligonucleotide
uccuaggaaauggggcccu

SEQ ID NO: 658576 - RNA, 19 nt, Artificial Sequence
  Description of Artificial Sequence: Synthetic oligonucleotide
agugcccggguaggguggc

SEQ ID NO: 658577 - RNA, 19 nt, Artificial Sequence
  Description of Artificial Sequence: Synthetic oligonucleotide
auggaaccguccucaccga

SEQ ID NO: 658578 - RNA, 19 nt, Artificial Sequence
  Description of Artificial Sequence: Synthetic oligonucleotide
cucuaggcaaacacuggcu

SEQ ID NO: 658579 - RNA, 19 nt, Artificial Sequence
  Description of Artificial Sequence: Synthetic oligonucleotide
gugcgaagcugggagugcc

SEQ ID NO: 658580 - RNA, 19 nt, Artificial Sequence
  Description of Artificial Sequence: Synthetic oligonucleotide
auuuaagaccaggcuugaa

SEQ ID NO: 658581 - RNA, 19 nt, Artificial Sequence
  Description of Artificial Sequence: Synthetic oligonucleotide
uaguaaccuuugucuuuuc

SEQ ID NO: 658582 - RNA, 19 nt, Artificial Sequence
  Description of Artificial Sequence: Synthetic oligonucleotide
acuggcucacaaauucaau

SEQ ID NO: 658583 - RNA, 19 nt, Artificial Sequence
  Description of Artificial Sequence: Synthetic oligonucleotide
gaccggggccuccucguac

SEQ ID NO: 658584 - RNA, 19 nt, Artificial Sequence
  Description of Artificial Sequence: Synthetic oligonucleotide
ugaugcggaugcagcgaua

SEQ ID NO: 658585 - RNA, 19 nt, Artificial Sequence
  Description of Artificial Sequence: Synthetic oligonucleotide
cucaccgauucgguaggac

SEQ ID NO: 658586 - RNA, 19 nt, Artificial Sequence
  Description of Artificial Sequence: Synthetic oligonucleotide
cuaaagaggcagggaccug

SEQ ID NO: 658587 - RNA, 19 nt, Artificial Sequence
  Description of Artificial Sequence: Synthetic oligonucleotide
cacuugggucugugggccc

SEQ ID NO: 658588 - RNA, 19 nt, Artificial Sequence
  Description of Artificial Sequence: Synthetic oligonucleotide
ggcgguggaaauggggaag

SEQ ID NO: 658589 - RNA, 19 nt, Artificial Sequence
  Description of Artificial Sequence: Synthetic oligonucleotide
guaggguggcuccuauuua

SEQ ID NO: 658590 - RNA, 19 nt, Artificial Sequence
  Description of Artificial Sequence: Synthetic oligonucleotide
ugacucuaucuagcucugu

SEQ ID NO: 658591 - RNA, 19 nt, Artificial Sequence
  Description of Artificial Sequence: Synthetic oligonucleotide
cuugaggagaaggcaguaa

SEQ ID NO: 658592 - RNA, 19 nt, Artificial Sequence
  Description of Artificial Sequence: Synthetic oligonucleotide
uucggacuuucaugugguu

SEQ ID NO: 658593 - RNA, 19 nt, Artificial Sequence
  Description of Artificial Sequence: Synthetic oligonucleotide
agcagcauucggacuuuca

SEQ ID NO: 658594 - RNA, 19 nt, Artificial Sequence
  Description of Artificial Sequence: Synthetic oligonucleotide
agccaccucucaaaggaau

SEQ ID NO: 658595 - RNA, 19 nt, Artificial Sequence
  Description of Artificial Sequence: Synthetic oligonucleotide
agagcagagcaaagguuuu

SEQ ID NO: 658596 - RNA, 19 nt, Artificial Sequence
  Description of Artificial Sequence: Synthetic oligonucleotide
ucccucuuugggucccaaa

SEQ ID NO: 658597 - RNA, 19 nt, Artificial Sequence
  Description of Artificial Sequence: Synthetic oligonucleotide
ucacucuacccagggucuc

SEQ ID NO: 658598 - RNA, 19 nt, Artificial Sequence
  Description of Artificial Sequence: Synthetic oligonucleotide
gcauucggacuuucaugug

SEQ ID NO: 658599 - RNA, 19 nt, Artificial Sequence
  Description of Artificial Sequence: Synthetic oligonucleotide
ggaaagauccugaccccuc

SEQ ID NO: 658600 - RNA, 19 nt, Artificial Sequence
  Description of Artificial Sequence: Synthetic oligonucleotide
cccauaggaggcagcgacc

SEQ ID NO: 658601 - RNA, 19 nt, Artificial Sequence
  Description of Artificial Sequence: Synthetic oligonucleotide
aggaacaggagaggucguu

SEQ ID NO: 658602 - RNA, 19 nt, Artificial Sequence
  Description of Artificial Sequence: Synthetic oligonucleotide
cccaaggguagacucagga

SEQ ID NO: 658603 - RNA, 19 nt, Artificial Sequence
  Description of Artificial Sequence: Synthetic oligonucleotide
gguauacgguggccuguug

SEQ ID NO: 658604 - RNA, 19 nt, Artificial Sequence
  Description of Artificial Sequence: Synthetic oligonucleotide
ggaagcgauuccucauuaa

SEQ ID NO: 658605 - RNA, 19 nt, Artificial Sequence
  Description of Artificial Sequence: Synthetic oligonucleotide
cuucgaggggcugcuccug

SEQ ID NO: 658606 - RNA, 19 nt, Artificial Sequence
  Description of Artificial Sequence: Synthetic oligonucleotide
uggcuaggccaauccccaa

SEQ ID NO: 658607 - RNA, 19 nt, Artificial Sequence
  Description of Artificial Sequence: Synthetic oligonucleotide
gcgguggaaauggggaagc

SEQ ID NO: 658608 - RNA, 19 nt, Artificial Sequence
  Description of Artificial Sequence: Synthetic oligonucleotide
gagcgaugggcugacucua

SEQ ID NO: 658609 - RNA, 19 nt, Artificial Sequence
  Description of Artificial Sequence: Synthetic oligonucleotide
cugccuuacaucccacccu

SEQ ID NO: 658610 - RNA, 19 nt, Artificial Sequence
  Description of Artificial Sequence: Synthetic oligonucleotide
caggacccaaucacaugaa

SEQ ID NO: 658611 - RNA, 19 nt, Artificial Sequence
  Description of Artificial Sequence: Synthetic oligonucleotide
ccuuacaucccacccucca

SEQ ID NO: 658612 - RNA, 19 nt, Artificial Sequence
  Description of Artificial Sequence: Synthetic oligonucleotide
gggaagcgauuccucauua

SEQ ID NO: 658613 - RNA, 19 nt, Artificial Sequence
  Description of Artificial Sequence: Synthetic oligonucleotide
ggcuaggccaauccccaaa

SEQ ID NO: 658614 - RNA, 19 nt, Artificial Sequence
  Description of Artificial Sequence: Synthetic oligonucleotide
ccucguacaggacacagau

SEQ ID NO: 658615 - RNA, 19 nt, Artificial Sequence
  Description of Artificial Sequence: Synthetic oligonucleotide
gagccaccucucaaaggaa

SEQ ID NO: 658616 - RNA, 19 nt, Artificial Sequence
  Description of Artificial Sequence: Synthetic oligonucleotide
gaguggaaacugaggaguu

SEQ ID NO: 658617 - RNA, 19 nt, Artificial Sequence
  Description of Artificial Sequence: Synthetic oligonucleotide
ggaugcagcgauagccaga

SEQ ID NO: 658618 - RNA, 19 nt, Artificial Sequence
  Description of Artificial Sequence: Synthetic oligonucleotide
ggcuccuauuuagcuggag

SEQ ID NO: 658619 - RNA, 19 nt, Artificial Sequence
  Description of Artificial Sequence: Synthetic oligonucleotide
ggaccuguuugcggacaag

SEQ ID NO: 658620 - RNA, 19 nt, Artificial Sequence
  Description of Artificial Sequence: Synthetic oligonucleotide
agcggggaacaggagucuu

SEQ ID NO: 658621 - RNA, 19 nt, Artificial Sequence
  Description of Artificial Sequence: Synthetic oligonucleotide
ccagguugagguauacggu

SEQ ID NO: 658622 - RNA, 19 nt, Artificial Sequence
  Description of Artificial Sequence: Synthetic oligonucleotide
caggcaucccaggaaagau

SEQ ID NO: 658623 - RNA, 19 nt, Artificial Sequence
  Description of Artificial Sequence: Synthetic oligonucleotide
gcggggaacaggagucuug

SEQ ID NO: 658624 - RNA, 19 nt, Artificial Sequence
  Description of Artificial Sequence: Synthetic oligonucleotide
gcccggguaggguggcucc

SEQ ID NO: 658625 - RNA, 19 nt, Artificial Sequence
  Description of Artificial Sequence: Synthetic oligonucleotide
gggaccuguuugcggacaa

SEQ ID NO: 658626 - RNA, 19 nt, Artificial Sequence
  Description of Artificial Sequence: Synthetic oligonucleotide
gggcugacucuaucuagcu

SEQ ID NO: 658627 - RNA, 19 nt, Artificial Sequence
  Description of Artificial Sequence: Synthetic oligonucleotide
gggcuggcugaguccaauc

SEQ ID NO: 658628 - RNA, 19 nt, Artificial Sequence
  Description of Artificial Sequence: Synthetic oligonucleotide
ggagagaaccaucccucuu

SEQ ID NO: 658629 - RNA, 19 nt, Artificial Sequence
  Description of Artificial Sequence: Synthetic oligonucleotide
gcccagaguuaacuuuaaa

SEQ ID NO: 658630 - RNA, 19 nt, Artificial Sequence
  Description of Artificial Sequence: Synthetic oligonucleotide
cagaauuuccugggacuau

SEQ ID NO: 658631 - RNA, 19 nt, Artificial Sequence
  Description of Artificial Sequence: Synthetic oligonucleotide
ggggaagcgauuccucauu

SEQ ID NO: 658632 - RNA, 19 nt, Artificial Sequence
  Description of Artificial Sequence: Synthetic oligonucleotide
gccaccucucaaaggaaua

SEQ ID NO: 658633 - RNA, 19 nt, Artificial Sequence
  Description of Artificial Sequence: Synthetic oligonucleotide
gccuuacaucccacccucc

SEQ ID NO: 658634 - RNA, 19 nt, Artificial Sequence
  Description of Artificial Sequence: Synthetic oligonucleotide
gcucaacaguccagcucug

SEQ ID NO: 658635 - RNA, 19 nt, Artificial Sequence
  Description of Artificial Sequence: Synthetic oligonucleotide
ccugcucaacaguccagcu

SEQ ID NO: 658636 - RNA, 19 nt, Artificial Sequence
  Description of Artificial Sequence: Synthetic oligonucleotide
ggaaccguccucaccgauu

SEQ ID NO: 658637 - RNA, 19 nt, Artificial Sequence
  Description of Artificial Sequence: Synthetic oligonucleotide
ggacuauugcacagugauu

SEQ ID NO: 658638 - RNA, 19 nt, Artificial Sequence
  Description of Artificial Sequence: Synthetic oligonucleotide
cagcgaccggggccuccuc

SEQ ID NO: 658639 - RNA, 19 nt, Artificial Sequence
  Description of Artificial Sequence: Synthetic oligonucleotide
gcgaccggggccuccucgu

SEQ ID NO: 658640 - RNA, 19 nt, Artificial Sequence
  Description of Artificial Sequence: Synthetic oligonucleotide
cguccucaccgauucggua

SEQ ID NO: 658641 - RNA, 19 nt, Artificial Sequence
  Description of Artificial Sequence: Synthetic oligonucleotide
ccguccucaccgauucggu

SEQ ID NO: 658642 - RNA, 19 nt, Artificial Sequence
  Description of Artificial Sequence: Synthetic oligonucleotide
ccucaccgauucgguagga

SEQ ID NO: 658643 - RNA, 19 nt, Artificial Sequence
  Description of Artificial Sequence: Synthetic oligonucleotide
ggagagcgaugggcugacu

SEQ ID NO: 658644 - RNA, 19 nt, Artificial Sequence
  Description of Artificial Sequence: Synthetic oligonucleotide
ccggaguucccuggagcuu

SEQ ID NO: 658645 - RNA, 19 nt, Artificial Sequence
  Description of Artificial Sequence: Synthetic oligonucleotide
cgaccggggccuccucgua

SEQ ID NO: 658646 - RNA, 19 nt, Artificial Sequence
  Description of Artificial Sequence: Synthetic oligonucleotide
aauguaggaauuccaaagc

SEQ ID NO: 658647 - RNA, 19 nt, Artificial Sequence
  Description of Artificial Sequence: Synthetic oligonucleotide
auaugcuaaaaguagcugc

SEQ ID NO: 658648 - RNA, 19 nt, Artificial Sequence
  Description of Artificial Sequence: Synthetic oligonucleotide
auaaccuaaguauagcugg

SEQ ID NO: 658649 - RNA, 19 nt, Artificial Sequence
  Description of Artificial Sequence: Synthetic oligonucleotide
aggaaauagaaacuugugc

SEQ ID NO: 658650 - RNA, 19 nt, Artificial Sequence
  Description of Artificial Sequence: Synthetic oligonucleotide
aagauuuauaacagaaugc

SEQ ID NO: 658651 - RNA, 19 nt, Artificial Sequence
  Description of Artificial Sequence: Synthetic oligonucleotide
ugcuacauagcuaagacca

SEQ ID NO: 658652 - RNA, 19 nt, Artificial Sequence
  Description of Artificial Sequence: Synthetic oligonucleotide
aauauaaccuaaguauagc

SEQ ID NO: 658653 - RNA, 19 nt, Artificial Sequence
  Description of Artificial Sequence: Synthetic oligonucleotide
aaaagucccgaaaauagcc

SEQ ID NO: 658654 - RNA, 19 nt, Artificial Sequence
  Description of Artificial Sequence: Synthetic oligonucleotide
aaaugggagacguagccac

SEQ ID NO: 658655 - RNA, 19 nt, Artificial Sequence
  Description of Artificial Sequence: Synthetic oligonucleotide
uuuauaacagaaugcaggc

SEQ ID NO: 658656 - RNA, 19 nt, Artificial Sequence
  Description of Artificial Sequence: Synthetic oligonucleotide
gaauguaggaauuccaaag

SEQ ID NO: 658657 - RNA, 19 nt, Artificial Sequence
  Description of Artificial Sequence: Synthetic oligonucleotide
cuuaggaucacccacacuc

SEQ ID NO: 658658 - RNA, 19 nt, Artificial Sequence
  Description of Artificial Sequence: Synthetic oligonucleotide
aauaagauuuauaacagaa

SEQ ID NO: 658659 - RNA, 19 nt, Artificial Sequence
  Description of Artificial Sequence: Synthetic oligonucleotide
ucuaggaaaucucucagug

SEQ ID NO: 658660 - RNA, 19 nt, Artificial Sequence
  Description of Artificial Sequence: Synthetic oligonucleotide
uucaaauacaaugaggugu

SEQ ID NO: 658661 - RNA, 19 nt, Artificial Sequence
  Description of Artificial Sequence: Synthetic oligonucleotide
ugauaaugcuaucaaacca

SEQ ID NO: 658662 - RNA, 19 nt, Artificial Sequence
  Description of Artificial Sequence: Synthetic oligonucleotide
ugcaaauugauaaugcuau

SEQ ID NO: 658663 - RNA, 19 nt, Artificial Sequence
  Description of Artificial Sequence: Synthetic oligonucleotide
aaugacuugguucgaaugu

SEQ ID NO: 658664 - RNA, 19 nt, Artificial Sequence
  Description of Artificial Sequence: Synthetic oligonucleotide
uauaaccuaaguauagcug

SEQ ID NO: 658665 - RNA, 19 nt, Artificial Sequence
  Description of Artificial Sequence: Synthetic oligonucleotide
aagaacugauuguaagggg

SEQ ID NO: 658666 - RNA, 19 nt, Artificial Sequence
  Description of Artificial Sequence: Synthetic oligonucleotide
aguaguuucuuucauagaa

SEQ ID NO: 658667 - RNA, 19 nt, Artificial Sequence
  Description of Artificial Sequence: Synthetic oligonucleotide
aacccuugcucauuaaguc

SEQ ID NO: 658668 - RNA, 19 nt, Artificial Sequence
  Description of Artificial Sequence: Synthetic oligonucleotide
ucacagaucguguauauac

SEQ ID NO: 658669 - RNA, 19 nt, Artificial Sequence
  Description of Artificial Sequence: Synthetic oligonucleotide
gguuuauucagguaaaccc

SEQ ID NO: 658670 - RNA, 19 nt, Artificial Sequence
  Description of Artificial Sequence: Synthetic oligonucleotide
aaauugauaaugcuaucaa

SEQ ID NO: 658671 - RNA, 19 nt, Artificial Sequence
  Description of Artificial Sequence: Synthetic oligonucleotide
uuaucugugcacagaaucc

SEQ ID NO: 658672 - RNA, 19 nt, Artificial Sequence
  Description of Artificial Sequence: Synthetic oligonucleotide
caugguucaggcaacagag

SEQ ID NO: 658673 - RNA, 19 nt, Artificial Sequence
  Description of Artificial Sequence: Synthetic oligonucleotide
uaugcuaaaaguagcugca

SEQ ID NO: 658674 - RNA, 19 nt, Artificial Sequence
  Description of Artificial Sequence: Synthetic oligonucleotide
agauuuauaacagaaugca

SEQ ID NO: 658675 - RNA, 19 nt, Artificial Sequence
  Description of Artificial Sequence: Synthetic oligonucleotide
ucuugaaauauaaccuaag

SEQ ID NO: 658676 - RNA, 19 nt, Artificial Sequence
  Description of Artificial Sequence: Synthetic oligonucleotide
agauuaucaggccccaugg

SEQ ID NO: 658677 - RNA, 19 nt, Artificial Sequence
  Description of Artificial Sequence: Synthetic oligonucleotide
uuaugguuuucaaauacaa

SEQ ID NO: 658678 - RNA, 19 nt, Artificial Sequence
  Description of Artificial Sequence: Synthetic oligonucleotide
uguggcuacauccauugca

SEQ ID NO: 658679 - RNA, 19 nt, Artificial Sequence
  Description of Artificial Sequence: Synthetic oligonucleotide
uguauacuucuucuuagga

SEQ ID NO: 658680 - RNA, 19 nt, Artificial Sequence
  Description of Artificial Sequence: Synthetic oligonucleotide
gugguucaaucacagaucg

SEQ ID NO: 658681 - RNA, 19 nt, Artificial Sequence
  Description of Artificial Sequence: Synthetic oligonucleotide
uguuauucucgguagguga

SEQ ID NO: 658682 - RNA, 19 nt, Artificial Sequence
  Description of Artificial Sequence: Synthetic oligonucleotide
agcugcuagaagcacacac

SEQ ID NO: 658683 - RNA, 19 nt, Artificial Sequence
  Description of Artificial Sequence: Synthetic oligonucleotide
uaaacccuugcucauuaag

SEQ ID NO: 658684 - RNA, 19 nt, Artificial Sequence
  Description of Artificial Sequence: Synthetic oligonucleotide
agugagacuggagaggggc

SEQ ID NO: 658685 - RNA, 19 nt, Artificial Sequence
  Description of Artificial Sequence: Synthetic oligonucleotide
uggagcaguguuauucucg

SEQ ID NO: 658686 - RNA, 19 nt, Artificial Sequence
  Description of Artificial Sequence: Synthetic oligonucleotide
ucaaccuuggguccauagg

SEQ ID NO: 658687 - RNA, 19 nt, Artificial Sequence
  Description of Artificial Sequence: Synthetic oligonucleotide
aguauuccgggucaaagca

SEQ ID NO: 658688 - RNA, 19 nt, Artificial Sequence
  Description of Artificial Sequence: Synthetic oligonucleotide
aaugggagaaacaaggcaa

SEQ ID NO: 658689 - RNA, 19 nt, Artificial Sequence
  Description of Artificial Sequence: Synthetic oligonucleotide
uacaaugagguguuugggc

SEQ ID NO: 658690 - RNA, 19 nt, Artificial Sequence
  Description of Artificial Sequence: Synthetic oligonucleotide
uccuauuuagaaauggcua

SEQ ID NO: 658691 - RNA, 19 nt, Artificial Sequence
  Description of Artificial Sequence: Synthetic oligonucleotide
ggaucagucauccaguugc

SEQ ID NO: 658692 - RNA, 19 nt, Artificial Sequence
  Description of Artificial Sequence: Synthetic oligonucleotide
auugcaaauugauaaugcu

SEQ ID NO: 658693 - RNA, 19 nt, Artificial Sequence
  Description of Artificial Sequence: Synthetic oligonucleotide
uaaggaaugggaugguuga

SEQ ID NO: 658694 - RNA, 19 nt, Artificial Sequence
  Description of Artificial Sequence: Synthetic oligonucleotide
auuccuauuuagaaauggc

SEQ ID NO: 658695 - RNA, 19 nt, Artificial Sequence
  Description of Artificial Sequence: Synthetic oligonucleotide
uuuaauggccaccuccugu

SEQ ID NO: 658696 - RNA, 19 nt, Artificial Sequence
  Description of Artificial Sequence: Synthetic oligonucleotide
accauaaauuuauguaguc

SEQ ID NO: 658697 - RNA, 19 nt, Artificial Sequence
  Description of Artificial Sequence: Synthetic oligonucleotide
uccaucucaagacagcggu

SEQ ID NO: 658698 - RNA, 19 nt, Artificial Sequence
  Description of Artificial Sequence: Synthetic oligonucleotide
uuucaaauacaaugaggug

SEQ ID NO: 658699 - RNA, 19 nt, Artificial Sequence
  Description of Artificial Sequence: Synthetic oligonucleotide
gucaagaacugauuguaag

SEQ ID NO: 658700 - RNA, 19 nt, Artificial Sequence
  Description of Artificial Sequence: Synthetic oligonucleotide
uugcaguauacacugugcc

SEQ ID NO: 658701 - RNA, 19 nt, Artificial Sequence
  Description of Artificial Sequence: Synthetic oligonucleotide
acagaucguguauauacag

SEQ ID NO: 658702 - RNA, 19 nt, Artificial Sequence
  Description of Artificial Sequence: Synthetic oligonucleotide
aucguguauauacagauuu

SEQ ID NO: 658703 - RNA, 19 nt, Artificial Sequence
  Description of Artificial Sequence: Synthetic oligonucleotide
cuuggcacgaugaucuggg

SEQ ID NO: 658704 - RNA, 19 nt, Artificial Sequence
  Description of Artificial Sequence: Synthetic oligonucleotide
auuaucaggccccauggca

SEQ ID NO: 658705 - RNA, 19 nt, Artificial Sequence
  Description of Artificial Sequence: Synthetic oligonucleotide
ugaggaaucggaguucccg

SEQ ID NO: 658706 - RNA, 19 nt, Artificial Sequence
  Description of Artificial Sequence: Synthetic oligonucleotide
agaucguguauauacagau

SEQ ID NO: 658707 - RNA, 19 nt, Artificial Sequence
  Description of Artificial Sequence: Synthetic oligonucleotide
aaccuaaguauagcuggcc

SEQ ID NO: 658708 - RNA, 19 nt, Artificial Sequence
  Description of Artificial Sequence: Synthetic oligonucleotide
agagcacuaaaucaggaaa

SEQ ID NO: 658709 - RNA, 19 nt, Artificial Sequence
  Description of Artificial Sequence: Synthetic oligonucleotide
uggauuagaagggaauucc

SEQ ID NO: 658710 - RNA, 19 nt, Artificial Sequence
  Description of Artificial Sequence: Synthetic oligonucleotide
uccgggucaaagcaucugg

SEQ ID NO: 658711 - RNA, 19 nt, Artificial Sequence
  Description of Artificial Sequence: Synthetic oligonucleotide
ugugcucuaggaaaucucu

SEQ ID NO: 658712 - RNA, 19 nt, Artificial Sequence
  Description of Artificial Sequence: Synthetic oligonucleotide
uuccuugucacaacuucag

SEQ ID NO: 658713 - RNA, 19 nt, Artificial Sequence
  Description of Artificial Sequence: Synthetic oligonucleotide
ucucagugcuauaaauaag

SEQ ID NO: 658714 - RNA, 19 nt, Artificial Sequence
  Description of Artificial Sequence: Synthetic oligonucleotide
cuguuuaauggccaccucc

SEQ ID NO: 658715 - RNA, 19 nt, Artificial Sequence
  Description of Artificial Sequence: Synthetic oligonucleotide
uucagguaaacccuugcuc

SEQ ID NO: 658716 - RNA, 19 nt, Artificial Sequence
  Description of Artificial Sequence: Synthetic oligonucleotide
gaaugacuugguucgaaug

SEQ ID NO: 658717 - RNA, 19 nt, Artificial Sequence
  Description of Artificial Sequence: Synthetic oligonucleotide
cagaugucaaccuuggguc

SEQ ID NO: 658718 - RNA, 19 nt, Artificial Sequence
  Description of Artificial Sequence: Synthetic oligonucleotide
ucucaaaccguguauacuu

SEQ ID NO: 658719 - RNA, 19 nt, Artificial Sequence
  Description of Artificial Sequence: Synthetic oligonucleotide
uuguaagggguaaggaaug

SEQ ID NO: 658720 - RNA, 19 nt, Artificial Sequence
  Description of Artificial Sequence: Synthetic oligonucleotide
ucaguuaacuugacagagc

SEQ ID NO: 658721 - RNA, 19 nt, Artificial Sequence
  Description of Artificial Sequence: Synthetic oligonucleotide
uucgaauguaggaauucca

SEQ ID NO: 658722 - RNA, 19 nt, Artificial Sequence
  Description of Artificial Sequence: Synthetic oligonucleotide
aaccguguauacuucuucu

SEQ ID NO: 658723 - RNA, 19 nt, Artificial Sequence
  Description of Artificial Sequence: Synthetic oligonucleotide
gauuguaagggguaaggaa

SEQ ID NO: 658724 - RNA, 19 nt, Artificial Sequence
  Description of Artificial Sequence: Synthetic oligonucleotide
ucucgguaggugaaauggg

SEQ ID NO: 658725 - RNA, 19 nt, Artificial Sequence
  Description of Artificial Sequence: Synthetic oligonucleotide
ugcuaucaaaccauaaauu

SEQ ID NO: 658726 - RNA, 19 nt, Artificial Sequence
  Description of Artificial Sequence: Synthetic oligonucleotide
gagacguagccacaucccg

SEQ ID NO: 658727 - RNA, 19 nt, Artificial Sequence
  Description of Artificial Sequence: Synthetic oligonucleotide
uuucguagaaacagguuua

SEQ ID NO: 658728 - RNA, 19 nt, Artificial Sequence
  Description of Artificial Sequence: Synthetic oligonucleotide
aacaugguaguucucccau

SEQ ID NO: 658729 - RNA, 19 nt, Artificial Sequence
  Description of Artificial Sequence: Synthetic oligonucleotide
uuuagcugaaccucucuuc

SEQ ID NO: 658730 - RNA, 19 nt, Artificial Sequence
  Description of Artificial Sequence: Synthetic oligonucleotide
cuuuaggaacugaugcugc

SEQ ID NO: 658731 - RNA, 19 nt, Artificial Sequence
  Description of Artificial Sequence: Synthetic oligonucleotide
aaauagccgacaguuucuc

SEQ ID NO: 658732 - RNA, 19 nt, Artificial Sequence
  Description of Artificial Sequence: Synthetic oligonucleotide
gaucaaagucuugagagca

SEQ ID NO: 658733 - RNA, 19 nt, Artificial Sequence
  Description of Artificial Sequence: Synthetic oligonucleotide
cuaaguauagcuggccagg

SEQ ID NO: 658734 - RNA, 19 nt, Artificial Sequence
  Description of Artificial Sequence: Synthetic oligonucleotide
ucucccaaacagcugcuag

SEQ ID NO: 658735 - RNA, 19 nt, Artificial Sequence
  Description of Artificial Sequence: Synthetic oligonucleotide
aauagcacagggaacacua

SEQ ID NO: 658736 - RNA, 19 nt, Artificial Sequence
  Description of Artificial Sequence: Synthetic oligonucleotide
uaugcuccguaauuucucc

SEQ ID NO: 658737 - RNA, 19 nt, Artificial Sequence
  Description of Artificial Sequence: Synthetic oligonucleotide
caaucuuuaggaacugaug

SEQ ID NO: 658738 - RNA, 19 nt, Artificial Sequence
  Description of Artificial Sequence: Synthetic oligonucleotide
gcuaagaccauuucacuag

SEQ ID NO: 658739 - RNA, 19 nt, Artificial Sequence
  Description of Artificial Sequence: Synthetic oligonucleotide
ugagguacaaggcucucaa

SEQ ID NO: 658740 - RNA, 19 nt, Artificial Sequence
  Description of Artificial Sequence: Synthetic oligonucleotide
guguauacuucuucuuagg

SEQ ID NO: 658741 - RNA, 19 nt, Artificial Sequence
  Description of Artificial Sequence: Synthetic oligonucleotide
uuuauucagguaaacccuu

SEQ ID NO: 658742 - RNA, 19 nt, Artificial Sequence
  Description of Artificial Sequence: Synthetic oligonucleotide
uaaucagcucuuucuucgg

SEQ ID NO: 658743 - RNA, 19 nt, Artificial Sequence
  Description of Artificial Sequence: Synthetic oligonucleotide
ugaucugggguggaugugg

SEQ ID NO: 658744 - RNA, 19 nt, Artificial Sequence
  Description of Artificial Sequence: Synthetic oligonucleotide
aaucggaguucccgaauug

SEQ ID NO: 658745 - RNA, 19 nt, Artificial Sequence
  Description of Artificial Sequence: Synthetic oligonucleotide
cuuguagacacucucggca

SEQ ID NO: 658746 - RNA, 19 nt, Artificial Sequence
  Description of Artificial Sequence: Synthetic oligonucleotide
auggauuagaagggaauuc

SEQ ID NO: 658747 - RNA, 19 nt, Artificial Sequence
  Description of Artificial Sequence: Synthetic oligonucleotide
ucggaguucccgaauugag

SEQ ID NO: 658748 - RNA, 19 nt, Artificial Sequence
  Description of Artificial Sequence: Synthetic oligonucleotide
agagccuccagccaaguau

SEQ ID NO: 658749 - RNA, 19 nt, Artificial Sequence
  Description of Artificial Sequence: Synthetic oligonucleotide
uguaagggguaaggaaugg

SEQ ID NO: 658750 - RNA, 19 nt, Artificial Sequence
  Description of Artificial Sequence: Synthetic oligonucleotide
uggcagauuaucaggcccc

SEQ ID NO: 658751 - RNA, 19 nt, Artificial Sequence
  Description of Artificial Sequence: Synthetic oligonucleotide
aaggcuuggcacgaugauc

SEQ ID NO: 658752 - RNA, 19 nt, Artificial Sequence
  Description of Artificial Sequence: Synthetic oligonucleotide
agucaguuaacuugacaga

SEQ ID NO: 658753 - RNA, 19 nt, Artificial Sequence
  Description of Artificial Sequence: Synthetic oligonucleotide
ugcucuggaguuaucugug

SEQ ID NO: 658754 - RNA, 19 nt, Artificial Sequence
  Description of Artificial Sequence: Synthetic oligonucleotide
cugauuguaagggguaagg

SEQ ID NO: 658755 - RNA, 19 nt, Artificial Sequence
  Description of Artificial Sequence: Synthetic oligonucleotide
acauagcuaagaccauuuc

SEQ ID NO: 658756 - RNA, 19 nt, Artificial Sequence
  Description of Artificial Sequence: Synthetic oligonucleotide
uuauguagucaagaacuga

SEQ ID NO: 658757 - RNA, 19 nt, Artificial Sequence
  Description of Artificial Sequence: Synthetic oligonucleotide
ugcaguauacacugugccu

SEQ ID NO: 658758 - RNA, 19 nt, Artificial Sequence
  Description of Artificial Sequence: Synthetic oligonucleotide
uauuccgggucaaagcauc

SEQ ID NO: 658759 - RNA, 19 nt, Artificial Sequence
  Description of Artificial Sequence: Synthetic oligonucleotide
caaggaucaaagucuugag

SEQ ID NO: 658760 - RNA, 19 nt, Artificial Sequence
  Description of Artificial Sequence: Synthetic oligonucleotide
uccagauaguucacaauau

SEQ ID NO: 658761 - RNA, 19 nt, Artificial Sequence
  Description of Artificial Sequence: Synthetic oligonucleotide
uaggaacugaugcugcagu

SEQ ID NO: 658762 - RNA, 19 nt, Artificial Sequence
  Description of Artificial Sequence: Synthetic oligonucleotide
ucccgaaaauagccgacag

SEQ ID NO: 658763 - RNA, 19 nt, Artificial Sequence
  Description of Artificial Sequence: Synthetic oligonucleotide
ucccgaauugaguaguuuc

SEQ ID NO: 658764 - RNA, 19 nt, Artificial Sequence
  Description of Artificial Sequence: Synthetic oligonucleotide
ucagugcuauaaauaagau

SEQ ID NO: 658765 - RNA, 19 nt, Artificial Sequence
  Description of Artificial Sequence: Synthetic oligonucleotide
cuggcagauuaucaggccc

SEQ ID NO: 658766 - RNA, 19 nt, Artificial Sequence
  Description of Artificial Sequence: Synthetic oligonucleotide
guaaggaaugggaugguug

SEQ ID NO: 658767 - RNA, 19 nt, Artificial Sequence
  Description of Artificial Sequence: Synthetic oligonucleotide
ugauuguaagggguaagga

SEQ ID NO: 658768 - RNA, 19 nt, Artificial Sequence
  Description of Artificial Sequence: Synthetic oligonucleotide
uugguucgaauguaggaau

SEQ ID NO: 658769 - RNA, 19 nt, Artificial Sequence
  Description of Artificial Sequence: Synthetic oligonucleotide
uagucaagaacugauugua

SEQ ID NO: 658770 - RNA, 19 nt, Artificial Sequence
  Description of Artificial Sequence: Synthetic oligonucleotide
uucaaucacagaucgugua

SEQ ID NO: 658771 - RNA, 19 nt, Artificial Sequence
  Description of Artificial Sequence: Synthetic oligonucleotide
ugcuagacaaaugguuucc

SEQ ID NO: 658772 - RNA, 19 nt, Artificial Sequence
  Description of Artificial Sequence: Synthetic oligonucleotide
uuagaagggaauuccuauu

SEQ ID NO: 658773 - RNA, 19 nt, Artificial Sequence
  Description of Artificial Sequence: Synthetic oligonucleotide
aauagccgacaguuucucu

SEQ ID NO: 658774 - RNA, 19 nt, Artificial Sequence
  Description of Artificial Sequence: Synthetic oligonucleotide
uccaguugcaguucucuuc

SEQ ID NO: 658775 - RNA, 19 nt, Artificial Sequence
  Description of Artificial Sequence: Synthetic oligonucleotide
gacuugguucgaauguagg

SEQ ID NO: 658776 - RNA, 19 nt, Artificial Sequence
  Description of Artificial Sequence: Synthetic oligonucleotide
cagauuaucaggccccaug

SEQ ID NO: 658777 - RNA, 19 nt, Artificial Sequence
  Description of Artificial Sequence: Synthetic oligonucleotide
ggagcaguguuauucucgg

SEQ ID NO: 658778 - RNA, 19 nt, Artificial Sequence
  Description of Artificial Sequence: Synthetic oligonucleotide
accuaaguauagcuggcca

SEQ ID NO: 658779 - RNA, 19 nt, Artificial Sequence
  Description of Artificial Sequence: Synthetic oligonucleotide
uucuuaggaucacccacac

SEQ ID NO: 658780 - RNA, 19 nt, Artificial Sequence
  Description of Artificial Sequence: Synthetic oligonucleotide
ggcacgaugaucuggggug

SEQ ID NO: 658781 - RNA, 19 nt, Artificial Sequence
  Description of Artificial Sequence: Synthetic oligonucleotide
ugaaugacuugguucgaau

SEQ ID NO: 658782 - RNA, 19 nt, Artificial Sequence
  Description of Artificial Sequence: Synthetic oligonucleotide
augacaagccacaaugcug

SEQ ID NO: 658783 - RNA, 19 nt, Artificial Sequence
  Description of Artificial Sequence: Synthetic oligonucleotide
uucucccaugucaggauca

SEQ ID NO: 658784 - RNA, 19 nt, Artificial Sequence
  Description of Artificial Sequence: Synthetic oligonucleotide
agcacuaaaucaggaaaug

SEQ ID NO: 658785 - RNA, 19 nt, Artificial Sequence
  Description of Artificial Sequence: Synthetic oligonucleotide
gaguucccgaauugaguag

SEQ ID NO: 658786 - RNA, 19 nt, Artificial Sequence
  Description of Artificial Sequence: Synthetic oligonucleotide
uggaucagucauccaguug

SEQ ID NO: 658787 - RNA, 19 nt, Artificial Sequence
  Description of Artificial Sequence: Synthetic oligonucleotide
aguguuauucucgguaggu

SEQ ID NO: 658788 - RNA, 19 nt, Artificial Sequence
  Description of Artificial Sequence: Synthetic oligonucleotide
gagcaugacaaaguaguca

SEQ ID NO: 658789 - RNA, 19 nt, Artificial Sequence
  Description of Artificial Sequence: Synthetic oligonucleotide
cagccuaggggaugcaggg

SEQ ID NO: 658790 - RNA, 19 nt, Artificial Sequence
  Description of Artificial Sequence: Synthetic oligonucleotide
guuaugguuuucaaauaca

SEQ ID NO: 658791 - RNA, 19 nt, Artificial Sequence
  Description of Artificial Sequence: Synthetic oligonucleotide
guuaacuugacagagccau

SEQ ID NO: 658792 - RNA, 19 nt, Artificial Sequence
  Description of Artificial Sequence: Synthetic oligonucleotide
ggagugagacuggagaggg

SEQ ID NO: 658793 - RNA, 19 nt, Artificial Sequence
  Description of Artificial Sequence: Synthetic oligonucleotide
acccuugcucauuaaguca

SEQ ID NO: 658794 - RNA, 19 nt, Artificial Sequence
  Description of Artificial Sequence: Synthetic oligonucleotide
gagagcacuaaaucaggaa

SEQ ID NO: 658795 - RNA, 19 nt, Artificial Sequence
  Description of Artificial Sequence: Synthetic oligonucleotide
gcaguguuauucucgguag

SEQ ID NO: 658796 - RNA, 19 nt, Artificial Sequence
  Description of Artificial Sequence: Synthetic oligonucleotide
aggcuuggcacgaugaucu

SEQ ID NO: 658797 - RNA, 19 nt, Artificial Sequence
  Description of Artificial Sequence: Synthetic oligonucleotide
auaacucaucucccacaag

SEQ ID NO: 658798 - RNA, 19 nt, Artificial Sequence
  Description of Artificial Sequence: Synthetic oligonucleotide
uggcacgaugaucuggggu

SEQ ID NO: 658799 - RNA, 19 nt, Artificial Sequence
  Description of Artificial Sequence: Synthetic oligonucleotide
uuaacuugacagagccauc

SEQ ID NO: 658800 - RNA, 19 nt, Artificial Sequence
  Description of Artificial Sequence: Synthetic oligonucleotide
gcugcuacauagcuaagac

SEQ ID NO: 658801 - RNA, 19 nt, Artificial Sequence
  Description of Artificial Sequence: Synthetic oligonucleotide
ugaccaggaucucauuaau

SEQ ID NO: 658802 - RNA, 19 nt, Artificial Sequence
  Description of Artificial Sequence: Synthetic oligonucleotide
aucaaagucuugagagcac

SEQ ID NO: 658803 - RNA, 19 nt, Artificial Sequence
  Description of Artificial Sequence: Synthetic oligonucleotide
uaagaccauuucacuagaa

SEQ ID NO: 658804 - RNA, 19 nt, Artificial Sequence
  Description of Artificial Sequence: Synthetic oligonucleotide
acugauuguaagggguaag

SEQ ID NO: 658805 - RNA, 19 nt, Artificial Sequence
  Description of Artificial Sequence: Synthetic oligonucleotide
uccuuugcugcagcaauca

SEQ ID NO: 658806 - RNA, 19 nt, Artificial Sequence
  Description of Artificial Sequence: Synthetic oligonucleotide
gcaguauacacugugccug

SEQ ID NO: 658807 - RNA, 19 nt, Artificial Sequence
  Description of Artificial Sequence: Synthetic oligonucleotide
gaggaaucggaguucccga

SEQ ID NO: 658808 - RNA, 19 nt, Artificial Sequence
  Description of Artificial Sequence: Synthetic oligonucleotide
ucguguauauacagauuuu

SEQ ID NO: 658809 - RNA, 19 nt, Artificial Sequence
  Description of Artificial Sequence: Synthetic oligonucleotide
gauuagaagggaauuccua

SEQ ID NO: 658810 - RNA, 19 nt, Artificial Sequence
  Description of Artificial Sequence: Synthetic oligonucleotide
cacuaugcuccguaauuuc

SEQ ID NO: 658811 - RNA, 19 nt, Artificial Sequence
  Description of Artificial Sequence: Synthetic oligonucleotide
gaggcaacaguaccucuga

SEQ ID NO: 658812 - RNA, 19 nt, Artificial Sequence
  Description of Artificial Sequence: Synthetic oligonucleotide
uaaguauagcuggccaggu

SEQ ID NO: 658813 - RNA, 19 nt, Artificial Sequence
  Description of Artificial Sequence: Synthetic oligonucleotide
gggagacguagccacaucc

SEQ ID NO: 658814 - RNA, 19 nt, Artificial Sequence
  Description of Artificial Sequence: Synthetic oligonucleotide
cauaacucaucucccacaa

SEQ ID NO: 658815 - RNA, 19 nt, Artificial Sequence
  Description of Artificial Sequence: Synthetic oligonucleotide
auggcuauugcuggaucag

SEQ ID NO: 658816 - RNA, 19 nt, Artificial Sequence
  Description of Artificial Sequence: Synthetic oligonucleotide
gggaaucaaaagcugcuac

SEQ ID NO: 658817 - RNA, 19 nt, Artificial Sequence
  Description of Artificial Sequence: Synthetic oligonucleotide
cucaaaccguguauacuuc

SEQ ID NO: 658818 - RNA, 19 nt, Artificial Sequence
  Description of Artificial Sequence: Synthetic oligonucleotide
aaugguuuccaaggaucaa

SEQ ID NO: 658819 - RNA, 19 nt, Artificial Sequence
  Description of Artificial Sequence: Synthetic oligonucleotide
aguucccgaauugaguagu

SEQ ID NO: 658820 - RNA, 19 nt, Artificial Sequence
  Description of Artificial Sequence: Synthetic oligonucleotide
ccuaaguauagcuggccag

SEQ ID NO: 658821 - RNA, 19 nt, Artificial Sequence
  Description of Artificial Sequence: Synthetic oligonucleotide
acccauaacucaucuccca

SEQ ID NO: 658822 - RNA, 19 nt, Artificial Sequence
  Description of Artificial Sequence: Synthetic oligonucleotide
ucuuaggaucacccacacu

SEQ ID NO: 658823 - RNA, 19 nt, Artificial Sequence
  Description of Artificial Sequence: Synthetic oligonucleotide
acuaugcuccguaauuucu

SEQ ID NO: 658824 - RNA, 19 nt, Artificial Sequence
  Description of Artificial Sequence: Synthetic oligonucleotide
agucccgaaaauagccgac

SEQ ID NO: 658825 - RNA, 19 nt, Artificial Sequence
  Description of Artificial Sequence: Synthetic oligonucleotide
ugacaacccauaacucauc

SEQ ID NO: 658826 - RNA, 19 nt, Artificial Sequence
  Description of Artificial Sequence: Synthetic oligonucleotide
gugcuagacaaaugguuuc

SEQ ID NO: 658827 - RNA, 19 nt, Artificial Sequence
  Description of Artificial Sequence: Synthetic oligonucleotide
uugcucauuaagucaccuc

SEQ ID NO: 658828 - RNA, 19 nt, Artificial Sequence
  Description of Artificial Sequence: Synthetic oligonucleotide
cucgguaggugaaauggga

SEQ ID NO: 658829 - RNA, 19 nt, Artificial Sequence
  Description of Artificial Sequence: Synthetic oligonucleotide
ugcuggccaagcauccuac

SEQ ID NO: 658830 - RNA, 19 nt, Artificial Sequence
  Description of Artificial Sequence: Synthetic oligonucleotide
cacagaucguguauauaca

SEQ ID NO: 658831 - RNA, 19 nt, Artificial Sequence
  Description of Artificial Sequence: Synthetic oligonucleotide
uauucucgguaggugaaau

SEQ ID NO: 658832 - RNA, 19 nt, Artificial Sequence
  Description of Artificial Sequence: Synthetic oligonucleotide
cagcaugugcucuaggaaa

SEQ ID NO: 658833 - RNA, 19 nt, Artificial Sequence
  Description of Artificial Sequence: Synthetic oligonucleotide
ugguucgaauguaggaauu

SEQ ID NO: 658834 - RNA, 19 nt, Artificial Sequence
  Description of Artificial Sequence: Synthetic oligonucleotide
cagaucguguauauacaga

SEQ ID NO: 658835 - RNA, 19 nt, Artificial Sequence
  Description of Artificial Sequence: Synthetic oligonucleotide
gggaauuccuauuuagaaa

SEQ ID NO: 658836 - RNA, 19 nt, Artificial Sequence
  Description of Artificial Sequence: Synthetic oligonucleotide
gcucuuacucagcaugugc

SEQ ID NO: 658837 - RNA, 19 nt, Artificial Sequence
  Description of Artificial Sequence: Synthetic oligonucleotide
ggucuugaaauauaaccua

SEQ ID NO: 658838 - RNA, 19 nt, Artificial Sequence
  Description of Artificial Sequence: Synthetic oligonucleotide
acucacuaugcuccguaau

SEQ ID NO: 658839 - RNA, 19 nt, Artificial Sequence
  Description of Artificial Sequence: Synthetic oligonucleotide
ccgaguuggaguaacagga

SEQ ID NO: 658840 - RNA, 19 nt, Artificial Sequence
  Description of Artificial Sequence: Synthetic oligonucleotide
cuaagaccauuucacuaga

SEQ ID NO: 658841 - RNA, 19 nt, Artificial Sequence
  Description of Artificial Sequence: Synthetic oligonucleotide
guagcugcacuuuuccucu

SEQ ID NO: 658842 - RNA, 19 nt, Artificial Sequence
  Description of Artificial Sequence: Synthetic oligonucleotide
uucguagaaacagguuuau

SEQ ID NO: 658843 - RNA, 19 nt, Artificial Sequence
  Description of Artificial Sequence: Synthetic oligonucleotide
gaugucaaccuugggucca

SEQ ID NO: 658844 - RNA, 19 nt, Artificial Sequence
  Description of Artificial Sequence: Synthetic oligonucleotide
agcugcuacauagcuaaga

SEQ ID NO: 658845 - RNA, 19 nt, Artificial Sequence
  Description of Artificial Sequence: Synthetic oligonucleotide
gucaugguucucccaaaca

SEQ ID NO: 658846 - RNA, 19 nt, Artificial Sequence
  Description of Artificial Sequence: Synthetic oligonucleotide
acacuacugggucaugguu

SEQ ID NO: 658847 - RNA, 19 nt, Artificial Sequence
  Description of Artificial Sequence: Synthetic oligonucleotide
ggaguucccgaauugagua

SEQ ID NO: 658848 - RNA, 19 nt, Artificial Sequence
  Description of Artificial Sequence: Synthetic oligonucleotide
cugcuagaagcacacacaa

SEQ ID NO: 658849 - RNA, 19 nt, Artificial Sequence
  Description of Artificial Sequence: Synthetic oligonucleotide
cccgaguuggaguaacagg

SEQ ID NO: 658850 - RNA, 19 nt, Artificial Sequence
  Description of Artificial Sequence: Synthetic oligonucleotide
uuauucucgguaggugaaa

SEQ ID NO: 658851 - RNA, 19 nt, Artificial Sequence
  Description of Artificial Sequence: Synthetic oligonucleotide
ugcucuuacucagcaugug

SEQ ID NO: 658852 - RNA, 19 nt, Artificial Sequence
  Description of Artificial Sequence: Synthetic oligonucleotide
caugacaagccacaaugcu

SEQ ID NO: 658853 - RNA, 19 nt, Artificial Sequence
  Description of Artificial Sequence: Synthetic oligonucleotide
uaggggaugcagggaauca

SEQ ID NO: 658854 - RNA, 19 nt, Artificial Sequence
  Description of Artificial Sequence: Synthetic oligonucleotide
acacucacuaugcuccgua

SEQ ID NO: 658855 - RNA, 19 nt, Artificial Sequence
  Description of Artificial Sequence: Synthetic oligonucleotide
aucggaguucccgaauuga

SEQ ID NO: 658856 - RNA, 19 nt, Artificial Sequence
  Description of Artificial Sequence: Synthetic oligonucleotide
guuauucucgguaggugaa

SEQ ID NO: 658857 - RNA, 19 nt, Artificial Sequence
  Description of Artificial Sequence: Synthetic oligonucleotide
gcuauugcuggaucaguca

SEQ ID NO: 658858 - RNA, 19 nt, Artificial Sequence
  Description of Artificial Sequence: Synthetic oligonucleotide
aggaacugaugcugcagua

SEQ ID NO: 658859 - RNA, 19 nt, Artificial Sequence
  Description of Artificial Sequence: Synthetic oligonucleotide
guaauuucuccaagaucuc

SEQ ID NO: 658860 - RNA, 19 nt, Artificial Sequence
  Description of Artificial Sequence: Synthetic oligonucleotide
cagguuuauucagguaaac

SEQ ID NO: 658861 - RNA, 19 nt, Artificial Sequence
  Description of Artificial Sequence: Synthetic oligonucleotide
acagguuuauucagguaaa

SEQ ID NO: 658862 - RNA, 19 nt, Artificial Sequence
  Description of Artificial Sequence: Synthetic oligonucleotide
augcuccguaauuucucca

SEQ ID NO: 658863 - RNA, 19 nt, Artificial Sequence
  Description of Artificial Sequence: Synthetic oligonucleotide
caacugauugcaaauugau

SEQ ID NO: 658864 - RNA, 19 nt, Artificial Sequence
  Description of Artificial Sequence: Synthetic oligonucleotide
aagagccuccagccaagua

SEQ ID NO: 658865 - RNA, 19 nt, Artificial Sequence
  Description of Artificial Sequence: Synthetic oligonucleotide
gagacuggagaggggcuug

SEQ ID NO: 658866 - RNA, 19 nt, Artificial Sequence
  Description of Artificial Sequence: Synthetic oligonucleotide
uggcuacauccauugcagu

SEQ ID NO: 658867 - RNA, 19 nt, Artificial Sequence
  Description of Artificial Sequence: Synthetic oligonucleotide
uagcugaaccucucuucuc

SEQ ID NO: 658868 - RNA, 19 nt, Artificial Sequence
  Description of Artificial Sequence: Synthetic oligonucleotide
caugguaguucucccaugu

SEQ ID NO: 658869 - RNA, 19 nt, Artificial Sequence
  Description of Artificial Sequence: Synthetic oligonucleotide
augacuugguucgaaugua

SEQ ID NO: 658870 - RNA, 19 nt, Artificial Sequence
  Description of Artificial Sequence: Synthetic oligonucleotide
cuggccaagcauccuacca

SEQ ID NO: 658871 - RNA, 19 nt, Artificial Sequence
  Description of Artificial Sequence: Synthetic oligonucleotide
gagugagacuggagagggg

SEQ ID NO: 658872 - RNA, 19 nt, Artificial Sequence
  Description of Artificial Sequence: Synthetic oligonucleotide
agucaagaacugauuguaa

SEQ ID NO: 658873 - RNA, 19 nt, Artificial Sequence
  Description of Artificial Sequence: Synthetic oligonucleotide
cuaggggaugcagggaauc

SEQ ID NO: 658874 - RNA, 19 nt, Artificial Sequence
  Description of Artificial Sequence: Synthetic oligonucleotide
gcaaauugauaaugcuauc

SEQ ID NO: 658875 - RNA, 19 nt, Artificial Sequence
  Description of Artificial Sequence: Synthetic oligonucleotide
caggcaacagagccacuuc

SEQ ID NO: 658876 - RNA, 19 nt, Artificial Sequence
  Description of Artificial Sequence: Synthetic oligonucleotide
cccauggcauuccaaacug

SEQ ID NO: 658877 - RNA, 19 nt, Artificial Sequence
  Description of Artificial Sequence: Synthetic oligonucleotide
caccuuguccaaucuucuc

SEQ ID NO: 658878 - RNA, 19 nt, Artificial Sequence
  Description of Artificial Sequence: Synthetic oligonucleotide
ggucaugguucucccaaac

SEQ ID NO: 658879 - RNA, 19 nt, Artificial Sequence
  Description of Artificial Sequence: Synthetic oligonucleotide
uggcuauugcuggaucagu

SEQ ID NO: 658880 - RNA, 19 nt, Artificial Sequence
  Description of Artificial Sequence: Synthetic oligonucleotide
ggagacguagccacauccc

SEQ ID NO: 658881 - RNA, 19 nt, Artificial Sequence
  Description of Artificial Sequence: Synthetic oligonucleotide
gaaucggaguucccgaauu

SEQ ID NO: 658882 - RNA, 19 nt, Artificial Sequence
  Description of Artificial Sequence: Synthetic oligonucleotide
gcagccuaggggaugcagg

SEQ ID NO: 658883 - RNA, 19 nt, Artificial Sequence
  Description of Artificial Sequence: Synthetic oligonucleotide
caguauacacugugccuga

SEQ ID NO: 658884 - RNA, 19 nt, Artificial Sequence
  Description of Artificial Sequence: Synthetic oligonucleotide
gaagcaccuuguccaaucu

SEQ ID NO: 658885 - RNA, 19 nt, Artificial Sequence
  Description of Artificial Sequence: Synthetic oligonucleotide
cacaucccgaguuggagua

SEQ ID NO: 658886 - RNA, 19 nt, Artificial Sequence
  Description of Artificial Sequence: Synthetic oligonucleotide
gguaaacccuugcucauua

SEQ ID NO: 658887 - RNA, 19 nt, Artificial Sequence
  Description of Artificial Sequence: Synthetic oligonucleotide
gguucgaauguaggaauuc

SEQ ID NO: 658888 - RNA, 19 nt, Artificial Sequence
  Description of Artificial Sequence: Synthetic oligonucleotide
uaccucugagcaugacaaa

SEQ ID NO: 658889 - RNA, 19 nt, Artificial Sequence
  Description of Artificial Sequence: Synthetic oligonucleotide
ccaagcauccuaccacagc

SEQ ID NO: 658890 - RNA, 19 nt, Artificial Sequence
  Description of Artificial Sequence: Synthetic oligonucleotide
ugggagacguagccacauc

SEQ ID NO: 658891 - RNA, 19 nt, Artificial Sequence
  Description of Artificial Sequence: Synthetic oligonucleotide
gcuaaaaguagcugcacuu

SEQ ID NO: 658892 - RNA, 19 nt, Artificial Sequence
  Description of Artificial Sequence: Synthetic oligonucleotide
caaucacagaucguguaua

SEQ ID NO: 658893 - RNA, 19 nt, Artificial Sequence
  Description of Artificial Sequence: Synthetic oligonucleotide
cccauaacucaucucccac

SEQ ID NO: 658894 - RNA, 19 nt, Artificial Sequence
  Description of Artificial Sequence: Synthetic oligonucleotide
ucaugaccaggaucucauu

SEQ ID NO: 658895 - RNA, 19 nt, Artificial Sequence
  Description of Artificial Sequence: Synthetic oligonucleotide
cagugcuagacaaaugguu

SEQ ID NO: 658896 - RNA, 19 nt, Artificial Sequence
  Description of Artificial Sequence: Synthetic oligonucleotide
ccuauuuagaaauggcuau

SEQ ID NO: 658897 - RNA, 19 nt, Artificial Sequence
  Description of Artificial Sequence: Synthetic oligonucleotide
guucaaucacagaucgugu

SEQ ID NO: 658898 - RNA, 19 nt, Artificial Sequence
  Description of Artificial Sequence: Synthetic oligonucleotide
augggagacguagccacau

SEQ ID NO: 658899 - RNA, 19 nt, Artificial Sequence
  Description of Artificial Sequence: Synthetic oligonucleotide
ucguagaaacagguuuauu

SEQ ID NO: 658900 - RNA, 19 nt, Artificial Sequence
  Description of Artificial Sequence: Synthetic oligonucleotide
uucccgaauugaguaguuu

SEQ ID NO: 658901 - RNA, 19 nt, Artificial Sequence
  Description of Artificial Sequence: Synthetic oligonucleotide
gaaggcuuggcacgaugau

SEQ ID NO: 658902 - RNA, 19 nt, Artificial Sequence
  Description of Artificial Sequence: Synthetic oligonucleotide
ggcuauugcuggaucaguc

SEQ ID NO: 658903 - RNA, 19 nt, Artificial Sequence
  Description of Artificial Sequence: Synthetic oligonucleotide
gucccgaaaauagccgaca

SEQ ID NO: 658904 - RNA, 19 nt, Artificial Sequence
  Description of Artificial Sequence: Synthetic oligonucleotide
guaaacccuugcucauuaa

SEQ ID NO: 658905 - RNA, 19 nt, Artificial Sequence
  Description of Artificial Sequence: Synthetic oligonucleotide
aucacagaucguguauaua

SEQ ID NO: 658906 - RNA, 19 nt, Artificial Sequence
  Description of Artificial Sequence: Synthetic oligonucleotide
gugaaugacuugguucgaa

SEQ ID NO: 658907 - RNA, 19 nt, Artificial Sequence
  Description of Artificial Sequence: Synthetic oligonucleotide
cuacauccauugcaguaua

SEQ ID NO: 658908 - RNA, 19 nt, Artificial Sequence
  Description of Artificial Sequence: Synthetic oligonucleotide
ccauaacucaucucccaca

SEQ ID NO: 658909 - RNA, 19 nt, Artificial Sequence
  Description of Artificial Sequence: Synthetic oligonucleotide
gguguuugggcaauuuggu

SEQ ID NO: 658910 - RNA, 19 nt, Artificial Sequence
  Description of Artificial Sequence: Synthetic oligonucleotide
gagccacuucaugucccug

SEQ ID NO: 658911 - RNA, 19 nt, Artificial Sequence
  Description of Artificial Sequence: Synthetic oligonucleotide
cugcucuuacucagcaugu

SEQ ID NO: 658912 - RNA, 19 nt, Artificial Sequence
  Description of Artificial Sequence: Synthetic oligonucleotide
gaucguguauauacagauu

SEQ ID NO: 658913 - RNA, 19 nt, Artificial Sequence
  Description of Artificial Sequence: Synthetic oligonucleotide
cacucacuaugcuccguaa

SEQ ID NO: 658914 - RNA, 19 nt, Artificial Sequence
  Description of Artificial Sequence: Synthetic oligonucleotide
acguagccacaucccgagu

SEQ ID NO: 658915 - RNA, 19 nt, Artificial Sequence
  Description of Artificial Sequence: Synthetic oligonucleotide
ggauuagaagggaauuccu

SEQ ID NO: 658916 - RNA, 19 nt, Artificial Sequence
  Description of Artificial Sequence: Synthetic oligonucleotide
gcuggccaagcauccuacc

SEQ ID NO: 658917 - RNA, 19 nt, Artificial Sequence
  Description of Artificial Sequence: Synthetic oligonucleotide
auagaaggcuuggcacgau

SEQ ID NO: 658918 - RNA, 19 nt, Artificial Sequence
  Description of Artificial Sequence: Synthetic oligonucleotide
gcaaucuuuaggaacugau

SEQ ID NO: 658919 - RNA, 19 nt, Artificial Sequence
  Description of Artificial Sequence: Synthetic oligonucleotide
agguaacuguccagauagu

SEQ ID NO: 658920 - RNA, 19 nt, Artificial Sequence
  Description of Artificial Sequence: Synthetic oligonucleotide
cgaauguaggaauuccaaa

SEQ ID NO: 658921 - RNA, 19 nt, Artificial Sequence
  Description of Artificial Sequence: Synthetic oligonucleotide
gcuacauccauugcaguau

SEQ ID NO: 658922 - RNA, 19 nt, Artificial Sequence
  Description of Artificial Sequence: Synthetic oligonucleotide
acgaugaucugggguggau

SEQ ID NO: 658923 - RNA, 19 nt, Artificial Sequence
  Description of Artificial Sequence: Synthetic oligonucleotide
caaaccguguauacuucuu

SEQ ID NO: 658924 - RNA, 19 nt, Artificial Sequence
  Description of Artificial Sequence: Synthetic oligonucleotide
ccgaaaauagccgacaguu

SEQ ID NO: 658925 - RNA, 19 nt, Artificial Sequence
  Description of Artificial Sequence: Synthetic oligonucleotide
ucucggcacacagcugcua

SEQ ID NO: 658926 - RNA, 19 nt, Artificial Sequence
  Description of Artificial Sequence: Synthetic oligonucleotide
uugcucugcucuggaguua

SEQ ID NO: 658927 - RNA, 19 nt, Artificial Sequence
  Description of Artificial Sequence: Synthetic oligonucleotide
aucccgaguuggaguaaca

SEQ ID NO: 658928 - RNA, 19 nt, Artificial Sequence
  Description of Artificial Sequence: Synthetic oligonucleotide
guauuccgggucaaagcau

SEQ ID NO: 658929 - RNA, 19 nt, Artificial Sequence
  Description of Artificial Sequence: Synthetic oligonucleotide
ggucaugguucaggcaaca

SEQ ID NO: 658930 - RNA, 19 nt, Artificial Sequence
  Description of Artificial Sequence: Synthetic oligonucleotide
acaucccgaguuggaguaa

SEQ ID NO: 658931 - RNA, 19 nt, Artificial Sequence
  Description of Artificial Sequence: Synthetic oligonucleotide
gggguggaugugguuucag

SEQ ID NO: 658932 - RNA, 19 nt, Artificial Sequence
  Description of Artificial Sequence: Synthetic oligonucleotide
ugucaaccuuggguccaua

SEQ ID NO: 658933 - RNA, 19 nt, Artificial Sequence
  Description of Artificial Sequence: Synthetic oligonucleotide
ggaacacuacugggucaug

SEQ ID NO: 658934 - RNA, 19 nt, Artificial Sequence
  Description of Artificial Sequence: Synthetic oligonucleotide
ggaguaacaggaagugguu

SEQ ID NO: 658935 - RNA, 19 nt, Artificial Sequence
  Description of Artificial Sequence: Synthetic oligonucleotide
gaggggcuuggcaaucuuu

SEQ ID NO: 658936 - RNA, 19 nt, Artificial Sequence
  Description of Artificial Sequence: Synthetic oligonucleotide
cacccacacucacuaugcu

SEQ ID NO: 658937 - RNA, 19 nt, Artificial Sequence
  Description of Artificial Sequence: Synthetic oligonucleotide
ccacaucccgaguuggagu

SEQ ID NO: 658938 - RNA, 19 nt, Artificial Sequence
  Description of Artificial Sequence: Synthetic oligonucleotide
gccgacaguuucucugggu

SEQ ID NO: 658939 - RNA, 19 nt, Artificial Sequence
  Description of Artificial Sequence: Synthetic oligonucleotide
ccgacaguuucucuggguu

SEQ ID NO: 658940 - RNA, 19 nt, Artificial Sequence
  Description of Artificial Sequence: Synthetic oligonucleotide
guucccgaauugaguaguu

SEQ ID NO: 658941 - RNA, 19 nt, Artificial Sequence
  Description of Artificial Sequence: Synthetic oligonucleotide
cccgaaaauagccgacagu

SEQ ID NO: 658942 - RNA, 19 nt, Artificial Sequence
  Description of Artificial Sequence: Synthetic oligonucleotide
ccccaugcccauggauuag

SEQ ID NO: 658943 - RNA, 19 nt, Artificial Sequence
  Description of Artificial Sequence: Synthetic oligonucleotide
gcuacauagcuaagaccau

SEQ ID NO: 658944 - RNA, 19 nt, Artificial Sequence
  Description of Artificial Sequence: Synthetic oligonucleotide
ccgggucaaagcaucuggu

SEQ ID NO: 658945 - RNA, 19 nt, Artificial Sequence
  Description of Artificial Sequence: Synthetic oligonucleotide
cgaaaauagccgacaguuu

SEQ ID NO: 658946 - RNA, 19 nt, Artificial Sequence
  Description of Artificial Sequence: Synthetic oligonucleotide
uuugauuaggcugugaccc

SEQ ID NO: 658947 - RNA, 19 nt, Artificial Sequence
  Description of Artificial Sequence: Synthetic oligonucleotide
uccuggucgacaaugaagg

SEQ ID NO: 658948 - RNA, 19 nt, Artificial Sequence
  Description of Artificial Sequence: Synthetic oligonucleotide
aaccuagcagcacagggcg

SEQ ID NO: 658949 - RNA, 19 nt, Artificial Sequence
  Description of Artificial Sequence: Synthetic oligonucleotide
agacggagcaccuuggagc

SEQ ID NO: 658950 - RNA, 19 nt, Artificial Sequence
  Description of Artificial Sequence: Synthetic oligonucleotide
agaaaggggaccucggggc

SEQ ID NO: 658951 - RNA, 19 nt, Artificial Sequence
  Description of Artificial Sequence: Synthetic oligonucleotide
uuuagcuguggccacaacc

SEQ ID NO: 658952 - RNA, 19 nt, Artificial Sequence
  Description of Artificial Sequence: Synthetic oligonucleotide
gauacccgggccuugaagg

SEQ ID NO: 658953 - RNA, 19 nt, Artificial Sequence
  Description of Artificial Sequence: Synthetic oligonucleotide
ucgacaaugaaggaggugc

SEQ ID NO: 658954 - RNA, 19 nt, Artificial Sequence
  Description of Artificial Sequence: Synthetic oligonucleotide
acgggaguaaauuugggag

SEQ ID NO: 658955 - RNA, 19 nt, Artificial Sequence
  Description of Artificial Sequence: Synthetic oligonucleotide
aagggaucauucuugguca

SEQ ID NO: 658956 - RNA, 19 nt, Artificial Sequence
  Description of Artificial Sequence: Synthetic oligonucleotide
agggucucgguauagcagc

SEQ ID NO: 658957 - RNA, 19 nt, Artificial Sequence
  Description of Artificial Sequence: Synthetic oligonucleotide
acaaccuagcagcacaggg

SEQ ID NO: 658958 - RNA, 19 nt, Artificial Sequence
  Description of Artificial Sequence: Synthetic oligonucleotide
agagcgacaacucguacag

SEQ ID NO: 658959 - RNA, 19 nt, Artificial Sequence
  Description of Artificial Sequence: Synthetic oligonucleotide
agcgacaacucguacaguc

SEQ ID NO: 658960 - RNA, 19 nt, Artificial Sequence
  Description of Artificial Sequence: Synthetic oligonucleotide
aaaacgccggagccgacac

SEQ ID NO: 658961 - RNA, 19 nt, Artificial Sequence
  Description of Artificial Sequence: Synthetic oligonucleotide
auauccagaugauacccgg

SEQ ID NO: 658962 - RNA, 19 nt, Artificial Sequence
  Description of Artificial Sequence: Synthetic oligonucleotide
uccacuuagagugccaggg

SEQ ID NO: 658963 - RNA, 19 nt, Artificial Sequence
  Description of Artificial Sequence: Synthetic oligonucleotide
cuuccgacaaaggacaugg

SEQ ID NO: 658964 - RNA, 19 nt, Artificial Sequence
  Description of Artificial Sequence: Synthetic oligonucleotide
gauucucccacccucagca

SEQ ID NO: 658965 - RNA, 19 nt, Artificial Sequence
  Description of Artificial Sequence: Synthetic oligonucleotide
uucugcggggcguaaaacg

SEQ ID NO: 658966 - RNA, 19 nt, Artificial Sequence
  Description of Artificial Sequence: Synthetic oligonucleotide
gagaaaggggaccucgggg

SEQ ID NO: 658967 - RNA, 19 nt, Artificial Sequence
  Description of Artificial Sequence: Synthetic oligonucleotide
ugagaaaggggaccucggg

SEQ ID NO: 658968 - RNA, 19 nt, Artificial Sequence
  Description of Artificial Sequence: Synthetic oligonucleotide
augggcuccgagcagacgg

SEQ ID NO: 658969 - RNA, 19 nt, Artificial Sequence
  Description of Artificial Sequence: Synthetic oligonucleotide
aaacuuaggugcgggaguc

SEQ ID NO: 658970 - RNA, 19 nt, Artificial Sequence
  Description of Artificial Sequence: Synthetic oligonucleotide
gagucaauuguuccaauuc

SEQ ID NO: 658971 - RNA, 19 nt, Artificial Sequence
  Description of Artificial Sequence: Synthetic oligonucleotide
uggggaauggaccuguagu

SEQ ID NO: 658972 - RNA, 19 nt, Artificial Sequence
  Description of Artificial Sequence: Synthetic oligonucleotide
ugaacuaagggcuucucuu

SEQ ID NO: 658973 - RNA, 19 nt, Artificial Sequence
  Description of Artificial Sequence: Synthetic oligonucleotide
auaggcaaucccaugagag

SEQ ID NO: 658974 - RNA, 19 nt, Artificial Sequence
  Description of Artificial Sequence: Synthetic oligonucleotide
ucugcggggcguaaaacgc

SEQ ID NO: 658975 - RNA, 19 nt, Artificial Sequence
  Description of Artificial Sequence: Synthetic oligonucleotide
uguggcacuuccgacaaag

SEQ ID NO: 658976 - RNA, 19 nt, Artificial Sequence
  Description of Artificial Sequence: Synthetic oligonucleotide
agcaacagcacuaaaugug

SEQ ID NO: 658977 - RNA, 19 nt, Artificial Sequence
  Description of Artificial Sequence: Synthetic oligonucleotide
agaaugauaggcaauccca

SEQ ID NO: 658978 - RNA, 19 nt, Artificial Sequence
  Description of Artificial Sequence: Synthetic oligonucleotide
uggaaugcagggaggguag

SEQ ID NO: 658979 - RNA, 19 nt, Artificial Sequence
  Description of Artificial Sequence: Synthetic oligonucleotide
aacgccggagccgacacgg

SEQ ID NO: 658980 - RNA, 19 nt, Artificial Sequence
  Description of Artificial Sequence: Synthetic oligonucleotide
aaugugagccucggguugg

SEQ ID NO: 658981 - RNA, 19 nt, Artificial Sequence
  Description of Artificial Sequence: Synthetic oligonucleotide
cuagaaggggucuuccaag

SEQ ID NO: 658982 - RNA, 19 nt, Artificial Sequence
  Description of Artificial Sequence: Synthetic oligonucleotide
uugaacuaagggcuucucu

SEQ ID NO: 658983 - RNA, 19 nt, Artificial Sequence
  Description of Artificial Sequence: Synthetic oligonucleotide
ggaccuguagucuggaagg

SEQ ID NO: 658984 - RNA, 19 nt, Artificial Sequence
  Description of Artificial Sequence: Synthetic oligonucleotide
aguaaauuugggagccacc

SEQ ID NO: 658985 - RNA, 19 nt, Artificial Sequence
  Description of Artificial Sequence: Synthetic oligonucleotide
caaccuagcagcacagggc

SEQ ID NO: 658986 - RNA, 19 nt, Artificial Sequence
  Description of Artificial Sequence: Synthetic oligonucleotide
ugcggugggagcugggugg

SEQ ID NO: 658987 - RNA, 19 nt, Artificial Sequence
  Description of Artificial Sequence: Synthetic oligonucleotide
cuugagauacuggggaggg

SEQ ID NO: 658988 - RNA, 19 nt, Artificial Sequence
  Description of Artificial Sequence: Synthetic oligonucleotide
ucguacagucucaucucgg

SEQ ID NO: 658989 - RNA, 19 nt, Artificial Sequence
  Description of Artificial Sequence: Synthetic oligonucleotide
accggagcaaacuuaggug

SEQ ID NO: 658990 - RNA, 19 nt, Artificial Sequence
  Description of Artificial Sequence: Synthetic oligonucleotide
uggagcauacugcuuguga

SEQ ID NO: 658991 - RNA, 19 nt, Artificial Sequence
  Description of Artificial Sequence: Synthetic oligonucleotide
cuaggcuugggaacaaaug

SEQ ID NO: 658992 - RNA, 19 nt, Artificial Sequence
  Description of Artificial Sequence: Synthetic oligonucleotide
acacaggugaagcaaugug

SEQ ID NO: 658993 - RNA, 19 nt, Artificial Sequence
  Description of Artificial Sequence: Synthetic oligonucleotide
uucggcgccacaaccgggg

SEQ ID NO: 658994 - RNA, 19 nt, Artificial Sequence
  Description of Artificial Sequence: Synthetic oligonucleotide
gagucggagccugagaaag

SEQ ID NO: 658995 - RNA, 19 nt, Artificial Sequence
  Description of Artificial Sequence: Synthetic oligonucleotide
aaaacggcaccccguccag

SEQ ID NO: 658996 - RNA, 19 nt, Artificial Sequence
  Description of Artificial Sequence: Synthetic oligonucleotide
gaggguucgggauucuccc

SEQ ID NO: 658997 - RNA, 19 nt, Artificial Sequence
  Description of Artificial Sequence: Synthetic oligonucleotide
ucgcauucugccucugagg

SEQ ID NO: 658998 - RNA, 19 nt, Artificial Sequence
  Description of Artificial Sequence: Synthetic oligonucleotide
ugauuaggcugugacccgg

SEQ ID NO: 658999 - RNA, 19 nt, Artificial Sequence
  Description of Artificial Sequence: Synthetic oligonucleotide
ugcggggcguaaaacgccg

SEQ ID NO: 659000 - RNA, 19 nt, Artificial Sequence
  Description of Artificial Sequence: Synthetic oligonucleotide
uugguacuaggcuugggaa

SEQ ID NO: 659001 - RNA, 19 nt, Artificial Sequence
  Description of Artificial Sequence: Synthetic oligonucleotide
ggggauuucgcccacccgg

SEQ ID NO: 659002 - RNA, 19 nt, Artificial Sequence
  Description of Artificial Sequence: Synthetic oligonucleotide
uucucccacccucagcaag

SEQ ID NO: 659003 - RNA, 19 nt, Artificial Sequence
  Description of Artificial Sequence: Synthetic oligonucleotide
ccaggcucaggcaugaugg

SEQ ID NO: 659004 - RNA, 19 nt, Artificial Sequence
  Description of Artificial Sequence: Synthetic oligonucleotide
uuaggugcgggagucggag

SEQ ID NO: 659005 - RNA, 19 nt, Artificial Sequence
  Description of Artificial Sequence: Synthetic oligonucleotide
uagcagcccucgcaaaacg

SEQ ID NO: 659006 - RNA, 19 nt, Artificial Sequence
  Description of Artificial Sequence: Synthetic oligonucleotide
ucucccuaggcugcggugg

SEQ ID NO: 659007 - RNA, 19 nt, Artificial Sequence
  Description of Artificial Sequence: Synthetic oligonucleotide
gcuugugauagucagggac

SEQ ID NO: 659008 - RNA, 19 nt, Artificial Sequence
  Description of Artificial Sequence: Synthetic oligonucleotide
ggagccgacacggagacgg

SEQ ID NO: 659009 - RNA, 19 nt, Artificial Sequence
  Description of Artificial Sequence: Synthetic oligonucleotide
gaauggaccuguagucugg

SEQ ID NO: 659010 - RNA, 19 nt, Artificial Sequence
  Description of Artificial Sequence: Synthetic oligonucleotide
ugguacuaggcuugggaac

SEQ ID NO: 659011 - RNA, 19 nt, Artificial Sequence
  Description of Artificial Sequence: Synthetic oligonucleotide
gauuucgcccacccggccc

SEQ ID NO: 659012 - RNA, 19 nt, Artificial Sequence
  Description of Artificial Sequence: Synthetic oligonucleotide
cucgcaaaacggcaccccg

SEQ ID NO: 659013 - RNA, 19 nt, Artificial Sequence
  Description of Artificial Sequence: Synthetic oligonucleotide
ucaggcaugaugggcuccg

SEQ ID NO: 659014 - RNA, 19 nt, Artificial Sequence
  Description of Artificial Sequence: Synthetic oligonucleotide
auacccgggccuugaaggg

SEQ ID NO: 659015 - RNA, 19 nt, Artificial Sequence
  Description of Artificial Sequence: Synthetic oligonucleotide
cucgguauagcagcccucg

SEQ ID NO: 659016 - RNA, 19 nt, Artificial Sequence
  Description of Artificial Sequence: Synthetic oligonucleotide
agugcauaggcugcucagg

SEQ ID NO: 659017 - RNA, 19 nt, Artificial Sequence
  Description of Artificial Sequence: Synthetic oligonucleotide
ugaaggaggugcccuccag

SEQ ID NO: 659018 - RNA, 19 nt, Artificial Sequence
  Description of Artificial Sequence: Synthetic oligonucleotide
cugagaaaggggaccucgg

SEQ ID NO: 659019 - RNA, 19 nt, Artificial Sequence
  Description of Artificial Sequence: Synthetic oligonucleotide
gaguaaauuugggagccac

SEQ ID NO: 659020 - RNA, 19 nt, Artificial Sequence
  Description of Artificial Sequence: Synthetic oligonucleotide
ucggccgcacaacucaggc

SEQ ID NO: 659021 - RNA, 19 nt, Artificial Sequence
  Description of Artificial Sequence: Synthetic oligonucleotide
ugagucaauuguuccaauu

SEQ ID NO: 659022 - RNA, 19 nt, Artificial Sequence
  Description of Artificial Sequence: Synthetic oligonucleotide
cucgcauucugccucugag

SEQ ID NO: 659023 - RNA, 19 nt, Artificial Sequence
  Description of Artificial Sequence: Synthetic oligonucleotide
ugggaacaaauggaguggc

SEQ ID NO: 659024 - RNA, 19 nt, Artificial Sequence
  Description of Artificial Sequence: Synthetic oligonucleotide
cccggguccacuuagagug

SEQ ID NO: 659025 - RNA, 19 nt, Artificial Sequence
  Description of Artificial Sequence: Synthetic oligonucleotide
ucggagccugagaaagggg

SEQ ID NO: 659026 - RNA, 19 nt, Artificial Sequence
  Description of Artificial Sequence: Synthetic oligonucleotide
agccguugucaucagccuc

SEQ ID NO: 659027 - RNA, 19 nt, Artificial Sequence
  Description of Artificial Sequence: Synthetic oligonucleotide
gucagggcacuugagauac

SEQ ID NO: 659028 - RNA, 19 nt, Artificial Sequence
  Description of Artificial Sequence: Synthetic oligonucleotide
ucgggauucucccacccuc

SEQ ID NO: 659029 - RNA, 19 nt, Artificial Sequence
  Description of Artificial Sequence: Synthetic oligonucleotide
ucuucugcggggcguaaaa

SEQ ID NO: 659030 - RNA, 19 nt, Artificial Sequence
  Description of Artificial Sequence: Synthetic oligonucleotide
aucgugagcgccgcguccc

SEQ ID NO: 659031 - RNA, 19 nt, Artificial Sequence
  Description of Artificial Sequence: Synthetic oligonucleotide
cugugcacggggcaggggc

SEQ ID NO: 659032 - RNA, 19 nt, Artificial Sequence
  Description of Artificial Sequence: Synthetic oligonucleotide
ggggaccucagaaugauag

SEQ ID NO: 659033 - RNA, 19 nt, Artificial Sequence
  Description of Artificial Sequence: Synthetic oligonucleotide
gagcaaacuuaggugcggg

SEQ ID NO: 659034 - RNA, 19 nt, Artificial Sequence
  Description of Artificial Sequence: Synthetic oligonucleotide
cucgcuguccccaggccgg

SEQ ID NO: 659035 - RNA, 19 nt, Artificial Sequence
  Description of Artificial Sequence: Synthetic oligonucleotide
caacagcacuaaaugugag

SEQ ID NO: 659036 - RNA, 19 nt, Artificial Sequence
  Description of Artificial Sequence: Synthetic oligonucleotide
accggggcgaacuucuucu

SEQ ID NO: 659037 - RNA, 19 nt, Artificial Sequence
  Description of Artificial Sequence: Synthetic oligonucleotide
ggaauggaccuguagucug

SEQ ID NO: 659038 - RNA, 19 nt, Artificial Sequence
  Description of Artificial Sequence: Synthetic oligonucleotide
ucagugugggugguccacg

SEQ ID NO: 659039 - RNA, 19 nt, Artificial Sequence
  Description of Artificial Sequence: Synthetic oligonucleotide
cacuuucucccuaggcugc

SEQ ID NO: 659040 - RNA, 19 nt, Artificial Sequence
  Description of Artificial Sequence: Synthetic oligonucleotide
gggguacauauccagauga

SEQ ID NO: 659041 - RNA, 19 nt, Artificial Sequence
  Description of Artificial Sequence: Synthetic oligonucleotide
gacggagaccgccggaggc

SEQ ID NO: 659042 - RNA, 19 nt, Artificial Sequence
  Description of Artificial Sequence: Synthetic oligonucleotide
aaacgccggagccgacacg

SEQ ID NO: 659043 - RNA, 19 nt, Artificial Sequence
  Description of Artificial Sequence: Synthetic oligonucleotide
ccggagcaaacuuaggugc

SEQ ID NO: 659044 - RNA, 19 nt, Artificial Sequence
  Description of Artificial Sequence: Synthetic oligonucleotide
gugugggugguccacggug

SEQ ID NO: 659045 - RNA, 19 nt, Artificial Sequence
  Description of Artificial Sequence: Synthetic oligonucleotide
aggggcucguggcaucggc

SEQ ID NO: 659046 - RNA, 19 nt, Artificial Sequence
  Description of Artificial Sequence: Synthetic oligonucleotide
ggggcgaacuucuucugcg

SEQ ID NO: 659047 - RNA, 19 nt, Artificial Sequence
  Description of Artificial Sequence: Synthetic oligonucleotide
agcagccguugucaucagc

SEQ ID NO: 659048 - RNA, 19 nt, Artificial Sequence
  Description of Artificial Sequence: Synthetic oligonucleotide
gcgaggauuggucucagug

SEQ ID NO: 659049 - RNA, 19 nt, Artificial Sequence
  Description of Artificial Sequence: Synthetic oligonucleotide
ugggcucuagcaguguggc

SEQ ID NO: 659050 - RNA, 19 nt, Artificial Sequence
  Description of Artificial Sequence: Synthetic oligonucleotide
uaaaacgccggagccgaca

SEQ ID NO: 659051 - RNA, 19 nt, Artificial Sequence
  Description of Artificial Sequence: Synthetic oligonucleotide
uccucaacucaggucuggg

SEQ ID NO: 659052 - RNA, 19 nt, Artificial Sequence
  Description of Artificial Sequence: Synthetic oligonucleotide
gauuaggcugugacccggg

SEQ ID NO: 659053 - RNA, 19 nt, Artificial Sequence
  Description of Artificial Sequence: Synthetic oligonucleotide
uuucucccuaggcugcggu

SEQ ID NO: 659054 - RNA, 19 nt, Artificial Sequence
  Description of Artificial Sequence: Synthetic oligonucleotide
ggauuggucucaguguggg

SEQ ID NO: 659055 - RNA, 19 nt, Artificial Sequence
  Description of Artificial Sequence: Synthetic oligonucleotide
ggcguaaaacgccggagcc

SEQ ID NO: 659056 - RNA, 19 nt, Artificial Sequence
  Description of Artificial Sequence: Synthetic oligonucleotide
gagacggagaccgccggag

SEQ ID NO: 659057 - RNA, 19 nt, Artificial Sequence
  Description of Artificial Sequence: Synthetic oligonucleotide
ggcaugaugggcuccgagc

SEQ ID NO: 659058 - RNA, 19 nt, Artificial Sequence
  Description of Artificial Sequence: Synthetic oligonucleotide
cacgggaguaaauuuggga

SEQ ID NO: 659059 - RNA, 19 nt, Artificial Sequence
  Description of Artificial Sequence: Synthetic oligonucleotide
cauucuuggucaugucauc

SEQ ID NO: 659060 - RNA, 19 nt, Artificial Sequence
  Description of Artificial Sequence: Synthetic oligonucleotide
ucgcaaaacggcaccccgu

SEQ ID NO: 659061 - RNA, 19 nt, Artificial Sequence
  Description of Artificial Sequence: Synthetic oligonucleotide
cagacggagcaccuuggag

SEQ ID NO: 659062 - RNA, 19 nt, Artificial Sequence
  Description of Artificial Sequence: Synthetic oligonucleotide
gaucgugagcgccgcgucc

SEQ ID NO: 659063 - RNA, 19 nt, Artificial Sequence
  Description of Artificial Sequence: Synthetic oligonucleotide
ggggcuguacauuagugga

SEQ ID NO: 659064 - RNA, 19 nt, Artificial Sequence
  Description of Artificial Sequence: Synthetic oligonucleotide
auuucgcccacccggccca

SEQ ID NO: 659065 - RNA, 19 nt, Artificial Sequence
  Description of Artificial Sequence: Synthetic oligonucleotide
guccacuuagagugccagg

SEQ ID NO: 659066 - RNA, 19 nt, Artificial Sequence
  Description of Artificial Sequence: Synthetic oligonucleotide
agacggagaccgccggagg

SEQ ID NO: 659067 - RNA, 19 nt, Artificial Sequence
  Description of Artificial Sequence: Synthetic oligonucleotide
gacggagacggagaccgcc

SEQ ID NO: 659068 - RNA, 19 nt, Artificial Sequence
  Description of Artificial Sequence: Synthetic oligonucleotide
acuuagagugccagggcug

SEQ ID NO: 659069 - RNA, 19 nt, Artificial Sequence
  Description of Artificial Sequence: Synthetic oligonucleotide
cagagcgacaacucguaca

SEQ ID NO: 659070 - RNA, 19 nt, Artificial Sequence
  Description of Artificial Sequence: Synthetic oligonucleotide
agcaaacuuaggugcggga

SEQ ID NO: 659071 - RNA, 19 nt, Artificial Sequence
  Description of Artificial Sequence: Synthetic oligonucleotide
aggagagcgcaccugguuu

SEQ ID NO: 659072 - RNA, 19 nt, Artificial Sequence
  Description of Artificial Sequence: Synthetic oligonucleotide
agagggaagcagccguugu

SEQ ID NO: 659073 - RNA, 19 nt, Artificial Sequence
  Description of Artificial Sequence: Synthetic oligonucleotide
uucgggauucucccacccu

SEQ ID NO: 659074 - RNA, 19 nt, Artificial Sequence
  Description of Artificial Sequence: Synthetic oligonucleotide
guggggaauggaccuguag

SEQ ID NO: 659075 - RNA, 19 nt, Artificial Sequence
  Description of Artificial Sequence: Synthetic oligonucleotide
gugacccggguccacuuag

SEQ ID NO: 659076 - RNA, 19 nt, Artificial Sequence
  Description of Artificial Sequence: Synthetic oligonucleotide
agcuagaaggggucuucca

SEQ ID NO: 659077 - RNA, 19 nt, Artificial Sequence
  Description of Artificial Sequence: Synthetic oligonucleotide
ucugagggugcuccauguc

SEQ ID NO: 659078 - RNA, 19 nt, Artificial Sequence
  Description of Artificial Sequence: Synthetic oligonucleotide
cauaggcugcucaggccag

SEQ ID NO: 659079 - RNA, 19 nt, Artificial Sequence
  Description of Artificial Sequence: Synthetic oligonucleotide
gguauagcagcccucgcaa

SEQ ID NO: 659080 - RNA, 19 nt, Artificial Sequence
  Description of Artificial Sequence: Synthetic oligonucleotide
ugucgacacugauggcaag

SEQ ID NO: 659081 - RNA, 19 nt, Artificial Sequence
  Description of Artificial Sequence: Synthetic oligonucleotide
cgcauucugccucugaggg

SEQ ID NO: 659082 - RNA, 19 nt, Artificial Sequence
  Description of Artificial Sequence: Synthetic oligonucleotide
ggcgaacuucuucugcggg

SEQ ID NO: 659083 - RNA, 19 nt, Artificial Sequence
  Description of Artificial Sequence: Synthetic oligonucleotide
gaccgcaggcugugcacgg

SEQ ID NO: 659084 - RNA, 19 nt, Artificial Sequence
  Description of Artificial Sequence: Synthetic oligonucleotide
ugguccacgguggggaaug

SEQ ID NO: 659085 - RNA, 19 nt, Artificial Sequence
  Description of Artificial Sequence: Synthetic oligonucleotide
ugugcacggggcaggggcu

SEQ ID NO: 659086 - RNA, 19 nt, Artificial Sequence
  Description of Artificial Sequence: Synthetic oligonucleotide
gcgaacuucuucugcgggg

SEQ ID NO: 659087 - RNA, 19 nt, Artificial Sequence
  Description of Artificial Sequence: Synthetic oligonucleotide
gggaccucagaaugauagg

SEQ ID NO: 659088 - RNA, 19 nt, Artificial Sequence
  Description of Artificial Sequence: Synthetic oligonucleotide
cagugugggugguccacgg

SEQ ID NO: 659089 - RNA, 19 nt, Artificial Sequence
  Description of Artificial Sequence: Synthetic oligonucleotide
gcagccguugucaucagcc

SEQ ID NO: 659090 - RNA, 19 nt, Artificial Sequence
  Description of Artificial Sequence: Synthetic oligonucleotide
uuuuagcuguggccacaac

SEQ ID NO: 659091 - RNA, 19 nt, Artificial Sequence
  Description of Artificial Sequence: Synthetic oligonucleotide
cugcggggcguaaaacgcc

SEQ ID NO: 659092 - RNA, 19 nt, Artificial Sequence
  Description of Artificial Sequence: Synthetic oligonucleotide
uucucccuaggcugcggug

SEQ ID NO: 659093 - RNA, 19 nt, Artificial Sequence
  Description of Artificial Sequence: Synthetic oligonucleotide
ucgguauagcagcccucgc

SEQ ID NO: 659094 - RNA, 19 nt, Artificial Sequence
  Description of Artificial Sequence: Synthetic oligonucleotide
ggaacagcugucccagggc

SEQ ID NO: 659095 - RNA, 19 nt, Artificial Sequence
  Description of Artificial Sequence: Synthetic oligonucleotide
uuccgacaaaggacauggc

SEQ ID NO: 659096 - RNA, 19 nt, Artificial Sequence
  Description of Artificial Sequence: Synthetic oligonucleotide
caguguggcacuuccgaca

SEQ ID NO: 659097 - RNA, 19 nt, Artificial Sequence
  Description of Artificial Sequence: Synthetic oligonucleotide
acaaccggggcgaacuucu

SEQ ID NO: 659098 - RNA, 19 nt, Artificial Sequence
  Description of Artificial Sequence: Synthetic oligonucleotide
auuaggcugugacccgggu

SEQ ID NO: 659099 - RNA, 19 nt, Artificial Sequence
  Description of Artificial Sequence: Synthetic oligonucleotide
gaugauacccgggccuuga

SEQ ID NO: 659100 - RNA, 19 nt, Artificial Sequence
  Description of Artificial Sequence: Synthetic oligonucleotide
cacuuugggcuucggcgcc

SEQ ID NO: 659101 - RNA, 19 nt, Artificial Sequence
  Description of Artificial Sequence: Synthetic oligonucleotide
cacagggcgaaggugggug

SEQ ID NO: 659102 - RNA, 19 nt, Artificial Sequence
  Description of Artificial Sequence: Synthetic oligonucleotide
ucucgguauagcagcccuc

SEQ ID NO: 659103 - RNA, 19 nt, Artificial Sequence
  Description of Artificial Sequence: Synthetic oligonucleotide
ugcgcgcgcaggaucguga

SEQ ID NO: 659104 - RNA, 19 nt, Artificial Sequence
  Description of Artificial Sequence: Synthetic oligonucleotide
cuucggcgccacaaccggg

SEQ ID NO: 659105 - RNA, 19 nt, Artificial Sequence
  Description of Artificial Sequence: Synthetic oligonucleotide
gccacgggaguaaauuugg

SEQ ID NO: 659106 - RNA, 19 nt, Artificial Sequence
  Description of Artificial Sequence: Synthetic oligonucleotide
gacaacucguacagucuca

SEQ ID NO: 659107 - RNA, 19 nt, Artificial Sequence
  Description of Artificial Sequence: Synthetic oligonucleotide
auccucaacucaggucugg

SEQ ID NO: 659108 - RNA, 19 nt, Artificial Sequence
  Description of Artificial Sequence: Synthetic oligonucleotide
gcuucggcgccacaaccgg

SEQ ID NO: 659109 - RNA, 19 nt, Artificial Sequence
  Description of Artificial Sequence: Synthetic oligonucleotide
gcucgcugggccccgaccg

SEQ ID NO: 659110 - RNA, 19 nt, Artificial Sequence
  Description of Artificial Sequence: Synthetic oligonucleotide
cacuuguaacacuucauau

SEQ ID NO: 659111 - RNA, 19 nt, Artificial Sequence
  Description of Artificial Sequence: Synthetic oligonucleotide
gaugggcuccgagcagacg

SEQ ID NO: 659112 - RNA, 19 nt, Artificial Sequence
  Description of Artificial Sequence: Synthetic oligonucleotide
acccggguccacuuagagu

SEQ ID NO: 659113 - RNA, 19 nt, Artificial Sequence
  Description of Artificial Sequence: Synthetic oligonucleotide
uugggcuucggcgccacaa

SEQ ID NO: 659114 - RNA, 19 nt, Artificial Sequence
  Description of Artificial Sequence: Synthetic oligonucleotide
cacaaccuagcagcacagg

SEQ ID NO: 659115 - RNA, 19 nt, Artificial Sequence
  Description of Artificial Sequence: Synthetic oligonucleotide
gcugucgacacugauggca

SEQ ID NO: 659116 - RNA, 19 nt, Artificial Sequence
  Description of Artificial Sequence: Synthetic oligonucleotide
ugcggucagugaugggcug

SEQ ID NO: 659117 - RNA, 19 nt, Artificial Sequence
  Description of Artificial Sequence: Synthetic oligonucleotide
cuuagagugccagggcuga

SEQ ID NO: 659118 - RNA, 19 nt, Artificial Sequence
  Description of Artificial Sequence: Synthetic oligonucleotide
ugacccggguccacuuaga

SEQ ID NO: 659119 - RNA, 19 nt, Artificial Sequence
  Description of Artificial Sequence: Synthetic oligonucleotide
caucggccgcacaacucag

SEQ ID NO: 659120 - RNA, 19 nt, Artificial Sequence
  Description of Artificial Sequence: Synthetic oligonucleotide
acggagacggagaccgccg

SEQ ID NO: 659121 - RNA, 19 nt, Artificial Sequence
  Description of Artificial Sequence: Synthetic oligonucleotide
ucgugagcgccgcgucccg

SEQ ID NO: 659122 - RNA, 19 nt, Artificial Sequence
  Description of Artificial Sequence: Synthetic oligonucleotide
cugucgacacugauggcaa

SEQ ID NO: 659123 - RNA, 19 nt, Artificial Sequence
  Description of Artificial Sequence: Synthetic oligonucleotide
cgggaguaaauuugggagc

SEQ ID NO: 659124 - RNA, 19 nt, Artificial Sequence
  Description of Artificial Sequence: Synthetic oligonucleotide
gggcgaacuucuucugcgg

SEQ ID NO: 659125 - RNA, 19 nt, Artificial Sequence
  Description of Artificial Sequence: Synthetic oligonucleotide
cucccuaggcugcgguggg

SEQ ID NO: 659126 - RNA, 19 nt, Artificial Sequence
  Description of Artificial Sequence: Synthetic oligonucleotide
gaggcgaggauuggucuca

SEQ ID NO: 659127 - RNA, 19 nt, Artificial Sequence
  Description of Artificial Sequence: Synthetic oligonucleotide
gggagucggagccugagaa

SEQ ID NO: 659128 - RNA, 19 nt, Artificial Sequence
  Description of Artificial Sequence: Synthetic oligonucleotide
uaggugcgggagucggagc

SEQ ID NO: 659129 - RNA, 19 nt, Artificial Sequence
  Description of Artificial Sequence: Synthetic oligonucleotide
gcuagaaggggucuuccaa

SEQ ID NO: 659130 - RNA, 19 nt, Artificial Sequence
  Description of Artificial Sequence: Synthetic oligonucleotide
gguccacuuagagugccag

SEQ ID NO: 659131 - RNA, 19 nt, Artificial Sequence
  Description of Artificial Sequence: Synthetic oligonucleotide
aggaucgugagcgccgcgu

SEQ ID NO: 659132 - RNA, 19 nt, Artificial Sequence
  Description of Artificial Sequence: Synthetic oligonucleotide
gcacuuccgacaaaggaca

SEQ ID NO: 659133 - RNA, 19 nt, Artificial Sequence
  Description of Artificial Sequence: Synthetic oligonucleotide
gcguaaaacgccggagccg

SEQ ID NO: 659134 - RNA, 19 nt, Artificial Sequence
  Description of Artificial Sequence: Synthetic oligonucleotide
ggcuucggcgccacaaccg

SEQ ID NO: 659135 - RNA, 19 nt, Artificial Sequence
  Description of Artificial Sequence: Synthetic oligonucleotide
gcaucggccgcacaacuca

SEQ ID NO: 659136 - RNA, 19 nt, Artificial Sequence
  Description of Artificial Sequence: Synthetic oligonucleotide
gcgaagguggguguccagg

SEQ ID NO: 659137 - RNA, 19 nt, Artificial Sequence
  Description of Artificial Sequence: Synthetic oligonucleotide
aggguucgggauucuccca

SEQ ID NO: 659138 - RNA, 19 nt, Artificial Sequence
  Description of Artificial Sequence: Synthetic oligonucleotide
cuucugcggggcguaaaac

SEQ ID NO: 659139 - RNA, 19 nt, Artificial Sequence
  Description of Artificial Sequence: Synthetic oligonucleotide
caccggagcaaacuuaggu

SEQ ID NO: 659140 - RNA, 19 nt, Artificial Sequence
  Description of Artificial Sequence: Synthetic oligonucleotide
agcuggaccugaggcuugg

SEQ ID NO: 659141 - RNA, 19 nt, Artificial Sequence
  Description of Artificial Sequence: Synthetic oligonucleotide
ccgaccgccacugaagaag

SEQ ID NO: 659142 - RNA, 19 nt, Artificial Sequence
  Description of Artificial Sequence: Synthetic oligonucleotide
ggaggcaagggugcugugc

SEQ ID NO: 659143 - RNA, 19 nt, Artificial Sequence
  Description of Artificial Sequence: Synthetic oligonucleotide
cugagggugcuccaugucu

SEQ ID NO: 659144 - RNA, 19 nt, Artificial Sequence
  Description of Artificial Sequence: Synthetic oligonucleotide
ggguucgggauucucccac

SEQ ID NO: 659145 - RNA, 19 nt, Artificial Sequence
  Description of Artificial Sequence: Synthetic oligonucleotide
caggccggaaaggauucac

SEQ ID NO: 659146 - RNA, 19 nt, Artificial Sequence
  Description of Artificial Sequence: Synthetic oligonucleotide
agaugauacccgggccuug

SEQ ID NO: 659147 - RNA, 19 nt, Artificial Sequence
  Description of Artificial Sequence: Synthetic oligonucleotide
ccucaacucaggucugggc

SEQ ID NO: 659148 - RNA, 19 nt, Artificial Sequence
  Description of Artificial Sequence: Synthetic oligonucleotide
cauuuuagcuguggccaca

SEQ ID NO: 659149 - RNA, 19 nt, Artificial Sequence
  Description of Artificial Sequence: Synthetic oligonucleotide
gagagcgcaccugguuuug

SEQ ID NO: 659150 - RNA, 19 nt, Artificial Sequence
  Description of Artificial Sequence: Synthetic oligonucleotide
ggaucauucuuggucaugu

SEQ ID NO: 659151 - RNA, 19 nt, Artificial Sequence
  Description of Artificial Sequence: Synthetic oligonucleotide
cagcccucgcaaaacggca

SEQ ID NO: 659152 - RNA, 19 nt, Artificial Sequence
  Description of Artificial Sequence: Synthetic oligonucleotide
guauagcagcccucgcaaa

SEQ ID NO: 659153 - RNA, 19 nt, Artificial Sequence
  Description of Artificial Sequence: Synthetic oligonucleotide
ccacgggaguaaauuuggg

SEQ ID NO: 659154 - RNA, 19 nt, Artificial Sequence
  Description of Artificial Sequence: Synthetic oligonucleotide
cuuaggugcgggagucgga

SEQ ID NO: 659155 - RNA, 19 nt, Artificial Sequence
  Description of Artificial Sequence: Synthetic oligonucleotide
cucaggcaugaugggcucc

SEQ ID NO: 659156 - RNA, 19 nt, Artificial Sequence
  Description of Artificial Sequence: Synthetic oligonucleotide
aucggccgcacaacucagg

SEQ ID NO: 659157 - RNA, 19 nt, Artificial Sequence
  Description of Artificial Sequence: Synthetic oligonucleotide
gcaaaacggcaccccgucc

SEQ ID NO: 659158 - RNA, 19 nt, Artificial Sequence
  Description of Artificial Sequence: Synthetic oligonucleotide
gcugagucaauuguuccaa

SEQ ID NO: 659159 - RNA, 19 nt, Artificial Sequence
  Description of Artificial Sequence: Synthetic oligonucleotide
uggggaccucagaaugaua

SEQ ID NO: 659160 - RNA, 19 nt, Artificial Sequence
  Description of Artificial Sequence: Synthetic oligonucleotide
agccgacacggagacggag

SEQ ID NO: 659161 - RNA, 19 nt, Artificial Sequence
  Description of Artificial Sequence: Synthetic oligonucleotide
gcagcccucgcaaaacggc

SEQ ID NO: 659162 - RNA, 19 nt, Artificial Sequence
  Description of Artificial Sequence: Synthetic oligonucleotide
ggaccgcaggcugugcacg

SEQ ID NO: 659163 - RNA, 19 nt, Artificial Sequence
  Description of Artificial Sequence: Synthetic oligonucleotide
ggcugaacuuggaagccac

SEQ ID NO: 659164 - RNA, 19 nt, Artificial Sequence
  Description of Artificial Sequence: Synthetic oligonucleotide
gggcuucggcgccacaacc

SEQ ID NO: 659165 - RNA, 19 nt, Artificial Sequence
  Description of Artificial Sequence: Synthetic oligonucleotide
gggauuucgcccacccggc

SEQ ID NO: 659166 - RNA, 19 nt, Artificial Sequence
  Description of Artificial Sequence: Synthetic oligonucleotide
caucggugcagcagugcaa

SEQ ID NO: 659167 - RNA, 19 nt, Artificial Sequence
  Description of Artificial Sequence: Synthetic oligonucleotide
aggccggaaaggauucacu

SEQ ID NO: 659168 - RNA, 19 nt, Artificial Sequence
  Description of Artificial Sequence: Synthetic oligonucleotide
cgaccgccacugaagaagg

SEQ ID NO: 659169 - RNA, 19 nt, Artificial Sequence
  Description of Artificial Sequence: Synthetic oligonucleotide
caggaucgugagcgccgcg

SEQ ID NO: 659170 - RNA, 19 nt, Artificial Sequence
  Description of Artificial Sequence: Synthetic oligonucleotide
cgacaacucguacagucuc

SEQ ID NO: 659171 - RNA, 19 nt, Artificial Sequence
  Description of Artificial Sequence: Synthetic oligonucleotide
gggaucauucuuggucaug

SEQ ID NO: 659172 - RNA, 19 nt, Artificial Sequence
  Description of Artificial Sequence: Synthetic oligonucleotide
ggcuugguacuaggcuugg

SEQ ID NO: 659173 - RNA, 19 nt, Artificial Sequence
  Description of Artificial Sequence: Synthetic oligonucleotide
ccgacacggagacggagac

SEQ ID NO: 659174 - RNA, 19 nt, Artificial Sequence
  Description of Artificial Sequence: Synthetic oligonucleotide
gucgacacugauggcaagu

SEQ ID NO: 659175 - RNA, 19 nt, Artificial Sequence
  Description of Artificial Sequence: Synthetic oligonucleotide
ggucagggcacuugagaua

SEQ ID NO: 659176 - RNA, 19 nt, Artificial Sequence
  Description of Artificial Sequence: Synthetic oligonucleotide
acgguggggaauggaccug

SEQ ID NO: 659177 - RNA, 19 nt, Artificial Sequence
  Description of Artificial Sequence: Synthetic oligonucleotide
ggaucgugagcgccgcguc

SEQ ID NO: 659178 - RNA, 19 nt, Artificial Sequence
  Description of Artificial Sequence: Synthetic oligonucleotide
ggagucggagccugagaaa

SEQ ID NO: 659179 - RNA, 19 nt, Artificial Sequence
  Description of Artificial Sequence: Synthetic oligonucleotide
cuugggcgcugaggggacc

SEQ ID NO: 659180 - RNA, 19 nt, Artificial Sequence
  Description of Artificial Sequence: Synthetic oligonucleotide
ccaccggagcaaacuuagg

SEQ ID NO: 659181 - RNA, 19 nt, Artificial Sequence
  Description of Artificial Sequence: Synthetic oligonucleotide
gggcgggcuugguacuagg

SEQ ID NO: 659182 - RNA, 19 nt, Artificial Sequence
  Description of Artificial Sequence: Synthetic oligonucleotide
ggguagaggcgaggauugg

SEQ ID NO: 659183 - RNA, 19 nt, Artificial Sequence
  Description of Artificial Sequence: Synthetic oligonucleotide
cuaggcugcggugggagcu

SEQ ID NO: 659184 - RNA, 19 nt, Artificial Sequence
  Description of Artificial Sequence: Synthetic oligonucleotide
gggaauggaccuguagucu

SEQ ID NO: 659185 - RNA, 19 nt, Artificial Sequence
  Description of Artificial Sequence: Synthetic oligonucleotide
ggugcccuccaggggacag

SEQ ID NO: 659186 - RNA, 19 nt, Artificial Sequence
  Description of Artificial Sequence: Synthetic oligonucleotide
ggcgccacaaccggggcga

SEQ ID NO: 659187 - RNA, 19 nt, Artificial Sequence
  Description of Artificial Sequence: Synthetic oligonucleotide
guaaaacgccggagccgac

SEQ ID NO: 659188 - RNA, 19 nt, Artificial Sequence
  Description of Artificial Sequence: Synthetic oligonucleotide
cccaggccggaaaggauuc

SEQ ID NO: 659189 - RNA, 19 nt, Artificial Sequence
  Description of Artificial Sequence: Synthetic oligonucleotide
ggcaucggugcagcagugc

SEQ ID NO: 659190 - RNA, 19 nt, Artificial Sequence
  Description of Artificial Sequence: Synthetic oligonucleotide
ccagagcgacaacucguac

SEQ ID NO: 659191 - RNA, 19 nt, Artificial Sequence
  Description of Artificial Sequence: Synthetic oligonucleotide
ggcucguggcaucggccgc

SEQ ID NO: 659192 - RNA, 19 nt, Artificial Sequence
  Description of Artificial Sequence: Synthetic oligonucleotide
caggucaauacugcucacu

SEQ ID NO: 659193 - RNA, 19 nt, Artificial Sequence
  Description of Artificial Sequence: Synthetic oligonucleotide
ccgcacaacucaggcaccg

SEQ ID NO: 659194 - RNA, 19 nt, Artificial Sequence
  Description of Artificial Sequence: Synthetic oligonucleotide
cgcaaaacggcaccccguc

SEQ ID NO: 659195 - RNA, 19 nt, Artificial Sequence
  Description of Artificial Sequence: Synthetic oligonucleotide
ucguggcaucggccgcaca

SEQ ID NO: 659196 - RNA, 19 nt, Artificial Sequence
  Description of Artificial Sequence: Synthetic oligonucleotide
ggcgggcuugguacuaggc

SEQ ID NO: 659197 - RNA, 19 nt, Artificial Sequence
  Description of Artificial Sequence: Synthetic oligonucleotide
agccaccggagcaaacuua

SEQ ID NO: 659198 - RNA, 19 nt, Artificial Sequence
  Description of Artificial Sequence: Synthetic oligonucleotide
ccucgcaaaacggcacccc

SEQ ID NO: 659199 - RNA, 19 nt, Artificial Sequence
  Description of Artificial Sequence: Synthetic oligonucleotide
ucccuaggcugcgguggga

SEQ ID NO: 659200 - RNA, 19 nt, Artificial Sequence
  Description of Artificial Sequence: Synthetic oligonucleotide
gcaggaucgugagcgccgc

SEQ ID NO: 659201 - RNA, 19 nt, Artificial Sequence
  Description of Artificial Sequence: Synthetic oligonucleotide
gcggucagugaugggcugc

SEQ ID NO: 659202 - RNA, 19 nt, Artificial Sequence
  Description of Artificial Sequence: Synthetic oligonucleotide
gcgcgcgcaggaucgugag

SEQ ID NO: 659203 - RNA, 19 nt, Artificial Sequence
  Description of Artificial Sequence: Synthetic oligonucleotide
ggggcucguggcaucggcc

SEQ ID NO: 659204 - RNA, 19 nt, Artificial Sequence
  Description of Artificial Sequence: Synthetic oligonucleotide
ggucaauacugcucacuuu

SEQ ID NO: 659205 - RNA, 19 nt, Artificial Sequence
  Description of Artificial Sequence: Synthetic oligonucleotide
gcgggcuugguacuaggcu

SEQ ID NO: 659206 - RNA, 19 nt, Artificial Sequence
  Description of Artificial Sequence: Synthetic oligonucleotide
cagccguugucaucagccu

SEQ ID NO: 659207 - RNA, 19 nt, Artificial Sequence
  Description of Artificial Sequence: Synthetic oligonucleotide
gcaagggguggagcccagg

SEQ ID NO: 659208 - RNA, 19 nt, Artificial Sequence
  Description of Artificial Sequence: Synthetic oligonucleotide
ggcaucggccgcacaacuc

SEQ ID NO: 659209 - RNA, 19 nt, Artificial Sequence
  Description of Artificial Sequence: Synthetic oligonucleotide
gccgacacggagacggaga

SEQ ID NO: 659210 - RNA, 19 nt, Artificial Sequence
  Description of Artificial Sequence: Synthetic oligonucleotide
ccggguccacuuagagugc

SEQ ID NO: 659211 - RNA, 19 nt, Artificial Sequence
  Description of Artificial Sequence: Synthetic oligonucleotide
gggcuguacauuaguggaa

SEQ ID NO: 659212 - RNA, 19 nt, Artificial Sequence
  Description of Artificial Sequence: Synthetic oligonucleotide
cccucgcaaaacggcaccc

SEQ ID NO: 659213 - RNA, 19 nt, Artificial Sequence
  Description of Artificial Sequence: Synthetic oligonucleotide
ucgcuguccccaggccgga

SEQ ID NO: 659214 - RNA, 19 nt, Artificial Sequence
  Description of Artificial Sequence: Synthetic oligonucleotide
cggggcgaacuucuucugc

SEQ ID NO: 659215 - RNA, 19 nt, Artificial Sequence
  Description of Artificial Sequence: Synthetic oligonucleotide
cugcgcgcgcaggaucgug

SEQ ID NO: 659216 - RNA, 19 nt, Artificial Sequence
  Description of Artificial Sequence: Synthetic oligonucleotide
ggccacaaccuagcagcac

SEQ ID NO: 659217 - RNA, 19 nt, Artificial Sequence
  Description of Artificial Sequence: Synthetic oligonucleotide
guccacgguggggaaugga

SEQ ID NO: 659218 - RNA, 19 nt, Artificial Sequence
  Description of Artificial Sequence: Synthetic oligonucleotide
gagccgacacggagacgga

SEQ ID NO: 659219 - RNA, 19 nt, Artificial Sequence
  Description of Artificial Sequence: Synthetic oligonucleotide
cggagacggagaccgccgg

SEQ ID NO: 659220 - RNA, 19 nt, Artificial Sequence
  Description of Artificial Sequence: Synthetic oligonucleotide
ggguuggggaccucagaau

SEQ ID NO: 659221 - RNA, 19 nt, Artificial Sequence
  Description of Artificial Sequence: Synthetic oligonucleotide
gcgacaacucguacagucu

SEQ ID NO: 659222 - RNA, 19 nt, Artificial Sequence
  Description of Artificial Sequence: Synthetic oligonucleotide
caggagagcgcaccugguu

SEQ ID NO: 659223 - RNA, 19 nt, Artificial Sequence
  Description of Artificial Sequence: Synthetic oligonucleotide
ccggcacacucgcauucug

SEQ ID NO: 659224 - RNA, 19 nt, Artificial Sequence
  Description of Artificial Sequence: Synthetic oligonucleotide
gugcucgcugggccccgac

SEQ ID NO: 659225 - RNA, 19 nt, Artificial Sequence
  Description of Artificial Sequence: Synthetic oligonucleotide
cacuuccgacaaaggacau

SEQ ID NO: 659226 - RNA, 19 nt, Artificial Sequence
  Description of Artificial Sequence: Synthetic oligonucleotide
gggcugcgcgcgcaggauc

SEQ ID NO: 659227 - RNA, 19 nt, Artificial Sequence
  Description of Artificial Sequence: Synthetic oligonucleotide
ccggggcgaacuucuucug

SEQ ID NO: 659228 - RNA, 19 nt, Artificial Sequence
  Description of Artificial Sequence: Synthetic oligonucleotide
gccgcacaacucaggcacc

SEQ ID NO: 659229 - RNA, 19 nt, Artificial Sequence
  Description of Artificial Sequence: Synthetic oligonucleotide
cccguccaggcuguagaac

SEQ ID NO: 659230 - RNA, 19 nt, Artificial Sequence
  Description of Artificial Sequence: Synthetic oligonucleotide
cggaccgcaggcugugcac

SEQ ID NO: 659231 - RNA, 19 nt, Artificial Sequence
  Description of Artificial Sequence: Synthetic oligonucleotide
gcuugggcgcugaggggac

SEQ ID NO: 659232 - RNA, 19 nt, Artificial Sequence
  Description of Artificial Sequence: Synthetic oligonucleotide
ggcaagggguggagcccag

SEQ ID NO: 659233 - RNA, 19 nt, Artificial Sequence
  Description of Artificial Sequence: Synthetic oligonucleotide
gagcgacaacucguacagu

SEQ ID NO: 659234 - RNA, 19 nt, Artificial Sequence
  Description of Artificial Sequence: Synthetic oligonucleotide
ggucgacaaugaaggaggu

SEQ ID NO: 659235 - RNA, 19 nt, Artificial Sequence
  Description of Artificial Sequence: Synthetic oligonucleotide
uuucgcccacccggcccau

SEQ ID NO: 659236 - RNA, 19 nt, Artificial Sequence
  Description of Artificial Sequence: Synthetic oligonucleotide
ggguccacuuagagugcca

SEQ ID NO: 659237 - RNA, 19 nt, Artificial Sequence
  Description of Artificial Sequence: Synthetic oligonucleotide
gaccucggggcuguacauu

SEQ ID NO: 659238 - RNA, 19 nt, Artificial Sequence
  Description of Artificial Sequence: Synthetic oligonucleotide
cgacacggagacggagacg

SEQ ID NO: 659239 - RNA, 19 nt, Artificial Sequence
  Description of Artificial Sequence: Synthetic oligonucleotide
cgggauucucccacccuca

SEQ ID NO: 659240 - RNA, 19 nt, Artificial Sequence
  Description of Artificial Sequence: Synthetic oligonucleotide
ccccgaccgccacugaaga

SEQ ID NO: 659241 - RNA, 19 nt, Artificial Sequence
  Description of Artificial Sequence: Synthetic oligonucleotide
cugugacccggguccacuu

SEQ ID NO: 659242 - RNA, 19 nt, Artificial Sequence
  Description of Artificial Sequence: Synthetic oligonucleotide
gcugugacccggguccacu

SEQ ID NO: 659243 - RNA, 19 nt, Artificial Sequence
  Description of Artificial Sequence: Synthetic oligonucleotide
ggugcgggagucggagccu

SEQ ID NO: 659244 - RNA, 19 nt, Artificial Sequence
  Description of Artificial Sequence: Synthetic oligonucleotide
cgugagcgccgcgucccgg

SEQ ID NO: 659245 - RNA, 19 nt, Artificial Sequence
  Description of Artificial Sequence: Synthetic oligonucleotide
ccgggccuugaagggauca

SEQ ID NO: 659246 - RNA, 19 nt, Artificial Sequence
  Description of Artificial Sequence: Synthetic oligonucleotide
ccaggagagcgcaccuggu

SEQ ID NO: 659247 - RNA, 19 nt, Artificial Sequence
  Description of Artificial Sequence: Synthetic oligonucleotide
cccgaccgccacugaagaa

SEQ ID NO: 659248 - RNA, 19 nt, Artificial Sequence
  Description of Artificial Sequence: Synthetic oligonucleotide
cccggccucagcacuucua

SEQ ID NO: 659249 - RNA, 19 nt, Artificial Sequence
  Description of Artificial Sequence: Synthetic oligonucleotide
ccggcccaucugugcucgc

SEQ ID NO: 659250 - RNA, 19 nt, Artificial Sequence
  Description of Artificial Sequence: Synthetic oligonucleotide
cggagccgacacggagacg

SEQ ID NO: 659251 - RNA, 19 nt, Artificial Sequence
  Description of Artificial Sequence: Synthetic oligonucleotide
gccucggguuggggaccuc

SEQ ID NO: 659252 - RNA, 19 nt, Artificial Sequence
  Description of Artificial Sequence: Synthetic oligonucleotide
gcgccacaaccggggcgaa

SEQ ID NO: 659253 - RNA, 19 nt, Artificial Sequence
  Description of Artificial Sequence: Synthetic oligonucleotide
cggcccaucugugcucgcu

SEQ ID NO: 659254 - RNA, 19 nt, Artificial Sequence
  Description of Artificial Sequence: Synthetic oligonucleotide
  modified_base (7)..(7): a, c, u, g, unknown or other
uuuuggnggaaacaaacag

SEQ ID NO: 659255 - RNA, 19 nt, Artificial Sequence
  Description of Artificial Sequence: Synthetic oligonucleotide
aacaugcggaagcaaaucc

SEQ ID NO: 659256 - RNA, 19 nt, Artificial Sequence
  Description of Artificial Sequence: Synthetic oligonucleotide
aagacgauuuccgugaagc

SEQ ID NO: 659257 - RNA, 19 nt, Artificial Sequence
  Description of Artificial Sequence: Synthetic oligonucleotide
aaagacguucugcagcccc

SEQ ID NO: 659258 - RNA, 19 nt, Artificial Sequence
  Description of Artificial Sequence: Synthetic oligonucleotide
uaugcuucgggucaaagac

SEQ ID NO: 659259 - RNA, 19 nt, Artificial Sequence
  Description of Artificial Sequence: Synthetic oligonucleotide
aauguauuccuucggcauc

SEQ ID NO: 659260 - RNA, 19 nt, Artificial Sequence
  Description of Artificial Sequence: Synthetic oligonucleotide
ucacccaucacucggagcc

SEQ ID NO: 659261 - RNA, 19 nt, Artificial Sequence
  Description of Artificial Sequence: Synthetic oligonucleotide
acagcgacaauauucacug

SEQ ID NO: 659262 - RNA, 19 nt, Artificial Sequence
  Description of Artificial Sequence: Synthetic oligonucleotide
uuaccaaugacguggaacu

SEQ ID NO: 659263 - RNA, 19 nt, Artificial Sequence
  Description of Artificial Sequence: Synthetic oligonucleotide
uaauugaccuuguaggcag

SEQ ID NO: 659264 - RNA, 19 nt, Artificial Sequence
  Description of Artificial Sequence: Synthetic oligonucleotide
cauggaucagaugagaccg

SEQ ID NO: 659265 - RNA, 19 nt, Artificial Sequence
  Description of Artificial Sequence: Synthetic oligonucleotide
ucguugaccagcuccaugg

SEQ ID NO: 659266 - RNA, 19 nt, Artificial Sequence
  Description of Artificial Sequence: Synthetic oligonucleotide
ugacugggaaaauggaucg

SEQ ID NO: 659267 - RNA, 19 nt, Artificial Sequence
  Description of Artificial Sequence: Synthetic oligonucleotide
gaaaagacguucugcagcc

SEQ ID NO: 659268 - RNA, 19 nt, Artificial Sequence
  Description of Artificial Sequence: Synthetic oligonucleotide
gaugucacccaucacucgg

SEQ ID NO: 659269 - RNA, 19 nt, Artificial Sequence
  Description of Artificial Sequence: Synthetic oligonucleotide
guaguuaaggcagagcagg

SEQ ID NO: 659270 - RNA, 19 nt, Artificial Sequence
  Description of Artificial Sequence: Synthetic oligonucleotide
  modified_base (6)..(6): a, c, u, g, unknown or other
uuuggnggaaacaaacagu

SEQ ID NO: 659271 - RNA, 19 nt, Artificial Sequence
  Description of Artificial Sequence: Synthetic oligonucleotide
aauccggggauucagcuca

SEQ ID NO: 659272 - RNA, 19 nt, Artificial Sequence
  Description of Artificial Sequence: Synthetic oligonucleotide
cacaagacauucaaugagg

SEQ ID NO: 659273 - RNA, 19 nt, Artificial Sequence
  Description of Artificial Sequence: Synthetic oligonucleotide
acccacauggaucagauga

SEQ ID NO: 659274 - RNA, 19 nt, Artificial Sequence
  Description of Artificial Sequence: Synthetic oligonucleotide
aucgcagaaggcuucggcc

SEQ ID NO: 659275 - RNA, 19 nt, Artificial Sequence
  Description of Artificial Sequence: Synthetic oligonucleotide
gacuacuugucaaugagcc

SEQ ID NO: 659276 - RNA, 19 nt, Artificial Sequence
  Description of Artificial Sequence: Synthetic oligonucleotide
aaauggaucgcagaaggcu

SEQ ID NO: 659277 - RNA, 19 nt, Artificial Sequence
  Description of Artificial Sequence: Synthetic oligonucleotide
  modified_base (5)..(5): a, c, u, g, unknown or other
uuggnggaaacaaacaguu

SEQ ID NO: 659278 - RNA, 19 nt, Artificial Sequence
  Description of Artificial Sequence: Synthetic oligonucleotide
uaggugguucaucagaugu

SEQ ID NO: 659279 - RNA, 19 nt, Artificial Sequence
  Description of Artificial Sequence: Synthetic oligonucleotide
uuugcgcucaaucaauuuc

SEQ ID NO: 659280 - RNA, 19 nt, Artificial Sequence
  Description of Artificial Sequence: Synthetic oligonucleotide
acuacuugucaaugagccc

SEQ ID NO: 659281 - RNA, 19 nt, Artificial Sequence
  Description of Artificial Sequence: Synthetic oligonucleotide
uugaccugcucauuugagg

SEQ ID NO: 659282 - RNA, 19 nt, Artificial Sequence
  Description of Artificial Sequence: Synthetic oligonucleotide
auuccuucggcauccgugg

SEQ ID NO: 659283 - RNA, 19 nt, Artificial Sequence
  Description of Artificial Sequence: Synthetic oligonucleotide
ugugacuugaucugagcca

SEQ ID NO: 659284 - RNA, 19 nt, Artificial Sequence
  Description of Artificial Sequence: Synthetic oligonucleotide
aaguaaaggaugcuguguu

SEQ ID NO: 659285 - RNA, 19 nt, Artificial Sequence
  Description of Artificial Sequence: Synthetic oligonucleotide
auguaacccagguaccggc

SEQ ID NO: 659286 - RNA, 19 nt, Artificial Sequence
  Description of Artificial Sequence: Synthetic oligonucleotide
cucucgaaugccaggaacg

SEQ ID NO: 659287 - RNA, 19 nt, Artificial Sequence
  Description of Artificial Sequence: Synthetic oligonucleotide
aagaucggagcccauggcu

SEQ ID NO: 659288 - RNA, 19 nt, Artificial Sequence
  Description of Artificial Sequence: Synthetic oligonucleotide
ugaugugguacuccuuuag

SEQ ID NO: 659289 - RNA, 19 nt, Artificial Sequence
  Description of Artificial Sequence: Synthetic oligonucleotide
caugcggaagcaaaucccg

SEQ ID NO: 659290 - RNA, 19 nt, Artificial Sequence
  Description of Artificial Sequence: Synthetic oligonucleotide
uucgggucaaagacgaggc

SEQ ID NO: 659291 - RNA, 19 nt, Artificial Sequence
  Description of Artificial Sequence: Synthetic oligonucleotide
gauaaugccucgccgcucc

SEQ ID NO: 659292 - RNA, 19 nt, Artificial Sequence
  Description of Artificial Sequence: Synthetic oligonucleotide
acagaagacgauuuccgug

SEQ ID NO: 659293 - RNA, 19 nt, Artificial Sequence
  Description of Artificial Sequence: Synthetic oligonucleotide
cagcgaguuaccaaugacg

SEQ ID NO: 659294 - RNA, 19 nt, Artificial Sequence
  Description of Artificial Sequence: Synthetic oligonucleotide
aguaggcucgucucaggcc

SEQ ID NO: 659295 - RNA, 19 nt, Artificial Sequence
  Description of Artificial Sequence: Synthetic oligonucleotide
  modified_base (3)..(3): a, c, u, g, unknown or other
ggnggaaacaaacaguuca

SEQ ID NO: 659296 - RNA, 19 nt, Artificial Sequence
  Description of Artificial Sequence: Synthetic oligonucleotide
ugauguaacccagguaccg

SEQ ID NO: 659297 - RNA, 19 nt, Artificial Sequence
  Description of Artificial Sequence: Synthetic oligonucleotide
auaaggguccucuucucag

SEQ ID NO: 659298 - RNA, 19 nt, Artificial Sequence
  Description of Artificial Sequence: Synthetic oligonucleotide
uaguccuugauguaaccca

SEQ ID NO: 659299 - RNA, 19 nt, Artificial Sequence
  Description of Artificial Sequence: Synthetic oligonucleotide
agacgauuuccgugaagcc

SEQ ID NO: 659300 - RNA, 19 nt, Artificial Sequence
  Description of Artificial Sequence: Synthetic oligonucleotide
ucacguaguagcgacugcg

SEQ ID NO: 659301 - RNA, 19 nt, Artificial Sequence
  Description of Artificial Sequence: Synthetic oligonucleotide
acguggcaguaacagagcc

SEQ ID NO: 659302 - RNA, 19 nt, Artificial Sequence
  Description of Artificial Sequence: Synthetic oligonucleotide
uuuugagaguuguguacag

SEQ ID NO: 659303 - RNA, 19 nt, Artificial Sequence
  Description of Artificial Sequence: Synthetic oligonucleotide
uuaugcuucgggucaaaga

SEQ ID NO: 659304 - RNA, 19 nt, Artificial Sequence
  Description of Artificial Sequence: Synthetic oligonucleotide
uugggugucagcgaguuac

SEQ ID NO: 659305 - RNA, 19 nt, Artificial Sequence
  Description of Artificial Sequence: Synthetic oligonucleotide
cucgauaaugccucgccgc

SEQ ID NO: 659306 - RNA, 19 nt, Artificial Sequence
  Description of Artificial Sequence: Synthetic oligonucleotide
uugcgcucaaucaauuucu

SEQ ID NO: 659307 - RNA, 19 nt, Artificial Sequence
  Description of Artificial Sequence: Synthetic oligonucleotide
ucgaaugccaggaacgcuc

SEQ ID NO: 659308 - RNA, 19 nt, Artificial Sequence
  Description of Artificial Sequence: Synthetic oligonucleotide
ucaauggggaagcggauaa

SEQ ID NO: 659309 - RNA, 19 nt, Artificial Sequence
  Description of Artificial Sequence: Synthetic oligonucleotide
uugaaauagccgauggcau

SEQ ID NO: 659310 - RNA, 19 nt, Artificial Sequence
  Description of Artificial Sequence: Synthetic oligonucleotide
caguaguuaaggcagagca

SEQ ID NO: 659311 - RNA, 19 nt, Artificial Sequence
  Description of Artificial Sequence: Synthetic oligonucleotide
caauauucacugucugggg

SEQ ID NO: 659312 - RNA, 19 nt, Artificial Sequence
  Description of Artificial Sequence: Synthetic oligonucleotide
acaagacauucaaugaggg

SEQ ID NO: 659313 - RNA, 19 nt, Artificial Sequence
  Description of Artificial Sequence: Synthetic oligonucleotide
uucgacgaaggcaggaaca

SEQ ID NO: 659314 - RNA, 19 nt, Artificial Sequence
  Description of Artificial Sequence: Synthetic oligonucleotide
ugcguaaccguucugucau

SEQ ID NO: 659315 - RNA, 19 nt, Artificial Sequence
  Description of Artificial Sequence: Synthetic oligonucleotide
gaacauuuuggagagcuca

SEQ ID NO: 659316 - RNA, 19 nt, Artificial Sequence
  Description of Artificial Sequence: Synthetic oligonucleotide
gacgauuuccgugaagccc

SEQ ID NO: 659317 - RNA, 19 nt, Artificial Sequence
  Description of Artificial Sequence: Synthetic oligonucleotide
acaugcggaagcaaauccc

SEQ ID NO: 659318 - RNA, 19 nt, Artificial Sequence
  Description of Artificial Sequence: Synthetic oligonucleotide
cauccugucucucgaaugc

SEQ ID NO: 659319 - RNA, 19 nt, Artificial Sequence
  Description of Artificial Sequence: Synthetic oligonucleotide
guaggcucgucucaggccc

SEQ ID NO: 659320 - RNA, 19 nt, Artificial Sequence
  Description of Artificial Sequence: Synthetic oligonucleotide
acguggaacucgauaaugc

SEQ ID NO: 659321 - RNA, 19 nt, Artificial Sequence
  Description of Artificial Sequence: Synthetic oligonucleotide
gaugggauucgacgaaggc

SEQ ID NO: 659322 - RNA, 19 nt, Artificial Sequence
  Description of Artificial Sequence: Synthetic oligonucleotide
gauguaacccagguaccgg

SEQ ID NO: 659323 - RNA, 19 nt, Artificial Sequence
  Description of Artificial Sequence: Synthetic oligonucleotide
uaaccguucugucaugguc

SEQ ID NO: 659324 - RNA, 19 nt, Artificial Sequence
  Description of Artificial Sequence: Synthetic oligonucleotide
guuaccaaugacguggaac

SEQ ID NO: 659325 - RNA, 19 nt, Artificial Sequence
  Description of Artificial Sequence: Synthetic oligonucleotide
uccaguagcugccggcggg

SEQ ID NO: 659326 - RNA, 19 nt, Artificial Sequence
  Description of Artificial Sequence: Synthetic oligonucleotide
uagccgauggcauauucgu

SEQ ID NO: 659327 - RNA, 19 nt, Artificial Sequence
  Description of Artificial Sequence: Synthetic oligonucleotide
uggguggucucguaacggg

SEQ ID NO: 659328 - RNA, 19 nt, Artificial Sequence
  Description of Artificial Sequence: Synthetic oligonucleotide
aaaagacguucugcagccc

SEQ ID NO: 659329 - RNA, 19 nt, Artificial Sequence
  Description of Artificial Sequence: Synthetic oligonucleotide
ucagcgaguuaccaaugac

SEQ ID NO: 659330 - RNA, 19 nt, Artificial Sequence
  Description of Artificial Sequence: Synthetic oligonucleotide
auuugccccguagaucucc

SEQ ID NO: 659331 - RNA, 19 nt, Artificial Sequence
  Description of Artificial Sequence: Synthetic oligonucleotide
ugggaaaauggaucgcaga

SEQ ID NO: 659332 - RNA, 19 nt, Artificial Sequence
  Description of Artificial Sequence: Synthetic oligonucleotide
acugcguaaccguucuguc

SEQ ID NO: 659333 - RNA, 19 nt, Artificial Sequence
  Description of Artificial Sequence: Synthetic oligonucleotide
uggcauauucgucagcaua

SEQ ID NO: 659334 - RNA, 19 nt, Artificial Sequence
  Description of Artificial Sequence: Synthetic oligonucleotide
aaccguucugucauggucu

SEQ ID NO: 659335 - RNA, 19 nt, Artificial Sequence
  Description of Artificial Sequence: Synthetic oligonucleotide
aaacauugucugccgcucu

SEQ ID NO: 659336 - RNA, 19 nt, Artificial Sequence
  Description of Artificial Sequence: Synthetic oligonucleotide
ucauuugaggugacagcac

SEQ ID NO: 659337 - RNA, 19 nt, Artificial Sequence
  Description of Artificial Sequence: Synthetic oligonucleotide
ucgauaaugccucgccgcu

SEQ ID NO: 659338 - RNA, 19 nt, Artificial Sequence
  Description of Artificial Sequence: Synthetic oligonucleotide
aauugaccuuguaggcagc

SEQ ID NO: 659339 - RNA, 19 nt, Artificial Sequence
  Description of Artificial Sequence: Synthetic oligonucleotide
guaacagagccaucuggug

SEQ ID NO: 659340 - RNA, 19 nt, Artificial Sequence
  Description of Artificial Sequence: Synthetic oligonucleotide
gcuaaauuuguacugcaca

SEQ ID NO: 659341 - RNA, 19 nt, Artificial Sequence
  Description of Artificial Sequence: Synthetic oligonucleotide
auagccgauggcauauucg

SEQ ID NO: 659342 - RNA, 19 nt, Artificial Sequence
  Description of Artificial Sequence: Synthetic oligonucleotide
uuugagaguuguguacagc

SEQ ID NO: 659343 - RNA, 19 nt, Artificial Sequence
  Description of Artificial Sequence: Synthetic oligonucleotide
ugccccguagaucuccucc

SEQ ID NO: 659344 - RNA, 19 nt, Artificial Sequence
  Description of Artificial Sequence: Synthetic oligonucleotide
gaguaggcucgucucaggc

SEQ ID NO: 659345 - RNA, 19 nt, Artificial Sequence
  Description of Artificial Sequence: Synthetic oligonucleotide
gaugagaccgagguggaca

SEQ ID NO: 659346 - RNA, 19 nt, Artificial Sequence
  Description of Artificial Sequence: Synthetic oligonucleotide
ucugcaagaucggagccca

SEQ ID NO: 659347 - RNA, 19 nt, Artificial Sequence
  Description of Artificial Sequence: Synthetic oligonucleotide
ugcguuggcugagaguagg

SEQ ID NO: 659348 - RNA, 19 nt, Artificial Sequence
  Description of Artificial Sequence: Synthetic oligonucleotide
aguaguuaaggcagagcag

SEQ ID NO: 659349 - RNA, 19 nt, Artificial Sequence
  Description of Artificial Sequence: Synthetic oligonucleotide
caaaucccgccgaugacac

SEQ ID NO: 659350 - RNA, 19 nt, Artificial Sequence
  Description of Artificial Sequence: Synthetic oligonucleotide
aggaacgcucuccacagga

SEQ ID NO: 659351 - RNA, 19 nt, Artificial Sequence
  Description of Artificial Sequence: Synthetic oligonucleotide
caggaaucugucucacucc

SEQ ID NO: 659352 - RNA, 19 nt, Artificial Sequence
  Description of Artificial Sequence: Synthetic oligonucleotide
agcgaguuaccaaugacgu

SEQ ID NO: 659353 - RNA, 19 nt, Artificial Sequence
  Description of Artificial Sequence: Synthetic oligonucleotide
uagaccuuucggaucugug

SEQ ID NO: 659354 - RNA, 19 nt, Artificial Sequence
  Description of Artificial Sequence: Synthetic oligonucleotide
ucgcagaaggcuucggcca

SEQ ID NO: 659355 - RNA, 19 nt, Artificial Sequence
  Description of Artificial Sequence: Synthetic oligonucleotide
uuuccgugaagcccugagu

SEQ ID NO: 659356 - RNA, 19 nt, Artificial Sequence
  Description of Artificial Sequence: Synthetic oligonucleotide
ucgacgaaggcaggaacag

SEQ ID NO: 659357 - RNA, 19 nt, Artificial Sequence
  Description of Artificial Sequence: Synthetic oligonucleotide
cgaguuaccaaugacgugg

SEQ ID NO: 659358 - RNA, 19 nt, Artificial Sequence
  Description of Artificial Sequence: Synthetic oligonucleotide
ggaacacccacauggauca

SEQ ID NO: 659359 - RNA, 19 nt, Artificial Sequence
  Description of Artificial Sequence: Synthetic oligonucleotide
uggcuaaauuuguacugca

SEQ ID NO: 659360 - RNA, 19 nt, Artificial Sequence
  Description of Artificial Sequence: Synthetic oligonucleotide
ucgggucaaagacgaggcg

SEQ ID NO: 659361 - RNA, 19 nt, Artificial Sequence
  Description of Artificial Sequence: Synthetic oligonucleotide
  modified_base (4)..(4): a, c, u, g, unknown or other
uggnggaaacaaacaguuc

SEQ ID NO: 659362 - RNA, 19 nt, Artificial Sequence
  Description of Artificial Sequence: Synthetic oligonucleotide
aaagacgaggcgggcaaug

SEQ ID NO: 659363 - RNA, 19 nt, Artificial Sequence
  Description of Artificial Sequence: Synthetic oligonucleotide
uguaacccagguaccggcu

SEQ ID NO: 659364 - RNA, 19 nt, Artificial Sequence
  Description of Artificial Sequence: Synthetic oligonucleotide
agcgucuuaugcuucgggu

SEQ ID NO: 659365 - RNA, 19 nt, Artificial Sequence
  Description of Artificial Sequence: Synthetic oligonucleotide
aauggaucgcagaaggcuu

SEQ ID NO: 659366 - RNA, 19 nt, Artificial Sequence
  Description of Artificial Sequence: Synthetic oligonucleotide
ucucgaaugccaggaacgc

SEQ ID NO: 659367 - RNA, 19 nt, Artificial Sequence
  Description of Artificial Sequence: Synthetic oligonucleotide
gcaagaucggagcccaugg

SEQ ID NO: 659368 - RNA, 19 nt, Artificial Sequence
  Description of Artificial Sequence: Synthetic oligonucleotide
gcaucgugaagccagacuc

SEQ ID NO: 659369 - RNA, 19 nt, Artificial Sequence
  Description of Artificial Sequence: Synthetic oligonucleotide
ugucacccaucacucggag

SEQ ID NO: 659370 - RNA, 19 nt, Artificial Sequence
  Description of Artificial Sequence: Synthetic oligonucleotide
ugucagcgaguuaccaaug

SEQ ID NO: 659371 - RNA, 19 nt, Artificial Sequence
  Description of Artificial Sequence: Synthetic oligonucleotide
agccguuucgucucgggcu

SEQ ID NO: 659372 - RNA, 19 nt, Artificial Sequence
  Description of Artificial Sequence: Synthetic oligonucleotide
uggaucagaugagaccgag

SEQ ID NO: 659373 - RNA, 19 nt, Artificial Sequence
  Description of Artificial Sequence: Synthetic oligonucleotide
guaauugaccuuguaggca

SEQ ID NO: 659374 - RNA, 19 nt, Artificial Sequence
  Description of Artificial Sequence: Synthetic oligonucleotide
aaaucccgccgaugacacg

SEQ ID NO: 659375 - RNA, 19 nt, Artificial Sequence
  Description of Artificial Sequence: Synthetic oligonucleotide
uccaguaguuaaggcagag

SEQ ID NO: 659376 - RNA, 19 nt, Artificial Sequence
  Description of Artificial Sequence: Synthetic oligonucleotide
agaguaggcucgucucagg

SEQ ID NO: 659377 - RNA, 19 nt, Artificial Sequence
  Description of Artificial Sequence: Synthetic oligonucleotide
cugagaguaggcucgucuc

SEQ ID NO: 659378 - RNA, 19 nt, Artificial Sequence
  Description of Artificial Sequence: Synthetic oligonucleotide
ugccuguuugcgcucaauc

SEQ ID NO: 659379 - RNA, 19 nt, Artificial Sequence
  Description of Artificial Sequence: Synthetic oligonucleotide
cucuucuacuggcaugggc

SEQ ID NO: 659380 - RNA, 19 nt, Artificial Sequence
  Description of Artificial Sequence: Synthetic oligonucleotide
uucuacuggcaugggcucg

SEQ ID NO: 659381 - RNA, 19 nt, Artificial Sequence
  Description of Artificial Sequence: Synthetic oligonucleotide
agucgggagccucugauuu

SEQ ID NO: 659382 - RNA, 19 nt, Artificial Sequence
  Description of Artificial Sequence: Synthetic oligonucleotide
guaguagcgacugcguaac

SEQ ID NO: 659383 - RNA, 19 nt, Artificial Sequence
  Description of Artificial Sequence: Synthetic oligonucleotide
cauccguggcagcuggugg

SEQ ID NO: 659384 - RNA, 19 nt, Artificial Sequence
  Description of Artificial Sequence: Synthetic oligonucleotide
gacacgcccauccuugauc

SEQ ID NO: 659385 - RNA, 19 nt, Artificial Sequence
  Description of Artificial Sequence: Synthetic oligonucleotide
ggcaagguggcuaaauuug

SEQ ID NO: 659386 - RNA, 19 nt, Artificial Sequence
  Description of Artificial Sequence: Synthetic oligonucleotide
uguuugcgcucaaucaauu

SEQ ID NO: 659387 - RNA, 19 nt, Artificial Sequence
  Description of Artificial Sequence: Synthetic oligonucleotide
gcacguggcaguaacagag

SEQ ID NO: 659388 - RNA, 19 nt, Artificial Sequence
  Description of Artificial Sequence: Synthetic oligonucleotide
gaagcaaaucccgccgaug

SEQ ID NO: 659389 - RNA, 19 nt, Artificial Sequence
  Description of Artificial Sequence: Synthetic oligonucleotide
aaccucguaguagucggga

SEQ ID NO: 659390 - RNA, 19 nt, Artificial Sequence
  Description of Artificial Sequence: Synthetic oligonucleotide
agaugggauucgacgaagg

SEQ ID NO: 659391 - RNA, 19 nt, Artificial Sequence
  Description of Artificial Sequence: Synthetic oligonucleotide
acauugucugccgcucucg

SEQ ID NO: 659392 - RNA, 19 nt, Artificial Sequence
  Description of Artificial Sequence: Synthetic oligonucleotide
gaauccggggauucagcuc

SEQ ID NO: 659393 - RNA, 19 nt, Artificial Sequence
  Description of Artificial Sequence: Synthetic oligonucleotide
caagaucggagcccauggc

SEQ ID NO: 659394 - RNA, 19 nt, Artificial Sequence
  Description of Artificial Sequence: Synthetic oligonucleotide
ugagcaggugucuccaguu

SEQ ID NO: 659395 - RNA, 19 nt, Artificial Sequence
  Description of Artificial Sequence: Synthetic oligonucleotide
uggaucgcagaaggcuucg

SEQ ID NO: 659396 - RNA, 19 nt, Artificial Sequence
  Description of Artificial Sequence: Synthetic oligonucleotide
cagacugggaccgcugccg

SEQ ID NO: 659397 - RNA, 19 nt, Artificial Sequence
  Description of Artificial Sequence: Synthetic oligonucleotide
accgagguggacauugcag

SEQ ID NO: 659398 - RNA, 19 nt, Artificial Sequence
  Description of Artificial Sequence: Synthetic oligonucleotide
aggcuaucgcagcucuggg

SEQ ID NO: 659399 - RNA, 19 nt, Artificial Sequence
  Description of Artificial Sequence: Synthetic oligonucleotide
gagccguuucgucucgggc

SEQ ID NO: 659400 - RNA, 19 nt, Artificial Sequence
  Description of Artificial Sequence: Synthetic oligonucleotide
uggggacuacuugucaaug

SEQ ID NO: 659401 - RNA, 19 nt, Artificial Sequence
  Description of Artificial Sequence: Synthetic oligonucleotide
augcggaagcaaaucccgc

SEQ ID NO: 659402 - RNA, 19 nt, Artificial Sequence
  Description of Artificial Sequence: Synthetic oligonucleotide
cagcgucgcuccuucauag

SEQ ID NO: 659403 - RNA, 19 nt, Artificial Sequence
  Description of Artificial Sequence: Synthetic oligonucleotide
uugcugccuccacccaugg

SEQ ID NO: 659404 - RNA, 19 nt, Artificial Sequence
  Description of Artificial Sequence: Synthetic oligonucleotide
uguauuccuucggcauccg

SEQ ID NO: 659405 - RNA, 19 nt, Artificial Sequence
  Description of Artificial Sequence: Synthetic oligonucleotide
ucagcgucgcuccuucaua

SEQ ID NO: 659406 - RNA, 19 nt, Artificial Sequence
  Description of Artificial Sequence: Synthetic oligonucleotide
aagacgaggcgggcaaugu

SEQ ID NO: 659407 - RNA, 19 nt, Artificial Sequence
  Description of Artificial Sequence: Synthetic oligonucleotide
gacauugcagagcccagcu

SEQ ID NO: 659408 - RNA, 19 nt, Artificial Sequence
  Description of Artificial Sequence: Synthetic oligonucleotide
ugggacuaaaggguggcau

SEQ ID NO: 659409 - RNA, 19 nt, Artificial Sequence
  Description of Artificial Sequence: Synthetic oligonucleotide
gaacucgauaaugccucgc

SEQ ID NO: 659410 - RNA, 19 nt, Artificial Sequence
  Description of Artificial Sequence: Synthetic oligonucleotide
gggagaauuugccccguag

SEQ ID NO: 659411 - RNA, 19 nt, Artificial Sequence
  Description of Artificial Sequence: Synthetic oligonucleotide
uuucgucucgggcugcguu

SEQ ID NO: 659412 - RNA, 19 nt, Artificial Sequence
  Description of Artificial Sequence: Synthetic oligonucleotide
gacauggguggucucguaa

SEQ ID NO: 659413 - RNA, 19 nt, Artificial Sequence
  Description of Artificial Sequence: Synthetic oligonucleotide
uuugccccguagaucuccu

SEQ ID NO: 659414 - RNA, 19 nt, Artificial Sequence
  Description of Artificial Sequence: Synthetic oligonucleotide
gccgauggcauauucguca

SEQ ID NO: 659415 - RNA, 19 nt, Artificial Sequence
  Description of Artificial Sequence: Synthetic oligonucleotide
ggaacucgauaaugccucg

SEQ ID NO: 659416 - RNA, 19 nt, Artificial Sequence
  Description of Artificial Sequence: Synthetic oligonucleotide
ucgggagccucugauuucu

SEQ ID NO: 659417 - RNA, 19 nt, Artificial Sequence
  Description of Artificial Sequence: Synthetic oligonucleotide
aauuugccccguagaucuc

SEQ ID NO: 659418 - RNA, 19 nt, Artificial Sequence
  Description of Artificial Sequence: Synthetic oligonucleotide
gcuugggauugccugcugg

SEQ ID NO: 659419 - RNA, 19 nt, Artificial Sequence
  Description of Artificial Sequence: Synthetic oligonucleotide
gaaauagccgauggcauau

SEQ ID NO: 659420 - RNA, 19 nt, Artificial Sequence
  Description of Artificial Sequence: Synthetic oligonucleotide
aucagcgucgcuccuucau

SEQ ID NO: 659421 - RNA, 19 nt, Artificial Sequence
  Description of Artificial Sequence: Synthetic oligonucleotide
cagcgucuuaugcuucggg

SEQ ID NO: 659422 - RNA, 19 nt, Artificial Sequence
  Description of Artificial Sequence: Synthetic oligonucleotide
cuucggccaaagacauggg

SEQ ID NO: 659423 - RNA, 19 nt, Artificial Sequence
  Description of Artificial Sequence: Synthetic oligonucleotide
ggcuaucgcagcucugggg

SEQ ID NO: 659424 - RNA, 19 nt, Artificial Sequence
  Description of Artificial Sequence: Synthetic oligonucleotide
gucagcgaguuaccaauga

SEQ ID NO: 659425 - RNA, 19 nt, Artificial Sequence
  Description of Artificial Sequence: Synthetic oligonucleotide
augugugccauagcccuug

SEQ ID NO: 659426 - RNA, 19 nt, Artificial Sequence
  Description of Artificial Sequence: Synthetic oligonucleotide
aagacguucugcagcccca

SEQ ID NO: 659427 - RNA, 19 nt, Artificial Sequence
  Description of Artificial Sequence: Synthetic oligonucleotide
gguuccaugaagggccagg

SEQ ID NO: 659428 - RNA, 19 nt, Artificial Sequence
  Description of Artificial Sequence: Synthetic oligonucleotide
gacugggaaaauggaucgc

SEQ ID NO: 659429 - RNA, 19 nt, Artificial Sequence
  Description of Artificial Sequence: Synthetic oligonucleotide
gcagcggggucagugaugg

SEQ ID NO: 659430 - RNA, 19 nt, Artificial Sequence
  Description of Artificial Sequence: Synthetic oligonucleotide
ccaggaacgcucuccacag

SEQ ID NO: 659431 - RNA, 19 nt, Artificial Sequence
  Description of Artificial Sequence: Synthetic oligonucleotide
cucguugaccagcuccaug

SEQ ID NO: 659432 - RNA, 19 nt, Artificial Sequence
  Description of Artificial Sequence: Synthetic oligonucleotide
cagcgugagguucucagga

SEQ ID NO: 659433 - RNA, 19 nt, Artificial Sequence
  Description of Artificial Sequence: Synthetic oligonucleotide
gcggauaaccucguaguag

SEQ ID NO: 659434 - RNA, 19 nt, Artificial Sequence
  Description of Artificial Sequence: Synthetic oligonucleotide
agcgacugcguaaccguuc

SEQ ID NO: 659435 - RNA, 19 nt, Artificial Sequence
  Description of Artificial Sequence: Synthetic oligonucleotide
cacagcgacaauauucacu

SEQ ID NO: 659436 - RNA, 19 nt, Artificial Sequence
  Description of Artificial Sequence: Synthetic oligonucleotide
agacguucugcagccccac

SEQ ID NO: 659437 - RNA, 19 nt, Artificial Sequence
  Description of Artificial Sequence: Synthetic oligonucleotide
gccccuguagaauccaggc

SEQ ID NO: 659438 - RNA, 19 nt, Artificial Sequence
  Description of Artificial Sequence: Synthetic oligonucleotide
uaguagcgacugcguaacc

SEQ ID NO: 659439 - RNA, 19 nt, Artificial Sequence
  Description of Artificial Sequence: Synthetic oligonucleotide
ggucacguaguagcgacug

SEQ ID NO: 659440 - RNA, 19 nt, Artificial Sequence
  Description of Artificial Sequence: Synthetic oligonucleotide
agcauccuccagcgugagg

SEQ ID NO: 659441 - RNA, 19 nt, Artificial Sequence
  Description of Artificial Sequence: Synthetic oligonucleotide
cucggccccuguagaaucc

SEQ ID NO: 659442 - RNA, 19 nt, Artificial Sequence
  Description of Artificial Sequence: Synthetic oligonucleotide
agaccgagguggacauugc

SEQ ID NO: 659443 - RNA, 19 nt, Artificial Sequence
  Description of Artificial Sequence: Synthetic oligonucleotide
caggcccuagcauggcagc

SEQ ID NO: 659444 - RNA, 19 nt, Artificial Sequence
  Description of Artificial Sequence: Synthetic oligonucleotide
aguagucgggagccucuga

SEQ ID NO: 659445 - RNA, 19 nt, Artificial Sequence
  Description of Artificial Sequence: Synthetic oligonucleotide
gugucagcgaguuaccaau

SEQ ID NO: 659446 - RNA, 19 nt, Artificial Sequence
  Description of Artificial Sequence: Synthetic oligonucleotide
uucggaucugugccuguuu

SEQ ID NO: 659447 - RNA, 19 nt, Artificial Sequence
  Description of Artificial Sequence: Synthetic oligonucleotide
aggccagcgucuuaugcuu

SEQ ID NO: 659448 - RNA, 19 nt, Artificial Sequence
  Description of Artificial Sequence: Synthetic oligonucleotide
gucacguaguagcgacugc

SEQ ID NO: 659449 - RNA, 19 nt, Artificial Sequence
  Description of Artificial Sequence: Synthetic oligonucleotide
uaucgcagcucuggggcac

SEQ ID NO: 659450 - RNA, 19 nt, Artificial Sequence
  Description of Artificial Sequence: Synthetic oligonucleotide
gacugcguaaccguucugu

SEQ ID NO: 659451 - RNA, 19 nt, Artificial Sequence
  Description of Artificial Sequence: Synthetic oligonucleotide
acguaguagcgacugcgua

SEQ ID NO: 659452 - RNA, 19 nt, Artificial Sequence
  Description of Artificial Sequence: Synthetic oligonucleotide
agcgugagguucucaggaa

SEQ ID NO: 659453 - RNA, 19 nt, Artificial Sequence
  Description of Artificial Sequence: Synthetic oligonucleotide
  modified_base (2)..(2): a, c, u, g, unknown or other
gnggaaacaaacaguucau

SEQ ID NO: 659454 - RNA, 19 nt, Artificial Sequence
  Description of Artificial Sequence: Synthetic oligonucleotide
gccuguuugcgcucaauca

SEQ ID NO: 659455 - RNA, 19 nt, Artificial Sequence
  Description of Artificial Sequence: Synthetic oligonucleotide
gguaccggcucuugggcac

SEQ ID NO: 659456 - RNA, 19 nt, Artificial Sequence
  Description of Artificial Sequence: Synthetic oligonucleotide
ugacacgcccauccuugau

SEQ ID NO: 659457 - RNA, 19 nt, Artificial Sequence
  Description of Artificial Sequence: Synthetic oligonucleotide
ggaucagaugagaccgagg

SEQ ID NO: 659458 - RNA, 19 nt, Artificial Sequence
  Description of Artificial Sequence: Synthetic oligonucleotide
gaguuaccaaugacgugga

SEQ ID NO: 659459 - RNA, 19 nt, Artificial Sequence
  Description of Artificial Sequence: Synthetic oligonucleotide
uaguagucgggagccucug

SEQ ID NO: 659460 - RNA, 19 nt, Artificial Sequence
  Description of Artificial Sequence: Synthetic oligonucleotide
cuagcauggcagcgggguc

SEQ ID NO: 659461 - RNA, 19 nt, Artificial Sequence
  Description of Artificial Sequence: Synthetic oligonucleotide
gaguuguguacagcugauc

SEQ ID NO: 659462 - RNA, 19 nt, Artificial Sequence
  Description of Artificial Sequence: Synthetic oligonucleotide
cggcaguuggcgaugaccc

SEQ ID NO: 659463 - RNA, 19 nt, Artificial Sequence
  Description of Artificial Sequence: Synthetic oligonucleotide
ggugggacuaaaggguggc

SEQ ID NO: 659464 - RNA, 19 nt, Artificial Sequence
  Description of Artificial Sequence: Synthetic oligonucleotide
auucgucagcauaggugag

SEQ ID NO: 659465 - RNA, 19 nt, Artificial Sequence
  Description of Artificial Sequence: Synthetic oligonucleotide
cccgcugcaggucagcuac

SEQ ID NO: 659466 - RNA, 19 nt, Artificial Sequence
  Description of Artificial Sequence: Synthetic oligonucleotide
gggcacguggcaguaacag

SEQ ID NO: 659467 - RNA, 19 nt, Artificial Sequence
  Description of Artificial Sequence: Synthetic oligonucleotide
ugggaccgcugccggaacu

SEQ ID NO: 659468 - RNA, 19 nt, Artificial Sequence
  Description of Artificial Sequence: Synthetic oligonucleotide
gcgucuuaugcuucggguc

SEQ ID NO: 659469 - RNA, 19 nt, Artificial Sequence
  Description of Artificial Sequence: Synthetic oligonucleotide
ggcuaaauuuguacugcac

SEQ ID NO: 659470 - RNA, 19 nt, Artificial Sequence
  Description of Artificial Sequence: Synthetic oligonucleotide
aggcccuagcauggcagcg

SEQ ID NO: 659471 - RNA, 19 nt, Artificial Sequence
  Description of Artificial Sequence: Synthetic oligonucleotide
gugggacagcucuguguag

SEQ ID NO: 659472 - RNA, 19 nt, Artificial Sequence
  Description of Artificial Sequence: Synthetic oligonucleotide
cauauucgucagcauaggu

SEQ ID NO: 659473 - RNA, 19 nt, Artificial Sequence
  Description of Artificial Sequence: Synthetic oligonucleotide
gcaguuggcgaugacccgc

SEQ ID NO: 659474 - RNA, 19 nt, Artificial Sequence
  Description of Artificial Sequence: Synthetic oligonucleotide
guggaacucgauaaugccu

SEQ ID NO: 659475 - RNA, 19 nt, Artificial Sequence
  Description of Artificial Sequence: Synthetic oligonucleotide
ucccaagggcuuccauccu

SEQ ID NO: 659476 - RNA, 19 nt, Artificial Sequence
  Description of Artificial Sequence: Synthetic oligonucleotide
caggaacgcucuccacagg

SEQ ID NO: 659477 - RNA, 19 nt, Artificial Sequence
  Description of Artificial Sequence: Synthetic oligonucleotide
uggggaugucacccaucac

SEQ ID NO: 659478 - RNA, 19 nt, Artificial Sequence
  Description of Artificial Sequence: Synthetic oligonucleotide
gccaggaacgcucuccaca

SEQ ID NO: 659479 - RNA, 19 nt, Artificial Sequence
  Description of Artificial Sequence: Synthetic oligonucleotide
uaccaaugacguggaacuc

SEQ ID NO: 659480 - RNA, 19 nt, Artificial Sequence
  Description of Artificial Sequence: Synthetic oligonucleotide
ggugucagcgaguuaccaa

SEQ ID NO: 659481 - RNA, 19 nt, Artificial Sequence
  Description of Artificial Sequence: Synthetic oligonucleotide
ucacucggagccgcuuagc

SEQ ID NO: 659482 - RNA, 19 nt, Artificial Sequence
  Description of Artificial Sequence: Synthetic oligonucleotide
uagcgacugcguaaccguu

SEQ ID NO: 659483 - RNA, 19 nt, Artificial Sequence
  Description of Artificial Sequence: Synthetic oligonucleotide
agcgucgcuccuucauagu

SEQ ID NO: 659484 - RNA, 19 nt, Artificial Sequence
  Description of Artificial Sequence: Synthetic oligonucleotide
aguuaccaaugacguggaa

SEQ ID NO: 659485 - RNA, 19 nt, Artificial Sequence
  Description of Artificial Sequence: Synthetic oligonucleotide
cugcguuggcugagaguag

SEQ ID NO: 659486 - RNA, 19 nt, Artificial Sequence
  Description of Artificial Sequence: Synthetic oligonucleotide
cagaaggcuucggccaaag

SEQ ID NO: 659487 - RNA, 19 nt, Artificial Sequence
  Description of Artificial Sequence: Synthetic oligonucleotide
ccgugaagcccugaguggg

SEQ ID NO: 659488 - RNA, 19 nt, Artificial Sequence
  Description of Artificial Sequence: Synthetic oligonucleotide
cugccggcgggugacuggg

SEQ ID NO: 659489 - RNA, 19 nt, Artificial Sequence
  Description of Artificial Sequence: Synthetic oligonucleotide
ggguggucucguaacgggg

SEQ ID NO: 659490 - RNA, 19 nt, Artificial Sequence
  Description of Artificial Sequence: Synthetic oligonucleotide
agacgaggcgggcaaugua

SEQ ID NO: 659491 - RNA, 19 nt, Artificial Sequence
  Description of Artificial Sequence: Synthetic oligonucleotide
cgggucaaagacgaggcgg

SEQ ID NO: 659492 - RNA, 19 nt, Artificial Sequence
  Description of Artificial Sequence: Synthetic oligonucleotide
cagcuacaaagagcuuccg

SEQ ID NO: 659493 - RNA, 19 nt, Artificial Sequence
  Description of Artificial Sequence: Synthetic oligonucleotide
gcaggugucuccaguuucc

SEQ ID NO: 659494 - RNA, 19 nt, Artificial Sequence
  Description of Artificial Sequence: Synthetic oligonucleotide
gcccuagcauggcagcggg

SEQ ID NO: 659495 - RNA, 19 nt, Artificial Sequence
  Description of Artificial Sequence: Synthetic oligonucleotide
ugggagaauuugccccgua

SEQ ID NO: 659496 - RNA, 19 nt, Artificial Sequence
  Description of Artificial Sequence: Synthetic oligonucleotide
ucccgccgaugacacgccc

SEQ ID NO: 659497 - RNA, 19 nt, Artificial Sequence
  Description of Artificial Sequence: Synthetic oligonucleotide
caauggggaagcggauaac

SEQ ID NO: 659498 - RNA, 19 nt, Artificial Sequence
  Description of Artificial Sequence: Synthetic oligonucleotide
auaaugccucgccgcuccu

SEQ ID NO: 659499 - RNA, 19 nt, Artificial Sequence
  Description of Artificial Sequence: Synthetic oligonucleotide
gcgaguuaccaaugacgug

SEQ ID NO: 659500 - RNA, 19 nt, Artificial Sequence
  Description of Artificial Sequence: Synthetic oligonucleotide
gacgaggcgggcaauguau

SEQ ID NO: 659501 - RNA, 19 nt, Artificial Sequence
  Description of Artificial Sequence: Synthetic oligonucleotide
gccguuucgucucgggcug

SEQ ID NO: 659502 - RNA, 19 nt, Artificial Sequence
  Description of Artificial Sequence: Synthetic oligonucleotide
ccuguuugcgcucaaucaa

SEQ ID NO: 659503 - RNA, 19 nt, Artificial Sequence
  Description of Artificial Sequence: Synthetic oligonucleotide
uagcauccuccagcgugag

SEQ ID NO: 659504 - RNA, 19 nt, Artificial Sequence
  Description of Artificial Sequence: Synthetic oligonucleotide
gucgggagccucugauuuc

SEQ ID NO: 659505 - RNA, 19 nt, Artificial Sequence
  Description of Artificial Sequence: Synthetic oligonucleotide
ggaauccggggauucagcu

SEQ ID NO: 659506 - RNA, 19 nt, Artificial Sequence
  Description of Artificial Sequence: Synthetic oligonucleotide
ccaguaguuaaggcagagc

SEQ ID NO: 659507 - RNA, 19 nt, Artificial Sequence
  Description of Artificial Sequence: Synthetic oligonucleotide
ccgagguggacauugcaga

SEQ ID NO: 659508 - RNA, 19 nt, Artificial Sequence
  Description of Artificial Sequence: Synthetic oligonucleotide
aucgcagcucuggggcacg

SEQ ID NO: 659509 - RNA, 19 nt, Artificial Sequence
  Description of Artificial Sequence: Synthetic oligonucleotide
aucccgccgaugacacgcc

SEQ ID NO: 659510 - RNA, 19 nt, Artificial Sequence
  Description of Artificial Sequence: Synthetic oligonucleotide
gauuguacucccggcaguu

SEQ ID NO: 659511 - RNA, 19 nt, Artificial Sequence
  Description of Artificial Sequence: Synthetic oligonucleotide
ccaaugacguggaacucga

SEQ ID NO: 659512 - RNA, 19 nt, Artificial Sequence
  Description of Artificial Sequence: Synthetic oligonucleotide
cacccaucacucggagccg

SEQ ID NO: 659513 - RNA, 19 nt, Artificial Sequence
  Description of Artificial Sequence: Synthetic oligonucleotide
gcugagaguaggcucgucu

SEQ ID NO: 659514 - RNA, 19 nt, Artificial Sequence
  Description of Artificial Sequence: Synthetic oligonucleotide
cguaaccguucugucaugg

SEQ ID NO: 659515 - RNA, 19 nt, Artificial Sequence
  Description of Artificial Sequence: Synthetic oligonucleotide
ucgggcugcguuggcugag

SEQ ID NO: 659516 - RNA, 19 nt, Artificial Sequence
  Description of Artificial Sequence: Synthetic oligonucleotide
gacguucugcagccccaca

SEQ ID NO: 659517 - RNA, 19 nt, Artificial Sequence
  Description of Artificial Sequence: Synthetic oligonucleotide
agacucccagaugggagaa

SEQ ID NO: 659518 - RNA, 19 nt, Artificial Sequence
  Description of Artificial Sequence: Synthetic oligonucleotide
guaaccguucugucauggu

SEQ ID NO: 659519 - RNA, 19 nt, Artificial Sequence
  Description of Artificial Sequence: Synthetic oligonucleotide
auggaucagaugagaccga

SEQ ID NO: 659520 - RNA, 19 nt, Artificial Sequence
  Description of Artificial Sequence: Synthetic oligonucleotide
guuugcgcucaaucaauuu

SEQ ID NO: 659521 - RNA, 19 nt, Artificial Sequence
  Description of Artificial Sequence: Synthetic oligonucleotide
ggcacguggcaguaacaga

SEQ ID NO: 659522 - RNA, 19 nt, Artificial Sequence
  Description of Artificial Sequence: Synthetic oligonucleotide
uccaggcgagccguuucgu

SEQ ID NO: 659523 - RNA, 19 nt, Artificial Sequence
  Description of Artificial Sequence: Synthetic oligonucleotide
ccggcaguuggcgaugacc

SEQ ID NO: 659524 - RNA, 19 nt, Artificial Sequence
  Description of Artificial Sequence: Synthetic oligonucleotide
augggagaauuugccccgu

SEQ ID NO: 659525 - RNA, 19 nt, Artificial Sequence
  Description of Artificial Sequence: Synthetic oligonucleotide
ggauucgacgaaggcagga

SEQ ID NO: 659526 - RNA, 19 nt, Artificial Sequence
  Description of Artificial Sequence: Synthetic oligonucleotide
caggaacuuggggaaguga

SEQ ID NO: 659527 - RNA, 19 nt, Artificial Sequence
  Description of Artificial Sequence: Synthetic oligonucleotide
gcgggugacugggaaaaug

SEQ ID NO: 659528 - RNA, 19 nt, Artificial Sequence
  Description of Artificial Sequence: Synthetic oligonucleotide
cacguaguagcgacugcgu

SEQ ID NO: 659529 - RNA, 19 nt, Artificial Sequence
  Description of Artificial Sequence: Synthetic oligonucleotide
gcugccggcgggugacugg

SEQ ID NO: 659530 - RNA, 19 nt, Artificial Sequence
  Description of Artificial Sequence: Synthetic oligonucleotide
gccggaacugagcaggugu

SEQ ID NO: 659531 - RNA, 19 nt, Artificial Sequence
  Description of Artificial Sequence: Synthetic oligonucleotide
guaguagucgggagccucu

SEQ ID NO: 659532 - RNA, 19 nt, Artificial Sequence
  Description of Artificial Sequence: Synthetic oligonucleotide
ggaucgcagaaggcuucgg

SEQ ID NO: 659533 - RNA, 19 nt, Artificial Sequence
  Description of Artificial Sequence: Synthetic oligonucleotide
cccaagggcuuccauccug

SEQ ID NO: 659534 - RNA, 19 nt, Artificial Sequence
  Description of Artificial Sequence: Synthetic oligonucleotide
gggauucgacgaaggcagg

SEQ ID NO: 659535 - RNA, 19 nt, Artificial Sequence
  Description of Artificial Sequence: Synthetic oligonucleotide
ggcgagccguuucgucucg

SEQ ID NO: 659536 - RNA, 19 nt, Artificial Sequence
  Description of Artificial Sequence: Synthetic oligonucleotide
guaccggcucuugggcacc

SEQ ID NO: 659537 - RNA, 19 nt, Artificial Sequence
  Description of Artificial Sequence: Synthetic oligonucleotide
gacuaaaggguggcaucgu

SEQ ID NO: 659538 - RNA, 19 nt, Artificial Sequence
  Description of Artificial Sequence: Synthetic oligonucleotide
gcauccguggcagcuggug

SEQ ID NO: 659539 - RNA, 19 nt, Artificial Sequence
  Description of Artificial Sequence: Synthetic oligonucleotide
ccggaacugagcagguguc

SEQ ID NO: 659540 - RNA, 19 nt, Artificial Sequence
  Description of Artificial Sequence: Synthetic oligonucleotide
cugagcaggugucuccagu

SEQ ID NO: 659541 - RNA, 19 nt, Artificial Sequence
  Description of Artificial Sequence: Synthetic oligonucleotide
gcacagcgacaauauucac

SEQ ID NO: 659542 - RNA, 19 nt, Artificial Sequence
  Description of Artificial Sequence: Synthetic oligonucleotide
uugccccguagaucuccuc

SEQ ID NO: 659543 - RNA, 19 nt, Artificial Sequence
  Description of Artificial Sequence: Synthetic oligonucleotide
ccaucagcgucgcuccuuc

SEQ ID NO: 659544 - RNA, 19 nt, Artificial Sequence
  Description of Artificial Sequence: Synthetic oligonucleotide
auccggggauucagcucac

SEQ ID NO: 659545 - RNA, 19 nt, Artificial Sequence
  Description of Artificial Sequence: Synthetic oligonucleotide
gggcaagguggcuaaauuu

SEQ ID NO: 659546 - RNA, 19 nt, Artificial Sequence
  Description of Artificial Sequence: Synthetic oligonucleotide
guauuccuucggcauccgu

SEQ ID NO: 659547 - RNA, 19 nt, Artificial Sequence
  Description of Artificial Sequence: Synthetic oligonucleotide
cuacuggcaugggcucggc

SEQ ID NO: 659548 - RNA, 19 nt, Artificial Sequence
  Description of Artificial Sequence: Synthetic oligonucleotide
ggauuguacucccggcagu

SEQ ID NO: 659549 - RNA, 19 nt, Artificial Sequence
  Description of Artificial Sequence: Synthetic oligonucleotide
gagcaggugucuccaguuu

SEQ ID NO: 659550 - RNA, 19 nt, Artificial Sequence
  Description of Artificial Sequence: Synthetic oligonucleotide
augccucgccgcuccucca

SEQ ID NO: 659551 - RNA, 19 nt, Artificial Sequence
  Description of Artificial Sequence: Synthetic oligonucleotide
cccagaccagaugucuccc

SEQ ID NO: 659552 - RNA, 19 nt, Artificial Sequence
  Description of Artificial Sequence: Synthetic oligonucleotide
ggucccagaccagaugucu

SEQ ID NO: 659553 - RNA, 19 nt, Artificial Sequence
  Description of Artificial Sequence: Synthetic oligonucleotide
gcaagguggcuaaauuugu

SEQ ID NO: 659554 - RNA, 19 nt, Artificial Sequence
  Description of Artificial Sequence: Synthetic oligonucleotide
cgagccguuucgucucggg

SEQ ID NO: 659555 - RNA, 19 nt, Artificial Sequence
  Description of Artificial Sequence: Synthetic oligonucleotide
acgaggcgggcaauguauu

SEQ ID NO: 659556 - RNA, 19 nt, Artificial Sequence
  Description of Artificial Sequence: Synthetic oligonucleotide
cugcucauuugaggugaca

SEQ ID NO: 659557 - RNA, 19 nt, Artificial Sequence
  Description of Artificial Sequence: Synthetic oligonucleotide
gggaggcuaucgcagcucu

SEQ ID NO: 659558 - RNA, 19 nt, Artificial Sequence
  Description of Artificial Sequence: Synthetic oligonucleotide
caguuggcgaugacccgcu

SEQ ID NO: 659559 - RNA, 19 nt, Artificial Sequence
  Description of Artificial Sequence: Synthetic oligonucleotide
gauugccugcuggcugaaa

SEQ ID NO: 659560 - RNA, 19 nt, Artificial Sequence
  Description of Artificial Sequence: Synthetic oligonucleotide
ugccggcgggugacuggga

SEQ ID NO: 659561 - RNA, 19 nt, Artificial Sequence
  Description of Artificial Sequence: Synthetic oligonucleotide
caucagcgucgcuccuuca

SEQ ID NO: 659562 - RNA, 19 nt, Artificial Sequence
  Description of Artificial Sequence: Synthetic oligonucleotide
gcguaaccguucugucaug

SEQ ID NO: 659563 - RNA, 19 nt, Artificial Sequence
  Description of Artificial Sequence: Synthetic oligonucleotide
gcgacugcguaaccguucu

SEQ ID NO: 659564 - RNA, 19 nt, Artificial Sequence
  Description of Artificial Sequence: Synthetic oligonucleotide
cguaguagucgggagccuc

SEQ ID NO: 659565 - RNA, 19 nt, Artificial Sequence
  Description of Artificial Sequence: Synthetic oligonucleotide
ugagaccgagguggacauu

SEQ ID NO: 659566 - RNA, 19 nt, Artificial Sequence
  Description of Artificial Sequence: Synthetic oligonucleotide
ggaacgcucuccacaggaa

SEQ ID NO: 659567 - RNA, 19 nt, Artificial Sequence
  Description of Artificial Sequence: Synthetic oligonucleotide
ucgcuccuucauaguccuu

SEQ ID NO: 659568 - RNA, 19 nt, Artificial Sequence
  Description of Artificial Sequence: Synthetic oligonucleotide
ggaggcuaucgcagcucug

SEQ ID NO: 659569 - RNA, 19 nt, Artificial Sequence
  Description of Artificial Sequence: Synthetic oligonucleotide
gaugugugccauagcccuu

SEQ ID NO: 659570 - RNA, 19 nt, Artificial Sequence
  Description of Artificial Sequence: Synthetic oligonucleotide
gcuucgggucaaagacgag

SEQ ID NO: 659571 - RNA, 19 nt, Artificial Sequence
  Description of Artificial Sequence: Synthetic oligonucleotide
ggggcaagguggcuaaauu

SEQ ID NO: 659572 - RNA, 19 nt, Artificial Sequence
  Description of Artificial Sequence: Synthetic oligonucleotide
ccuagcauggcagcggggu

SEQ ID NO: 659573 - RNA, 19 nt, Artificial Sequence
  Description of Artificial Sequence: Synthetic oligonucleotide
cguuucgucucgggcugcg

SEQ ID NO: 659574 - RNA, 19 nt, Artificial Sequence
  Description of Artificial Sequence: Synthetic oligonucleotide
cacccauggugggacuaaa

SEQ ID NO: 659575 - RNA, 19 nt, Artificial Sequence
  Description of Artificial Sequence: Synthetic oligonucleotide
gccccguagaucuccuccu

SEQ ID NO: 659576 - RNA, 19 nt, Artificial Sequence
  Description of Artificial Sequence: Synthetic oligonucleotide
ggggaacaugcggaagcaa

SEQ ID NO: 659577 - RNA, 19 nt, Artificial Sequence
  Description of Artificial Sequence: Synthetic oligonucleotide
ggcucgucucaggcccuag

SEQ ID NO: 659578 - RNA, 19 nt, Artificial Sequence
  Description of Artificial Sequence: Synthetic oligonucleotide
caaugagcccucccuccuu

SEQ ID NO: 659579 - RNA, 19 nt, Artificial Sequence
  Description of Artificial Sequence: Synthetic oligonucleotide
cacgcccauccuugaucaa

SEQ ID NO: 659580 - RNA, 19 nt, Artificial Sequence
  Description of Artificial Sequence: Synthetic oligonucleotide
gcgagccguuucgucucgg

SEQ ID NO: 659581 - RNA, 19 nt, Artificial Sequence
  Description of Artificial Sequence: Synthetic oligonucleotide
gguucucaggaagcuuccu

SEQ ID NO: 659582 - RNA, 19 nt, Artificial Sequence
  Description of Artificial Sequence: Synthetic oligonucleotide
gccggcgggugacugggaa

SEQ ID NO: 659583 - RNA, 19 nt, Artificial Sequence
  Description of Artificial Sequence: Synthetic oligonucleotide
cccgccgaugacacgccca

SEQ ID NO: 659584 - RNA, 19 nt, Artificial Sequence
  Description of Artificial Sequence: Synthetic oligonucleotide
ggccagcgucuuaugcuuc

SEQ ID NO: 659585 - RNA, 19 nt, Artificial Sequence
  Description of Artificial Sequence: Synthetic oligonucleotide
guuucgucucgggcugcgu

SEQ ID NO: 659586 - RNA, 19 nt, Artificial Sequence
  Description of Artificial Sequence: Synthetic oligonucleotide
cgauaaugccucgccgcuc

SEQ ID NO: 659587 - RNA, 19 nt, Artificial Sequence
  Description of Artificial Sequence: Synthetic oligonucleotide
ggcaugggcucggccccug

SEQ ID NO: 659588 - RNA, 19 nt, Artificial Sequence
  Description of Artificial Sequence: Synthetic oligonucleotide
ccguuucgucucgggcugc

SEQ ID NO: 659589 - RNA, 19 nt, Artificial Sequence
  Description of Artificial Sequence: Synthetic oligonucleotide
ccggcgggugacugggaaa

SEQ ID NO: 659590 - RNA, 19 nt, Artificial Sequence
  Description of Artificial Sequence: Synthetic oligonucleotide
ccgaugacacgcccauccu

SEQ ID NO: 659591 - RNA, 19 nt, Artificial Sequence
  Description of Artificial Sequence: Synthetic oligonucleotide
cccggcaguuggcgaugac

SEQ ID NO: 659592 - RNA, 19 nt, Artificial Sequence
  Description of Artificial Sequence: Synthetic oligonucleotide
cggcgggugacugggaaaa

SEQ ID NO: 659593 - RNA, 19 nt, Artificial Sequence
  Description of Artificial Sequence: Synthetic oligonucleotide
ccgccgaugacacgcccau

SEQ ID NO: 659594 - RNA, 19 nt, Artificial Sequence
  Description of Artificial Sequence: Synthetic oligonucleotide
ggcgggcaauguauuccuu

SEQ ID NO: 659595 - RNA, 19 nt, Artificial Sequence
  Description of Artificial Sequence: Synthetic oligonucleotide
ggcgggugacugggaaaau

SEQ ID NO: 659596 - RNA, 19 nt, Artificial Sequence
  Description of Artificial Sequence: Synthetic oligonucleotide
ggcauccguggcagcuggu

SEQ ID NO: 659597 - RNA, 19 nt, Artificial Sequence
  Description of Artificial Sequence: Synthetic oligonucleotide
cccucuccacucggaauuu

SEQ ID NO: 659598 - RNA, 19 nt, Artificial Sequence
  Description of Artificial Sequence: Synthetic oligonucleotide
uuuccuugcaauaagauug

SEQ ID NO: 659599 - RNA, 19 nt, Artificial Sequence
  Description of Artificial Sequence: Synthetic oligonucleotide
uguaguaccuuccaaauca

SEQ ID NO: 659600 - RNA, 19 nt, Artificial Sequence
  Description of Artificial Sequence: Synthetic oligonucleotide
gaagagacgacuauggugg

SEQ ID NO: 659601 - RNA, 19 nt, Artificial Sequence
  Description of Artificial Sequence: Synthetic oligonucleotide
auuaagccaaugcaggacc

SEQ ID NO: 659602 - RNA, 19 nt, Artificial Sequence
  Description of Artificial Sequence: Synthetic oligonucleotide
ucauauagaagguucagca

SEQ ID NO: 659603 - RNA, 19 nt, Artificial Sequence
  Description of Artificial Sequence: Synthetic oligonucleotide
aauccaggcacauuccuag

SEQ ID NO: 659604 - RNA, 19 nt, Artificial Sequence
  Description of Artificial Sequence: Synthetic oligonucleotide
uguacaacugcauuggcga

SEQ ID NO: 659605 - RNA, 19 nt, Artificial Sequence
  Description of Artificial Sequence: Synthetic oligonucleotide
aacuguaguagccacugag

SEQ ID NO: 659606 - RNA, 19 nt, Artificial Sequence
  Description of Artificial Sequence: Synthetic oligonucleotide
gugguuacugccaugaucg

SEQ ID NO: 659607 - RNA, 19 nt, Artificial Sequence
  Description of Artificial Sequence: Synthetic oligonucleotide
ugauccacaaaguuggcug

SEQ ID NO: 659608 - RNA, 19 nt, Artificial Sequence
  Description of Artificial Sequence: Synthetic oligonucleotide
acacaggaccauuuaaggc

SEQ ID NO: 659609 - RNA, 19 nt, Artificial Sequence
  Description of Artificial Sequence: Synthetic oligonucleotide
uuugaaucggaccuucucu

SEQ ID NO: 659610 - RNA, 19 nt, Artificial Sequence
  Description of Artificial Sequence: Synthetic oligonucleotide
uccucauuaagccaaugca

SEQ ID NO: 659611 - RNA, 19 nt, Artificial Sequence
  Description of Artificial Sequence: Synthetic oligonucleotide
aaauugcaucaccagguag

SEQ ID NO: 659612 - RNA, 19 nt, Artificial Sequence
  Description of Artificial Sequence: Synthetic oligonucleotide
ugcaauaagauugccaaug

SEQ ID NO: 659613 - RNA, 19 nt, Artificial Sequence
  Description of Artificial Sequence: Synthetic oligonucleotide
cugaugaucacuucuggag

SEQ ID NO: 659614 - RNA, 19 nt, Artificial Sequence
  Description of Artificial Sequence: Synthetic oligonucleotide
cugcccauacacuagaacc

SEQ ID NO: 659615 - RNA, 19 nt, Artificial Sequence
  Description of Artificial Sequence: Synthetic oligonucleotide
ucggcuucaauguugaagu

SEQ ID NO: 659616 - RNA, 19 nt, Artificial Sequence
  Description of Artificial Sequence: Synthetic oligonucleotide
auauucccacgucucaugc

SEQ ID NO: 659617 - RNA, 19 nt, Artificial Sequence
  Description of Artificial Sequence: Synthetic oligonucleotide
cugcaauccggucaaaugg

SEQ ID NO: 659618 - RNA, 19 nt, Artificial Sequence
  Description of Artificial Sequence: Synthetic oligonucleotide
uggauauuugaaucggacc

SEQ ID NO: 659619 - RNA, 19 nt, Artificial Sequence
  Description of Artificial Sequence: Synthetic oligonucleotide
aauccggucaaauggggca

SEQ ID NO: 659620 - RNA, 19 nt, Artificial Sequence
  Description of Artificial Sequence: Synthetic oligonucleotide
agaacugaugaucacuucu

SEQ ID NO: 659621 - RNA, 19 nt, Artificial Sequence
  Description of Artificial Sequence: Synthetic oligonucleotide
acaugaggggcuccaaacc

SEQ ID NO: 659622 - RNA, 19 nt, Artificial Sequence
  Description of Artificial Sequence: Synthetic oligonucleotide
uguguuuggauauuugaau

SEQ ID NO: 659623 - RNA, 19 nt, Artificial Sequence
  Description of Artificial Sequence: Synthetic oligonucleotide
auuugaaucggaccuucuc

SEQ ID NO: 659624 - RNA, 19 nt, Artificial Sequence
  Description of Artificial Sequence: Synthetic oligonucleotide
uuggauauuugaaucggac

SEQ ID NO: 659625 - RNA, 19 nt, Artificial Sequence
  Description of Artificial Sequence: Synthetic oligonucleotide
ugaugaucacuucuggaga

SEQ ID NO: 659626 - RNA, 19 nt, Artificial Sequence
  Description of Artificial Sequence: Synthetic oligonucleotide
ucuggguaggggacgaagg

SEQ ID NO: 659627 - RNA, 19 nt, Artificial Sequence
  Description of Artificial Sequence: Synthetic oligonucleotide
aauugcaucaccagguagu

SEQ ID NO: 659628 - RNA, 19 nt, Artificial Sequence
  Description of Artificial Sequence: Synthetic oligonucleotide
gauucgaucacugcagcag

SEQ ID NO: 659629 - RNA, 19 nt, Artificial Sequence
  Description of Artificial Sequence: Synthetic oligonucleotide
acgugcuucagcaucaggc

SEQ ID NO: 659630 - RNA, 19 nt, Artificial Sequence
  Description of Artificial Sequence: Synthetic oligonucleotide
ugcccauacacuagaaccc

SEQ ID NO: 659631 - RNA, 19 nt, Artificial Sequence
  Description of Artificial Sequence: Synthetic oligonucleotide
cauauagaagguucagcag

SEQ ID NO: 659632 - RNA, 19 nt, Artificial Sequence
  Description of Artificial Sequence: Synthetic oligonucleotide
cuguacaacugcauuggcg

SEQ ID NO: 659633 - RNA, 19 nt, Artificial Sequence
  Description of Artificial Sequence: Synthetic oligonucleotide
gaaggaguggccaauccag

SEQ ID NO: 659634 - RNA, 19 nt, Artificial Sequence
  Description of Artificial Sequence: Synthetic oligonucleotide
cacaaggggagguaggacc

SEQ ID NO: 659635 - RNA, 19 nt, Artificial Sequence
  Description of Artificial Sequence: Synthetic oligonucleotide
uuuggauauuugaaucgga

SEQ ID NO: 659636 - RNA, 19 nt, Artificial Sequence
  Description of Artificial Sequence: Synthetic oligonucleotide
uuugaguaauuuucugaga

SEQ ID NO: 659637 - RNA, 19 nt, Artificial Sequence
  Description of Artificial Sequence: Synthetic oligonucleotide
auucgaucacugcagcagg

SEQ ID NO: 659638 - RNA, 19 nt, Artificial Sequence
  Description of Artificial Sequence: Synthetic oligonucleotide
uggucauuggcuucccagg

SEQ ID NO: 659639 - RNA, 19 nt, Artificial Sequence
  Description of Artificial Sequence: Synthetic oligonucleotide
ucucuuccauguccgaggg

SEQ ID NO: 659640 - RNA, 19 nt, Artificial Sequence
  Description of Artificial Sequence: Synthetic oligonucleotide
aggaguggccaauccaggc

SEQ ID NO: 659641 - RNA, 19 nt, Artificial Sequence
  Description of Artificial Sequence: Synthetic oligonucleotide
ugugguuacugccaugauc

SEQ ID NO: 659642 - RNA, 19 nt, Artificial Sequence
  Description of Artificial Sequence: Synthetic oligonucleotide
uggggauggaucaauucca

SEQ ID NO: 659643 - RNA, 19 nt, Artificial Sequence
  Description of Artificial Sequence: Synthetic oligonucleotide
uccacaagucucuggauga

SEQ ID NO: 659644 - RNA, 19 nt, Artificial Sequence
  Description of Artificial Sequence: Synthetic oligonucleotide
cacaggaccauuuaaggca

SEQ ID NO: 659645 - RNA, 19 nt, Artificial Sequence
  Description of Artificial Sequence: Synthetic oligonucleotide
aguugaucucugcaauccg

SEQ ID NO: 659646 - RNA, 19 nt, Artificial Sequence
  Description of Artificial Sequence: Synthetic oligonucleotide
auguaguaccuuccaaauc

SEQ ID NO: 659647 - RNA, 19 nt, Artificial Sequence
  Description of Artificial Sequence: Synthetic oligonucleotide
aaaauugcaucaccaggua

SEQ ID NO: 659648 - RNA, 19 nt, Artificial Sequence
  Description of Artificial Sequence: Synthetic oligonucleotide
aaggaagcagccugaccag

SEQ ID NO: 659649 - RNA, 19 nt, Artificial Sequence
  Description of Artificial Sequence: Synthetic oligonucleotide
aaaggcuuucucugggccu

SEQ ID NO: 659650 - RNA, 19 nt, Artificial Sequence
  Description of Artificial Sequence: Synthetic oligonucleotide
caucguguucucaggaagg

SEQ ID NO: 659651 - RNA, 19 nt, Artificial Sequence
  Description of Artificial Sequence: Synthetic oligonucleotide
uuccuugcaauaagauugc

SEQ ID NO: 659652 - RNA, 19 nt, Artificial Sequence
  Description of Artificial Sequence: Synthetic oligonucleotide
ugucagaggcuaccagugg

SEQ ID NO: 659653 - RNA, 19 nt, Artificial Sequence
  Description of Artificial Sequence: Synthetic oligonucleotide
auauuugaaucggaccuuc

SEQ ID NO: 659654 - RNA, 19 nt, Artificial Sequence
  Description of Artificial Sequence: Synthetic oligonucleotide
uuucuugauaaaggaagca

SEQ ID NO: 659655 - RNA, 19 nt, Artificial Sequence
  Description of Artificial Sequence: Synthetic oligonucleotide
ggaagagacgacuauggug

SEQ ID NO: 659656 - RNA, 19 nt, Artificial Sequence
  Description of Artificial Sequence: Synthetic oligonucleotide
cuuccuagugacacacacg

SEQ ID NO: 659657 - RNA, 19 nt, Artificial Sequence
  Description of Artificial Sequence: Synthetic oligonucleotide
gaccaaaggcuuucucugg

SEQ ID NO: 659658 - RNA, 19 nt, Artificial Sequence
  Description of Artificial Sequence: Synthetic oligonucleotide
ugcauuggcgauccgugug

SEQ ID NO: 659659 - RNA, 19 nt, Artificial Sequence
  Description of Artificial Sequence: Synthetic oligonucleotide
ucacccgggcgguacaucg

SEQ ID NO: 659660 - RNA, 19 nt, Artificial Sequence
  Description of Artificial Sequence: Synthetic oligonucleotide
cucggcauggcuguggucc

SEQ ID NO: 659661 - RNA, 19 nt, Artificial Sequence
  Description of Artificial Sequence: Synthetic oligonucleotide
acuguaguagccacugagg

SEQ ID NO: 659662 - RNA, 19 nt, Artificial Sequence
  Description of Artificial Sequence: Synthetic oligonucleotide
ccaaaucacugucugagcg

SEQ ID NO: 659663 - RNA, 19 nt, Artificial Sequence
  Description of Artificial Sequence: Synthetic oligonucleotide
uagucugucgcugaucugu

SEQ ID NO: 659664 - RNA, 19 nt, Artificial Sequence
  Description of Artificial Sequence: Synthetic oligonucleotide
gcaauaagauugccaaugg

SEQ ID NO: 659665 - RNA, 19 nt, Artificial Sequence
  Description of Artificial Sequence: Synthetic oligonucleotide
aaucggaccuucucuucca

SEQ ID NO: 659666 - RNA, 19 nt, Artificial Sequence
  Description of Artificial Sequence: Synthetic oligonucleotide
uggcaacuaaggcuggggc

SEQ ID NO: 659667 - RNA, 19 nt, Artificial Sequence
  Description of Artificial Sequence: Synthetic oligonucleotide
uuaagccaaugcaggaccu

SEQ ID NO: 659668 - RNA, 19 nt, Artificial Sequence
  Description of Artificial Sequence: Synthetic oligonucleotide
ugugggucugcaccgggcc

SEQ ID NO: 659669 - RNA, 19 nt, Artificial Sequence
  Description of Artificial Sequence: Synthetic oligonucleotide
uggauucgaucacugcagc

SEQ ID NO: 659670 - RNA, 19 nt, Artificial Sequence
  Description of Artificial Sequence: Synthetic oligonucleotide
ucuguacaacugcauuggc

SEQ ID NO: 659671 - RNA, 19 nt, Artificial Sequence
  Description of Artificial Sequence: Synthetic oligonucleotide
gguacaucgagucuccuca

SEQ ID NO: 659672 - RNA, 19 nt, Artificial Sequence
  Description of Artificial Sequence: Synthetic oligonucleotide
acaguguuccugcgguugg

SEQ ID NO: 659673 - RNA, 19 nt, Artificial Sequence
  Description of Artificial Sequence: Synthetic oligonucleotide
ggauauuugaaucggaccu

SEQ ID NO: 659674 - RNA, 19 nt, Artificial Sequence
  Description of Artificial Sequence: Synthetic oligonucleotide
agcuaacacagugcugucc

SEQ ID NO: 659675 - RNA, 19 nt, Artificial Sequence
  Description of Artificial Sequence: Synthetic oligonucleotide
uugccggagaccaacuggu

SEQ ID NO: 659676 - RNA, 19 nt, Artificial Sequence
  Description of Artificial Sequence: Synthetic oligonucleotide
uaggacuguccucaucggc

SEQ ID NO: 659677 - RNA, 19 nt, Artificial Sequence
  Description of Artificial Sequence: Synthetic oligonucleotide
cuagaacccacaucccuug

SEQ ID NO: 659678 - RNA, 19 nt, Artificial Sequence
  Description of Artificial Sequence: Synthetic oligonucleotide
agucauauagaagguucag

SEQ ID NO: 659679 - RNA, 19 nt, Artificial Sequence
  Description of Artificial Sequence: Synthetic oligonucleotide
acgacuaugguggcugugg

SEQ ID NO: 659680 - RNA, 19 nt, Artificial Sequence
  Description of Artificial Sequence: Synthetic oligonucleotide
gcagacaucggguucacug

SEQ ID NO: 659681 - RNA, 19 nt, Artificial Sequence
  Description of Artificial Sequence: Synthetic oligonucleotide
ugaucaccuguucaguuuu

SEQ ID NO: 659682 - RNA, 19 nt, Artificial Sequence
  Description of Artificial Sequence: Synthetic oligonucleotide
agaugggucaccaucgugu

SEQ ID NO: 659683 - RNA, 19 nt, Artificial Sequence
  Description of Artificial Sequence: Synthetic oligonucleotide
ccucauuaagccaaugcag

SEQ ID NO: 659684 - RNA, 19 nt, Artificial Sequence
  Description of Artificial Sequence: Synthetic oligonucleotide
uucgaucacugcagcaggc

SEQ ID NO: 659685 - RNA, 19 nt, Artificial Sequence
  Description of Artificial Sequence: Synthetic oligonucleotide
ucggaugacuucacugaug

SEQ ID NO: 659686 - RNA, 19 nt, Artificial Sequence
  Description of Artificial Sequence: Synthetic oligonucleotide
uauuugaaucggaccuucu

SEQ ID NO: 659687 - RNA, 19 nt, Artificial Sequence
  Description of Artificial Sequence: Synthetic oligonucleotide
acggcaaucugcagggagc

SEQ ID NO: 659688 - RNA, 19 nt, Artificial Sequence
  Description of Artificial Sequence: Synthetic oligonucleotide
gggagguaggaccaaaggc

SEQ ID NO: 659689 - RNA, 19 nt, Artificial Sequence
  Description of Artificial Sequence: Synthetic oligonucleotide
uccuagcugcugcuaagcc

SEQ ID NO: 659690 - RNA, 19 nt, Artificial Sequence
  Description of Artificial Sequence: Synthetic oligonucleotide
ccuagugacacacacguuc

SEQ ID NO: 659691 - RNA, 19 nt, Artificial Sequence
  Description of Artificial Sequence: Synthetic oligonucleotide
caucugcuggaucugguac

SEQ ID NO: 659692 - RNA, 19 nt, Artificial Sequence
  Description of Artificial Sequence: Synthetic oligonucleotide
uugaaucggaccuucucuu

SEQ ID NO: 659693 - RNA, 19 nt, Artificial Sequence
  Description of Artificial Sequence: Synthetic oligonucleotide
gaguggccaauccaggcac

SEQ ID NO: 659694 - RNA, 19 nt, Artificial Sequence
  Description of Artificial Sequence: Synthetic oligonucleotide
uauucccacgucucaugcc

SEQ ID NO: 659695 - RNA, 19 nt, Artificial Sequence
  Description of Artificial Sequence: Synthetic oligonucleotide
uggggcauugauguuguca

SEQ ID NO: 659696 - RNA, 19 nt, Artificial Sequence
  Description of Artificial Sequence: Synthetic oligonucleotide
acguuccaggcacaagggg

SEQ ID NO: 659697 - RNA, 19 nt, Artificial Sequence
  Description of Artificial Sequence: Synthetic oligonucleotide
cucguccucgccuagucug

SEQ ID NO: 659698 - RNA, 19 nt, Artificial Sequence
  Description of Artificial Sequence: Synthetic oligonucleotide
aauggggcauugauguugu

SEQ ID NO: 659699 - RNA, 19 nt, Artificial Sequence
  Description of Artificial Sequence: Synthetic oligonucleotide
agagcugaggugccuacgu

SEQ ID NO: 659700 - RNA, 19 nt, Artificial Sequence
  Description of Artificial Sequence: Synthetic oligonucleotide
agguucagcagacucucgu

SEQ ID NO: 659701 - RNA, 19 nt, Artificial Sequence
  Description of Artificial Sequence: Synthetic oligonucleotide
gauccgugugaggugaccc

SEQ ID NO: 659702 - RNA, 19 nt, Artificial Sequence
  Description of Artificial Sequence: Synthetic oligonucleotide
auacacugcugccugcaca

SEQ ID NO: 659703 - RNA, 19 nt, Artificial Sequence
  Description of Artificial Sequence: Synthetic oligonucleotide
ugugggagggccugccuug

SEQ ID NO: 659704 - RNA, 19 nt, Artificial Sequence
  Description of Artificial Sequence: Synthetic oligonucleotide
gacuucacugauguggguc

SEQ ID NO: 659705 - RNA, 19 nt, Artificial Sequence
  Description of Artificial Sequence: Synthetic oligonucleotide
uccucgccuagucugucgc

SEQ ID NO: 659706 - RNA, 19 nt, Artificial Sequence
  Description of Artificial Sequence: Synthetic oligonucleotide
guaggacuguccucaucgg

SEQ ID NO: 659707 - RNA, 19 nt, Artificial Sequence
  Description of Artificial Sequence: Synthetic oligonucleotide
acaggaccauuuaaggcag

SEQ ID NO: 659708 - RNA, 19 nt, Artificial Sequence
  Description of Artificial Sequence: Synthetic oligonucleotide
aguggggccuuccuaguga

SEQ ID NO: 659709 - RNA, 19 nt, Artificial Sequence
  Description of Artificial Sequence: Synthetic oligonucleotide
ucuggccaucacccgggcg

SEQ ID NO: 659710 - RNA, 19 nt, Artificial Sequence
  Description of Artificial Sequence: Synthetic oligonucleotide
ugcgguuggucuccaucag

SEQ ID NO: 659711 - RNA, 19 nt, Artificial Sequence
  Description of Artificial Sequence: Synthetic oligonucleotide
ucccaggguggcaacuaag

SEQ ID NO: 659712 - RNA, 19 nt, Artificial Sequence
  Description of Artificial Sequence: Synthetic oligonucleotide
augaucaccuguucaguuu

SEQ ID NO: 659713 - RNA, 19 nt, Artificial Sequence
  Description of Artificial Sequence: Synthetic oligonucleotide
ugagacaugaggggcucca

SEQ ID NO: 659714 - RNA, 19 nt, Artificial Sequence
  Description of Artificial Sequence: Synthetic oligonucleotide
ugguuacugccaugaucgg

SEQ ID NO: 659715 - RNA, 19 nt, Artificial Sequence
  Description of Artificial Sequence: Synthetic oligonucleotide
gcgaggaccuucuuucugg

SEQ ID NO: 659716 - RNA, 19 nt, Artificial Sequence
  Description of Artificial Sequence: Synthetic oligonucleotide
cacggcaaucugcagggag

SEQ ID NO: 659717 - RNA, 19 nt, Artificial Sequence
  Description of Artificial Sequence: Synthetic oligonucleotide
guccauauccacaggcgag

SEQ ID NO: 659718 - RNA, 19 nt, Artificial Sequence
  Description of Artificial Sequence: Synthetic oligonucleotide
ugacccauauucccacguc

SEQ ID NO: 659719 - RNA, 19 nt, Artificial Sequence
  Description of Artificial Sequence: Synthetic oligonucleotide
aguaauuuucugagacaug

SEQ ID NO: 659720 - RNA, 19 nt, Artificial Sequence
  Description of Artificial Sequence: Synthetic oligonucleotide
cuguccguacacucagccc

SEQ ID NO: 659721 - RNA, 19 nt, Artificial Sequence
  Description of Artificial Sequence: Synthetic oligonucleotide
uuccuagcugcugcuaagc

SEQ ID NO: 659722 - RNA, 19 nt, Artificial Sequence
  Description of Artificial Sequence: Synthetic oligonucleotide
uugcaauaagauugccaau

SEQ ID NO: 659723 - RNA, 19 nt, Artificial Sequence
  Description of Artificial Sequence: Synthetic oligonucleotide
agccugaccagggcgggcc

SEQ ID NO: 659724 - RNA, 19 nt, Artificial Sequence
  Description of Artificial Sequence: Synthetic oligonucleotide
agcgaggaccuucuuucug

SEQ ID NO: 659725 - RNA, 19 nt, Artificial Sequence
  Description of Artificial Sequence: Synthetic oligonucleotide
gaucugguacucagagaag

SEQ ID NO: 659726 - RNA, 19 nt, Artificial Sequence
  Description of Artificial Sequence: Synthetic oligonucleotide
ggccaauccaggcacauuc

SEQ ID NO: 659727 - RNA, 19 nt, Artificial Sequence
  Description of Artificial Sequence: Synthetic oligonucleotide
caucgaagggcuggauucg

SEQ ID NO: 659728 - RNA, 19 nt, Artificial Sequence
  Description of Artificial Sequence: Synthetic oligonucleotide
aggacuguccucaucggcu

SEQ ID NO: 659729 - RNA, 19 nt, Artificial Sequence
  Description of Artificial Sequence: Synthetic oligonucleotide
caggccgaugaacuucucc

SEQ ID NO: 659730 - RNA, 19 nt, Artificial Sequence
  Description of Artificial Sequence: Synthetic oligonucleotide
caaaguuggcugucaucug

SEQ ID NO: 659731 - RNA, 19 nt, Artificial Sequence
  Description of Artificial Sequence: Synthetic oligonucleotide
ugaucucugcaauccgguc

SEQ ID NO: 659732 - RNA, 19 nt, Artificial Sequence
  Description of Artificial Sequence: Synthetic oligonucleotide
gcagaaaggcuggaagucg

SEQ ID NO: 659733 - RNA, 19 nt, Artificial Sequence
  Description of Artificial Sequence: Synthetic oligonucleotide
guggcaacuaaggcugggg

SEQ ID NO: 659734 - RNA, 19 nt, Artificial Sequence
  Description of Artificial Sequence: Synthetic oligonucleotide
acaagucucuggaugauuu

SEQ ID NO: 659735 - RNA, 19 nt, Artificial Sequence
  Description of Artificial Sequence: Synthetic oligonucleotide
gaccucuugccggagacca

SEQ ID NO: 659736 - RNA, 19 nt, Artificial Sequence
  Description of Artificial Sequence: Synthetic oligonucleotide
ccacaaagcucucccagcg

SEQ ID NO: 659737 - RNA, 19 nt, Artificial Sequence
  Description of Artificial Sequence: Synthetic oligonucleotide
agcgcccacggcaaucugc

SEQ ID NO: 659738 - RNA, 19 nt, Artificial Sequence
  Description of Artificial Sequence: Synthetic oligonucleotide
cacaaagcucucccagcgc

SEQ ID NO: 659739 - RNA, 19 nt, Artificial Sequence
  Description of Artificial Sequence: Synthetic oligonucleotide
gugaggugacccauauucc

SEQ ID NO: 659740 - RNA, 19 nt, Artificial Sequence
  Description of Artificial Sequence: Synthetic oligonucleotide
accaaaugcagcauuuauu

SEQ ID NO: 659741 - RNA, 19 nt, Artificial Sequence
  Description of Artificial Sequence: Synthetic oligonucleotide
gcacauuccuagcugcugc

SEQ ID NO: 659742 - RNA, 19 nt, Artificial Sequence
  Description of Artificial Sequence: Synthetic oligonucleotide
acagaugggucaccaucgu

SEQ ID NO: 659743 - RNA, 19 nt, Artificial Sequence
  Description of Artificial Sequence: Synthetic oligonucleotide
gcuguccguacacucagcc

SEQ ID NO: 659744 - RNA, 19 nt, Artificial Sequence
  Description of Artificial Sequence: Synthetic oligonucleotide
agacaugaggggcuccaaa

SEQ ID NO: 659745 - RNA, 19 nt, Artificial Sequence
  Description of Artificial Sequence: Synthetic oligonucleotide
accaucguguucucaggaa

SEQ ID NO: 659746 - RNA, 19 nt, Artificial Sequence
  Description of Artificial Sequence: Synthetic oligonucleotide
gcugaucuguggcacauca

SEQ ID NO: 659747 - RNA, 19 nt, Artificial Sequence
  Description of Artificial Sequence: Synthetic oligonucleotide
ucgaucacugcagcaggcu

SEQ ID NO: 659748 - RNA, 19 nt, Artificial Sequence
  Description of Artificial Sequence: Synthetic oligonucleotide
uaacacagugcuguccgua

SEQ ID NO: 659749 - RNA, 19 nt, Artificial Sequence
  Description of Artificial Sequence: Synthetic oligonucleotide
gguccauauccacaggcga

SEQ ID NO: 659750 - RNA, 19 nt, Artificial Sequence
  Description of Artificial Sequence: Synthetic oligonucleotide
uccuugcaauaagauugcc

SEQ ID NO: 659751 - RNA, 19 nt, Artificial Sequence
  Description of Artificial Sequence: Synthetic oligonucleotide
cugaucuguggcacaucac

SEQ ID NO: 659752 - RNA, 19 nt, Artificial Sequence
  Description of Artificial Sequence: Synthetic oligonucleotide
agguaguuuucuugauaaa

SEQ ID NO: 659753 - RNA, 19 nt, Artificial Sequence
  Description of Artificial Sequence: Synthetic oligonucleotide
ccaucguguucucaggaag

SEQ ID NO: 659754 - RNA, 19 nt, Artificial Sequence
  Description of Artificial Sequence: Synthetic oligonucleotide
ucccacgucucaugccacc

SEQ ID NO: 659755 - RNA, 19 nt, Artificial Sequence
  Description of Artificial Sequence: Synthetic oligonucleotide
auccgugugaggugaccca

SEQ ID NO: 659756 - RNA, 19 nt, Artificial Sequence
  Description of Artificial Sequence: Synthetic oligonucleotide
guaguaccuuccaaaucac

SEQ ID NO: 659757 - RNA, 19 nt, Artificial Sequence
  Description of Artificial Sequence: Synthetic oligonucleotide
caggguggcaacuaaggcu

SEQ ID NO: 659758 - RNA, 19 nt, Artificial Sequence
  Description of Artificial Sequence: Synthetic oligonucleotide
guccucgccuagucugucg

SEQ ID NO: 659759 - RNA, 19 nt, Artificial Sequence
  Description of Artificial Sequence: Synthetic oligonucleotide
guggcacaucacaagucag

SEQ ID NO: 659760 - RNA, 19 nt, Artificial Sequence
  Description of Artificial Sequence: Synthetic oligonucleotide
accuucuuucuggguaggg

SEQ ID NO: 659761 - RNA, 19 nt, Artificial Sequence
  Description of Artificial Sequence: Synthetic oligonucleotide
guccauguaguaccuucca

SEQ ID NO: 659762 - RNA, 19 nt, Artificial Sequence
  Description of Artificial Sequence: Synthetic oligonucleotide
cagaugggucaccaucgug

SEQ ID NO: 659763 - RNA, 19 nt, Artificial Sequence
  Description of Artificial Sequence: Synthetic oligonucleotide
auugcaucaccagguaguu

SEQ ID NO: 659764 - RNA, 19 nt, Artificial Sequence
  Description of Artificial Sequence: Synthetic oligonucleotide
guacucagagaaggccagg

SEQ ID NO: 659765 - RNA, 19 nt, Artificial Sequence
  Description of Artificial Sequence: Synthetic oligonucleotide
gaccuucuuucuggguagg

SEQ ID NO: 659766 - RNA, 19 nt, Artificial Sequence
  Description of Artificial Sequence: Synthetic oligonucleotide
ucgccuagucugucgcuga

SEQ ID NO: 659767 - RNA, 19 nt, Artificial Sequence
  Description of Artificial Sequence: Synthetic oligonucleotide
ccacaggcgagcugcaccg

SEQ ID NO: 659768 - RNA, 19 nt, Artificial Sequence
  Description of Artificial Sequence: Synthetic oligonucleotide
ggugacccauauucccacg

SEQ ID NO: 659769 - RNA, 19 nt, Artificial Sequence
  Description of Artificial Sequence: Synthetic oligonucleotide
cauguccgagggguggucc

SEQ ID NO: 659770 - RNA, 19 nt, Artificial Sequence
  Description of Artificial Sequence: Synthetic oligonucleotide
auagaagguucagcagacu

SEQ ID NO: 659771 - RNA, 19 nt, Artificial Sequence
  Description of Artificial Sequence: Synthetic oligonucleotide
uucccacgucucaugccac

SEQ ID NO: 659772 - RNA, 19 nt, Artificial Sequence
  Description of Artificial Sequence: Synthetic oligonucleotide
gaagcucacaggcuguguu

SEQ ID NO: 659773 - RNA, 19 nt, Artificial Sequence
  Description of Artificial Sequence: Synthetic oligonucleotide
caauaagauugccaauggu

SEQ ID NO: 659774 - RNA, 19 nt, Artificial Sequence
  Description of Artificial Sequence: Synthetic oligonucleotide
ggaguggccaauccaggca

SEQ ID NO: 659775 - RNA, 19 nt, Artificial Sequence
  Description of Artificial Sequence: Synthetic oligonucleotide
caugaggggcuccaaaccu

SEQ ID NO: 659776 - RNA, 19 nt, Artificial Sequence
  Description of Artificial Sequence: Synthetic oligonucleotide
gaccaacugguuccacaca

SEQ ID NO: 659777 - RNA, 19 nt, Artificial Sequence
  Description of Artificial Sequence: Synthetic oligonucleotide
guccugugugaugagguuc

SEQ ID NO: 659778 - RNA, 19 nt, Artificial Sequence
  Description of Artificial Sequence: Synthetic oligonucleotide
cucgccuagucugucgcug

SEQ ID NO: 659779 - RNA, 19 nt, Artificial Sequence
  Description of Artificial Sequence: Synthetic oligonucleotide
cagcagaacugaugaucac

SEQ ID NO: 659780 - RNA, 19 nt, Artificial Sequence
  Description of Artificial Sequence: Synthetic oligonucleotide
gauauuugaaucggaccuu

SEQ ID NO: 659781 - RNA, 19 nt, Artificial Sequence
  Description of Artificial Sequence: Synthetic oligonucleotide
auguccgaggggugguccu

SEQ ID NO: 659782 - RNA, 19 nt, Artificial Sequence
  Description of Artificial Sequence: Synthetic oligonucleotide
ccaggguggcaacuaaggc

SEQ ID NO: 659783 - RNA, 19 nt, Artificial Sequence
  Description of Artificial Sequence: Synthetic oligonucleotide
caauccaggcacauuccua

SEQ ID NO: 659784 - RNA, 19 nt, Artificial Sequence
  Description of Artificial Sequence: Synthetic oligonucleotide
cauuggcgauccgugugag

SEQ ID NO: 659785 - RNA, 19 nt, Artificial Sequence
  Description of Artificial Sequence: Synthetic oligonucleotide
aggcacaaggggagguagg

SEQ ID NO: 659786 - RNA, 19 nt, Artificial Sequence
  Description of Artificial Sequence: Synthetic oligonucleotide
agggcuggauucgaucacu

SEQ ID NO: 659787 - RNA, 19 nt, Artificial Sequence
  Description of Artificial Sequence: Synthetic oligonucleotide
ccagggaauucuuugagua

SEQ ID NO: 659788 - RNA, 19 nt, Artificial Sequence
  Description of Artificial Sequence: Synthetic oligonucleotide
cacugaugugggucugcac

SEQ ID NO: 659789 - RNA, 19 nt, Artificial Sequence
  Description of Artificial Sequence: Synthetic oligonucleotide
gguaggaccaaaggcuuuc

SEQ ID NO: 659790 - RNA, 19 nt, Artificial Sequence
  Description of Artificial Sequence: Synthetic oligonucleotide
gacgacuaugguggcugug

SEQ ID NO: 659791 - RNA, 19 nt, Artificial Sequence
  Description of Artificial Sequence: Synthetic oligonucleotide
ggauucgaucacugcagca

SEQ ID NO: 659792 - RNA, 19 nt, Artificial Sequence
  Description of Artificial Sequence: Synthetic oligonucleotide
cccucggaugacuucacug

SEQ ID NO: 659793 - RNA, 19 nt, Artificial Sequence
  Description of Artificial Sequence: Synthetic oligonucleotide
cauacacuagaacccacau

SEQ ID NO: 659794 - RNA, 19 nt, Artificial Sequence
  Description of Artificial Sequence: Synthetic oligonucleotide
agacgacuaugguggcugu

SEQ ID NO: 659795 - RNA, 19 nt, Artificial Sequence
  Description of Artificial Sequence: Synthetic oligonucleotide
gaggggugguccuguguga

SEQ ID NO: 659796 - RNA, 19 nt, Artificial Sequence
  Description of Artificial Sequence: Synthetic oligonucleotide
uccgugugaggugacccau

SEQ ID NO: 659797 - RNA, 19 nt, Artificial Sequence
  Description of Artificial Sequence: Synthetic oligonucleotide
caccaucguguucucagga

SEQ ID NO: 659798 - RNA, 19 nt, Artificial Sequence
  Description of Artificial Sequence: Synthetic oligonucleotide
cacuagaacccacaucccu

SEQ ID NO: 659799 - RNA, 19 nt, Artificial Sequence
  Description of Artificial Sequence: Synthetic oligonucleotide
caggaccauuuaaggcagc

SEQ ID NO: 659800 - RNA, 19 nt, Artificial Sequence
  Description of Artificial Sequence: Synthetic oligonucleotide
agucugucgcugaucugug

SEQ ID NO: 659801 - RNA, 19 nt, Artificial Sequence
  Description of Artificial Sequence: Synthetic oligonucleotide
ccucggaugacuucacuga

SEQ ID NO: 659802 - RNA, 19 nt, Artificial Sequence
  Description of Artificial Sequence: Synthetic oligonucleotide
gguaggggacgaaggagug

SEQ ID NO: 659803 - RNA, 19 nt, Artificial Sequence
  Description of Artificial Sequence: Synthetic oligonucleotide
cagaagcucacaggcugug

SEQ ID NO: 659804 - RNA, 19 nt, Artificial Sequence
  Description of Artificial Sequence: Synthetic oligonucleotide
aggggacgaaggaguggcc

SEQ ID NO: 659805 - RNA, 19 nt, Artificial Sequence
  Description of Artificial Sequence: Synthetic oligonucleotide
gccgaugaacuucuccuuc

SEQ ID NO: 659806 - RNA, 19 nt, Artificial Sequence
  Description of Artificial Sequence: Synthetic oligonucleotide
gguggcaacuaaggcuggg

SEQ ID NO: 659807 - RNA, 19 nt, Artificial Sequence
  Description of Artificial Sequence: Synthetic oligonucleotide
agcgguuacacaggaccau

SEQ ID NO: 659808 - RNA, 19 nt, Artificial Sequence
  Description of Artificial Sequence: Synthetic oligonucleotide
ucggugaacuuggcccagc

SEQ ID NO: 659809 - RNA, 19 nt, Artificial Sequence
  Description of Artificial Sequence: Synthetic oligonucleotide
cuuucuccucuggagcuga

SEQ ID NO: 659810 - RNA, 19 nt, Artificial Sequence
  Description of Artificial Sequence: Synthetic oligonucleotide
cacacguuccaggcacaag

SEQ ID NO: 659811 - RNA, 19 nt, Artificial Sequence
  Description of Artificial Sequence: Synthetic oligonucleotide
gcauuggcgauccguguga

SEQ ID NO: 659812 - RNA, 19 nt, Artificial Sequence
  Description of Artificial Sequence: Synthetic oligonucleotide
aucacccgggcgguacauc

SEQ ID NO: 659813 - RNA, 19 nt, Artificial Sequence
  Description of Artificial Sequence: Synthetic oligonucleotide
caugaucaccuguucaguu

SEQ ID NO: 659814 - RNA, 19 nt, Artificial Sequence
  Description of Artificial Sequence: Synthetic oligonucleotide
gugacccauauucccacgu

SEQ ID NO: 659815 - RNA, 19 nt, Artificial Sequence
  Description of Artificial Sequence: Synthetic oligonucleotide
caguaggacuguccucauc

SEQ ID NO: 659816 - RNA, 19 nt, Artificial Sequence
  Description of Artificial Sequence: Synthetic oligonucleotide
auccggucaaauggggcau

SEQ ID NO: 659817 - RNA, 19 nt, Artificial Sequence
  Description of Artificial Sequence: Synthetic oligonucleotide
cagacucucguccucgccu

SEQ ID NO: 659818 - RNA, 19 nt, Artificial Sequence
  Description of Artificial Sequence: Synthetic oligonucleotide
gccggagaccaacugguuc

SEQ ID NO: 659819 - RNA, 19 nt, Artificial Sequence
  Description of Artificial Sequence: Synthetic oligonucleotide
uccgaggggugguccugug

SEQ ID NO: 659820 - RNA, 19 nt, Artificial Sequence
  Description of Artificial Sequence: Synthetic oligonucleotide
cugagacaugaggggcucc

SEQ ID NO: 659821 - RNA, 19 nt, Artificial Sequence
  Description of Artificial Sequence: Synthetic oligonucleotide
ggcaacuaaggcuggggcu

SEQ ID NO: 659822 - RNA, 19 nt, Artificial Sequence
  Description of Artificial Sequence: Synthetic oligonucleotide
cagcacuucuggaacagau

SEQ ID NO: 659823 - RNA, 19 nt, Artificial Sequence
  Description of Artificial Sequence: Synthetic oligonucleotide
ugccggagaccaacugguu

SEQ ID NO: 659824 - RNA, 19 nt, Artificial Sequence
  Description of Artificial Sequence: Synthetic oligonucleotide
ggggauggaucaauuccac

SEQ ID NO: 659825 - RNA, 19 nt, Artificial Sequence
  Description of Artificial Sequence: Synthetic oligonucleotide
guccguacacucagcccug

SEQ ID NO: 659826 - RNA, 19 nt, Artificial Sequence
  Description of Artificial Sequence: Synthetic oligonucleotide
gaccagggcgggccacagc

SEQ ID NO: 659827 - RNA, 19 nt, Artificial Sequence
  Description of Artificial Sequence: Synthetic oligonucleotide
aggcacauuccuagcugcu

SEQ ID NO: 659828 - RNA, 19 nt, Artificial Sequence
  Description of Artificial Sequence: Synthetic oligonucleotide
gcagacucucguccucgcc

SEQ ID NO: 659829 - RNA, 19 nt, Artificial Sequence
  Description of Artificial Sequence: Synthetic oligonucleotide
cgaggggugguccugugug

SEQ ID NO: 659830 - RNA, 19 nt, Artificial Sequence
  Description of Artificial Sequence: Synthetic oligonucleotide
ggcgguacaucgagucucc

SEQ ID NO: 659831 - RNA, 19 nt, Artificial Sequence
  Description of Artificial Sequence: Synthetic oligonucleotide
cgaggaccuucuuucuggg

SEQ ID NO: 659832 - RNA, 19 nt, Artificial Sequence
  Description of Artificial Sequence: Synthetic oligonucleotide
cccauacacuagaacccac

SEQ ID NO: 659833 - RNA, 19 nt, Artificial Sequence
  Description of Artificial Sequence: Synthetic oligonucleotide
caccgggcccugcuccagg

SEQ ID NO: 659834 - RNA, 19 nt, Artificial Sequence
  Description of Artificial Sequence: Synthetic oligonucleotide
cugccaugaucggcccugg

SEQ ID NO: 659835 - RNA, 19 nt, Artificial Sequence
  Description of Artificial Sequence: Synthetic oligonucleotide
cacugaggaagagacgacu

SEQ ID NO: 659836 - RNA, 19 nt, Artificial Sequence
  Description of Artificial Sequence: Synthetic oligonucleotide
ggaccauuuaaggcagcuc

SEQ ID NO: 659837 - RNA, 19 nt, Artificial Sequence
  Description of Artificial Sequence: Synthetic oligonucleotide
gagcgaggaccuucuuucu

SEQ ID NO: 659838 - RNA, 19 nt, Artificial Sequence
  Description of Artificial Sequence: Synthetic oligonucleotide
cgacuaugguggcuguggg

SEQ ID NO: 659839 - RNA, 19 nt, Artificial Sequence
  Description of Artificial Sequence: Synthetic oligonucleotide
uuucuggguaggggacgaa

SEQ ID NO: 659840 - RNA, 19 nt, Artificial Sequence
  Description of Artificial Sequence: Synthetic oligonucleotide
gggacgaaggaguggccaa

SEQ ID NO: 659841 - RNA, 19 nt, Artificial Sequence
  Description of Artificial Sequence: Synthetic oligonucleotide
guacaacugcauuggcgau

SEQ ID NO: 659842 - RNA, 19 nt, Artificial Sequence
  Description of Artificial Sequence: Synthetic oligonucleotide
ggggacgaaggaguggcca

SEQ ID NO: 659843 - RNA, 19 nt, Artificial Sequence
  Description of Artificial Sequence: Synthetic oligonucleotide
cucggaugacuucacugau

SEQ ID NO: 659844 - RNA, 19 nt, Artificial Sequence
  Description of Artificial Sequence: Synthetic oligonucleotide
ggggugguccugugugaug

SEQ ID NO: 659845 - RNA, 19 nt, Artificial Sequence
  Description of Artificial Sequence: Synthetic oligonucleotide
gcgagcugcaccggggccc

SEQ ID NO: 659846 - RNA, 19 nt, Artificial Sequence
  Description of Artificial Sequence: Synthetic oligonucleotide
agguaggaccaaaggcuuu

SEQ ID NO: 659847 - RNA, 19 nt, Artificial Sequence
  Description of Artificial Sequence: Synthetic oligonucleotide
ggaagucauauagaagguu

SEQ ID NO: 659848 - RNA, 19 nt, Artificial Sequence
  Description of Artificial Sequence: Synthetic oligonucleotide
gguuggucuccaucagugu

SEQ ID NO: 659849 - RNA, 19 nt, Artificial Sequence
  Description of Artificial Sequence: Synthetic oligonucleotide
ccagguaguuuucuugaua

SEQ ID NO: 659850 - RNA, 19 nt, Artificial Sequence
  Description of Artificial Sequence: Synthetic oligonucleotide
ggaggccuuuccaccauga

SEQ ID NO: 659851 - RNA, 19 nt, Artificial Sequence
  Description of Artificial Sequence: Synthetic oligonucleotide
uggccaauccaggcacauu

SEQ ID NO: 659852 - RNA, 19 nt, Artificial Sequence
  Description of Artificial Sequence: Synthetic oligonucleotide
cugagcgaggaccuucuuu

SEQ ID NO: 659853 - RNA, 19 nt, Artificial Sequence
  Description of Artificial Sequence: Synthetic oligonucleotide
ggugaacuuggcccagccu

SEQ ID NO: 659854 - RNA, 19 nt, Artificial Sequence
  Description of Artificial Sequence: Synthetic oligonucleotide
gucugagcgaggaccuucu

SEQ ID NO: 659855 - RNA, 19 nt, Artificial Sequence
  Description of Artificial Sequence: Synthetic oligonucleotide
caaauggggcauugauguu

SEQ ID NO: 659856 - RNA, 19 nt, Artificial Sequence
  Description of Artificial Sequence: Synthetic oligonucleotide
gaagggcaucugucuuccu

SEQ ID NO: 659857 - RNA, 19 nt, Artificial Sequence
  Description of Artificial Sequence: Synthetic oligonucleotide
cacccgggcgguacaucga

SEQ ID NO: 659858 - RNA, 19 nt, Artificial Sequence
  Description of Artificial Sequence: Synthetic oligonucleotide
cucugcaauccggucaaau

SEQ ID NO: 659859 - RNA, 19 nt, Artificial Sequence
  Description of Artificial Sequence: Synthetic oligonucleotide
cauccugauggggauggau

SEQ ID NO: 659860 - RNA, 19 nt, Artificial Sequence
  Description of Artificial Sequence: Synthetic oligonucleotide
caugagagcugaggugccu

SEQ ID NO: 659861 - RNA, 19 nt, Artificial Sequence
  Description of Artificial Sequence: Synthetic oligonucleotide
caucggcuucaauguugaa

SEQ ID NO: 659862 - RNA, 19 nt, Artificial Sequence
  Description of Artificial Sequence: Synthetic oligonucleotide
cugcagggagcccucggau

SEQ ID NO: 659863 - RNA, 19 nt, Artificial Sequence
  Description of Artificial Sequence: Synthetic oligonucleotide
ggucaccaucguguucuca

SEQ ID NO: 659864 - RNA, 19 nt, Artificial Sequence
  Description of Artificial Sequence: Synthetic oligonucleotide
ccucugucuugggcagugg

SEQ ID NO: 659865 - RNA, 19 nt, Artificial Sequence
  Description of Artificial Sequence: Synthetic oligonucleotide
gccuagucugucgcugauc

SEQ ID NO: 659866 - RNA, 19 nt, Artificial Sequence
  Description of Artificial Sequence: Synthetic oligonucleotide
accucuugccggagaccaa

SEQ ID NO: 659867 - RNA, 19 nt, Artificial Sequence
  Description of Artificial Sequence: Synthetic oligonucleotide
ggcaguggggaggccuuuc

SEQ ID NO: 659868 - RNA, 19 nt, Artificial Sequence
  Description of Artificial Sequence: Synthetic oligonucleotide
guggccaauccaggcacau

SEQ ID NO: 659869 - RNA, 19 nt, Artificial Sequence
  Description of Artificial Sequence: Synthetic oligonucleotide
cgauccgugugaggugacc

SEQ ID NO: 659870 - RNA, 19 nt, Artificial Sequence
  Description of Artificial Sequence: Synthetic oligonucleotide
gugugaggugacccauauu

SEQ ID NO: 659871 - RNA, 19 nt, Artificial Sequence
  Description of Artificial Sequence: Synthetic oligonucleotide
ccauauucccacgucucau

SEQ ID NO: 659872 - RNA, 19 nt, Artificial Sequence
  Description of Artificial Sequence: Synthetic oligonucleotide
cacaucccuugaagcuccu

SEQ ID NO: 659873 - RNA, 19 nt, Artificial Sequence
  Description of Artificial Sequence: Synthetic oligonucleotide
caucaucgaagggcuggau

SEQ ID NO: 659874 - RNA, 19 nt, Artificial Sequence
  Description of Artificial Sequence: Synthetic oligonucleotide
guccgaggggugguccugu

SEQ ID NO: 659875 - RNA, 19 nt, Artificial Sequence
  Description of Artificial Sequence: Synthetic oligonucleotide
ggacgaaggaguggccaau

SEQ ID NO: 659876 - RNA, 19 nt, Artificial Sequence
  Description of Artificial Sequence: Synthetic oligonucleotide
ccaucacccgggcgguaca

SEQ ID NO: 659877 - RNA, 19 nt, Artificial Sequence
  Description of Artificial Sequence: Synthetic oligonucleotide
gggagggccugccuugcuu

SEQ ID NO: 659878 - RNA, 19 nt, Artificial Sequence
  Description of Artificial Sequence: Synthetic oligonucleotide
gccugaccagggcgggcca

SEQ ID NO: 659879 - RNA, 19 nt, Artificial Sequence
  Description of Artificial Sequence: Synthetic oligonucleotide
ccacaaaguuggcugucau

SEQ ID NO: 659880 - RNA, 19 nt, Artificial Sequence
  Description of Artificial Sequence: Synthetic oligonucleotide
ccauuuaaggcagcuccuu

SEQ ID NO: 659881 - RNA, 19 nt, Artificial Sequence
  Description of Artificial Sequence: Synthetic oligonucleotide
gcgguuacacaggaccauu

SEQ ID NO: 659882 - RNA, 19 nt, Artificial Sequence
  Description of Artificial Sequence: Synthetic oligonucleotide
gcgauccgugugaggugac

SEQ ID NO: 659883 - RNA, 19 nt, Artificial Sequence
  Description of Artificial Sequence: Synthetic oligonucleotide
caucacccgggcgguacau

SEQ ID NO: 659884 - RNA, 19 nt, Artificial Sequence
  Description of Artificial Sequence: Synthetic oligonucleotide
ccagcgcccacggcaaucu

SEQ ID NO: 659885 - RNA, 19 nt, Artificial Sequence
  Description of Artificial Sequence: Synthetic oligonucleotide
cgaucacugcagcaggcuu

SEQ ID NO: 659886 - RNA, 19 nt, Artificial Sequence
  Description of Artificial Sequence: Synthetic oligonucleotide
cgguuacacaggaccauuu

SEQ ID NO: 659887 - RNA, 19 nt, Artificial Sequence
  Description of Artificial Sequence: Synthetic oligonucleotide
ccacaagucucuggaugau

SEQ ID NO: 659888 - RNA, 19 nt, Artificial Sequence
  Description of Artificial Sequence: Synthetic oligonucleotide
ccguacacucagcccugcu

SEQ ID NO: 659889 - RNA, 19 nt, Artificial Sequence
  Description of Artificial Sequence: Synthetic oligonucleotide
gcccugcuggcaacagccu

SEQ ID NO: 659890 - RNA, 19 nt, Artificial Sequence
  Description of Artificial Sequence: Synthetic oligonucleotide
gcgguacaucgagucuccu

SEQ ID NO: 659891 - RNA, 19 nt, Artificial Sequence
  Description of Artificial Sequence: Synthetic oligonucleotide
cccgggcgguacaucgagu

SEQ ID NO: 659892 - RNA, 19 nt, Artificial Sequence
  Description of Artificial Sequence: Synthetic oligonucleotide
ggccaucacccgggcggua

SEQ ID NO: 659893 - RNA, 19 nt, Artificial Sequence
  Description of Artificial Sequence: Synthetic oligonucleotide
cgccuagucugucgcugau

SEQ ID NO: 659894 - RNA, 19 nt, Artificial Sequence
  Description of Artificial Sequence: Synthetic oligonucleotide
ucaauauacagccgaaugg

SEQ ID NO: 659895 - RNA, 19 nt, Artificial Sequence
  Description of Artificial Sequence: Synthetic oligonucleotide
aaauucuccguguaguugg

SEQ ID NO: 659896 - RNA, 19 nt, Artificial Sequence
  Description of Artificial Sequence: Synthetic oligonucleotide
uaacuaucaauauacagcc

SEQ ID NO: 659897 - RNA, 19 nt, Artificial Sequence
  Description of Artificial Sequence: Synthetic oligonucleotide
auaaccuuacugcugaccc

SEQ ID NO: 659898 - RNA, 19 nt, Artificial Sequence
  Description of Artificial Sequence: Synthetic oligonucleotide
cuugcauccaucaaguucc

SEQ ID NO: 659899 - RNA, 19 nt, Artificial Sequence
  Description of Artificial Sequence: Synthetic oligonucleotide
aaauacggaaugcugaaga

SEQ ID NO: 659900 - RNA, 19 nt, Artificial Sequence
  Description of Artificial Sequence: Synthetic oligonucleotide
aacauugccgcauaguccu

SEQ ID NO: 659901 - RNA, 19 nt, Artificial Sequence
  Description of Artificial Sequence: Synthetic oligonucleotide
aacgcuuccgucuaccggg

SEQ ID NO: 659902 - RNA, 19 nt, Artificial Sequence
  Description of Artificial Sequence: Synthetic oligonucleotide
agaaugaucccaccaaugg

SEQ ID NO: 659903 - RNA, 19 nt, Artificial Sequence
  Description of Artificial Sequence: Synthetic oligonucleotide
ugugauguaaacaguaccu

SEQ ID NO: 659904 - RNA, 19 nt, Artificial Sequence
  Description of Artificial Sequence: Synthetic oligonucleotide
aaucauaccugguaaagaa

SEQ ID NO: 659905 - RNA, 19 nt, Artificial Sequence
  Description of Artificial Sequence: Synthetic oligonucleotide
uguuucucaacauugccgc

SEQ ID NO: 659906 - RNA, 19 nt, Artificial Sequence
  Description of Artificial Sequence: Synthetic oligonucleotide
uuugcuacccgauccaggg

SEQ ID NO: 659907 - RNA, 19 nt, Artificial Sequence
  Description of Artificial Sequence: Synthetic oligonucleotide
uuucggaugaugcaggaca

SEQ ID NO: 659908 - RNA, 19 nt, Artificial Sequence
  Description of Artificial Sequence: Synthetic oligonucleotide
ugauacgagaaccaucugc

SEQ ID NO: 659909 - RNA, 19 nt, Artificial Sequence
  Description of Artificial Sequence: Synthetic oligonucleotide
auuuaaucccaaaaucucc

SEQ ID NO: 659910 - RNA, 19 nt, Artificial Sequence
  Description of Artificial Sequence: Synthetic oligonucleotide
gacuuuaucauuugcugag

SEQ ID NO: 659911 - RNA, 19 nt, Artificial Sequence
  Description of Artificial Sequence: Synthetic oligonucleotide
acuaucaauauacagccga

SEQ ID NO: 659912 - RNA, 19 nt, Artificial Sequence
  Description of Artificial Sequence: Synthetic oligonucleotide
uacggaaugcugaagaugu

SEQ ID NO: 659913 - RNA, 19 nt, Artificial Sequence
  Description of Artificial Sequence: Synthetic oligonucleotide
gagugugagcccuaggucg

SEQ ID NO: 659914 - RNA, 19 nt, Artificial Sequence
  Description of Artificial Sequence: Synthetic oligonucleotide
gagucuacaaucuccacug

SEQ ID NO: 659915 - RNA, 19 nt, Artificial Sequence
  Description of Artificial Sequence: Synthetic oligonucleotide
aauugucuugcugauuugg

SEQ ID NO: 659916 - RNA, 19 nt, Artificial Sequence
  Description of Artificial Sequence: Synthetic oligonucleotide
aauauugaauuuaauccca

SEQ ID NO: 659917 - RNA, 19 nt, Artificial Sequence
  Description of Artificial Sequence: Synthetic oligonucleotide
acaaagaacccaugcuugc

SEQ ID NO: 659918 - RNA, 19 nt, Artificial Sequence
  Description of Artificial Sequence: Synthetic oligonucleotide
ucaacauugccgcauaguc

SEQ ID NO: 659919 - RNA, 19 nt, Artificial Sequence
  Description of Artificial Sequence: Synthetic oligonucleotide
acgaucuucaccauggugg

SEQ ID NO: 659920 - RNA, 19 nt, Artificial Sequence
  Description of Artificial Sequence: Synthetic oligonucleotide
aaucggguggcguggauag

SEQ ID NO: 659921 - RNA, 19 nt, Artificial Sequence
  Description of Artificial Sequence: Synthetic oligonucleotide
aaaauaagccgcaagcccu

SEQ ID NO: 659922 - RNA, 19 nt, Artificial Sequence
  Description of Artificial Sequence: Synthetic oligonucleotide
gaacgguccaacaucaggg

SEQ ID NO: 659923 - RNA, 19 nt, Artificial Sequence
  Description of Artificial Sequence: Synthetic oligonucleotide
agcgaugacggccacagag

SEQ ID NO: 659924 - RNA, 19 nt, Artificial Sequence
  Description of Artificial Sequence: Synthetic oligonucleotide
ugaugcuaggagacaaagg

SEQ ID NO: 659925 - RNA, 19 nt, Artificial Sequence
  Description of Artificial Sequence: Synthetic oligonucleotide
uauacagccgaaugguggc

SEQ ID NO: 659926 - RNA, 19 nt, Artificial Sequence
  Description of Artificial Sequence: Synthetic oligonucleotide
agcaauggagaucagggga

SEQ ID NO: 659927 - RNA, 19 nt, Artificial Sequence
  Description of Artificial Sequence: Synthetic oligonucleotide
cagucugcuggaaauacgg

SEQ ID NO: 659928 - RNA, 19 nt, Artificial Sequence
  Description of Artificial Sequence: Synthetic oligonucleotide
aguacguccuguccucucc

SEQ ID NO: 659929 - RNA, 19 nt, Artificial Sequence
  Description of Artificial Sequence: Synthetic oligonucleotide
uuuacguacggucccacaa

SEQ ID NO: 659930 - RNA, 19 nt, Artificial Sequence
  Description of Artificial Sequence: Synthetic oligonucleotide
auauacagccgaauggugg

SEQ ID NO: 659931 - RNA, 19 nt, Artificial Sequence
  Description of Artificial Sequence: Synthetic oligonucleotide
aaggguucacaaagaaccc

SEQ ID NO: 659932 - RNA, 19 nt, Artificial Sequence
  Description of Artificial Sequence: Synthetic oligonucleotide
uaucauuugcugagaacug

SEQ ID NO: 659933 - RNA, 19 nt, Artificial Sequence
  Description of Artificial Sequence: Synthetic oligonucleotide
aauacggaaugcugaagau

SEQ ID NO: 659934 - RNA, 19 nt, Artificial Sequence
  Description of Artificial Sequence: Synthetic oligonucleotide
auacaaagcgaccuuugug

SEQ ID NO: 659935 - RNA, 19 nt, Artificial Sequence
  Description of Artificial Sequence: Synthetic oligonucleotide
cugugauguaaacaguacc

SEQ ID NO: 659936 - RNA, 19 nt, Artificial Sequence
  Description of Artificial Sequence: Synthetic oligonucleotide
gacgauaagcuggauagcc

SEQ ID NO: 659937 - RNA, 19 nt, Artificial Sequence
  Description of Artificial Sequence: Synthetic oligonucleotide
uucccucuccuauauacag

SEQ ID NO: 659938 - RNA, 19 nt, Artificial Sequence
  Description of Artificial Sequence: Synthetic oligonucleotide
ucggucauguagaagcggc

SEQ ID NO: 659939 - RNA, 19 nt, Artificial Sequence
  Description of Artificial Sequence: Synthetic oligonucleotide
ucuaugcggaucuucaguc

SEQ ID NO: 659940 - RNA, 19 nt, Artificial Sequence
  Description of Artificial Sequence: Synthetic oligonucleotide
guuggcguuacucuggaac

SEQ ID NO: 659941 - RNA, 19 nt, Artificial Sequence
  Description of Artificial Sequence: Synthetic oligonucleotide
ucauacaaagcgaccuuug

SEQ ID NO: 659942 - RNA, 19 nt, Artificial Sequence
  Description of Artificial Sequence: Synthetic oligonucleotide
ugcgucuucacugucacga

SEQ ID NO: 659943 - RNA, 19 nt, Artificial Sequence
  Description of Artificial Sequence: Synthetic oligonucleotide
uaccgggucacuauauuca

SEQ ID NO: 659944 - RNA, 19 nt, Artificial Sequence
  Description of Artificial Sequence: Synthetic oligonucleotide
agaggguacagauuugagu

SEQ ID NO: 659945 - RNA, 19 nt, Artificial Sequence
  Description of Artificial Sequence: Synthetic oligonucleotide
acccucuagagacagaaga

SEQ ID NO: 659946 - RNA, 19 nt, Artificial Sequence
  Description of Artificial Sequence: Synthetic oligonucleotide
uuucuaggugaugacagug

SEQ ID NO: 659947 - RNA, 19 nt, Artificial Sequence
  Description of Artificial Sequence: Synthetic oligonucleotide
gaugauacgagaaccaucu

SEQ ID NO: 659948 - RNA, 19 nt, Artificial Sequence
  Description of Artificial Sequence: Synthetic oligonucleotide
aaagcgaccuuuguggcgu

SEQ ID NO: 659949 - RNA, 19 nt, Artificial Sequence
  Description of Artificial Sequence: Synthetic oligonucleotide
uuugcaggggcaccaagcu

SEQ ID NO: 659950 - RNA, 19 nt, Artificial Sequence
  Description of Artificial Sequence: Synthetic oligonucleotide
ucuccuauauacaguggcu

SEQ ID NO: 659951 - RNA, 19 nt, Artificial Sequence
  Description of Artificial Sequence: Synthetic oligonucleotide
caacauugccgcauagucc

SEQ ID NO: 659952 - RNA, 19 nt, Artificial Sequence
  Description of Artificial Sequence: Synthetic oligonucleotide
uuaucagugauugcuucug

SEQ ID NO: 659953 - RNA, 19 nt, Artificial Sequence
  Description of Artificial Sequence: Synthetic oligonucleotide
uuggcguuacucuggaaca

SEQ ID NO: 659954 - RNA, 19 nt, Artificial Sequence
  Description of Artificial Sequence: Synthetic oligonucleotide
cuuucggguggccagaaug

SEQ ID NO: 659955 - RNA, 19 nt, Artificial Sequence
  Description of Artificial Sequence: Synthetic oligonucleotide
aaagcccaggcgaauacag

SEQ ID NO: 659956 - RNA, 19 nt, Artificial Sequence
  Description of Artificial Sequence: Synthetic oligonucleotide
acagaggaucuucuuuacg

SEQ ID NO: 659957 - RNA, 19 nt, Artificial Sequence
  Description of Artificial Sequence: Synthetic oligonucleotide
caugcauggcaucuaugcg

SEQ ID NO: 659958 - RNA, 19 nt, Artificial Sequence
  Description of Artificial Sequence: Synthetic oligonucleotide
gauaagcuggauagccucg

SEQ ID NO: 659959 - RNA, 19 nt, Artificial Sequence
  Description of Artificial Sequence: Synthetic oligonucleotide
uaaucauaccugguaaaga

SEQ ID NO: 659960 - RNA, 19 nt, Artificial Sequence
  Description of Artificial Sequence: Synthetic oligonucleotide
acgagaaccaucugcaaaa

SEQ ID NO: 659961 - RNA, 19 nt, Artificial Sequence
  Description of Artificial Sequence: Synthetic oligonucleotide
ugugccucacaaaugguua

SEQ ID NO: 659962 - RNA, 19 nt, Artificial Sequence
  Description of Artificial Sequence: Synthetic oligonucleotide
agacagaagauaaccuuac

SEQ ID NO: 659963 - RNA, 19 nt, Artificial Sequence
  Description of Artificial Sequence: Synthetic oligonucleotide
uguagaagcggccgucccc

SEQ ID NO: 659964 - RNA, 19 nt, Artificial Sequence
  Description of Artificial Sequence: Synthetic oligonucleotide
uuugagugugagcccuagg

SEQ ID NO: 659965 - RNA, 19 nt, Artificial Sequence
  Description of Artificial Sequence: Synthetic oligonucleotide
ugcuacccgauccagggcu

SEQ ID NO: 659966 - RNA, 19 nt, Artificial Sequence
  Description of Artificial Sequence: Synthetic oligonucleotide
uccaccgagucuacaaucu

SEQ ID NO: 659967 - RNA, 19 nt, Artificial Sequence
  Description of Artificial Sequence: Synthetic oligonucleotide
cuucuuuacguacgguccc

SEQ ID NO: 659968 - RNA, 19 nt, Artificial Sequence
  Description of Artificial Sequence: Synthetic oligonucleotide
aaccaggcagccaaucccg

SEQ ID NO: 659969 - RNA, 19 nt, Artificial Sequence
  Description of Artificial Sequence: Synthetic oligonucleotide
uggccaucuuucuagguga

SEQ ID NO: 659970 - RNA, 19 nt, Artificial Sequence
  Description of Artificial Sequence: Synthetic oligonucleotide
aacuaucaauauacagccg

SEQ ID NO: 659971 - RNA, 19 nt, Artificial Sequence
  Description of Artificial Sequence: Synthetic oligonucleotide
aggucuaccuucaagucag

SEQ ID NO: 659972 - RNA, 19 nt, Artificial Sequence
  Description of Artificial Sequence: Synthetic oligonucleotide
gaccuuuacacugugaugu

SEQ ID NO: 659973 - RNA, 19 nt, Artificial Sequence
  Description of Artificial Sequence: Synthetic oligonucleotide
aucuaugcggaucuucagu

SEQ ID NO: 659974 - RNA, 19 nt, Artificial Sequence
  Description of Artificial Sequence: Synthetic oligonucleotide
gccucggucauguagaagc

SEQ ID NO: 659975 - RNA, 19 nt, Artificial Sequence
  Description of Artificial Sequence: Synthetic oligonucleotide
guuccggccaaacuuuugc

SEQ ID NO: 659976 - RNA, 19 nt, Artificial Sequence
  Description of Artificial Sequence: Synthetic oligonucleotide
agaugauacgagaaccauc

SEQ ID NO: 659977 - RNA, 19 nt, Artificial Sequence
  Description of Artificial Sequence: Synthetic oligonucleotide
gcgaauacaguuucugucc

SEQ ID NO: 659978 - RNA, 19 nt, Artificial Sequence
  Description of Artificial Sequence: Synthetic oligonucleotide
uuacguacggucccacaac

SEQ ID NO: 659979 - RNA, 19 nt, Artificial Sequence
  Description of Artificial Sequence: Synthetic oligonucleotide
cauacugcgugcaaagcca

SEQ ID NO: 659980 - RNA, 19 nt, Artificial Sequence
  Description of Artificial Sequence: Synthetic oligonucleotide
ggcaccaagcucuucacag

SEQ ID NO: 659981 - RNA, 19 nt, Artificial Sequence
  Description of Artificial Sequence: Synthetic oligonucleotide
gaaauacggaaugcugaag

SEQ ID NO: 659982 - RNA, 19 nt, Artificial Sequence
  Description of Artificial Sequence: Synthetic oligonucleotide
caaagcgaccuuuguggcg

SEQ ID NO: 659983 - RNA, 19 nt, Artificial Sequence
  Description of Artificial Sequence: Synthetic oligonucleotide
cuuuguggcguuugcuacc

SEQ ID NO: 659984 - RNA, 19 nt, Artificial Sequence
  Description of Artificial Sequence: Synthetic oligonucleotide
ggaaugcugaagauguugg

SEQ ID NO: 659985 - RNA, 19 nt, Artificial Sequence
  Description of Artificial Sequence: Synthetic oligonucleotide
aaggaacgguccaacauca

SEQ ID NO: 659986 - RNA, 19 nt, Artificial Sequence
  Description of Artificial Sequence: Synthetic oligonucleotide
gguggagggacguaccacg

SEQ ID NO: 659987 - RNA, 19 nt, Artificial Sequence
  Description of Artificial Sequence: Synthetic oligonucleotide
cacgaauguggucggaacc

SEQ ID NO: 659988 - RNA, 19 nt, Artificial Sequence
  Description of Artificial Sequence: Synthetic oligonucleotide
uacguacggucccacaacu

SEQ ID NO: 659989 - RNA, 19 nt, Artificial Sequence
  Description of Artificial Sequence: Synthetic oligonucleotide
uucggaugaugcaggacac

SEQ ID NO: 659990 - RNA, 19 nt, Artificial Sequence
  Description of Artificial Sequence: Synthetic oligonucleotide
uccacgcucugcuuucggg

SEQ ID NO: 659991 - RNA, 19 nt, Artificial Sequence
  Description of Artificial Sequence: Synthetic oligonucleotide
ucggcuuucccucuccuau

SEQ ID NO: 659992 - RNA, 19 nt, Artificial Sequence
  Description of Artificial Sequence: Synthetic oligonucleotide
uucucacgaauguggucgg

SEQ ID NO: 659993 - RNA, 19 nt, Artificial Sequence
  Description of Artificial Sequence: Synthetic oligonucleotide
ugaggucuaccuucaaguc

SEQ ID NO: 659994 - RNA, 19 nt, Artificial Sequence
  Description of Artificial Sequence: Synthetic oligonucleotide
uucuccguguaguuggcgu

SEQ ID NO: 659995 - RNA, 19 nt, Artificial Sequence
  Description of Artificial Sequence: Synthetic oligonucleotide
ggacaguuugcuugcaucc

SEQ ID NO: 659996 - RNA, 19 nt, Artificial Sequence
  Description of Artificial Sequence: Synthetic oligonucleotide
auaagcuggauagccucgg

SEQ ID NO: 659997 - RNA, 19 nt, Artificial Sequence
  Description of Artificial Sequence: Synthetic oligonucleotide
uguggcguuugcuacccga

SEQ ID NO: 659998 - RNA, 19 nt, Artificial Sequence
  Description of Artificial Sequence: Synthetic oligonucleotide
guagaagcggccguccccg

SEQ ID NO: 659999 - RNA, 19 nt, Artificial Sequence
  Description of Artificial Sequence: Synthetic oligonucleotide
ucucaacauugccgcauag

SEQ ID NO: 660000 - RNA, 19 nt, Artificial Sequence
  Description of Artificial Sequence: Synthetic oligonucleotide
uggagaucaggggagccag

SEQ ID NO: 660001 - RNA, 19 nt, Artificial Sequence
  Description of Artificial Sequence: Synthetic oligonucleotide
ucacgaauguggucggaac

SEQ ID NO: 660002 - RNA, 19 nt, Artificial Sequence
  Description of Artificial Sequence: Synthetic oligonucleotide
cagauuugagugugagccc

SEQ ID NO: 660003 - RNA, 19 nt, Artificial Sequence
  Description of Artificial Sequence: Synthetic oligonucleotide
ggaucuucuuuacguacgg

SEQ ID NO: 660004 - RNA, 19 nt, Artificial Sequence
  Description of Artificial Sequence: Synthetic oligonucleotide
aagccgcaagcccugauuu

SEQ ID NO: 660005 - RNA, 19 nt, Artificial Sequence
  Description of Artificial Sequence: Synthetic oligonucleotide
cuaccgggucacuauauuc

SEQ ID NO: 660006 - RNA, 19 nt, Artificial Sequence
  Description of Artificial Sequence: Synthetic oligonucleotide
ugcgugcaaagccacggac

SEQ ID NO: 660007 - RNA, 19 nt, Artificial Sequence
  Description of Artificial Sequence: Synthetic oligonucleotide
cuuuacacugugauguaaa

SEQ ID NO: 660008 - RNA, 19 nt, Artificial Sequence
  Description of Artificial Sequence: Synthetic oligonucleotide
agcgacuacggcuucugcu

SEQ ID NO: 660009 - RNA, 19 nt, Artificial Sequence
  Description of Artificial Sequence: Synthetic oligonucleotide
aaaagcccaggcgaauaca

SEQ ID NO: 660010 - RNA, 19 nt, Artificial Sequence
  Description of Artificial Sequence: Synthetic oligonucleotide
gcucguaccaggcuucugg

SEQ ID NO: 660011 - RNA, 19 nt, Artificial Sequence
  Description of Artificial Sequence: Synthetic oligonucleotide
acagccgaaugguggcccc

SEQ ID NO: 660012 - RNA, 19 nt, Artificial Sequence
  Description of Artificial Sequence: Synthetic oligonucleotide
cggacgauaagcuggauag

SEQ ID NO: 660013 - RNA, 19 nt, Artificial Sequence
  Description of Artificial Sequence: Synthetic oligonucleotide
guggcgguuaccugcgggg

SEQ ID NO: 660014 - RNA, 19 nt, Artificial Sequence
  Description of Artificial Sequence: Synthetic oligonucleotide
cacagagucggaaggguuc

SEQ ID NO: 660015 - RNA, 19 nt, Artificial Sequence
  Description of Artificial Sequence: Synthetic oligonucleotide
aucauaccugguaaagaag

SEQ ID NO: 660016 - RNA, 19 nt, Artificial Sequence
  Description of Artificial Sequence: Synthetic oligonucleotide
caccaucaaaggcagcccc

SEQ ID NO: 660017 - RNA, 19 nt, Artificial Sequence
  Description of Artificial Sequence: Synthetic oligonucleotide
uuucucaacauugccgcau

SEQ ID NO: 660018 - RNA, 19 nt, Artificial Sequence
  Description of Artificial Sequence: Synthetic oligonucleotide
auagccucggucauguaga

SEQ ID NO: 660019 - RNA, 19 nt, Artificial Sequence
  Description of Artificial Sequence: Synthetic oligonucleotide
agaagcggccguccccgcc

SEQ ID NO: 660020 - RNA, 19 nt, Artificial Sequence
  Description of Artificial Sequence: Synthetic oligonucleotide
agagaggguacagauuuga

SEQ ID NO: 660021 - RNA, 19 nt, Artificial Sequence
  Description of Artificial Sequence: Synthetic oligonucleotide
caucuaugcggaucuucag

SEQ ID NO: 660022 - RNA, 19 nt, Artificial Sequence
  Description of Artificial Sequence: Synthetic oligonucleotide
uaucaauauacagccgaau

SEQ ID NO: 660023 - RNA, 19 nt, Artificial Sequence
  Description of Artificial Sequence: Synthetic oligonucleotide
ggcgaauacaguuucuguc

SEQ ID NO: 660024 - RNA, 19 nt, Artificial Sequence
  Description of Artificial Sequence: Synthetic oligonucleotide
guaccaggcuucugguccg

SEQ ID NO: 660025 - RNA, 19 nt, Artificial Sequence
  Description of Artificial Sequence: Synthetic oligonucleotide
ggcguuugcuacccgaucc

SEQ ID NO: 660026 - RNA, 19 nt, Artificial Sequence
  Description of Artificial Sequence: Synthetic oligonucleotide
uaaccuuacugcugacccu

SEQ ID NO: 660027 - RNA, 19 nt, Artificial Sequence
  Description of Artificial Sequence: Synthetic oligonucleotide
auacagccgaaugguggcc

SEQ ID NO: 660028 - RNA, 19 nt, Artificial Sequence
  Description of Artificial Sequence: Synthetic oligonucleotide
cuucaaucggguggcgugg

SEQ ID NO: 660029 - RNA, 19 nt, Artificial Sequence
  Description of Artificial Sequence: Synthetic oligonucleotide
gcuugcauccaucaaguuc

SEQ ID NO: 660030 - RNA, 19 nt, Artificial Sequence
  Description of Artificial Sequence: Synthetic oligonucleotide
caguaccugaugcuaggag

SEQ ID NO: 660031 - RNA, 19 nt, Artificial Sequence
  Description of Artificial Sequence: Synthetic oligonucleotide
acguccuguccucuccugg

SEQ ID NO: 660032 - RNA, 19 nt, Artificial Sequence
  Description of Artificial Sequence: Synthetic oligonucleotide
guaaacaguaccugaugcu

SEQ ID NO: 660033 - RNA, 19 nt, Artificial Sequence
  Description of Artificial Sequence: Synthetic oligonucleotide
guuaccugcggggcgacag

SEQ ID NO: 660034 - RNA, 19 nt, Artificial Sequence
  Description of Artificial Sequence: Synthetic oligonucleotide
agggacguaccacgucugg

SEQ ID NO: 660035 - RNA, 19 nt, Artificial Sequence
  Description of Artificial Sequence: Synthetic oligonucleotide
uaagccgcaagcccugauu

SEQ ID NO: 660036 - RNA, 19 nt, Artificial Sequence
  Description of Artificial Sequence: Synthetic oligonucleotide
gccauucuguccaauaacc

SEQ ID NO: 660037 - RNA, 19 nt, Artificial Sequence
  Description of Artificial Sequence: Synthetic oligonucleotide
gaagcggccguccccgccc

SEQ ID NO: 660038 - RNA, 19 nt, Artificial Sequence
  Description of Artificial Sequence: Synthetic oligonucleotide
caggcagccaaucccguug

SEQ ID NO: 660039 - RNA, 19 nt, Artificial Sequence
  Description of Artificial Sequence: Synthetic oligonucleotide
cuaucaauauacagccgaa

SEQ ID NO: 660040 - RNA, 19 nt, Artificial Sequence
  Description of Artificial Sequence: Synthetic oligonucleotide
aggucggcuuucccucucc

SEQ ID NO: 660041 - RNA, 19 nt, Artificial Sequence
  Description of Artificial Sequence: Synthetic oligonucleotide
ucccucuccuauauacagu

SEQ ID NO: 660042 - RNA, 19 nt, Artificial Sequence
  Description of Artificial Sequence: Synthetic oligonucleotide
uucucaacauugccgcaua

SEQ ID NO: 660043 - RNA, 19 nt, Artificial Sequence
  Description of Artificial Sequence: Synthetic oligonucleotide
ucuaccgggucacuauauu

SEQ ID NO: 660044 - RNA, 19 nt, Artificial Sequence
  Description of Artificial Sequence: Synthetic oligonucleotide
auuugagugugagcccuag

SEQ ID NO: 660045 - RNA, 19 nt, Artificial Sequence
  Description of Artificial Sequence: Synthetic oligonucleotide
ucuguccaauaaccaggca

SEQ ID NO: 660046 - RNA, 19 nt, Artificial Sequence
  Description of Artificial Sequence: Synthetic oligonucleotide
cauguagaagcggccgucc

SEQ ID NO: 660047 - RNA, 19 nt, Artificial Sequence
  Description of Artificial Sequence: Synthetic oligonucleotide
ggcgaugcggacgauaagc

SEQ ID NO: 660048 - RNA, 19 nt, Artificial Sequence
  Description of Artificial Sequence: Synthetic oligonucleotide
uggguggagggacguacca

SEQ ID NO: 660049 - RNA, 19 nt, Artificial Sequence
  Description of Artificial Sequence: Synthetic oligonucleotide
gucuaccuucaagucaggg

SEQ ID NO: 660050 - RNA, 19 nt, Artificial Sequence
  Description of Artificial Sequence: Synthetic oligonucleotide
gagucggaaggguucacaa

SEQ ID NO: 660051 - RNA, 19 nt, Artificial Sequence
  Description of Artificial Sequence: Synthetic oligonucleotide
caauugucuugcugauuug

SEQ ID NO: 660052 - RNA, 19 nt, Artificial Sequence
  Description of Artificial Sequence: Synthetic oligonucleotide
auugucuugcugauuugga

SEQ ID NO: 660053 - RNA, 19 nt, Artificial Sequence
  Description of Artificial Sequence: Synthetic oligonucleotide
ggaaauacggaaugcugaa

SEQ ID NO: 660054 - RNA, 19 nt, Artificial Sequence
  Description of Artificial Sequence: Synthetic oligonucleotide
uucuuuacguacgguccca

SEQ ID NO: 660055 - RNA, 19 nt, Artificial Sequence
  Description of Artificial Sequence: Synthetic oligonucleotide
uacagccgaaugguggccc

SEQ ID NO: 660056 - RNA, 19 nt, Artificial Sequence
  Description of Artificial Sequence: Synthetic oligonucleotide
auauugaauuuaaucccaa

SEQ ID NO: 660057 - RNA, 19 nt, Artificial Sequence
  Description of Artificial Sequence: Synthetic oligonucleotide
ucauguagaagcggccguc

SEQ ID NO: 660058 - RNA, 19 nt, Artificial Sequence
  Description of Artificial Sequence: Synthetic oligonucleotide
gcaauggagaucaggggag

SEQ ID NO: 660059 - RNA, 19 nt, Artificial Sequence
  Description of Artificial Sequence: Synthetic oligonucleotide
acgguccaacaucagggcu

SEQ ID NO: 660060 - RNA, 19 nt, Artificial Sequence
  Description of Artificial Sequence: Synthetic oligonucleotide
uugcuacccgauccagggc

SEQ ID NO: 660061 - RNA, 19 nt, Artificial Sequence
  Description of Artificial Sequence: Synthetic oligonucleotide
uccggguacgccugcgucu

SEQ ID NO: 660062 - RNA, 19 nt, Artificial Sequence
  Description of Artificial Sequence: Synthetic oligonucleotide
uugaaacgcuuccgucuac

SEQ ID NO: 660063 - RNA, 19 nt, Artificial Sequence
  Description of Artificial Sequence: Synthetic oligonucleotide
agccgcaagcccugauuuc

SEQ ID NO: 660064 - RNA, 19 nt, Artificial Sequence
  Description of Artificial Sequence: Synthetic oligonucleotide
cacgcucugcuuucgggug

SEQ ID NO: 660065 - RNA, 19 nt, Artificial Sequence
  Description of Artificial Sequence: Synthetic oligonucleotide
augauacgagaaccaucug

SEQ ID NO: 660066 - RNA, 19 nt, Artificial Sequence
  Description of Artificial Sequence: Synthetic oligonucleotide
ucggguggcguggauaggu

SEQ ID NO: 660067 - RNA, 19 nt, Artificial Sequence
  Description of Artificial Sequence: Synthetic oligonucleotide
cucggucauguagaagcgg

SEQ ID NO: 660068 - RNA, 19 nt, Artificial Sequence
  Description of Artificial Sequence: Synthetic oligonucleotide
gagaucaggggagccagca

SEQ ID NO: 660069 - RNA, 19 nt, Artificial Sequence
  Description of Artificial Sequence: Synthetic oligonucleotide
uaccuucaagucagggcaa

SEQ ID NO: 660070 - RNA, 19 nt, Artificial Sequence
  Description of Artificial Sequence: Synthetic oligonucleotide
accgagucuacaaucucca

SEQ ID NO: 660071 - RNA, 19 nt, Artificial Sequence
  Description of Artificial Sequence: Synthetic oligonucleotide
aauaagccgcaagcccuga

SEQ ID NO: 660072 - RNA, 19 nt, Artificial Sequence
  Description of Artificial Sequence: Synthetic oligonucleotide
agucggaaggguucacaaa

SEQ ID NO: 660073 - RNA, 19 nt, Artificial Sequence
  Description of Artificial Sequence: Synthetic oligonucleotide
accacgucuggccaucuuu

SEQ ID NO: 660074 - RNA, 19 nt, Artificial Sequence
  Description of Artificial Sequence: Synthetic oligonucleotide
cuugaaacgcuuccgucua

SEQ ID NO: 660075 - RNA, 19 nt, Artificial Sequence
  Description of Artificial Sequence: Synthetic oligonucleotide
ugugggcauacugcgugca

SEQ ID NO: 660076 - RNA, 19 nt, Artificial Sequence
  Description of Artificial Sequence: Synthetic oligonucleotide
agggcaagagaggguacag

SEQ ID NO: 660077 - RNA, 19 nt, Artificial Sequence
  Description of Artificial Sequence: Synthetic oligonucleotide
gggacaguuugcuugcauc

SEQ ID NO: 660078 - RNA, 19 nt, Artificial Sequence
  Description of Artificial Sequence: Synthetic oligonucleotide
augcaggacacagcaggag

SEQ ID NO: 660079 - RNA, 19 nt, Artificial Sequence
  Description of Artificial Sequence: Synthetic oligonucleotide
acgauaagcuggauagccu

SEQ ID NO: 660080 - RNA, 19 nt, Artificial Sequence
  Description of Artificial Sequence: Synthetic oligonucleotide
guccaauaaccaggcagcc

SEQ ID NO: 660081 - RNA, 19 nt, Artificial Sequence
  Description of Artificial Sequence: Synthetic oligonucleotide
agcccuaggucggcuuucc

SEQ ID NO: 660082 - RNA, 19 nt, Artificial Sequence
  Description of Artificial Sequence: Synthetic oligonucleotide
gguggcgguuaccugcggg

SEQ ID NO: 660083 - RNA, 19 nt, Artificial Sequence
  Description of Artificial Sequence: Synthetic oligonucleotide
ucuuuacguacggucccac

SEQ ID NO: 660084 - RNA, 19 nt, Artificial Sequence
  Description of Artificial Sequence: Synthetic oligonucleotide
cucccggugccacucaguc

SEQ ID NO: 660085 - RNA, 19 nt, Artificial Sequence
  Description of Artificial Sequence: Synthetic oligonucleotide
augguggcgguuaccugcg

SEQ ID NO: 660086 - RNA, 19 nt, Artificial Sequence
  Description of Artificial Sequence: Synthetic oligonucleotide
guggucggaaccagucccg

SEQ ID NO: 660087 - RNA, 19 nt, Artificial Sequence
  Description of Artificial Sequence: Synthetic oligonucleotide
cguacggucccacaacucc

SEQ ID NO: 660088 - RNA, 19 nt, Artificial Sequence
  Description of Artificial Sequence: Synthetic oligonucleotide
uuguggcguuugcuacccg

SEQ ID NO: 660089 - RNA, 19 nt, Artificial Sequence
  Description of Artificial Sequence: Synthetic oligonucleotide
auguuccgauccccaucac

SEQ ID NO: 660090 - RNA, 19 nt, Artificial Sequence
  Description of Artificial Sequence: Synthetic oligonucleotide
uggcguuugcuacccgauc

SEQ ID NO: 660091 - RNA, 19 nt, Artificial Sequence
  Description of Artificial Sequence: Synthetic oligonucleotide
uggagggacguaccacguc

SEQ ID NO: 660092 - RNA, 19 nt, Artificial Sequence
  Description of Artificial Sequence: Synthetic oligonucleotide
ccagucugcuggaaauacg

SEQ ID NO: 660093 - RNA, 19 nt, Artificial Sequence
  Description of Artificial Sequence: Synthetic oligonucleotide
ccggccaaacuuuugccag

SEQ ID NO: 660094 - RNA, 19 nt, Artificial Sequence
  Description of Artificial Sequence: Synthetic oligonucleotide
cccugauuucuugaaacgc

SEQ ID NO: 660095 - RNA, 19 nt, Artificial Sequence
  Description of Artificial Sequence: Synthetic oligonucleotide
uggcguuacucuggaacac

SEQ ID NO: 660096 - RNA, 19 nt, Artificial Sequence
  Description of Artificial Sequence: Synthetic oligonucleotide
cuuuacguacggucccaca

SEQ ID NO: 660097 - RNA, 19 nt, Artificial Sequence
  Description of Artificial Sequence: Synthetic oligonucleotide
acagcgacuacggcuucug

SEQ ID NO: 660098 - RNA, 19 nt, Artificial Sequence
  Description of Artificial Sequence: Synthetic oligonucleotide
acaguaccugaugcuagga

SEQ ID NO: 660099 - RNA, 19 nt, Artificial Sequence
  Description of Artificial Sequence: Synthetic oligonucleotide
cacccucuagagacagaag

SEQ ID NO: 660100 - RNA, 19 nt, Artificial Sequence
  Description of Artificial Sequence: Synthetic oligonucleotide
cauacaaagcgaccuuugu

SEQ ID NO: 660101 - RNA, 19 nt, Artificial Sequence
  Description of Artificial Sequence: Synthetic oligonucleotide
cuuccgucuaccgggucac

SEQ ID NO: 660102 - RNA, 19 nt, Artificial Sequence
  Description of Artificial Sequence: Synthetic oligonucleotide
aaccagucccgaagcucuc

SEQ ID NO: 660103 - RNA, 19 nt, Artificial Sequence
  Description of Artificial Sequence: Synthetic oligonucleotide
ccuaggucggcuuucccuc

SEQ ID NO: 660104 - RNA, 19 nt, Artificial Sequence
  Description of Artificial Sequence: Synthetic oligonucleotide
uaccugaugcuaggagaca

SEQ ID NO: 660105 - RNA, 19 nt, Artificial Sequence
  Description of Artificial Sequence: Synthetic oligonucleotide
uucaaucggguggcgugga

SEQ ID NO: 660106 - RNA, 19 nt, Artificial Sequence
  Description of Artificial Sequence: Synthetic oligonucleotide
auacaguggcugugccuca

SEQ ID NO: 660107 - RNA, 19 nt, Artificial Sequence
  Description of Artificial Sequence: Synthetic oligonucleotide
cgauaagcuggauagccuc

SEQ ID NO: 660108 - RNA, 19 nt, Artificial Sequence
  Description of Artificial Sequence: Synthetic oligonucleotide
ggggcgacagcgacuacgg

SEQ ID NO: 660109 - RNA, 19 nt, Artificial Sequence
  Description of Artificial Sequence: Synthetic oligonucleotide
accuuuacacugugaugua

SEQ ID NO: 660110 - RNA, 19 nt, Artificial Sequence
  Description of Artificial Sequence: Synthetic oligonucleotide
gagggacguaccacgucug

SEQ ID NO: 660111 - RNA, 19 nt, Artificial Sequence
  Description of Artificial Sequence: Synthetic oligonucleotide
gcaucuaugcggaucuuca

SEQ ID NO: 660112 - RNA, 19 nt, Artificial Sequence
  Description of Artificial Sequence: Synthetic oligonucleotide
uggcgguuaccugcggggc

SEQ ID NO: 660113 - RNA, 19 nt, Artificial Sequence
  Description of Artificial Sequence: Synthetic oligonucleotide
ggcgguuaccugcggggcg

SEQ ID NO: 660114 - RNA, 19 nt, Artificial Sequence
  Description of Artificial Sequence: Synthetic oligonucleotide
ucaaucggguggcguggau

SEQ ID NO: 660115 - RNA, 19 nt, Artificial Sequence
  Description of Artificial Sequence: Synthetic oligonucleotide
agucugcuggaaauacgga

SEQ ID NO: 660116 - RNA, 19 nt, Artificial Sequence
  Description of Artificial Sequence: Synthetic oligonucleotide
uuccgauccccaucaccau

SEQ ID NO: 660117 - RNA, 19 nt, Artificial Sequence
  Description of Artificial Sequence: Synthetic oligonucleotide
acguacggucccacaacuc

SEQ ID NO: 660118 - RNA, 19 nt, Artificial Sequence
  Description of Artificial Sequence: Synthetic oligonucleotide
ugguggcgguuaccugcgg

SEQ ID NO: 660119 - RNA, 19 nt, Artificial Sequence
  Description of Artificial Sequence: Synthetic oligonucleotide
cuccacgcucugcuuucgg

SEQ ID NO: 660120 - RNA, 19 nt, Artificial Sequence
  Description of Artificial Sequence: Synthetic oligonucleotide
acgucuggccaucuuucua

SEQ ID NO: 660121 - RNA, 19 nt, Artificial Sequence
  Description of Artificial Sequence: Synthetic oligonucleotide
uguggcuggccgucagaau

SEQ ID NO: 660122 - RNA, 19 nt, Artificial Sequence
  Description of Artificial Sequence: Synthetic oligonucleotide
ggcguggauagguccuggg

SEQ ID NO: 660123 - RNA, 19 nt, Artificial Sequence
  Description of Artificial Sequence: Synthetic oligonucleotide
gaaguuccggccaaacuuu

SEQ ID NO: 660124 - RNA, 19 nt, Artificial Sequence
  Description of Artificial Sequence: Synthetic oligonucleotide
aguuccggccaaacuuuug

SEQ ID NO: 660125 - RNA, 19 nt, Artificial Sequence
  Description of Artificial Sequence: Synthetic oligonucleotide
ggguggcguggauaggucc

SEQ ID NO: 660126 - RNA, 19 nt, Artificial Sequence
  Description of Artificial Sequence: Synthetic oligonucleotide
cagcccgcucguaccaggc

SEQ ID NO: 660127 - RNA, 19 nt, Artificial Sequence
  Description of Artificial Sequence: Synthetic oligonucleotide
guacggucccacaacucca

SEQ ID NO: 660128 - RNA, 19 nt, Artificial Sequence
  Description of Artificial Sequence: Synthetic oligonucleotide
uggguuguggcuggccguc

SEQ ID NO: 660129 - RNA, 19 nt, Artificial Sequence
  Description of Artificial Sequence: Synthetic oligonucleotide
ugugagcccuaggucggcu

SEQ ID NO: 660130 - RNA, 19 nt, Artificial Sequence
  Description of Artificial Sequence: Synthetic oligonucleotide
ccucuccuauauacagugg

SEQ ID NO: 660131 - RNA, 19 nt, Artificial Sequence
  Description of Artificial Sequence: Synthetic oligonucleotide
uccguguaguuggcguuac

SEQ ID NO: 660132 - RNA, 19 nt, Artificial Sequence
  Description of Artificial Sequence: Synthetic oligonucleotide
ggagggacguaccacgucu

SEQ ID NO: 660133 - RNA, 19 nt, Artificial Sequence
  Description of Artificial Sequence: Synthetic oligonucleotide
ggcgacagcgacuacggcu

SEQ ID NO: 660134 - RNA, 19 nt, Artificial Sequence
  Description of Artificial Sequence: Synthetic oligonucleotide
uggucggaaccagucccga

SEQ ID NO: 660135 - RNA, 19 nt, Artificial Sequence
  Description of Artificial Sequence: Synthetic oligonucleotide
cuucaauugucuugcugau

SEQ ID NO: 660136 - RNA, 19 nt, Artificial Sequence
  Description of Artificial Sequence: Synthetic oligonucleotide
ucucacgaauguggucgga

SEQ ID NO: 660137 - RNA, 19 nt, Artificial Sequence
  Description of Artificial Sequence: Synthetic oligonucleotide
ggcaguacguccuguccuc

SEQ ID NO: 660138 - RNA, 19 nt, Artificial Sequence
  Description of Artificial Sequence: Synthetic oligonucleotide
caacuccaugcauggcauc

SEQ ID NO: 660139 - RNA, 19 nt, Artificial Sequence
  Description of Artificial Sequence: Synthetic oligonucleotide
gcgugcaaagccacggacc

SEQ ID NO: 660140 - RNA, 19 nt, Artificial Sequence
  Description of Artificial Sequence: Synthetic oligonucleotide
uccgucuaccgggucacua

SEQ ID NO: 660141 - RNA, 19 nt, Artificial Sequence
  Description of Artificial Sequence: Synthetic oligonucleotide
caguacguccuguccucuc

SEQ ID NO: 660142 - RNA, 19 nt, Artificial Sequence
  Description of Artificial Sequence: Synthetic oligonucleotide
acggucccacaacuccaug

SEQ ID NO: 660143 - RNA, 19 nt, Artificial Sequence
  Description of Artificial Sequence: Synthetic oligonucleotide
ccugcgucuucacugucac

SEQ ID NO: 660144 - RNA, 19 nt, Artificial Sequence
  Description of Artificial Sequence: Synthetic oligonucleotide
aaguuccggccaaacuuuu

SEQ ID NO: 660145 - RNA, 19 nt, Artificial Sequence
  Description of Artificial Sequence: Synthetic oligonucleotide
cuacccgauccagggcucc

SEQ ID NO: 660146 - RNA, 19 nt, Artificial Sequence
  Description of Artificial Sequence: Synthetic oligonucleotide
uagaagcggccguccccgc

SEQ ID NO: 660147 - RNA, 19 nt, Artificial Sequence
  Description of Artificial Sequence: Synthetic oligonucleotide
cuaugcggaucuucagucu

SEQ ID NO: 660148 - RNA, 19 nt, Artificial Sequence
  Description of Artificial Sequence: Synthetic oligonucleotide
guuguggcuggccgucaga

SEQ ID NO: 660149 - RNA, 19 nt, Artificial Sequence
  Description of Artificial Sequence: Synthetic oligonucleotide
cagcgacuacggcuucugc

SEQ ID NO: 660150 - RNA, 19 nt, Artificial Sequence
  Description of Artificial Sequence: Synthetic oligonucleotide
cucacgaauguggucggaa

SEQ ID NO: 660151 - RNA, 19 nt, Artificial Sequence
  Description of Artificial Sequence: Synthetic oligonucleotide
ccucacaaaugguuauuca

SEQ ID NO: 660152 - RNA, 19 nt, Artificial Sequence
  Description of Artificial Sequence: Synthetic oligonucleotide
cauaccugguaaagaaguu

SEQ ID NO: 660153 - RNA, 19 nt, Artificial Sequence
  Description of Artificial Sequence: Synthetic oligonucleotide
cccaggcgaauacaguuuc

SEQ ID NO: 660154 - RNA, 19 nt, Artificial Sequence
  Description of Artificial Sequence: Synthetic oligonucleotide
ggcaucuaugcggaucuuc

SEQ ID NO: 660155 - RNA, 19 nt, Artificial Sequence
  Description of Artificial Sequence: Synthetic oligonucleotide
ccacgucuggccaucuuuc

SEQ ID NO: 660156 - RNA, 19 nt, Artificial Sequence
  Description of Artificial Sequence: Synthetic oligonucleotide
cagggcaagagaggguaca

SEQ ID NO: 660157 - RNA, 19 nt, Artificial Sequence
  Description of Artificial Sequence: Synthetic oligonucleotide
cguguaguuggcguuacuc

SEQ ID NO: 660158 - RNA, 19 nt, Artificial Sequence
  Description of Artificial Sequence: Synthetic oligonucleotide
acauugccgcauaguccuc

SEQ ID NO: 660159 - RNA, 19 nt, Artificial Sequence
  Description of Artificial Sequence: Synthetic oligonucleotide
aucggguggcguggauagg

SEQ ID NO: 660160 - RNA, 19 nt, Artificial Sequence
  Description of Artificial Sequence: Synthetic oligonucleotide
gauuugagugugagcccua

SEQ ID NO: 660161 - RNA, 19 nt, Artificial Sequence
  Description of Artificial Sequence: Synthetic oligonucleotide
cagucccgaagcucuccuc

SEQ ID NO: 660162 - RNA, 19 nt, Artificial Sequence
  Description of Artificial Sequence: Synthetic oligonucleotide
agccgaaugguggccccug

SEQ ID NO: 660163 - RNA, 19 nt, Artificial Sequence
  Description of Artificial Sequence: Synthetic oligonucleotide
gcacccucuagagacagaa

SEQ ID NO: 660164 - RNA, 19 nt, Artificial Sequence
  Description of Artificial Sequence: Synthetic oligonucleotide
cucaacauugccgcauagu

SEQ ID NO: 660165 - RNA, 19 nt, Artificial Sequence
  Description of Artificial Sequence: Synthetic oligonucleotide
gccgucagaaugaucccac

SEQ ID NO: 660166 - RNA, 19 nt, Artificial Sequence
  Description of Artificial Sequence: Synthetic oligonucleotide
cccagucugcuggaaauac

SEQ ID NO: 660167 - RNA, 19 nt, Artificial Sequence
  Description of Artificial Sequence: Synthetic oligonucleotide
uacccgauccagggcucca

SEQ ID NO: 660168 - RNA, 19 nt, Artificial Sequence
  Description of Artificial Sequence: Synthetic oligonucleotide
uaccacgucuggccaucuu

SEQ ID NO: 660169 - RNA, 19 nt, Artificial Sequence
  Description of Artificial Sequence: Synthetic oligonucleotide
gaccuuuguggcguuugcu

SEQ ID NO: 660170 - RNA, 19 nt, Artificial Sequence
  Description of Artificial Sequence: Synthetic oligonucleotide
cugcgugcaaagccacgga

SEQ ID NO: 660171 - RNA, 19 nt, Artificial Sequence
  Description of Artificial Sequence: Synthetic oligonucleotide
cucguaccaggcuucuggu

SEQ ID NO: 660172 - RNA, 19 nt, Artificial Sequence
  Description of Artificial Sequence: Synthetic oligonucleotide
gcguuugcuacccgaucca

SEQ ID NO: 660173 - RNA, 19 nt, Artificial Sequence
  Description of Artificial Sequence: Synthetic oligonucleotide
cauuugcugagaacugcuu

SEQ ID NO: 660174 - RNA, 19 nt, Artificial Sequence
  Description of Artificial Sequence: Synthetic oligonucleotide
cggucauguagaagcggcc

SEQ ID NO: 660175 - RNA, 19 nt, Artificial Sequence
  Description of Artificial Sequence: Synthetic oligonucleotide
agcgcccuucucauaacua

SEQ ID NO: 660176 - RNA, 19 nt, Artificial Sequence
  Description of Artificial Sequence: Synthetic oligonucleotide
gugggcauacugcgugcaa

SEQ ID NO: 660177 - RNA, 19 nt, Artificial Sequence
  Description of Artificial Sequence: Synthetic oligonucleotide
aagcgaccuuuguggcguu

SEQ ID NO: 660178 - RNA, 19 nt, Artificial Sequence
  Description of Artificial Sequence: Synthetic oligonucleotide
gcgaccuuuguggcguuug

SEQ ID NO: 660179 - RNA, 19 nt, Artificial Sequence
  Description of Artificial Sequence: Synthetic oligonucleotide
cgaugcggacgauaagcug

SEQ ID NO: 660180 - RNA, 19 nt, Artificial Sequence
  Description of Artificial Sequence: Synthetic oligonucleotide
caaucggguggcguggaua

SEQ ID NO: 660181 - RNA, 19 nt, Artificial Sequence
  Description of Artificial Sequence: Synthetic oligonucleotide
caaucccguuggcggcggc

SEQ ID NO: 660182 - RNA, 19 nt, Artificial Sequence
  Description of Artificial Sequence: Synthetic oligonucleotide
cagagucggaaggguucac

SEQ ID NO: 660183 - RNA, 19 nt, Artificial Sequence
  Description of Artificial Sequence: Synthetic oligonucleotide
ccgagucuacaaucuccac

SEQ ID NO: 660184 - RNA, 19 nt, Artificial Sequence
  Description of Artificial Sequence: Synthetic oligonucleotide
ggccgucagaaugauccca

SEQ ID NO: 660185 - RNA, 19 nt, Artificial Sequence
  Description of Artificial Sequence: Synthetic oligonucleotide
cuaggucggcuuucccucu

SEQ ID NO: 660186 - RNA, 19 nt, Artificial Sequence
  Description of Artificial Sequence: Synthetic oligonucleotide
acucccggugccacucagu

SEQ ID NO: 660187 - RNA, 19 nt, Artificial Sequence
  Description of Artificial Sequence: Synthetic oligonucleotide
gaguggagaggaugccauu

SEQ ID NO: 660188 - RNA, 19 nt, Artificial Sequence
  Description of Artificial Sequence: Synthetic oligonucleotide
cgaauguggucggaaccag

SEQ ID NO: 660189 - RNA, 19 nt, Artificial Sequence
  Description of Artificial Sequence: Synthetic oligonucleotide
ccguuggcggcggcgaugc

SEQ ID NO: 660190 - RNA, 19 nt, Artificial Sequence
  Description of Artificial Sequence: Synthetic oligonucleotide
cggggcgacagcgacuacg

SEQ ID NO: 660191 - RNA, 19 nt, Artificial Sequence
  Description of Artificial Sequence: Synthetic oligonucleotide
ggcagccaaucccguuggc

SEQ ID NO: 660192 - RNA, 19 nt, Artificial Sequence
  Description of Artificial Sequence: Synthetic oligonucleotide
cgaccuuuguggcguuugc

SEQ ID NO: 660193 - RNA, 19 nt, Artificial Sequence
  Description of Artificial Sequence: Synthetic oligonucleotide
cuccguguaguuggcguua

SEQ ID NO: 660194 - RNA, 19 nt, Artificial Sequence
  Description of Artificial Sequence: Synthetic oligonucleotide
uuccgucuaccgggucacu

SEQ ID NO: 660195 - RNA, 19 nt, Artificial Sequence
  Description of Artificial Sequence: Synthetic oligonucleotide
cguuugcuacccgauccag

SEQ ID NO: 660196 - RNA, 19 nt, Artificial Sequence
  Description of Artificial Sequence: Synthetic oligonucleotide
gcggcgaugcggacgauaa

SEQ ID NO: 660197 - RNA, 19 nt, Artificial Sequence
  Description of Artificial Sequence: Synthetic oligonucleotide
acggaaugcugaagauguu

SEQ ID NO: 660198 - RNA, 19 nt, Artificial Sequence
  Description of Artificial Sequence: Synthetic oligonucleotide
cugcuuucggguggccaga

SEQ ID NO: 660199 - RNA, 19 nt, Artificial Sequence
  Description of Artificial Sequence: Synthetic oligonucleotide
ccggcuccaccguggagac

SEQ ID NO: 660200 - RNA, 19 nt, Artificial Sequence
  Description of Artificial Sequence: Synthetic oligonucleotide
gguggcguggauagguccu

SEQ ID NO: 660201 - RNA, 19 nt, Artificial Sequence
  Description of Artificial Sequence: Synthetic oligonucleotide
ccuuuacacugugauguaa

SEQ ID NO: 660202 - RNA, 19 nt, Artificial Sequence
  Description of Artificial Sequence: Synthetic oligonucleotide
gcguggauagguccugggu

SEQ ID NO: 660203 - RNA, 19 nt, Artificial Sequence
  Description of Artificial Sequence: Synthetic oligonucleotide
ggucggaaccagucccgaa

SEQ ID NO: 660204 - RNA, 19 nt, Artificial Sequence
  Description of Artificial Sequence: Synthetic oligonucleotide
gcgcccuucucauaacuau

SEQ ID NO: 660205 - RNA, 19 nt, Artificial Sequence
  Description of Artificial Sequence: Synthetic oligonucleotide
guggagggacguaccacgu

SEQ ID NO: 660206 - RNA, 19 nt, Artificial Sequence
  Description of Artificial Sequence: Synthetic oligonucleotide
gucuaccgggucacuauau

SEQ ID NO: 660207 - RNA, 19 nt, Artificial Sequence
  Description of Artificial Sequence: Synthetic oligonucleotide
ccacaacuccaugcauggc

SEQ ID NO: 660208 - RNA, 19 nt, Artificial Sequence
  Description of Artificial Sequence: Synthetic oligonucleotide
gggcgacagcgacuacggc

SEQ ID NO: 660209 - RNA, 19 nt, Artificial Sequence
  Description of Artificial Sequence: Synthetic oligonucleotide
gcuccacuugugggcauac

SEQ ID NO: 660210 - RNA, 19 nt, Artificial Sequence
  Description of Artificial Sequence: Synthetic oligonucleotide
ggcguuacucuggaacacu

SEQ ID NO: 660211 - RNA, 19 nt, Artificial Sequence
  Description of Artificial Sequence: Synthetic oligonucleotide
ccaaucccguuggcggcgg

SEQ ID NO: 660212 - RNA, 19 nt, Artificial Sequence
  Description of Artificial Sequence: Synthetic oligonucleotide
gcgguuaccugcggggcga

SEQ ID NO: 660213 - RNA, 19 nt, Artificial Sequence
  Description of Artificial Sequence: Synthetic oligonucleotide
uggcaucuaugcggaucuu

SEQ ID NO: 660214 - RNA, 19 nt, Artificial Sequence
  Description of Artificial Sequence: Synthetic oligonucleotide
gcgaugcggacgauaagcu

SEQ ID NO: 660215 - RNA, 19 nt, Artificial Sequence
  Description of Artificial Sequence: Synthetic oligonucleotide
cccuaggucggcuuucccu

SEQ ID NO: 660216 - RNA, 19 nt, Artificial Sequence
  Description of Artificial Sequence: Synthetic oligonucleotide
gcccuaggucggcuuuccc

SEQ ID NO: 660217 - RNA, 19 nt, Artificial Sequence
  Description of Artificial Sequence: Synthetic oligonucleotide
accugcggggcgacagcga

SEQ ID NO: 660218 - RNA, 19 nt, Artificial Sequence
  Description of Artificial Sequence: Synthetic oligonucleotide
ccuccacgcucugcuuucg

SEQ ID NO: 660219 - RNA, 19 nt, Artificial Sequence
  Description of Artificial Sequence: Synthetic oligonucleotide
gcuacccgauccagggcuc

SEQ ID NO: 660220 - RNA, 19 nt, Artificial Sequence
  Description of Artificial Sequence: Synthetic oligonucleotide
agcgaccuuuguggcguuu

SEQ ID NO: 660221 - RNA, 19 nt, Artificial Sequence
  Description of Artificial Sequence: Synthetic oligonucleotide
ccacgcucugcuuucgggu

SEQ ID NO: 660222 - RNA, 19 nt, Artificial Sequence
  Description of Artificial Sequence: Synthetic oligonucleotide
gugagcccuaggucggcuu

SEQ ID NO: 660223 - RNA, 19 nt, Artificial Sequence
  Description of Artificial Sequence: Synthetic oligonucleotide
cguaccacgucuggccauc

SEQ ID NO: 660224 - RNA, 19 nt, Artificial Sequence
  Description of Artificial Sequence: Synthetic oligonucleotide
ggucggcuuucccucuccu

SEQ ID NO: 660225 - RNA, 19 nt, Artificial Sequence
  Description of Artificial Sequence: Synthetic oligonucleotide
gcuggccgucagaaugauc

SEQ ID NO: 660226 - RNA, 19 nt, Artificial Sequence
  Description of Artificial Sequence: Synthetic oligonucleotide
cugcggggcgacagcgacu

SEQ ID NO: 660227 - RNA, 19 nt, Artificial Sequence
  Description of Artificial Sequence: Synthetic oligonucleotide
ccgcauaguccuccaccga

SEQ ID NO: 660228 - RNA, 19 nt, Artificial Sequence
  Description of Artificial Sequence: Synthetic oligonucleotide
guaccacgucuggccaucu

SEQ ID NO: 660229 - RNA, 19 nt, Artificial Sequence
  Description of Artificial Sequence: Synthetic oligonucleotide
cggguggcguggauagguc

SEQ ID NO: 660230 - RNA, 19 nt, Artificial Sequence
  Description of Artificial Sequence: Synthetic oligonucleotide
ccaggcgaauacaguuucu

SEQ ID NO: 660231 - RNA, 19 nt, Artificial Sequence
  Description of Artificial Sequence: Synthetic oligonucleotide
gguuaccugcggggcgaca

SEQ ID NO: 660232 - RNA, 19 nt, Artificial Sequence
  Description of Artificial Sequence: Synthetic oligonucleotide
gcguuacucuggaacacuu

SEQ ID NO: 660233 - RNA, 19 nt, Artificial Sequence
  Description of Artificial Sequence: Synthetic oligonucleotide
ggguuguggcuggccguca

SEQ ID NO: 660234 - RNA, 19 nt, Artificial Sequence
  Description of Artificial Sequence: Synthetic oligonucleotide
ggcggcgaugcggacgaua

SEQ ID NO: 660235 - RNA, 19 nt, Artificial Sequence
  Description of Artificial Sequence: Synthetic oligonucleotide
ccgucuaccgggucacuau

SEQ ID NO: 660236 - RNA, 19 nt, Artificial Sequence
  Description of Artificial Sequence: Synthetic oligonucleotide
gcaguacguccuguccucu

SEQ ID NO: 660237 - RNA, 19 nt, Artificial Sequence
  Description of Artificial Sequence: Synthetic oligonucleotide
cgucuaccgggucacuaua

SEQ ID NO: 660238 - RNA, 19 nt, Artificial Sequence
  Description of Artificial Sequence: Synthetic oligonucleotide
gcccaggcgaauacaguuu

SEQ ID NO: 660239 - RNA, 19 nt, Artificial Sequence
  Description of Artificial Sequence: Synthetic oligonucleotide
gcgccggcuccaccgugga

SEQ ID NO: 660240 - RNA, 19 nt, Artificial Sequence
  Description of Artificial Sequence: Synthetic oligonucleotide
gcggaucuucagucuguuu

SEQ ID NO: 660241 - RNA, 19 nt, Artificial Sequence
  Description of Artificial Sequence: Synthetic oligonucleotide
cguuacucuggaacacuuu

SEQ ID NO: 660242 - RNA, 19 nt, Artificial Sequence
  Description of Artificial Sequence: Synthetic oligonucleotide
cgacagcgacuacggcuuc

SEQ ID NO: 660243 - RNA, 19 nt, Artificial Sequence
  Description of Artificial Sequence: Synthetic oligonucleotide
cguuggcggcggcgaugcg

SEQ ID NO: 660244 - RNA, 19 nt, Artificial Sequence
  Description of Artificial Sequence: Synthetic oligonucleotide
cgcucguaccaggcuucug

SEQ ID NO: 660245 - RNA, 19 nt, Artificial Sequence
  Description of Artificial Sequence: Synthetic oligonucleotide
ggcuggccgucagaaugau

SEQ ID NO: 660246 - RNA, 19 nt, Artificial Sequence
  Description of Artificial Sequence: Synthetic oligonucleotide
gcggggcgacagcgacuac

SEQ ID NO: 660247 - RNA, 19 nt, Artificial Sequence
  Description of Artificial Sequence: Synthetic oligonucleotide
ccguguaguuggcguuacu

SEQ ID NO: 660248 - RNA, 19 nt, Artificial Sequence
  Description of Artificial Sequence: Synthetic oligonucleotide
cgguuaccugcggggcgac

SEQ ID NO: 660249 - RNA, 19 nt, Artificial Sequence
  Description of Artificial Sequence: Synthetic oligonucleotide
cggguacgccugcgucuuc

SEQ ID NO: 660250 - RNA, 19 nt, Artificial Sequence
  Description of Artificial Sequence: Synthetic oligonucleotide
ccggguacgccugcgucuu

SEQ ID NO: 660251 - RNA, 19 nt, Artificial Sequence
  Description of Artificial Sequence: Synthetic oligonucleotide
aacguguugacauagaaac

SEQ ID NO: 660252 - RNA, 19 nt, Artificial Sequence
  Description of Artificial Sequence: Synthetic oligonucleotide
uuuaacagaagccagguag

SEQ ID NO: 660253 - RNA, 19 nt, Artificial Sequence
  Description of Artificial Sequence: Synthetic oligonucleotide
acuaucauaauccaccagc

SEQ ID NO: 660254 - RNA, 19 nt, Artificial Sequence
  Description of Artificial Sequence: Synthetic oligonucleotide
aacacuagggcuuauuuuc

SEQ ID NO: 660255 - RNA, 19 nt, Artificial Sequence
  Description of Artificial Sequence: Synthetic oligonucleotide
uuugaguugaaguucauca

SEQ ID NO: 660256 - RNA, 19 nt, Artificial Sequence
  Description of Artificial Sequence: Synthetic oligonucleotide
aaaccuacacggcuguucc

SEQ ID NO: 660257 - RNA, 19 nt, Artificial Sequence
  Description of Artificial Sequence: Synthetic oligonucleotide
ugacauagaaaccuacacg

SEQ ID NO: 660258 - RNA, 19 nt, Artificial Sequence
  Description of Artificial Sequence: Synthetic oligonucleotide
agaguuucaaaacaaaaca

SEQ ID NO: 660259 - RNA, 19 nt, Artificial Sequence
  Description of Artificial Sequence: Synthetic oligonucleotide
uguagguccacauucaucu

SEQ ID NO: 660260 - RNA, 19 nt, Artificial Sequence
  Description of Artificial Sequence: Synthetic oligonucleotide
ucgugguucacucugaucu

SEQ ID NO: 660261 - RNA, 19 nt, Artificial Sequence
  Description of Artificial Sequence: Synthetic oligonucleotide
uugaacaugaagcccgggg

SEQ ID NO: 660262 - RNA, 19 nt, Artificial Sequence
  Description of Artificial Sequence: Synthetic oligonucleotide
cuuacucaucucuuuaugg

SEQ ID NO: 660263 - RNA, 19 nt, Artificial Sequence
  Description of Artificial Sequence: Synthetic oligonucleotide
ucgugcauggcuuuaacag

SEQ ID NO: 660264 - RNA, 19 nt, Artificial Sequence
  Description of Artificial Sequence: Synthetic oligonucleotide
ucauauaccuccuggagac

SEQ ID NO: 660265 - RNA, 19 nt, Artificial Sequence
  Description of Artificial Sequence: Synthetic oligonucleotide
uugaaguucaucaguguca

SEQ ID NO: 660266 - RNA, 19 nt, Artificial Sequence
  Description of Artificial Sequence: Synthetic oligonucleotide
uuugggaaaagguucuuca

SEQ ID NO: 660267 - RNA, 19 nt, Artificial Sequence
  Description of Artificial Sequence: Synthetic oligonucleotide
uuucccgacacuuuucaag

SEQ ID NO: 660268 - RNA, 19 nt, Artificial Sequence
  Description of Artificial Sequence: Synthetic oligonucleotide
ugauugagcuuacucaucu

SEQ ID NO: 660269 - RNA, 19 nt, Artificial Sequence
  Description of Artificial Sequence: Synthetic oligonucleotide
uccuucacucccaugagcc

SEQ ID NO: 660270 - RNA, 19 nt, Artificial Sequence
  Description of Artificial Sequence: Synthetic oligonucleotide
ugaacaugcgggcaccagg

SEQ ID NO: 660271 - RNA, 19 nt, Artificial Sequence
  Description of Artificial Sequence: Synthetic oligonucleotide
aauuucccgacacuuuuca

SEQ ID NO: 660272 - RNA, 19 nt, Artificial Sequence
  Description of Artificial Sequence: Synthetic oligonucleotide
ucuuguuugcuucaucccu

SEQ ID NO: 660273 - RNA, 19 nt, Artificial Sequence
  Description of Artificial Sequence: Synthetic oligonucleotide
uuacucaucucuuuaugga

SEQ ID NO: 660274 - RNA, 19 nt, Artificial Sequence
  Description of Artificial Sequence: Synthetic oligonucleotide
ucaucuuuggggaacgccu

SEQ ID NO: 660275 - RNA, 19 nt, Artificial Sequence
  Description of Artificial Sequence: Synthetic oligonucleotide
aaguccacugaacugggcu

SEQ ID NO: 660276 - RNA, 19 nt, Artificial Sequence
  Description of Artificial Sequence: Synthetic oligonucleotide
acugaacugggcuggacgg

SEQ ID NO: 660277 - RNA, 19 nt, Artificial Sequence
  Description of Artificial Sequence: Synthetic oligonucleotide
agugaaauucuccgggaag

SEQ ID NO: 660278 - RNA, 19 nt, Artificial Sequence
  Description of Artificial Sequence: Synthetic oligonucleotide
caaugcgugacuuaauguc

SEQ ID NO: 660279 - RNA, 19 nt, Artificial Sequence
  Description of Artificial Sequence: Synthetic oligonucleotide
uuuggggaacgccucuugg

SEQ ID NO: 660280 - RNA, 19 nt, Artificial Sequence
  Description of Artificial Sequence: Synthetic oligonucleotide
accaggacgucauugaggu

SEQ ID NO: 660281 - RNA, 19 nt, Artificial Sequence
  Description of Artificial Sequence: Synthetic oligonucleotide
uuuggcgguuugaagagac

SEQ ID NO: 660282 - RNA, 19 nt, Artificial Sequence
  Description of Artificial Sequence: Synthetic oligonucleotide
accuugaacaugaagcccg

SEQ ID NO: 660283 - RNA, 19 nt, Artificial Sequence
  Description of Artificial Sequence: Synthetic oligonucleotide
aaugcgugacuuaauguca

SEQ ID NO: 660284 - RNA, 19 nt, Artificial Sequence
  Description of Artificial Sequence: Synthetic oligonucleotide
auauaccuccuggagacac

SEQ ID NO: 660285 - RNA, 19 nt, Artificial Sequence
  Description of Artificial Sequence: Synthetic oligonucleotide
auggcuuuaacagaagcca

SEQ ID NO: 660286 - RNA, 19 nt, Artificial Sequence
  Description of Artificial Sequence: Synthetic oligonucleotide
gucaguggccguauaaucg

SEQ ID NO: 660287 - RNA, 19 nt, Artificial Sequence
  Description of Artificial Sequence: Synthetic oligonucleotide
uggcuuuaacagaagccag

SEQ ID NO: 660288 - RNA, 19 nt, Artificial Sequence
  Description of Artificial Sequence: Synthetic oligonucleotide
gaguugaaguucaucagug

SEQ ID NO: 660289 - RNA, 19 nt, Artificial Sequence
  Description of Artificial Sequence: Synthetic oligonucleotide
uugcuggcgaucuuccccg

SEQ ID NO: 660290 - RNA, 19 nt, Artificial Sequence
  Description of Artificial Sequence: Synthetic oligonucleotide
ggcacuaucauaauccacc

SEQ ID NO: 660291 - RNA, 19 nt, Artificial Sequence
  Description of Artificial Sequence: Synthetic oligonucleotide
uccauaguaggucauuguu

SEQ ID NO: 660292 - RNA, 19 nt, Artificial Sequence
  Description of Artificial Sequence: Synthetic oligonucleotide
uagggcuuauuuucaaaca

SEQ ID NO: 660293 - RNA, 19 nt, Artificial Sequence
  Description of Artificial Sequence: Synthetic oligonucleotide
auaauccaccagcuuccgc

SEQ ID NO: 660294 - RNA, 19 nt, Artificial Sequence
  Description of Artificial Sequence: Synthetic oligonucleotide
cuuguuugcuucaucccug

SEQ ID NO: 660295 - RNA, 19 nt, Artificial Sequence
  Description of Artificial Sequence: Synthetic oligonucleotide
aacgccucuuggcuuagug

SEQ ID NO: 660296 - RNA, 19 nt, Artificial Sequence
  Description of Artificial Sequence: Synthetic oligonucleotide
gaaggggaucaccagcacc

SEQ ID NO: 660297 - RNA, 19 nt, Artificial Sequence
  Description of Artificial Sequence: Synthetic oligonucleotide
aauucuccgggaagacgcc

SEQ ID NO: 660298 - RNA, 19 nt, Artificial Sequence
  Description of Artificial Sequence: Synthetic oligonucleotide
aguggugccgggcacuauc

SEQ ID NO: 660299 - RNA, 19 nt, Artificial Sequence
  Description of Artificial Sequence: Synthetic oligonucleotide
acgccucuuggcuuagugc

SEQ ID NO: 660300 - RNA, 19 nt, Artificial Sequence
  Description of Artificial Sequence: Synthetic oligonucleotide
uugugcugguuccagucgc

SEQ ID NO: 660301 - RNA, 19 nt, Artificial Sequence
  Description of Artificial Sequence: Synthetic oligonucleotide
uaauggcgcaaggaggccg

SEQ ID NO: 660302 - RNA, 19 nt, Artificial Sequence
  Description of Artificial Sequence: Synthetic oligonucleotide
cacugaacugggcuggacg

SEQ ID NO: 660303 - RNA, 19 nt, Artificial Sequence
  Description of Artificial Sequence: Synthetic oligonucleotide
auagaaaccuacacggcug

SEQ ID NO: 660304 - RNA, 19 nt, Artificial Sequence
  Description of Artificial Sequence: Synthetic oligonucleotide
acggguggucugcagagcg

SEQ ID NO: 660305 - RNA, 19 nt, Artificial Sequence
  Description of Artificial Sequence: Synthetic oligonucleotide
ggacacacugcucaaacug

SEQ ID NO: 660306 - RNA, 19 nt, Artificial Sequence
  Description of Artificial Sequence: Synthetic oligonucleotide
agacucauaguggugccgg

SEQ ID NO: 660307 - RNA, 19 nt, Artificial Sequence
  Description of Artificial Sequence: Synthetic oligonucleotide
uguacguugcuggcgaucu

SEQ ID NO: 660308 - RNA, 19 nt, Artificial Sequence
  Description of Artificial Sequence: Synthetic oligonucleotide
uucgcugcauuuugaacac

SEQ ID NO: 660309 - RNA, 19 nt, Artificial Sequence
  Description of Artificial Sequence: Synthetic oligonucleotide
caggacgucauugagguuc

SEQ ID NO: 660310 - RNA, 19 nt, Artificial Sequence
  Description of Artificial Sequence: Synthetic oligonucleotide
ggccguauaaucgugcugg

SEQ ID NO: 660311 - RNA, 19 nt, Artificial Sequence
  Description of Artificial Sequence: Synthetic oligonucleotide
uuggaugggguguguuugg

SEQ ID NO: 660312 - RNA, 19 nt, Artificial Sequence
  Description of Artificial Sequence: Synthetic oligonucleotide
cauaguaggucauuguucu

SEQ ID NO: 660313 - RNA, 19 nt, Artificial Sequence
  Description of Artificial Sequence: Synthetic oligonucleotide
uagaaaccuacacggcugu

SEQ ID NO: 660314 - RNA, 19 nt, Artificial Sequence
  Description of Artificial Sequence: Synthetic oligonucleotide
ugucaguggccguauaauc

SEQ ID NO: 660315 - RNA, 19 nt, Artificial Sequence
  Description of Artificial Sequence: Synthetic oligonucleotide
uguuucgcugcauuuugaa

SEQ ID NO: 660316 - RNA, 19 nt, Artificial Sequence
  Description of Artificial Sequence: Synthetic oligonucleotide
uucgugcauggcuuuaaca

SEQ ID NO: 660317 - RNA, 19 nt, Artificial Sequence
  Description of Artificial Sequence: Synthetic oligonucleotide
agcgagcgcggauaauggc

SEQ ID NO: 660318 - RNA, 19 nt, Artificial Sequence
  Description of Artificial Sequence: Synthetic oligonucleotide
ucuucacacaccggaaggc

SEQ ID NO: 660319 - RNA, 19 nt, Artificial Sequence
  Description of Artificial Sequence: Synthetic oligonucleotide
uggggaacgccucuuggcu

SEQ ID NO: 660320 - RNA, 19 nt, Artificial Sequence
  Description of Artificial Sequence: Synthetic oligonucleotide
aguccacugaacugggcug

SEQ ID NO: 660321 - RNA, 19 nt, Artificial Sequence
  Description of Artificial Sequence: Synthetic oligonucleotide
acucaucucuuuauggaag

SEQ ID NO: 660322 - RNA, 19 nt, Artificial Sequence
  Description of Artificial Sequence: Synthetic oligonucleotide
ggugaagggcucuuguucc

SEQ ID NO: 660323 - RNA, 19 nt, Artificial Sequence
  Description of Artificial Sequence: Synthetic oligonucleotide
ggugguaguccauccauag

SEQ ID NO: 660324 - RNA, 19 nt, Artificial Sequence
  Description of Artificial Sequence: Synthetic oligonucleotide
uuggggaacgccucuuggc

SEQ ID NO: 660325 - RNA, 19 nt, Artificial Sequence
  Description of Artificial Sequence: Synthetic oligonucleotide
acucauaguggugccgggc

SEQ ID NO: 660326 - RNA, 19 nt, Artificial Sequence
  Description of Artificial Sequence: Synthetic oligonucleotide
ggucacgcugaucucaggg

SEQ ID NO: 660327 - RNA, 19 nt, Artificial Sequence
  Description of Artificial Sequence: Synthetic oligonucleotide
agaggacccaagcccugcc

SEQ ID NO: 660328 - RNA, 19 nt, Artificial Sequence
  Description of Artificial Sequence: Synthetic oligonucleotide
auaguaggucauuguucuc

SEQ ID NO: 660329 - RNA, 19 nt, Artificial Sequence
  Description of Artificial Sequence: Synthetic oligonucleotide
accuacacggcuguuccac

SEQ ID NO: 660330 - RNA, 19 nt, Artificial Sequence
  Description of Artificial Sequence: Synthetic oligonucleotide
aguggccguauaaucgugc

SEQ ID NO: 660331 - RNA, 19 nt, Artificial Sequence
  Description of Artificial Sequence: Synthetic oligonucleotide
uuggcaaugcgugacuuaa

SEQ ID NO: 660332 - RNA, 19 nt, Artificial Sequence
  Description of Artificial Sequence: Synthetic oligonucleotide
uggcucgugguucacucug

SEQ ID NO: 660333 - RNA, 19 nt, Artificial Sequence
  Description of Artificial Sequence: Synthetic oligonucleotide
auaauggcgcaaggaggcc

SEQ ID NO: 660334 - RNA, 19 nt, Artificial Sequence
  Description of Artificial Sequence: Synthetic oligonucleotide
ucgggaacacuggagaagu

SEQ ID NO: 660335 - RNA, 19 nt, Artificial Sequence
  Description of Artificial Sequence: Synthetic oligonucleotide
ggcuguuccacagggaugg

SEQ ID NO: 660336 - RNA, 19 nt, Artificial Sequence
  Description of Artificial Sequence: Synthetic oligonucleotide
cuuggaugggguguguuug

SEQ ID NO: 660337 - RNA, 19 nt, Artificial Sequence
  Description of Artificial Sequence: Synthetic oligonucleotide
gcuuauugaaguucuggac

SEQ ID NO: 660338 - RNA, 19 nt, Artificial Sequence
  Description of Artificial Sequence: Synthetic oligonucleotide
ugcgugacuuaaugucagg

SEQ ID NO: 660339 - RNA, 19 nt, Artificial Sequence
  Description of Artificial Sequence: Synthetic oligonucleotide
acacggguggucugcagag

SEQ ID NO: 660340 - RNA, 19 nt, Artificial Sequence
  Description of Artificial Sequence: Synthetic oligonucleotide
uauaaucgugcugggcuug

SEQ ID NO: 660341 - RNA, 19 nt, Artificial Sequence
  Description of Artificial Sequence: Synthetic oligonucleotide
uucaggcgcauugucacug

SEQ ID NO: 660342 - RNA, 19 nt, Artificial Sequence
  Description of Artificial Sequence: Synthetic oligonucleotide
ugcuccacuccccaauuuc

SEQ ID NO: 660343 - RNA, 19 nt, Artificial Sequence
  Description of Artificial Sequence: Synthetic oligonucleotide
ggcaaugcgugacuuaaug

SEQ ID NO: 660344 - RNA, 19 nt, Artificial Sequence
  Description of Artificial Sequence: Synthetic oligonucleotide
gucauuguucucugcaauc

SEQ ID NO: 660345 - RNA, 19 nt, Artificial Sequence
  Description of Artificial Sequence: Synthetic oligonucleotide
caccacggcgggaagagag

SEQ ID NO: 660346 - RNA, 19 nt, Artificial Sequence
  Description of Artificial Sequence: Synthetic oligonucleotide
auaaucgugcugggcuugc

SEQ ID NO: 660347 - RNA, 19 nt, Artificial Sequence
  Description of Artificial Sequence: Synthetic oligonucleotide
uugagcuuacucaucucuu

SEQ ID NO: 660348 - RNA, 19 nt, Artificial Sequence
  Description of Artificial Sequence: Synthetic oligonucleotide
guuucgcugcauuuugaac

SEQ ID NO: 660349 - RNA, 19 nt, Artificial Sequence
  Description of Artificial Sequence: Synthetic oligonucleotide
uccuuagucucauccgccu

SEQ ID NO: 660350 - RNA, 19 nt, Artificial Sequence
  Description of Artificial Sequence: Synthetic oligonucleotide
ugagcuuacucaucucuuu

SEQ ID NO: 660351 - RNA, 19 nt, Artificial Sequence
  Description of Artificial Sequence: Synthetic oligonucleotide
ucuggcucgugguucacuc

SEQ ID NO: 660352 - RNA, 19 nt, Artificial Sequence
  Description of Artificial Sequence: Synthetic oligonucleotide
ucaggcgcauugucacugg

SEQ ID NO: 660353 - RNA, 19 nt, Artificial Sequence
  Description of Artificial Sequence: Synthetic oligonucleotide
  modified_base (16)..(16): a, c, u, g, unknown or other
gaucuuccccgccgunacc

SEQ ID NO: 660354 - RNA, 19 nt, Artificial Sequence
  Description of Artificial Sequence: Synthetic oligonucleotide
gacucauaguggugccggg

SEQ ID NO: 660355 - RNA, 19 nt, Artificial Sequence
  Description of Artificial Sequence: Synthetic oligonucleotide
ugggguguguuugggaggc

SEQ ID NO: 660356 - RNA, 19 nt, Artificial Sequence
  Description of Artificial Sequence: Synthetic oligonucleotide
cauagaaaccuacacggcu

SEQ ID NO: 660357 - RNA, 19 nt, Artificial Sequence
  Description of Artificial Sequence: Synthetic oligonucleotide
agaagaggacccaagcccu

SEQ ID NO: 660358 - RNA, 19 nt, Artificial Sequence
  Description of Artificial Sequence: Synthetic oligonucleotide
ucucagggacaaaugcguc

SEQ ID NO: 660359 - RNA, 19 nt, Artificial Sequence
  Description of Artificial Sequence: Synthetic oligonucleotide
cuacacggcuguuccacag

SEQ ID NO: 660360 - RNA, 19 nt, Artificial Sequence
  Description of Artificial Sequence: Synthetic oligonucleotide
uauaccuccuggagacacu

SEQ ID NO: 660361 - RNA, 19 nt, Artificial Sequence
  Description of Artificial Sequence: Synthetic oligonucleotide
aagcgcccagucccacugc

SEQ ID NO: 660362 - RNA, 19 nt, Artificial Sequence
  Description of Artificial Sequence: Synthetic oligonucleotide
ugccauccgucacugcacc

SEQ ID NO: 660363 - RNA, 19 nt, Artificial Sequence
  Description of Artificial Sequence: Synthetic oligonucleotide
acggcuguuccacagggau

SEQ ID NO: 660364 - RNA, 19 nt, Artificial Sequence
  Description of Artificial Sequence: Synthetic oligonucleotide
caucaggcaagugcggcgg

SEQ ID NO: 660365 - RNA, 19 nt, Artificial Sequence
  Description of Artificial Sequence: Synthetic oligonucleotide
cuucuguacguugcuggcg

SEQ ID NO: 660366 - RNA, 19 nt, Artificial Sequence
  Description of Artificial Sequence: Synthetic oligonucleotide
cucaucuuuggggaacgcc

SEQ ID NO: 660367 - RNA, 19 nt, Artificial Sequence
  Description of Artificial Sequence: Synthetic oligonucleotide
uggacacacugcucaaacu

SEQ ID NO: 660368 - RNA, 19 nt, Artificial Sequence
  Description of Artificial Sequence: Synthetic oligonucleotide
ucauaguggugccgggcac

SEQ ID NO: 660369 - RNA, 19 nt, Artificial Sequence
  Description of Artificial Sequence: Synthetic oligonucleotide
ucuuugugcugguuccagu

SEQ ID NO: 660370 - RNA, 19 nt, Artificial Sequence
  Description of Artificial Sequence: Synthetic oligonucleotide
gucucauccgccuucccca

SEQ ID NO: 660371 - RNA, 19 nt, Artificial Sequence
  Description of Artificial Sequence: Synthetic oligonucleotide
uccggagcugggaugggga

SEQ ID NO: 660372 - RNA, 19 nt, Artificial Sequence
  Description of Artificial Sequence: Synthetic oligonucleotide
agguagguguccaugguca

SEQ ID NO: 660373 - RNA, 19 nt, Artificial Sequence
  Description of Artificial Sequence: Synthetic oligonucleotide
acaggugggccuuuccgga

SEQ ID NO: 660374 - RNA, 19 nt, Artificial Sequence
  Description of Artificial Sequence: Synthetic oligonucleotide
uaacagaagccagguaggu

SEQ ID NO: 660375 - RNA, 19 nt, Artificial Sequence
  Description of Artificial Sequence: Synthetic oligonucleotide
cuguagguccacauucauc

SEQ ID NO: 660376 - RNA, 19 nt, Artificial Sequence
  Description of Artificial Sequence: Synthetic oligonucleotide
cauugagguucugauugag

SEQ ID NO: 660377 - RNA, 19 nt, Artificial Sequence
  Description of Artificial Sequence: Synthetic oligonucleotide
gguggcacgaccaagcauc

SEQ ID NO: 660378 - RNA, 19 nt, Artificial Sequence
  Description of Artificial Sequence: Synthetic oligonucleotide
  modified_base (14)..(14): a, c, u, g, unknown or other
ucuuccccgccgunacccc

SEQ ID NO: 660379 - RNA, 19 nt, Artificial Sequence
  Description of Artificial Sequence: Synthetic oligonucleotide
cacuaucauaauccaccag

SEQ ID NO: 660380 - RNA, 19 nt, Artificial Sequence
  Description of Artificial Sequence: Synthetic oligonucleotide
uggaacguguugacauaga

SEQ ID NO: 660381 - RNA, 19 nt, Artificial Sequence
  Description of Artificial Sequence: Synthetic oligonucleotide
uggcgguuugaagagacuc

SEQ ID NO: 660382 - RNA, 19 nt, Artificial Sequence
  Description of Artificial Sequence: Synthetic oligonucleotide
gacggcucuuuggaaaacc

SEQ ID NO: 660383 - RNA, 19 nt, Artificial Sequence
  Description of Artificial Sequence: Synthetic oligonucleotide
aagacgccccggcauuucu

SEQ ID NO: 660384 - RNA, 19 nt, Artificial Sequence
  Description of Artificial Sequence: Synthetic oligonucleotide
uggacggcucuuuggaaaa

SEQ ID NO: 660385 - RNA, 19 nt, Artificial Sequence
  Description of Artificial Sequence: Synthetic oligonucleotide
ucccgacacuuuucaagag

SEQ ID NO: 660386 - RNA, 19 nt, Artificial Sequence
  Description of Artificial Sequence: Synthetic oligonucleotide
gaacaugcgggcaccagga

SEQ ID NO: 660387 - RNA, 19 nt, Artificial Sequence
  Description of Artificial Sequence: Synthetic oligonucleotide
gaacguguugacauagaaa

SEQ ID NO: 660388 - RNA, 19 nt, Artificial Sequence
  Description of Artificial Sequence: Synthetic oligonucleotide
uggccguauaaucgugcug

SEQ ID NO: 660389 - RNA, 19 nt, Artificial Sequence
  Description of Artificial Sequence: Synthetic oligonucleotide
gaagagagcuggaggcugc

SEQ ID NO: 660390 - RNA, 19 nt, Artificial Sequence
  Description of Artificial Sequence: Synthetic oligonucleotide
gacuuaaugucagggaacu

SEQ ID NO: 660391 - RNA, 19 nt, Artificial Sequence
  Description of Artificial Sequence: Synthetic oligonucleotide
uuguuguuucgcugcauuu

SEQ ID NO: 660392 - RNA, 19 nt, Artificial Sequence
  Description of Artificial Sequence: Synthetic oligonucleotide
aagguucuucacacaccgg

SEQ ID NO: 660393 - RNA, 19 nt, Artificial Sequence
  Description of Artificial Sequence: Synthetic oligonucleotide
gcuuacucaucucuuuaug

SEQ ID NO: 660394 - RNA, 19 nt, Artificial Sequence
  Description of Artificial Sequence: Synthetic oligonucleotide
agcugcuuauugaaguucu

SEQ ID NO: 660395 - RNA, 19 nt, Artificial Sequence
  Description of Artificial Sequence: Synthetic oligonucleotide
ucgugcugggcuugcaccu

SEQ ID NO: 660396 - RNA, 19 nt, Artificial Sequence
  Description of Artificial Sequence: Synthetic oligonucleotide
uacguugcuggcgaucuuc

SEQ ID NO: 660397 - RNA, 19 nt, Artificial Sequence
  Description of Artificial Sequence: Synthetic oligonucleotide
acguugcuggcgaucuucc

SEQ ID NO: 660398 - RNA, 19 nt, Artificial Sequence
  Description of Artificial Sequence: Synthetic oligonucleotide
aggcgcauugucacugggc

SEQ ID NO: 660399 - RNA, 19 nt, Artificial Sequence
  Description of Artificial Sequence: Synthetic oligonucleotide
ggcuuagugcuccacuccc

SEQ ID NO: 660400 - RNA, 19 nt, Artificial Sequence
  Description of Artificial Sequence: Synthetic oligonucleotide
guccauccauaguagguca

SEQ ID NO: 660401 - RNA, 19 nt, Artificial Sequence
  Description of Artificial Sequence: Synthetic oligonucleotide
gcggagauccuucugcagc

SEQ ID NO: 660402 - RNA, 19 nt, Artificial Sequence
  Description of Artificial Sequence: Synthetic oligonucleotide
augcgugacuuaaugucag

SEQ ID NO: 660403 - RNA, 19 nt, Artificial Sequence
  Description of Artificial Sequence: Synthetic oligonucleotide
uccccaauuucccgacacu

SEQ ID NO: 660404 - RNA, 19 nt, Artificial Sequence
  Description of Artificial Sequence: Synthetic oligonucleotide
cucauaguggugccgggca

SEQ ID NO: 660405 - RNA, 19 nt, Artificial Sequence
  Description of Artificial Sequence: Synthetic oligonucleotide
guuugaagagacucauagu

SEQ ID NO: 660406 - RNA, 19 nt, Artificial Sequence
  Description of Artificial Sequence: Synthetic oligonucleotide
uuuuggcgguuugaagaga

SEQ ID NO: 660407 - RNA, 19 nt, Artificial Sequence
  Description of Artificial Sequence: Synthetic oligonucleotide
aaccuacacggcuguucca

SEQ ID NO: 660408 - RNA, 19 nt, Artificial Sequence
  Description of Artificial Sequence: Synthetic oligonucleotide
agacccgcgaugcucugga

SEQ ID NO: 660409 - RNA, 19 nt, Artificial Sequence
  Description of Artificial Sequence: Synthetic oligonucleotide
ggcgcaaggaggccgugcg

SEQ ID NO: 660410 - RNA, 19 nt, Artificial Sequence
  Description of Artificial Sequence: Synthetic oligonucleotide
ugugaagguguugcuccca

SEQ ID NO: 660411 - RNA, 19 nt, Artificial Sequence
  Description of Artificial Sequence: Synthetic oligonucleotide
ucgggucagcuucuucugu

SEQ ID NO: 660412 - RNA, 19 nt, Artificial Sequence
  Description of Artificial Sequence: Synthetic oligonucleotide
gagcuuacucaucucuuua

SEQ ID NO: 660413 - RNA, 19 nt, Artificial Sequence
  Description of Artificial Sequence: Synthetic oligonucleotide
caucucugccaucgcggcg

SEQ ID NO: 660414 - RNA, 19 nt, Artificial Sequence
  Description of Artificial Sequence: Synthetic oligonucleotide
gggcuuauuuucaaacagc

SEQ ID NO: 660415 - RNA, 19 nt, Artificial Sequence
  Description of Artificial Sequence: Synthetic oligonucleotide
ggagcgagcgcggauaaug

SEQ ID NO: 660416 - RNA, 19 nt, Artificial Sequence
  Description of Artificial Sequence: Synthetic oligonucleotide
cauccgucacugcacccgc

SEQ ID NO: 660417 - RNA, 19 nt, Artificial Sequence
  Description of Artificial Sequence: Synthetic oligonucleotide
cacccgcucagugaaauuc

SEQ ID NO: 660418 - RNA, 19 nt, Artificial Sequence
  Description of Artificial Sequence: Synthetic oligonucleotide
uggugguaguccauccaua

SEQ ID NO: 660419 - RNA, 19 nt, Artificial Sequence
  Description of Artificial Sequence: Synthetic oligonucleotide
cuucgugcauggcuuuaac

SEQ ID NO: 660420 - RNA, 19 nt, Artificial Sequence
  Description of Artificial Sequence: Synthetic oligonucleotide
gcuucgggaacacuggaga

SEQ ID NO: 660421 - RNA, 19 nt, Artificial Sequence
  Description of Artificial Sequence: Synthetic oligonucleotide
aacaugcgggcaccaggaa

SEQ ID NO: 660422 - RNA, 19 nt, Artificial Sequence
  Description of Artificial Sequence: Synthetic oligonucleotide
uuggcgguuugaagagacu

SEQ ID NO: 660423 - RNA, 19 nt, Artificial Sequence
  Description of Artificial Sequence: Synthetic oligonucleotide
cuugaacaugaagcccggg

SEQ ID NO: 660424 - RNA, 19 nt, Artificial Sequence
  Description of Artificial Sequence: Synthetic oligonucleotide
accaccacggcgggaagag

SEQ ID NO: 660425 - RNA, 19 nt, Artificial Sequence
  Description of Artificial Sequence: Synthetic oligonucleotide
uccuccuguagguccacau

SEQ ID NO: 660426 - RNA, 19 nt, Artificial Sequence
  Description of Artificial Sequence: Synthetic oligonucleotide
uccgucacugcacccgcuc

SEQ ID NO: 660427 - RNA, 19 nt, Artificial Sequence
  Description of Artificial Sequence: Synthetic oligonucleotide
agugcggcgguggcucugc

SEQ ID NO: 660428 - RNA, 19 nt, Artificial Sequence
  Description of Artificial Sequence: Synthetic oligonucleotide
caugcgggcaccaggaacu

SEQ ID NO: 660429 - RNA, 19 nt, Artificial Sequence
  Description of Artificial Sequence: Synthetic oligonucleotide
auuucccgacacuuuucaa

SEQ ID NO: 660430 - RNA, 19 nt, Artificial Sequence
  Description of Artificial Sequence: Synthetic oligonucleotide
uuagugcuccacuccccaa

SEQ ID NO: 660431 - RNA, 19 nt, Artificial Sequence
  Description of Artificial Sequence: Synthetic oligonucleotide
uggucacgcugaucucagg

SEQ ID NO: 660432 - RNA, 19 nt, Artificial Sequence
  Description of Artificial Sequence: Synthetic oligonucleotide
acuuaaugucagggaacug

SEQ ID NO: 660433 - RNA, 19 nt, Artificial Sequence
  Description of Artificial Sequence: Synthetic oligonucleotide
ucgggcucauauaccuccu

SEQ ID NO: 660434 - RNA, 19 nt, Artificial Sequence
  Description of Artificial Sequence: Synthetic oligonucleotide
gcgagcgcggauaauggcg

SEQ ID NO: 660435 - RNA, 19 nt, Artificial Sequence
  Description of Artificial Sequence: Synthetic oligonucleotide
cuggacggcucuuuggaaa

SEQ ID NO: 660436 - RNA, 19 nt, Artificial Sequence
  Description of Artificial Sequence: Synthetic oligonucleotide
uaggugcggagauccuucu

SEQ ID NO: 660437 - RNA, 19 nt, Artificial Sequence
  Description of Artificial Sequence: Synthetic oligonucleotide
cacuccccaauuucccgac

SEQ ID NO: 660438 - RNA, 19 nt, Artificial Sequence
  Description of Artificial Sequence: Synthetic oligonucleotide
cucgcccggagcgagcgcg

SEQ ID NO: 660439 - RNA, 19 nt, Artificial Sequence
  Description of Artificial Sequence: Synthetic oligonucleotide
uguugcucccauguugcuu

SEQ ID NO: 660440 - RNA, 19 nt, Artificial Sequence
  Description of Artificial Sequence: Synthetic oligonucleotide
agugcuccacuccccaauu

SEQ ID NO: 660441 - RNA, 19 nt, Artificial Sequence
  Description of Artificial Sequence: Synthetic oligonucleotide
cucgugguucacucugauc

SEQ ID NO: 660442 - RNA, 19 nt, Artificial Sequence
  Description of Artificial Sequence: Synthetic oligonucleotide
guggucacgcugaucucag

SEQ ID NO: 660443 - RNA, 19 nt, Artificial Sequence
  Description of Artificial Sequence: Synthetic oligonucleotide
cucaucucuuuauggaagu

SEQ ID NO: 660444 - RNA, 19 nt, Artificial Sequence
  Description of Artificial Sequence: Synthetic oligonucleotide
gugccgggcacuaucauaa

SEQ ID NO: 660445 - RNA, 19 nt, Artificial Sequence
  Description of Artificial Sequence: Synthetic oligonucleotide
aggccacucgggcucauau

SEQ ID NO: 660446 - RNA, 19 nt, Artificial Sequence
  Description of Artificial Sequence: Synthetic oligonucleotide
caggcgcauugucacuggg

SEQ ID NO: 660447 - RNA, 19 nt, Artificial Sequence
  Description of Artificial Sequence: Synthetic oligonucleotide
ugcacccgcucagugaaau

SEQ ID NO: 660448 - RNA, 19 nt, Artificial Sequence
  Description of Artificial Sequence: Synthetic oligonucleotide
caguggccguauaaucgug

SEQ ID NO: 660449 - RNA, 19 nt, Artificial Sequence
  Description of Artificial Sequence: Synthetic oligonucleotide
uagucucauccgccuuccc

SEQ ID NO: 660450 - RNA, 19 nt, Artificial Sequence
  Description of Artificial Sequence: Synthetic oligonucleotide
ccucggaggccucugcugg

SEQ ID NO: 660451 - RNA, 19 nt, Artificial Sequence
  Description of Artificial Sequence: Synthetic oligonucleotide
caggugggccuuuccggag

SEQ ID NO: 660452 - RNA, 19 nt, Artificial Sequence
  Description of Artificial Sequence: Synthetic oligonucleotide
gcacgaccaagcaucaggc

SEQ ID NO: 660453 - RNA, 19 nt, Artificial Sequence
  Description of Artificial Sequence: Synthetic oligonucleotide
uggcaaugcgugacuuaau

SEQ ID NO: 660454 - RNA, 19 nt, Artificial Sequence
  Description of Artificial Sequence: Synthetic oligonucleotide
acggcucuuuggaaaacca

SEQ ID NO: 660455 - RNA, 19 nt, Artificial Sequence
  Description of Artificial Sequence: Synthetic oligonucleotide
aggugcggagauccuucug

SEQ ID NO: 660456 - RNA, 19 nt, Artificial Sequence
  Description of Artificial Sequence: Synthetic oligonucleotide
uggcgaucuuccccgccgu

SEQ ID NO: 660457 - RNA, 19 nt, Artificial Sequence
  Description of Artificial Sequence: Synthetic oligonucleotide
cacucgggcucauauaccu

SEQ ID NO: 660458 - RNA, 19 nt, Artificial Sequence
  Description of Artificial Sequence: Synthetic oligonucleotide
gcggcgguggcucugcgcc

SEQ ID NO: 660459 - RNA, 19 nt, Artificial Sequence
  Description of Artificial Sequence: Synthetic oligonucleotide
agcgcccagucccacugcu

SEQ ID NO: 660460 - RNA, 19 nt, Artificial Sequence
  Description of Artificial Sequence: Synthetic oligonucleotide
gcagagcgggaccaggcug

SEQ ID NO: 660461 - RNA, 19 nt, Artificial Sequence
  Description of Artificial Sequence: Synthetic oligonucleotide
cgaccaagcaucaggcaag

SEQ ID NO: 660462 - RNA, 19 nt, Artificial Sequence
  Description of Artificial Sequence: Synthetic oligonucleotide
gccguauaaucgugcuggg

SEQ ID NO: 660463 - RNA, 19 nt, Artificial Sequence
  Description of Artificial Sequence: Synthetic oligonucleotide
gcgccauucacaguugcug

SEQ ID NO: 660464 - RNA, 19 nt, Artificial Sequence
  Description of Artificial Sequence: Synthetic oligonucleotide
ucuguacguugcuggcgau

SEQ ID NO: 660465 - RNA, 19 nt, Artificial Sequence
  Description of Artificial Sequence: Synthetic oligonucleotide
guauaaucgugcugggcuu

SEQ ID NO: 660466 - RNA, 19 nt, Artificial Sequence
  Description of Artificial Sequence: Synthetic oligonucleotide
ggcuggacggcucuuugga

SEQ ID NO: 660467 - RNA, 19 nt, Artificial Sequence
  Description of Artificial Sequence: Synthetic oligonucleotide
agguucugauugagcuuac

SEQ ID NO: 660468 - RNA, 19 nt, Artificial Sequence
  Description of Artificial Sequence: Synthetic oligonucleotide
uaaucgugcugggcuugca

SEQ ID NO: 660469 - RNA, 19 nt, Artificial Sequence
  Description of Artificial Sequence: Synthetic oligonucleotide
ucacucccaugagccagcc

SEQ ID NO: 660470 - RNA, 19 nt, Artificial Sequence
  Description of Artificial Sequence: Synthetic oligonucleotide
ucgcccggagcgagcgcgg

SEQ ID NO: 660471 - RNA, 19 nt, Artificial Sequence
  Description of Artificial Sequence: Synthetic oligonucleotide
ggcgcauugucacugggcu

SEQ ID NO: 660472 - RNA, 19 nt, Artificial Sequence
  Description of Artificial Sequence: Synthetic oligonucleotide
cccgguggcacgaccaagc

SEQ ID NO: 660473 - RNA, 19 nt, Artificial Sequence
  Description of Artificial Sequence: Synthetic oligonucleotide
ccgcucagugaaauucucc

SEQ ID NO: 660474 - RNA, 19 nt, Artificial Sequence
  Description of Artificial Sequence: Synthetic oligonucleotide
cuuggcaaugcgugacuua

SEQ ID NO: 660475 - RNA, 19 nt, Artificial Sequence
  Description of Artificial Sequence: Synthetic oligonucleotide
cguauaaucgugcugggcu

SEQ ID NO: 660476 - RNA, 19 nt, Artificial Sequence
  Description of Artificial Sequence: Synthetic oligonucleotide
aucaggcaagugcggcggu

SEQ ID NO: 660477 - RNA, 19 nt, Artificial Sequence
  Description of Artificial Sequence: Synthetic oligonucleotide
agacacucacucagcuucu

SEQ ID NO: 660478 - RNA, 19 nt, Artificial Sequence
  Description of Artificial Sequence: Synthetic oligonucleotide
ggaggcuucgugcauggcu

SEQ ID NO: 660479 - RNA, 19 nt, Artificial Sequence
  Description of Artificial Sequence: Synthetic oligonucleotide
agggcucuuguucccuuuu

SEQ ID NO: 660480 - RNA, 19 nt, Artificial Sequence
  Description of Artificial Sequence: Synthetic oligonucleotide
uggcaccaggugaggcccc

SEQ ID NO: 660481 - RNA, 19 nt, Artificial Sequence
  Description of Artificial Sequence: Synthetic oligonucleotide
cacggcgccauucacaguu

SEQ ID NO: 660482 - RNA, 19 nt, Artificial Sequence
  Description of Artificial Sequence: Synthetic oligonucleotide
cucugcgccccaagcccgc

SEQ ID NO: 660483 - RNA, 19 nt, Artificial Sequence
  Description of Artificial Sequence: Synthetic oligonucleotide
cgagcgcggauaauggcgc

SEQ ID NO: 660484 - RNA, 19 nt, Artificial Sequence
  Description of Artificial Sequence: Synthetic oligonucleotide
uggcgcaaggaggccgugc

SEQ ID NO: 660485 - RNA, 19 nt, Artificial Sequence
  Description of Artificial Sequence: Synthetic oligonucleotide
cuguacguugcuggcgauc

SEQ ID NO: 660486 - RNA, 19 nt, Artificial Sequence
  Description of Artificial Sequence: Synthetic oligonucleotide
guggccguauaaucgugcu

SEQ ID NO: 660487 - RNA, 19 nt, Artificial Sequence
  Description of Artificial Sequence: Synthetic oligonucleotide
gaagacgccccggcauuuc

SEQ ID NO: 660488 - RNA, 19 nt, Artificial Sequence
  Description of Artificial Sequence: Synthetic oligonucleotide
cucugaucucagggguagc

SEQ ID NO: 660489 - RNA, 19 nt, Artificial Sequence
  Description of Artificial Sequence: Synthetic oligonucleotide
ccccgcuuggcaaugcgug

SEQ ID NO: 660490 - RNA, 19 nt, Artificial Sequence
  Description of Artificial Sequence: Synthetic oligonucleotide
cagacccgcgaugcucugg

SEQ ID NO: 660491 - RNA, 19 nt, Artificial Sequence
  Description of Artificial Sequence: Synthetic oligonucleotide
gaggcuucgugcauggcuu

SEQ ID NO: 660492 - RNA, 19 nt, Artificial Sequence
  Description of Artificial Sequence: Synthetic oligonucleotide
ggcgguuugaagagacuca

SEQ ID NO: 660493 - RNA, 19 nt, Artificial Sequence
  Description of Artificial Sequence: Synthetic oligonucleotide
augcgggcaccaggaacuc

SEQ ID NO: 660494 - RNA, 19 nt, Artificial Sequence
  Description of Artificial Sequence: Synthetic oligonucleotide
gcaagugcggcgguggcuc

SEQ ID NO: 660495 - RNA, 19 nt, Artificial Sequence
  Description of Artificial Sequence: Synthetic oligonucleotide
gugguaguccauccauagu

SEQ ID NO: 660496 - RNA, 19 nt, Artificial Sequence
  Description of Artificial Sequence: Synthetic oligonucleotide
gagcgcggauaauggcgca

SEQ ID NO: 660497 - RNA, 19 nt, Artificial Sequence
  Description of Artificial Sequence: Synthetic oligonucleotide
ggucauuguucucugcaau

SEQ ID NO: 660498 - RNA, 19 nt, Artificial Sequence
  Description of Artificial Sequence: Synthetic oligonucleotide
cugcccgguggcacgacca

SEQ ID NO: 660499 - RNA, 19 nt, Artificial Sequence
  Description of Artificial Sequence: Synthetic oligonucleotide
auaguggugccgggcacua

SEQ ID NO: 660500 - RNA, 19 nt, Artificial Sequence
  Description of Artificial Sequence: Synthetic oligonucleotide
gcggauaauggcgcaagga

SEQ ID NO: 660501 - RNA, 19 nt, Artificial Sequence
  Description of Artificial Sequence: Synthetic oligonucleotide
caucgcggcgccggccucg

SEQ ID NO: 660502 - RNA, 19 nt, Artificial Sequence
  Description of Artificial Sequence: Synthetic oligonucleotide
gcucuuuggaaaaccaccu

SEQ ID NO: 660503 - RNA, 19 nt, Artificial Sequence
  Description of Artificial Sequence: Synthetic oligonucleotide
gcugcuuauugaaguucug

SEQ ID NO: 660504 - RNA, 19 nt, Artificial Sequence
  Description of Artificial Sequence: Synthetic oligonucleotide
gccgggcacuaucauaauc

SEQ ID NO: 660505 - RNA, 19 nt, Artificial Sequence
  Description of Artificial Sequence: Synthetic oligonucleotide
cauauaccuccuggagaca

SEQ ID NO: 660506 - RNA, 19 nt, Artificial Sequence
  Description of Artificial Sequence: Synthetic oligonucleotide
cagggacaaaugcgucauc

SEQ ID NO: 660507 - RNA, 19 nt, Artificial Sequence
  Description of Artificial Sequence: Synthetic oligonucleotide
agcacacggguggucugca

SEQ ID NO: 660508 - RNA, 19 nt, Artificial Sequence
  Description of Artificial Sequence: Synthetic oligonucleotide
gaacugggcuggacggcuc

SEQ ID NO: 660509 - RNA, 19 nt, Artificial Sequence
  Description of Artificial Sequence: Synthetic oligonucleotide
gcucugcgccccaagcccg

SEQ ID NO: 660510 - RNA, 19 nt, Artificial Sequence
  Description of Artificial Sequence: Synthetic oligonucleotide
ucugcgccccaagcccgcc

SEQ ID NO: 660511 - RNA, 19 nt, Artificial Sequence
  Description of Artificial Sequence: Synthetic oligonucleotide
ccguauaaucgugcugggc

SEQ ID NO: 660512 - RNA, 19 nt, Artificial Sequence
  Description of Artificial Sequence: Synthetic oligonucleotide
ggugccgggcacuaucaua

SEQ ID NO: 660513 - RNA, 19 nt, Artificial Sequence
  Description of Artificial Sequence: Synthetic oligonucleotide
gcgcauugucacugggcug

SEQ ID NO: 660514 - RNA, 19 nt, Artificial Sequence
  Description of Artificial Sequence: Synthetic oligonucleotide
gugaagguguugcucccau

SEQ ID NO: 660515 - RNA, 19 nt, Artificial Sequence
  Description of Artificial Sequence: Synthetic oligonucleotide
ugccgggcacuaucauaau

SEQ ID NO: 660516 - RNA, 19 nt, Artificial Sequence
  Description of Artificial Sequence: Synthetic oligonucleotide
gugucaguggccguauaau

SEQ ID NO: 660517 - RNA, 19 nt, Artificial Sequence
  Description of Artificial Sequence: Synthetic oligonucleotide
agcgcggauaauggcgcaa

SEQ ID NO: 660518 - RNA, 19 nt, Artificial Sequence
  Description of Artificial Sequence: Synthetic oligonucleotide
gggaacgccucuuggcuua

SEQ ID NO: 660519 - RNA, 19 nt, Artificial Sequence
  Description of Artificial Sequence: Synthetic oligonucleotide
aggcuucgugcauggcuuu

SEQ ID NO: 660520 - RNA, 19 nt, Artificial Sequence
  Description of Artificial Sequence: Synthetic oligonucleotide
gcgcggauaauggcgcaag

SEQ ID NO: 660521 - RNA, 19 nt, Artificial Sequence
  Description of Artificial Sequence: Synthetic oligonucleotide
cacggcuguuccacaggga

SEQ ID NO: 660522 - RNA, 19 nt, Artificial Sequence
  Description of Artificial Sequence: Synthetic oligonucleotide
caccagccugggcucuggc

SEQ ID NO: 660523 - RNA, 19 nt, Artificial Sequence
  Description of Artificial Sequence: Synthetic oligonucleotide
ggggcucugccauccguca

SEQ ID NO: 660524 - RNA, 19 nt, Artificial Sequence
  Description of Artificial Sequence: Synthetic oligonucleotide
acgccccggcauuucucca

SEQ ID NO: 660525 - RNA, 19 nt, Artificial Sequence
  Description of Artificial Sequence: Synthetic oligonucleotide
cuaggcugaccaggacguc

SEQ ID NO: 660526 - RNA, 19 nt, Artificial Sequence
  Description of Artificial Sequence: Synthetic oligonucleotide
cugcgccccaagcccgccc

SEQ ID NO: 660527 - RNA, 19 nt, Artificial Sequence
  Description of Artificial Sequence: Synthetic oligonucleotide
gcgcucccagccuccagcc

SEQ ID NO: 660528 - RNA, 19 nt, Artificial Sequence
  Description of Artificial Sequence: Synthetic oligonucleotide
cacuggccgcugucucccc

SEQ ID NO: 660529 - RNA, 19 nt, Artificial Sequence
  Description of Artificial Sequence: Synthetic oligonucleotide
ggccggcucuggcucgugg

SEQ ID NO: 660530 - RNA, 19 nt, Artificial Sequence
  Description of Artificial Sequence: Synthetic oligonucleotide
cauaguggugccgggcacu

SEQ ID NO: 660531 - RNA, 19 nt, Artificial Sequence
  Description of Artificial Sequence: Synthetic oligonucleotide
gccccggcauuucuccagc

SEQ ID NO: 660532 - RNA, 19 nt, Artificial Sequence
  Description of Artificial Sequence: Synthetic oligonucleotide
gccucgcccggagcgagcg

SEQ ID NO: 660533 - RNA, 19 nt, Artificial Sequence
  Description of Artificial Sequence: Synthetic oligonucleotide
ccacuccccaauuucccga

SEQ ID NO: 660534 - RNA, 19 nt, Artificial Sequence
  Description of Artificial Sequence: Synthetic oligonucleotide
cgcggauaauggcgcaagg

SEQ ID NO: 660535 - RNA, 19 nt, Artificial Sequence
  Description of Artificial Sequence: Synthetic oligonucleotide
acggcgccauucacaguug

SEQ ID NO: 660536 - RNA, 19 nt, Artificial Sequence
  Description of Artificial Sequence: Synthetic oligonucleotide
cgugguucacucugaucuc

SEQ ID NO: 660537 - RNA, 19 nt, Artificial Sequence
  Description of Artificial Sequence: Synthetic oligonucleotide
gcacacggguggucugcag

SEQ ID NO: 660538 - RNA, 19 nt, Artificial Sequence
  Description of Artificial Sequence: Synthetic oligonucleotide
gugcggcgguggcucugcg

SEQ ID NO: 660539 - RNA, 19 nt, Artificial Sequence
  Description of Artificial Sequence: Synthetic oligonucleotide
gcuggacggcucuuuggaa

SEQ ID NO: 660540 - RNA, 19 nt, Artificial Sequence
  Description of Artificial Sequence: Synthetic oligonucleotide
ccgacacuuuucaagaguu

SEQ ID NO: 660541 - RNA, 19 nt, Artificial Sequence
  Description of Artificial Sequence: Synthetic oligonucleotide
ggaacgccucuuggcuuag

SEQ ID NO: 660542 - RNA, 19 nt, Artificial Sequence
  Description of Artificial Sequence: Synthetic oligonucleotide
ccgcuuggcaaugcgugac

SEQ ID NO: 660543 - RNA, 19 nt, Artificial Sequence
  Description of Artificial Sequence: Synthetic oligonucleotide
agcccgcccugaacaugcg

SEQ ID NO: 660544 - RNA, 19 nt, Artificial Sequence
  Description of Artificial Sequence: Synthetic oligonucleotide
gucacugcacccgcucagu

SEQ ID NO: 660545 - RNA, 19 nt, Artificial Sequence
  Description of Artificial Sequence: Synthetic oligonucleotide
ggacggcucuuuggaaaac

SEQ ID NO: 660546 - RNA, 19 nt, Artificial Sequence
  Description of Artificial Sequence: Synthetic oligonucleotide
gcgcaaggaggccgugcgc

SEQ ID NO: 660547 - RNA, 19 nt, Artificial Sequence
  Description of Artificial Sequence: Synthetic oligonucleotide
uaguggugccgggcacuau

SEQ ID NO: 660548 - RNA, 19 nt, Artificial Sequence
  Description of Artificial Sequence: Synthetic oligonucleotide
gggcauguccaagcgccca

SEQ ID NO: 660549 - RNA, 19 nt, Artificial Sequence
  Description of Artificial Sequence: Synthetic oligonucleotide
cacacaccggaaggcugca

SEQ ID NO: 660550 - RNA, 19 nt, Artificial Sequence
  Description of Artificial Sequence: Synthetic oligonucleotide
cuggcucgugguucacucu

SEQ ID NO: 660551 - RNA, 19 nt, Artificial Sequence
  Description of Artificial Sequence: Synthetic oligonucleotide
auccgucacugcacccgcu

SEQ ID NO: 660552 - RNA, 19 nt, Artificial Sequence
  Description of Artificial Sequence: Synthetic oligonucleotide
gcucuuugugcugguucca

SEQ ID NO: 660553 - RNA, 19 nt, Artificial Sequence
  Description of Artificial Sequence: Synthetic oligonucleotide
cccgacacuuuucaagagu

SEQ ID NO: 660554 - RNA, 19 nt, Artificial Sequence
  Description of Artificial Sequence: Synthetic oligonucleotide
  modified_base (18)..(18): a, c, u, g, unknown or other
gcgaucuuccccgccguna

SEQ ID NO: 660555 - RNA, 19 nt, Artificial Sequence
  Description of Artificial Sequence: Synthetic oligonucleotide
cucugccaucgcggcgccg

SEQ ID NO: 660556 - RNA, 19 nt, Artificial Sequence
  Description of Artificial Sequence: Synthetic oligonucleotide
gggcuugcaccuugaacau

SEQ ID NO: 660557 - RNA, 19 nt, Artificial Sequence
  Description of Artificial Sequence: Synthetic oligonucleotide
caagcccugcccgguggca

SEQ ID NO: 660558 - RNA, 19 nt, Artificial Sequence
  Description of Artificial Sequence: Synthetic oligonucleotide
cccgcuuggcaaugcguga

SEQ ID NO: 660559 - RNA, 19 nt, Artificial Sequence
  Description of Artificial Sequence: Synthetic oligonucleotide
ggaggccgugcgcgccgcg

SEQ ID NO: 660560 - RNA, 19 nt, Artificial Sequence
  Description of Artificial Sequence: Synthetic oligonucleotide
caccaggugaggccccacu

SEQ ID NO: 660561 - RNA, 19 nt, Artificial Sequence
  Description of Artificial Sequence: Synthetic oligonucleotide
acugggcuggacggcucuu

SEQ ID NO: 660562 - RNA, 19 nt, Artificial Sequence
  Description of Artificial Sequence: Synthetic oligonucleotide
gguucugauugagcuuacu

SEQ ID NO: 660563 - RNA, 19 nt, Artificial Sequence
  Description of Artificial Sequence: Synthetic oligonucleotide
gcccgguggcacgaccaag

SEQ ID NO: 660564 - RNA, 19 nt, Artificial Sequence
  Description of Artificial Sequence: Synthetic oligonucleotide
cuccacccaccaccucgga

SEQ ID NO: 660565 - RNA, 19 nt, Artificial Sequence
  Description of Artificial Sequence: Synthetic oligonucleotide
cggcgccauucacaguugc

SEQ ID NO: 660566 - RNA, 19 nt, Artificial Sequence
  Description of Artificial Sequence: Synthetic oligonucleotide
uggccggcucuggcucgug

SEQ ID NO: 660567 - RNA, 19 nt, Artificial Sequence
  Description of Artificial Sequence: Synthetic oligonucleotide
gccuuuccggagcugggau

SEQ ID NO: 660568 - RNA, 19 nt, Artificial Sequence
  Description of Artificial Sequence: Synthetic oligonucleotide
ggggaacgccucuuggcuu

SEQ ID NO: 660569 - RNA, 19 nt, Artificial Sequence
  Description of Artificial Sequence: Synthetic oligonucleotide
cugcacccgcucagugaaa

SEQ ID NO: 660570 - RNA, 19 nt, Artificial Sequence
  Description of Artificial Sequence: Synthetic oligonucleotide
ccagacccgcgaugcucug

SEQ ID NO: 660571 - RNA, 19 nt, Artificial Sequence
  Description of Artificial Sequence: Synthetic oligonucleotide
gcugccguccacggcgcca

SEQ ID NO: 660572 - RNA, 19 nt, Artificial Sequence
  Description of Artificial Sequence: Synthetic oligonucleotide
ccgguggcacgaccaagca

SEQ ID NO: 660573 - RNA, 19 nt, Artificial Sequence
  Description of Artificial Sequence: Synthetic oligonucleotide
ggcgccauucacaguugcu

SEQ ID NO: 660574 - RNA, 19 nt, Artificial Sequence
  Description of Artificial Sequence: Synthetic oligonucleotide
  modified_base (19)..(19): a, c, u, g, unknown or other
ggcgaucuuccccgccgun

SEQ ID NO: 660575 - RNA, 19 nt, Artificial Sequence
  Description of Artificial Sequence: Synthetic oligonucleotide
gcucgugguucacucugau

SEQ ID NO: 660576 - RNA, 19 nt, Artificial Sequence
  Description of Artificial Sequence: Synthetic oligonucleotide
cucauccgccuuccccagu

SEQ ID NO: 660577 - RNA, 19 nt, Artificial Sequence
  Description of Artificial Sequence: Synthetic oligonucleotide
gccggcucuggcucguggu

SEQ ID NO: 660578 - RNA, 19 nt, Artificial Sequence
  Description of Artificial Sequence: Synthetic oligonucleotide
guacguugcuggcgaucuu

SEQ ID NO: 660579 - RNA, 19 nt, Artificial Sequence
  Description of Artificial Sequence: Synthetic oligonucleotide
gaacgccucuuggcuuagu

SEQ ID NO: 660580 - RNA, 19 nt, Artificial Sequence
  Description of Artificial Sequence: Synthetic oligonucleotide
gcgcccagucccacugcug

SEQ ID NO: 660581 - RNA, 19 nt, Artificial Sequence
  Description of Artificial Sequence: Synthetic oligonucleotide
ccacccacggcagcugcca

SEQ ID NO: 660582 - RNA, 19 nt, Artificial Sequence
  Description of Artificial Sequence: Synthetic oligonucleotide
ggcaagugcggcgguggcu

SEQ ID NO: 660583 - RNA, 19 nt, Artificial Sequence
  Description of Artificial Sequence: Synthetic oligonucleotide
ggcuucgugcauggcuuua

SEQ ID NO: 660584 - RNA, 19 nt, Artificial Sequence
  Description of Artificial Sequence: Synthetic oligonucleotide
cggccgcuccaccagccug

SEQ ID NO: 660585 - RNA, 19 nt, Artificial Sequence
  Description of Artificial Sequence: Synthetic oligonucleotide
cacucccaugagccagccu

SEQ ID NO: 660586 - RNA, 19 nt, Artificial Sequence
  Description of Artificial Sequence: Synthetic oligonucleotide
ccccaauuucccgacacuu

SEQ ID NO: 660587 - RNA, 19 nt, Artificial Sequence
  Description of Artificial Sequence: Synthetic oligonucleotide
ggaagacgccccggcauuu

SEQ ID NO: 660588 - RNA, 19 nt, Artificial Sequence
  Description of Artificial Sequence: Synthetic oligonucleotide
cauccgccuuccccaguuu

SEQ ID NO: 660589 - RNA, 19 nt, Artificial Sequence
  Description of Artificial Sequence: Synthetic oligonucleotide
cccggagcgagcgcggaua

SEQ ID NO: 660590 - RNA, 19 nt, Artificial Sequence
  Description of Artificial Sequence: Synthetic oligonucleotide
ccaagcccgcccugaacau

SEQ ID NO: 660591 - RNA, 19 nt, Artificial Sequence
  Description of Artificial Sequence: Synthetic oligonucleotide
ccauccauaguaggucauu

SEQ ID NO: 660592 - RNA, 19 nt, Artificial Sequence
  Description of Artificial Sequence: Synthetic oligonucleotide
cgacacuuuucaagaguuu

SEQ ID NO: 660593 - RNA, 19 nt, Artificial Sequence
  Description of Artificial Sequence: Synthetic oligonucleotide
cgggaagacgccccggcau

SEQ ID NO: 660594 - RNA, 19 nt, Artificial Sequence
  Description of Artificial Sequence: Synthetic oligonucleotide
gcccugcccgguggcacga

SEQ ID NO: 660595 - RNA, 19 nt, Artificial Sequence
  Description of Artificial Sequence: Synthetic oligonucleotide
ccccggcauuucuccagcu

SEQ ID NO: 660596 - RNA, 19 nt, Artificial Sequence
  Description of Artificial Sequence: Synthetic oligonucleotide
gcccggagcgagcgcggau

SEQ ID NO: 660597 - RNA, 19 nt, Artificial Sequence
  Description of Artificial Sequence: Synthetic oligonucleotide
ccaggacgucauugagguu

SEQ ID NO: 660598 - RNA, 19 nt, Artificial Sequence
  Description of Artificial Sequence: Synthetic oligonucleotide
aaaagguagagccaaacag

SEQ ID NO: 660599 - RNA, 19 nt, Artificial Sequence
  Description of Artificial Sequence: Synthetic oligonucleotide
aaguuuacacagcaagccc

SEQ ID NO: 660600 - RNA, 19 nt, Artificial Sequence
  Description of Artificial Sequence: Synthetic oligonucleotide
auuuuaacgaggcaguguc

SEQ ID NO: 660601 - RNA, 19 nt, Artificial Sequence
  Description of Artificial Sequence: Synthetic oligonucleotide
aaacauuucaaggagauau

SEQ ID NO: 660602 - RNA, 19 nt, Artificial Sequence
  Description of Artificial Sequence: Synthetic oligonucleotide
aaugccguauuuuaacgag

SEQ ID NO: 660603 - RNA, 19 nt, Artificial Sequence
  Description of Artificial Sequence: Synthetic oligonucleotide
ugcauaaacauuucaagga

SEQ ID NO: 660604 - RNA, 19 nt, Artificial Sequence
  Description of Artificial Sequence: Synthetic oligonucleotide
gguagagccaaacagaagg

SEQ ID NO: 660605 - RNA, 19 nt, Artificial Sequence
  Description of Artificial Sequence: Synthetic oligonucleotide
aagaaaccgaugucgcugc

SEQ ID NO: 660606 - RNA, 19 nt, Artificial Sequence
  Description of Artificial Sequence: Synthetic oligonucleotide
aauauucccaaggccagcc

SEQ ID NO: 660607 - RNA, 19 nt, Artificial Sequence
  Description of Artificial Sequence: Synthetic oligonucleotide
gacuaaguggguuucauug

SEQ ID NO: 660608 - RNA, 19 nt, Artificial Sequence
  Description of Artificial Sequence: Synthetic oligonucleotide
auauaggaagcauuucuac

SEQ ID NO: 660609 - RNA, 19 nt, Artificial Sequence
  Description of Artificial Sequence: Synthetic oligonucleotide
uccuagaaaagcaagcucu

SEQ ID NO: 660610 - RNA, 19 nt, Artificial Sequence
  Description of Artificial Sequence: Synthetic oligonucleotide
aaaguaaccagguccucag

SEQ ID NO: 660611 - RNA, 19 nt, Artificial Sequence
  Description of Artificial Sequence: Synthetic oligonucleotide
gaaaucauagcgcuugaug

SEQ ID NO: 660612 - RNA, 19 nt, Artificial Sequence
  Description of Artificial Sequence: Synthetic oligonucleotide
auacaggucaaagagucgc

SEQ ID NO: 660613 - RNA, 19 nt, Artificial Sequence
  Description of Artificial Sequence: Synthetic oligonucleotide
ucaaacuauacagugugag

SEQ ID NO: 660614 - RNA, 19 nt, Artificial Sequence
  Description of Artificial Sequence: Synthetic oligonucleotide
aucgccugaguccaguucc

SEQ ID NO: 660615 - RNA, 19 nt, Artificial Sequence
  Description of Artificial Sequence: Synthetic oligonucleotide
uugacuuuugcuuuaugga

SEQ ID NO: 660616 - RNA, 19 nt, Artificial Sequence
  Description of Artificial Sequence: Synthetic oligonucleotide
auccucaacauccucuagc

SEQ ID NO: 660617 - RNA, 19 nt, Artificial Sequence
  Description of Artificial Sequence: Synthetic oligonucleotide
ucaaggagauauaggaagc

SEQ ID NO: 660618 - RNA, 19 nt, Artificial Sequence
  Description of Artificial Sequence: Synthetic oligonucleotide
uguuuuguuggguuaaacu

SEQ ID NO: 660619 - RNA, 19 nt, Artificial Sequence
  Description of Artificial Sequence: Synthetic oligonucleotide
aguuuacacagcaagcccc

SEQ ID NO: 660620 - RNA, 19 nt, Artificial Sequence
  Description of Artificial Sequence: Synthetic oligonucleotide
acaaugccguauuuuaacg

SEQ ID NO: 660621 - RNA, 19 nt, Artificial Sequence
  Description of Artificial Sequence: Synthetic oligonucleotide
gaaaccaacuuccucaguc

SEQ ID NO: 660622 - RNA, 19 nt, Artificial Sequence
  Description of Artificial Sequence: Synthetic oligonucleotide
uuggguuaaacuucugcag

SEQ ID NO: 660623 - RNA, 19 nt, Artificial Sequence
  Description of Artificial Sequence: Synthetic oligonucleotide
agucagccgaauuuccucc

SEQ ID NO: 660624 - RNA, 19 nt, Artificial Sequence
  Description of Artificial Sequence: Synthetic oligonucleotide
uggguuaaacuucugcagc

SEQ ID NO: 660625 - RNA, 19 nt, Artificial Sequence
  Description of Artificial Sequence: Synthetic oligonucleotide
cucaacauccucuagccac

SEQ ID NO: 660626 - RNA, 19 nt, Artificial Sequence
  Description of Artificial Sequence: Synthetic oligonucleotide
acagcuugcagcuugggca

SEQ ID NO: 660627 - RNA, 19 nt, Artificial Sequence
  Description of Artificial Sequence: Synthetic oligonucleotide
gaaggaaaaguucugaagu

SEQ ID NO: 660628 - RNA, 19 nt, Artificial Sequence
  Description of Artificial Sequence: Synthetic oligonucleotide
uauaggaagcauuucuacu

SEQ ID NO: 660629 - RNA, 19 nt, Artificial Sequence
  Description of Artificial Sequence: Synthetic oligonucleotide
agaaaagcaagcucugugu

SEQ ID NO: 660630 - RNA, 19 nt, Artificial Sequence
  Description of Artificial Sequence: Synthetic oligonucleotide
aaggaucuggacaggaugg

SEQ ID NO: 660631 - RNA, 19 nt, Artificial Sequence
  Description of Artificial Sequence: Synthetic oligonucleotide
caacugauuuuccugagag

SEQ ID NO: 660632 - RNA, 19 nt, Artificial Sequence
  Description of Artificial Sequence: Synthetic oligonucleotide
acuucgaacugaugaauuc

SEQ ID NO: 660633 - RNA, 19 nt, Artificial Sequence
  Description of Artificial Sequence: Synthetic oligonucleotide
ugggcauugauggaagugg

SEQ ID NO: 660634 - RNA, 19 nt, Artificial Sequence
  Description of Artificial Sequence: Synthetic oligonucleotide
ggucaauuggcuuugacac

SEQ ID NO: 660635 - RNA, 19 nt, Artificial Sequence
  Description of Artificial Sequence: Synthetic oligonucleotide
aguaaccagguccucagag

SEQ ID NO: 660636 - RNA, 19 nt, Artificial Sequence
  Description of Artificial Sequence: Synthetic oligonucleotide
ucuagcgcugccaaagagc

SEQ ID NO: 660637 - RNA, 19 nt, Artificial Sequence
  Description of Artificial Sequence: Synthetic oligonucleotide
aaagaucuguaguugggau

SEQ ID NO: 660638 - RNA, 19 nt, Artificial Sequence
  Description of Artificial Sequence: Synthetic oligonucleotide
aaaccgaugucgcugcgug

SEQ ID NO: 660639 - RNA, 19 nt, Artificial Sequence
  Description of Artificial Sequence: Synthetic oligonucleotide
ucaacagucagccgaauuu

SEQ ID NO: 660640 - RNA, 19 nt, Artificial Sequence
  Description of Artificial Sequence: Synthetic oligonucleotide
uucuccuauggcaugguug

SEQ ID NO: 660641 - RNA, 19 nt, Artificial Sequence
  Description of Artificial Sequence: Synthetic oligonucleotide
uuaucgcuggccuugucag

SEQ ID NO: 660642 - RNA, 19 nt, Artificial Sequence
  Description of Artificial Sequence: Synthetic oligonucleotide
agaucuguaguugggauag

SEQ ID NO: 660643 - RNA, 19 nt, Artificial Sequence
  Description of Artificial Sequence: Synthetic oligonucleotide
ugacuuuugcuuuauggaa

SEQ ID NO: 660644 - RNA, 19 nt, Artificial Sequence
  Description of Artificial Sequence: Synthetic oligonucleotide
caaugagaggucaauuggc

SEQ ID NO: 660645 - RNA, 19 nt, Artificial Sequence
  Description of Artificial Sequence: Synthetic oligonucleotide
uccucaacauccucuagcc

SEQ ID NO: 660646 - RNA, 19 nt, Artificial Sequence
  Description of Artificial Sequence: Synthetic oligonucleotide
ugccguauuuuaacgaggc

SEQ ID NO: 660647 - RNA, 19 nt, Artificial Sequence
  Description of Artificial Sequence: Synthetic oligonucleotide
agcgcugccaaagagcccc

SEQ ID NO: 660648 - RNA, 19 nt, Artificial Sequence
  Description of Artificial Sequence: Synthetic oligonucleotide
agauugacaaguuccugug

SEQ ID NO: 660649 - RNA, 19 nt, Artificial Sequence
  Description of Artificial Sequence: Synthetic oligonucleotide
accuucgucaaacaggagu

SEQ ID NO: 660650 - RNA, 19 nt, Artificial Sequence
  Description of Artificial Sequence: Synthetic oligonucleotide
auaggcuugacuuuugcuu

SEQ ID NO: 660651 - RNA, 19 nt, Artificial Sequence
  Description of Artificial Sequence: Synthetic oligonucleotide
ucugcuaccuucgucaaac

SEQ ID NO: 660652 - RNA, 19 nt, Artificial Sequence
  Description of Artificial Sequence: Synthetic oligonucleotide
guuggguuaaacuucugca

SEQ ID NO: 660653 - RNA, 19 nt, Artificial Sequence
  Description of Artificial Sequence: Synthetic oligonucleotide
uauccgugagcuccaauca

SEQ ID NO: 660654 - RNA, 19 nt, Artificial Sequence
  Description of Artificial Sequence: Synthetic oligonucleotide
ucagccggagauuagaguu

SEQ ID NO: 660655 - RNA, 19 nt, Artificial Sequence
  Description of Artificial Sequence: Synthetic oligonucleotide
uccuucgccaaugagaggu

SEQ ID NO: 660656 - RNA, 19 nt, Artificial Sequence
  Description of Artificial Sequence: Synthetic oligonucleotide
gguaucaacagucagccga

SEQ ID NO: 660657 - RNA, 19 nt, Artificial Sequence
  Description of Artificial Sequence: Synthetic oligonucleotide
uuuaacgaggcagugucac

SEQ ID NO: 660658 - RNA, 19 nt, Artificial Sequence
  Description of Artificial Sequence: Synthetic oligonucleotide
cuagccacagggcaucugg

SEQ ID NO: 660659 - RNA, 19 nt, Artificial Sequence
  Description of Artificial Sequence: Synthetic oligonucleotide
aguuccugugugcaguauc

SEQ ID NO: 660660 - RNA, 19 nt, Artificial Sequence
  Description of Artificial Sequence: Synthetic oligonucleotide
uucucuagcgcugccaaag

SEQ ID NO: 660661 - RNA, 19 nt, Artificial Sequence
  Description of Artificial Sequence: Synthetic oligonucleotide
ugugaguguuucuaagacu

SEQ ID NO: 660662 - RNA, 19 nt, Artificial Sequence
  Description of Artificial Sequence: Synthetic oligonucleotide
agugugaguguuucuaaga

SEQ ID NO: 660663 - RNA, 19 nt, Artificial Sequence
  Description of Artificial Sequence: Synthetic oligonucleotide
auaaacaaggccacugcag

SEQ ID NO: 660664 - RNA, 19 nt, Artificial Sequence
  Description of Artificial Sequence: Synthetic oligonucleotide
augagugcugaaaucauag

SEQ ID NO: 660665 - RNA, 19 nt, Artificial Sequence
  Description of Artificial Sequence: Synthetic oligonucleotide
uauacagugugaguguuuc

SEQ ID NO: 660666 - RNA, 19 nt, Artificial Sequence
  Description of Artificial Sequence: Synthetic oligonucleotide
caaagucugggaguggugg

SEQ ID NO: 660667 - RNA, 19 nt, Artificial Sequence
  Description of Artificial Sequence: Synthetic oligonucleotide
acaccaacugauuuuccug

SEQ ID NO: 660668 - RNA, 19 nt, Artificial Sequence
  Description of Artificial Sequence: Synthetic oligonucleotide
aaccucggcgucuucagga

SEQ ID NO: 660669 - RNA, 19 nt, Artificial Sequence
  Description of Artificial Sequence: Synthetic oligonucleotide
acggcuugcucuuugccuc

SEQ ID NO: 660670 - RNA, 19 nt, Artificial Sequence
  Description of Artificial Sequence: Synthetic oligonucleotide
uucgaacugaugaauucuc

SEQ ID NO: 660671 - RNA, 19 nt, Artificial Sequence
  Description of Artificial Sequence: Synthetic oligonucleotide
ugagaggucaauuggcuuu

SEQ ID NO: 660672 - RNA, 19 nt, Artificial Sequence
  Description of Artificial Sequence: Synthetic oligonucleotide
agagccaaacagaaggguc

SEQ ID NO: 660673 - RNA, 19 nt, Artificial Sequence
  Description of Artificial Sequence: Synthetic oligonucleotide
accgaugucgcugcgugcc

SEQ ID NO: 660674 - RNA, 19 nt, Artificial Sequence
  Description of Artificial Sequence: Synthetic oligonucleotide
cuaccuucgucaaacagga

SEQ ID NO: 660675 - RNA, 19 nt, Artificial Sequence
  Description of Artificial Sequence: Synthetic oligonucleotide
aagaucuguaguugggaua

SEQ ID NO: 660676 - RNA, 19 nt, Artificial Sequence
  Description of Artificial Sequence: Synthetic oligonucleotide
aagauacuuuuccucccca

SEQ ID NO: 660677 - RNA, 19 nt, Artificial Sequence
  Description of Artificial Sequence: Synthetic oligonucleotide
guauccgugagcuccaauc

SEQ ID NO: 660678 - RNA, 19 nt, Artificial Sequence
  Description of Artificial Sequence: Synthetic oligonucleotide
agauacuuuuccuccccag

SEQ ID NO: 660679 - RNA, 19 nt, Artificial Sequence
  Description of Artificial Sequence: Synthetic oligonucleotide
aaguguccaauauucccaa

SEQ ID NO: 660680 - RNA, 19 nt, Artificial Sequence
  Description of Artificial Sequence: Synthetic oligonucleotide
cauagcgcuugauguaucc

SEQ ID NO: 660681 - RNA, 19 nt, Artificial Sequence
  Description of Artificial Sequence: Synthetic oligonucleotide
aaccgaugucgcugcgugc

SEQ ID NO: 660682 - RNA, 19 nt, Artificial Sequence
  Description of Artificial Sequence: Synthetic oligonucleotide
aaagucugggagugguggu

SEQ ID NO: 660683 - RNA, 19 nt, Artificial Sequence
  Description of Artificial Sequence: Synthetic oligonucleotide
uuuuaacgaggcaguguca

SEQ ID NO: 660684 - RNA, 19 nt, Artificial Sequence
  Description of Artificial Sequence: Synthetic oligonucleotide
gugugaguguuucuaagac

SEQ ID NO: 660685 - RNA, 19 nt, Artificial Sequence
  Description of Artificial Sequence: Synthetic oligonucleotide
ucgaacugaugaauucucu

SEQ ID NO: 660686 - RNA, 19 nt, Artificial Sequence
  Description of Artificial Sequence: Synthetic oligonucleotide
aggaagcauuucuacuggg

SEQ ID NO: 660687 - RNA, 19 nt, Artificial Sequence
  Description of Artificial Sequence: Synthetic oligonucleotide
agacaaggugagcaggaug

SEQ ID NO: 660688 - RNA, 19 nt, Artificial Sequence
  Description of Artificial Sequence: Synthetic oligonucleotide
agacuagccccuaagaccu

SEQ ID NO: 660689 - RNA, 19 nt, Artificial Sequence
  Description of Artificial Sequence: Synthetic oligonucleotide
guccaauauucccaaggcc

SEQ ID NO: 660690 - RNA, 19 nt, Artificial Sequence
  Description of Artificial Sequence: Synthetic oligonucleotide
caucauuggagaaucugca

SEQ ID NO: 660691 - RNA, 19 nt, Artificial Sequence
  Description of Artificial Sequence: Synthetic oligonucleotide
auagggccccacuucgaac

SEQ ID NO: 660692 - RNA, 19 nt, Artificial Sequence
  Description of Artificial Sequence: Synthetic oligonucleotide
ugggaguggugguaccugg

SEQ ID NO: 660693 - RNA, 19 nt, Artificial Sequence
  Description of Artificial Sequence: Synthetic oligonucleotide
gaaaguaaccagguccuca

SEQ ID NO: 660694 - RNA, 19 nt, Artificial Sequence
  Description of Artificial Sequence: Synthetic oligonucleotide
ccucuaagagacuagcccc

SEQ ID NO: 660695 - RNA, 19 nt, Artificial Sequence
  Description of Artificial Sequence: Synthetic oligonucleotide
auuagaguugguucugcua

SEQ ID NO: 660696 - RNA, 19 nt, Artificial Sequence
  Description of Artificial Sequence: Synthetic oligonucleotide
uagggccccacuucgaacu

SEQ ID NO: 660697 - RNA, 19 nt, Artificial Sequence
  Description of Artificial Sequence: Synthetic oligonucleotide
uuaaugccucugaggagca

SEQ ID NO: 660698 - RNA, 19 nt, Artificial Sequence
  Description of Artificial Sequence: Synthetic oligonucleotide
ucagagcaggucaaacuau

SEQ ID NO: 660699 - RNA, 19 nt, Artificial Sequence
  Description of Artificial Sequence: Synthetic oligonucleotide
gagcaggucaaacuauaca

SEQ ID NO: 660700 - RNA, 19 nt, Artificial Sequence
  Description of Artificial Sequence: Synthetic oligonucleotide
gcuuuauggaagcuguagc

SEQ ID NO: 660701 - RNA, 19 nt, Artificial Sequence
  Description of Artificial Sequence: Synthetic oligonucleotide
auggggagggaaccucagc

SEQ ID NO: 660702 - RNA, 19 nt, Artificial Sequence
  Description of Artificial Sequence: Synthetic oligonucleotide
gcugaaaucauagcgcuug

SEQ ID NO: 660703 - RNA, 19 nt, Artificial Sequence
  Description of Artificial Sequence: Synthetic oligonucleotide
aguugggauaggcuugacu

SEQ ID NO: 660704 - RNA, 19 nt, Artificial Sequence
  Description of Artificial Sequence: Synthetic oligonucleotide
gucgcugcgugccuuaaug

SEQ ID NO: 660705 - RNA, 19 nt, Artificial Sequence
  Description of Artificial Sequence: Synthetic oligonucleotide
agagcaggucaaacuauac

SEQ ID NO: 660706 - RNA, 19 nt, Artificial Sequence
  Description of Artificial Sequence: Synthetic oligonucleotide
ugauguauccaagggucac

SEQ ID NO: 660707 - RNA, 19 nt, Artificial Sequence
  Description of Artificial Sequence: Synthetic oligonucleotide
uacaggucaaagagucgcu

SEQ ID NO: 660708 - RNA, 19 nt, Artificial Sequence
  Description of Artificial Sequence: Synthetic oligonucleotide
cagaagggucuucaucucc

SEQ ID NO: 660709 - RNA, 19 nt, Artificial Sequence
  Description of Artificial Sequence: Synthetic oligonucleotide
acaucgaaguccuggcgga

SEQ ID NO: 660710 - RNA, 19 nt, Artificial Sequence
  Description of Artificial Sequence: Synthetic oligonucleotide
cuaccacggccccucaugg

SEQ ID NO: 660711 - RNA, 19 nt, Artificial Sequence
  Description of Artificial Sequence: Synthetic oligonucleotide
auccgugagcuccaaucag

SEQ ID NO: 660712 - RNA, 19 nt, Artificial Sequence
  Description of Artificial Sequence: Synthetic oligonucleotide
uucagccggagauuagagu

SEQ ID NO: 660713 - RNA, 19 nt, Artificial Sequence
  Description of Artificial Sequence: Synthetic oligonucleotide
uccugugugcaguauccgu

SEQ ID NO: 660714 - RNA, 19 nt, Artificial Sequence
  Description of Artificial Sequence: Synthetic oligonucleotide
ccguauuuuaacgaggcag

SEQ ID NO: 660715 - RNA, 19 nt, Artificial Sequence
  Description of Artificial Sequence: Synthetic oligonucleotide
aaguaaccagguccucaga

SEQ ID NO: 660716 - RNA, 19 nt, Artificial Sequence
  Description of Artificial Sequence: Synthetic oligonucleotide
ucucuagcgcugccaaaga

SEQ ID NO: 660717 - RNA, 19 nt, Artificial Sequence
  Description of Artificial Sequence: Synthetic oligonucleotide
guggggauaggacaauguc

SEQ ID NO: 660718 - RNA, 19 nt, Artificial Sequence
  Description of Artificial Sequence: Synthetic oligonucleotide
ugcgaccacggcuugcucu

SEQ ID NO: 660719 - RNA, 19 nt, Artificial Sequence
  Description of Artificial Sequence: Synthetic oligonucleotide
caaugccguauuuuaacga

SEQ ID NO: 660720 - RNA, 19 nt, Artificial Sequence
  Description of Artificial Sequence: Synthetic oligonucleotide
cacagcuugcagcuugggc

SEQ ID NO: 660721 - RNA, 19 nt, Artificial Sequence
  Description of Artificial Sequence: Synthetic oligonucleotide
gccgaccugacacacauug

SEQ ID NO: 660722 - RNA, 19 nt, Artificial Sequence
  Description of Artificial Sequence: Synthetic oligonucleotide
uucugcacaaugccguauu

SEQ ID NO: 660723 - RNA, 19 nt, Artificial Sequence
  Description of Artificial Sequence: Synthetic oligonucleotide
agcucgguggaggacacag

SEQ ID NO: 660724 - RNA, 19 nt, Artificial Sequence
  Description of Artificial Sequence: Synthetic oligonucleotide
cucgcugcacaccacccag

SEQ ID NO: 660725 - RNA, 19 nt, Artificial Sequence
  Description of Artificial Sequence: Synthetic oligonucleotide
gugccuuaaugccucugag

SEQ ID NO: 660726 - RNA, 19 nt, Artificial Sequence
  Description of Artificial Sequence: Synthetic oligonucleotide
augccguauuuuaacgagg

SEQ ID NO: 660727 - RNA, 19 nt, Artificial Sequence
  Description of Artificial Sequence: Synthetic oligonucleotide
uccagucagacaagagcuc

SEQ ID NO: 660728 - RNA, 19 nt, Artificial Sequence
  Description of Artificial Sequence: Synthetic oligonucleotide
cucuagcgcugccaaagag

SEQ ID NO: 660729 - RNA, 19 nt, Artificial Sequence
  Description of Artificial Sequence: Synthetic oligonucleotide
cuauggcaugguuggcucc

SEQ ID NO: 660730 - RNA, 19 nt, Artificial Sequence
  Description of Artificial Sequence: Synthetic oligonucleotide
ucgcugcgugccuuaaugc

SEQ ID NO: 660731 - RNA, 19 nt, Artificial Sequence
  Description of Artificial Sequence: Synthetic oligonucleotide
gcaucuggcuuaucgcugg

SEQ ID NO: 660732 - RNA, 19 nt, Artificial Sequence
  Description of Artificial Sequence: Synthetic oligonucleotide
uggcuuaucgcuggccuug

SEQ ID NO: 660733 - RNA, 19 nt, Artificial Sequence
  Description of Artificial Sequence: Synthetic oligonucleotide
cucagagcaggucaaacua

SEQ ID NO: 660734 - RNA, 19 nt, Artificial Sequence
  Description of Artificial Sequence: Synthetic oligonucleotide
agaaaccgaugucgcugcg

SEQ ID NO: 660735 - RNA, 19 nt, Artificial Sequence
  Description of Artificial Sequence: Synthetic oligonucleotide
ggggacaucgaaguccugg

SEQ ID NO: 660736 - RNA, 19 nt, Artificial Sequence
  Description of Artificial Sequence: Synthetic oligonucleotide
gagucgcucaguccuccag

SEQ ID NO: 660737 - RNA, 19 nt, Artificial Sequence
  Description of Artificial Sequence: Synthetic oligonucleotide
caugguuggcuccucccug

SEQ ID NO: 660738 - RNA, 19 nt, Artificial Sequence
  Description of Artificial Sequence: Synthetic oligonucleotide
uguauggggagggaaccuc

SEQ ID NO: 660739 - RNA, 19 nt, Artificial Sequence
  Description of Artificial Sequence: Synthetic oligonucleotide
caacagucagccgaauuuc

SEQ ID NO: 660740 - RNA, 19 nt, Artificial Sequence
  Description of Artificial Sequence: Synthetic oligonucleotide
auugauggaaguggggaua

SEQ ID NO: 660741 - RNA, 19 nt, Artificial Sequence
  Description of Artificial Sequence: Synthetic oligonucleotide
uucgccaaugagaggucaa

SEQ ID NO: 660742 - RNA, 19 nt, Artificial Sequence
  Description of Artificial Sequence: Synthetic oligonucleotide
ucgguggaggacacagcca

SEQ ID NO: 660743 - RNA, 19 nt, Artificial Sequence
  Description of Artificial Sequence: Synthetic oligonucleotide
ucccauugaugagugcuga

SEQ ID NO: 660744 - RNA, 19 nt, Artificial Sequence
  Description of Artificial Sequence: Synthetic oligonucleotide
agacgaaaggcagagucuu

SEQ ID NO: 660745 - RNA, 19 nt, Artificial Sequence
  Description of Artificial Sequence: Synthetic oligonucleotide
ggaauuguuuguuuucucu

SEQ ID NO: 660746 - RNA, 19 nt, Artificial Sequence
  Description of Artificial Sequence: Synthetic oligonucleotide
gacuccucuaagagacuag

SEQ ID NO: 660747 - RNA, 19 nt, Artificial Sequence
  Description of Artificial Sequence: Synthetic oligonucleotide
uuugccuccagcgcgccau

SEQ ID NO: 660748 - RNA, 19 nt, Artificial Sequence
  Description of Artificial Sequence: Synthetic oligonucleotide
cuguuggacugaagugugc

SEQ ID NO: 660749 - RNA, 19 nt, Artificial Sequence
  Description of Artificial Sequence: Synthetic oligonucleotide
gucaauuggcuuugacaca

SEQ ID NO: 660750 - RNA, 19 nt, Artificial Sequence
  Description of Artificial Sequence: Synthetic oligonucleotide
gugugcaguauccgugagc

SEQ ID NO: 660751 - RNA, 19 nt, Artificial Sequence
  Description of Artificial Sequence: Synthetic oligonucleotide
gauuagaguugguucugcu

SEQ ID NO: 660752 - RNA, 19 nt, Artificial Sequence
  Description of Artificial Sequence: Synthetic oligonucleotide
aggucaaacuauacagugu

SEQ ID NO: 660753 - RNA, 19 nt, Artificial Sequence
  Description of Artificial Sequence: Synthetic oligonucleotide
gauaggacaaugucuucuu

SEQ ID NO: 660754 - RNA, 19 nt, Artificial Sequence
  Description of Artificial Sequence: Synthetic oligonucleotide
cagccgaauuuccuccugc

SEQ ID NO: 660755 - RNA, 19 nt, Artificial Sequence
  Description of Artificial Sequence: Synthetic oligonucleotide
caaacuauacagugugagu

SEQ ID NO: 660756 - RNA, 19 nt, Artificial Sequence
  Description of Artificial Sequence: Synthetic oligonucleotide
auauucccaaggccagcca

SEQ ID NO: 660757 - RNA, 19 nt, Artificial Sequence
  Description of Artificial Sequence: Synthetic oligonucleotide
auacagugugaguguuucu

SEQ ID NO: 660758 - RNA, 19 nt, Artificial Sequence
  Description of Artificial Sequence: Synthetic oligonucleotide
agacuaaguggguuucauu

SEQ ID NO: 660759 - RNA, 19 nt, Artificial Sequence
  Description of Artificial Sequence: Synthetic oligonucleotide
auaggacaaugucuucuuu

SEQ ID NO: 660760 - RNA, 19 nt, Artificial Sequence
  Description of Artificial Sequence: Synthetic oligonucleotide
cauaguaauacaggucaaa

SEQ ID NO: 660761 - RNA, 19 nt, Artificial Sequence
  Description of Artificial Sequence: Synthetic oligonucleotide
ucucccggucaggagaaga

SEQ ID NO: 660762 - RNA, 19 nt, Artificial Sequence
  Description of Artificial Sequence: Synthetic oligonucleotide
ggauaggcuugacuuuugc

SEQ ID NO: 660763 - RNA, 19 nt, Artificial Sequence
  Description of Artificial Sequence: Synthetic oligonucleotide
uggcaugguuggcuccucc

SEQ ID NO: 660764 - RNA, 19 nt, Artificial Sequence
  Description of Artificial Sequence: Synthetic oligonucleotide
ggcaucauuggagaaucug

SEQ ID NO: 660765 - RNA, 19 nt, Artificial Sequence
  Description of Artificial Sequence: Synthetic oligonucleotide
acuauacagugugaguguu

SEQ ID NO: 660766 - RNA, 19 nt, Artificial Sequence
  Description of Artificial Sequence: Synthetic oligonucleotide
ggaaccucggcgucuucag

SEQ ID NO: 660767 - RNA, 19 nt, Artificial Sequence
  Description of Artificial Sequence: Synthetic oligonucleotide
cugcgugccuuaaugccuc

SEQ ID NO: 660768 - RNA, 19 nt, Artificial Sequence
  Description of Artificial Sequence: Synthetic oligonucleotide
ggcagacaaggugagcagg

SEQ ID NO: 660769 - RNA, 19 nt, Artificial Sequence
  Description of Artificial Sequence: Synthetic oligonucleotide
cauacccgcccucccauuc

SEQ ID NO: 660770 - RNA, 19 nt, Artificial Sequence
  Description of Artificial Sequence: Synthetic oligonucleotide
cugggcccuaccacggccc

SEQ ID NO: 660771 - RNA, 19 nt, Artificial Sequence
  Description of Artificial Sequence: Synthetic oligonucleotide
aucccuggccaaggaaaac

SEQ ID NO: 660772 - RNA, 19 nt, Artificial Sequence
  Description of Artificial Sequence: Synthetic oligonucleotide
ggccaugcaaacucaguca

SEQ ID NO: 660773 - RNA, 19 nt, Artificial Sequence
  Description of Artificial Sequence: Synthetic oligonucleotide
uaccuucgucaaacaggag

SEQ ID NO: 660774 - RNA, 19 nt, Artificial Sequence
  Description of Artificial Sequence: Synthetic oligonucleotide
aucccauugaugagugcug

SEQ ID NO: 660775 - RNA, 19 nt, Artificial Sequence
  Description of Artificial Sequence: Synthetic oligonucleotide
ccuguuggacugaagugug

SEQ ID NO: 660776 - RNA, 19 nt, Artificial Sequence
  Description of Artificial Sequence: Synthetic oligonucleotide
guccgagccauuccaguuc

SEQ ID NO: 660777 - RNA, 19 nt, Artificial Sequence
  Description of Artificial Sequence: Synthetic oligonucleotide
cggagauuagaguugguuc

SEQ ID NO: 660778 - RNA, 19 nt, Artificial Sequence
  Description of Artificial Sequence: Synthetic oligonucleotide
cuaagaccugggguccagg

SEQ ID NO: 660779 - RNA, 19 nt, Artificial Sequence
  Description of Artificial Sequence: Synthetic oligonucleotide
cgauaaacaaggccacugc

SEQ ID NO: 660780 - RNA, 19 nt, Artificial Sequence
  Description of Artificial Sequence: Synthetic oligonucleotide
cccggucaggagaagauug

SEQ ID NO: 660781 - RNA, 19 nt, Artificial Sequence
  Description of Artificial Sequence: Synthetic oligonucleotide
agguagagccaaacagaag

SEQ ID NO: 660782 - RNA, 19 nt, Artificial Sequence
  Description of Artificial Sequence: Synthetic oligonucleotide
ucgccugaguccaguucca

SEQ ID NO: 660783 - RNA, 19 nt, Artificial Sequence
  Description of Artificial Sequence: Synthetic oligonucleotide
cgcuugauguauccaaggg

SEQ ID NO: 660784 - RNA, 19 nt, Artificial Sequence
  Description of Artificial Sequence: Synthetic oligonucleotide
ggaagcuguagcaacaagu

SEQ ID NO: 660785 - RNA, 19 nt, Artificial Sequence
  Description of Artificial Sequence: Synthetic oligonucleotide
auacccgcccucccauucu

SEQ ID NO: 660786 - RNA, 19 nt, Artificial Sequence
  Description of Artificial Sequence: Synthetic oligonucleotide
caucgccugaguccaguuc

SEQ ID NO: 660787 - RNA, 19 nt, Artificial Sequence
  Description of Artificial Sequence: Synthetic oligonucleotide
gcuguauggggagggaacc

SEQ ID NO: 660788 - RNA, 19 nt, Artificial Sequence
  Description of Artificial Sequence: Synthetic oligonucleotide
caucccauugaugagugcu

SEQ ID NO: 660789 - RNA, 19 nt, Artificial Sequence
  Description of Artificial Sequence: Synthetic oligonucleotide
ugcugugaauggccacuaa

SEQ ID NO: 660790 - RNA, 19 nt, Artificial Sequence
  Description of Artificial Sequence: Synthetic oligonucleotide
cggacaagcuccaaggauc

SEQ ID NO: 660791 - RNA, 19 nt, Artificial Sequence
  Description of Artificial Sequence: Synthetic oligonucleotide
gccccuaagaccugggguc

SEQ ID NO: 660792 - RNA, 19 nt, Artificial Sequence
  Description of Artificial Sequence: Synthetic oligonucleotide
aucgaaguccuggcggaca

SEQ ID NO: 660793 - RNA, 19 nt, Artificial Sequence
  Description of Artificial Sequence: Synthetic oligonucleotide
gucaaacuauacaguguga

SEQ ID NO: 660794 - RNA, 19 nt, Artificial Sequence
  Description of Artificial Sequence: Synthetic oligonucleotide
cuucgaacugaugaauucu

SEQ ID NO: 660795 - RNA, 19 nt, Artificial Sequence
  Description of Artificial Sequence: Synthetic oligonucleotide
aggcagugucacugaagga

SEQ ID NO: 660796 - RNA, 19 nt, Artificial Sequence
  Description of Artificial Sequence: Synthetic oligonucleotide
gggaauuguuuguuuucuc

SEQ ID NO: 660797 - RNA, 19 nt, Artificial Sequence
  Description of Artificial Sequence: Synthetic oligonucleotide
ccgauaaacaaggccacug

SEQ ID NO: 660798 - RNA, 19 nt, Artificial Sequence
  Description of Artificial Sequence: Synthetic oligonucleotide
cuccuucgccaaugagagg

SEQ ID NO: 660799 - RNA, 19 nt, Artificial Sequence
  Description of Artificial Sequence: Synthetic oligonucleotide
cucuaagagacuagccccu

SEQ ID NO: 660800 - RNA, 19 nt, Artificial Sequence
  Description of Artificial Sequence: Synthetic oligonucleotide
ucgccaaugagaggucaau

SEQ ID NO: 660801 - RNA, 19 nt, Artificial Sequence
  Description of Artificial Sequence: Synthetic oligonucleotide
ccuauggcaugguuggcuc

SEQ ID NO: 660802 - RNA, 19 nt, Artificial Sequence
  Description of Artificial Sequence: Synthetic oligonucleotide
ugggcccuaccacggcccc

SEQ ID NO: 660803 - RNA, 19 nt, Artificial Sequence
  Description of Artificial Sequence: Synthetic oligonucleotide
guauggggagggaaccuca

SEQ ID NO: 660804 - RNA, 19 nt, Artificial Sequence
  Description of Artificial Sequence: Synthetic oligonucleotide
uaccacggccccucaugga

SEQ ID NO: 660805 - RNA, 19 nt, Artificial Sequence
  Description of Artificial Sequence: Synthetic oligonucleotide
ucggcgucuucaggaagca

SEQ ID NO: 660806 - RNA, 19 nt, Artificial Sequence
  Description of Artificial Sequence: Synthetic oligonucleotide
agagucgcucaguccucca

SEQ ID NO: 660807 - RNA, 19 nt, Artificial Sequence
  Description of Artificial Sequence: Synthetic oligonucleotide
gcuugggcauugauggaag

SEQ ID NO: 660808 - RNA, 19 nt, Artificial Sequence
  Description of Artificial Sequence: Synthetic oligonucleotide
cuguccucgggacuggucu

SEQ ID NO: 660809 - RNA, 19 nt, Artificial Sequence
  Description of Artificial Sequence: Synthetic oligonucleotide
uacccgcccucccauucuc

SEQ ID NO: 660810 - RNA, 19 nt, Artificial Sequence
  Description of Artificial Sequence: Synthetic oligonucleotide
gguccuagaaaagcaagcu

SEQ ID NO: 660811 - RNA, 19 nt, Artificial Sequence
  Description of Artificial Sequence: Synthetic oligonucleotide
ggcaucuggcuuaucgcug

SEQ ID NO: 660812 - RNA, 19 nt, Artificial Sequence
  Description of Artificial Sequence: Synthetic oligonucleotide
ugucgcugcgugccuuaau

SEQ ID NO: 660813 - RNA, 19 nt, Artificial Sequence
  Description of Artificial Sequence: Synthetic oligonucleotide
ggguccaggggucauccca

SEQ ID NO: 660814 - RNA, 19 nt, Artificial Sequence
  Description of Artificial Sequence: Synthetic oligonucleotide
uaucaacagucagccgaau

SEQ ID NO: 660815 - RNA, 19 nt, Artificial Sequence
  Description of Artificial Sequence: Synthetic oligonucleotide
ggccccucauggaagaaac

SEQ ID NO: 660816 - RNA, 19 nt, Artificial Sequence
  Description of Artificial Sequence: Synthetic oligonucleotide
aggggucaucccauugaug

SEQ ID NO: 660817 - RNA, 19 nt, Artificial Sequence
  Description of Artificial Sequence: Synthetic oligonucleotide
caucgaaguccuggcggac

SEQ ID NO: 660818 - RNA, 19 nt, Artificial Sequence
  Description of Artificial Sequence: Synthetic oligonucleotide
gaaaccgaugucgcugcgu

SEQ ID NO: 660819 - RNA, 19 nt, Artificial Sequence
  Description of Artificial Sequence: Synthetic oligonucleotide
gcacacugggcccuaccac

SEQ ID NO: 660820 - RNA, 19 nt, Artificial Sequence
  Description of Artificial Sequence: Synthetic oligonucleotide
agccaaacagaagggucuu

SEQ ID NO: 660821 - RNA, 19 nt, Artificial Sequence
  Description of Artificial Sequence: Synthetic oligonucleotide
cacugggcccuaccacggc

SEQ ID NO: 660822 - RNA, 19 nt, Artificial Sequence
  Description of Artificial Sequence: Synthetic oligonucleotide
ggccgauaaacaaggccac

SEQ ID NO: 660823 - RNA, 19 nt, Artificial Sequence
  Description of Artificial Sequence: Synthetic oligonucleotide
cguauuuuaacgaggcagu

SEQ ID NO: 660824 - RNA, 19 nt, Artificial Sequence
  Description of Artificial Sequence: Synthetic oligonucleotide
cacuucgaacugaugaauu

SEQ ID NO: 660825 - RNA, 19 nt, Artificial Sequence
  Description of Artificial Sequence: Synthetic oligonucleotide
aaucugcauuugggguccu

SEQ ID NO: 660826 - RNA, 19 nt, Artificial Sequence
  Description of Artificial Sequence: Synthetic oligonucleotide
ugcgugccuuaaugccucu

SEQ ID NO: 660827 - RNA, 19 nt, Artificial Sequence
  Description of Artificial Sequence: Synthetic oligonucleotide
ccaucccuggccaaggaaa

SEQ ID NO: 660828 - RNA, 19 nt, Artificial Sequence
  Description of Artificial Sequence: Synthetic oligonucleotide
acccgcccucccauucucc

SEQ ID NO: 660829 - RNA, 19 nt, Artificial Sequence
  Description of Artificial Sequence: Synthetic oligonucleotide
ggcggacaagcuccaagga

SEQ ID NO: 660830 - RNA, 19 nt, Artificial Sequence
  Description of Artificial Sequence: Synthetic oligonucleotide
cgcgccauaggaugucugc

SEQ ID NO: 660831 - RNA, 19 nt, Artificial Sequence
  Description of Artificial Sequence: Synthetic oligonucleotide
uugacacagcuugcagcuu

SEQ ID NO: 660832 - RNA, 19 nt, Artificial Sequence
  Description of Artificial Sequence: Synthetic oligonucleotide
gccguauuuuaacgaggca

SEQ ID NO: 660833 - RNA, 19 nt, Artificial Sequence
  Description of Artificial Sequence: Synthetic oligonucleotide
ccaacugauuuuccugaga

SEQ ID NO: 660834 - RNA, 19 nt, Artificial Sequence
  Description of Artificial Sequence: Synthetic oligonucleotide
cuguagcaacaagugucca

SEQ ID NO: 660835 - RNA, 19 nt, Artificial Sequence
  Description of Artificial Sequence: Synthetic oligonucleotide
cuugggcauugauggaagu

SEQ ID NO: 660836 - RNA, 19 nt, Artificial Sequence
  Description of Artificial Sequence: Synthetic oligonucleotide
agcgcgccauaggaugucu

SEQ ID NO: 660837 - RNA, 19 nt, Artificial Sequence
  Description of Artificial Sequence: Synthetic oligonucleotide
uaaugccucugaggagcau

SEQ ID NO: 660838 - RNA, 19 nt, Artificial Sequence
  Description of Artificial Sequence: Synthetic oligonucleotide
cuauacagugugaguguuu

SEQ ID NO: 660839 - RNA, 19 nt, Artificial Sequence
  Description of Artificial Sequence: Synthetic oligonucleotide
cugcuaccuucgucaaaca

SEQ ID NO: 660840 - RNA, 19 nt, Artificial Sequence
  Description of Artificial Sequence: Synthetic oligonucleotide
ggacuccucuaagagacua

SEQ ID NO: 660841 - RNA, 19 nt, Artificial Sequence
  Description of Artificial Sequence: Synthetic oligonucleotide
guucugaugcagagcucaa

SEQ ID NO: 660842 - RNA, 19 nt, Artificial Sequence
  Description of Artificial Sequence: Synthetic oligonucleotide
ccuucgucaaacaggaguu

SEQ ID NO: 660843 - RNA, 19 nt, Artificial Sequence
  Description of Artificial Sequence: Synthetic oligonucleotide
cagccgaccugacacacau

SEQ ID NO: 660844 - RNA, 19 nt, Artificial Sequence
  Description of Artificial Sequence: Synthetic oligonucleotide
cacccagauggggaaccuc

SEQ ID NO: 660845 - RNA, 19 nt, Artificial Sequence
  Description of Artificial Sequence: Synthetic oligonucleotide
ggaccacccuuguucugca

SEQ ID NO: 660846 - RNA, 19 nt, Artificial Sequence
  Description of Artificial Sequence: Synthetic oligonucleotide
ccccuaagaccuggggucc

SEQ ID NO: 660847 - RNA, 19 nt, Artificial Sequence
  Description of Artificial Sequence: Synthetic oligonucleotide
guaggcugaagaggaugcu

SEQ ID NO: 660848 - RNA, 19 nt, Artificial Sequence
  Description of Artificial Sequence: Synthetic oligonucleotide
ccauuccaguucaccgaug

SEQ ID NO: 660849 - RNA, 19 nt, Artificial Sequence
  Description of Artificial Sequence: Synthetic oligonucleotide
ggacaaggucucugcagcu

SEQ ID NO: 660850 - RNA, 19 nt, Artificial Sequence
  Description of Artificial Sequence: Synthetic oligonucleotide
cgaccugacacacauugua

SEQ ID NO: 660851 - RNA, 19 nt, Artificial Sequence
  Description of Artificial Sequence: Synthetic oligonucleotide
cgugccuuaaugccucuga

SEQ ID NO: 660852 - RNA, 19 nt, Artificial Sequence
  Description of Artificial Sequence: Synthetic oligonucleotide
cuuugccuccagcgcgcca

SEQ ID NO: 660853 - RNA, 19 nt, Artificial Sequence
  Description of Artificial Sequence: Synthetic oligonucleotide
caggggucaucccauugau

SEQ ID NO: 660854 - RNA, 19 nt, Artificial Sequence
  Description of Artificial Sequence: Synthetic oligonucleotide
ccggucaggagaagauuga

SEQ ID NO: 660855 - RNA, 19 nt, Artificial Sequence
  Description of Artificial Sequence: Synthetic oligonucleotide
guucugcacaaugccguau

SEQ ID NO: 660856 - RNA, 19 nt, Artificial Sequence
  Description of Artificial Sequence: Synthetic oligonucleotide
cuguauggggagggaaccu

SEQ ID NO: 660857 - RNA, 19 nt, Artificial Sequence
  Description of Artificial Sequence: Synthetic oligonucleotide
cagcgcgccauaggauguc

SEQ ID NO: 660858 - RNA, 19 nt, Artificial Sequence
  Description of Artificial Sequence: Synthetic oligonucleotide
gacgaaaggcagagucuuu

SEQ ID NO: 660859 - RNA, 19 nt, Artificial Sequence
  Description of Artificial Sequence: Synthetic oligonucleotide
gugcgaccacggcuugcuc

SEQ ID NO: 660860 - RNA, 19 nt, Artificial Sequence
  Description of Artificial Sequence: Synthetic oligonucleotide
gggguccaggggucauccc

SEQ ID NO: 660861 - RNA, 19 nt, Artificial Sequence
  Description of Artificial Sequence: Synthetic oligonucleotide
gccaaacagaagggucuuc

SEQ ID NO: 660862 - RNA, 19 nt, Artificial Sequence
  Description of Artificial Sequence: Synthetic oligonucleotide
cuccaaucagauggcuggu

SEQ ID NO: 660863 - RNA, 19 nt, Artificial Sequence
  Description of Artificial Sequence: Synthetic oligonucleotide
agccccuggcaaggagacu

SEQ ID NO: 660864 - RNA, 19 nt, Artificial Sequence
  Description of Artificial Sequence: Synthetic oligonucleotide
cuucgucaaacaggaguuu

SEQ ID NO: 660865 - RNA, 19 nt, Artificial Sequence
  Description of Artificial Sequence: Synthetic oligonucleotide
ccagugcgaccacggcuug

SEQ ID NO: 660866 - RNA, 19 nt, Artificial Sequence
  Description of Artificial Sequence: Synthetic oligonucleotide
gcgugccuuaaugccucug

SEQ ID NO: 660867 - RNA, 19 nt, Artificial Sequence
  Description of Artificial Sequence: Synthetic oligonucleotide
gccagugcgaccacggcuu

SEQ ID NO: 660868 - RNA, 19 nt, Artificial Sequence
  Description of Artificial Sequence: Synthetic oligonucleotide
acggccccucauggaagaa

SEQ ID NO: 660869 - RNA, 19 nt, Artificial Sequence
  Description of Artificial Sequence: Synthetic oligonucleotide
gcgcgccauaggaugucug

SEQ ID NO: 660870 - RNA, 19 nt, Artificial Sequence
  Description of Artificial Sequence: Synthetic oligonucleotide
gccauacccgcccucccau

SEQ ID NO: 660871 - RNA, 19 nt, Artificial Sequence
  Description of Artificial Sequence: Synthetic oligonucleotide
gccgauaaacaaggccacu

SEQ ID NO: 660872 - RNA, 19 nt, Artificial Sequence
  Description of Artificial Sequence: Synthetic oligonucleotide
caguauccgugagcuccaa

SEQ ID NO: 660873 - RNA, 19 nt, Artificial Sequence
  Description of Artificial Sequence: Synthetic oligonucleotide
ccacuucgaacugaugaau

SEQ ID NO: 660874 - RNA, 19 nt, Artificial Sequence
  Description of Artificial Sequence: Synthetic oligonucleotide
gccccacuucgaacugaug

SEQ ID NO: 660875 - RNA, 19 nt, Artificial Sequence
  Description of Artificial Sequence: Synthetic oligonucleotide
agccgaccugacacacauu

SEQ ID NO: 660876 - RNA, 19 nt, Artificial Sequence
  Description of Artificial Sequence: Synthetic oligonucleotide
ccgaccugacacacauugu

SEQ ID NO: 660877 - RNA, 19 nt, Artificial Sequence
  Description of Artificial Sequence: Synthetic oligonucleotide
ggggaaccucggcgucuuc

SEQ ID NO: 660878 - RNA, 19 nt, Artificial Sequence
  Description of Artificial Sequence: Synthetic oligonucleotide
ggcuuaucgcuggccuugu

SEQ ID NO: 660879 - RNA, 19 nt, Artificial Sequence
  Description of Artificial Sequence: Synthetic oligonucleotide
cccuaagaccuggggucca

SEQ ID NO: 660880 - RNA, 19 nt, Artificial Sequence
  Description of Artificial Sequence: Synthetic oligonucleotide
gccccucauggaagaaacu

SEQ ID NO: 660881 - RNA, 19 nt, Artificial Sequence
  Description of Artificial Sequence: Synthetic oligonucleotide
ccgcccucccauucuccua

SEQ ID NO: 660882 - RNA, 19 nt, Artificial Sequence
  Description of Artificial Sequence: Synthetic oligonucleotide
cgcccucccauucuccuau

SEQ ID NO: 660883 - RNA, 19 nt, Artificial Sequence
  Description of Artificial Sequence: Synthetic oligonucleotide
ccaucgccugaguccaguu

SEQ ID NO: 660884 - RNA, 19 nt, Artificial Sequence
  Description of Artificial Sequence: Synthetic oligonucleotide
ccgaugucgcugcgugccu

SEQ ID NO: 660885 - RNA, 19 nt, Artificial Sequence
  Description of Artificial Sequence: Synthetic oligonucleotide
ccuggcggacaagcuccaa

SEQ ID NO: 660886 - RNA, 19 nt, Artificial Sequence
  Description of Artificial Sequence: Synthetic oligonucleotide
ccauacccgcccucccauu

SEQ ID NO: 660887 - RNA, 19 nt, Artificial Sequence
  Description of Artificial Sequence: Synthetic oligonucleotide
gggcccuaccacggccccu

SEQ ID NO: 660888 - RNA, 19 nt, Artificial Sequence
  Description of Artificial Sequence: Synthetic oligonucleotide
cccuaccacggccccucau

SEQ ID NO: 660889 - RNA, 19 nt, Artificial Sequence
  Description of Artificial Sequence: Synthetic oligonucleotide
auaagcaacagcuucaucg

SEQ ID NO: 660890 - RNA, 19 nt, Artificial Sequence
  Description of Artificial Sequence: Synthetic oligonucleotide
agagaaucaaucucaauac

SEQ ID NO: 660891 - RNA, 19 nt, Artificial Sequence
  Description of Artificial Sequence: Synthetic oligonucleotide
acuuggacugacuuaaucc

SEQ ID NO: 660892 - RNA, 19 nt, Artificial Sequence
  Description of Artificial Sequence: Synthetic oligonucleotide
ucuacuuggaccuugggcc

SEQ ID NO: 660893 - RNA, 19 nt, Artificial Sequence
  Description of Artificial Sequence: Synthetic oligonucleotide
auucgcaggacauucaggc

SEQ ID NO: 660894 - RNA, 19 nt, Artificial Sequence
  Description of Artificial Sequence: Synthetic oligonucleotide
uuuagcaucucgaagggcc

SEQ ID NO: 660895 - RNA, 19 nt, Artificial Sequence
  Description of Artificial Sequence: Synthetic oligonucleotide
aaagcaacauagcuuggcg

SEQ ID NO: 660896 - RNA, 19 nt, Artificial Sequence
  Description of Artificial Sequence: Synthetic oligonucleotide
ucaauucccucauagagag

SEQ ID NO: 660897 - RNA, 19 nt, Artificial Sequence
  Description of Artificial Sequence: Synthetic oligonucleotide
ugauugucagaauagguag

SEQ ID NO: 660898 - RNA, 19 nt, Artificial Sequence
  Description of Artificial Sequence: Synthetic oligonucleotide
aaauccugaacauucucag

SEQ ID NO: 660899 - RNA, 19 nt, Artificial Sequence
  Description of Artificial Sequence: Synthetic oligonucleotide
aaugcuacaccucuacuug

SEQ ID NO: 660900 - RNA, 19 nt, Artificial Sequence
  Description of Artificial Sequence: Synthetic oligonucleotide
aaaaccuucacaagcugcc

SEQ ID NO: 660901 - RNA, 19 nt, Artificial Sequence
  Description of Artificial Sequence: Synthetic oligonucleotide
ugagaaucauugaaguagg

SEQ ID NO: 660902 - RNA, 19 nt, Artificial Sequence
  Description of Artificial Sequence: Synthetic oligonucleotide
ugcagucugauucuuaucc

SEQ ID NO: 660903 - RNA, 19 nt, Artificial Sequence
  Description of Artificial Sequence: Synthetic oligonucleotide
aaagcauaggacuccagug

SEQ ID NO: 660904 - RNA, 19 nt, Artificial Sequence
  Description of Artificial Sequence: Synthetic oligonucleotide
uuggucagaaccauagagg

SEQ ID NO: 660905 - RNA, 19 nt, Artificial Sequence
  Description of Artificial Sequence: Synthetic oligonucleotide
ucauagaccugaaugagca

SEQ ID NO: 660906 - RNA, 19 nt, Artificial Sequence
  Description of Artificial Sequence: Synthetic oligonucleotide
aaaaugagcacauuccuuu

SEQ ID NO: 660907 - RNA, 19 nt, Artificial Sequence
  Description of Artificial Sequence: Synthetic oligonucleotide
ucauguugaaagcauagga

SEQ ID NO: 660908 - RNA, 19 nt, Artificial Sequence
  Description of Artificial Sequence: Synthetic oligonucleotide
ucauugauaauucgcagga

SEQ ID NO: 660909 - RNA, 19 nt, Artificial Sequence
  Description of Artificial Sequence: Synthetic oligonucleotide
gaaucaaucucaauacugg

SEQ ID NO: 660910 - RNA, 19 nt, Artificial Sequence
  Description of Artificial Sequence: Synthetic oligonucleotide
ucuccagauagaauggccg

SEQ ID NO: 660911 - RNA, 19 nt, Artificial Sequence
  Description of Artificial Sequence: Synthetic oligonucleotide
uuauccagccaacugauga

SEQ ID NO: 660912 - RNA, 19 nt, Artificial Sequence
  Description of Artificial Sequence: Synthetic oligonucleotide
aucaauaccaacugcaggu

SEQ ID NO: 660913 - RNA, 19 nt, Artificial Sequence
  Description of Artificial Sequence: Synthetic oligonucleotide
gucauuggcaauuaucucc

SEQ ID NO: 660914 - RNA, 19 nt, Artificial Sequence
  Description of Artificial Sequence: Synthetic oligonucleotide
uuguauucuacuuggaccu

SEQ ID NO: 660915 - RNA, 19 nt, Artificial Sequence
  Description of Artificial Sequence: Synthetic oligonucleotide
uucgcuuaaacucagcaau

SEQ ID NO: 660916 - RNA, 19 nt, Artificial Sequence
  Description of Artificial Sequence: Synthetic oligonucleotide
uuuauuucccuguggaaca

SEQ ID NO: 660917 - RNA, 19 nt, Artificial Sequence
  Description of Artificial Sequence: Synthetic oligonucleotide
aggauagacacaucaaaag

SEQ ID NO: 660918 - RNA, 19 nt, Artificial Sequence
  Description of Artificial Sequence: Synthetic oligonucleotide
cauucaauucuucgaaucg

SEQ ID NO: 660919 - RNA, 19 nt, Artificial Sequence
  Description of Artificial Sequence: Synthetic oligonucleotide
ucuuaucuacagcagagac

SEQ ID NO: 660920 - RNA, 19 nt, Artificial Sequence
  Description of Artificial Sequence: Synthetic oligonucleotide
aauuaaucguucuguguca

SEQ ID NO: 660921 - RNA, 19 nt, Artificial Sequence
  Description of Artificial Sequence: Synthetic oligonucleotide
aguuuuauuucccugugga

SEQ ID NO: 660922 - RNA, 19 nt, Artificial Sequence
  Description of Artificial Sequence: Synthetic oligonucleotide
uucaauucuucgaaucgag

SEQ ID NO: 660923 - RNA, 19 nt, Artificial Sequence
  Description of Artificial Sequence: Synthetic oligonucleotide
caauuaaucguucuguguc

SEQ ID NO: 660924 - RNA, 19 nt, Artificial Sequence
  Description of Artificial Sequence: Synthetic oligonucleotide
ucaucauugaucuugccuu

SEQ ID NO: 660925 - RNA, 19 nt, Artificial Sequence
  Description of Artificial Sequence: Synthetic oligonucleotide
gaaaugguugaccauucug

SEQ ID NO: 660926 - RNA, 19 nt, Artificial Sequence
  Description of Artificial Sequence: Synthetic oligonucleotide
aaaugguugaccauucugu

SEQ ID NO: 660927 - RNA, 19 nt, Artificial Sequence
  Description of Artificial Sequence: Synthetic oligonucleotide
ugucuaguuuagcaucucg

SEQ ID NO: 660928 - RNA, 19 nt, Artificial Sequence
  Description of Artificial Sequence: Synthetic oligonucleotide
uuaucuagcccauaagcaa

SEQ ID NO: 660929 - RNA, 19 nt, Artificial Sequence
  Description of Artificial Sequence: Synthetic oligonucleotide
uaucagacugaacaacagc

SEQ ID NO: 660930 - RNA, 19 nt, Artificial Sequence
  Description of Artificial Sequence: Synthetic oligonucleotide
auuaucuccaccuuuccau

SEQ ID NO: 660931 - RNA, 19 nt, Artificial Sequence
  Description of Artificial Sequence: Synthetic oligonucleotide
gagguauagaaaucaauuc

SEQ ID NO: 660932 - RNA, 19 nt, Artificial Sequence
  Description of Artificial Sequence: Synthetic oligonucleotide
ucgagcacggguaauggag

SEQ ID NO: 660933 - RNA, 19 nt, Artificial Sequence
  Description of Artificial Sequence: Synthetic oligonucleotide
aagcauaggacuccaguga

SEQ ID NO: 660934 - RNA, 19 nt, Artificial Sequence
  Description of Artificial Sequence: Synthetic oligonucleotide
ugacuugucuaguuuagca

SEQ ID NO: 660935 - RNA, 19 nt, Artificial Sequence
  Description of Artificial Sequence: Synthetic oligonucleotide
aguucaaacuuuccaagca

SEQ ID NO: 660936 - RNA, 19 nt, Artificial Sequence
  Description of Artificial Sequence: Synthetic oligonucleotide
ugugacuugucuaguuuag

SEQ ID NO: 660937 - RNA, 19 nt, Artificial Sequence
  Description of Artificial Sequence: Synthetic oligonucleotide
cauagagagaaucaaucuc

SEQ ID NO: 660938 - RNA, 19 nt, Artificial Sequence
  Description of Artificial Sequence: Synthetic oligonucleotide
aaucucaauacuggccugg

SEQ ID NO: 660939 - RNA, 19 nt, Artificial Sequence
  Description of Artificial Sequence: Synthetic oligonucleotide
gacuccagugaauucuugg

SEQ ID NO: 660940 - RNA, 19 nt, Artificial Sequence
  Description of Artificial Sequence: Synthetic oligonucleotide
ugguugaccauucuguuau

SEQ ID NO: 660941 - RNA, 19 nt, Artificial Sequence
  Description of Artificial Sequence: Synthetic oligonucleotide
gauaauucgcaggacauuc

SEQ ID NO: 660942 - RNA, 19 nt, Artificial Sequence
  Description of Artificial Sequence: Synthetic oligonucleotide
ggaaagaggagugacaucc

SEQ ID NO: 660943 - RNA, 19 nt, Artificial Sequence
  Description of Artificial Sequence: Synthetic oligonucleotide
ucaaaccuacguccgauca

SEQ ID NO: 660944 - RNA, 19 nt, Artificial Sequence
  Description of Artificial Sequence: Synthetic oligonucleotide
agagggugcgcuuugcccg

SEQ ID NO: 660945 - RNA, 19 nt, Artificial Sequence
  Description of Artificial Sequence: Synthetic oligonucleotide
aaaacuguguugguggggu

SEQ ID NO: 660946 - RNA, 19 nt, Artificial Sequence
  Description of Artificial Sequence: Synthetic oligonucleotide
cauagcuuggcgugguucg

SEQ ID NO: 660947 - RNA, 19 nt, Artificial Sequence
  Description of Artificial Sequence: Synthetic oligonucleotide
uauagaaaucaauucccuc

SEQ ID NO: 660948 - RNA, 19 nt, Artificial Sequence
  Description of Artificial Sequence: Synthetic oligonucleotide
caagacaaugucauggauc

SEQ ID NO: 660949 - RNA, 19 nt, Artificial Sequence
  Description of Artificial Sequence: Synthetic oligonucleotide
agugccucggaacagguca

SEQ ID NO: 660950 - RNA, 19 nt, Artificial Sequence
  Description of Artificial Sequence: Synthetic oligonucleotide
uucauguugaaagcauagg

SEQ ID NO: 660951 - RNA, 19 nt, Artificial Sequence
  Description of Artificial Sequence: Synthetic oligonucleotide
uugauaauucgcaggacau

SEQ ID NO: 660952 - RNA, 19 nt, Artificial Sequence
  Description of Artificial Sequence: Synthetic oligonucleotide
agaaucaaucucaauacug

SEQ ID NO: 660953 - RNA, 19 nt, Artificial Sequence
  Description of Artificial Sequence: Synthetic oligonucleotide
auagagagaaucaaucuca

SEQ ID NO: 660954 - RNA, 19 nt, Artificial Sequence
  Description of Artificial Sequence: Synthetic oligonucleotide
ucgcugagaaucauugaag

SEQ ID NO: 660955 - RNA, 19 nt, Artificial Sequence
  Description of Artificial Sequence: Synthetic oligonucleotide
cuaguuuagcaucucgaag

SEQ ID NO: 660956 - RNA, 19 nt, Artificial Sequence
  Description of Artificial Sequence: Synthetic oligonucleotide
ucuaguuuagcaucucgaa

SEQ ID NO: 660957 - RNA, 19 nt, Artificial Sequence
  Description of Artificial Sequence: Synthetic oligonucleotide
cuuaucuagcccauaagca

SEQ ID NO: 660958 - RNA, 19 nt, Artificial Sequence
  Description of Artificial Sequence: Synthetic oligonucleotide
caacugaugauuucauuac

SEQ ID NO: 660959 - RNA, 19 nt, Artificial Sequence
  Description of Artificial Sequence: Synthetic oligonucleotide
agaaccauagaggacaccu

SEQ ID NO: 660960 - RNA, 19 nt, Artificial Sequence
  Description of Artificial Sequence: Synthetic oligonucleotide
guucauugauaauucgcag

SEQ ID NO: 660961 - RNA, 19 nt, Artificial Sequence
  Description of Artificial Sequence: Synthetic oligonucleotide
gguauagaaaucaauuccc

SEQ ID NO: 660962 - RNA, 19 nt, Artificial Sequence
  Description of Artificial Sequence: Synthetic oligonucleotide
agcacauuccuuucagcuc

SEQ ID NO: 660963 - RNA, 19 nt, Artificial Sequence
  Description of Artificial Sequence: Synthetic oligonucleotide
uuggugauagugaucuugu

SEQ ID NO: 660964 - RNA, 19 nt, Artificial Sequence
  Description of Artificial Sequence: Synthetic oligonucleotide
uggacugacuuaauccacc

SEQ ID NO: 660965 - RNA, 19 nt, Artificial Sequence
  Description of Artificial Sequence: Synthetic oligonucleotide
gugguauugcgcuugauga

SEQ ID NO: 660966 - RNA, 19 nt, Artificial Sequence
  Description of Artificial Sequence: Synthetic oligonucleotide
agcacucugguacagcuug

SEQ ID NO: 660967 - RNA, 19 nt, Artificial Sequence
  Description of Artificial Sequence: Synthetic oligonucleotide
aaucgagcacggguaaugg

SEQ ID NO: 660968 - RNA, 19 nt, Artificial Sequence
  Description of Artificial Sequence: Synthetic oligonucleotide
aagcaacauagcuuggcgu

SEQ ID NO: 660969 - RNA, 19 nt, Artificial Sequence
  Description of Artificial Sequence: Synthetic oligonucleotide
cugaaugagcacaccaggc

SEQ ID NO: 660970 - RNA, 19 nt, Artificial Sequence
  Description of Artificial Sequence: Synthetic oligonucleotide
gguggaaccacccaccaag

SEQ ID NO: 660971 - RNA, 19 nt, Artificial Sequence
  Description of Artificial Sequence: Synthetic oligonucleotide
auucuucgaaucgagcacg

SEQ ID NO: 660972 - RNA, 19 nt, Artificial Sequence
  Description of Artificial Sequence: Synthetic oligonucleotide
uccagagugccucggaaca

SEQ ID NO: 660973 - RNA, 19 nt, Artificial Sequence
  Description of Artificial Sequence: Synthetic oligonucleotide
ucugguggaaccacccacc

SEQ ID NO: 660974 - RNA, 19 nt, Artificial Sequence
  Description of Artificial Sequence: Synthetic oligonucleotide
uaucuagcccauaagcaau

SEQ ID NO: 660975 - RNA, 19 nt, Artificial Sequence
  Description of Artificial Sequence: Synthetic oligonucleotide
ugcuggaagacacccacac

SEQ ID NO: 660976 - RNA, 19 nt, Artificial Sequence
  Description of Artificial Sequence: Synthetic oligonucleotide
aguaaaagcaacauagcuu

SEQ ID NO: 660977 - RNA, 19 nt, Artificial Sequence
  Description of Artificial Sequence: Synthetic oligonucleotide
auagaggacaccuccucug

SEQ ID NO: 660978 - RNA, 19 nt, Artificial Sequence
  Description of Artificial Sequence: Synthetic oligonucleotide
uuucccuguggaacaaugc

SEQ ID NO: 660979 - RNA, 19 nt, Artificial Sequence
  Description of Artificial Sequence: Synthetic oligonucleotide
auagugaggauagacacau

SEQ ID NO: 660980 - RNA, 19 nt, Artificial Sequence
  Description of Artificial Sequence: Synthetic oligonucleotide
ucugguacagcuugguaau

SEQ ID NO: 660981 - RNA, 19 nt, Artificial Sequence
  Description of Artificial Sequence: Synthetic oligonucleotide
agauagaauggccgccugg

SEQ ID NO: 660982 - RNA, 19 nt, Artificial Sequence
  Description of Artificial Sequence: Synthetic oligonucleotide
uucgccuucauagaccuga

SEQ ID NO: 660983 - RNA, 19 nt, Artificial Sequence
  Description of Artificial Sequence: Synthetic oligonucleotide
agucugauucuuauccagc

SEQ ID NO: 660984 - RNA, 19 nt, Artificial Sequence
  Description of Artificial Sequence: Synthetic oligonucleotide
aaaccuacguccgaucaga

SEQ ID NO: 660985 - RNA, 19 nt, Artificial Sequence
  Description of Artificial Sequence: Synthetic oligonucleotide
ucuacagcagagacauuga

SEQ ID NO: 660986 - RNA, 19 nt, Artificial Sequence
  Description of Artificial Sequence: Synthetic oligonucleotide
uuucgcuuaaacucagcaa

SEQ ID NO: 660987 - RNA, 19 nt, Artificial Sequence
  Description of Artificial Sequence: Synthetic oligonucleotide
uuaucuccaccuuuccaug

SEQ ID NO: 660988 - RNA, 19 nt, Artificial Sequence
  Description of Artificial Sequence: Synthetic oligonucleotide
ggaucugugacuugucuag

SEQ ID NO: 660989 - RNA, 19 nt, Artificial Sequence
  Description of Artificial Sequence: Synthetic oligonucleotide
uucgaaucgagcacgggua

SEQ ID NO: 660990 - RNA, 19 nt, Artificial Sequence
  Description of Artificial Sequence: Synthetic oligonucleotide
cuuggacugacuuaaucca

SEQ ID NO: 660991 - RNA, 19 nt, Artificial Sequence
  Description of Artificial Sequence: Synthetic oligonucleotide
uucuucgaaucgagcacgg

SEQ ID NO: 660992 - RNA, 19 nt, Artificial Sequence
  Description of Artificial Sequence: Synthetic oligonucleotide
ugguauugcgcuugaugag

SEQ ID NO: 660993 - RNA, 19 nt, Artificial Sequence
  Description of Artificial Sequence: Synthetic oligonucleotide
uuugcccguucacaggcag

SEQ ID NO: 660994 - RNA, 19 nt, Artificial Sequence
  Description of Artificial Sequence: Synthetic oligonucleotide
ucgcuuaaacucagcaaug

SEQ ID NO: 660995 - RNA, 19 nt, Artificial Sequence
  Description of Artificial Sequence: Synthetic oligonucleotide
auagaccugaaugagcaca

SEQ ID NO: 660996 - RNA, 19 nt, Artificial Sequence
  Description of Artificial Sequence: Synthetic oligonucleotide
caucuuuuguagccugucg

SEQ ID NO: 660997 - RNA, 19 nt, Artificial Sequence
  Description of Artificial Sequence: Synthetic oligonucleotide
uaauggagguauagaaauc

SEQ ID NO: 660998 - RNA, 19 nt, Artificial Sequence
  Description of Artificial Sequence: Synthetic oligonucleotide
auaagcaauagcagcagca

SEQ ID NO: 660999 - RNA, 19 nt, Artificial Sequence
  Description of Artificial Sequence: Synthetic oligonucleotide
auagaauggccgccuggac

SEQ ID NO: 661000 - RNA, 19 nt, Artificial Sequence
  Description of Artificial Sequence: Synthetic oligonucleotide
uccccaauuaaucguucug

SEQ ID NO: 661001 - RNA, 19 nt, Artificial Sequence
  Description of Artificial Sequence: Synthetic oligonucleotide
cauccaagagcaacaaauc

SEQ ID NO: 661002 - RNA, 19 nt, Artificial Sequence
  Description of Artificial Sequence: Synthetic oligonucleotide
uggagguauagaaaucaau

SEQ ID NO: 661003 - RNA, 19 nt, Artificial Sequence
  Description of Artificial Sequence: Synthetic oligonucleotide
uccgaucagacguuuggca

SEQ ID NO: 661004 - RNA, 19 nt, Artificial Sequence
  Description of Artificial Sequence: Synthetic oligonucleotide
ggugccaagaucaauacca

SEQ ID NO: 661005 - RNA, 19 nt, Artificial Sequence
  Description of Artificial Sequence: Synthetic oligonucleotide
cuuaucuacagcagagaca

SEQ ID NO: 661006 - RNA, 19 nt, Artificial Sequence
  Description of Artificial Sequence: Synthetic oligonucleotide
guugaaagcauaggacucc

SEQ ID NO: 661007 - RNA, 19 nt, Artificial Sequence
  Description of Artificial Sequence: Synthetic oligonucleotide
uuggacugacuuaauccac

SEQ ID NO: 661008 - RNA, 19 nt, Artificial Sequence
  Description of Artificial Sequence: Synthetic oligonucleotide
aucaaaccuacguccgauc

SEQ ID NO: 661009 - RNA, 19 nt, Artificial Sequence
  Description of Artificial Sequence: Synthetic oligonucleotide
caaccuucuuaucuagccc

SEQ ID NO: 661010 - RNA, 19 nt, Artificial Sequence
  Description of Artificial Sequence: Synthetic oligonucleotide
auaguuccagcaucuuuug

SEQ ID NO: 661011 - RNA, 19 nt, Artificial Sequence
  Description of Artificial Sequence: Synthetic oligonucleotide
gcuucaucgggguuaaugc

SEQ ID NO: 661012 - RNA, 19 nt, Artificial Sequence
  Description of Artificial Sequence: Synthetic oligonucleotide
uccaugcuggaagacaccc

SEQ ID NO: 661013 - RNA, 19 nt, Artificial Sequence
  Description of Artificial Sequence: Synthetic oligonucleotide
gauucugguggaaccaccc

SEQ ID NO: 661014 - RNA, 19 nt, Artificial Sequence
  Description of Artificial Sequence: Synthetic oligonucleotide
ugaaaugguugaccauucu

SEQ ID NO: 661015 - RNA, 19 nt, Artificial Sequence
  Description of Artificial Sequence: Synthetic oligonucleotide
auuaaucguucugugucag

SEQ ID NO: 661016 - RNA, 19 nt, Artificial Sequence
  Description of Artificial Sequence: Synthetic oligonucleotide
gagagggugcgcuuugccc

SEQ ID NO: 661017 - RNA, 19 nt, Artificial Sequence
  Description of Artificial Sequence: Synthetic oligonucleotide
aucucgaagggccuucucu

SEQ ID NO: 661018 - RNA, 19 nt, Artificial Sequence
  Description of Artificial Sequence: Synthetic oligonucleotide
ugauucuuauccagccaac

SEQ ID NO: 661019 - RNA, 19 nt, Artificial Sequence
  Description of Artificial Sequence: Synthetic oligonucleotide
ugccuguaaguucaaacuu

SEQ ID NO: 661020 - RNA, 19 nt, Artificial Sequence
  Description of Artificial Sequence: Synthetic oligonucleotide
cuccagauagaauggccgc

SEQ ID NO: 661021 - RNA, 19 nt, Artificial Sequence
  Description of Artificial Sequence: Synthetic oligonucleotide
augcuacaccucuacuugg

SEQ ID NO: 661022 - RNA, 19 nt, Artificial Sequence
  Description of Artificial Sequence: Synthetic oligonucleotide
gguauugcgcuugaugagg

SEQ ID NO: 661023 - RNA, 19 nt, Artificial Sequence
  Description of Artificial Sequence: Synthetic oligonucleotide
cugauugucagaauaggua

SEQ ID NO: 661024 - RNA, 19 nt, Artificial Sequence
  Description of Artificial Sequence: Synthetic oligonucleotide
uaaucguucugugucagua

SEQ ID NO: 661025 - RNA, 19 nt, Artificial Sequence
  Description of Artificial Sequence: Synthetic oligonucleotide
ucgguuacccuggucauug

SEQ ID NO: 661026 - RNA, 19 nt, Artificial Sequence
  Description of Artificial Sequence: Synthetic oligonucleotide
uuagcaucucgaagggccu

SEQ ID NO: 661027 - RNA, 19 nt, Artificial Sequence
  Description of Artificial Sequence: Synthetic oligonucleotide
cauugaggaugccauuggc

SEQ ID NO: 661028 - RNA, 19 nt, Artificial Sequence
  Description of Artificial Sequence: Synthetic oligonucleotide
agugaauucuuggaggaaa

SEQ ID NO: 661029 - RNA, 19 nt, Artificial Sequence
  Description of Artificial Sequence: Synthetic oligonucleotide
ugaaagcauaggacuccag

SEQ ID NO: 661030 - RNA, 19 nt, Artificial Sequence
  Description of Artificial Sequence: Synthetic oligonucleotide
caauuaucuccaccuuucc

SEQ ID NO: 661031 - RNA, 19 nt, Artificial Sequence
  Description of Artificial Sequence: Synthetic oligonucleotide
auaucagacugaacaacag

SEQ ID NO: 661032 - RNA, 19 nt, Artificial Sequence
  Description of Artificial Sequence: Synthetic oligonucleotide
gguucgguuacccugguca

SEQ ID NO: 661033 - RNA, 19 nt, Artificial Sequence
  Description of Artificial Sequence: Synthetic oligonucleotide
gauagaauggccgccugga

SEQ ID NO: 661034 - RNA, 19 nt, Artificial Sequence
  Description of Artificial Sequence: Synthetic oligonucleotide
ugcuacaccucuacuugga

SEQ ID NO: 661035 - RNA, 19 nt, Artificial Sequence
  Description of Artificial Sequence: Synthetic oligonucleotide
uggaacaaugcuacaccuc

SEQ ID NO: 661036 - RNA, 19 nt, Artificial Sequence
  Description of Artificial Sequence: Synthetic oligonucleotide
gaccugaaugagcacacca

SEQ ID NO: 661037 - RNA, 19 nt, Artificial Sequence
  Description of Artificial Sequence: Synthetic oligonucleotide
ggugguauugcgcuugaug

SEQ ID NO: 661038 - RNA, 19 nt, Artificial Sequence
  Description of Artificial Sequence: Synthetic oligonucleotide
augaaaugguugaccauuc

SEQ ID NO: 661039 - RNA, 19 nt, Artificial Sequence
  Description of Artificial Sequence: Synthetic oligonucleotide
aagugggugucuccagcug

SEQ ID NO: 661040 - RNA, 19 nt, Artificial Sequence
  Description of Artificial Sequence: Synthetic oligonucleotide
cagucuucccgagauaggc

SEQ ID NO: 661041 - RNA, 19 nt, Artificial Sequence
  Description of Artificial Sequence: Synthetic oligonucleotide
accuacguccgaucagacg

SEQ ID NO: 661042 - RNA, 19 nt, Artificial Sequence
  Description of Artificial Sequence: Synthetic oligonucleotide
uggugccaagaucaauacc

SEQ ID NO: 661043 - RNA, 19 nt, Artificial Sequence
  Description of Artificial Sequence: Synthetic oligonucleotide
ccaaccuucuuaucuagcc

SEQ ID NO: 661044 - RNA, 19 nt, Artificial Sequence
  Description of Artificial Sequence: Synthetic oligonucleotide
acauagcuuggcgugguuc

SEQ ID NO: 661045 - RNA, 19 nt, Artificial Sequence
  Description of Artificial Sequence: Synthetic oligonucleotide
ugacuuaauccaccucuuc

SEQ ID NO: 661046 - RNA, 19 nt, Artificial Sequence
  Description of Artificial Sequence: Synthetic oligonucleotide
agcauaggacuccagugaa

SEQ ID NO: 661047 - RNA, 19 nt, Artificial Sequence
  Description of Artificial Sequence: Synthetic oligonucleotide
caucauugaucuugccuug

SEQ ID NO: 661048 - RNA, 19 nt, Artificial Sequence
  Description of Artificial Sequence: Synthetic oligonucleotide
cuguggaacaaugcuacac

SEQ ID NO: 661049 - RNA, 19 nt, Artificial Sequence
  Description of Artificial Sequence: Synthetic oligonucleotide
caaaccuacguccgaucag

SEQ ID NO: 661050 - RNA, 19 nt, Artificial Sequence
  Description of Artificial Sequence: Synthetic oligonucleotide
ugucauggaucugugacuu

SEQ ID NO: 661051 - RNA, 19 nt, Artificial Sequence
  Description of Artificial Sequence: Synthetic oligonucleotide
gcaaccugauucuucgcgg

SEQ ID NO: 661052 - RNA, 19 nt, Artificial Sequence
  Description of Artificial Sequence: Synthetic oligonucleotide
uugaaagcauaggacucca

SEQ ID NO: 661053 - RNA, 19 nt, Artificial Sequence
  Description of Artificial Sequence: Synthetic oligonucleotide
aucguucugugucaguaaa

SEQ ID NO: 661054 - RNA, 19 nt, Artificial Sequence
  Description of Artificial Sequence: Synthetic oligonucleotide
uggaucugugacuugucua

SEQ ID NO: 661055 - RNA, 19 nt, Artificial Sequence
  Description of Artificial Sequence: Synthetic oligonucleotide
cugugucaguaaaagcaac

SEQ ID NO: 661056 - RNA, 19 nt, Artificial Sequence
  Description of Artificial Sequence: Synthetic oligonucleotide
gaaucuuggggauucuggu

SEQ ID NO: 661057 - RNA, 19 nt, Artificial Sequence
  Description of Artificial Sequence: Synthetic oligonucleotide
ugcuucauaucagacugaa

SEQ ID NO: 661058 - RNA, 19 nt, Artificial Sequence
  Description of Artificial Sequence: Synthetic oligonucleotide
ucucgaagggccuucucua

SEQ ID NO: 661059 - RNA, 19 nt, Artificial Sequence
  Description of Artificial Sequence: Synthetic oligonucleotide
acaaugcuacaccucuacu

SEQ ID NO: 661060 - RNA, 19 nt, Artificial Sequence
  Description of Artificial Sequence: Synthetic oligonucleotide
ugaucuugccuugaaguuu

SEQ ID NO: 661061 - RNA, 19 nt, Artificial Sequence
  Description of Artificial Sequence: Synthetic oligonucleotide
cuguuaucaaagucuucuc

SEQ ID NO: 661062 - RNA, 19 nt, Artificial Sequence
  Description of Artificial Sequence: Synthetic oligonucleotide
ucuagcccauaagcaauag

SEQ ID NO: 661063 - RNA, 19 nt, Artificial Sequence
  Description of Artificial Sequence: Synthetic oligonucleotide
agcuugguaaugauggggu

SEQ ID NO: 661064 - RNA, 19 nt, Artificial Sequence
  Description of Artificial Sequence: Synthetic oligonucleotide
accugaaugagcacaccag

SEQ ID NO: 661065 - RNA, 19 nt, Artificial Sequence
  Description of Artificial Sequence: Synthetic oligonucleotide
cagacguuuggcaucaaaa

SEQ ID NO: 661066 - RNA, 19 nt, Artificial Sequence
  Description of Artificial Sequence: Synthetic oligonucleotide
ugccaagaucaauaccaac

SEQ ID NO: 661067 - RNA, 19 nt, Artificial Sequence
  Description of Artificial Sequence: Synthetic oligonucleotide
cuccaaccuucuuaucuag

SEQ ID NO: 661068 - RNA, 19 nt, Artificial Sequence
  Description of Artificial Sequence: Synthetic oligonucleotide
gagggaugccuguaaguuc

SEQ ID NO: 661069 - RNA, 19 nt, Artificial Sequence
  Description of Artificial Sequence: Synthetic oligonucleotide
uuaaucguucugugucagu

SEQ ID NO: 661070 - RNA, 19 nt, Artificial Sequence
  Description of Artificial Sequence: Synthetic oligonucleotide
ucaauaccaacugcagguc

SEQ ID NO: 661071 - RNA, 19 nt, Artificial Sequence
  Description of Artificial Sequence: Synthetic oligonucleotide
gcauucaauucuucgaauc

SEQ ID NO: 661072 - RNA, 19 nt, Artificial Sequence
  Description of Artificial Sequence: Synthetic oligonucleotide
ucgaaucgagcacggguaa

SEQ ID NO: 661073 - RNA, 19 nt, Artificial Sequence
  Description of Artificial Sequence: Synthetic oligonucleotide
agaagcaccaccagaugga

SEQ ID NO: 661074 - RNA, 19 nt, Artificial Sequence
  Description of Artificial Sequence: Synthetic oligonucleotide
ugucgcugagaaucauuga

SEQ ID NO: 661075 - RNA, 19 nt, Artificial Sequence
  Description of Artificial Sequence: Synthetic oligonucleotide
guaacagucuucccgagau

SEQ ID NO: 661076 - RNA, 19 nt, Artificial Sequence
  Description of Artificial Sequence: Synthetic oligonucleotide
gagaaucauugaaguaggc

SEQ ID NO: 661077 - RNA, 19 nt, Artificial Sequence
  Description of Artificial Sequence: Synthetic oligonucleotide
gagaaucaaucucaauacu

SEQ ID NO: 661078 - RNA, 19 nt, Artificial Sequence
  Description of Artificial Sequence: Synthetic oligonucleotide
ucuucgaaucgagcacggg

SEQ ID NO: 661079 - RNA, 19 nt, Artificial Sequence
  Description of Artificial Sequence: Synthetic oligonucleotide
auccccaauuaaucguucu

SEQ ID NO: 661080 - RNA, 19 nt, Artificial Sequence
  Description of Artificial Sequence: Synthetic oligonucleotide
gaucagacguuuggcauca

SEQ ID NO: 661081 - RNA, 19 nt, Artificial Sequence
  Description of Artificial Sequence: Synthetic oligonucleotide
aggcugauugucagaauag

SEQ ID NO: 661082 - RNA, 19 nt, Artificial Sequence
  Description of Artificial Sequence: Synthetic oligonucleotide
ucggaacaggucagcauuc

SEQ ID NO: 661083 - RNA, 19 nt, Artificial Sequence
  Description of Artificial Sequence: Synthetic oligonucleotide
acgccugacagcucucuug

SEQ ID NO: 661084 - RNA, 19 nt, Artificial Sequence
  Description of Artificial Sequence: Synthetic oligonucleotide
guauucuacuuggaccuug

SEQ ID NO: 661085 - RNA, 19 nt, Artificial Sequence
  Description of Artificial Sequence: Synthetic oligonucleotide
ugguaacagucuucccgag

SEQ ID NO: 661086 - RNA, 19 nt, Artificial Sequence
  Description of Artificial Sequence: Synthetic oligonucleotide
aaccuacguccgaucagac

SEQ ID NO: 661087 - RNA, 19 nt, Artificial Sequence
  Description of Artificial Sequence: Synthetic oligonucleotide
guggugccaagaucaauac

SEQ ID NO: 661088 - RNA, 19 nt, Artificial Sequence
  Description of Artificial Sequence: Synthetic oligonucleotide
ucguucugugucaguaaaa

SEQ ID NO: 661089 - RNA, 19 nt, Artificial Sequence
  Description of Artificial Sequence: Synthetic oligonucleotide
agaccugaaugagcacacc

SEQ ID NO: 661090 - RNA, 19 nt, Artificial Sequence
  Description of Artificial Sequence: Synthetic oligonucleotide
uucgcggcauccccaauua

SEQ ID NO: 661091 - RNA, 19 nt, Artificial Sequence
  Description of Artificial Sequence: Synthetic oligonucleotide
gugaauucuuggaggaaac

SEQ ID NO: 661092 - RNA, 19 nt, Artificial Sequence
  Description of Artificial Sequence: Synthetic oligonucleotide
cugugcucuuaucuacagc

SEQ ID NO: 661093 - RNA, 19 nt, Artificial Sequence
  Description of Artificial Sequence: Synthetic oligonucleotide
uguuauccuuggucauggc

SEQ ID NO: 661094 - RNA, 19 nt, Artificial Sequence
  Description of Artificial Sequence: Synthetic oligonucleotide
cauagaccugaaugagcac

SEQ ID NO: 661095 - RNA, 19 nt, Artificial Sequence
  Description of Artificial Sequence: Synthetic oligonucleotide
gguaaugaugggguugcag

SEQ ID NO: 661096 - RNA, 19 nt, Artificial Sequence
  Description of Artificial Sequence: Synthetic oligonucleotide
ugauaauucgcaggacauu

SEQ ID NO: 661097 - RNA, 19 nt, Artificial Sequence
  Description of Artificial Sequence: Synthetic oligonucleotide
cauugauaauucgcaggac

SEQ ID NO: 661098 - RNA, 19 nt, Artificial Sequence
  Description of Artificial Sequence: Synthetic oligonucleotide
ccuguaaguucaaacuuuc

SEQ ID NO: 661099 - RNA, 19 nt, Artificial Sequence
  Description of Artificial Sequence: Synthetic oligonucleotide
guugaccauucuguuauca

SEQ ID NO: 661100 - RNA, 19 nt, Artificial Sequence
  Description of Artificial Sequence: Synthetic oligonucleotide
ucuucccgagauaggcuuc

SEQ ID NO: 661101 - RNA, 19 nt, Artificial Sequence
  Description of Artificial Sequence: Synthetic oligonucleotide
cagagugccucggaacagg

SEQ ID NO: 661102 - RNA, 19 nt, Artificial Sequence
  Description of Artificial Sequence: Synthetic oligonucleotide
cucgaagggccuucucuac

SEQ ID NO: 661103 - RNA, 19 nt, Artificial Sequence
  Description of Artificial Sequence: Synthetic oligonucleotide
auagcuuggcgugguucgg

SEQ ID NO: 661104 - RNA, 19 nt, Artificial Sequence
  Description of Artificial Sequence: Synthetic oligonucleotide
auaauucgcaggacauuca

SEQ ID NO: 661105 - RNA, 19 nt, Artificial Sequence
  Description of Artificial Sequence: Synthetic oligonucleotide
ccaacugaugauuucauua

SEQ ID NO: 661106 - RNA, 19 nt, Artificial Sequence
  Description of Artificial Sequence: Synthetic oligonucleotide
gcaauuaucuccaccuuuc

SEQ ID NO: 661107 - RNA, 19 nt, Artificial Sequence
  Description of Artificial Sequence: Synthetic oligonucleotide
acgcagacgccugacagcu

SEQ ID NO: 661108 - RNA, 19 nt, Artificial Sequence
  Description of Artificial Sequence: Synthetic oligonucleotide
uggcgacgagaccacacaa

SEQ ID NO: 661109 - RNA, 19 nt, Artificial Sequence
  Description of Artificial Sequence: Synthetic oligonucleotide
cuacaggguccagagugcc

SEQ ID NO: 661110 - RNA, 19 nt, Artificial Sequence
  Description of Artificial Sequence: Synthetic oligonucleotide
aucgagcacggguaaugga

SEQ ID NO: 661111 - RNA, 19 nt, Artificial Sequence
  Description of Artificial Sequence: Synthetic oligonucleotide
guauagaaaucaauucccu

SEQ ID NO: 661112 - RNA, 19 nt, Artificial Sequence
  Description of Artificial Sequence: Synthetic oligonucleotide
gggccagugcuucauauca

SEQ ID NO: 661113 - RNA, 19 nt, Artificial Sequence
  Description of Artificial Sequence: Synthetic oligonucleotide
agcaucucgaagggccuuc

SEQ ID NO: 661114 - RNA, 19 nt, Artificial Sequence
  Description of Artificial Sequence: Synthetic oligonucleotide
guuuagcaucucgaagggc

SEQ ID NO: 661115 - RNA, 19 nt, Artificial Sequence
  Description of Artificial Sequence: Synthetic oligonucleotide
gugacuugucuaguuuagc

SEQ ID NO: 661116 - RNA, 19 nt, Artificial Sequence
  Description of Artificial Sequence: Synthetic oligonucleotide
gcaggucccuuagacaugg

SEQ ID NO: 661117 - RNA, 19 nt, Artificial Sequence
  Description of Artificial Sequence: Synthetic oligonucleotide
agaaaucaauucccucaua

SEQ ID NO: 661118 - RNA, 19 nt, Artificial Sequence
  Description of Artificial Sequence: Synthetic oligonucleotide
cuucgaaucgagcacgggu

SEQ ID NO: 661119 - RNA, 19 nt, Artificial Sequence
  Description of Artificial Sequence: Synthetic oligonucleotide
cccaauuaaucguucugug

SEQ ID NO: 661120 - RNA, 19 nt, Artificial Sequence
  Description of Artificial Sequence: Synthetic oligonucleotide
acgagaccacacaaaaccu

SEQ ID NO: 661121 - RNA, 19 nt, Artificial Sequence
  Description of Artificial Sequence: Synthetic oligonucleotide
cauccccaauuaaucguuc

SEQ ID NO: 661122 - RNA, 19 nt, Artificial Sequence
  Description of Artificial Sequence: Synthetic oligonucleotide
caggcaguacgcagacgcc

SEQ ID NO: 661123 - RNA, 19 nt, Artificial Sequence
  Description of Artificial Sequence: Synthetic oligonucleotide
gguugcuugccuguaggcc

SEQ ID NO: 661124 - RNA, 19 nt, Artificial Sequence
  Description of Artificial Sequence: Synthetic oligonucleotide
uggcaauuaucuccaccuu

SEQ ID NO: 661125 - RNA, 19 nt, Artificial Sequence
  Description of Artificial Sequence: Synthetic oligonucleotide
gaaccauagaggacaccuc

SEQ ID NO: 661126 - RNA, 19 nt, Artificial Sequence
  Description of Artificial Sequence: Synthetic oligonucleotide
gguuacccuggucauuggc

SEQ ID NO: 661127 - RNA, 19 nt, Artificial Sequence
  Description of Artificial Sequence: Synthetic oligonucleotide
cugugacuugucuaguuua

SEQ ID NO: 661128 - RNA, 19 nt, Artificial Sequence
  Description of Artificial Sequence: Synthetic oligonucleotide
gaaagaggagugacaucca

SEQ ID NO: 661129 - RNA, 19 nt, Artificial Sequence
  Description of Artificial Sequence: Synthetic oligonucleotide
uucuucgcggcauccccaa

SEQ ID NO: 661130 - RNA, 19 nt, Artificial Sequence
  Description of Artificial Sequence: Synthetic oligonucleotide
gauugucagaauagguagu

SEQ ID NO: 661131 - RNA, 19 nt, Artificial Sequence
  Description of Artificial Sequence: Synthetic oligonucleotide
uaacagucuucccgagaua

SEQ ID NO: 661132 - RNA, 19 nt, Artificial Sequence
  Description of Artificial Sequence: Synthetic oligonucleotide
ggucauuggcaauuaucuc

SEQ ID NO: 661133 - RNA, 19 nt, Artificial Sequence
  Description of Artificial Sequence: Synthetic oligonucleotide
aacauagcuuggcgugguu

SEQ ID NO: 661134 - RNA, 19 nt, Artificial Sequence
  Description of Artificial Sequence: Synthetic oligonucleotide
gacaugguugcuugccugu

SEQ ID NO: 661135 - RNA, 19 nt, Artificial Sequence
  Description of Artificial Sequence: Synthetic oligonucleotide
gcaacauagcuuggcgugg

SEQ ID NO: 661136 - RNA, 19 nt, Artificial Sequence
  Description of Artificial Sequence: Synthetic oligonucleotide
caagagcaacaaauccuga

SEQ ID NO: 661137 - RNA, 19 nt, Artificial Sequence
  Description of Artificial Sequence: Synthetic oligonucleotide
caaugcuacaccucuacuu

SEQ ID NO: 661138 - RNA, 19 nt, Artificial Sequence
  Description of Artificial Sequence: Synthetic oligonucleotide
ggagguauagaaaucaauu

SEQ ID NO: 661139 - RNA, 19 nt, Artificial Sequence
  Description of Artificial Sequence: Synthetic oligonucleotide
cugacagcucucuuguucu

SEQ ID NO: 661140 - RNA, 19 nt, Artificial Sequence
  Description of Artificial Sequence: Synthetic oligonucleotide
gcgugguucgguuacccug

SEQ ID NO: 661141 - RNA, 19 nt, Artificial Sequence
  Description of Artificial Sequence: Synthetic oligonucleotide
guccgaucagacguuuggc

SEQ ID NO: 661142 - RNA, 19 nt, Artificial Sequence
  Description of Artificial Sequence: Synthetic oligonucleotide
cacccaccaagacaauguc

SEQ ID NO: 661143 - RNA, 19 nt, Artificial Sequence
  Description of Artificial Sequence: Synthetic oligonucleotide
ugguggaaccacccaccaa

SEQ ID NO: 661144 - RNA, 19 nt, Artificial Sequence
  Description of Artificial Sequence: Synthetic oligonucleotide
cagaauagguagugaaagu

SEQ ID NO: 661145 - RNA, 19 nt, Artificial Sequence
  Description of Artificial Sequence: Synthetic oligonucleotide
guauugcgcuugaugagga

SEQ ID NO: 661146 - RNA, 19 nt, Artificial Sequence
  Description of Artificial Sequence: Synthetic oligonucleotide
ggaggaaaccuuaucucuc

SEQ ID NO: 661147 - RNA, 19 nt, Artificial Sequence
  Description of Artificial Sequence: Synthetic oligonucleotide
gaggacaccuccucugggu

SEQ ID NO: 661148 - RNA, 19 nt, Artificial Sequence
  Description of Artificial Sequence: Synthetic oligonucleotide
ugcccguucacaggcagua

SEQ ID NO: 661149 - RNA, 19 nt, Artificial Sequence
  Description of Artificial Sequence: Synthetic oligonucleotide
cgugguucgguuacccugg

SEQ ID NO: 661150 - RNA, 19 nt, Artificial Sequence
  Description of Artificial Sequence: Synthetic oligonucleotide
ccuacguccgaucagacgu

SEQ ID NO: 661151 - RNA, 19 nt, Artificial Sequence
  Description of Artificial Sequence: Synthetic oligonucleotide
gguggugccaagaucaaua

SEQ ID NO: 661152 - RNA, 19 nt, Artificial Sequence
  Description of Artificial Sequence: Synthetic oligonucleotide
uugcccguucacaggcagu

SEQ ID NO: 661153 - RNA, 19 nt, Artificial Sequence
  Description of Artificial Sequence: Synthetic oligonucleotide
cuugcagaagcuucugaau

SEQ ID NO: 661154 - RNA, 19 nt, Artificial Sequence
  Description of Artificial Sequence: Synthetic oligonucleotide
gguaacagucuucccgaga

SEQ ID NO: 661155 - RNA, 19 nt, Artificial Sequence
  Description of Artificial Sequence: Synthetic oligonucleotide
ccguucacaggcaguacgc

SEQ ID NO: 661156 - RNA, 19 nt, Artificial Sequence
  Description of Artificial Sequence: Synthetic oligonucleotide
auaccaacugcaggucccu

SEQ ID NO: 661157 - RNA, 19 nt, Artificial Sequence
  Description of Artificial Sequence: Synthetic oligonucleotide
gcgcuuugcccguucacag

SEQ ID NO: 661158 - RNA, 19 nt, Artificial Sequence
  Description of Artificial Sequence: Synthetic oligonucleotide
gucauggaucugugacuug

SEQ ID NO: 661159 - RNA, 19 nt, Artificial Sequence
  Description of Artificial Sequence: Synthetic oligonucleotide
cuacaccucuacuuggacu

SEQ ID NO: 661160 - RNA, 19 nt, Artificial Sequence
  Description of Artificial Sequence: Synthetic oligonucleotide
auggagguauagaaaucaa

SEQ ID NO: 661161 - RNA, 19 nt, Artificial Sequence
  Description of Artificial Sequence: Synthetic oligonucleotide
uagugaggauagacacauc

SEQ ID NO: 661162 - RNA, 19 nt, Artificial Sequence
  Description of Artificial Sequence: Synthetic oligonucleotide
uguauucuacuuggaccuu

SEQ ID NO: 661163 - RNA, 19 nt, Artificial Sequence
  Description of Artificial Sequence: Synthetic oligonucleotide
cguccgaucagacguuugg

SEQ ID NO: 661164 - RNA, 19 nt, Artificial Sequence
  Description of Artificial Sequence: Synthetic oligonucleotide
gcgacgagaccacacaaaa

SEQ ID NO: 661165 - RNA, 19 nt, Artificial Sequence
  Description of Artificial Sequence: Synthetic oligonucleotide
cuggcgacgagaccacaca

SEQ ID NO: 661166 - RNA, 19 nt, Artificial Sequence
  Description of Artificial Sequence: Synthetic oligonucleotide
ucgccuucauagaccugaa

SEQ ID NO: 661167 - RNA, 19 nt, Artificial Sequence
  Description of Artificial Sequence: Synthetic oligonucleotide
gcagucugauucuuaucca

SEQ ID NO: 661168 - RNA, 19 nt, Artificial Sequence
  Description of Artificial Sequence: Synthetic oligonucleotide
cuucucuacaggguccaga

SEQ ID NO: 661169 - RNA, 19 nt, Artificial Sequence
  Description of Artificial Sequence: Synthetic oligonucleotide
gagauaggcuucugcaauu

SEQ ID NO: 661170 - RNA, 19 nt, Artificial Sequence
  Description of Artificial Sequence: Synthetic oligonucleotide
gcugagaaucauugaagua

SEQ ID NO: 661171 - RNA, 19 nt, Artificial Sequence
  Description of Artificial Sequence: Synthetic oligonucleotide
gaguagguggugccaagau

SEQ ID NO: 661172 - RNA, 19 nt, Artificial Sequence
  Description of Artificial Sequence: Synthetic oligonucleotide
ccugccugcaucguucacc

SEQ ID NO: 661173 - RNA, 19 nt, Artificial Sequence
  Description of Artificial Sequence: Synthetic oligonucleotide
ucccuuagacaugguugcu

SEQ ID NO: 661174 - RNA, 19 nt, Artificial Sequence
  Description of Artificial Sequence: Synthetic oligonucleotide
cggcauccccaauuaaucg

SEQ ID NO: 661175 - RNA, 19 nt, Artificial Sequence
  Description of Artificial Sequence: Synthetic oligonucleotide
ggauucugguggaaccacc

SEQ ID NO: 661176 - RNA, 19 nt, Artificial Sequence
  Description of Artificial Sequence: Synthetic oligonucleotide
cccgagauaggcuucugca

SEQ ID NO: 661177 - RNA, 19 nt, Artificial Sequence
  Description of Artificial Sequence: Synthetic oligonucleotide
gcuacaccucuacuuggac

SEQ ID NO: 661178 - RNA, 19 nt, Artificial Sequence
  Description of Artificial Sequence: Synthetic oligonucleotide
ugguucgguuacccugguc

SEQ ID NO: 661179 - RNA, 19 nt, Artificial Sequence
  Description of Artificial Sequence: Synthetic oligonucleotide
cuuuccaagcagguuguua

SEQ ID NO: 661180 - RNA, 19 nt, Artificial Sequence
  Description of Artificial Sequence: Synthetic oligonucleotide
cugguggaaccacccacca

SEQ ID NO: 661181 - RNA, 19 nt, Artificial Sequence
  Description of Artificial Sequence: Synthetic oligonucleotide
cagaaccauagaggacacc

SEQ ID NO: 661182 - RNA, 19 nt, Artificial Sequence
  Description of Artificial Sequence: Synthetic oligonucleotide
cccuuucgccuucauagac

SEQ ID NO: 661183 - RNA, 19 nt, Artificial Sequence
  Description of Artificial Sequence: Synthetic oligonucleotide
ggcauccccaauuaaucgu

SEQ ID NO: 661184 - RNA, 19 nt, Artificial Sequence
  Description of Artificial Sequence: Synthetic oligonucleotide
cucuucaaugguaggcccu

SEQ ID NO: 661185 - RNA, 19 nt, Artificial Sequence
  Description of Artificial Sequence: Synthetic oligonucleotide
gucuucccgagauaggcuu

SEQ ID NO: 661186 - RNA, 19 nt, Artificial Sequence
  Description of Artificial Sequence: Synthetic oligonucleotide
aucuagcccauaagcaaua

SEQ ID NO: 661187 - RNA, 19 nt, Artificial Sequence
  Description of Artificial Sequence: Synthetic oligonucleotide
cugugcuggcgacgagacc

SEQ ID NO: 661188 - RNA, 19 nt, Artificial Sequence
  Description of Artificial Sequence: Synthetic oligonucleotide
gaacaaugcuacaccucua

SEQ ID NO: 661189 - RNA, 19 nt, Artificial Sequence
  Description of Artificial Sequence: Synthetic oligonucleotide
cuacuuggaccuugggccu

SEQ ID NO: 661190 - RNA, 19 nt, Artificial Sequence
  Description of Artificial Sequence: Synthetic oligonucleotide
cugguacagcuugguaaug

SEQ ID NO: 661191 - RNA, 19 nt, Artificial Sequence
  Description of Artificial Sequence: Synthetic oligonucleotide
gugccucggaacaggucag

SEQ ID NO: 661192 - RNA, 19 nt, Artificial Sequence
  Description of Artificial Sequence: Synthetic oligonucleotide
agccaacugaugauuucau

SEQ ID NO: 661193 - RNA, 19 nt, Artificial Sequence
  Description of Artificial Sequence: Synthetic oligonucleotide
accucuacuuggacugacu

SEQ ID NO: 661194 - RNA, 19 nt, Artificial Sequence
  Description of Artificial Sequence: Synthetic oligonucleotide
gcuccaaccuucuuaucua

SEQ ID NO: 661195 - RNA, 19 nt, Artificial Sequence
  Description of Artificial Sequence: Synthetic oligonucleotide
gcggcauccccaauuaauc

SEQ ID NO: 661196 - RNA, 19 nt, Artificial Sequence
  Description of Artificial Sequence: Synthetic oligonucleotide
agacgccugacagcucucu

SEQ ID NO: 661197 - RNA, 19 nt, Artificial Sequence
  Description of Artificial Sequence: Synthetic oligonucleotide
cuuugcccguucacaggca

SEQ ID NO: 661198 - RNA, 19 nt, Artificial Sequence
  Description of Artificial Sequence: Synthetic oligonucleotide
ucgcggcauccccaauuaa

SEQ ID NO: 661199 - RNA, 19 nt, Artificial Sequence
  Description of Artificial Sequence: Synthetic oligonucleotide
cacaggcaguacgcagacg

SEQ ID NO: 661200 - RNA, 19 nt, Artificial Sequence
  Description of Artificial Sequence: Synthetic oligonucleotide
uucgguuacccuggucauu

SEQ ID NO: 661201 - RNA, 19 nt, Artificial Sequence
  Description of Artificial Sequence: Synthetic oligonucleotide
ccaauuaaucguucugugu

SEQ ID NO: 661202 - RNA, 19 nt, Artificial Sequence
  Description of Artificial Sequence: Synthetic oligonucleotide
ggcaguacgcagacgccug

SEQ ID NO: 661203 - RNA, 19 nt, Artificial Sequence
  Description of Artificial Sequence: Synthetic oligonucleotide
gcugauugucagaauaggu

SEQ ID NO: 661204 - RNA, 19 nt, Artificial Sequence
  Description of Artificial Sequence: Synthetic oligonucleotide
ucuucgcggcauccccaau

SEQ ID NO: 661205 - RNA, 19 nt, Artificial Sequence
  Description of Artificial Sequence: Synthetic oligonucleotide
gaucugugacuugucuagu

SEQ ID NO: 661206 - RNA, 19 nt, Artificial Sequence
  Description of Artificial Sequence: Synthetic oligonucleotide
caguacgcagacgccugac

SEQ ID NO: 661207 - RNA, 19 nt, Artificial Sequence
  Description of Artificial Sequence: Synthetic oligonucleotide
cgaucagacguuuggcauc

SEQ ID NO: 661208 - RNA, 19 nt, Artificial Sequence
  Description of Artificial Sequence: Synthetic oligonucleotide
uacguccgaucagacguuu

SEQ ID NO: 661209 - RNA, 19 nt, Artificial Sequence
  Description of Artificial Sequence: Synthetic oligonucleotide
uucccgagauaggcuucug

SEQ ID NO: 661210 - RNA, 19 nt, Artificial Sequence
  Description of Artificial Sequence: Synthetic oligonucleotide
guaccaccucccaagucaa

SEQ ID NO: 661211 - RNA, 19 nt, Artificial Sequence
  Description of Artificial Sequence: Synthetic oligonucleotide
caauucccucauagagaga

SEQ ID NO: 661212 - RNA, 19 nt, Artificial Sequence
  Description of Artificial Sequence: Synthetic oligonucleotide
gcugugcuggcgacgagac

SEQ ID NO: 661213 - RNA, 19 nt, Artificial Sequence
  Description of Artificial Sequence: Synthetic oligonucleotide
gcagacgccugacagcucu

SEQ ID NO: 661214 - RNA, 19 nt, Artificial Sequence
  Description of Artificial Sequence: Synthetic oligonucleotide
ugcuugccuguaggcccgg

SEQ ID NO: 661215 - RNA, 19 nt, Artificial Sequence
  Description of Artificial Sequence: Synthetic oligonucleotide
guucgguuacccuggucau

SEQ ID NO: 661216 - RNA, 19 nt, Artificial Sequence
  Description of Artificial Sequence: Synthetic oligonucleotide
gguccagagugccucggaa

SEQ ID NO: 661217 - RNA, 19 nt, Artificial Sequence
  Description of Artificial Sequence: Synthetic oligonucleotide
acaccucuacuuggacuga

SEQ ID NO: 661218 - RNA, 19 nt, Artificial Sequence
  Description of Artificial Sequence: Synthetic oligonucleotide
augcuggaagacacccaca

SEQ ID NO: 661219 - RNA, 19 nt, Artificial Sequence
  Description of Artificial Sequence: Synthetic oligonucleotide
gagugccucggaacagguc

SEQ ID NO: 661220 - RNA, 19 nt, Artificial Sequence
  Description of Artificial Sequence: Synthetic oligonucleotide
augagcacaccaggcugau

SEQ ID NO: 661221 - RNA, 19 nt, Artificial Sequence
  Description of Artificial Sequence: Synthetic oligonucleotide
cugacuuaauccaccucuu

SEQ ID NO: 661222 - RNA, 19 nt, Artificial Sequence
  Description of Artificial Sequence: Synthetic oligonucleotide
acaugguugcuugccugua

SEQ ID NO: 661223 - RNA, 19 nt, Artificial Sequence
  Description of Artificial Sequence: Synthetic oligonucleotide
agguggugccaagaucaau

SEQ ID NO: 661224 - RNA, 19 nt, Artificial Sequence
  Description of Artificial Sequence: Synthetic oligonucleotide
gugcuucauaucagacuga

SEQ ID NO: 661225 - RNA, 19 nt, Artificial Sequence
  Description of Artificial Sequence: Synthetic oligonucleotide
gcuucauaucagacugaac

SEQ ID NO: 661226 - RNA, 19 nt, Artificial Sequence
  Description of Artificial Sequence: Synthetic oligonucleotide
caucaaaccuacguccgau

SEQ ID NO: 661227 - RNA, 19 nt, Artificial Sequence
  Description of Artificial Sequence: Synthetic oligonucleotide
cgacgagaccacacaaaac

SEQ ID NO: 661228 - RNA, 19 nt, Artificial Sequence
  Description of Artificial Sequence: Synthetic oligonucleotide
cagacgccugacagcucuc

SEQ ID NO: 661229 - RNA, 19 nt, Artificial Sequence
  Description of Artificial Sequence: Synthetic oligonucleotide
cgcuuugcccguucacagg

SEQ ID NO: 661230 - RNA, 19 nt, Artificial Sequence
  Description of Artificial Sequence: Synthetic oligonucleotide
ggagggaugccuguaaguu

SEQ ID NO: 661231 - RNA, 19 nt, Artificial Sequence
  Description of Artificial Sequence: Synthetic oligonucleotide
cagugaauucuuggaggaa

SEQ ID NO: 661232 - RNA, 19 nt, Artificial Sequence
  Description of Artificial Sequence: Synthetic oligonucleotide
ggugcgcuuugcccguuca

SEQ ID NO: 661233 - RNA, 19 nt, Artificial Sequence
  Description of Artificial Sequence: Synthetic oligonucleotide
gcuggcgacgagaccacac

SEQ ID NO: 661234 - RNA, 19 nt, Artificial Sequence
  Description of Artificial Sequence: Synthetic oligonucleotide
gguucauugcaaccugauu

SEQ ID NO: 661235 - RNA, 19 nt, Artificial Sequence
  Description of Artificial Sequence: Synthetic oligonucleotide
gaccuugggccugccugca

SEQ ID NO: 661236 - RNA, 19 nt, Artificial Sequence
  Description of Artificial Sequence: Synthetic oligonucleotide
ccgagauaggcuucugcaa

SEQ ID NO: 661237 - RNA, 19 nt, Artificial Sequence
  Description of Artificial Sequence: Synthetic oligonucleotide
ccucauagagagaaucaau

SEQ ID NO: 661238 - RNA, 19 nt, Artificial Sequence
  Description of Artificial Sequence: Synthetic oligonucleotide
uggugguauugcgcuugau

SEQ ID NO: 661239 - RNA, 19 nt, Artificial Sequence
  Description of Artificial Sequence: Synthetic oligonucleotide
cuucgcggcauccccaauu

SEQ ID NO: 661240 - RNA, 19 nt, Artificial Sequence
  Description of Artificial Sequence: Synthetic oligonucleotide
gggguucauugcaaccuga

SEQ ID NO: 661241 - RNA, 19 nt, Artificial Sequence
  Description of Artificial Sequence: Synthetic oligonucleotide
cgcugagaaucauugaagu

SEQ ID NO: 661242 - RNA, 19 nt, Artificial Sequence
  Description of Artificial Sequence: Synthetic oligonucleotide
gcaguacgcagacgccuga

SEQ ID NO: 661243 - RNA, 19 nt, Artificial Sequence
  Description of Artificial Sequence: Synthetic oligonucleotide
ggcgacgagaccacacaaa

SEQ ID NO: 661244 - RNA, 19 nt, Artificial Sequence
  Description of Artificial Sequence: Synthetic oligonucleotide
caacauagcuuggcguggu

SEQ ID NO: 661245 - RNA, 19 nt, Artificial Sequence
  Description of Artificial Sequence: Synthetic oligonucleotide
cuuggggauucugguggaa

SEQ ID NO: 661246 - RNA, 19 nt, Artificial Sequence
  Description of Artificial Sequence: Synthetic oligonucleotide
gccuguaaguucaaacuuu

SEQ ID NO: 661247 - RNA, 19 nt, Artificial Sequence
  Description of Artificial Sequence: Synthetic oligonucleotide
cacggguaauggagguaua

SEQ ID NO: 661248 - RNA, 19 nt, Artificial Sequence
  Description of Artificial Sequence: Synthetic oligonucleotide
ccccaauuaaucguucugu

SEQ ID NO: 661249 - RNA, 19 nt, Artificial Sequence
  Description of Artificial Sequence: Synthetic oligonucleotide
gacgccugacagcucucuu

SEQ ID NO: 661250 - RNA, 19 nt, Artificial Sequence
  Description of Artificial Sequence: Synthetic oligonucleotide
ccgaucagacguuuggcau

SEQ ID NO: 661251 - RNA, 19 nt, Artificial Sequence
  Description of Artificial Sequence: Synthetic oligonucleotide
ccaagcagguuguuauccu

SEQ ID NO: 661252 - RNA, 19 nt, Artificial Sequence
  Description of Artificial Sequence: Synthetic oligonucleotide
cuacuuggacugacuuaau

SEQ ID NO: 661253 - RNA, 19 nt, Artificial Sequence
  Description of Artificial Sequence: Synthetic oligonucleotide
ggcccggcugugcuggcga

SEQ ID NO: 661254 - RNA, 19 nt, Artificial Sequence
  Description of Artificial Sequence: Synthetic oligonucleotide
cgagauaggcuucugcaau

SEQ ID NO: 661255 - RNA, 19 nt, Artificial Sequence
  Description of Artificial Sequence: Synthetic oligonucleotide
cuacguccgaucagacguu

SEQ ID NO: 661256 - RNA, 19 nt, Artificial Sequence
  Description of Artificial Sequence: Synthetic oligonucleotide
gccaacugaugauuucauu

SEQ ID NO: 661257 - RNA, 19 nt, Artificial Sequence
  Description of Artificial Sequence: Synthetic oligonucleotide
ggaugccuguaaguucaaa

SEQ ID NO: 661258 - RNA, 19 nt, Artificial Sequence
  Description of Artificial Sequence: Synthetic oligonucleotide
gcuuggcgugguucgguua

SEQ ID NO: 661259 - RNA, 19 nt, Artificial Sequence
  Description of Artificial Sequence: Synthetic oligonucleotide
cgguuacccuggucauugg

SEQ ID NO: 661260 - RNA, 19 nt, Artificial Sequence
  Description of Artificial Sequence: Synthetic oligonucleotide
ggguucauugcaaccugau

SEQ ID NO: 661261 - RNA, 19 nt, Artificial Sequence
  Description of Artificial Sequence: Synthetic oligonucleotide
gugguucgguuacccuggu

SEQ ID NO: 661262 - RNA, 19 nt, Artificial Sequence
  Description of Artificial Sequence: Synthetic oligonucleotide
ggcgugguucgguuacccu

SEQ ID NO: 661263 - RNA, 19 nt, Artificial Sequence
  Description of Artificial Sequence: Synthetic oligonucleotide
aucagacguuuggcaucaa

SEQ ID NO: 661264 - RNA, 19 nt, Artificial Sequence
  Description of Artificial Sequence: Synthetic oligonucleotide
gugggugucuccagcuguu

SEQ ID NO: 661265 - RNA, 19 nt, Artificial Sequence
  Description of Artificial Sequence: Synthetic oligonucleotide
ggauggugguauugcgcuu

SEQ ID NO: 661266 - RNA, 19 nt, Artificial Sequence
  Description of Artificial Sequence: Synthetic oligonucleotide
ccucggaacaggucagcau

SEQ ID NO: 661267 - RNA, 19 nt, Artificial Sequence
  Description of Artificial Sequence: Synthetic oligonucleotide
cgcggcauccccaauuaau

SEQ ID NO: 661268 - RNA, 19 nt, Artificial Sequence
  Description of Artificial Sequence: Synthetic oligonucleotide
cgccugacagcucucuugu

SEQ ID NO: 661269 - RNA, 19 nt, Artificial Sequence
  Description of Artificial Sequence: Synthetic oligonucleotide
gcccggcugugcuggcgac

SEQ ID NO: 661270 - RNA, 19 nt, Artificial Sequence
  Description of Artificial Sequence: Synthetic oligonucleotide
gcaucucgaagggccuucu

SEQ ID NO: 661271 - RNA, 19 nt, Artificial Sequence
  Description of Artificial Sequence: Synthetic oligonucleotide
caggucccuuagacauggu

SEQ ID NO: 661272 - RNA, 19 nt, Artificial Sequence
  Description of Artificial Sequence: Synthetic oligonucleotide
cccuuagacaugguugcuu

SEQ ID NO: 661273 - RNA, 19 nt, Artificial Sequence
  Description of Artificial Sequence: Synthetic oligonucleotide
cgcagacgccugacagcuc

SEQ ID NO: 661274 - RNA, 19 nt, Artificial Sequence
  Description of Artificial Sequence: Synthetic oligonucleotide
cccuggucauuggcaauua

SEQ ID NO: 661275 - RNA, 19 nt, Artificial Sequence
  Description of Artificial Sequence: Synthetic oligonucleotide
gccugucgcugagaaucau

SEQ ID NO: 661276 - RNA, 19 nt, Artificial Sequence
  Description of Artificial Sequence: Synthetic oligonucleotide
cgaaucgagcacggguaau

SEQ ID NO: 661277 - RNA, 19 nt, Artificial Sequence
  Description of Artificial Sequence: Synthetic oligonucleotide
cgccuucauagaccugaau

SEQ ID NO: 661278 - RNA, 19 nt, Artificial Sequence
  Description of Artificial Sequence: Synthetic oligonucleotide
aaagcuacacugcagaagc

SEQ ID NO: 661279 - RNA, 19 nt, Artificial Sequence
  Description of Artificial Sequence: Synthetic oligonucleotide
aauaucauagccuguccac

SEQ ID NO: 661280 - RNA, 19 nt, Artificial Sequence
  Description of Artificial Sequence: Synthetic oligonucleotide
aacuguaacuacuagggag

SEQ ID NO: 661281 - RNA, 19 nt, Artificial Sequence
  Description of Artificial Sequence: Synthetic oligonucleotide
uacuaauaaggaaagauga

SEQ ID NO: 661282 - RNA, 19 nt, Artificial Sequence
  Description of Artificial Sequence: Synthetic oligonucleotide
ucugguacuaaacauuggg

SEQ ID NO: 661283 - RNA, 19 nt, Artificial Sequence
  Description of Artificial Sequence: Synthetic oligonucleotide
auuaggagcagugacaagc

SEQ ID NO: 661284 - RNA, 19 nt, Artificial Sequence
  Description of Artificial Sequence: Synthetic oligonucleotide
aaggauuaggagcagugac

SEQ ID NO: 661285 - RNA, 19 nt, Artificial Sequence
  Description of Artificial Sequence: Synthetic oligonucleotide
ucaggcaagacuaagcagc

SEQ ID NO: 661286 - RNA, 19 nt, Artificial Sequence
  Description of Artificial Sequence: Synthetic oligonucleotide
aguauaauccaccaaauua

SEQ ID NO: 661287 - RNA, 19 nt, Artificial Sequence
  Description of Artificial Sequence: Synthetic oligonucleotide
aaguuuagcagccacggcu

SEQ ID NO: 661288 - RNA, 19 nt, Artificial Sequence
  Description of Artificial Sequence: Synthetic oligonucleotide
aagaauugaguaaaaguag

SEQ ID NO: 661289 - RNA, 19 nt, Artificial Sequence
  Description of Artificial Sequence: Synthetic oligonucleotide
ugaacuguaauagugguga

SEQ ID NO: 661290 - RNA, 19 nt, Artificial Sequence
  Description of Artificial Sequence: Synthetic oligonucleotide
uuauuaauuagaacugaac

SEQ ID NO: 661291 - RNA, 19 nt, Artificial Sequence
  Description of Artificial Sequence: Synthetic oligonucleotide
uuaucguauccccugaacc

SEQ ID NO: 661292 - RNA, 19 nt, Artificial Sequence
  Description of Artificial Sequence: Synthetic oligonucleotide
uuugguaccuuauaccuug

SEQ ID NO: 661293 - RNA, 19 nt, Artificial Sequence
  Description of Artificial Sequence: Synthetic oligonucleotide
cagauagggagaaagauac

SEQ ID NO: 661294 - RNA, 19 nt, Artificial Sequence
  Description of Artificial Sequence: Synthetic oligonucleotide
aagaugauagaggagaaga

SEQ ID NO: 661295 - RNA, 19 nt, Artificial Sequence
  Description of Artificial Sequence: Synthetic oligonucleotide
uugaguaaaaguaggacau

SEQ ID NO: 661296 - RNA, 19 nt, Artificial Sequence
  Description of Artificial Sequence: Synthetic oligonucleotide
aaauaucauagccugucca

SEQ ID NO: 661297 - RNA, 19 nt, Artificial Sequence
  Description of Artificial Sequence: Synthetic oligonucleotide
aaaggcuuaacugugugug

SEQ ID NO: 661298 - RNA, 19 nt, Artificial Sequence
  Description of Artificial Sequence: Synthetic oligonucleotide
uagauuuguggguauagag

SEQ ID NO: 661299 - RNA, 19 nt, Artificial Sequence
  Description of Artificial Sequence: Synthetic oligonucleotide
aauaaucaaguguuuacuu

SEQ ID NO: 661300 - RNA, 19 nt, Artificial Sequence
  Description of Artificial Sequence: Synthetic oligonucleotide
aaauaaucaaguguuuacu

SEQ ID NO: 661301 - RNA, 19 nt, Artificial Sequence
  Description of Artificial Sequence: Synthetic oligonucleotide
agaaguaucagagcagugg

SEQ ID NO: 661302 - RNA, 19 nt, Artificial Sequence
  Description of Artificial Sequence: Synthetic oligonucleotide
aagcuaaagacugucacug

SEQ ID NO: 661303 - RNA, 19 nt, Artificial Sequence
  Description of Artificial Sequence: Synthetic oligonucleotide
uguaugugcaaaauguuua

SEQ ID NO: 661304 - RNA, 19 nt, Artificial Sequence
  Description of Artificial Sequence: Synthetic oligonucleotide
uguuuacuugaucaggugu

SEQ ID NO: 661305 - RNA, 19 nt, Artificial Sequence
  Description of Artificial Sequence: Synthetic oligonucleotide
gauauuauauuugugucuc

SEQ ID NO: 661306 - RNA, 19 nt, Artificial Sequence
  Description of Artificial Sequence: Synthetic oligonucleotide
agggacacuagauuugugg

SEQ ID NO: 661307 - RNA, 19 nt, Artificial Sequence
  Description of Artificial Sequence: Synthetic oligonucleotide
aagacuaagcagccaggac

SEQ ID NO: 661308 - RNA, 19 nt, Artificial Sequence
  Description of Artificial Sequence: Synthetic oligonucleotide
cuacuuugaacuguaauag

SEQ ID NO: 661309 - RNA, 19 nt, Artificial Sequence
  Description of Artificial Sequence: Synthetic oligonucleotide
gauuuaauguaaugugcug

SEQ ID NO: 661310 - RNA, 19 nt, Artificial Sequence
  Description of Artificial Sequence: Synthetic oligonucleotide
aaguguuuacuugaucagg

SEQ ID NO: 661311 - RNA, 19 nt, Artificial Sequence
  Description of Artificial Sequence: Synthetic oligonucleotide
uguaaugugcuguguaccc

SEQ ID NO: 661312 - RNA, 19 nt, Artificial Sequence
  Description of Artificial Sequence: Synthetic oligonucleotide
agacuaagcagccaggaca

SEQ ID NO: 661313 - RNA, 19 nt, Artificial Sequence
  Description of Artificial Sequence: Synthetic oligonucleotide
cuacuagggagcaaagucc

SEQ ID NO: 661314 - RNA, 19 nt, Artificial Sequence
  Description of Artificial Sequence: Synthetic oligonucleotide
auagagauuggcuuagcca

SEQ ID NO: 661315 - RNA, 19 nt, Artificial Sequence
  Description of Artificial Sequence: Synthetic oligonucleotide
ucugccggucaacauagcg

SEQ ID NO: 661316 - RNA, 19 nt, Artificial Sequence
  Description of Artificial Sequence: Synthetic oligonucleotide
uguaauaguggugauggga

SEQ ID NO: 661317 - RNA, 19 nt, Artificial Sequence
  Description of Artificial Sequence: Synthetic oligonucleotide
cuaaagacugucacugggg

SEQ ID NO: 661318 - RNA, 19 nt, Artificial Sequence
  Description of Artificial Sequence: Synthetic oligonucleotide
aguucuggcucuccuaugg

SEQ ID NO: 661319 - RNA, 19 nt, Artificial Sequence
  Description of Artificial Sequence: Synthetic oligonucleotide
uucuacuuaguucuggcuc

SEQ ID NO: 661320 - RNA, 19 nt, Artificial Sequence
  Description of Artificial Sequence: Synthetic oligonucleotide
uauagcaggaucugaacuc

SEQ ID NO: 661321 - RNA, 19 nt, Artificial Sequence
  Description of Artificial Sequence: Synthetic oligonucleotide
ucucggguugccaugaaca

SEQ ID NO: 661322 - RNA, 19 nt, Artificial Sequence
  Description of Artificial Sequence: Synthetic oligonucleotide
aguggagacagucagcaga

SEQ ID NO: 661323 - RNA, 19 nt, Artificial Sequence
  Description of Artificial Sequence: Synthetic oligonucleotide
auugagaagaauugaguaa

SEQ ID NO: 661324 - RNA, 19 nt, Artificial Sequence
  Description of Artificial Sequence: Synthetic oligonucleotide
uaucguauccccugaacca

SEQ ID NO: 661325 - RNA, 19 nt, Artificial Sequence
  Description of Artificial Sequence: Synthetic oligonucleotide
aaugaaaauggggaagaga

SEQ ID NO: 661326 - RNA, 19 nt, Artificial Sequence
  Description of Artificial Sequence: Synthetic oligonucleotide
aguuugauuuaauguaaug

SEQ ID NO: 661327 - RNA, 19 nt, Artificial Sequence
  Description of Artificial Sequence: Synthetic oligonucleotide
agagguauaugcuaacuaa

SEQ ID NO: 661328 - RNA, 19 nt, Artificial Sequence
  Description of Artificial Sequence: Synthetic oligonucleotide
gcuuagaaggauuaggagc

SEQ ID NO: 661329 - RNA, 19 nt, Artificial Sequence
  Description of Artificial Sequence: Synthetic oligonucleotide
auacuaauaaggaaagaug

SEQ ID NO: 661330 - RNA, 19 nt, Artificial Sequence
  Description of Artificial Sequence: Synthetic oligonucleotide
gaguaaaaguaggacaugc

SEQ ID NO: 661331 - RNA, 19 nt, Artificial Sequence
  Description of Artificial Sequence: Synthetic oligonucleotide
gacuucaauggguggaggg

SEQ ID NO: 661332 - RNA, 19 nt, Artificial Sequence
  Description of Artificial Sequence: Synthetic oligonucleotide
ucuacuuaguucuggcucu

SEQ ID NO: 661333 - RNA, 19 nt, Artificial Sequence
  Description of Artificial Sequence: Synthetic oligonucleotide
gauuggagggugcuggugc

SEQ ID NO: 661334 - RNA, 19 nt, Artificial Sequence
  Description of Artificial Sequence: Synthetic oligonucleotide
gagauaaccucugaaaaca

SEQ ID NO: 661335 - RNA, 19 nt, Artificial Sequence
  Description of Artificial Sequence: Synthetic oligonucleotide
ucaucuuggguacucuuga

SEQ ID NO: 661336 - RNA, 19 nt, Artificial Sequence
  Description of Artificial Sequence: Synthetic oligonucleotide
uuaacugugugugugcugu

SEQ ID NO: 661337 - RNA, 19 nt, Artificial Sequence
  Description of Artificial Sequence: Synthetic oligonucleotide
uucuauagcaggaucugaa

SEQ ID NO: 661338 - RNA, 19 nt, Artificial Sequence
  Description of Artificial Sequence: Synthetic oligonucleotide
acuuugaacuguaauagug

SEQ ID NO: 661339 - RNA, 19 nt, Artificial Sequence
  Description of Artificial Sequence: Synthetic oligonucleotide
guauaugcuaacuaaauau

SEQ ID NO: 661340 - RNA, 19 nt, Artificial Sequence
  Description of Artificial Sequence: Synthetic oligonucleotide
ucccucauuaagaacacuc

SEQ ID NO: 661341 - RNA, 19 nt, Artificial Sequence
  Description of Artificial Sequence: Synthetic oligonucleotide
guaggaaaggcucagugga

SEQ ID NO: 661342 - RNA, 19 nt, Artificial Sequence
  Description of Artificial Sequence: Synthetic oligonucleotide
uuuaucguauccccugaac

SEQ ID NO: 661343 - RNA, 19 nt, Artificial Sequence
  Description of Artificial Sequence: Synthetic oligonucleotide
auaagcuaccuccccuccc

SEQ ID NO: 661344 - RNA, 19 nt, Artificial Sequence
  Description of Artificial Sequence: Synthetic oligonucleotide
uugugcguccuucucaggc

SEQ ID NO: 661345 - RNA, 19 nt, Artificial Sequence
  Description of Artificial Sequence: Synthetic oligonucleotide
ucuugugcguccuucucag

SEQ ID NO: 661346 - RNA, 19 nt, Artificial Sequence
  Description of Artificial Sequence: Synthetic oligonucleotide
ccaaauuacaagauggaac

SEQ ID NO: 661347 - RNA, 19 nt, Artificial Sequence
  Description of Artificial Sequence: Synthetic oligonucleotide
uuagcuguugcagaaggcu

SEQ ID NO: 661348 - RNA, 19 nt, Artificial Sequence
  Description of Artificial Sequence: Synthetic oligonucleotide
gucauacuaauaaggaaag

SEQ ID NO: 661349 - RNA, 19 nt, Artificial Sequence
  Description of Artificial Sequence: Synthetic oligonucleotide
caaguguuuacuugaucag

SEQ ID NO: 661350 - RNA, 19 nt, Artificial Sequence
  Description of Artificial Sequence: Synthetic oligonucleotide
guaaaaguaggacaugcaa

SEQ ID NO: 661351 - RNA, 19 nt, Artificial Sequence
  Description of Artificial Sequence: Synthetic oligonucleotide
acagcguucugcugcaggg

SEQ ID NO: 661352 - RNA, 19 nt, Artificial Sequence
  Description of Artificial Sequence: Synthetic oligonucleotide
uugaaugcacuugagggac

SEQ ID NO: 661353 - RNA, 19 nt, Artificial Sequence
  Description of Artificial Sequence: Synthetic oligonucleotide
uaucauagccuguccacug

SEQ ID NO: 661354 - RNA, 19 nt, Artificial Sequence
  Description of Artificial Sequence: Synthetic oligonucleotide
aagggacucaguaagcaug

SEQ ID NO: 661355 - RNA, 19 nt, Artificial Sequence
  Description of Artificial Sequence: Synthetic oligonucleotide
gaggauuggagggugcugg

SEQ ID NO: 661356 - RNA, 19 nt, Artificial Sequence
  Description of Artificial Sequence: Synthetic oligonucleotide
uugauucuauagcaggauc

SEQ ID NO: 661357 - RNA, 19 nt, Artificial Sequence
  Description of Artificial Sequence: Synthetic oligonucleotide
guagaggacacacuggaga

SEQ ID NO: 661358 - RNA, 19 nt, Artificial Sequence
  Description of Artificial Sequence: Synthetic oligonucleotide
ugugcguccuucucaggcg

SEQ ID NO: 661359 - RNA, 19 nt, Artificial Sequence
  Description of Artificial Sequence: Synthetic oligonucleotide
agagcuuuacuguuauaca

SEQ ID NO: 661360 - RNA, 19 nt, Artificial Sequence
  Description of Artificial Sequence: Synthetic oligonucleotide
agugucugguacuaaacau

SEQ ID NO: 661361 - RNA, 19 nt, Artificial Sequence
  Description of Artificial Sequence: Synthetic oligonucleotide
cuuugggucauaagcuacc

SEQ ID NO: 661362 - RNA, 19 nt, Artificial Sequence
  Description of Artificial Sequence: Synthetic oligonucleotide
gacuaagcagccaggacag

SEQ ID NO: 661363 - RNA, 19 nt, Artificial Sequence
  Description of Artificial Sequence: Synthetic oligonucleotide
gcaucagccaauuaacaag

SEQ ID NO: 661364 - RNA, 19 nt, Artificial Sequence
  Description of Artificial Sequence: Synthetic oligonucleotide
uuuagagguauaugcuaac

SEQ ID NO: 661365 - RNA, 19 nt, Artificial Sequence
  Description of Artificial Sequence: Synthetic oligonucleotide
gguaggaaaggcucagugg

SEQ ID NO: 661366 - RNA, 19 nt, Artificial Sequence
  Description of Artificial Sequence: Synthetic oligonucleotide
gugaguuagugucugguac

SEQ ID NO: 661367 - RNA, 19 nt, Artificial Sequence
  Description of Artificial Sequence: Synthetic oligonucleotide
uggguauagagauuggcuu

SEQ ID NO: 661368 - RNA, 19 nt, Artificial Sequence
  Description of Artificial Sequence: Synthetic oligonucleotide
ugguuuauuuuagagguau

SEQ ID NO: 661369 - RNA, 19 nt, Artificial Sequence
  Description of Artificial Sequence: Synthetic oligonucleotide
uaagcauggcagcaccuca

SEQ ID NO: 661370 - RNA, 19 nt, Artificial Sequence
  Description of Artificial Sequence: Synthetic oligonucleotide
aacuguaauaguggugaug

SEQ ID NO: 661371 - RNA, 19 nt, Artificial Sequence
  Description of Artificial Sequence: Synthetic oligonucleotide
aggacgggaauauaaaaua

SEQ ID NO: 661372 - RNA, 19 nt, Artificial Sequence
  Description of Artificial Sequence: Synthetic oligonucleotide
aaagugucccuaccauuca

SEQ ID NO: 661373 - RNA, 19 nt, Artificial Sequence
  Description of Artificial Sequence: Synthetic oligonucleotide
cacaagacuuuccuuuggg

SEQ ID NO: 661374 - RNA, 19 nt, Artificial Sequence
  Description of Artificial Sequence: Synthetic oligonucleotide
aguaucagagcagugggga

SEQ ID NO: 661375 - RNA, 19 nt, Artificial Sequence
  Description of Artificial Sequence: Synthetic oligonucleotide
aguggugaugggauaaagg

SEQ ID NO: 661376 - RNA, 19 nt, Artificial Sequence
  Description of Artificial Sequence: Synthetic oligonucleotide
ugaaggugaguuagugucu

SEQ ID NO: 661377 - RNA, 19 nt, Artificial Sequence
  Description of Artificial Sequence: Synthetic oligonucleotide
uaagcuaccuccccucccu

SEQ ID NO: 661378 - RNA, 19 nt, Artificial Sequence
  Description of Artificial Sequence: Synthetic oligonucleotide
gggacacuagauuuguggg

SEQ ID NO: 661379 - RNA, 19 nt, Artificial Sequence
  Description of Artificial Sequence: Synthetic oligonucleotide
ggagaaagauacuucucag

SEQ ID NO: 661380 - RNA, 19 nt, Artificial Sequence
  Description of Artificial Sequence: Synthetic oligonucleotide
ucaggacgggaauauaaaa

SEQ ID NO: 661381 - RNA, 19 nt, Artificial Sequence
  Description of Artificial Sequence: Synthetic oligonucleotide
acuagauuuguggguauag

SEQ ID NO: 661382 - RNA, 19 nt, Artificial Sequence
  Description of Artificial Sequence: Synthetic oligonucleotide
gugcaguugcacuuugagg

SEQ ID NO: 661383 - RNA, 19 nt, Artificial Sequence
  Description of Artificial Sequence: Synthetic oligonucleotide
agggcaaaggaaagugucc

SEQ ID NO: 661384 - RNA, 19 nt, Artificial Sequence
  Description of Artificial Sequence: Synthetic oligonucleotide
cuugaaugcacuugaggga

SEQ ID NO: 661385 - RNA, 19 nt, Artificial Sequence
  Description of Artificial Sequence: Synthetic oligonucleotide
cagaaaguaggaucaggac

SEQ ID NO: 661386 - RNA, 19 nt, Artificial Sequence
  Description of Artificial Sequence: Synthetic oligonucleotide
acgucaggaagacagugca

SEQ ID NO: 661387 - RNA, 19 nt, Artificial Sequence
  Description of Artificial Sequence: Synthetic oligonucleotide
uacaaccuacuuugaacug

SEQ ID NO: 661388 - RNA, 19 nt, Artificial Sequence
  Description of Artificial Sequence: Synthetic oligonucleotide
aggcuucuacccaagacac

SEQ ID NO: 661389 - RNA, 19 nt, Artificial Sequence
  Description of Artificial Sequence: Synthetic oligonucleotide
auugguuauuuuguguuga

SEQ ID NO: 661390 - RNA, 19 nt, Artificial Sequence
  Description of Artificial Sequence: Synthetic oligonucleotide
acggcuuagaaggauuagg

SEQ ID NO: 661391 - RNA, 19 nt, Artificial Sequence
  Description of Artificial Sequence: Synthetic oligonucleotide
cuuagagcugggcaucagc

SEQ ID NO: 661392 - RNA, 19 nt, Artificial Sequence
  Description of Artificial Sequence: Synthetic oligonucleotide
gacagcguucugcugcagg

SEQ ID NO: 661393 - RNA, 19 nt, Artificial Sequence
  Description of Artificial Sequence: Synthetic oligonucleotide
gacuucuacuuaguucugg

SEQ ID NO: 661394 - RNA, 19 nt, Artificial Sequence
  Description of Artificial Sequence: Synthetic oligonucleotide
aguguuuacuugaucaggu

SEQ ID NO: 661395 - RNA, 19 nt, Artificial Sequence
  Description of Artificial Sequence: Synthetic oligonucleotide
ggaucuguagaaguucucg

SEQ ID NO: 661396 - RNA, 19 nt, Artificial Sequence
  Description of Artificial Sequence: Synthetic oligonucleotide
caaaauugagaagaauuga

SEQ ID NO: 661397 - RNA, 19 nt, Artificial Sequence
  Description of Artificial Sequence: Synthetic oligonucleotide
gauaaagggauauuauauu

SEQ ID NO: 661398 - RNA, 19 nt, Artificial Sequence
  Description of Artificial Sequence: Synthetic oligonucleotide
guggauagggcucaggcaa

SEQ ID NO: 661399 - RNA, 19 nt, Artificial Sequence
  Description of Artificial Sequence: Synthetic oligonucleotide
gagauuggcuuagccaggg

SEQ ID NO: 661400 - RNA, 19 nt, Artificial Sequence
  Description of Artificial Sequence: Synthetic oligonucleotide
ggaagcuaaagacugucac

SEQ ID NO: 661401 - RNA, 19 nt, Artificial Sequence
  Description of Artificial Sequence: Synthetic oligonucleotide
gggauauuauauuuguguc

SEQ ID NO: 661402 - RNA, 19 nt, Artificial Sequence
  Description of Artificial Sequence: Synthetic oligonucleotide
gaagguaggaaaggcucag

SEQ ID NO: 661403 - RNA, 19 nt, Artificial Sequence
  Description of Artificial Sequence: Synthetic oligonucleotide
ucuacccaagacacuaaau

SEQ ID NO: 661404 - RNA, 19 nt, Artificial Sequence
  Description of Artificial Sequence: Synthetic oligonucleotide
agaaggauuaggagcagug

SEQ ID NO: 661405 - RNA, 19 nt, Artificial Sequence
  Description of Artificial Sequence: Synthetic oligonucleotide
aaguucucggguugccaug

SEQ ID NO: 661406 - RNA, 19 nt, Artificial Sequence
  Description of Artificial Sequence: Synthetic oligonucleotide
aagucccuuauccuggcua

SEQ ID NO: 661407 - RNA, 19 nt, Artificial Sequence
  Description of Artificial Sequence: Synthetic oligonucleotide
guaccuuauaccuugacuu

SEQ ID NO: 661408 - RNA, 19 nt, Artificial Sequence
  Description of Artificial Sequence: Synthetic oligonucleotide
aguggauagggcucaggca

SEQ ID NO: 661409 - RNA, 19 nt, Artificial Sequence
  Description of Artificial Sequence: Synthetic oligonucleotide
aaaguaggaucaggacggg

SEQ ID NO: 661410 - RNA, 19 nt, Artificial Sequence
  Description of Artificial Sequence: Synthetic oligonucleotide
gaaggugaguuagugucug

SEQ ID NO: 661411 - RNA, 19 nt, Artificial Sequence
  Description of Artificial Sequence: Synthetic oligonucleotide
uuuuaucguauccccugaa

SEQ ID NO: 661412 - RNA, 19 nt, Artificial Sequence
  Description of Artificial Sequence: Synthetic oligonucleotide
uaccuuauaccuugacuuc

SEQ ID NO: 661413 - RNA, 19 nt, Artificial Sequence
  Description of Artificial Sequence: Synthetic oligonucleotide
ggucauacuaauaaggaaa

SEQ ID NO: 661414 - RNA, 19 nt, Artificial Sequence
  Description of Artificial Sequence: Synthetic oligonucleotide
uguguacccuguuauuuau

SEQ ID NO: 661415 - RNA, 19 nt, Artificial Sequence
  Description of Artificial Sequence: Synthetic oligonucleotide
aacuacuagggagcaaagu

SEQ ID NO: 661416 - RNA, 19 nt, Artificial Sequence
  Description of Artificial Sequence: Synthetic oligonucleotide
agaccaaugagcagagcag

SEQ ID NO: 661417 - RNA, 19 nt, Artificial Sequence
  Description of Artificial Sequence: Synthetic oligonucleotide
auagggcucaggcaagacu

SEQ ID NO: 661418 - RNA, 19 nt, Artificial Sequence
  Description of Artificial Sequence: Synthetic oligonucleotide
cacgucaggaagacagugc

SEQ ID NO: 661419 - RNA, 19 nt, Artificial Sequence
  Description of Artificial Sequence: Synthetic oligonucleotide
acgggaauauaaaauaaau

SEQ ID NO: 661420 - RNA, 19 nt, Artificial Sequence
  Description of Artificial Sequence: Synthetic oligonucleotide
guuagugucugguacuaaa

SEQ ID NO: 661421 - RNA, 19 nt, Artificial Sequence
  Description of Artificial Sequence: Synthetic oligonucleotide
guucauuagcuguugcaga

SEQ ID NO: 661422 - RNA, 19 nt, Artificial Sequence
  Description of Artificial Sequence: Synthetic oligonucleotide
gauggcaaagggaagcuaa

SEQ ID NO: 661423 - RNA, 19 nt, Artificial Sequence
  Description of Artificial Sequence: Synthetic oligonucleotide
agauuggcuuagccagggc

SEQ ID NO: 661424 - RNA, 19 nt, Artificial Sequence
  Description of Artificial Sequence: Synthetic oligonucleotide
uuggguacucuugaaugca

SEQ ID NO: 661425 - RNA, 19 nt, Artificial Sequence
  Description of Artificial Sequence: Synthetic oligonucleotide
uggauagggcucaggcaag

SEQ ID NO: 661426 - RNA, 19 nt, Artificial Sequence
  Description of Artificial Sequence: Synthetic oligonucleotide
agaagggacucaguaagca

SEQ ID NO: 661427 - RNA, 19 nt, Artificial Sequence
  Description of Artificial Sequence: Synthetic oligonucleotide
ucauagccuguccacugac

SEQ ID NO: 661428 - RNA, 19 nt, Artificial Sequence
  Description of Artificial Sequence: Synthetic oligonucleotide
cauacuaauaaggaaagau

SEQ ID NO: 661429 - RNA, 19 nt, Artificial Sequence
  Description of Artificial Sequence: Synthetic oligonucleotide
ucacgucaggaagacagug

SEQ ID NO: 661430 - RNA, 19 nt, Artificial Sequence
  Description of Artificial Sequence: Synthetic oligonucleotide
ugcacgugugcaaaagcua

SEQ ID NO: 661431 - RNA, 19 nt, Artificial Sequence
  Description of Artificial Sequence: Synthetic oligonucleotide
ucaauggguggagggaacc

SEQ ID NO: 661432 - RNA, 19 nt, Artificial Sequence
  Description of Artificial Sequence: Synthetic oligonucleotide
auagccuguccacugacua

SEQ ID NO: 661433 - RNA, 19 nt, Artificial Sequence
  Description of Artificial Sequence: Synthetic oligonucleotide
aguaaaaguaggacaugca

SEQ ID NO: 661434 - RNA, 19 nt, Artificial Sequence
  Description of Artificial Sequence: Synthetic oligonucleotide
accaaauuacaagauggaa

SEQ ID NO: 661435 - RNA, 19 nt, Artificial Sequence
  Description of Artificial Sequence: Synthetic oligonucleotide
agggacucaguaagcaugg

SEQ ID NO: 661436 - RNA, 19 nt, Artificial Sequence
  Description of Artificial Sequence: Synthetic oligonucleotide
cuuauaccuugacuucuac

SEQ ID NO: 661437 - RNA, 19 nt, Artificial Sequence
  Description of Artificial Sequence: Synthetic oligonucleotide
gauuggcuuagccagggcu

SEQ ID NO: 661438 - RNA, 19 nt, Artificial Sequence
  Description of Artificial Sequence: Synthetic oligonucleotide
ugaugggauaaagggauau

SEQ ID NO: 661439 - RNA, 19 nt, Artificial Sequence
  Description of Artificial Sequence: Synthetic oligonucleotide
auaucauagccuguccacu

SEQ ID NO: 661440 - RNA, 19 nt, Artificial Sequence
  Description of Artificial Sequence: Synthetic oligonucleotide
auagcaggaucugaacucu

SEQ ID NO: 661441 - RNA, 19 nt, Artificial Sequence
  Description of Artificial Sequence: Synthetic oligonucleotide
augggauaaagggauauua

SEQ ID NO: 661442 - RNA, 19 nt, Artificial Sequence
  Description of Artificial Sequence: Synthetic oligonucleotide
cuuaacugugugugugcug

SEQ ID NO: 661443 - RNA, 19 nt, Artificial Sequence
  Description of Artificial Sequence: Synthetic oligonucleotide
cuuugagguagguucauua

SEQ ID NO: 661444 - RNA, 19 nt, Artificial Sequence
  Description of Artificial Sequence: Synthetic oligonucleotide
gaagucacgucaggaagac

SEQ ID NO: 661445 - RNA, 19 nt, Artificial Sequence
  Description of Artificial Sequence: Synthetic oligonucleotide
ucaguaagcauggcagcac

SEQ ID NO: 661446 - RNA, 19 nt, Artificial Sequence
  Description of Artificial Sequence: Synthetic oligonucleotide
aaucaaguguuuacuugau

SEQ ID NO: 661447 - RNA, 19 nt, Artificial Sequence
  Description of Artificial Sequence: Synthetic oligonucleotide
cuguaauaguggugauggg

SEQ ID NO: 661448 - RNA, 19 nt, Artificial Sequence
  Description of Artificial Sequence: Synthetic oligonucleotide
gacgggaauauaaaauaaa

SEQ ID NO: 661449 - RNA, 19 nt, Artificial Sequence
  Description of Artificial Sequence: Synthetic oligonucleotide
uaguggugaugggauaaag

SEQ ID NO: 661450 - RNA, 19 nt, Artificial Sequence
  Description of Artificial Sequence: Synthetic oligonucleotide
gaagcaggcucuacaugag

SEQ ID NO: 661451 - RNA, 19 nt, Artificial Sequence
  Description of Artificial Sequence: Synthetic oligonucleotide
aggccacagaaugagaaga

SEQ ID NO: 661452 - RNA, 19 nt, Artificial Sequence
  Description of Artificial Sequence: Synthetic oligonucleotide
uggggaaauaucuggcauu

SEQ ID NO: 661453 - RNA, 19 nt, Artificial Sequence
  Description of Artificial Sequence: Synthetic oligonucleotide
gaaggauuaggagcaguga

SEQ ID NO: 661454 - RNA, 19 nt, Artificial Sequence
  Description of Artificial Sequence: Synthetic oligonucleotide
agaacacuccauuggugau

SEQ ID NO: 661455 - RNA, 19 nt, Artificial Sequence
  Description of Artificial Sequence: Synthetic oligonucleotide
ugacuucuacuuaguucug

SEQ ID NO: 661456 - RNA, 19 nt, Artificial Sequence
  Description of Artificial Sequence: Synthetic oligonucleotide
uccuauggucauacuaaua

SEQ ID NO: 661457 - RNA, 19 nt, Artificial Sequence
  Description of Artificial Sequence: Synthetic oligonucleotide
aggauuaggagcagugaca

SEQ ID NO: 661458 - RNA, 19 nt, Artificial Sequence
  Description of Artificial Sequence: Synthetic oligonucleotide
uucucggguugccaugaac

SEQ ID NO: 661459 - RNA, 19 nt, Artificial Sequence
  Description of Artificial Sequence: Synthetic oligonucleotide
gugucccuaccauucaaac

SEQ ID NO: 661460 - RNA, 19 nt, Artificial Sequence
  Description of Artificial Sequence: Synthetic oligonucleotide
caccaaauuacaagaugga

SEQ ID NO: 661461 - RNA, 19 nt, Artificial Sequence
  Description of Artificial Sequence: Synthetic oligonucleotide
aagcuaccuccccucccuc

SEQ ID NO: 661462 - RNA, 19 nt, Artificial Sequence
  Description of Artificial Sequence: Synthetic oligonucleotide
agagauuggcuuagccagg

SEQ ID NO: 661463 - RNA, 19 nt, Artificial Sequence
  Description of Artificial Sequence: Synthetic oligonucleotide
agucccuuauccuggcuaa

SEQ ID NO: 661464 - RNA, 19 nt, Artificial Sequence
  Description of Artificial Sequence: Synthetic oligonucleotide
ggauauuauauuugugucu

SEQ ID NO: 661465 - RNA, 19 nt, Artificial Sequence
  Description of Artificial Sequence: Synthetic oligonucleotide
acagauagggagaaagaua

SEQ ID NO: 661466 - RNA, 19 nt, Artificial Sequence
  Description of Artificial Sequence: Synthetic oligonucleotide
cagguugcucccacaagac

SEQ ID NO: 661467 - RNA, 19 nt, Artificial Sequence
  Description of Artificial Sequence: Synthetic oligonucleotide
caaugagcagagcagccca

SEQ ID NO: 661468 - RNA, 19 nt, Artificial Sequence
  Description of Artificial Sequence: Synthetic oligonucleotide
cccucauuaagaacacucc

SEQ ID NO: 661469 - RNA, 19 nt, Artificial Sequence
  Description of Artificial Sequence: Synthetic oligonucleotide
auuugugucucuagggcaa

SEQ ID NO: 661470 - RNA, 19 nt, Artificial Sequence
  Description of Artificial Sequence: Synthetic oligonucleotide
ugguaccuuauaccuugac

SEQ ID NO: 661471 - RNA, 19 nt, Artificial Sequence
  Description of Artificial Sequence: Synthetic oligonucleotide
auaauccaccaaauuacaa

SEQ ID NO: 661472 - RNA, 19 nt, Artificial Sequence
  Description of Artificial Sequence: Synthetic oligonucleotide
cagaaguaucagagcagug

SEQ ID NO: 661473 - RNA, 19 nt, Artificial Sequence
  Description of Artificial Sequence: Synthetic oligonucleotide
gacagcugguuguaacgga

SEQ ID NO: 661474 - RNA, 19 nt, Artificial Sequence
  Description of Artificial Sequence: Synthetic oligonucleotide
aauggguggagggaaccuu

SEQ ID NO: 661475 - RNA, 19 nt, Artificial Sequence
  Description of Artificial Sequence: Synthetic oligonucleotide
ucccuuauccuggcuaacu

SEQ ID NO: 661476 - RNA, 19 nt, Artificial Sequence
  Description of Artificial Sequence: Synthetic oligonucleotide
agguugcucccacaagacu

SEQ ID NO: 661477 - RNA, 19 nt, Artificial Sequence
  Description of Artificial Sequence: Synthetic oligonucleotide
cugccggucaacauagcga

SEQ ID NO: 661478 - RNA, 19 nt, Artificial Sequence
  Description of Artificial Sequence: Synthetic oligonucleotide
ccguccauugguuauuuug

SEQ ID NO: 661479 - RNA, 19 nt, Artificial Sequence
  Description of Artificial Sequence: Synthetic oligonucleotide
agaagagagaagggacuca

SEQ ID NO: 661480 - RNA, 19 nt, Artificial Sequence
  Description of Artificial Sequence: Synthetic oligonucleotide
uugguaccuuauaccuuga

SEQ ID NO: 661481 - RNA, 19 nt, Artificial Sequence
  Description of Artificial Sequence: Synthetic oligonucleotide
aaguaggaucaggacggga

SEQ ID NO: 661482 - RNA, 19 nt, Artificial Sequence
  Description of Artificial Sequence: Synthetic oligonucleotide
ggucauaagcuaccucccc

SEQ ID NO: 661483 - RNA, 19 nt, Artificial Sequence
  Description of Artificial Sequence: Synthetic oligonucleotide
agauacuucucagcuuaga

SEQ ID NO: 661484 - RNA, 19 nt, Artificial Sequence
  Description of Artificial Sequence: Synthetic oligonucleotide
cccaaguuuagcagccacg

SEQ ID NO: 661485 - RNA, 19 nt, Artificial Sequence
  Description of Artificial Sequence: Synthetic oligonucleotide
cuaacugcugaagguaaga

SEQ ID NO: 661486 - RNA, 19 nt, Artificial Sequence
  Description of Artificial Sequence: Synthetic oligonucleotide
cucuccuauggucauacua

SEQ ID NO: 661487 - RNA, 19 nt, Artificial Sequence
  Description of Artificial Sequence: Synthetic oligonucleotide
caucaccuccguccauugg

SEQ ID NO: 661488 - RNA, 19 nt, Artificial Sequence
  Description of Artificial Sequence: Synthetic oligonucleotide
caagacuaagcagccagga

SEQ ID NO: 661489 - RNA, 19 nt, Artificial Sequence
  Description of Artificial Sequence: Synthetic oligonucleotide
aguucucggguugccauga

SEQ ID NO: 661490 - RNA, 19 nt, Artificial Sequence
  Description of Artificial Sequence: Synthetic oligonucleotide
guaagcauggcagcaccuc

SEQ ID NO: 661491 - RNA, 19 nt, Artificial Sequence
  Description of Artificial Sequence: Synthetic oligonucleotide
cuugugcguccuucucagg

SEQ ID NO: 661492 - RNA, 19 nt, Artificial Sequence
  Description of Artificial Sequence: Synthetic oligonucleotide
ccauucaaacccagguccc

SEQ ID NO: 661493 - RNA, 19 nt, Artificial Sequence
  Description of Artificial Sequence: Synthetic oligonucleotide
gguaccuuauaccuugacu

SEQ ID NO: 661494 - RNA, 19 nt, Artificial Sequence
  Description of Artificial Sequence: Synthetic oligonucleotide
cuaguggauagggcucagg

SEQ ID NO: 661495 - RNA, 19 nt, Artificial Sequence
  Description of Artificial Sequence: Synthetic oligonucleotide
aucaggacgggaauauaaa

SEQ ID NO: 661496 - RNA, 19 nt, Artificial Sequence
  Description of Artificial Sequence: Synthetic oligonucleotide
uacuuaguucuggcucucc

SEQ ID NO: 661497 - RNA, 19 nt, Artificial Sequence
  Description of Artificial Sequence: Synthetic oligonucleotide
gucauaagcuaccuccccu

SEQ ID NO: 661498 - RNA, 19 nt, Artificial Sequence
  Description of Artificial Sequence: Synthetic oligonucleotide
aguuuagcagccacggcua

SEQ ID NO: 661499 - RNA, 19 nt, Artificial Sequence
  Description of Artificial Sequence: Synthetic oligonucleotide
ucaccuccguccauugguu

SEQ ID NO: 661500 - RNA, 19 nt, Artificial Sequence
  Description of Artificial Sequence: Synthetic oligonucleotide
accuccguccauugguuau

SEQ ID NO: 661501 - RNA, 19 nt, Artificial Sequence
  Description of Artificial Sequence: Synthetic oligonucleotide
cuuaguucuggcucuccua

SEQ ID NO: 661502 - RNA, 19 nt, Artificial Sequence
  Description of Artificial Sequence: Synthetic oligonucleotide
ggauuaggagcagugacaa

SEQ ID NO: 661503 - RNA, 19 nt, Artificial Sequence
  Description of Artificial Sequence: Synthetic oligonucleotide
uguuuccauuacagugguc

SEQ ID NO: 661504 - RNA, 19 nt, Artificial Sequence
  Description of Artificial Sequence: Synthetic oligonucleotide
uaggaucaggacgggaaua

SEQ ID NO: 661505 - RNA, 19 nt, Artificial Sequence
  Description of Artificial Sequence: Synthetic oligonucleotide
gaagggacucaguaagcau

SEQ ID NO: 661506 - RNA, 19 nt, Artificial Sequence
  Description of Artificial Sequence: Synthetic oligonucleotide
caggacgggaauauaaaau

SEQ ID NO: 661507 - RNA, 19 nt, Artificial Sequence
  Description of Artificial Sequence: Synthetic oligonucleotide
ggggaaauaucuggcauuc

SEQ ID NO: 661508 - RNA, 19 nt, Artificial Sequence
  Description of Artificial Sequence: Synthetic oligonucleotide
aggcucaucuuggguacuc

SEQ ID NO: 661509 - RNA, 19 nt, Artificial Sequence
  Description of Artificial Sequence: Synthetic oligonucleotide
ugcuguguacccuguuauu

SEQ ID NO: 661510 - RNA, 19 nt, Artificial Sequence
  Description of Artificial Sequence: Synthetic oligonucleotide
aucagagcaguggggaaau

SEQ ID NO: 661511 - RNA, 19 nt, Artificial Sequence
  Description of Artificial Sequence: Synthetic oligonucleotide
cuucaauggguggagggaa

SEQ ID NO: 661512 - RNA, 19 nt, Artificial Sequence
  Description of Artificial Sequence: Synthetic oligonucleotide
uuugugucucuagggcaaa

SEQ ID NO: 661513 - RNA, 19 nt, Artificial Sequence
  Description of Artificial Sequence: Synthetic oligonucleotide
gcacgugugcaaaagcuac

SEQ ID NO: 661514 - RNA, 19 nt, Artificial Sequence
  Description of Artificial Sequence: Synthetic oligonucleotide
gagggugcuggugcaguug

SEQ ID NO: 661515 - RNA, 19 nt, Artificial Sequence
  Description of Artificial Sequence: Synthetic oligonucleotide
ggguauagagauuggcuua

SEQ ID NO: 661516 - RNA, 19 nt, Artificial Sequence
  Description of Artificial Sequence: Synthetic oligonucleotide
ccucauuaagaacacucca

SEQ ID NO: 661517 - RNA, 19 nt, Artificial Sequence
  Description of Artificial Sequence: Synthetic oligonucleotide
agcuaccuccccucccuca

SEQ ID NO: 661518 - RNA, 19 nt, Artificial Sequence
  Description of Artificial Sequence: Synthetic oligonucleotide
cacggcuuagaaggauuag

SEQ ID NO: 661519 - RNA, 19 nt, Artificial Sequence
  Description of Artificial Sequence: Synthetic oligonucleotide
cucaagcacgcuguaguca

SEQ ID NO: 661520 - RNA, 19 nt, Artificial Sequence
  Description of Artificial Sequence: Synthetic oligonucleotide
ccuuugguaccuuauaccu

SEQ ID NO: 661521 - RNA, 19 nt, Artificial Sequence
  Description of Artificial Sequence: Synthetic oligonucleotide
cacgugugcaaaagcuaca

SEQ ID NO: 661522 - RNA, 19 nt, Artificial Sequence
  Description of Artificial Sequence: Synthetic oligonucleotide
ucucaggcgccggugcugu

SEQ ID NO: 661523 - RNA, 19 nt, Artificial Sequence
  Description of Artificial Sequence: Synthetic oligonucleotide
ccaauuaacaaguuugauu

SEQ ID NO: 661524 - RNA, 19 nt, Artificial Sequence
  Description of Artificial Sequence: Synthetic oligonucleotide
acggcuacauuuggaggcu

SEQ ID NO: 661525 - RNA, 19 nt, Artificial Sequence
  Description of Artificial Sequence: Synthetic oligonucleotide
auccaccaaauuacaagau

SEQ ID NO: 661526 - RNA, 19 nt, Artificial Sequence
  Description of Artificial Sequence: Synthetic oligonucleotide
guauccccugaaccagcug

SEQ ID NO: 661527 - RNA, 19 nt, Artificial Sequence
  Description of Artificial Sequence: Synthetic oligonucleotide
cggguugccaugaacauca

SEQ ID NO: 661528 - RNA, 19 nt, Artificial Sequence
  Description of Artificial Sequence: Synthetic oligonucleotide
guugauucuauagcaggau

SEQ ID NO: 661529 - RNA, 19 nt, Artificial Sequence
  Description of Artificial Sequence: Synthetic oligonucleotide
ggacgggaauauaaaauaa

SEQ ID NO: 661530 - RNA, 19 nt, Artificial Sequence
  Description of Artificial Sequence: Synthetic oligonucleotide
agacugucacuggggagca

SEQ ID NO: 661531 - RNA, 19 nt, Artificial Sequence
  Description of Artificial Sequence: Synthetic oligonucleotide
guaggacaugcaaaagugu

SEQ ID NO: 661532 - RNA, 19 nt, Artificial Sequence
  Description of Artificial Sequence: Synthetic oligonucleotide
guuguaacggagagcuuua

SEQ ID NO: 661533 - RNA, 19 nt, Artificial Sequence
  Description of Artificial Sequence: Synthetic oligonucleotide
agacuuuccuuugggucau

SEQ ID NO: 661534 - RNA, 19 nt, Artificial Sequence
  Description of Artificial Sequence: Synthetic oligonucleotide
gagcagugacaagccaaac

SEQ ID NO: 661535 - RNA, 19 nt, Artificial Sequence
  Description of Artificial Sequence: Synthetic oligonucleotide
ggugaguuagugucuggua

SEQ ID NO: 661536 - RNA, 19 nt, Artificial Sequence
  Description of Artificial Sequence: Synthetic oligonucleotide
cuucuacccaagacacuaa

SEQ ID NO: 661537 - RNA, 19 nt, Artificial Sequence
  Description of Artificial Sequence: Synthetic oligonucleotide
aguuagugucugguacuaa

SEQ ID NO: 661538 - RNA, 19 nt, Artificial Sequence
  Description of Artificial Sequence: Synthetic oligonucleotide
ggacacuagauuugugggu

SEQ ID NO: 661539 - RNA, 19 nt, Artificial Sequence
  Description of Artificial Sequence: Synthetic oligonucleotide
acuuugagguagguucauu

SEQ ID NO: 661540 - RNA, 19 nt, Artificial Sequence
  Description of Artificial Sequence: Synthetic oligonucleotide
ccuucucaggcgccggugc

SEQ ID NO: 661541 - RNA, 19 nt, Artificial Sequence
  Description of Artificial Sequence: Synthetic oligonucleotide
caguuucugccggucaaca

SEQ ID NO: 661542 - RNA, 19 nt, Artificial Sequence
  Description of Artificial Sequence: Synthetic oligonucleotide
ggagagcuuuuaucguauc

SEQ ID NO: 661543 - RNA, 19 nt, Artificial Sequence
  Description of Artificial Sequence: Synthetic oligonucleotide
cuuugguaccuuauaccuu

SEQ ID NO: 661544 - RNA, 19 nt, Artificial Sequence
  Description of Artificial Sequence: Synthetic oligonucleotide
gaugggauaaagggauauu

SEQ ID NO: 661545 - RNA, 19 nt, Artificial Sequence
  Description of Artificial Sequence: Synthetic oligonucleotide
cauuggugauggcagcagu

SEQ ID NO: 661546 - RNA, 19 nt, Artificial Sequence
  Description of Artificial Sequence: Synthetic oligonucleotide
cccggcugcuaguggauag

SEQ ID NO: 661547 - RNA, 19 nt, Artificial Sequence
  Description of Artificial Sequence: Synthetic oligonucleotide
gcagccaacaggagguaga

SEQ ID NO: 661548 - RNA, 19 nt, Artificial Sequence
  Description of Artificial Sequence: Synthetic oligonucleotide
cagugcagguggcagccaa

SEQ ID NO: 661549 - RNA, 19 nt, Artificial Sequence
  Description of Artificial Sequence: Synthetic oligonucleotide
ggcgccggugcuguggaug

SEQ ID NO: 661550 - RNA, 19 nt, Artificial Sequence
  Description of Artificial Sequence: Synthetic oligonucleotide
cucggguugccaugaacau

SEQ ID NO: 661551 - RNA, 19 nt, Artificial Sequence
  Description of Artificial Sequence: Synthetic oligonucleotide
ccggucaacauagcgagaa

SEQ ID NO: 661552 - RNA, 19 nt, Artificial Sequence
  Description of Artificial Sequence: Synthetic oligonucleotide
ucccggcugcuaguggaua

SEQ ID NO: 661553 - RNA, 19 nt, Artificial Sequence
  Description of Artificial Sequence: Synthetic oligonucleotide
ccggcugcuaguggauagg

SEQ ID NO: 661554 - RNA, 19 nt, Artificial Sequence
  Description of Artificial Sequence: Synthetic oligonucleotide
caauggguggagggaaccu

SEQ ID NO: 661555 - RNA, 19 nt, Artificial Sequence
  Description of Artificial Sequence: Synthetic oligonucleotide
guucucggguugccaugaa

SEQ ID NO: 661556 - RNA, 19 nt, Artificial Sequence
  Description of Artificial Sequence: Synthetic oligonucleotide
caccuccguccauugguua

SEQ ID NO: 661557 - RNA, 19 nt, Artificial Sequence
  Description of Artificial Sequence: Synthetic oligonucleotide
gugacaagccaaacuuguu

SEQ ID NO: 661558 - RNA, 19 nt, Artificial Sequence
  Description of Artificial Sequence: Synthetic oligonucleotide
gcgccggugcuguggauga

SEQ ID NO: 661559 - RNA, 19 nt, Artificial Sequence
  Description of Artificial Sequence: Synthetic oligonucleotide
cucaggcgccggugcugug

SEQ ID NO: 661560 - RNA, 19 nt, Artificial Sequence
  Description of Artificial Sequence: Synthetic oligonucleotide
cggcugcuaguggauaggg

SEQ ID NO: 661561 - RNA, 19 nt, Artificial Sequence
  Description of Artificial Sequence: Synthetic oligonucleotide
ggacagcguucugcugcag

SEQ ID NO: 661562 - RNA, 19 nt, Artificial Sequence
  Description of Artificial Sequence: Synthetic oligonucleotide
cagcguucugcugcagggu

SEQ ID NO: 661563 - RNA, 19 nt, Artificial Sequence
  Description of Artificial Sequence: Synthetic oligonucleotide
gacuuuccuuugggucaua

SEQ ID NO: 661564 - RNA, 19 nt, Artificial Sequence
  Description of Artificial Sequence: Synthetic oligonucleotide
ggcuucuacccaagacacu

SEQ ID NO: 661565 - RNA, 19 nt, Artificial Sequence
  Description of Artificial Sequence: Synthetic oligonucleotide
cguauccccugaaccagcu

SEQ ID NO: 661566 - RNA, 19 nt, Artificial Sequence
  Description of Artificial Sequence: Synthetic oligonucleotide
cuccguccauugguuauuu

SEQ ID NO: 661567 - RNA, 19 nt, Artificial Sequence
  Description of Artificial Sequence: Synthetic oligonucleotide
gcucuccuauggucauacu

SEQ ID NO: 661568 - RNA, 19 nt, Artificial Sequence
  Description of Artificial Sequence: Synthetic oligonucleotide
ggcuuagccagggcugcuu

SEQ ID NO: 661569 - RNA, 19 nt, Artificial Sequence
  Description of Artificial Sequence: Synthetic oligonucleotide
aaugucuacacgcaacugc

SEQ ID NO: 661570 - RNA, 19 nt, Artificial Sequence
  Description of Artificial Sequence: Synthetic oligonucleotide
caagacacggccuagaugg

SEQ ID NO: 661571 - RNA, 19 nt, Artificial Sequence
  Description of Artificial Sequence: Synthetic oligonucleotide
uguguaaaaggcaaggcag

SEQ ID NO: 661572 - RNA, 19 nt, Artificial Sequence
  Description of Artificial Sequence: Synthetic oligonucleotide
ugaguaacggcauagguag

SEQ ID NO: 661573 - RNA, 19 nt, Artificial Sequence
  Description of Artificial Sequence: Synthetic oligonucleotide
uucaugaugccacaaaagc

SEQ ID NO: 661574 - RNA, 19 nt, Artificial Sequence
  Description of Artificial Sequence: Synthetic oligonucleotide
uaugucuugcaucaagggg

SEQ ID NO: 661575 - RNA, 19 nt, Artificial Sequence
  Description of Artificial Sequence: Synthetic oligonucleotide
uguaauccagcccauuacg

SEQ ID NO: 661576 - RNA, 19 nt, Artificial Sequence
  Description of Artificial Sequence: Synthetic oligonucleotide
auagguagugaguagauca

SEQ ID NO: 661577 - RNA, 19 nt, Artificial Sequence
  Description of Artificial Sequence: Synthetic oligonucleotide
agauaaucagcaaagagag

SEQ ID NO: 661578 - RNA, 19 nt, Artificial Sequence
  Description of Artificial Sequence: Synthetic oligonucleotide
uuuggggcuaauuaugucc

SEQ ID NO: 661579 - RNA, 19 nt, Artificial Sequence
  Description of Artificial Sequence: Synthetic oligonucleotide
augugugaaacucagcauc

SEQ ID NO: 661580 - RNA, 19 nt, Artificial Sequence
  Description of Artificial Sequence: Synthetic oligonucleotide
aaggaauaaugucucaugu

SEQ ID NO: 661581 - RNA, 19 nt, Artificial Sequence
  Description of Artificial Sequence: Synthetic oligonucleotide
ugauagauccgcaagcgca

SEQ ID NO: 661582 - RNA, 19 nt, Artificial Sequence
  Description of Artificial Sequence: Synthetic oligonucleotide
gauggauuguguaaaaggc

SEQ ID NO: 661583 - RNA, 19 nt, Artificial Sequence
  Description of Artificial Sequence: Synthetic oligonucleotide
ggcuaauuggacuagaaag

SEQ ID NO: 661584 - RNA, 19 nt, Artificial Sequence
  Description of Artificial Sequence: Synthetic oligonucleotide
gauuguguaaaaggcaagg

SEQ ID NO: 661585 - RNA, 19 nt, Artificial Sequence
  Description of Artificial Sequence: Synthetic oligonucleotide
uuguguaaaaggcaaggca

SEQ ID NO: 661586 - RNA, 19 nt, Artificial Sequence
  Description of Artificial Sequence: Synthetic oligonucleotide
cauguuaucccugaguugc

SEQ ID NO: 661587 - RNA, 19 nt, Artificial Sequence
  Description of Artificial Sequence: Synthetic oligonucleotide
agcaugucucaauaguagc

SEQ ID NO: 661588 - RNA, 19 nt, Artificial Sequence
  Description of Artificial Sequence: Synthetic oligonucleotide
agaaccuaugucuugcauc

SEQ ID NO: 661589 - RNA, 19 nt, Artificial Sequence
  Description of Artificial Sequence: Synthetic oligonucleotide
augccaaaguucuucuucc

SEQ ID NO: 661590 - RNA, 19 nt, Artificial Sequence
  Description of Artificial Sequence: Synthetic oligonucleotide
aauuggacuagaaaguccu

SEQ ID NO: 661591 - RNA, 19 nt, Artificial Sequence
  Description of Artificial Sequence: Synthetic oligonucleotide
guaugugugaaacucagca

SEQ ID NO: 661592 - RNA, 19 nt, Artificial Sequence
  Description of Artificial Sequence: Synthetic oligonucleotide
cagauaaucagcaaagaga

SEQ ID NO: 661593 - RNA, 19 nt, Artificial Sequence
  Description of Artificial Sequence: Synthetic oligonucleotide
agcuaaugaggguagcugg

SEQ ID NO: 661594 - RNA, 19 nt, Artificial Sequence
  Description of Artificial Sequence: Synthetic oligonucleotide
ugaccucuaacauucggag

SEQ ID NO: 661595 - RNA, 19 nt, Artificial Sequence
  Description of Artificial Sequence: Synthetic oligonucleotide
agcgcaacuccucaggacg

SEQ ID NO: 661596 - RNA, 19 nt, Artificial Sequence
  Description of Artificial Sequence: Synthetic oligonucleotide
cuuacguuucauguaaucc

SEQ ID NO: 661597 - RNA, 19 nt, Artificial Sequence
  Description of Artificial Sequence: Synthetic oligonucleotide
ucucaauaguagcuugagg

SEQ ID NO: 661598 - RNA, 19 nt, Artificial Sequence
  Description of Artificial Sequence: Synthetic oligonucleotide
ggauggauuguguaaaagg

SEQ ID NO: 661599 - RNA, 19 nt, Artificial Sequence
  Description of Artificial Sequence: Synthetic oligonucleotide
auaccuguggaugaguaac

SEQ ID NO: 661600 - RNA, 19 nt, Artificial Sequence
  Description of Artificial Sequence: Synthetic oligonucleotide
uuagagcuaaugaggguag

SEQ ID NO: 661601 - RNA, 19 nt, Artificial Sequence
  Description of Artificial Sequence: Synthetic oligonucleotide
augucucauguguaggccc

SEQ ID NO: 661602 - RNA, 19 nt, Artificial Sequence
  Description of Artificial Sequence: Synthetic oligonucleotide
augauagauccgcaagcgc

SEQ ID NO: 661603 - RNA, 19 nt, Artificial Sequence
  Description of Artificial Sequence: Synthetic oligonucleotide
aguaugauaccuguggaug

SEQ ID NO: 661604 - RNA, 19 nt, Artificial Sequence
  Description of Artificial Sequence: Synthetic oligonucleotide
uuuucgaagugaaggcucc

SEQ ID NO: 661605 - RNA, 19 nt, Artificial Sequence
  Description of Artificial Sequence: Synthetic oligonucleotide
cucaaggcaaagaauggag

SEQ ID NO: 661606 - RNA, 19 nt, Artificial Sequence
  Description of Artificial Sequence: Synthetic oligonucleotide
ucgugauucagguaugugu

SEQ ID NO: 661607 - RNA, 19 nt, Artificial Sequence
  Description of Artificial Sequence: Synthetic oligonucleotide
gucccaaucagagaggagg

SEQ ID NO: 661608 - RNA, 19 nt, Artificial Sequence
  Description of Artificial Sequence: Synthetic oligonucleotide
uggacuagaaaguccuucc

SEQ ID NO: 661609 - RNA, 19 nt, Artificial Sequence
  Description of Artificial Sequence: Synthetic oligonucleotide
ucgaagugaaggcuccacg

SEQ ID NO: 661610 - RNA, 19 nt, Artificial Sequence
  Description of Artificial Sequence: Synthetic oligonucleotide
ugugcgaagcacauccuug

SEQ ID NO: 661611 - RNA, 19 nt, Artificial Sequence
  Description of Artificial Sequence: Synthetic oligonucleotide
ggcaguaugauaccugugg

SEQ ID NO: 661612 - RNA, 19 nt, Artificial Sequence
  Description of Artificial Sequence: Synthetic oligonucleotide
ucccaaucagagaggaggg

SEQ ID NO: 661613 - RNA, 19 nt, Artificial Sequence
  Description of Artificial Sequence: Synthetic oligonucleotide
uuggggcuaauuauguccc

SEQ ID NO: 661614 - RNA, 19 nt, Artificial Sequence
  Description of Artificial Sequence: Synthetic oligonucleotide
acagcuaugucaccagaag

SEQ ID NO: 661615 - RNA, 19 nt, Artificial Sequence
  Description of Artificial Sequence: Synthetic oligonucleotide
aaucaggccgagaagagga

SEQ ID NO: 661616 - RNA, 19 nt, Artificial Sequence
  Description of Artificial Sequence: Synthetic oligonucleotide
caugauagauccgcaagcg

SEQ ID NO: 661617 - RNA, 19 nt, Artificial Sequence
  Description of Artificial Sequence: Synthetic oligonucleotide
accgccauaccacuuuucg

SEQ ID NO: 661618 - RNA, 19 nt, Artificial Sequence
  Description of Artificial Sequence: Synthetic oligonucleotide
gggacuuagagcuaaugag

SEQ ID NO: 661619 - RNA, 19 nt, Artificial Sequence
  Description of Artificial Sequence: Synthetic oligonucleotide
ugugcugcggaugaauucc

SEQ ID NO: 661620 - RNA, 19 nt, Artificial Sequence
  Description of Artificial Sequence: Synthetic oligonucleotide
aguagaucauguagggccc

SEQ ID NO: 661621 - RNA, 19 nt, Artificial Sequence
  Description of Artificial Sequence: Synthetic oligonucleotide
auaaugucucauguguagg

SEQ ID NO: 661622 - RNA, 19 nt, Artificial Sequence
  Description of Artificial Sequence: Synthetic oligonucleotide
cucgauguagcuaagugga

SEQ ID NO: 661623 - RNA, 19 nt, Artificial Sequence
  Description of Artificial Sequence: Synthetic oligonucleotide
aggaauaaugucucaugug

SEQ ID NO: 661624 - RNA, 19 nt, Artificial Sequence
  Description of Artificial Sequence: Synthetic oligonucleotide
aagcgcaacuccucaggac

SEQ ID NO: 661625 - RNA, 19 nt, Artificial Sequence
  Description of Artificial Sequence: Synthetic oligonucleotide
caggugaccucuaacauuc

SEQ ID NO: 661626 - RNA, 19 nt, Artificial Sequence
  Description of Artificial Sequence: Synthetic oligonucleotide
gaagugaaggcuccacgcc

SEQ ID NO: 661627 - RNA, 19 nt, Artificial Sequence
  Description of Artificial Sequence: Synthetic oligonucleotide
ucaaaaugcauggcuagcu

SEQ ID NO: 661628 - RNA, 19 nt, Artificial Sequence
  Description of Artificial Sequence: Synthetic oligonucleotide
caaacccaaggagagaggg

SEQ ID NO: 661629 - RNA, 19 nt, Artificial Sequence
  Description of Artificial Sequence: Synthetic oligonucleotide
guauaguuuagaaaacaac

SEQ ID NO: 661630 - RNA, 19 nt, Artificial Sequence
  Description of Artificial Sequence: Synthetic oligonucleotide
aaucaagauggagcugugg

SEQ ID NO: 661631 - RNA, 19 nt, Artificial Sequence
  Description of Artificial Sequence: Synthetic oligonucleotide
cuuuucgaagugaaggcuc

SEQ ID NO: 661632 - RNA, 19 nt, Artificial Sequence
  Description of Artificial Sequence: Synthetic oligonucleotide
agggacuuagagcuaauga

SEQ ID NO: 661633 - RNA, 19 nt, Artificial Sequence
  Description of Artificial Sequence: Synthetic oligonucleotide
gucuacacgcaacugcagg

SEQ ID NO: 661634 - RNA, 19 nt, Artificial Sequence
  Description of Artificial Sequence: Synthetic oligonucleotide
ucuacacgcaacugcaggu

SEQ ID NO: 661635 - RNA, 19 nt, Artificial Sequence
  Description of Artificial Sequence: Synthetic oligonucleotide
uaauccauccgcucacggc

SEQ ID NO: 661636 - RNA, 19 nt, Artificial Sequence
  Description of Artificial Sequence: Synthetic oligonucleotide
ugucucaauaguagcuuga

SEQ ID NO: 661637 - RNA, 19 nt, Artificial Sequence
  Description of Artificial Sequence: Synthetic oligonucleotide
gaucauguagggcccguag

SEQ ID NO: 661638 - RNA, 19 nt, Artificial Sequence
  Description of Artificial Sequence: Synthetic oligonucleotide
acgaccaucaggauggaag

SEQ ID NO: 661639 - RNA, 19 nt, Artificial Sequence
  Description of Artificial Sequence: Synthetic oligonucleotide
agcuaaguggacaacagca

SEQ ID NO: 661640 - RNA, 19 nt, Artificial Sequence
  Description of Artificial Sequence: Synthetic oligonucleotide
uaaugaggguagcugggug

SEQ ID NO: 661641 - RNA, 19 nt, Artificial Sequence
  Description of Artificial Sequence: Synthetic oligonucleotide
aggcggucaaaaugcaugg

SEQ ID NO: 661642 - RNA, 19 nt, Artificial Sequence
  Description of Artificial Sequence: Synthetic oligonucleotide
cagcaugucucaauaguag

SEQ ID NO: 661643 - RNA, 19 nt, Artificial Sequence
  Description of Artificial Sequence: Synthetic oligonucleotide
auccaaugacaucuuuggg

SEQ ID NO: 661644 - RNA, 19 nt, Artificial Sequence
  Description of Artificial Sequence: Synthetic oligonucleotide
uggaugaguaacggcauag

SEQ ID NO: 661645 - RNA, 19 nt, Artificial Sequence
  Description of Artificial Sequence: Synthetic oligonucleotide
cuucaugguccauaacagc

SEQ ID NO: 661646 - RNA, 19 nt, Artificial Sequence
  Description of Artificial Sequence: Synthetic oligonucleotide
uuacgcaugauguggucac

SEQ ID NO: 661647 - RNA, 19 nt, Artificial Sequence
  Description of Artificial Sequence: Synthetic oligonucleotide
accuuagacaagguacgcc

SEQ ID NO: 661648 - RNA, 19 nt, Artificial Sequence
  Description of Artificial Sequence: Synthetic oligonucleotide
cuuagacaagguacgcccc

SEQ ID NO: 661649 - RNA, 19 nt, Artificial Sequence
  Description of Artificial Sequence: Synthetic oligonucleotide
uaugugugaaacucagcau

SEQ ID NO: 661650 - RNA, 19 nt, Artificial Sequence
  Description of Artificial Sequence: Synthetic oligonucleotide
agugaggaacgcuucucag

SEQ ID NO: 661651 - RNA, 19 nt, Artificial Sequence
  Description of Artificial Sequence: Synthetic oligonucleotide
uccccaaucuuccagcaau

SEQ ID NO: 661652 - RNA, 19 nt, Artificial Sequence
  Description of Artificial Sequence: Synthetic oligonucleotide
gaaucaggccgagaagagg

SEQ ID NO: 661653 - RNA, 19 nt, Artificial Sequence
  Description of Artificial Sequence: Synthetic oligonucleotide
uggaccauccucaggcccc

SEQ ID NO: 661654 - RNA, 19 nt, Artificial Sequence
  Description of Artificial Sequence: Synthetic oligonucleotide
cucaggacgggagagcugg

SEQ ID NO: 661655 - RNA, 19 nt, Artificial Sequence
  Description of Artificial Sequence: Synthetic oligonucleotide
ucuuacguuucauguaauc

SEQ ID NO: 661656 - RNA, 19 nt, Artificial Sequence
  Description of Artificial Sequence: Synthetic oligonucleotide
aaggagaagccuccugggu

SEQ ID NO: 661657 - RNA, 19 nt, Artificial Sequence
  Description of Artificial Sequence: Synthetic oligonucleotide
gcucgauguagcuaagugg

SEQ ID NO: 661658 - RNA, 19 nt, Artificial Sequence
  Description of Artificial Sequence: Synthetic oligonucleotide
aguauaguuuagaaaacaa

SEQ ID NO: 661659 - RNA, 19 nt, Artificial Sequence
  Description of Artificial Sequence: Synthetic oligonucleotide
ccuuagacaagguacgccc

SEQ ID NO: 661660 - RNA, 19 nt, Artificial Sequence
  Description of Artificial Sequence: Synthetic oligonucleotide
augaacuccaggugaccuc

SEQ ID NO: 661661 - RNA, 19 nt, Artificial Sequence
  Description of Artificial Sequence: Synthetic oligonucleotide
cuucagacugcagauaauc

SEQ ID NO: 661662 - RNA, 19 nt, Artificial Sequence
  Description of Artificial Sequence: Synthetic oligonucleotide
aagucagugucucccacuu

SEQ ID NO: 661663 - RNA, 19 nt, Artificial Sequence
  Description of Artificial Sequence: Synthetic oligonucleotide
guaauccauccgcucacgg

SEQ ID NO: 661664 - RNA, 19 nt, Artificial Sequence
  Description of Artificial Sequence: Synthetic oligonucleotide
agcuaugucaccagaagga

SEQ ID NO: 661665 - RNA, 19 nt, Artificial Sequence
  Description of Artificial Sequence: Synthetic oligonucleotide
cucugcgcaagacacggcc

SEQ ID NO: 661666 - RNA, 19 nt, Artificial Sequence
  Description of Artificial Sequence: Synthetic oligonucleotide
ugauaccuguggaugagua

SEQ ID NO: 661667 - RNA, 19 nt, Artificial Sequence
  Description of Artificial Sequence: Synthetic oligonucleotide
aguaacggcauagguagug

SEQ ID NO: 661668 - RNA, 19 nt, Artificial Sequence
  Description of Artificial Sequence: Synthetic oligonucleotide
cugugacuaccaaagucag

SEQ ID NO: 661669 - RNA, 19 nt, Artificial Sequence
  Description of Artificial Sequence: Synthetic oligonucleotide
guagcuaaguggacaacag

SEQ ID NO: 661670 - RNA, 19 nt, Artificial Sequence
  Description of Artificial Sequence: Synthetic oligonucleotide
ccuaugucuugcaucaagg

SEQ ID NO: 661671 - RNA, 19 nt, Artificial Sequence
  Description of Artificial Sequence: Synthetic oligonucleotide
ugugugugcaaaguauagu

SEQ ID NO: 661672 - RNA, 19 nt, Artificial Sequence
  Description of Artificial Sequence: Synthetic oligonucleotide
uccucugagggccgaaugu

SEQ ID NO: 661673 - RNA, 19 nt, Artificial Sequence
  Description of Artificial Sequence: Synthetic oligonucleotide
gagaggauggauuguguaa

SEQ ID NO: 661674 - RNA, 19 nt, Artificial Sequence
  Description of Artificial Sequence: Synthetic oligonucleotide
auaguaaggaugggcucgg

SEQ ID NO: 661675 - RNA, 19 nt, Artificial Sequence
  Description of Artificial Sequence: Synthetic oligonucleotide
agauccgcaagcgcaacuc

SEQ ID NO: 661676 - RNA, 19 nt, Artificial Sequence
  Description of Artificial Sequence: Synthetic oligonucleotide
gaugaguaacggcauaggu

SEQ ID NO: 661677 - RNA, 19 nt, Artificial Sequence
  Description of Artificial Sequence: Synthetic oligonucleotide
gauaaucagcaaagagagc

SEQ ID NO: 661678 - RNA, 19 nt, Artificial Sequence
  Description of Artificial Sequence: Synthetic oligonucleotide
aguggcgaaagcugugcug

SEQ ID NO: 661679 - RNA, 19 nt, Artificial Sequence
  Description of Artificial Sequence: Synthetic oligonucleotide
ugcgaagcacauccuugag

SEQ ID NO: 661680 - RNA, 19 nt, Artificial Sequence
  Description of Artificial Sequence: Synthetic oligonucleotide
guaauccagcccauuacgc

SEQ ID NO: 661681 - RNA, 19 nt, Artificial Sequence
  Description of Artificial Sequence: Synthetic oligonucleotide
aacaugucuggggauggca

SEQ ID NO: 661682 - RNA, 19 nt, Artificial Sequence
  Description of Artificial Sequence: Synthetic oligonucleotide
aucacucagagguggcuug

SEQ ID NO: 661683 - RNA, 19 nt, Artificial Sequence
  Description of Artificial Sequence: Synthetic oligonucleotide
guaaggaugggcucggucu

SEQ ID NO: 661684 - RNA, 19 nt, Artificial Sequence
  Description of Artificial Sequence: Synthetic oligonucleotide
cauuggguuggagaccugg

SEQ ID NO: 661685 - RNA, 19 nt, Artificial Sequence
  Description of Artificial Sequence: Synthetic oligonucleotide
cuagaugguguuuccucac

SEQ ID NO: 661686 - RNA, 19 nt, Artificial Sequence
  Description of Artificial Sequence: Synthetic oligonucleotide
auuacgcaugaugugguca

SEQ ID NO: 661687 - RNA, 19 nt, Artificial Sequence
  Description of Artificial Sequence: Synthetic oligonucleotide
guagggacgugccaggauc

SEQ ID NO: 661688 - RNA, 19 nt, Artificial Sequence
  Description of Artificial Sequence: Synthetic oligonucleotide
ugauucagguaugugugaa

SEQ ID NO: 661689 - RNA, 19 nt, Artificial Sequence
  Description of Artificial Sequence: Synthetic oligonucleotide
uacgccccaccugagagag

SEQ ID NO: 661690 - RNA, 19 nt, Artificial Sequence
  Description of Artificial Sequence: Synthetic oligonucleotide
aaaugcauggcuagcucau

SEQ ID NO: 661691 - RNA, 19 nt, Artificial Sequence
  Description of Artificial Sequence: Synthetic oligonucleotide
uguccuagccggucccgcg

SEQ ID NO: 661692 - RNA, 19 nt, Artificial Sequence
  Description of Artificial Sequence: Synthetic oligonucleotide
gcggaugaauuccaggucc

SEQ ID NO: 661693 - RNA, 19 nt, Artificial Sequence
  Description of Artificial Sequence: Synthetic oligonucleotide
auggauuguguaaaaggca

SEQ ID NO: 661694 - RNA, 19 nt, Artificial Sequence
  Description of Artificial Sequence: Synthetic oligonucleotide
agggccgaaugucuacacg

SEQ ID NO: 661695 - RNA, 19 nt, Artificial Sequence
  Description of Artificial Sequence: Synthetic oligonucleotide
ggaccuuagacaagguacg

SEQ ID NO: 661696 - RNA, 19 nt, Artificial Sequence
  Description of Artificial Sequence: Synthetic oligonucleotide
cuuagagcuaaugagggua

SEQ ID NO: 661697 - RNA, 19 nt, Artificial Sequence
  Description of Artificial Sequence: Synthetic oligonucleotide
agaggauggauuguguaaa

SEQ ID NO: 661698 - RNA, 19 nt, Artificial Sequence
  Description of Artificial Sequence: Synthetic oligonucleotide
gauccgcaagcgcaacucc

SEQ ID NO: 661699 - RNA, 19 nt, Artificial Sequence
  Description of Artificial Sequence: Synthetic oligonucleotide
aggauggauuguguaaaag

SEQ ID NO: 661700 - RNA, 19 nt, Artificial Sequence
  Description of Artificial Sequence: Synthetic oligonucleotide
gucucaauaguagcuugag

SEQ ID NO: 661701 - RNA, 19 nt, Artificial Sequence
  Description of Artificial Sequence: Synthetic oligonucleotide
uacacgcaacugcagguaa

SEQ ID NO: 661702 - RNA, 19 nt, Artificial Sequence
  Description of Artificial Sequence: Synthetic oligonucleotide
acggccuagaugguguuuc

SEQ ID NO: 661703 - RNA, 19 nt, Artificial Sequence
  Description of Artificial Sequence: Synthetic oligonucleotide
ugacguacuggccgucccc

SEQ ID NO: 661704 - RNA, 19 nt, Artificial Sequence
  Description of Artificial Sequence: Synthetic oligonucleotide
ggugaccucuaacauucgg

SEQ ID NO: 661705 - RNA, 19 nt, Artificial Sequence
  Description of Artificial Sequence: Synthetic oligonucleotide
caagguacgccccaccuga

SEQ ID NO: 661706 - RNA, 19 nt, Artificial Sequence
  Description of Artificial Sequence: Synthetic oligonucleotide
gguacgccccaccugagag

SEQ ID NO: 661707 - RNA, 19 nt, Artificial Sequence
  Description of Artificial Sequence: Synthetic oligonucleotide
acucucgacucuuacguuu

SEQ ID NO: 661708 - RNA, 19 nt, Artificial Sequence
  Description of Artificial Sequence: Synthetic oligonucleotide
ugauuacaaucaagaugga

SEQ ID NO: 661709 - RNA, 19 nt, Artificial Sequence
  Description of Artificial Sequence: Synthetic oligonucleotide
aacggcauagguagugagu

SEQ ID NO: 661710 - RNA, 19 nt, Artificial Sequence
  Description of Artificial Sequence: Synthetic oligonucleotide
gaaugucuacacgcaacug

SEQ ID NO: 661711 - RNA, 19 nt, Artificial Sequence
  Description of Artificial Sequence: Synthetic oligonucleotide
ucugcgcaagacacggccu

SEQ ID NO: 661712 - RNA, 19 nt, Artificial Sequence
  Description of Artificial Sequence: Synthetic oligonucleotide
augaggguagcuggguggg

SEQ ID NO: 661713 - RNA, 19 nt, Artificial Sequence
  Description of Artificial Sequence: Synthetic oligonucleotide
gucaaaaugcauggcuagc

SEQ ID NO: 661714 - RNA, 19 nt, Artificial Sequence
  Description of Artificial Sequence: Synthetic oligonucleotide
cucgcuuuugagcugcuca

SEQ ID NO: 661715 - RNA, 19 nt, Artificial Sequence
  Description of Artificial Sequence: Synthetic oligonucleotide
gggccgaaugucuacacgc

SEQ ID NO: 661716 - RNA, 19 nt, Artificial Sequence
  Description of Artificial Sequence: Synthetic oligonucleotide
agagcuaaugaggguagcu

SEQ ID NO: 661717 - RNA, 19 nt, Artificial Sequence
  Description of Artificial Sequence: Synthetic oligonucleotide
gauaccuguggaugaguaa

SEQ ID NO: 661718 - RNA, 19 nt, Artificial Sequence
  Description of Artificial Sequence: Synthetic oligonucleotide
ucgauguagcuaaguggac

SEQ ID NO: 661719 - RNA, 19 nt, Artificial Sequence
  Description of Artificial Sequence: Synthetic oligonucleotide
ucggagucccacacuucag

SEQ ID NO: 661720 - RNA, 19 nt, Artificial Sequence
  Description of Artificial Sequence: Synthetic oligonucleotide
cccauuacgcaugaugugg

SEQ ID NO: 661721 - RNA, 19 nt, Artificial Sequence
  Description of Artificial Sequence: Synthetic oligonucleotide
cuuuggggcuaauuauguc

SEQ ID NO: 661722 - RNA, 19 nt, Artificial Sequence
  Description of Artificial Sequence: Synthetic oligonucleotide
uagggacgugccaggaucu

SEQ ID NO: 661723 - RNA, 19 nt, Artificial Sequence
  Description of Artificial Sequence: Synthetic oligonucleotide
guaagguuuggaggcagug

SEQ ID NO: 661724 - RNA, 19 nt, Artificial Sequence
  Description of Artificial Sequence: Synthetic oligonucleotide
cucccguuuaagcuccagc

SEQ ID NO: 661725 - RNA, 19 nt, Artificial Sequence
  Description of Artificial Sequence: Synthetic oligonucleotide
gacucuuacguuucaugua

SEQ ID NO: 661726 - RNA, 19 nt, Artificial Sequence
  Description of Artificial Sequence: Synthetic oligonucleotide
ggcucgauguagcuaagug

SEQ ID NO: 661727 - RNA, 19 nt, Artificial Sequence
  Description of Artificial Sequence: Synthetic oligonucleotide
cgugauucagguaugugug

SEQ ID NO: 661728 - RNA, 19 nt, Artificial Sequence
  Description of Artificial Sequence: Synthetic oligonucleotide
ccuggagugauuacaauca

SEQ ID NO: 661729 - RNA, 19 nt, Artificial Sequence
  Description of Artificial Sequence: Synthetic oligonucleotide
uagauccgcaagcgcaacu

SEQ ID NO: 661730 - RNA, 19 nt, Artificial Sequence
  Description of Artificial Sequence: Synthetic oligonucleotide
auagauccgcaagcgcaac

SEQ ID NO: 661731 - RNA, 19 nt, Artificial Sequence
  Description of Artificial Sequence: Synthetic oligonucleotide
cuaugucaccagaaggaga

SEQ ID NO: 661732 - RNA, 19 nt, Artificial Sequence
  Description of Artificial Sequence: Synthetic oligonucleotide
uucgugauucagguaugug

SEQ ID NO: 661733 - RNA, 19 nt, Artificial Sequence
  Description of Artificial Sequence: Synthetic oligonucleotide
acgcaugauguggucacgg

SEQ ID NO: 661734 - RNA, 19 nt, Artificial Sequence
  Description of Artificial Sequence: Synthetic oligonucleotide
auacaaaggcauggccuuc

SEQ ID NO: 661735 - RNA, 19 nt, Artificial Sequence
  Description of Artificial Sequence: Synthetic oligonucleotide
ucauuguaauccagcccau

SEQ ID NO: 661736 - RNA, 19 nt, Artificial Sequence
  Description of Artificial Sequence: Synthetic oligonucleotide
ucgcuuuugagcugcucau

SEQ ID NO: 661737 - RNA, 19 nt, Artificial Sequence
  Description of Artificial Sequence: Synthetic oligonucleotide
gugguagggacgugccagg

SEQ ID NO: 661738 - RNA, 19 nt, Artificial Sequence
  Description of Artificial Sequence: Synthetic oligonucleotide
ccguuuaagcuccagcagc

SEQ ID NO: 661739 - RNA, 19 nt, Artificial Sequence
  Description of Artificial Sequence: Synthetic oligonucleotide
cucucgacucuuacguuuc

SEQ ID NO: 661740 - RNA, 19 nt, Artificial Sequence
  Description of Artificial Sequence: Synthetic oligonucleotide
gucagcaugucucaauagu

SEQ ID NO: 661741 - RNA, 19 nt, Artificial Sequence
  Description of Artificial Sequence: Synthetic oligonucleotide
gaccuuagacaagguacgc

SEQ ID NO: 661742 - RNA, 19 nt, Artificial Sequence
  Description of Artificial Sequence: Synthetic oligonucleotide
gauagauccgcaagcgcaa

SEQ ID NO: 661743 - RNA, 19 nt, Artificial Sequence
  Description of Artificial Sequence: Synthetic oligonucleotide
uucgaagugaaggcuccac

SEQ ID NO: 661744 - RNA, 19 nt, Artificial Sequence
  Description of Artificial Sequence: Synthetic oligonucleotide
ccccgcauaguaaggaugg

SEQ ID NO: 661745 - RNA, 19 nt, Artificial Sequence
  Description of Artificial Sequence: Synthetic oligonucleotide
ugaggugggcaaacuuggu

SEQ ID NO: 661746 - RNA, 19 nt, Artificial Sequence
  Description of Artificial Sequence: Synthetic oligonucleotide
caagucacucaugcccugg

SEQ ID NO: 661747 - RNA, 19 nt, Artificial Sequence
  Description of Artificial Sequence: Synthetic oligonucleotide
ucugacguacuggccgucc

SEQ ID NO: 661748 - RNA, 19 nt, Artificial Sequence
  Description of Artificial Sequence: Synthetic oligonucleotide
guagaucauguagggcccg

SEQ ID NO: 661749 - RNA, 19 nt, Artificial Sequence
  Description of Artificial Sequence: Synthetic oligonucleotide
acggcauagguagugagua

SEQ ID NO: 661750 - RNA, 19 nt, Artificial Sequence
  Description of Artificial Sequence: Synthetic oligonucleotide
gcaggcaaggaauaauguc

SEQ ID NO: 661751 - RNA, 19 nt, Artificial Sequence
  Description of Artificial Sequence: Synthetic oligonucleotide
caaucaagauggagcugug

SEQ ID NO: 661752 - RNA, 19 nt, Artificial Sequence
  Description of Artificial Sequence: Synthetic oligonucleotide
gcuaugucaccagaaggag

SEQ ID NO: 661753 - RNA, 19 nt, Artificial Sequence
  Description of Artificial Sequence: Synthetic oligonucleotide
cauuacgcaugaugugguc

SEQ ID NO: 661754 - RNA, 19 nt, Artificial Sequence
  Description of Artificial Sequence: Synthetic oligonucleotide
cauagguagugaguagauc

SEQ ID NO: 661755 - RNA, 19 nt, Artificial Sequence
  Description of Artificial Sequence: Synthetic oligonucleotide
gcugggagguccaacaagc

SEQ ID NO: 661756 - RNA, 19 nt, Artificial Sequence
  Description of Artificial Sequence: Synthetic oligonucleotide
ccaacucagcaccugcugg

SEQ ID NO: 661757 - RNA, 19 nt, Artificial Sequence
  Description of Artificial Sequence: Synthetic oligonucleotide
ucucgacucuuacguuuca

SEQ ID NO: 661758 - RNA, 19 nt, Artificial Sequence
  Description of Artificial Sequence: Synthetic oligonucleotide
gcaugauguggucacggug

SEQ ID NO: 661759 - RNA, 19 nt, Artificial Sequence
  Description of Artificial Sequence: Synthetic oligonucleotide
ggagguaccgccauaccac

SEQ ID NO: 661760 - RNA, 19 nt, Artificial Sequence
  Description of Artificial Sequence: Synthetic oligonucleotide
uggggcuaauuaugucccc

SEQ ID NO: 661761 - RNA, 19 nt, Artificial Sequence
  Description of Artificial Sequence: Synthetic oligonucleotide
gugauucagguauguguga

SEQ ID NO: 661762 - RNA, 19 nt, Artificial Sequence
  Description of Artificial Sequence: Synthetic oligonucleotide
uagagcuaaugaggguagc

SEQ ID NO: 661763 - RNA, 19 nt, Artificial Sequence
  Description of Artificial Sequence: Synthetic oligonucleotide
cgaagugaaggcuccacgc

SEQ ID NO: 661764 - RNA, 19 nt, Artificial Sequence
  Description of Artificial Sequence: Synthetic oligonucleotide
gggaaucaggccgagaaga

SEQ ID NO: 661765 - RNA, 19 nt, Artificial Sequence
  Description of Artificial Sequence: Synthetic oligonucleotide
cugacguacuggccguccc

SEQ ID NO: 661766 - RNA, 19 nt, Artificial Sequence
  Description of Artificial Sequence: Synthetic oligonucleotide
uggcaacacugaaccacac

SEQ ID NO: 661767 - RNA, 19 nt, Artificial Sequence
  Description of Artificial Sequence: Synthetic oligonucleotide
uuucgaagugaaggcucca

SEQ ID NO: 661768 - RNA, 19 nt, Artificial Sequence
  Description of Artificial Sequence: Synthetic oligonucleotide
gagggccgaaugucuacac

SEQ ID NO: 661769 - RNA, 19 nt, Artificial Sequence
  Description of Artificial Sequence: Synthetic oligonucleotide
caggccgagaagaggagga

SEQ ID NO: 661770 - RNA, 19 nt, Artificial Sequence
  Description of Artificial Sequence: Synthetic oligonucleotide
aacauucggagagcaucau

SEQ ID NO: 661771 - RNA, 19 nt, Artificial Sequence
  Description of Artificial Sequence: Synthetic oligonucleotide
ggaaucaggccgagaagag

SEQ ID NO: 661772 - RNA, 19 nt, Artificial Sequence
  Description of Artificial Sequence: Synthetic oligonucleotide
uggcgaaagcugugcugag

SEQ ID NO: 661773 - RNA, 19 nt, Artificial Sequence
  Description of Artificial Sequence: Synthetic oligonucleotide
uagacaagguacgccccac

SEQ ID NO: 661774 - RNA, 19 nt, Artificial Sequence
  Description of Artificial Sequence: Synthetic oligonucleotide
ugcgcaagacacggccuag

SEQ ID NO: 661775 - RNA, 19 nt, Artificial Sequence
  Description of Artificial Sequence: Synthetic oligonucleotide
ccuacagcuaugucaccag

SEQ ID NO: 661776 - RNA, 19 nt, Artificial Sequence
  Description of Artificial Sequence: Synthetic oligonucleotide
guccucugagggccgaaug

SEQ ID NO: 661777 - RNA, 19 nt, Artificial Sequence
  Description of Artificial Sequence: Synthetic oligonucleotide
caggccccgcauaguaagg

SEQ ID NO: 661778 - RNA, 19 nt, Artificial Sequence
  Description of Artificial Sequence: Synthetic oligonucleotide
augggcucggucugugcga

SEQ ID NO: 661779 - RNA, 19 nt, Artificial Sequence
  Description of Artificial Sequence: Synthetic oligonucleotide
gcaagacacggccuagaug

SEQ ID NO: 661780 - RNA, 19 nt, Artificial Sequence
  Description of Artificial Sequence: Synthetic oligonucleotide
cucuaacauucggagagca

SEQ ID NO: 661781 - RNA, 19 nt, Artificial Sequence
  Description of Artificial Sequence: Synthetic oligonucleotide
aaugcauggcuagcucauu

SEQ ID NO: 661782 - RNA, 19 nt, Artificial Sequence
  Description of Artificial Sequence: Synthetic oligonucleotide
augugccucugacguacug

SEQ ID NO: 661783 - RNA, 19 nt, Artificial Sequence
  Description of Artificial Sequence: Synthetic oligonucleotide
cuggcaguaugauaccugu

SEQ ID NO: 661784 - RNA, 19 nt, Artificial Sequence
  Description of Artificial Sequence: Synthetic oligonucleotide
caagcgcaacuccucagga

SEQ ID NO: 661785 - RNA, 19 nt, Artificial Sequence
  Description of Artificial Sequence: Synthetic oligonucleotide
uggcugggagguccaacaa

SEQ ID NO: 661786 - RNA, 19 nt, Artificial Sequence
  Description of Artificial Sequence: Synthetic oligonucleotide
guggcaacacugaaccaca

SEQ ID NO: 661787 - RNA, 19 nt, Artificial Sequence
  Description of Artificial Sequence: Synthetic oligonucleotide
ggggaaucaggccgagaag

SEQ ID NO: 661788 - RNA, 19 nt, Artificial Sequence
  Description of Artificial Sequence: Synthetic oligonucleotide
cuaggucccuggcucgaug

SEQ ID NO: 661789 - RNA, 19 nt, Artificial Sequence
  Description of Artificial Sequence: Synthetic oligonucleotide
acacgcaacugcagguaag

SEQ ID NO: 661790 - RNA, 19 nt, Artificial Sequence
  Description of Artificial Sequence: Synthetic oligonucleotide
cacucgcugggcccacucg

SEQ ID NO: 661791 - RNA, 19 nt, Artificial Sequence
  Description of Artificial Sequence: Synthetic oligonucleotide
uagaucauguagggcccgu

SEQ ID NO: 661792 - RNA, 19 nt, Artificial Sequence
  Description of Artificial Sequence: Synthetic oligonucleotide
gguaugugugaaacucagc

SEQ ID NO: 661793 - RNA, 19 nt, Artificial Sequence
  Description of Artificial Sequence: Synthetic oligonucleotide
agauggggaaucaggccga

SEQ ID NO: 661794 - RNA, 19 nt, Artificial Sequence
  Description of Artificial Sequence: Synthetic oligonucleotide
gccuagaugguguuuccuc

SEQ ID NO: 661795 - RNA, 19 nt, Artificial Sequence
  Description of Artificial Sequence: Synthetic oligonucleotide
cuacagcuaugucaccaga

SEQ ID NO: 661796 - RNA, 19 nt, Artificial Sequence
  Description of Artificial Sequence: Synthetic oligonucleotide
agccaguagcacaucagau

SEQ ID NO: 661797 - RNA, 19 nt, Artificial Sequence
  Description of Artificial Sequence: Synthetic oligonucleotide
gcaugugccucugacguac

SEQ ID NO: 661798 - RNA, 19 nt, Artificial Sequence
  Description of Artificial Sequence: Synthetic oligonucleotide
uaccgccauaccacuuuuc

SEQ ID NO: 661799 - RNA, 19 nt, Artificial Sequence
  Description of Artificial Sequence: Synthetic oligonucleotide
gccuucgugauucagguau

SEQ ID NO: 661800 - RNA, 19 nt, Artificial Sequence
  Description of Artificial Sequence: Synthetic oligonucleotide
uacuggccguccccuguga

SEQ ID NO: 661801 - RNA, 19 nt, Artificial Sequence
  Description of Artificial Sequence: Synthetic oligonucleotide
guccuagccggucccgcgc

SEQ ID NO: 661802 - RNA, 19 nt, Artificial Sequence
  Description of Artificial Sequence: Synthetic oligonucleotide
cccguuuaagcuccagcag

SEQ ID NO: 661803 - RNA, 19 nt, Artificial Sequence
  Description of Artificial Sequence: Synthetic oligonucleotide
ccuagaugguguuuccuca

SEQ ID NO: 661804 - RNA, 19 nt, Artificial Sequence
  Description of Artificial Sequence: Synthetic oligonucleotide
agguacgccccaccugaga

SEQ ID NO: 661805 - RNA, 19 nt, Artificial Sequence
  Description of Artificial Sequence: Synthetic oligonucleotide
ccauguuaucccugaguug

SEQ ID NO: 661806 - RNA, 19 nt, Artificial Sequence
  Description of Artificial Sequence: Synthetic oligonucleotide
ggcgaaagcugugcugagg

SEQ ID NO: 661807 - RNA, 19 nt, Artificial Sequence
  Description of Artificial Sequence: Synthetic oligonucleotide
gacacggccuagauggugu

SEQ ID NO: 661808 - RNA, 19 nt, Artificial Sequence
  Description of Artificial Sequence: Synthetic oligonucleotide
gagaaccuaugucuugcau

SEQ ID NO: 661809 - RNA, 19 nt, Artificial Sequence
  Description of Artificial Sequence: Synthetic oligonucleotide
ccuggcucgauguagcuaa

SEQ ID NO: 661810 - RNA, 19 nt, Artificial Sequence
  Description of Artificial Sequence: Synthetic oligonucleotide
ugguagggacgugccagga

SEQ ID NO: 661811 - RNA, 19 nt, Artificial Sequence
  Description of Artificial Sequence: Synthetic oligonucleotide
ccaacaugucuggggaugg

SEQ ID NO: 661812 - RNA, 19 nt, Artificial Sequence
  Description of Artificial Sequence: Synthetic oligonucleotide
gggagagcuggccuucgug

SEQ ID NO: 661813 - RNA, 19 nt, Artificial Sequence
  Description of Artificial Sequence: Synthetic oligonucleotide
cuggagugauuacaaucaa

SEQ ID NO: 661814 - RNA, 19 nt, Artificial Sequence
  Description of Artificial Sequence: Synthetic oligonucleotide
cuggaccuuagacaaggua

SEQ ID NO: 661815 - RNA, 19 nt, Artificial Sequence
  Description of Artificial Sequence: Synthetic oligonucleotide
auccgcaagcgcaacuccu

SEQ ID NO: 661816 - RNA, 19 nt, Artificial Sequence
  Description of Artificial Sequence: Synthetic oligonucleotide
gcccauuacgcaugaugug

SEQ ID NO: 661817 - RNA, 19 nt, Artificial Sequence
  Description of Artificial Sequence: Synthetic oligonucleotide
ggucccuggcucgauguag

SEQ ID NO: 661818 - RNA, 19 nt, Artificial Sequence
  Description of Artificial Sequence: Synthetic oligonucleotide
aagacacggccuagauggu

SEQ ID NO: 661819 - RNA, 19 nt, Artificial Sequence
  Description of Artificial Sequence: Synthetic oligonucleotide
uggcucgauguagcuaagu

SEQ ID NO: 661820 - RNA, 19 nt, Artificial Sequence
  Description of Artificial Sequence: Synthetic oligonucleotide
caguaugauaccuguggau

SEQ ID NO: 661821 - RNA, 19 nt, Artificial Sequence
  Description of Artificial Sequence: Synthetic oligonucleotide
ugaggguagcugggugggc

SEQ ID NO: 661822 - RNA, 19 nt, Artificial Sequence
  Description of Artificial Sequence: Synthetic oligonucleotide
ccgcauaguaaggaugggc

SEQ ID NO: 661823 - RNA, 19 nt, Artificial Sequence
  Description of Artificial Sequence: Synthetic oligonucleotide
guagcuugaggugggcaaa

SEQ ID NO: 661824 - RNA, 19 nt, Artificial Sequence
  Description of Artificial Sequence: Synthetic oligonucleotide
ggugggcuaauuggacuag

SEQ ID NO: 661825 - RNA, 19 nt, Artificial Sequence
  Description of Artificial Sequence: Synthetic oligonucleotide
ggucacggugcuccagcag

SEQ ID NO: 661826 - RNA, 19 nt, Artificial Sequence
  Description of Artificial Sequence: Synthetic oligonucleotide
ggacgugccaggaucucug

SEQ ID NO: 661827 - RNA, 19 nt, Artificial Sequence
  Description of Artificial Sequence: Synthetic oligonucleotide
ggcucggucugugcgaagc

SEQ ID NO: 661828 - RNA, 19 nt, Artificial Sequence
  Description of Artificial Sequence: Synthetic oligonucleotide
gcaguggcgaaagcugugc

SEQ ID NO: 661829 - RNA, 19 nt, Artificial Sequence
  Description of Artificial Sequence: Synthetic oligonucleotide
ggagaaccuaugucuugca

SEQ ID NO: 661830 - RNA, 19 nt, Artificial Sequence
  Description of Artificial Sequence: Synthetic oligonucleotide
augaugccacaaaagcaua

SEQ ID NO: 661831 - RNA, 19 nt, Artificial Sequence
  Description of Artificial Sequence: Synthetic oligonucleotide
guacgccccaccugagaga

SEQ ID NO: 661832 - RNA, 19 nt, Artificial Sequence
  Description of Artificial Sequence: Synthetic oligonucleotide
acguacuggccguccccug

SEQ ID NO: 661833 - RNA, 19 nt, Artificial Sequence
  Description of Artificial Sequence: Synthetic oligonucleotide
agggacgugccaggaucuc

SEQ ID NO: 661834 - RNA, 19 nt, Artificial Sequence
  Description of Artificial Sequence: Synthetic oligonucleotide
uguccucugagggccgaau

SEQ ID NO: 661835 - RNA, 19 nt, Artificial Sequence
  Description of Artificial Sequence: Synthetic oligonucleotide
cuguccuagccggucccgc

SEQ ID NO: 661836 - RNA, 19 nt, Artificial Sequence
  Description of Artificial Sequence: Synthetic oligonucleotide
aggccccgcauaguaagga

SEQ ID NO: 661837 - RNA, 19 nt, Artificial Sequence
  Description of Artificial Sequence: Synthetic oligonucleotide
aaccuaugucuugcaucaa

SEQ ID NO: 661838 - RNA, 19 nt, Artificial Sequence
  Description of Artificial Sequence: Synthetic oligonucleotide
ccacuaggucccuggcucg

SEQ ID NO: 661839 - RNA, 19 nt, Artificial Sequence
  Description of Artificial Sequence: Synthetic oligonucleotide
ugggcucggucugugcgaa

SEQ ID NO: 661840 - RNA, 19 nt, Artificial Sequence
  Description of Artificial Sequence: Synthetic oligonucleotide
ccuucgugauucagguaug

SEQ ID NO: 661841 - RNA, 19 nt, Artificial Sequence
  Description of Artificial Sequence: Synthetic oligonucleotide
gaggguagcugggugggcu

SEQ ID NO: 661842 - RNA, 19 nt, Artificial Sequence
  Description of Artificial Sequence: Synthetic oligonucleotide
ggccauggcacgaccauca

SEQ ID NO: 661843 - RNA, 19 nt, Artificial Sequence
  Description of Artificial Sequence: Synthetic oligonucleotide
gcaugucucaauaguagcu

SEQ ID NO: 661844 - RNA, 19 nt, Artificial Sequence
  Description of Artificial Sequence: Synthetic oligonucleotide
ccacuuggcugggaggucc

SEQ ID NO: 661845 - RNA, 19 nt, Artificial Sequence
  Description of Artificial Sequence: Synthetic oligonucleotide
auuggacuagaaaguccuu

SEQ ID NO: 661846 - RNA, 19 nt, Artificial Sequence
  Description of Artificial Sequence: Synthetic oligonucleotide
ggggcuaauuaugucccca

SEQ ID NO: 661847 - RNA, 19 nt, Artificial Sequence
  Description of Artificial Sequence: Synthetic oligonucleotide
ccacucgcuuuugagcugc

SEQ ID NO: 661848 - RNA, 19 nt, Artificial Sequence
  Description of Artificial Sequence: Synthetic oligonucleotide
cucaggccccgcauaguaa

SEQ ID NO: 661849 - RNA, 19 nt, Artificial Sequence
  Description of Artificial Sequence: Synthetic oligonucleotide
gcgcaacuccucaggacgg

SEQ ID NO: 661850 - RNA, 19 nt, Artificial Sequence
  Description of Artificial Sequence: Synthetic oligonucleotide
cuacacgcaacugcaggua

SEQ ID NO: 661851 - RNA, 19 nt, Artificial Sequence
  Description of Artificial Sequence: Synthetic oligonucleotide
accaggcggucaaaaugca

SEQ ID NO: 661852 - RNA, 19 nt, Artificial Sequence
  Description of Artificial Sequence: Synthetic oligonucleotide
cuuccccauaugaccaacu

SEQ ID NO: 661853 - RNA, 19 nt, Artificial Sequence
  Description of Artificial Sequence: Synthetic oligonucleotide
ccucggccaaacuccuggg

SEQ ID NO: 661854 - RNA, 19 nt, Artificial Sequence
  Description of Artificial Sequence: Synthetic oligonucleotide
cgcauaguaaggaugggcu

SEQ ID NO: 661855 - RNA, 19 nt, Artificial Sequence
  Description of Artificial Sequence: Synthetic oligonucleotide
gacguacuggccguccccu

SEQ ID NO: 661856 - RNA, 19 nt, Artificial Sequence
  Description of Artificial Sequence: Synthetic oligonucleotide
gcauggcuagcucauugua

SEQ ID NO: 661857 - RNA, 19 nt, Artificial Sequence
  Description of Artificial Sequence: Synthetic oligonucleotide
gccccgcauaguaaggaug

SEQ ID NO: 661858 - RNA, 19 nt, Artificial Sequence
  Description of Artificial Sequence: Synthetic oligonucleotide
cugcgcaagacacggccua

SEQ ID NO: 661859 - RNA, 19 nt, Artificial Sequence
  Description of Artificial Sequence: Synthetic oligonucleotide
caaaggcaaacucccguuu

SEQ ID NO: 661860 - RNA, 19 nt, Artificial Sequence
  Description of Artificial Sequence: Synthetic oligonucleotide
guccccaaucuuccagcaa

SEQ ID NO: 661861 - RNA, 19 nt, Artificial Sequence
  Description of Artificial Sequence: Synthetic oligonucleotide
gccgaaugucuacacgcaa

SEQ ID NO: 661862 - RNA, 19 nt, Artificial Sequence
  Description of Artificial Sequence: Synthetic oligonucleotide
aggucccuggcucgaugua

SEQ ID NO: 661863 - RNA, 19 nt, Artificial Sequence
  Description of Artificial Sequence: Synthetic oligonucleotide
gguaccgccauaccacuuu

SEQ ID NO: 661864 - RNA, 19 nt, Artificial Sequence
  Description of Artificial Sequence: Synthetic oligonucleotide
cuucgugauucagguaugu

SEQ ID NO: 661865 - RNA, 19 nt, Artificial Sequence
  Description of Artificial Sequence: Synthetic oligonucleotide
ggccgaaugucuacacgca

SEQ ID NO: 661866 - RNA, 19 nt, Artificial Sequence
  Description of Artificial Sequence: Synthetic oligonucleotide
cgauguagcuaaguggaca

SEQ ID NO: 661867 - RNA, 19 nt, Artificial Sequence
  Description of Artificial Sequence: Synthetic oligonucleotide
gcgccagguagcugaugcc

SEQ ID NO: 661868 - RNA, 19 nt, Artificial Sequence
  Description of Artificial Sequence: Synthetic oligonucleotide
cgacucuuacguuucaugu

SEQ ID NO: 661869 - RNA, 19 nt, Artificial Sequence
  Description of Artificial Sequence: Synthetic oligonucleotide
cucuuacguuucauguaau

SEQ ID NO: 661870 - RNA, 19 nt, Artificial Sequence
  Description of Artificial Sequence: Synthetic oligonucleotide
gucgucagugaggaacgcu

SEQ ID NO: 661871 - RNA, 19 nt, Artificial Sequence
  Description of Artificial Sequence: Synthetic oligonucleotide
gcccauguuaucccugagu

SEQ ID NO: 661872 - RNA, 19 nt, Artificial Sequence
  Description of Artificial Sequence: Synthetic oligonucleotide
cucugacguacuggccguc

SEQ ID NO: 661873 - RNA, 19 nt, Artificial Sequence
  Description of Artificial Sequence: Synthetic oligonucleotide
cggcauagguagugaguag

SEQ ID NO: 661874 - RNA, 19 nt, Artificial Sequence
  Description of Artificial Sequence: Synthetic oligonucleotide
cgcaagcgcaacuccucag

SEQ ID NO: 661875 - RNA, 19 nt, Artificial Sequence
  Description of Artificial Sequence: Synthetic oligonucleotide
ccauuacgcaugauguggu

SEQ ID NO: 661876 - RNA, 19 nt, Artificial Sequence
  Description of Artificial Sequence: Synthetic oligonucleotide
gaguaacggcauagguagu

SEQ ID NO: 661877 - RNA, 19 nt, Artificial Sequence
  Description of Artificial Sequence: Synthetic oligonucleotide
cccacucgcuuuugagcug

SEQ ID NO: 661878 - RNA, 19 nt, Artificial Sequence
  Description of Artificial Sequence: Synthetic oligonucleotide
cccgcauaguaaggauggg

SEQ ID NO: 661879 - RNA, 19 nt, Artificial Sequence
  Description of Artificial Sequence: Synthetic oligonucleotide
cacuaggucccuggcucga

SEQ ID NO: 661880 - RNA, 19 nt, Artificial Sequence
  Description of Artificial Sequence: Synthetic oligonucleotide
gcuugucucaggagacguc

SEQ ID NO: 661881 - RNA, 19 nt, Artificial Sequence
  Description of Artificial Sequence: Synthetic oligonucleotide
ggcuugucucaggagacgu

SEQ ID NO: 661882 - RNA, 19 nt, Artificial Sequence
  Description of Artificial Sequence: Synthetic oligonucleotide
ccgccauaccacuuuucga

SEQ ID NO: 661883 - RNA, 19 nt, Artificial Sequence
  Description of Artificial Sequence: Synthetic oligonucleotide
ggccuucaugguccauaac

SEQ ID NO: 661884 - RNA, 19 nt, Artificial Sequence
  Description of Artificial Sequence: Synthetic oligonucleotide
caguggcgaaagcugugcu

SEQ ID NO: 661885 - RNA, 19 nt, Artificial Sequence
  Description of Artificial Sequence: Synthetic oligonucleotide
guaccgccauaccacuuuu

SEQ ID NO: 661886 - RNA, 19 nt, Artificial Sequence
  Description of Artificial Sequence: Synthetic oligonucleotide
cagauccaaugacaucuuu

SEQ ID NO: 661887 - RNA, 19 nt, Artificial Sequence
  Description of Artificial Sequence: Synthetic oligonucleotide
agguaccgccauaccacuu

SEQ ID NO: 661888 - RNA, 19 nt, Artificial Sequence
  Description of Artificial Sequence: Synthetic oligonucleotide
gguaagguuuggaggcagu

SEQ ID NO: 661889 - RNA, 19 nt, Artificial Sequence
  Description of Artificial Sequence: Synthetic oligonucleotide
cauuguaauccagcccauu

SEQ ID NO: 661890 - RNA, 19 nt, Artificial Sequence
  Description of Artificial Sequence: Synthetic oligonucleotide
cggccuagaugguguuucc

SEQ ID NO: 661891 - RNA, 19 nt, Artificial Sequence
  Description of Artificial Sequence: Synthetic oligonucleotide
caugugccucugacguacu

SEQ ID NO: 661892 - RNA, 19 nt, Artificial Sequence
  Description of Artificial Sequence: Synthetic oligonucleotide
gaacuccaggugaccucua

SEQ ID NO: 661893 - RNA, 19 nt, Artificial Sequence
  Description of Artificial Sequence: Synthetic oligonucleotide
gccguccccugugacuacc

SEQ ID NO: 661894 - RNA, 19 nt, Artificial Sequence
  Description of Artificial Sequence: Synthetic oligonucleotide
cucgacucuuacguuucau

SEQ ID NO: 661895 - RNA, 19 nt, Artificial Sequence
  Description of Artificial Sequence: Synthetic oligonucleotide
gggcucggucugugcgaag

SEQ ID NO: 661896 - RNA, 19 nt, Artificial Sequence
  Description of Artificial Sequence: Synthetic oligonucleotide
cccaaucagagaggaggga

SEQ ID NO: 661897 - RNA, 19 nt, Artificial Sequence
  Description of Artificial Sequence: Synthetic oligonucleotide
gggacgugccaggaucucu

SEQ ID NO: 661898 - RNA, 19 nt, Artificial Sequence
  Description of Artificial Sequence: Synthetic oligonucleotide
gcgcaagacacggccuaga

SEQ ID NO: 661899 - RNA, 19 nt, Artificial Sequence
  Description of Artificial Sequence: Synthetic oligonucleotide
ggccuagaugguguuuccu

SEQ ID NO: 661900 - RNA, 19 nt, Artificial Sequence
  Description of Artificial Sequence: Synthetic oligonucleotide
ggccccgcauaguaaggau

SEQ ID NO: 661901 - RNA, 19 nt, Artificial Sequence
  Description of Artificial Sequence: Synthetic oligonucleotide
gucccgcgccagguagcug

SEQ ID NO: 661902 - RNA, 19 nt, Artificial Sequence
  Description of Artificial Sequence: Synthetic oligonucleotide
cccuccucggagucccaca

SEQ ID NO: 661903 - RNA, 19 nt, Artificial Sequence
  Description of Artificial Sequence: Synthetic oligonucleotide
ggccguccccugugacuac

SEQ ID NO: 661904 - RNA, 19 nt, Artificial Sequence
  Description of Artificial Sequence: Synthetic oligonucleotide
cggucccgcgccagguagc

SEQ ID NO: 661905 - RNA, 19 nt, Artificial Sequence
  Description of Artificial Sequence: Synthetic oligonucleotide
cacucgcuuuugagcugcu

SEQ ID NO: 661906 - RNA, 19 nt, Artificial Sequence
  Description of Artificial Sequence: Synthetic oligonucleotide
ccguccccugugacuacca

SEQ ID NO: 661907 - RNA, 19 nt, Artificial Sequence
  Description of Artificial Sequence: Synthetic oligonucleotide
cgcaugauguggucacggu

SEQ ID NO: 661908 - RNA, 19 nt, Artificial Sequence
  Description of Artificial Sequence: Synthetic oligonucleotide
cguacuggccguccccugu

SEQ ID NO: 661909 - RNA, 19 nt, Artificial Sequence
  Description of Artificial Sequence: Synthetic oligonucleotide
cacggccuagaugguguuu

SEQ ID NO: 661910 - RNA, 19 nt, Artificial Sequence
  Description of Artificial Sequence: Synthetic oligonucleotide
cgcaagacacggccuagau

SEQ ID NO: 661911 - RNA, 19 nt, Artificial Sequence
  Description of Artificial Sequence: Synthetic oligonucleotide
cccuggcucgauguagcua

SEQ ID NO: 661912 - RNA, 19 nt, Artificial Sequence
  Description of Artificial Sequence: Synthetic oligonucleotide
ccauccgcucacggccugu

SEQ ID NO: 661913 - RNA, 19 nt, Artificial Sequence
  Description of Artificial Sequence: Synthetic oligonucleotide
cccgcgccagguagcugau

SEQ ID NO: 661914 - RNA, 19 nt, Artificial Sequence
  Description of Artificial Sequence: Synthetic oligonucleotide
gccccaccugagagaggau

SEQ ID NO: 661915 - RNA, 19 nt, Artificial Sequence
  Description of Artificial Sequence: Synthetic oligonucleotide
aauuauguauuuuggcugc

SEQ ID NO: 661916 - RNA, 19 nt, Artificial Sequence
  Description of Artificial Sequence: Synthetic oligonucleotide
aaauuauguauuuuggcug

SEQ ID NO: 661917 - RNA, 19 nt, Artificial Sequence
  Description of Artificial Sequence: Synthetic oligonucleotide
uucguuaagagaaucaaag

SEQ ID NO: 661918 - RNA, 19 nt, Artificial Sequence
  Description of Artificial Sequence: Synthetic oligonucleotide
uucaugacgagacaaaugc

SEQ ID NO: 661919 - RNA, 19 nt, Artificial Sequence
  Description of Artificial Sequence: Synthetic oligonucleotide
ucuaauuguagauugggag

SEQ ID NO: 661920 - RNA, 19 nt, Artificial Sequence
  Description of Artificial Sequence: Synthetic oligonucleotide
aaccaaguagcuuacuugg

SEQ ID NO: 661921 - RNA, 19 nt, Artificial Sequence
  Description of Artificial Sequence: Synthetic oligonucleotide
uguuauacagggcaggcag

SEQ ID NO: 661922 - RNA, 19 nt, Artificial Sequence
  Description of Artificial Sequence: Synthetic oligonucleotide
auuaaaugauuacuccacc

SEQ ID NO: 661923 - RNA, 19 nt, Artificial Sequence
  Description of Artificial Sequence: Synthetic oligonucleotide
uguguuagcguaauuaugu

SEQ ID NO: 661924 - RNA, 19 nt, Artificial Sequence
  Description of Artificial Sequence: Synthetic oligonucleotide
aauuacacccaugucuucc

SEQ ID NO: 661925 - RNA, 19 nt, Artificial Sequence
  Description of Artificial Sequence: Synthetic oligonucleotide
aaauuuuggaccggggacc

SEQ ID NO: 661926 - RNA, 19 nt, Artificial Sequence
  Description of Artificial Sequence: Synthetic oligonucleotide
uguuucuagauacucagug

SEQ ID NO: 661927 - RNA, 19 nt, Artificial Sequence
  Description of Artificial Sequence: Synthetic oligonucleotide
agugggugcaugcauaugc

SEQ ID NO: 661928 - RNA, 19 nt, Artificial Sequence
  Description of Artificial Sequence: Synthetic oligonucleotide
gacugaauauucuaagggg

SEQ ID NO: 661929 - RNA, 19 nt, Artificial Sequence
  Description of Artificial Sequence: Synthetic oligonucleotide
uauuaaaugauuacuccac

SEQ ID NO: 661930 - RNA, 19 nt, Artificial Sequence
  Description of Artificial Sequence: Synthetic oligonucleotide
guaguggucauguaaauag

SEQ ID NO: 661931 - RNA, 19 nt, Artificial Sequence
  Description of Artificial Sequence: Synthetic oligonucleotide
acaaaaccgaagcacaugg

SEQ ID NO: 661932 - RNA, 19 nt, Artificial Sequence
  Description of Artificial Sequence: Synthetic oligonucleotide
uuucuagauacucagugug

SEQ ID NO: 661933 - RNA, 19 nt, Artificial Sequence
  Description of Artificial Sequence: Synthetic oligonucleotide
aaacuaaggcagcugguac

SEQ ID NO: 661934 - RNA, 19 nt, Artificial Sequence
  Description of Artificial Sequence: Synthetic oligonucleotide
aagacaacuaggcccaggg

SEQ ID NO: 661935 - RNA, 19 nt, Artificial Sequence
  Description of Artificial Sequence: Synthetic oligonucleotide
uuaaccuuuauaugcauga

SEQ ID NO: 661936 - RNA, 19 nt, Artificial Sequence
  Description of Artificial Sequence: Synthetic oligonucleotide
cuuuauaugcaugaaauac

SEQ ID NO: 661937 - RNA, 19 nt, Artificial Sequence
  Description of Artificial Sequence: Synthetic oligonucleotide
uaguguuguaaaaugacug

SEQ ID NO: 661938 - RNA, 19 nt, Artificial Sequence
  Description of Artificial Sequence: Synthetic oligonucleotide
aaaccaaguagcuuacuug

SEQ ID NO: 661939 - RNA, 19 nt, Artificial Sequence
  Description of Artificial Sequence: Synthetic oligonucleotide
uugguaagaauaauaugag

SEQ ID NO: 661940 - RNA, 19 nt, Artificial Sequence
  Description of Artificial Sequence: Synthetic oligonucleotide
aaugauuacuccaccauag

SEQ ID NO: 661941 - RNA, 19 nt, Artificial Sequence
  Description of Artificial Sequence: Synthetic oligonucleotide
uucccugcgaucaagaaga

SEQ ID NO: 661942 - RNA, 19 nt, Artificial Sequence
  Description of Artificial Sequence: Synthetic oligonucleotide
caugucuacuuauauaacc

SEQ ID NO: 661943 - RNA, 19 nt, Artificial Sequence
  Description of Artificial Sequence: Synthetic oligonucleotide
guuaccaggaaguagagga

SEQ ID NO: 661944 - RNA, 19 nt, Artificial Sequence
  Description of Artificial Sequence: Synthetic oligonucleotide
uccaucucaacaauuuucc

SEQ ID NO: 661945 - RNA, 19 nt, Artificial Sequence
  Description of Artificial Sequence: Synthetic oligonucleotide
aacaaugacugucacugug

SEQ ID NO: 661946 - RNA, 19 nt, Artificial Sequence
  Description of Artificial Sequence: Synthetic oligonucleotide
guaagaauaauaugagaug

SEQ ID NO: 661947 - RNA, 19 nt, Artificial Sequence
  Description of Artificial Sequence: Synthetic oligonucleotide
uuucauaagaaaugguuaa

SEQ ID NO: 661948 - RNA, 19 nt, Artificial Sequence
  Description of Artificial Sequence: Synthetic oligonucleotide
caugagaugagucucacuc

SEQ ID NO: 661949 - RNA, 19 nt, Artificial Sequence
  Description of Artificial Sequence: Synthetic oligonucleotide
auagauauaacaugucuaa

SEQ ID NO: 661950 - RNA, 19 nt, Artificial Sequence
  Description of Artificial Sequence: Synthetic oligonucleotide
caugucuaauuguagauug

SEQ ID NO: 661951 - RNA, 19 nt, Artificial Sequence
  Description of Artificial Sequence: Synthetic oligonucleotide
aaugaaaacccagggguuc

SEQ ID NO: 661952 - RNA, 19 nt, Artificial Sequence
  Description of Artificial Sequence: Synthetic oligonucleotide
aauccuaucagaguaggga

SEQ ID NO: 661953 - RNA, 19 nt, Artificial Sequence
  Description of Artificial Sequence: Synthetic oligonucleotide
uuauuuucggucagaaacu

SEQ ID NO: 661954 - RNA, 19 nt, Artificial Sequence
  Description of Artificial Sequence: Synthetic oligonucleotide
augaugacaaugacuaugc

SEQ ID NO: 661955 - RNA, 19 nt, Artificial Sequence
  Description of Artificial Sequence: Synthetic oligonucleotide
uauguauuuuggcugcugc

SEQ ID NO: 661956 - RNA, 19 nt, Artificial Sequence
  Description of Artificial Sequence: Synthetic oligonucleotide
agugugaugucaucugugg

SEQ ID NO: 661957 - RNA, 19 nt, Artificial Sequence
  Description of Artificial Sequence: Synthetic oligonucleotide
ugagucucacucaaaacca

SEQ ID NO: 661958 - RNA, 19 nt, Artificial Sequence
  Description of Artificial Sequence: Synthetic oligonucleotide
auaugcaugaaauacucaa

SEQ ID NO: 661959 - RNA, 19 nt, Artificial Sequence
  Description of Artificial Sequence: Synthetic oligonucleotide
ugucuaauuguagauuggg

SEQ ID NO: 661960 - RNA, 19 nt, Artificial Sequence
  Description of Artificial Sequence: Synthetic oligonucleotide
uguuagcguaauuaugucc

SEQ ID NO: 661961 - RNA, 19 nt, Artificial Sequence
  Description of Artificial Sequence: Synthetic oligonucleotide
aacaugucuaauuguagau

SEQ ID NO: 661962 - RNA, 19 nt, Artificial Sequence
  Description of Artificial Sequence: Synthetic oligonucleotide
aacuccucuucucauagcu

SEQ ID NO: 661963 - RNA, 19 nt, Artificial Sequence
  Description of Artificial Sequence: Synthetic oligonucleotide
aauuauguccacucauuau

SEQ ID NO: 661964 - RNA, 19 nt, Artificial Sequence
  Description of Artificial Sequence: Synthetic oligonucleotide
auuaucaccgcuaccaauc

SEQ ID NO: 661965 - RNA, 19 nt, Artificial Sequence
  Description of Artificial Sequence: Synthetic oligonucleotide
auguauuuuggcugcugcc

SEQ ID NO: 661966 - RNA, 19 nt, Artificial Sequence
  Description of Artificial Sequence: Synthetic oligonucleotide
gaugacagcgugaaugagg

SEQ ID NO: 661967 - RNA, 19 nt, Artificial Sequence
  Description of Artificial Sequence: Synthetic oligonucleotide
gacguuauuaaaugauuac

SEQ ID NO: 661968 - RNA, 19 nt, Artificial Sequence
  Description of Artificial Sequence: Synthetic oligonucleotide
agauauaacaugucuaauu

SEQ ID NO: 661969 - RNA, 19 nt, Artificial Sequence
  Description of Artificial Sequence: Synthetic oligonucleotide
auuauguccacucauuauu

SEQ ID NO: 661970 - RNA, 19 nt, Artificial Sequence
  Description of Artificial Sequence: Synthetic oligonucleotide
cagaaacuaaggcagcugg

SEQ ID NO: 661971 - RNA, 19 nt, Artificial Sequence
  Description of Artificial Sequence: Synthetic oligonucleotide
cucacucaaaaccaaguag

SEQ ID NO: 661972 - RNA, 19 nt, Artificial Sequence
  Description of Artificial Sequence: Synthetic oligonucleotide
accacauuaucaccgcuac

SEQ ID NO: 661973 - RNA, 19 nt, Artificial Sequence
  Description of Artificial Sequence: Synthetic oligonucleotide
uguguacauggcaagcugc

SEQ ID NO: 661974 - RNA, 19 nt, Artificial Sequence
  Description of Artificial Sequence: Synthetic oligonucleotide
ugauuaacuuuccuucuac

SEQ ID NO: 661975 - RNA, 19 nt, Artificial Sequence
  Description of Artificial Sequence: Synthetic oligonucleotide
aaguagcuuacuugguaag

SEQ ID NO: 661976 - RNA, 19 nt, Artificial Sequence
  Description of Artificial Sequence: Synthetic oligonucleotide
uguagauugggagaugcug

SEQ ID NO: 661977 - RNA, 19 nt, Artificial Sequence
  Description of Artificial Sequence: Synthetic oligonucleotide
aaccgaagcacauggagaa

SEQ ID NO: 661978 - RNA, 19 nt, Artificial Sequence
  Description of Artificial Sequence: Synthetic oligonucleotide
gaccauggugaccagaccc

SEQ ID NO: 661979 - RNA, 19 nt, Artificial Sequence
  Description of Artificial Sequence: Synthetic oligonucleotide
auauaaccaaaauuuugga

SEQ ID NO: 661980 - RNA, 19 nt, Artificial Sequence
  Description of Artificial Sequence: Synthetic oligonucleotide
uccuuugugcccuuuccgg

SEQ ID NO: 661981 - RNA, 19 nt, Artificial Sequence
  Description of Artificial Sequence: Synthetic oligonucleotide
ugacguuauuaaaugauua

SEQ ID NO: 661982 - RNA, 19 nt, Artificial Sequence
  Description of Artificial Sequence: Synthetic oligonucleotide
uccccauuucaacaucucg

SEQ ID NO: 661983 - RNA, 19 nt, Artificial Sequence
  Description of Artificial Sequence: Synthetic oligonucleotide
caugacgagacaaaugcuc

SEQ ID NO: 661984 - RNA, 19 nt, Artificial Sequence
  Description of Artificial Sequence: Synthetic oligonucleotide
uccaaucacaaaaccgaag

SEQ ID NO: 661985 - RNA, 19 nt, Artificial Sequence
  Description of Artificial Sequence: Synthetic oligonucleotide
uccaccauagccuaguguu

SEQ ID NO: 661986 - RNA, 19 nt, Artificial Sequence
  Description of Artificial Sequence: Synthetic oligonucleotide
ucuacuaguguuguaaaau

SEQ ID NO: 661987 - RNA, 19 nt, Artificial Sequence
  Description of Artificial Sequence: Synthetic oligonucleotide
gaucccugcuccaagagag

SEQ ID NO: 661988 - RNA, 19 nt, Artificial Sequence
  Description of Artificial Sequence: Synthetic oligonucleotide
uaauuauguccacucauua

SEQ ID NO: 661989 - RNA, 19 nt, Artificial Sequence
  Description of Artificial Sequence: Synthetic oligonucleotide
auaugagaugauucuaaca

SEQ ID NO: 661990 - RNA, 19 nt, Artificial Sequence
  Description of Artificial Sequence: Synthetic oligonucleotide
gacccagugagccacacac

SEQ ID NO: 661991 - RNA, 19 nt, Artificial Sequence
  Description of Artificial Sequence: Synthetic oligonucleotide
uauaugcaugaaauacuca

SEQ ID NO: 661992 - RNA, 19 nt, Artificial Sequence
  Description of Artificial Sequence: Synthetic oligonucleotide
uguccguuccauuaagugu

SEQ ID NO: 661993 - RNA, 19 nt, Artificial Sequence
  Description of Artificial Sequence: Synthetic oligonucleotide
gaaguagaggaguggcagg

SEQ ID NO: 661994 - RNA, 19 nt, Artificial Sequence
  Description of Artificial Sequence: Synthetic oligonucleotide
ugguaagaauaauaugaga

SEQ ID NO: 661995 - RNA, 19 nt, Artificial Sequence
  Description of Artificial Sequence: Synthetic oligonucleotide
ugauauggcuucuucauuu

SEQ ID NO: 661996 - RNA, 19 nt, Artificial Sequence
  Description of Artificial Sequence: Synthetic oligonucleotide
ucguuaagagaaucaaaga

SEQ ID NO: 661997 - RNA, 19 nt, Artificial Sequence
  Description of Artificial Sequence: Synthetic oligonucleotide
uucauaagaaaugguuaag

SEQ ID NO: 661998 - RNA, 19 nt, Artificial Sequence
  Description of Artificial Sequence: Synthetic oligonucleotide
acuguuuaaagcaggcuuc

SEQ ID NO: 661999 - RNA, 19 nt, Artificial Sequence
  Description of Artificial Sequence: Synthetic oligonucleotide
aauguagucugaaaauuau

SEQ ID NO: 662000 - RNA, 19 nt, Artificial Sequence
  Description of Artificial Sequence: Synthetic oligonucleotide
aguggucauguaaauagac

SEQ ID NO: 662001 - RNA, 19 nt, Artificial Sequence
  Description of Artificial Sequence: Synthetic oligonucleotide
gcuaccaaucucaugaugg

SEQ ID NO: 662002 - RNA, 19 nt, Artificial Sequence
  Description of Artificial Sequence: Synthetic oligonucleotide
gguacuaucugauggcucc

SEQ ID NO: 662003 - RNA, 19 nt, Artificial Sequence
  Description of Artificial Sequence: Synthetic oligonucleotide
aguguguuagcguaauuau

SEQ ID NO: 662004 - RNA, 19 nt, Artificial Sequence
  Description of Artificial Sequence: Synthetic oligonucleotide
agaguagggaggaaaagag

SEQ ID NO: 662005 - RNA, 19 nt, Artificial Sequence
  Description of Artificial Sequence: Synthetic oligonucleotide
gaugguaguggucauguaa

SEQ ID NO: 662006 - RNA, 19 nt, Artificial Sequence
  Description of Artificial Sequence: Synthetic oligonucleotide
uugacaugauuaacuuucc

SEQ ID NO: 662007 - RNA, 19 nt, Artificial Sequence
  Description of Artificial Sequence: Synthetic oligonucleotide
uaaauagaccacagcucgc

SEQ ID NO: 662008 - RNA, 19 nt, Artificial Sequence
  Description of Artificial Sequence: Synthetic oligonucleotide
aaccaguccacugcgauga

SEQ ID NO: 662009 - RNA, 19 nt, Artificial Sequence
  Description of Artificial Sequence: Synthetic oligonucleotide
ugggcaaucagcugauaug

SEQ ID NO: 662010 - RNA, 19 nt, Artificial Sequence
  Description of Artificial Sequence: Synthetic oligonucleotide
uacaucuugguuucacugu

SEQ ID NO: 662011 - RNA, 19 nt, Artificial Sequence
  Description of Artificial Sequence: Synthetic oligonucleotide
uugacguuauuaaaugauu

SEQ ID NO: 662012 - RNA, 19 nt, Artificial Sequence
  Description of Artificial Sequence: Synthetic oligonucleotide
agaugagucucacucaaaa

SEQ ID NO: 662013 - RNA, 19 nt, Artificial Sequence
  Description of Artificial Sequence: Synthetic oligonucleotide
aucucgguucuuuaguuca

SEQ ID NO: 662014 - RNA, 19 nt, Artificial Sequence
  Description of Artificial Sequence: Synthetic oligonucleotide
uucuagauacucagugugu

SEQ ID NO: 662015 - RNA, 19 nt, Artificial Sequence
  Description of Artificial Sequence: Synthetic oligonucleotide
acagcgugaaugaggaggc

SEQ ID NO: 662016 - RNA, 19 nt, Artificial Sequence
  Description of Artificial Sequence: Synthetic oligonucleotide
acguuauuaaaugauuacu

SEQ ID NO: 662017 - RNA, 19 nt, Artificial Sequence
  Description of Artificial Sequence: Synthetic oligonucleotide
cauaccacauuaucaccgc

SEQ ID NO: 662018 - RNA, 19 nt, Artificial Sequence
  Description of Artificial Sequence: Synthetic oligonucleotide
acucuaaaacuccucuucu

SEQ ID NO: 662019 - RNA, 19 nt, Artificial Sequence
  Description of Artificial Sequence: Synthetic oligonucleotide
uuauguccacucauuauuu

SEQ ID NO: 662020 - RNA, 19 nt, Artificial Sequence
  Description of Artificial Sequence: Synthetic oligonucleotide
cuaccaaucucaugauggc

SEQ ID NO: 662021 - RNA, 19 nt, Artificial Sequence
  Description of Artificial Sequence: Synthetic oligonucleotide
accuuuauaugcaugaaau

SEQ ID NO: 662022 - RNA, 19 nt, Artificial Sequence
  Description of Artificial Sequence: Synthetic oligonucleotide
aaaaucacaccggguaaca

SEQ ID NO: 662023 - RNA, 19 nt, Artificial Sequence
  Description of Artificial Sequence: Synthetic oligonucleotide
ugucuacuuauauaaccaa

SEQ ID NO: 662024 - RNA, 19 nt, Artificial Sequence
  Description of Artificial Sequence: Synthetic oligonucleotide
auuucauaagaaaugguua

SEQ ID NO: 662025 - RNA, 19 nt, Artificial Sequence
  Description of Artificial Sequence: Synthetic oligonucleotide
cacauuaucaccgcuacca

SEQ ID NO: 662026 - RNA, 19 nt, Artificial Sequence
  Description of Artificial Sequence: Synthetic oligonucleotide
aaaccgaagcacauggaga

SEQ ID NO: 662027 - RNA, 19 nt, Artificial Sequence
  Description of Artificial Sequence: Synthetic oligonucleotide
agacaacuaggcccagggc

SEQ ID NO: 662028 - RNA, 19 nt, Artificial Sequence
  Description of Artificial Sequence: Synthetic oligonucleotide
cacucuaaaacuccucuuc

SEQ ID NO: 662029 - RNA, 19 nt, Artificial Sequence
  Description of Artificial Sequence: Synthetic oligonucleotide
ugacggacuggcaaaggga

SEQ ID NO: 662030 - RNA, 19 nt, Artificial Sequence
  Description of Artificial Sequence: Synthetic oligonucleotide
ucuacaucuugguuucacu

SEQ ID NO: 662031 - RNA, 19 nt, Artificial Sequence
  Description of Artificial Sequence: Synthetic oligonucleotide
acuaucugauggcucccac

SEQ ID NO: 662032 - RNA, 19 nt, Artificial Sequence
  Description of Artificial Sequence: Synthetic oligonucleotide
uccaagagagucacccagc

SEQ ID NO: 662033 - RNA, 19 nt, Artificial Sequence
  Description of Artificial Sequence: Synthetic oligonucleotide
agaauaauaugagaugauu

SEQ ID NO: 662034 - RNA, 19 nt, Artificial Sequence
  Description of Artificial Sequence: Synthetic oligonucleotide
cugacggacuggcaaaggg

SEQ ID NO: 662035 - RNA, 19 nt, Artificial Sequence
  Description of Artificial Sequence: Synthetic oligonucleotide
aaacuguuuaaagcaggcu

SEQ ID NO: 662036 - RNA, 19 nt, Artificial Sequence
  Description of Artificial Sequence: Synthetic oligonucleotide
uuccggguuaccaggaagu

SEQ ID NO: 662037 - RNA, 19 nt, Artificial Sequence
  Description of Artificial Sequence: Synthetic oligonucleotide
ugacaugauuaacuuuccu

SEQ ID NO: 662038 - RNA, 19 nt, Artificial Sequence
  Description of Artificial Sequence: Synthetic oligonucleotide
ugcgcgagggagcucaaug

SEQ ID NO: 662039 - RNA, 19 nt, Artificial Sequence
  Description of Artificial Sequence: Synthetic oligonucleotide
auuacuccaccauagccua

SEQ ID NO: 662040 - RNA, 19 nt, Artificial Sequence
  Description of Artificial Sequence: Synthetic oligonucleotide
aaaucacaccggguaacag

SEQ ID NO: 662041 - RNA, 19 nt, Artificial Sequence
  Description of Artificial Sequence: Synthetic oligonucleotide
uuaucaccgcuaccaaucu

SEQ ID NO: 662042 - RNA, 19 nt, Artificial Sequence
  Description of Artificial Sequence: Synthetic oligonucleotide
cuccaagagagucacccag

SEQ ID NO: 662043 - RNA, 19 nt, Artificial Sequence
  Description of Artificial Sequence: Synthetic oligonucleotide
ucaugacgagacaaaugcu

SEQ ID NO: 662044 - RNA, 19 nt, Artificial Sequence
  Description of Artificial Sequence: Synthetic oligonucleotide
gauuucauaagaaaugguu

SEQ ID NO: 662045 - RNA, 19 nt, Artificial Sequence
  Description of Artificial Sequence: Synthetic oligonucleotide
ccugcgaucaagaagagga

SEQ ID NO: 662046 - RNA, 19 nt, Artificial Sequence
  Description of Artificial Sequence: Synthetic oligonucleotide
uccgggauggaugaugaug

SEQ ID NO: 662047 - RNA, 19 nt, Artificial Sequence
  Description of Artificial Sequence: Synthetic oligonucleotide
caagcugcccuccaauuac

SEQ ID NO: 662048 - RNA, 19 nt, Artificial Sequence
  Description of Artificial Sequence: Synthetic oligonucleotide
ucgguucuuuaguucauga

SEQ ID NO: 662049 - RNA, 19 nt, Artificial Sequence
  Description of Artificial Sequence: Synthetic oligonucleotide
uuuuggaccggggacccag

SEQ ID NO: 662050 - RNA, 19 nt, Artificial Sequence
  Description of Artificial Sequence: Synthetic oligonucleotide
gauuacuccaccauagccu

SEQ ID NO: 662051 - RNA, 19 nt, Artificial Sequence
  Description of Artificial Sequence: Synthetic oligonucleotide
uucuacuaguguuguaaaa

SEQ ID NO: 662052 - RNA, 19 nt, Artificial Sequence
  Description of Artificial Sequence: Synthetic oligonucleotide
ugccccuagagagaaaugu

SEQ ID NO: 662053 - RNA, 19 nt, Artificial Sequence
  Description of Artificial Sequence: Synthetic oligonucleotide
ugccccaaugcuugcagcc

SEQ ID NO: 662054 - RNA, 19 nt, Artificial Sequence
  Description of Artificial Sequence: Synthetic oligonucleotide
cauaugcagagccucugac

SEQ ID NO: 662055 - RNA, 19 nt, Artificial Sequence
  Description of Artificial Sequence: Synthetic oligonucleotide
ucucauagcugguuuuaaa

SEQ ID NO: 662056 - RNA, 19 nt, Artificial Sequence
  Description of Artificial Sequence: Synthetic oligonucleotide
cguuauuaaaugauuacuc

SEQ ID NO: 662057 - RNA, 19 nt, Artificial Sequence
  Description of Artificial Sequence: Synthetic oligonucleotide
accggggacccagugagcc

SEQ ID NO: 662058 - RNA, 19 nt, Artificial Sequence
  Description of Artificial Sequence: Synthetic oligonucleotide
ugguuucacugucagccac

SEQ ID NO: 662059 - RNA, 19 nt, Artificial Sequence
  Description of Artificial Sequence: Synthetic oligonucleotide
agcgcuugcagcaacccuc

SEQ ID NO: 662060 - RNA, 19 nt, Artificial Sequence
  Description of Artificial Sequence: Synthetic oligonucleotide
augacagcgugaaugagga

SEQ ID NO: 662061 - RNA, 19 nt, Artificial Sequence
  Description of Artificial Sequence: Synthetic oligonucleotide
gagucuagaggagucacuc

SEQ ID NO: 662062 - RNA, 19 nt, Artificial Sequence
  Description of Artificial Sequence: Synthetic oligonucleotide
ugugcccuuuccgggaugg

SEQ ID NO: 662063 - RNA, 19 nt, Artificial Sequence
  Description of Artificial Sequence: Synthetic oligonucleotide
agggcggccgaacuugagg

SEQ ID NO: 662064 - RNA, 19 nt, Artificial Sequence
  Description of Artificial Sequence: Synthetic oligonucleotide
ugaauaucuuugacugaau

SEQ ID NO: 662065 - RNA, 19 nt, Artificial Sequence
  Description of Artificial Sequence: Synthetic oligonucleotide
aucaccgcuaccaaucuca

SEQ ID NO: 662066 - RNA, 19 nt, Artificial Sequence
  Description of Artificial Sequence: Synthetic oligonucleotide
caugcauaugcagagccuc

SEQ ID NO: 662067 - RNA, 19 nt, Artificial Sequence
  Description of Artificial Sequence: Synthetic oligonucleotide
gacaaugacuaugccaauc

SEQ ID NO: 662068 - RNA, 19 nt, Artificial Sequence
  Description of Artificial Sequence: Synthetic oligonucleotide
gacugccacauacauuaac

SEQ ID NO: 662069 - RNA, 19 nt, Artificial Sequence
  Description of Artificial Sequence: Synthetic oligonucleotide
cuguuuaaagcaggcuucc

SEQ ID NO: 662070 - RNA, 19 nt, Artificial Sequence
  Description of Artificial Sequence: Synthetic oligonucleotide
accauagccuaguguuaac

SEQ ID NO: 662071 - RNA, 19 nt, Artificial Sequence
  Description of Artificial Sequence: Synthetic oligonucleotide
ucagcuagagaggagucua

SEQ ID NO: 662072 - RNA, 19 nt, Artificial Sequence
  Description of Artificial Sequence: Synthetic oligonucleotide
augucuaauuguagauugg

SEQ ID NO: 662073 - RNA, 19 nt, Artificial Sequence
  Description of Artificial Sequence: Synthetic oligonucleotide
gcuagagaggagucuagag

SEQ ID NO: 662074 - RNA, 19 nt, Artificial Sequence
  Description of Artificial Sequence: Synthetic oligonucleotide
aucacaccggguaacagca

SEQ ID NO: 662075 - RNA, 19 nt, Artificial Sequence
  Description of Artificial Sequence: Synthetic oligonucleotide
uccauucacagagccagga

SEQ ID NO: 662076 - RNA, 19 nt, Artificial Sequence
  Description of Artificial Sequence: Synthetic oligonucleotide
uccacucauuauuuucggu

SEQ ID NO: 662077 - RNA, 19 nt, Artificial Sequence
  Description of Artificial Sequence: Synthetic oligonucleotide
aguagcuuacuugguaaga

SEQ ID NO: 662078 - RNA, 19 nt, Artificial Sequence
  Description of Artificial Sequence: Synthetic oligonucleotide
agagggccugauuucauaa

SEQ ID NO: 662079 - RNA, 19 nt, Artificial Sequence
  Description of Artificial Sequence: Synthetic oligonucleotide
auuaacuucuguaguguau

SEQ ID NO: 662080 - RNA, 19 nt, Artificial Sequence
  Description of Artificial Sequence: Synthetic oligonucleotide
acagcucgcaugcccaucu

SEQ ID NO: 662081 - RNA, 19 nt, Artificial Sequence
  Description of Artificial Sequence: Synthetic oligonucleotide
ggugcauaccacauuauca

SEQ ID NO: 662082 - RNA, 19 nt, Artificial Sequence
  Description of Artificial Sequence: Synthetic oligonucleotide
cccuagagagaaauguccg

SEQ ID NO: 662083 - RNA, 19 nt, Artificial Sequence
  Description of Artificial Sequence: Synthetic oligonucleotide
gaaacuaaggcagcuggua

SEQ ID NO: 662084 - RNA, 19 nt, Artificial Sequence
  Description of Artificial Sequence: Synthetic oligonucleotide
agcucgcaugcccaucuuc

SEQ ID NO: 662085 - RNA, 19 nt, Artificial Sequence
  Description of Artificial Sequence: Synthetic oligonucleotide
uucaguccacagugggugc

SEQ ID NO: 662086 - RNA, 19 nt, Artificial Sequence
  Description of Artificial Sequence: Synthetic oligonucleotide
cagauugggagggaacagc

SEQ ID NO: 662087 - RNA, 19 nt, Artificial Sequence
  Description of Artificial Sequence: Synthetic oligonucleotide
cauugguggugguucggag

SEQ ID NO: 662088 - RNA, 19 nt, Artificial Sequence
  Description of Artificial Sequence: Synthetic oligonucleotide
ucugacggacuggcaaagg

SEQ ID NO: 662089 - RNA, 19 nt, Artificial Sequence
  Description of Artificial Sequence: Synthetic oligonucleotide
uucaacaucucgguucuuu

SEQ ID NO: 662090 - RNA, 19 nt, Artificial Sequence
  Description of Artificial Sequence: Synthetic oligonucleotide
uuccaaaauagagcuugac

SEQ ID NO: 662091 - RNA, 19 nt, Artificial Sequence
  Description of Artificial Sequence: Synthetic oligonucleotide
cagcauuaauuugacauga

SEQ ID NO: 662092 - RNA, 19 nt, Artificial Sequence
  Description of Artificial Sequence: Synthetic oligonucleotide
ccacucauuauuuucgguc

SEQ ID NO: 662093 - RNA, 19 nt, Artificial Sequence
  Description of Artificial Sequence: Synthetic oligonucleotide
acaucucgguucuuuaguu

SEQ ID NO: 662094 - RNA, 19 nt, Artificial Sequence
  Description of Artificial Sequence: Synthetic oligonucleotide
guuucuagauacucagugu

SEQ ID NO: 662095 - RNA, 19 nt, Artificial Sequence
  Description of Artificial Sequence: Synthetic oligonucleotide
uccguuccauuaagugucc

SEQ ID NO: 662096 - RNA, 19 nt, Artificial Sequence
  Description of Artificial Sequence: Synthetic oligonucleotide
uaccaaucucaugauggcu

SEQ ID NO: 662097 - RNA, 19 nt, Artificial Sequence
  Description of Artificial Sequence: Synthetic oligonucleotide
gcgaucaagaagaggaugc

SEQ ID NO: 662098 - RNA, 19 nt, Artificial Sequence
  Description of Artificial Sequence: Synthetic oligonucleotide
cuuuccgggauggaugaug

SEQ ID NO: 662099 - RNA, 19 nt, Artificial Sequence
  Description of Artificial Sequence: Synthetic oligonucleotide
agauugggagggaacagca

SEQ ID NO: 662100 - RNA, 19 nt, Artificial Sequence
  Description of Artificial Sequence: Synthetic oligonucleotide
cuucguuaagagaaucaaa

SEQ ID NO: 662101 - RNA, 19 nt, Artificial Sequence
  Description of Artificial Sequence: Synthetic oligonucleotide
uguuuaaagcaggcuucca

SEQ ID NO: 662102 - RNA, 19 nt, Artificial Sequence
  Description of Artificial Sequence: Synthetic oligonucleotide
ccccuagagagaaaugucc

SEQ ID NO: 662103 - RNA, 19 nt, Artificial Sequence
  Description of Artificial Sequence: Synthetic oligonucleotide
acgaucccugcuccaagag

SEQ ID NO: 662104 - RNA, 19 nt, Artificial Sequence
  Description of Artificial Sequence: Synthetic oligonucleotide
caucucgguucuuuaguuc

SEQ ID NO: 662105 - RNA, 19 nt, Artificial Sequence
  Description of Artificial Sequence: Synthetic oligonucleotide
acauuaucaccgcuaccaa

SEQ ID NO: 662106 - RNA, 19 nt, Artificial Sequence
  Description of Artificial Sequence: Synthetic oligonucleotide
uacauggcaagcugcccuc

SEQ ID NO: 662107 - RNA, 19 nt, Artificial Sequence
  Description of Artificial Sequence: Synthetic oligonucleotide
aucacagcgcccaggagug

SEQ ID NO: 662108 - RNA, 19 nt, Artificial Sequence
  Description of Artificial Sequence: Synthetic oligonucleotide
ggaccggggacccagugag

SEQ ID NO: 662109 - RNA, 19 nt, Artificial Sequence
  Description of Artificial Sequence: Synthetic oligonucleotide
uuagagggccugauuucau

SEQ ID NO: 662110 - RNA, 19 nt, Artificial Sequence
  Description of Artificial Sequence: Synthetic oligonucleotide
guguuagcguaauuauguc

SEQ ID NO: 662111 - RNA, 19 nt, Artificial Sequence
  Description of Artificial Sequence: Synthetic oligonucleotide
cagaguagggaggaaaaga

SEQ ID NO: 662112 - RNA, 19 nt, Artificial Sequence
  Description of Artificial Sequence: Synthetic oligonucleotide
ggaguuccccauuucaaca

SEQ ID NO: 662113 - RNA, 19 nt, Artificial Sequence
  Description of Artificial Sequence: Synthetic oligonucleotide
uuugugcccuuuccgggau

SEQ ID NO: 662114 - RNA, 19 nt, Artificial Sequence
  Description of Artificial Sequence: Synthetic oligonucleotide
acaugucuaauuguagauu

SEQ ID NO: 662115 - RNA, 19 nt, Artificial Sequence
  Description of Artificial Sequence: Synthetic oligonucleotide
cucgcaugcccaucuuccc

SEQ ID NO: 662116 - RNA, 19 nt, Artificial Sequence
  Description of Artificial Sequence: Synthetic oligonucleotide
gucuaauuguagauuggga

SEQ ID NO: 662117 - RNA, 19 nt, Artificial Sequence
  Description of Artificial Sequence: Synthetic oligonucleotide
ucucucacugcgcgaggga

SEQ ID NO: 662118 - RNA, 19 nt, Artificial Sequence
  Description of Artificial Sequence: Synthetic oligonucleotide
guagcuuacuugguaagaa

SEQ ID NO: 662119 - RNA, 19 nt, Artificial Sequence
  Description of Artificial Sequence: Synthetic oligonucleotide
agcgugaaugaggaggcca

SEQ ID NO: 662120 - RNA, 19 nt, Artificial Sequence
  Description of Artificial Sequence: Synthetic oligonucleotide
cuuagagggccugauuuca

SEQ ID NO: 662121 - RNA, 19 nt, Artificial Sequence
  Description of Artificial Sequence: Synthetic oligonucleotide
gcaaucucagcuagagagg

SEQ ID NO: 662122 - RNA, 19 nt, Artificial Sequence
  Description of Artificial Sequence: Synthetic oligonucleotide
ccaaugaaaacccaggggu

SEQ ID NO: 662123 - RNA, 19 nt, Artificial Sequence
  Description of Artificial Sequence: Synthetic oligonucleotide
uaucaccgcuaccaaucuc

SEQ ID NO: 662124 - RNA, 19 nt, Artificial Sequence
  Description of Artificial Sequence: Synthetic oligonucleotide
uuccccauuucaacaucuc

SEQ ID NO: 662125 - RNA, 19 nt, Artificial Sequence
  Description of Artificial Sequence: Synthetic oligonucleotide
acauggcaagcugcccucc

SEQ ID NO: 662126 - RNA, 19 nt, Artificial Sequence
  Description of Artificial Sequence: Synthetic oligonucleotide
cuucuacuaguguuguaaa

SEQ ID NO: 662127 - RNA, 19 nt, Artificial Sequence
  Description of Artificial Sequence: Synthetic oligonucleotide
agaaacuaaggcagcuggu

SEQ ID NO: 662128 - RNA, 19 nt, Artificial Sequence
  Description of Artificial Sequence: Synthetic oligonucleotide
ggggcucucucacugcgcg

SEQ ID NO: 662129 - RNA, 19 nt, Artificial Sequence
  Description of Artificial Sequence: Synthetic oligonucleotide
ucaaugagauggacacauu

SEQ ID NO: 662130 - RNA, 19 nt, Artificial Sequence
  Description of Artificial Sequence: Synthetic oligonucleotide
ggaguguuucauuggucug

SEQ ID NO: 662131 - RNA, 19 nt, Artificial Sequence
  Description of Artificial Sequence: Synthetic oligonucleotide
augcccagaggugcauacc

SEQ ID NO: 662132 - RNA, 19 nt, Artificial Sequence
  Description of Artificial Sequence: Synthetic oligonucleotide
agcgaugaugguagugguc

SEQ ID NO: 662133 - RNA, 19 nt, Artificial Sequence
  Description of Artificial Sequence: Synthetic oligonucleotide
auguuauacagggcaggca

SEQ ID NO: 662134 - RNA, 19 nt, Artificial Sequence
  Description of Artificial Sequence: Synthetic oligonucleotide
cauagccuaguguuaaccu

SEQ ID NO: 662135 - RNA, 19 nt, Artificial Sequence
  Description of Artificial Sequence: Synthetic oligonucleotide
uucucauagcugguuuuaa

SEQ ID NO: 662136 - RNA, 19 nt, Artificial Sequence
  Description of Artificial Sequence: Synthetic oligonucleotide
uacuaucugauggcuccca

SEQ ID NO: 662137 - RNA, 19 nt, Artificial Sequence
  Description of Artificial Sequence: Synthetic oligonucleotide
cauuaacuucuguagugua

SEQ ID NO: 662138 - RNA, 19 nt, Artificial Sequence
  Description of Artificial Sequence: Synthetic oligonucleotide
agggguucuuccggguuac

SEQ ID NO: 662139 - RNA, 19 nt, Artificial Sequence
  Description of Artificial Sequence: Synthetic oligonucleotide
guacauggcaagcugcccu

SEQ ID NO: 662140 - RNA, 19 nt, Artificial Sequence
  Description of Artificial Sequence: Synthetic oligonucleotide
guagauugggagaugcugu

SEQ ID NO: 662141 - RNA, 19 nt, Artificial Sequence
  Description of Artificial Sequence: Synthetic oligonucleotide
cagcuagagaggagucuag

SEQ ID NO: 662142 - RNA, 19 nt, Artificial Sequence
  Description of Artificial Sequence: Synthetic oligonucleotide
uagagggccugauuucaua

SEQ ID NO: 662143 - RNA, 19 nt, Artificial Sequence
  Description of Artificial Sequence: Synthetic oligonucleotide
agggaucaccuuagagggc

SEQ ID NO: 662144 - RNA, 19 nt, Artificial Sequence
  Description of Artificial Sequence: Synthetic oligonucleotide
ucuuccggguuaccaggaa

SEQ ID NO: 662145 - RNA, 19 nt, Artificial Sequence
  Description of Artificial Sequence: Synthetic oligonucleotide
acucaaaaccaaguagcuu

SEQ ID NO: 662146 - RNA, 19 nt, Artificial Sequence
  Description of Artificial Sequence: Synthetic oligonucleotide
caguguguuagcguaauua

SEQ ID NO: 662147 - RNA, 19 nt, Artificial Sequence
  Description of Artificial Sequence: Synthetic oligonucleotide
cucaaugagauggacacau

SEQ ID NO: 662148 - RNA, 19 nt, Artificial Sequence
  Description of Artificial Sequence: Synthetic oligonucleotide
cacggaguuccccauuuca

SEQ ID NO: 662149 - RNA, 19 nt, Artificial Sequence
  Description of Artificial Sequence: Synthetic oligonucleotide
gucuagaggagucacucau

SEQ ID NO: 662150 - RNA, 19 nt, Artificial Sequence
  Description of Artificial Sequence: Synthetic oligonucleotide
cuagauacucaguguguua

SEQ ID NO: 662151 - RNA, 19 nt, Artificial Sequence
  Description of Artificial Sequence: Synthetic oligonucleotide
agcuagagaggagucuaga

SEQ ID NO: 662152 - RNA, 19 nt, Artificial Sequence
  Description of Artificial Sequence: Synthetic oligonucleotide
cccuccaaugaaaacccag

SEQ ID NO: 662153 - RNA, 19 nt, Artificial Sequence
  Description of Artificial Sequence: Synthetic oligonucleotide
ucccugcgaucaagaagag

SEQ ID NO: 662154 - RNA, 19 nt, Artificial Sequence
  Description of Artificial Sequence: Synthetic oligonucleotide
cacgaugaccauggugacc

SEQ ID NO: 662155 - RNA, 19 nt, Artificial Sequence
  Description of Artificial Sequence: Synthetic oligonucleotide
ucaccgcuaccaaucucau

SEQ ID NO: 662156 - RNA, 19 nt, Artificial Sequence
  Description of Artificial Sequence: Synthetic oligonucleotide
gcucaagacuucugugaag

SEQ ID NO: 662157 - RNA, 19 nt, Artificial Sequence
  Description of Artificial Sequence: Synthetic oligonucleotide
ucaguguguuagcguaauu

SEQ ID NO: 662158 - RNA, 19 nt, Artificial Sequence
  Description of Artificial Sequence: Synthetic oligonucleotide
gguggugguucggaggcgg

SEQ ID NO: 662159 - RNA, 19 nt, Artificial Sequence
  Description of Artificial Sequence: Synthetic oligonucleotide
uuuggaccggggacccagu

SEQ ID NO: 662160 - RNA, 19 nt, Artificial Sequence
  Description of Artificial Sequence: Synthetic oligonucleotide
ccggauucgggucaggguc

SEQ ID NO: 662161 - RNA, 19 nt, Artificial Sequence
  Description of Artificial Sequence: Synthetic oligonucleotide
cucugacggacuggcaaag

SEQ ID NO: 662162 - RNA, 19 nt, Artificial Sequence
  Description of Artificial Sequence: Synthetic oligonucleotide
guacuaucugauggcuccc

SEQ ID NO: 662163 - RNA, 19 nt, Artificial Sequence
  Description of Artificial Sequence: Synthetic oligonucleotide
ccauagccuaguguuaacc

SEQ ID NO: 662164 - RNA, 19 nt, Artificial Sequence
  Description of Artificial Sequence: Synthetic oligonucleotide
cccaggaguguuucauugg

SEQ ID NO: 662165 - RNA, 19 nt, Artificial Sequence
  Description of Artificial Sequence: Synthetic oligonucleotide
gagaugauucuaacaauuu

SEQ ID NO: 662166 - RNA, 19 nt, Artificial Sequence
  Description of Artificial Sequence: Synthetic oligonucleotide
gaguuccccauuucaacau

SEQ ID NO: 662167 - RNA, 19 nt, Artificial Sequence
  Description of Artificial Sequence: Synthetic oligonucleotide
agccuggugcucaagacuu

SEQ ID NO: 662168 - RNA, 19 nt, Artificial Sequence
  Description of Artificial Sequence: Synthetic oligonucleotide
agaccacagcucgcaugcc

SEQ ID NO: 662169 - RNA, 19 nt, Artificial Sequence
  Description of Artificial Sequence: Synthetic oligonucleotide
ggugguucggaggcggucc

SEQ ID NO: 662170 - RNA, 19 nt, Artificial Sequence
  Description of Artificial Sequence: Synthetic oligonucleotide
gcuuacuugguaagaauaa

SEQ ID NO: 662171 - RNA, 19 nt, Artificial Sequence
  Description of Artificial Sequence: Synthetic oligonucleotide
gcucgcaugcccaucuucc

SEQ ID NO: 662172 - RNA, 19 nt, Artificial Sequence
  Description of Artificial Sequence: Synthetic oligonucleotide
aucaccuuagagggccuga

SEQ ID NO: 662173 - RNA, 19 nt, Artificial Sequence
  Description of Artificial Sequence: Synthetic oligonucleotide
gaguucugugaugagcgcu

SEQ ID NO: 662174 - RNA, 19 nt, Artificial Sequence
  Description of Artificial Sequence: Synthetic oligonucleotide
accaaguagcuuacuuggu

SEQ ID NO: 662175 - RNA, 19 nt, Artificial Sequence
  Description of Artificial Sequence: Synthetic oligonucleotide
gcuucguuaagagaaucaa

SEQ ID NO: 662176 - RNA, 19 nt, Artificial Sequence
  Description of Artificial Sequence: Synthetic oligonucleotide
augcauaugcagagccucu

SEQ ID NO: 662177 - RNA, 19 nt, Artificial Sequence
  Description of Artificial Sequence: Synthetic oligonucleotide
agcauuaauuugacaugau

SEQ ID NO: 662178 - RNA, 19 nt, Artificial Sequence
  Description of Artificial Sequence: Synthetic oligonucleotide
ugaugagcgcuugcagcaa

SEQ ID NO: 662179 - RNA, 19 nt, Artificial Sequence
  Description of Artificial Sequence: Synthetic oligonucleotide
ccuaguguuaaccuuuaua

SEQ ID NO: 662180 - RNA, 19 nt, Artificial Sequence
  Description of Artificial Sequence: Synthetic oligonucleotide
acggacuggcaaagggauc

SEQ ID NO: 662181 - RNA, 19 nt, Artificial Sequence
  Description of Artificial Sequence: Synthetic oligonucleotide
ccuucuacuaguguuguaa

SEQ ID NO: 662182 - RNA, 19 nt, Artificial Sequence
  Description of Artificial Sequence: Synthetic oligonucleotide
gacggacuggcaaagggau

SEQ ID NO: 662183 - RNA, 19 nt, Artificial Sequence
  Description of Artificial Sequence: Synthetic oligonucleotide
acggaguuccccauuucaa

SEQ ID NO: 662184 - RNA, 19 nt, Artificial Sequence
  Description of Artificial Sequence: Synthetic oligonucleotide
cauuaucaccgcuaccaau

SEQ ID NO: 662185 - RNA, 19 nt, Artificial Sequence
  Description of Artificial Sequence: Synthetic oligonucleotide
caaugaaaacccagggguu

SEQ ID NO: 662186 - RNA, 19 nt, Artificial Sequence
  Description of Artificial Sequence: Synthetic oligonucleotide
accagacccgccugaggaa

SEQ ID NO: 662187 - RNA, 19 nt, Artificial Sequence
  Description of Artificial Sequence: Synthetic oligonucleotide
ggcuucguuaagagaauca

SEQ ID NO: 662188 - RNA, 19 nt, Artificial Sequence
  Description of Artificial Sequence: Synthetic oligonucleotide
cucaacgaucccugcucca

SEQ ID NO: 662189 - RNA, 19 nt, Artificial Sequence
  Description of Artificial Sequence: Synthetic oligonucleotide
ucacaccggguaacagcau

SEQ ID NO: 662190 - RNA, 19 nt, Artificial Sequence
  Description of Artificial Sequence: Synthetic oligonucleotide
uccggguuaccaggaagua

SEQ ID NO: 662191 - RNA, 19 nt, Artificial Sequence
  Description of Artificial Sequence: Synthetic oligonucleotide
cuucucauagcugguuuua

SEQ ID NO: 662192 - RNA, 19 nt, Artificial Sequence
  Description of Artificial Sequence: Synthetic oligonucleotide
caccgcuaccaaucucaug

SEQ ID NO: 662193 - RNA, 19 nt, Artificial Sequence
  Description of Artificial Sequence: Synthetic oligonucleotide
gcauuaauuugacaugauu

SEQ ID NO: 662194 - RNA, 19 nt, Artificial Sequence
  Description of Artificial Sequence: Synthetic oligonucleotide
gguaguggucauguaaaua

SEQ ID NO: 662195 - RNA, 19 nt, Artificial Sequence
  Description of Artificial Sequence: Synthetic oligonucleotide
cacauugcagaauggcuuu

SEQ ID NO: 662196 - RNA, 19 nt, Artificial Sequence
  Description of Artificial Sequence: Synthetic oligonucleotide
auggcuucguuaagagaau

SEQ ID NO: 662197 - RNA, 19 nt, Artificial Sequence
  Description of Artificial Sequence: Synthetic oligonucleotide
ccacugaauaucuuugacu

SEQ ID NO: 662198 - RNA, 19 nt, Artificial Sequence
  Description of Artificial Sequence: Synthetic oligonucleotide
ccaauuacacccaugucuu

SEQ ID NO: 662199 - RNA, 19 nt, Artificial Sequence
  Description of Artificial Sequence: Synthetic oligonucleotide
ccacauuaucaccgcuacc

SEQ ID NO: 662200 - RNA, 19 nt, Artificial Sequence
  Description of Artificial Sequence: Synthetic oligonucleotide
uggugguucggaggcgguc

SEQ ID NO: 662201 - RNA, 19 nt, Artificial Sequence
  Description of Artificial Sequence: Synthetic oligonucleotide
acgguuuucucaggcucau

SEQ ID NO: 662202 - RNA, 19 nt, Artificial Sequence
  Description of Artificial Sequence: Synthetic oligonucleotide
agcgcccaggaguguuuca

SEQ ID NO: 662203 - RNA, 19 nt, Artificial Sequence
  Description of Artificial Sequence: Synthetic oligonucleotide
cgaucaagaagaggaugcc

SEQ ID NO: 662204 - RNA, 19 nt, Artificial Sequence
  Description of Artificial Sequence: Synthetic oligonucleotide
gagggcggccgaacuugag

SEQ ID NO: 662205 - RNA, 19 nt, Artificial Sequence
  Description of Artificial Sequence: Synthetic oligonucleotide
gagcgcuugcagcaacccu

SEQ ID NO: 662206 - RNA, 19 nt, Artificial Sequence
  Description of Artificial Sequence: Synthetic oligonucleotide
gcgcgagggagcucaauga

SEQ ID NO: 662207 - RNA, 19 nt, Artificial Sequence
  Description of Artificial Sequence: Synthetic oligonucleotide
ccacaugucuacuuauaua

SEQ ID NO: 662208 - RNA, 19 nt, Artificial Sequence
  Description of Artificial Sequence: Synthetic oligonucleotide
gcaaagggaucaccuuaga

SEQ ID NO: 662209 - RNA, 19 nt, Artificial Sequence
  Description of Artificial Sequence: Synthetic oligonucleotide
cagcgugaaugaggaggcc

SEQ ID NO: 662210 - RNA, 19 nt, Artificial Sequence
  Description of Artificial Sequence: Synthetic oligonucleotide
gugguucggaggcggucca

SEQ ID NO: 662211 - RNA, 19 nt, Artificial Sequence
  Description of Artificial Sequence: Synthetic oligonucleotide
ccggguuaccaggaaguag

SEQ ID NO: 662212 - RNA, 19 nt, Artificial Sequence
  Description of Artificial Sequence: Synthetic oligonucleotide
cagugggugcaugcauaug

SEQ ID NO: 662213 - RNA, 19 nt, Artificial Sequence
  Description of Artificial Sequence: Synthetic oligonucleotide
cagccugccccuagagaga

SEQ ID NO: 662214 - RNA, 19 nt, Artificial Sequence
  Description of Artificial Sequence: Synthetic oligonucleotide
cgcgagggagcucaaugag

SEQ ID NO: 662215 - RNA, 19 nt, Artificial Sequence
  Description of Artificial Sequence: Synthetic oligonucleotide
guccacugcgaugaugagu

SEQ ID NO: 662216 - RNA, 19 nt, Artificial Sequence
  Description of Artificial Sequence: Synthetic oligonucleotide
cagcugccccaaugcuugc

SEQ ID NO: 662217 - RNA, 19 nt, Artificial Sequence
  Description of Artificial Sequence: Synthetic oligonucleotide
gccccuagagagaaauguc

SEQ ID NO: 662218 - RNA, 19 nt, Artificial Sequence
  Description of Artificial Sequence: Synthetic oligonucleotide
gaccggggacccagugagc

SEQ ID NO: 662219 - RNA, 19 nt, Artificial Sequence
  Description of Artificial Sequence: Synthetic oligonucleotide
ccauggugaccagacccgc

SEQ ID NO: 662220 - RNA, 19 nt, Artificial Sequence
  Description of Artificial Sequence: Synthetic oligonucleotide
cucacugcgcgagggagcu

SEQ ID NO: 662221 - RNA, 19 nt, Artificial Sequence
  Description of Artificial Sequence: Synthetic oligonucleotide
ccuagagagaaauguccgu

SEQ ID NO: 662222 - RNA, 19 nt, Artificial Sequence
  Description of Artificial Sequence: Synthetic oligonucleotide
cugcgaucaagaagaggau

SEQ ID NO: 662223 - RNA, 19 nt, Artificial Sequence
  Description of Artificial Sequence: Synthetic oligonucleotide
caaucacggaguuccccau

SEQ ID NO: 662224 - RNA, 19 nt, Artificial Sequence
  Description of Artificial Sequence: Synthetic oligonucleotide
gcgagggagcucaaugaga

SEQ ID NO: 662225 - RNA, 19 nt, Artificial Sequence
  Description of Artificial Sequence: Synthetic oligonucleotide
gguucggaggcgguccaga

SEQ ID NO: 662226 - RNA, 19 nt, Artificial Sequence
  Description of Artificial Sequence: Synthetic oligonucleotide
cggacuggcaaagggauca

SEQ ID NO: 662227 - RNA, 19 nt, Artificial Sequence
  Description of Artificial Sequence: Synthetic oligonucleotide
ucacagcgcccaggagugu

SEQ ID NO: 662228 - RNA, 19 nt, Artificial Sequence
  Description of Artificial Sequence: Synthetic oligonucleotide
gcgugaaugaggaggccaa

SEQ ID NO: 662229 - RNA, 19 nt, Artificial Sequence
  Description of Artificial Sequence: Synthetic oligonucleotide
cagcgcccaggaguguuuc

SEQ ID NO: 662230 - RNA, 19 nt, Artificial Sequence
  Description of Artificial Sequence: Synthetic oligonucleotide
cgagggagcucaaugagau

SEQ ID NO: 662231 - RNA, 19 nt, Artificial Sequence
  Description of Artificial Sequence: Synthetic oligonucleotide
gcaugagaugagucucacu

SEQ ID NO: 662232 - RNA, 19 nt, Artificial Sequence
  Description of Artificial Sequence: Synthetic oligonucleotide
cgaucccugcuccaagaga

SEQ ID NO: 662233 - RNA, 19 nt, Artificial Sequence
  Description of Artificial Sequence: Synthetic oligonucleotide
ucacugcgcgagggagcuc

SEQ ID NO: 662234 - RNA, 19 nt, Artificial Sequence
  Description of Artificial Sequence: Synthetic oligonucleotide
cuugccccugcuccuucau

SEQ ID NO: 662235 - RNA, 19 nt, Artificial Sequence
  Description of Artificial Sequence: Synthetic oligonucleotide
cugcgaugaugagugugau

SEQ ID NO: 662236 - RNA, 19 nt, Artificial Sequence
  Description of Artificial Sequence: Synthetic oligonucleotide
gggguucuuccggguuacc

SEQ ID NO: 662237 - RNA, 19 nt, Artificial Sequence
  Description of Artificial Sequence: Synthetic oligonucleotide
gccaagccuucccugguuu

SEQ ID NO: 662238 - RNA, 19 nt, Artificial Sequence
  Description of Artificial Sequence: Synthetic oligonucleotide
gccuuccacaugucuacuu

SEQ ID NO: 662239 - RNA, 19 nt, Artificial Sequence
  Description of Artificial Sequence: Synthetic oligonucleotide
gcugagggcggccgaacuu

SEQ ID NO: 662240 - RNA, 19 nt, Artificial Sequence
  Description of Artificial Sequence: Synthetic oligonucleotide
gugcccuuuccgggaugga

SEQ ID NO: 662241 - RNA, 19 nt, Artificial Sequence
  Description of Artificial Sequence: Synthetic oligonucleotide
ccucccggauucgggucag

SEQ ID NO: 662242 - RNA, 19 nt, Artificial Sequence
  Description of Artificial Sequence: Synthetic oligonucleotide
acugcgcgagggagcucaa

SEQ ID NO: 662243 - RNA, 19 nt, Artificial Sequence
  Description of Artificial Sequence: Synthetic oligonucleotide
cguuccauuaaguguccuu

SEQ ID NO: 662244 - RNA, 19 nt, Artificial Sequence
  Description of Artificial Sequence: Synthetic oligonucleotide
gccuaguguuaaccuuuau

SEQ ID NO: 662245 - RNA, 19 nt, Artificial Sequence
  Description of Artificial Sequence: Synthetic oligonucleotide
ccggggacccagugagcca

SEQ ID NO: 662246 - RNA, 19 nt, Artificial Sequence
  Description of Artificial Sequence: Synthetic oligonucleotide
gcgcccaggaguguuucau

SEQ ID NO: 662247 - RNA, 19 nt, Artificial Sequence
  Description of Artificial Sequence: Synthetic oligonucleotide
ccagacccgccugaggaau

SEQ ID NO: 662248 - RNA, 19 nt, Artificial Sequence
  Description of Artificial Sequence: Synthetic oligonucleotide
ccgcuaccaaucucaugau

SEQ ID NO: 662249 - RNA, 19 nt, Artificial Sequence
  Description of Artificial Sequence: Synthetic oligonucleotide
cagcucgcaugcccaucuu

SEQ ID NO: 662250 - RNA, 19 nt, Artificial Sequence
  Description of Artificial Sequence: Synthetic oligonucleotide
cugcgcgagggagcucaau

SEQ ID NO: 662251 - RNA, 19 nt, Artificial Sequence
  Description of Artificial Sequence: Synthetic oligonucleotide
ccguuccauuaaguguccu

SEQ ID NO: 662252 - RNA, 19 nt, Artificial Sequence
  Description of Artificial Sequence: Synthetic oligonucleotide
gccugccccuagagagaaa

SEQ ID NO: 662253 - RNA, 19 nt, Artificial Sequence
  Description of Artificial Sequence: Synthetic oligonucleotide
ccuuuccgggauggaugau

SEQ ID NO: 662254 - RNA, 19 nt, Artificial Sequence
  Description of Artificial Sequence: Synthetic oligonucleotide
aagacagucaccaaguucc

SEQ ID NO: 662255 - RNA, 19 nt, Artificial Sequence
  Description of Artificial Sequence: Synthetic oligonucleotide
aauucucucauauuagaac

SEQ ID NO: 662256 - RNA, 19 nt, Artificial Sequence
  Description of Artificial Sequence: Synthetic oligonucleotide
uauuagaaccaaaauagag

SEQ ID NO: 662257 - RNA, 19 nt, Artificial Sequence
  Description of Artificial Sequence: Synthetic oligonucleotide
aagauuccgagcaagagcc

SEQ ID NO: 662258 - RNA, 19 nt, Artificial Sequence
  Description of Artificial Sequence: Synthetic oligonucleotide
aauucuuacucacucgaac

SEQ ID NO: 662259 - RNA, 19 nt, Artificial Sequence
  Description of Artificial Sequence: Synthetic oligonucleotide
ugaggaaucugucagauac

SEQ ID NO: 662260 - RNA, 19 nt, Artificial Sequence
  Description of Artificial Sequence: Synthetic oligonucleotide
auucuuacucacucgaacc

SEQ ID NO: 662261 - RNA, 19 nt, Artificial Sequence
  Description of Artificial Sequence: Synthetic oligonucleotide
uuagaaccaaaauagaggu

SEQ ID NO: 662262 - RNA, 19 nt, Artificial Sequence
  Description of Artificial Sequence: Synthetic oligonucleotide
aagaaugucagucgaucac

SEQ ID NO: 662263 - RNA, 19 nt, Artificial Sequence
  Description of Artificial Sequence: Synthetic oligonucleotide
aauugcccgagcaagauuc

SEQ ID NO: 662264 - RNA, 19 nt, Artificial Sequence
  Description of Artificial Sequence: Synthetic oligonucleotide
acgauuauugcggacagcc

SEQ ID NO: 662265 - RNA, 19 nt, Artificial Sequence
  Description of Artificial Sequence: Synthetic oligonucleotide
uaugucgucauccuggagu

SEQ ID NO: 662266 - RNA, 19 nt, Artificial Sequence
  Description of Artificial Sequence: Synthetic oligonucleotide
ucuuauaauugcccgagca

SEQ ID NO: 662267 - RNA, 19 nt, Artificial Sequence
  Description of Artificial Sequence: Synthetic oligonucleotide
uuccguacgauguagauaa

SEQ ID NO: 662268 - RNA, 19 nt, Artificial Sequence
  Description of Artificial Sequence: Synthetic oligonucleotide
aacaucugccgauaaacug

SEQ ID NO: 662269 - RNA, 19 nt, Artificial Sequence
  Description of Artificial Sequence: Synthetic oligonucleotide
aaacaucuacaucuuuccg

SEQ ID NO: 662270 - RNA, 19 nt, Artificial Sequence
  Description of Artificial Sequence: Synthetic oligonucleotide
agaucuuacagaugcuucg

SEQ ID NO: 662271 - RNA, 19 nt, Artificial Sequence
  Description of Artificial Sequence: Synthetic oligonucleotide
acgauguagauaaaggggc

SEQ ID NO: 662272 - RNA, 19 nt, Artificial Sequence
  Description of Artificial Sequence: Synthetic oligonucleotide
ucucauauuagaaccaaaa

SEQ ID NO: 662273 - RNA, 19 nt, Artificial Sequence
  Description of Artificial Sequence: Synthetic oligonucleotide
acuauaaugcaacuguccu

SEQ ID NO: 662274 - RNA, 19 nt, Artificial Sequence
  Description of Artificial Sequence: Synthetic oligonucleotide
auacgaguguggcaaaagc

SEQ ID NO: 662275 - RNA, 19 nt, Artificial Sequence
  Description of Artificial Sequence: Synthetic oligonucleotide
uccagaucagaaaagcagc

SEQ ID NO: 662276 - RNA, 19 nt, Artificial Sequence
  Description of Artificial Sequence: Synthetic oligonucleotide
aucgguaauucuuacucac

SEQ ID NO: 662277 - RNA, 19 nt, Artificial Sequence
  Description of Artificial Sequence: Synthetic oligonucleotide
ugaacugccgaccacuggc

SEQ ID NO: 662278 - RNA, 19 nt, Artificial Sequence
  Description of Artificial Sequence: Synthetic oligonucleotide
agaugcuucgaacuuguuc

SEQ ID NO: 662279 - RNA, 19 nt, Artificial Sequence
  Description of Artificial Sequence: Synthetic oligonucleotide
ugaggcauauuccagcaga

SEQ ID NO: 662280 - RNA, 19 nt, Artificial Sequence
  Description of Artificial Sequence: Synthetic oligonucleotide
ucacaguaaucccugagga

SEQ ID NO: 662281 - RNA, 19 nt, Artificial Sequence
  Description of Artificial Sequence: Synthetic oligonucleotide
aauggguuucacugugggg

SEQ ID NO: 662282 - RNA, 19 nt, Artificial Sequence
  Description of Artificial Sequence: Synthetic oligonucleotide
aauagagguugugugacug

SEQ ID NO: 662283 - RNA, 19 nt, Artificial Sequence
  Description of Artificial Sequence: Synthetic oligonucleotide
uuggugaaugucaaacuca

SEQ ID NO: 662284 - RNA, 19 nt, Artificial Sequence
  Description of Artificial Sequence: Synthetic oligonucleotide
ucagauacgaguguggcaa

SEQ ID NO: 662285 - RNA, 19 nt, Artificial Sequence
  Description of Artificial Sequence: Synthetic oligonucleotide
uauaauugcccgagcaaga

SEQ ID NO: 662286 - RNA, 19 nt, Artificial Sequence
  Description of Artificial Sequence: Synthetic oligonucleotide
ugagaguaaacaucuacau

SEQ ID NO: 662287 - RNA, 19 nt, Artificial Sequence
  Description of Artificial Sequence: Synthetic oligonucleotide
ugagccuucucuuauaauu

SEQ ID NO: 662288 - RNA, 19 nt, Artificial Sequence
  Description of Artificial Sequence: Synthetic oligonucleotide
agagucauccagaaagagc

SEQ ID NO: 662289 - RNA, 19 nt, Artificial Sequence
  Description of Artificial Sequence: Synthetic oligonucleotide
ucucuuauaauugcccgag

SEQ ID NO: 662290 - RNA, 19 nt, Artificial Sequence
  Description of Artificial Sequence: Synthetic oligonucleotide
ucuuugcaggccaaugaag

SEQ ID NO: 662291 - RNA, 19 nt, Artificial Sequence
  Description of Artificial Sequence: Synthetic oligonucleotide
acucacucgaaccaauuug

SEQ ID NO: 662292 - RNA, 19 nt, Artificial Sequence
  Description of Artificial Sequence: Synthetic oligonucleotide
ucugccguugcucacaaau

SEQ ID NO: 662293 - RNA, 19 nt, Artificial Sequence
  Description of Artificial Sequence: Synthetic oligonucleotide
ucauccagaaagagcgggg

SEQ ID NO: 662294 - RNA, 19 nt, Artificial Sequence
  Description of Artificial Sequence: Synthetic oligonucleotide
ucauaugucuguucugaug

SEQ ID NO: 662295 - RNA, 19 nt, Artificial Sequence
  Description of Artificial Sequence: Synthetic oligonucleotide
uugaagaguuuucucaaaa

SEQ ID NO: 662296 - RNA, 19 nt, Artificial Sequence
  Description of Artificial Sequence: Synthetic oligonucleotide
acaaaauggaaaccuggcu

SEQ ID NO: 662297 - RNA, 19 nt, Artificial Sequence
  Description of Artificial Sequence: Synthetic oligonucleotide
agcccagacgauuauugcg

SEQ ID NO: 662298 - RNA, 19 nt, Artificial Sequence
  Description of Artificial Sequence: Synthetic oligonucleotide
cucagcuuaucucaggaac

SEQ ID NO: 662299 - RNA, 19 nt, Artificial Sequence
  Description of Artificial Sequence: Synthetic oligonucleotide
gcuacaaaccaccaguugc

SEQ ID NO: 662300 - RNA, 19 nt, Artificial Sequence
  Description of Artificial Sequence: Synthetic oligonucleotide
ucuacaucuuuccguacga

SEQ ID NO: 662301 - RNA, 19 nt, Artificial Sequence
  Description of Artificial Sequence: Synthetic oligonucleotide
aggcccguaugacugaucg

SEQ ID NO: 662302 - RNA, 19 nt, Artificial Sequence
  Description of Artificial Sequence: Synthetic oligonucleotide
ugagcaucauggcuggccc

SEQ ID NO: 662303 - RNA, 19 nt, Artificial Sequence
  Description of Artificial Sequence: Synthetic oligonucleotide
ucuuacagaugcuucgaac

SEQ ID NO: 662304 - RNA, 19 nt, Artificial Sequence
  Description of Artificial Sequence: Synthetic oligonucleotide
agcgcuucuccccauacag

SEQ ID NO: 662305 - RNA, 19 nt, Artificial Sequence
  Description of Artificial Sequence: Synthetic oligonucleotide
acauuccucacgccagugc

SEQ ID NO: 662306 - RNA, 19 nt, Artificial Sequence
  Description of Artificial Sequence: Synthetic oligonucleotide
aggagcaucuccccgggac

SEQ ID NO: 662307 - RNA, 19 nt, Artificial Sequence
  Description of Artificial Sequence: Synthetic oligonucleotide
cuucguggucucuaugucg

SEQ ID NO: 662308 - RNA, 19 nt, Artificial Sequence
  Description of Artificial Sequence: Synthetic oligonucleotide
aggaaccuuccaaugagcc

SEQ ID NO: 662309 - RNA, 19 nt, Artificial Sequence
  Description of Artificial Sequence: Synthetic oligonucleotide
augucgucauccuggaguc

SEQ ID NO: 662310 - RNA, 19 nt, Artificial Sequence
  Description of Artificial Sequence: Synthetic oligonucleotide
auugcggacagccuucaug

SEQ ID NO: 662311 - RNA, 19 nt, Artificial Sequence
  Description of Artificial Sequence: Synthetic oligonucleotide
uuugucgugccucauccaa

SEQ ID NO: 662312 - RNA, 19 nt, Artificial Sequence
  Description of Artificial Sequence: Synthetic oligonucleotide
cugugaugagcaaacaguc

SEQ ID NO: 662313 - RNA, 19 nt, Artificial Sequence
  Description of Artificial Sequence: Synthetic oligonucleotide
aguucagucagcgucugag

SEQ ID NO: 662314 - RNA, 19 nt, Artificial Sequence
  Description of Artificial Sequence: Synthetic oligonucleotide
uuccauacaggcccguaug

SEQ ID NO: 662315 - RNA, 19 nt, Artificial Sequence
  Description of Artificial Sequence: Synthetic oligonucleotide
uggugaaugucaaacucaa

SEQ ID NO: 662316 - RNA, 19 nt, Artificial Sequence
  Description of Artificial Sequence: Synthetic oligonucleotide
uggaauucacgccuggaau

SEQ ID NO: 662317 - RNA, 19 nt, Artificial Sequence
  Description of Artificial Sequence: Synthetic oligonucleotide
aauuugagcuuuccuggau

SEQ ID NO: 662318 - RNA, 19 nt, Artificial Sequence
  Description of Artificial Sequence: Synthetic oligonucleotide
uucguggucucuaugucgu

SEQ ID NO: 662319 - RNA, 19 nt, Artificial Sequence
  Description of Artificial Sequence: Synthetic oligonucleotide
gagaguaaacaucuacauc

SEQ ID NO: 662320 - RNA, 19 nt, Artificial Sequence
  Description of Artificial Sequence: Synthetic oligonucleotide
gggguuagaauacagcagc

SEQ ID NO: 662321 - RNA, 19 nt, Artificial Sequence
  Description of Artificial Sequence: Synthetic oligonucleotide
aaggaugcggcacaugcuu

SEQ ID NO: 662322 - RNA, 19 nt, Artificial Sequence
  Description of Artificial Sequence: Synthetic oligonucleotide
cucgcaaucgagcuccucc

SEQ ID NO: 662323 - RNA, 19 nt, Artificial Sequence
  Description of Artificial Sequence: Synthetic oligonucleotide
caucgacauacaaagcuac

SEQ ID NO: 662324 - RNA, 19 nt, Artificial Sequence
  Description of Artificial Sequence: Synthetic oligonucleotide
gugggguuagaauacagca

SEQ ID NO: 662325 - RNA, 19 nt, Artificial Sequence
  Description of Artificial Sequence: Synthetic oligonucleotide
caacaagguggccucaucc

SEQ ID NO: 662326 - RNA, 19 nt, Artificial Sequence
  Description of Artificial Sequence: Synthetic oligonucleotide
aggugagcuacaaaccacc

SEQ ID NO: 662327 - RNA, 19 nt, Artificial Sequence
  Description of Artificial Sequence: Synthetic oligonucleotide
ucugucagauacgagugug

SEQ ID NO: 662328 - RNA, 19 nt, Artificial Sequence
  Description of Artificial Sequence: Synthetic oligonucleotide
uuacaucgacauacaaagc

SEQ ID NO: 662329 - RNA, 19 nt, Artificial Sequence
  Description of Artificial Sequence: Synthetic oligonucleotide
cagugauccaaaaggucgg

SEQ ID NO: 662330 - RNA, 19 nt, Artificial Sequence
  Description of Artificial Sequence: Synthetic oligonucleotide
auagagguugugugacugg

SEQ ID NO: 662331 - RNA, 19 nt, Artificial Sequence
  Description of Artificial Sequence: Synthetic oligonucleotide
acaguaaucccugaggaau

SEQ ID NO: 662332 - RNA, 19 nt, Artificial Sequence
  Description of Artificial Sequence: Synthetic oligonucleotide
cuuugcaggccaaugaaga

SEQ ID NO: 662333 - RNA, 19 nt, Artificial Sequence
  Description of Artificial Sequence: Synthetic oligonucleotide
caauggguuucacuguggg

SEQ ID NO: 662334 - RNA, 19 nt, Artificial Sequence
  Description of Artificial Sequence: Synthetic oligonucleotide
uuuuccggucaauuccucc

SEQ ID NO: 662335 - RNA, 19 nt, Artificial Sequence
  Description of Artificial Sequence: Synthetic oligonucleotide
uccugaggcauauuccagc

SEQ ID NO: 662336 - RNA, 19 nt, Artificial Sequence
  Description of Artificial Sequence: Synthetic oligonucleotide
ugucgugccucauccaacc

SEQ ID NO: 662337 - RNA, 19 nt, Artificial Sequence
  Description of Artificial Sequence: Synthetic oligonucleotide
acaucuuuccguacgaugu

SEQ ID NO: 662338 - RNA, 19 nt, Artificial Sequence
  Description of Artificial Sequence: Synthetic oligonucleotide
gagaggaauccgcucaaug

SEQ ID NO: 662339 - RNA, 19 nt, Artificial Sequence
  Description of Artificial Sequence: Synthetic oligonucleotide
ucugccgauaaacugucua

SEQ ID NO: 662340 - RNA, 19 nt, Artificial Sequence
  Description of Artificial Sequence: Synthetic oligonucleotide
agacgauuauugcggacag

SEQ ID NO: 662341 - RNA, 19 nt, Artificial Sequence
  Description of Artificial Sequence: Synthetic oligonucleotide
ugucagauacgaguguggc

SEQ ID NO: 662342 - RNA, 19 nt, Artificial Sequence
  Description of Artificial Sequence: Synthetic oligonucleotide
cacuuggugaaugucaaac

SEQ ID NO: 662343 - RNA, 19 nt, Artificial Sequence
  Description of Artificial Sequence: Synthetic oligonucleotide
cuacuauaaugcaacuguc

SEQ ID NO: 662344 - RNA, 19 nt, Artificial Sequence
  Description of Artificial Sequence: Synthetic oligonucleotide
cagucgaucacugagcauc

SEQ ID NO: 662345 - RNA, 19 nt, Artificial Sequence
  Description of Artificial Sequence: Synthetic oligonucleotide
ucucauguuugcuuggguu

SEQ ID NO: 662346 - RNA, 19 nt, Artificial Sequence
  Description of Artificial Sequence: Synthetic oligonucleotide
uaauucuuacucacucgaa

SEQ ID NO: 662347 - RNA, 19 nt, Artificial Sequence
  Description of Artificial Sequence: Synthetic oligonucleotide
ucuaugucgucauccugga

SEQ ID NO: 662348 - RNA, 19 nt, Artificial Sequence
  Description of Artificial Sequence: Synthetic oligonucleotide
gauuccgagcaagagccag

SEQ ID NO: 662349 - RNA, 19 nt, Artificial Sequence
  Description of Artificial Sequence: Synthetic oligonucleotide
cugucagauacgagugugg

SEQ ID NO: 662350 - RNA, 19 nt, Artificial Sequence
  Description of Artificial Sequence: Synthetic oligonucleotide
cucacacacgugcagucgg

SEQ ID NO: 662351 - RNA, 19 nt, Artificial Sequence
  Description of Artificial Sequence: Synthetic oligonucleotide
gcaagugccgcucacauuc

SEQ ID NO: 662352 - RNA, 19 nt, Artificial Sequence
  Description of Artificial Sequence: Synthetic oligonucleotide
accuucguggucucuaugu

SEQ ID NO: 662353 - RNA, 19 nt, Artificial Sequence
  Description of Artificial Sequence: Synthetic oligonucleotide
aagcuacuauaaugcaacu

SEQ ID NO: 662354 - RNA, 19 nt, Artificial Sequence
  Description of Artificial Sequence: Synthetic oligonucleotide
cguacgauguagauaaagg

SEQ ID NO: 662355 - RNA, 19 nt, Artificial Sequence
  Description of Artificial Sequence: Synthetic oligonucleotide
gaucgguaauucuuacuca

SEQ ID NO: 662356 - RNA, 19 nt, Artificial Sequence
  Description of Artificial Sequence: Synthetic oligonucleotide
ugccgauaaacugucuacc

SEQ ID NO: 662357 - RNA, 19 nt, Artificial Sequence
  Description of Artificial Sequence: Synthetic oligonucleotide
auauuagaaccaaaauaga

SEQ ID NO: 662358 - RNA, 19 nt, Artificial Sequence
  Description of Artificial Sequence: Synthetic oligonucleotide
ucgguaauucuuacucacu

SEQ ID NO: 662359 - RNA, 19 nt, Artificial Sequence
  Description of Artificial Sequence: Synthetic oligonucleotide
acaucugccgauaaacugu

SEQ ID NO: 662360 - RNA, 19 nt, Artificial Sequence
  Description of Artificial Sequence: Synthetic oligonucleotide
ucggaugcuccaagagagg

SEQ ID NO: 662361 - RNA, 19 nt, Artificial Sequence
  Description of Artificial Sequence: Synthetic oligonucleotide
gcuacuauaaugcaacugu

SEQ ID NO: 662362 - RNA, 19 nt, Artificial Sequence
  Description of Artificial Sequence: Synthetic oligonucleotide
cugccgauaaacugucuac

SEQ ID NO: 662363 - RNA, 19 nt, Artificial Sequence
  Description of Artificial Sequence: Synthetic oligonucleotide
caggagagaagcggcaucg

SEQ ID NO: 662364 - RNA, 19 nt, Artificial Sequence
  Description of Artificial Sequence: Synthetic oligonucleotide
uagucacuaggaaauggua

SEQ ID NO: 662365 - RNA, 19 nt, Artificial Sequence
  Description of Artificial Sequence: Synthetic oligonucleotide
ugccucauccaaccggccc

SEQ ID NO: 662366 - RNA, 19 nt, Artificial Sequence
  Description of Artificial Sequence: Synthetic oligonucleotide
agagaagcggcaucggcaa

SEQ ID NO: 662367 - RNA, 19 nt, Artificial Sequence
  Description of Artificial Sequence: Synthetic oligonucleotide
cgaucacugagcaucaugg

SEQ ID NO: 662368 - RNA, 19 nt, Artificial Sequence
  Description of Artificial Sequence: Synthetic oligonucleotide
cuugaucacuuggugaaug

SEQ ID NO: 662369 - RNA, 19 nt, Artificial Sequence
  Description of Artificial Sequence: Synthetic oligonucleotide
uuugcaggccaaugaagau

SEQ ID NO: 662370 - RNA, 19 nt, Artificial Sequence
  Description of Artificial Sequence: Synthetic oligonucleotide
ucacuaggaaaugguacca

SEQ ID NO: 662371 - RNA, 19 nt, Artificial Sequence
  Description of Artificial Sequence: Synthetic oligonucleotide
cuuguucggucaucugccg

SEQ ID NO: 662372 - RNA, 19 nt, Artificial Sequence
  Description of Artificial Sequence: Synthetic oligonucleotide
auugcaaccuggugcauuu

SEQ ID NO: 662373 - RNA, 19 nt, Artificial Sequence
  Description of Artificial Sequence: Synthetic oligonucleotide
aguuauugcgggcucgcaa

SEQ ID NO: 662374 - RNA, 19 nt, Artificial Sequence
  Description of Artificial Sequence: Synthetic oligonucleotide
gaaugucagucgaucacug

SEQ ID NO: 662375 - RNA, 19 nt, Artificial Sequence
  Description of Artificial Sequence: Synthetic oligonucleotide
cuuauaauugcccgagcaa

SEQ ID NO: 662376 - RNA, 19 nt, Artificial Sequence
  Description of Artificial Sequence: Synthetic oligonucleotide
ucgacauacaaagcuacua

SEQ ID NO: 662377 - RNA, 19 nt, Artificial Sequence
  Description of Artificial Sequence: Synthetic oligonucleotide
aaagagcggggugcgaucu

SEQ ID NO: 662378 - RNA, 19 nt, Artificial Sequence
  Description of Artificial Sequence: Synthetic oligonucleotide
agcuacuauaaugcaacug

SEQ ID NO: 662379 - RNA, 19 nt, Artificial Sequence
  Description of Artificial Sequence: Synthetic oligonucleotide
uuggcucggaugcuccaag

SEQ ID NO: 662380 - RNA, 19 nt, Artificial Sequence
  Description of Artificial Sequence: Synthetic oligonucleotide
caagaaugucagucgauca

SEQ ID NO: 662381 - RNA, 19 nt, Artificial Sequence
  Description of Artificial Sequence: Synthetic oligonucleotide
auacaggcccguaugacug

SEQ ID NO: 662382 - RNA, 19 nt, Artificial Sequence
  Description of Artificial Sequence: Synthetic oligonucleotide
gauaaacugucuaccucac

SEQ ID NO: 662383 - RNA, 19 nt, Artificial Sequence
  Description of Artificial Sequence: Synthetic oligonucleotide
gaaaccuggcugcugaacu

SEQ ID NO: 662384 - RNA, 19 nt, Artificial Sequence
  Description of Artificial Sequence: Synthetic oligonucleotide
aaugggcauuguccucauc

SEQ ID NO: 662385 - RNA, 19 nt, Artificial Sequence
  Description of Artificial Sequence: Synthetic oligonucleotide
cauccaaccggcccugaag

SEQ ID NO: 662386 - RNA, 19 nt, Artificial Sequence
  Description of Artificial Sequence: Synthetic oligonucleotide
gagcccagacgauuauugc

SEQ ID NO: 662387 - RNA, 19 nt, Artificial Sequence
  Description of Artificial Sequence: Synthetic oligonucleotide
agcuccaaggaaacucggc

SEQ ID NO: 662388 - RNA, 19 nt, Artificial Sequence
  Description of Artificial Sequence: Synthetic oligonucleotide
uacucacucgaaccaauuu

SEQ ID NO: 662389 - RNA, 19 nt, Artificial Sequence
  Description of Artificial Sequence: Synthetic oligonucleotide
gagcaagauuccgagcaag

SEQ ID NO: 662390 - RNA, 19 nt, Artificial Sequence
  Description of Artificial Sequence: Synthetic oligonucleotide
ugggcauccagcucaccac

SEQ ID NO: 662391 - RNA, 19 nt, Artificial Sequence
  Description of Artificial Sequence: Synthetic oligonucleotide
ugcccgagcaagauuccga

SEQ ID NO: 662392 - RNA, 19 nt, Artificial Sequence
  Description of Artificial Sequence: Synthetic oligonucleotide
gucagucgaucacugagca

SEQ ID NO: 662393 - RNA, 19 nt, Artificial Sequence
  Description of Artificial Sequence: Synthetic oligonucleotide
gcaauugcaaccuggugca

SEQ ID NO: 662394 - RNA, 19 nt, Artificial Sequence
  Description of Artificial Sequence: Synthetic oligonucleotide
ucgcaaucgagcuccucca

SEQ ID NO: 662395 - RNA, 19 nt, Artificial Sequence
  Description of Artificial Sequence: Synthetic oligonucleotide
ugcgggcucgcaaucgagc

SEQ ID NO: 662396 - RNA, 19 nt, Artificial Sequence
  Description of Artificial Sequence: Synthetic oligonucleotide
cuucgaacuuguucgguca

SEQ ID NO: 662397 - RNA, 19 nt, Artificial Sequence
  Description of Artificial Sequence: Synthetic oligonucleotide
uguucggucaucugccguu

SEQ ID NO: 662398 - RNA, 19 nt, Artificial Sequence
  Description of Artificial Sequence: Synthetic oligonucleotide
aaaggucggugaggugagc

SEQ ID NO: 662399 - RNA, 19 nt, Artificial Sequence
  Description of Artificial Sequence: Synthetic oligonucleotide
aucuuuccguacgauguag

SEQ ID NO: 662400 - RNA, 19 nt, Artificial Sequence
  Description of Artificial Sequence: Synthetic oligonucleotide
ucuuacucacucgaaccaa

SEQ ID NO: 662401 - RNA, 19 nt, Artificial Sequence
  Description of Artificial Sequence: Synthetic oligonucleotide
uugucgugccucauccaac

SEQ ID NO: 662402 - RNA, 19 nt, Artificial Sequence
  Description of Artificial Sequence: Synthetic oligonucleotide
ccagaucagaaaagcagcc

SEQ ID NO: 662403 - RNA, 19 nt, Artificial Sequence
  Description of Artificial Sequence: Synthetic oligonucleotide
uagaaccaaaauagagguu

SEQ ID NO: 662404 - RNA, 19 nt, Artificial Sequence
  Description of Artificial Sequence: Synthetic oligonucleotide
uuauugcgggcucgcaauc

SEQ ID NO: 662405 - RNA, 19 nt, Artificial Sequence
  Description of Artificial Sequence: Synthetic oligonucleotide
caucugccgauaaacuguc

SEQ ID NO: 662406 - RNA, 19 nt, Artificial Sequence
  Description of Artificial Sequence: Synthetic oligonucleotide
uuguucggucaucugccgu

SEQ ID NO: 662407 - RNA, 19 nt, Artificial Sequence
  Description of Artificial Sequence: Synthetic oligonucleotide
agccuagucacuaggaaau

SEQ ID NO: 662408 - RNA, 19 nt, Artificial Sequence
  Description of Artificial Sequence: Synthetic oligonucleotide
gaggugagcuacaaaccac

SEQ ID NO: 662409 - RNA, 19 nt, Artificial Sequence
  Description of Artificial Sequence: Synthetic oligonucleotide
uuuccguacgauguagaua

SEQ ID NO: 662410 - RNA, 19 nt, Artificial Sequence
  Description of Artificial Sequence: Synthetic oligonucleotide
gaacuuguucggucaucug

SEQ ID NO: 662411 - RNA, 19 nt, Artificial Sequence
  Description of Artificial Sequence: Synthetic oligonucleotide
cucggcaccuucucggaug

SEQ ID NO: 662412 - RNA, 19 nt, Artificial Sequence
  Description of Artificial Sequence: Synthetic oligonucleotide
auaaugcaacuguccucag

SEQ ID NO: 662413 - RNA, 19 nt, Artificial Sequence
  Description of Artificial Sequence: Synthetic oligonucleotide
cagcgcaucagcucauaug

SEQ ID NO: 662414 - RNA, 19 nt, Artificial Sequence
  Description of Artificial Sequence: Synthetic oligonucleotide
aucugucagauacgagugu

SEQ ID NO: 662415 - RNA, 19 nt, Artificial Sequence
  Description of Artificial Sequence: Synthetic oligonucleotide
caaguuauugcgggcucgc

SEQ ID NO: 662416 - RNA, 19 nt, Artificial Sequence
  Description of Artificial Sequence: Synthetic oligonucleotide
acgccuggaauccaaguua

SEQ ID NO: 662417 - RNA, 19 nt, Artificial Sequence
  Description of Artificial Sequence: Synthetic oligonucleotide
uaauugcccgagcaagauu

SEQ ID NO: 662418 - RNA, 19 nt, Artificial Sequence
  Description of Artificial Sequence: Synthetic oligonucleotide
ucacacacgugcagucgga

SEQ ID NO: 662419 - RNA, 19 nt, Artificial Sequence
  Description of Artificial Sequence: Synthetic oligonucleotide
cagacgauuauugcggaca

SEQ ID NO: 662420 - RNA, 19 nt, Artificial Sequence
  Description of Artificial Sequence: Synthetic oligonucleotide
gaaagagcggggugcgauc

SEQ ID NO: 662421 - RNA, 19 nt, Artificial Sequence
  Description of Artificial Sequence: Synthetic oligonucleotide
cugucuaccucacacacgu

SEQ ID NO: 662422 - RNA, 19 nt, Artificial Sequence
  Description of Artificial Sequence: Synthetic oligonucleotide
auugcccgagcaagauucc

SEQ ID NO: 662423 - RNA, 19 nt, Artificial Sequence
  Description of Artificial Sequence: Synthetic oligonucleotide
cuagucacuaggaaauggu

SEQ ID NO: 662424 - RNA, 19 nt, Artificial Sequence
  Description of Artificial Sequence: Synthetic oligonucleotide
uucgaacuuguucggucau

SEQ ID NO: 662425 - RNA, 19 nt, Artificial Sequence
  Description of Artificial Sequence: Synthetic oligonucleotide
aagugccgcucacauuccu

SEQ ID NO: 662426 - RNA, 19 nt, Artificial Sequence
  Description of Artificial Sequence: Synthetic oligonucleotide
uugcccgagcaagauuccg

SEQ ID NO: 662427 - RNA, 19 nt, Artificial Sequence
  Description of Artificial Sequence: Synthetic oligonucleotide
gaaacucggcccagcuccg

SEQ ID NO: 662428 - RNA, 19 nt, Artificial Sequence
  Description of Artificial Sequence: Synthetic oligonucleotide
aucuuacagaugcuucgaa

SEQ ID NO: 662429 - RNA, 19 nt, Artificial Sequence
  Description of Artificial Sequence: Synthetic oligonucleotide
gcccagacgauuauugcgg

SEQ ID NO: 662430 - RNA, 19 nt, Artificial Sequence
  Description of Artificial Sequence: Synthetic oligonucleotide
auuugucgugccucaucca

SEQ ID NO: 662431 - RNA, 19 nt, Artificial Sequence
  Description of Artificial Sequence: Synthetic oligonucleotide
agaaagagcggggugcgau

SEQ ID NO: 662432 - RNA, 19 nt, Artificial Sequence
  Description of Artificial Sequence: Synthetic oligonucleotide
cuacaaaccaccaguugcu

SEQ ID NO: 662433 - RNA, 19 nt, Artificial Sequence
  Description of Artificial Sequence: Synthetic oligonucleotide
cacuaggaaaugguaccag

SEQ ID NO: 662434 - RNA, 19 nt, Artificial Sequence
  Description of Artificial Sequence: Synthetic oligonucleotide
ggagagaagcggcaucggc

SEQ ID NO: 662435 - RNA, 19 nt, Artificial Sequence
  Description of Artificial Sequence: Synthetic oligonucleotide
acaucgacauacaaagcua

SEQ ID NO: 662436 - RNA, 19 nt, Artificial Sequence
  Description of Artificial Sequence: Synthetic oligonucleotide
uuauugcggacagccuuca

SEQ ID NO: 662437 - RNA, 19 nt, Artificial Sequence
  Description of Artificial Sequence: Synthetic oligonucleotide
gaagcggcaucggcaaagc

SEQ ID NO: 662438 - RNA, 19 nt, Artificial Sequence
  Description of Artificial Sequence: Synthetic oligonucleotide
aggcauauuccagcagaag

SEQ ID NO: 662439 - RNA, 19 nt, Artificial Sequence
  Description of Artificial Sequence: Synthetic oligonucleotide
guagauaaaggggcagcuc

SEQ ID NO: 662440 - RNA, 19 nt, Artificial Sequence
  Description of Artificial Sequence: Synthetic oligonucleotide
agucggacccagucaagaa

SEQ ID NO: 662441 - RNA, 19 nt, Artificial Sequence
  Description of Artificial Sequence: Synthetic oligonucleotide
cugaggcauauuccagcag

SEQ ID NO: 662442 - RNA, 19 nt, Artificial Sequence
  Description of Artificial Sequence: Synthetic oligonucleotide
aaacucggcccagcuccgg

SEQ ID NO: 662443 - RNA, 19 nt, Artificial Sequence
  Description of Artificial Sequence: Synthetic oligonucleotide
guuauugcgggcucgcaau

SEQ ID NO: 662444 - RNA, 19 nt, Artificial Sequence
  Description of Artificial Sequence: Synthetic oligonucleotide
ggugcgaucugagauguca

SEQ ID NO: 662445 - RNA, 19 nt, Artificial Sequence
  Description of Artificial Sequence: Synthetic oligonucleotide
aagagcggggugcgaucug

SEQ ID NO: 662446 - RNA, 19 nt, Artificial Sequence
  Description of Artificial Sequence: Synthetic oligonucleotide
agcaagauuccgagcaaga

SEQ ID NO: 662447 - RNA, 19 nt, Artificial Sequence
  Description of Artificial Sequence: Synthetic oligonucleotide
uucggucaucugccguugc

SEQ ID NO: 662448 - RNA, 19 nt, Artificial Sequence
  Description of Artificial Sequence: Synthetic oligonucleotide
aaguuauugcgggcucgca

SEQ ID NO: 662449 - RNA, 19 nt, Artificial Sequence
  Description of Artificial Sequence: Synthetic oligonucleotide
uggguucucacugcccaga

SEQ ID NO: 662450 - RNA, 19 nt, Artificial Sequence
  Description of Artificial Sequence: Synthetic oligonucleotide
caagugccgcucacauucc

SEQ ID NO: 662451 - RNA, 19 nt, Artificial Sequence
  Description of Artificial Sequence: Synthetic oligonucleotide
aaaggaucucacacagguu

SEQ ID NO: 662452 - RNA, 19 nt, Artificial Sequence
  Description of Artificial Sequence: Synthetic oligonucleotide
cauacaggcccguaugacu

SEQ ID NO: 662453 - RNA, 19 nt, Artificial Sequence
  Description of Artificial Sequence: Synthetic oligonucleotide
ugcgaacgugcugucuugc

SEQ ID NO: 662454 - RNA, 19 nt, Artificial Sequence
  Description of Artificial Sequence: Synthetic oligonucleotide
cgauaaacugucuaccuca

SEQ ID NO: 662455 - RNA, 19 nt, Artificial Sequence
  Description of Artificial Sequence: Synthetic oligonucleotide
gacgauuauugcggacagc

SEQ ID NO: 662456 - RNA, 19 nt, Artificial Sequence
  Description of Artificial Sequence: Synthetic oligonucleotide
gaacaucugccgauaaacu

SEQ ID NO: 662457 - RNA, 19 nt, Artificial Sequence
  Description of Artificial Sequence: Synthetic oligonucleotide
uacaggcccguaugacuga

SEQ ID NO: 662458 - RNA, 19 nt, Artificial Sequence
  Description of Artificial Sequence: Synthetic oligonucleotide
agugauccaaaaggucggu

SEQ ID NO: 662459 - RNA, 19 nt, Artificial Sequence
  Description of Artificial Sequence: Synthetic oligonucleotide
acagucuguggaacucccg

SEQ ID NO: 662460 - RNA, 19 nt, Artificial Sequence
  Description of Artificial Sequence: Synthetic oligonucleotide
aucgacauacaaagcuacu

SEQ ID NO: 662461 - RNA, 19 nt, Artificial Sequence
  Description of Artificial Sequence: Synthetic oligonucleotide
gugauccaaaaggucggug

SEQ ID NO: 662462 - RNA, 19 nt, Artificial Sequence
  Description of Artificial Sequence: Synthetic oligonucleotide
gucgucauccuggagucuc

SEQ ID NO: 662463 - RNA, 19 nt, Artificial Sequence
  Description of Artificial Sequence: Synthetic oligonucleotide
cuaugucgucauccuggag

SEQ ID NO: 662464 - RNA, 19 nt, Artificial Sequence
  Description of Artificial Sequence: Synthetic oligonucleotide
uguggaacucccgguacuu

SEQ ID NO: 662465 - RNA, 19 nt, Artificial Sequence
  Description of Artificial Sequence: Synthetic oligonucleotide
ugcuucgaacuuguucggu

SEQ ID NO: 662466 - RNA, 19 nt, Artificial Sequence
  Description of Artificial Sequence: Synthetic oligonucleotide
ccgagcaagauuccgagca

SEQ ID NO: 662467 - RNA, 19 nt, Artificial Sequence
  Description of Artificial Sequence: Synthetic oligonucleotide
ucagucgaucacugagcau

SEQ ID NO: 662468 - RNA, 19 nt, Artificial Sequence
  Description of Artificial Sequence: Synthetic oligonucleotide
uggcucggaugcuccaaga

SEQ ID NO: 662469 - RNA, 19 nt, Artificial Sequence
  Description of Artificial Sequence: Synthetic oligonucleotide
aggacugagaaugggcauu

SEQ ID NO: 662470 - RNA, 19 nt, Artificial Sequence
  Description of Artificial Sequence: Synthetic oligonucleotide
ccaagaaugucagucgauc

SEQ ID NO: 662471 - RNA, 19 nt, Artificial Sequence
  Description of Artificial Sequence: Synthetic oligonucleotide
cugcgaacgugcugucuug

SEQ ID NO: 662472 - RNA, 19 nt, Artificial Sequence
  Description of Artificial Sequence: Synthetic oligonucleotide
ggcuagacugggcauagaa

SEQ ID NO: 662473 - RNA, 19 nt, Artificial Sequence
  Description of Artificial Sequence: Synthetic oligonucleotide
cauuccucacgccagugcu

SEQ ID NO: 662474 - RNA, 19 nt, Artificial Sequence
  Description of Artificial Sequence: Synthetic oligonucleotide
cucacgccagugcugccac

SEQ ID NO: 662475 - RNA, 19 nt, Artificial Sequence
  Description of Artificial Sequence: Synthetic oligonucleotide
agucgaucacugagcauca

SEQ ID NO: 662476 - RNA, 19 nt, Artificial Sequence
  Description of Artificial Sequence: Synthetic oligonucleotide
agcagccuagucacuagga

SEQ ID NO: 662477 - RNA, 19 nt, Artificial Sequence
  Description of Artificial Sequence: Synthetic oligonucleotide
gcccgagcaagauuccgag

SEQ ID NO: 662478 - RNA, 19 nt, Artificial Sequence
  Description of Artificial Sequence: Synthetic oligonucleotide
agauacgaguguggcaaaa

SEQ ID NO: 662479 - RNA, 19 nt, Artificial Sequence
  Description of Artificial Sequence: Synthetic oligonucleotide
acgccagugcugccacuuc

SEQ ID NO: 662480 - RNA, 19 nt, Artificial Sequence
  Description of Artificial Sequence: Synthetic oligonucleotide
gaaccaaaauagagguugu

SEQ ID NO: 662481 - RNA, 19 nt, Artificial Sequence
  Description of Artificial Sequence: Synthetic oligonucleotide
ggaaucugucagauacgag

SEQ ID NO: 662482 - RNA, 19 nt, Artificial Sequence
  Description of Artificial Sequence: Synthetic oligonucleotide
ucgaacuuguucggucauc

SEQ ID NO: 662483 - RNA, 19 nt, Artificial Sequence
  Description of Artificial Sequence: Synthetic oligonucleotide
agcucggcaccuucucgga

SEQ ID NO: 662484 - RNA, 19 nt, Artificial Sequence
  Description of Artificial Sequence: Synthetic oligonucleotide
ccgauaaacugucuaccuc

SEQ ID NO: 662485 - RNA, 19 nt, Artificial Sequence
  Description of Artificial Sequence: Synthetic oligonucleotide
cgguaauucuuacucacuc

SEQ ID NO: 662486 - RNA, 19 nt, Artificial Sequence
  Description of Artificial Sequence: Synthetic oligonucleotide
ggcaaagcgcuucucccca

SEQ ID NO: 662487 - RNA, 19 nt, Artificial Sequence
  Description of Artificial Sequence: Synthetic oligonucleotide
guucggucaucugccguug

SEQ ID NO: 662488 - RNA, 19 nt, Artificial Sequence
  Description of Artificial Sequence: Synthetic oligonucleotide
agcggggugcgaucugaga

SEQ ID NO: 662489 - RNA, 19 nt, Artificial Sequence
  Description of Artificial Sequence: Synthetic oligonucleotide
uauugcggacagccuucau

SEQ ID NO: 662490 - RNA, 19 nt, Artificial Sequence
  Description of Artificial Sequence: Synthetic oligonucleotide
auuccgagcaagagccagu

SEQ ID NO: 662491 - RNA, 19 nt, Artificial Sequence
  Description of Artificial Sequence: Synthetic oligonucleotide
agagcggggugcgaucuga

SEQ ID NO: 662492 - RNA, 19 nt, Artificial Sequence
  Description of Artificial Sequence: Synthetic oligonucleotide
ccguacgauguagauaaag

SEQ ID NO: 662493 - RNA, 19 nt, Artificial Sequence
  Description of Artificial Sequence: Synthetic oligonucleotide
cuuacucacucgaaccaau

SEQ ID NO: 662494 - RNA, 19 nt, Artificial Sequence
  Description of Artificial Sequence: Synthetic oligonucleotide
cuuuccguacgauguagau

SEQ ID NO: 662495 - RNA, 19 nt, Artificial Sequence
  Description of Artificial Sequence: Synthetic oligonucleotide
agggcgucugugagcagag

SEQ ID NO: 662496 - RNA, 19 nt, Artificial Sequence
  Description of Artificial Sequence: Synthetic oligonucleotide
gcgucugaguguugccagg

SEQ ID NO: 662497 - RNA, 19 nt, Artificial Sequence
  Description of Artificial Sequence: Synthetic oligonucleotide
cacacacgugcagucggac

SEQ ID NO: 662498 - RNA, 19 nt, Artificial Sequence
  Description of Artificial Sequence: Synthetic oligonucleotide
uccguacgauguagauaaa

SEQ ID NO: 662499 - RNA, 19 nt, Artificial Sequence
  Description of Artificial Sequence: Synthetic oligonucleotide
ggcccguaugacugaucgg

SEQ ID NO: 662500 - RNA, 19 nt, Artificial Sequence
  Description of Artificial Sequence: Synthetic oligonucleotide
ggcaguagucaaaguaauc

SEQ ID NO: 662501 - RNA, 19 nt, Artificial Sequence
  Description of Artificial Sequence: Synthetic oligonucleotide
caucuuuccguacgaugua

SEQ ID NO: 662502 - RNA, 19 nt, Artificial Sequence
  Description of Artificial Sequence: Synthetic oligonucleotide
ggaaccuuccaaugagccu

SEQ ID NO: 662503 - RNA, 19 nt, Artificial Sequence
  Description of Artificial Sequence: Synthetic oligonucleotide
cagucggacccagucaaga

SEQ ID NO: 662504 - RNA, 19 nt, Artificial Sequence
  Description of Artificial Sequence: Synthetic oligonucleotide
agacagucaccaaguucca

SEQ ID NO: 662505 - RNA, 19 nt, Artificial Sequence
  Description of Artificial Sequence: Synthetic oligonucleotide
ugucgucauccuggagucu

SEQ ID NO: 662506 - RNA, 19 nt, Artificial Sequence
  Description of Artificial Sequence: Synthetic oligonucleotide
ucguggucucuaugucguc

SEQ ID NO: 662507 - RNA, 19 nt, Artificial Sequence
  Description of Artificial Sequence: Synthetic oligonucleotide
gccgauaaacugucuaccu

SEQ ID NO: 662508 - RNA, 19 nt, Artificial Sequence
  Description of Artificial Sequence: Synthetic oligonucleotide
caaggaugcggcacaugcu

SEQ ID NO: 662509 - RNA, 19 nt, Artificial Sequence
  Description of Artificial Sequence: Synthetic oligonucleotide
ccucacacacgugcagucg

SEQ ID NO: 662510 - RNA, 19 nt, Artificial Sequence
  Description of Artificial Sequence: Synthetic oligonucleotide
ccagacgauuauugcggac

SEQ ID NO: 662511 - RNA, 19 nt, Artificial Sequence
  Description of Artificial Sequence: Synthetic oligonucleotide
agauuccgagcaagagcca

SEQ ID NO: 662512 - RNA, 19 nt, Artificial Sequence
  Description of Artificial Sequence: Synthetic oligonucleotide
ccauacaggcccguaugac

SEQ ID NO: 662513 - RNA, 19 nt, Artificial Sequence
  Description of Artificial Sequence: Synthetic oligonucleotide
gagaagcggcaucggcaaa

SEQ ID NO: 662514 - RNA, 19 nt, Artificial Sequence
  Description of Artificial Sequence: Synthetic oligonucleotide
ggcaucggcaaagcgcuuc

SEQ ID NO: 662515 - RNA, 19 nt, Artificial Sequence
  Description of Artificial Sequence: Synthetic oligonucleotide
gaacugccgaccacuggcu

SEQ ID NO: 662516 - RNA, 19 nt, Artificial Sequence
  Description of Artificial Sequence: Synthetic oligonucleotide
gcccguaugacugaucggu

SEQ ID NO: 662517 - RNA, 19 nt, Artificial Sequence
  Description of Artificial Sequence: Synthetic oligonucleotide
aucuccccgggaccccagu

SEQ ID NO: 662518 - RNA, 19 nt, Artificial Sequence
  Description of Artificial Sequence: Synthetic oligonucleotide
ggacagcauuugucgugcc

SEQ ID NO: 662519 - RNA, 19 nt, Artificial Sequence
  Description of Artificial Sequence: Synthetic oligonucleotide
acaggcccguaugacugau

SEQ ID NO: 662520 - RNA, 19 nt, Artificial Sequence
  Description of Artificial Sequence: Synthetic oligonucleotide
ucacgccagugcugccacu

SEQ ID NO: 662521 - RNA, 19 nt, Artificial Sequence
  Description of Artificial Sequence: Synthetic oligonucleotide
uugcaaccuggugcauuuc

SEQ ID NO: 662522 - RNA, 19 nt, Artificial Sequence
  Description of Artificial Sequence: Synthetic oligonucleotide
cagauacgaguguggcaaa

SEQ ID NO: 662523 - RNA, 19 nt, Artificial Sequence
  Description of Artificial Sequence: Synthetic oligonucleotide
caucugccguugcucacaa

SEQ ID NO: 662524 - RNA, 19 nt, Artificial Sequence
  Description of Artificial Sequence: Synthetic oligonucleotide
cacgccuggaauccaaguu

SEQ ID NO: 662525 - RNA, 19 nt, Artificial Sequence
  Description of Artificial Sequence: Synthetic oligonucleotide
gccuagucacuaggaaaug

SEQ ID NO: 662526 - RNA, 19 nt, Artificial Sequence
  Description of Artificial Sequence: Synthetic oligonucleotide
cacgugcagucggacccag

SEQ ID NO: 662527 - RNA, 19 nt, Artificial Sequence
  Description of Artificial Sequence: Synthetic oligonucleotide
cucucauguuugcuugggu

SEQ ID NO: 662528 - RNA, 19 nt, Artificial Sequence
  Description of Artificial Sequence: Synthetic oligonucleotide
ccggcccugaagcaccaag

SEQ ID NO: 662529 - RNA, 19 nt, Artificial Sequence
  Description of Artificial Sequence: Synthetic oligonucleotide
ccguaugacugaucgguaa

SEQ ID NO: 662530 - RNA, 19 nt, Artificial Sequence
  Description of Artificial Sequence: Synthetic oligonucleotide
caggacugagaaugggcau

SEQ ID NO: 662531 - RNA, 19 nt, Artificial Sequence
  Description of Artificial Sequence: Synthetic oligonucleotide
aucugccgauaaacugucu

SEQ ID NO: 662532 - RNA, 19 nt, Artificial Sequence
  Description of Artificial Sequence: Synthetic oligonucleotide
cguugcucacaaauccuca

SEQ ID NO: 662533 - RNA, 19 nt, Artificial Sequence
  Description of Artificial Sequence: Synthetic oligonucleotide
gcgaacgugcugucuugca

SEQ ID NO: 662534 - RNA, 19 nt, Artificial Sequence
  Description of Artificial Sequence: Synthetic oligonucleotide
cggggugcgaucugagaug

SEQ ID NO: 662535 - RNA, 19 nt, Artificial Sequence
  Description of Artificial Sequence: Synthetic oligonucleotide
gcggggugcgaucugagau

SEQ ID NO: 662536 - RNA, 19 nt, Artificial Sequence
  Description of Artificial Sequence: Synthetic oligonucleotide
cuggugcauuucuuccaua

SEQ ID NO: 662537 - RNA, 19 nt, Artificial Sequence
  Description of Artificial Sequence: Synthetic oligonucleotide
gcugcgaacgugcugucuu

SEQ ID NO: 662538 - RNA, 19 nt, Artificial Sequence
  Description of Artificial Sequence: Synthetic oligonucleotide
caaaagaggcagggcgucu

SEQ ID NO: 662539 - RNA, 19 nt, Artificial Sequence
  Description of Artificial Sequence: Synthetic oligonucleotide
cccagacgauuauugcgga

SEQ ID NO: 662540 - RNA, 19 nt, Artificial Sequence
  Description of Artificial Sequence: Synthetic oligonucleotide
ggggugcgaucugagaugu

SEQ ID NO: 662541 - RNA, 19 nt, Artificial Sequence
  Description of Artificial Sequence: Synthetic oligonucleotide
cuacaucuuuccguacgau

SEQ ID NO: 662542 - RNA, 19 nt, Artificial Sequence
  Description of Artificial Sequence: Synthetic oligonucleotide
cuucucggaugugucuacu

SEQ ID NO: 662543 - RNA, 19 nt, Artificial Sequence
  Description of Artificial Sequence: Synthetic oligonucleotide
gcaucggcaaagcgcuucu

SEQ ID NO: 662544 - RNA, 19 nt, Artificial Sequence
  Description of Artificial Sequence: Synthetic oligonucleotide
gggcaguagucaaaguaau

SEQ ID NO: 662545 - RNA, 19 nt, Artificial Sequence
  Description of Artificial Sequence: Synthetic oligonucleotide
gcaaucgagcuccuccauu

SEQ ID NO: 662546 - RNA, 19 nt, Artificial Sequence
  Description of Artificial Sequence: Synthetic oligonucleotide
cgaacgugcugucuugcaa

SEQ ID NO: 662547 - RNA, 19 nt, Artificial Sequence
  Description of Artificial Sequence: Synthetic oligonucleotide
ccgggaccccagucaaaac

SEQ ID NO: 662548 - RNA, 19 nt, Artificial Sequence
  Description of Artificial Sequence: Synthetic oligonucleotide
ccucacgccagugcugcca

SEQ ID NO: 662549 - RNA, 19 nt, Artificial Sequence
  Description of Artificial Sequence: Synthetic oligonucleotide
cccguaugacugaucggua

SEQ ID NO: 662550 - RNA, 19 nt, Artificial Sequence
  Description of Artificial Sequence: Synthetic oligonucleotide
ccggucaauuccuccucaa

SEQ ID NO: 662551 - RNA, 19 nt, Artificial Sequence
  Description of Artificial Sequence: Synthetic oligonucleotide
cguaugacugaucgguaau

SEQ ID NO: 662552 - RNA, 19 nt, Artificial Sequence
  Description of Artificial Sequence: Synthetic oligonucleotide
ccaggcuagacugggcaua

SEQ ID NO: 662553 - RNA, 19 nt, Artificial Sequence
  Description of Artificial Sequence: Synthetic oligonucleotide
cccaagaaugucagucgau

SEQ ID NO: 662554 - RNA, 19 nt, Artificial Sequence
  Description of Artificial Sequence: Synthetic oligonucleotide
cgagcaagauuccgagcaa

SEQ ID NO: 662555 - RNA, 19 nt, Artificial Sequence
  Description of Artificial Sequence: Synthetic oligonucleotide
cgucugaguguugccagga

SEQ ID NO: 662556 - RNA, 19 nt, Artificial Sequence
  Description of Artificial Sequence: Synthetic oligonucleotide
cagcaucuuuggcucggau

SEQ ID NO: 662557 - RNA, 19 nt, Artificial Sequence
  Description of Artificial Sequence: Synthetic oligonucleotide
cgauuauugcggacagccu

SEQ ID NO: 662558 - RNA, 19 nt, Artificial Sequence
  Description of Artificial Sequence: Synthetic oligonucleotide
cgggcucgcaaucgagcuc

SEQ ID NO: 662559 - RNA, 19 nt, Artificial Sequence
  Description of Artificial Sequence: Synthetic oligonucleotide
gcucgcaaucgagcuccuc

SEQ ID NO: 662560 - RNA, 19 nt, Artificial Sequence
  Description of Artificial Sequence: Synthetic oligonucleotide
gcgcuucuccccauacagu

SEQ ID NO: 662561 - RNA, 19 nt, Artificial Sequence
  Description of Artificial Sequence: Synthetic oligonucleotide
ggcugcgaacgugcugucu

SEQ ID NO: 662562 - RNA, 19 nt, Artificial Sequence
  Description of Artificial Sequence: Synthetic oligonucleotide
gcucggcaccuucucggau

SEQ ID NO: 662563 - RNA, 19 nt, Artificial Sequence
  Description of Artificial Sequence: Synthetic oligonucleotide
gggugcgaucugagauguc

SEQ ID NO: 662564 - RNA, 19 nt, Artificial Sequence
  Description of Artificial Sequence: Synthetic oligonucleotide
ccuugaucacuuggugaau

SEQ ID NO: 662565 - RNA, 19 nt, Artificial Sequence
  Description of Artificial Sequence: Synthetic oligonucleotide
cggucaauuccuccucaau

SEQ ID NO: 662566 - RNA, 19 nt, Artificial Sequence
  Description of Artificial Sequence: Synthetic oligonucleotide
cgcaaucgagcuccuccau

SEQ ID NO: 662567 - RNA, 19 nt, Artificial Sequence
  Description of Artificial Sequence: Synthetic oligonucleotide
ggcucgcaaucgagcuccu

SEQ ID NO: 662568 - RNA, 19 nt, Artificial Sequence
  Description of Artificial Sequence: Synthetic oligonucleotide
cggcaucggcaaagcgcuu

SEQ ID NO: 662569 - RNA, 19 nt, Artificial Sequence
  Description of Artificial Sequence: Synthetic oligonucleotide
aaaagaugcacaaaccucc

SEQ ID NO: 662570 - RNA, 19 nt, Artificial Sequence
  Description of Artificial Sequence: Synthetic oligonucleotide
gaauuagcuggcuugaugg

SEQ ID NO: 662571 - RNA, 19 nt, Artificial Sequence
  Description of Artificial Sequence: Synthetic oligonucleotide
aguacagacacuuuggcag

SEQ ID NO: 662572 - RNA, 19 nt, Artificial Sequence
  Description of Artificial Sequence: Synthetic oligonucleotide
aagaaugguacuccgcacc

SEQ ID NO: 662573 - RNA, 19 nt, Artificial Sequence
  Description of Artificial Sequence: Synthetic oligonucleotide
gaugagacaauaaacacag

SEQ ID NO: 662574 - RNA, 19 nt, Artificial Sequence
  Description of Artificial Sequence: Synthetic oligonucleotide
ugaugguugauucuaaccc

SEQ ID NO: 662575 - RNA, 19 nt, Artificial Sequence
  Description of Artificial Sequence: Synthetic oligonucleotide
aaaagaaugguacuccgca

SEQ ID NO: 662576 - RNA, 19 nt, Artificial Sequence
  Description of Artificial Sequence: Synthetic oligonucleotide
ugaacauuaacuugaauuc

SEQ ID NO: 662577 - RNA, 19 nt, Artificial Sequence
  Description of Artificial Sequence: Synthetic oligonucleotide
agaaguuccauucuugaag

SEQ ID NO: 662578 - RNA, 19 nt, Artificial Sequence
  Description of Artificial Sequence: Synthetic oligonucleotide
uuaacuugaauucggaauc

SEQ ID NO: 662579 - RNA, 19 nt, Artificial Sequence
  Description of Artificial Sequence: Synthetic oligonucleotide
gaaguuccauucuugaagg

SEQ ID NO: 662580 - RNA, 19 nt, Artificial Sequence
  Description of Artificial Sequence: Synthetic oligonucleotide
ugaacagucucuaugggug

SEQ ID NO: 662581 - RNA, 19 nt, Artificial Sequence
  Description of Artificial Sequence: Synthetic oligonucleotide
uucaugacgcucaacgugg

SEQ ID NO: 662582 - RNA, 19 nt, Artificial Sequence
  Description of Artificial Sequence: Synthetic oligonucleotide
uguguagucagaaaucucu

SEQ ID NO: 662583 - RNA, 19 nt, Artificial Sequence
  Description of Artificial Sequence: Synthetic oligonucleotide
uucaucuguagacacgugg

SEQ ID NO: 662584 - RNA, 19 nt, Artificial Sequence
  Description of Artificial Sequence: Synthetic oligonucleotide
auuuguugggaccaguagg

SEQ ID NO: 662585 - RNA, 19 nt, Artificial Sequence
  Description of Artificial Sequence: Synthetic oligonucleotide
uuaauauugguaucaaauc

SEQ ID NO: 662586 - RNA, 19 nt, Artificial Sequence
  Description of Artificial Sequence: Synthetic oligonucleotide
gaaugggucuguuaagugg

SEQ ID NO: 662587 - RNA, 19 nt, Artificial Sequence
  Description of Artificial Sequence: Synthetic oligonucleotide
agaacguuucaucuaaguc

SEQ ID NO: 662588 - RNA, 19 nt, Artificial Sequence
  Description of Artificial Sequence: Synthetic oligonucleotide
ggugcuaucaccugaaggg

SEQ ID NO: 662589 - RNA, 19 nt, Artificial Sequence
  Description of Artificial Sequence: Synthetic oligonucleotide
aauauugguaucaaaucug

SEQ ID NO: 662590 - RNA, 19 nt, Artificial Sequence
  Description of Artificial Sequence: Synthetic oligonucleotide
acuuguaauauacauuucu

SEQ ID NO: 662591 - RNA, 19 nt, Artificial Sequence
  Description of Artificial Sequence: Synthetic oligonucleotide
acucacggaaacuaggagg

SEQ ID NO: 662592 - RNA, 19 nt, Artificial Sequence
  Description of Artificial Sequence: Synthetic oligonucleotide
aaaggguagacaaagguga

SEQ ID NO: 662593 - RNA, 19 nt, Artificial Sequence
  Description of Artificial Sequence: Synthetic oligonucleotide
gguuucaugacgcucaacg

SEQ ID NO: 662594 - RNA, 19 nt, Artificial Sequence
  Description of Artificial Sequence: Synthetic oligonucleotide
aaugucgccacacuuucug

SEQ ID NO: 662595 - RNA, 19 nt, Artificial Sequence
  Description of Artificial Sequence: Synthetic oligonucleotide
uuucaugacgcucaacgug

SEQ ID NO: 662596 - RNA, 19 nt, Artificial Sequence
  Description of Artificial Sequence: Synthetic oligonucleotide
uauggacaggucaaagagg

SEQ ID NO: 662597 - RNA, 19 nt, Artificial Sequence
  Description of Artificial Sequence: Synthetic oligonucleotide
agcuguaauccauaguuuc

SEQ ID NO: 662598 - RNA, 19 nt, Artificial Sequence
  Description of Artificial Sequence: Synthetic oligonucleotide
cuuaggauggaaauacuug

SEQ ID NO: 662599 - RNA, 19 nt, Artificial Sequence
  Description of Artificial Sequence: Synthetic oligonucleotide
cucacggaaacuaggaggg

SEQ ID NO: 662600 - RNA, 19 nt, Artificial Sequence
  Description of Artificial Sequence: Synthetic oligonucleotide
uauggcugguuucaugacg

SEQ ID NO: 662601 - RNA, 19 nt, Artificial Sequence
  Description of Artificial Sequence: Synthetic oligonucleotide
uguagucagaaaucucugg

SEQ ID NO: 662602 - RNA, 19 nt, Artificial Sequence
  Description of Artificial Sequence: Synthetic oligonucleotide
aaaaggguagacaaaggug

SEQ ID NO: 662603 - RNA, 19 nt, Artificial Sequence
  Description of Artificial Sequence: Synthetic oligonucleotide
acauccauaauuuuacuau

SEQ ID NO: 662604 - RNA, 19 nt, Artificial Sequence
  Description of Artificial Sequence: Synthetic oligonucleotide
aagauuuguagccaguguu

SEQ ID NO: 662605 - RNA, 19 nt, Artificial Sequence
  Description of Artificial Sequence: Synthetic oligonucleotide
gaaacuaggagggaagacc

SEQ ID NO: 662606 - RNA, 19 nt, Artificial Sequence
  Description of Artificial Sequence: Synthetic oligonucleotide
uaauccauaguuucacccc

SEQ ID NO: 662607 - RNA, 19 nt, Artificial Sequence
  Description of Artificial Sequence: Synthetic oligonucleotide
aagaccgcaggcugaaggg

SEQ ID NO: 662608 - RNA, 19 nt, Artificial Sequence
  Description of Artificial Sequence: Synthetic oligonucleotide
aaugaaucaucucuuccau

SEQ ID NO: 662609 - RNA, 19 nt, Artificial Sequence
  Description of Artificial Sequence: Synthetic oligonucleotide
uauauggacaggucaaaga

SEQ ID NO: 662610 - RNA, 19 nt, Artificial Sequence
  Description of Artificial Sequence: Synthetic oligonucleotide
aagggaucaucauauuuca

SEQ ID NO: 662611 - RNA, 19 nt, Artificial Sequence
  Description of Artificial Sequence: Synthetic oligonucleotide
gaaguuuucacaacuccag

SEQ ID NO: 662612 - RNA, 19 nt, Artificial Sequence
  Description of Artificial Sequence: Synthetic oligonucleotide
aaagauuuguagccagugu

SEQ ID NO: 662613 - RNA, 19 nt, Artificial Sequence
  Description of Artificial Sequence: Synthetic oligonucleotide
gaaguuuacugguuacucc

SEQ ID NO: 662614 - RNA, 19 nt, Artificial Sequence
  Description of Artificial Sequence: Synthetic oligonucleotide
aauccauaguuucacccca

SEQ ID NO: 662615 - RNA, 19 nt, Artificial Sequence
  Description of Artificial Sequence: Synthetic oligonucleotide
gaagaccgcaggcugaagg

SEQ ID NO: 662616 - RNA, 19 nt, Artificial Sequence
  Description of Artificial Sequence: Synthetic oligonucleotide
ucaaggauauguuuggcau

SEQ ID NO: 662617 - RNA, 19 nt, Artificial Sequence
  Description of Artificial Sequence: Synthetic oligonucleotide
ucuuugagugauagaaagc

SEQ ID NO: 662618 - RNA, 19 nt, Artificial Sequence
  Description of Artificial Sequence: Synthetic oligonucleotide
agaaugucgccacacuuuc

SEQ ID NO: 662619 - RNA, 19 nt, Artificial Sequence
  Description of Artificial Sequence: Synthetic oligonucleotide
uauuggucacugaacaugu

SEQ ID NO: 662620 - RNA, 19 nt, Artificial Sequence
  Description of Artificial Sequence: Synthetic oligonucleotide
guaggaauuagcuggcuug

SEQ ID NO: 662621 - RNA, 19 nt, Artificial Sequence
  Description of Artificial Sequence: Synthetic oligonucleotide
gauauguuuggcauccugc

SEQ ID NO: 662622 - RNA, 19 nt, Artificial Sequence
  Description of Artificial Sequence: Synthetic oligonucleotide
uucggaaucaccauuuguu

SEQ ID NO: 662623 - RNA, 19 nt, Artificial Sequence
  Description of Artificial Sequence: Synthetic oligonucleotide
caucauauuucaucuguag

SEQ ID NO: 662624 - RNA, 19 nt, Artificial Sequence
  Description of Artificial Sequence: Synthetic oligonucleotide
aauguugugaacagucucu

SEQ ID NO: 662625 - RNA, 19 nt, Artificial Sequence
  Description of Artificial Sequence: Synthetic oligonucleotide
ucuguagacacgugguaag

SEQ ID NO: 662626 - RNA, 19 nt, Artificial Sequence
  Description of Artificial Sequence: Synthetic oligonucleotide
gauuuguagccaguguugg

SEQ ID NO: 662627 - RNA, 19 nt, Artificial Sequence
  Description of Artificial Sequence: Synthetic oligonucleotide
aguccuggaaugucauucc

SEQ ID NO: 662628 - RNA, 19 nt, Artificial Sequence
  Description of Artificial Sequence: Synthetic oligonucleotide
cuuaccauccucuagccca

SEQ ID NO: 662629 - RNA, 19 nt, Artificial Sequence
  Description of Artificial Sequence: Synthetic oligonucleotide
aacucacggaaacuaggag

SEQ ID NO: 662630 - RNA, 19 nt, Artificial Sequence
  Description of Artificial Sequence: Synthetic oligonucleotide
aaucccaaaugaaucaucu

SEQ ID NO: 662631 - RNA, 19 nt, Artificial Sequence
  Description of Artificial Sequence: Synthetic oligonucleotide
auuacuccgaagucuuuuc

SEQ ID NO: 662632 - RNA, 19 nt, Artificial Sequence
  Description of Artificial Sequence: Synthetic oligonucleotide
caacacuccaucugaaacc

SEQ ID NO: 662633 - RNA, 19 nt, Artificial Sequence
  Description of Artificial Sequence: Synthetic oligonucleotide
gaagggaucaucauauuuc

SEQ ID NO: 662634 - RNA, 19 nt, Artificial Sequence
  Description of Artificial Sequence: Synthetic oligonucleotide
aaacugagguuggacgagc

SEQ ID NO: 662635 - RNA, 19 nt, Artificial Sequence
  Description of Artificial Sequence: Synthetic oligonucleotide
aguacuugcggaacuaagg

SEQ ID NO: 662636 - RNA, 19 nt, Artificial Sequence
  Description of Artificial Sequence: Synthetic oligonucleotide
guugauucuaacccaagga

SEQ ID NO: 662637 - RNA, 19 nt, Artificial Sequence
  Description of Artificial Sequence: Synthetic oligonucleotide
uuuggaaguuuacugguua

SEQ ID NO: 662638 - RNA, 19 nt, Artificial Sequence
  Description of Artificial Sequence: Synthetic oligonucleotide
ggaaucaccauuuguuggg

SEQ ID NO: 662639 - RNA, 19 nt, Artificial Sequence
  Description of Artificial Sequence: Synthetic oligonucleotide
aagugggaagcagacagag

SEQ ID NO: 662640 - RNA, 19 nt, Artificial Sequence
  Description of Artificial Sequence: Synthetic oligonucleotide
aauucggaaucaccauuug

SEQ ID NO: 662641 - RNA, 19 nt, Artificial Sequence
  Description of Artificial Sequence: Synthetic oligonucleotide
auaguuucaccccaauuaa

SEQ ID NO: 662642 - RNA, 19 nt, Artificial Sequence
  Description of Artificial Sequence: Synthetic oligonucleotide
gguuacuccaagaaugucg

SEQ ID NO: 662643 - RNA, 19 nt, Artificial Sequence
  Description of Artificial Sequence: Synthetic oligonucleotide
uguaauccauaguuucacc

SEQ ID NO: 662644 - RNA, 19 nt, Artificial Sequence
  Description of Artificial Sequence: Synthetic oligonucleotide
ucggaaucaccauuuguug

SEQ ID NO: 662645 - RNA, 19 nt, Artificial Sequence
  Description of Artificial Sequence: Synthetic oligonucleotide
uuguuaaccaugauuccau

SEQ ID NO: 662646 - RNA, 19 nt, Artificial Sequence
  Description of Artificial Sequence: Synthetic oligonucleotide
aaagucacgaggguucuca

SEQ ID NO: 662647 - RNA, 19 nt, Artificial Sequence
  Description of Artificial Sequence: Synthetic oligonucleotide
cauaguuucaccccaauua

SEQ ID NO: 662648 - RNA, 19 nt, Artificial Sequence
  Description of Artificial Sequence: Synthetic oligonucleotide
aacuugaauucggaaucac

SEQ ID NO: 662649 - RNA, 19 nt, Artificial Sequence
  Description of Artificial Sequence: Synthetic oligonucleotide
aucgccuuccugaagacac

SEQ ID NO: 662650 - RNA, 19 nt, Artificial Sequence
  Description of Artificial Sequence: Synthetic oligonucleotide
acuuaccauccucuagccc

SEQ ID NO: 662651 - RNA, 19 nt, Artificial Sequence
  Description of Artificial Sequence: Synthetic oligonucleotide
auggcugguuucaugacgc

SEQ ID NO: 662652 - RNA, 19 nt, Artificial Sequence
  Description of Artificial Sequence: Synthetic oligonucleotide
guuacuccaagaaugucgc

SEQ ID NO: 662653 - RNA, 19 nt, Artificial Sequence
  Description of Artificial Sequence: Synthetic oligonucleotide
ugagugauagaaagccaga

SEQ ID NO: 662654 - RNA, 19 nt, Artificial Sequence
  Description of Artificial Sequence: Synthetic oligonucleotide
cacaacuccaggaaggcuc

SEQ ID NO: 662655 - RNA, 19 nt, Artificial Sequence
  Description of Artificial Sequence: Synthetic oligonucleotide
uauguuuggcauccugcug

SEQ ID NO: 662656 - RNA, 19 nt, Artificial Sequence
  Description of Artificial Sequence: Synthetic oligonucleotide
ucuaacccaaggaggaagu

SEQ ID NO: 662657 - RNA, 19 nt, Artificial Sequence
  Description of Artificial Sequence: Synthetic oligonucleotide
aauuagcuggcuugauggu

SEQ ID NO: 662658 - RNA, 19 nt, Artificial Sequence
  Description of Artificial Sequence: Synthetic oligonucleotide
aaggaagcgcgccuacaag

SEQ ID NO: 662659 - RNA, 19 nt, Artificial Sequence
  Description of Artificial Sequence: Synthetic oligonucleotide
agaagaugugcucaaggau

SEQ ID NO: 662660 - RNA, 19 nt, Artificial Sequence
  Description of Artificial Sequence: Synthetic oligonucleotide
uuauacacucugcuacugu

SEQ ID NO: 662661 - RNA, 19 nt, Artificial Sequence
  Description of Artificial Sequence: Synthetic oligonucleotide
cucaacguggcaccaaaag

SEQ ID NO: 662662 - RNA, 19 nt, Artificial Sequence
  Description of Artificial Sequence: Synthetic oligonucleotide
ugaauucggaaucaccauu

SEQ ID NO: 662663 - RNA, 19 nt, Artificial Sequence
  Description of Artificial Sequence: Synthetic oligonucleotide
gguugauucuaacccaagg

SEQ ID NO: 662664 - RNA, 19 nt, Artificial Sequence
  Description of Artificial Sequence: Synthetic oligonucleotide
aaggcgugccuccgggccc

SEQ ID NO: 662665 - RNA, 19 nt, Artificial Sequence
  Description of Artificial Sequence: Synthetic oligonucleotide
augacgcucaacguggcac

SEQ ID NO: 662666 - RNA, 19 nt, Artificial Sequence
  Description of Artificial Sequence: Synthetic oligonucleotide
cacgugguaaguacuugcg

SEQ ID NO: 662667 - RNA, 19 nt, Artificial Sequence
  Description of Artificial Sequence: Synthetic oligonucleotide
uauccagcugguauaugga

SEQ ID NO: 662668 - RNA, 19 nt, Artificial Sequence
  Description of Artificial Sequence: Synthetic oligonucleotide
cucuaugggugcuaucacc

SEQ ID NO: 662669 - RNA, 19 nt, Artificial Sequence
  Description of Artificial Sequence: Synthetic oligonucleotide
agaaugggucuguuaagug

SEQ ID NO: 662670 - RNA, 19 nt, Artificial Sequence
  Description of Artificial Sequence: Synthetic oligonucleotide
aggauggaaauacuuguaa

SEQ ID NO: 662671 - RNA, 19 nt, Artificial Sequence
  Description of Artificial Sequence: Synthetic oligonucleotide
cauuucuaaccacagcauc

SEQ ID NO: 662672 - RNA, 19 nt, Artificial Sequence
  Description of Artificial Sequence: Synthetic oligonucleotide
cauuuguugggaccaguag

SEQ ID NO: 662673 - RNA, 19 nt, Artificial Sequence
  Description of Artificial Sequence: Synthetic oligonucleotide
ugucgugagccacuggaac

SEQ ID NO: 662674 - RNA, 19 nt, Artificial Sequence
  Description of Artificial Sequence: Synthetic oligonucleotide
gaccaguaggaauuagcug

SEQ ID NO: 662675 - RNA, 19 nt, Artificial Sequence
  Description of Artificial Sequence: Synthetic oligonucleotide
acgugguaaguacuugcgg

SEQ ID NO: 662676 - RNA, 19 nt, Artificial Sequence
  Description of Artificial Sequence: Synthetic oligonucleotide
gaagaugugcucaaggaua

SEQ ID NO: 662677 - RNA, 19 nt, Artificial Sequence
  Description of Artificial Sequence: Synthetic oligonucleotide
uagacacgugguaaguacu

SEQ ID NO: 662678 - RNA, 19 nt, Artificial Sequence
  Description of Artificial Sequence: Synthetic oligonucleotide
aaggugagagccugggaau

SEQ ID NO: 662679 - RNA, 19 nt, Artificial Sequence
  Description of Artificial Sequence: Synthetic oligonucleotide
aaggugcuucaagaggcac

SEQ ID NO: 662680 - RNA, 19 nt, Artificial Sequence
  Description of Artificial Sequence: Synthetic oligonucleotide
aaguacuugcggaacuaag

SEQ ID NO: 662681 - RNA, 19 nt, Artificial Sequence
  Description of Artificial Sequence: Synthetic oligonucleotide
guacuugcggaacuaagga

SEQ ID NO: 662682 - RNA, 19 nt, Artificial Sequence
  Description of Artificial Sequence: Synthetic oligonucleotide
agaaugguacuccgcaccu

SEQ ID NO: 662683 - RNA, 19 nt, Artificial Sequence
  Description of Artificial Sequence: Synthetic oligonucleotide
cuugaugguugauucuaac

SEQ ID NO: 662684 - RNA, 19 nt, Artificial Sequence
  Description of Artificial Sequence: Synthetic oligonucleotide
gagucugcugucagaaagg

SEQ ID NO: 662685 - RNA, 19 nt, Artificial Sequence
  Description of Artificial Sequence: Synthetic oligonucleotide
cuugcggaacuaaggaaug

SEQ ID NO: 662686 - RNA, 19 nt, Artificial Sequence
  Description of Artificial Sequence: Synthetic oligonucleotide
uugaauucggaaucaccau

SEQ ID NO: 662687 - RNA, 19 nt, Artificial Sequence
  Description of Artificial Sequence: Synthetic oligonucleotide
auucggaaucaccauuugu

SEQ ID NO: 662688 - RNA, 19 nt, Artificial Sequence
  Description of Artificial Sequence: Synthetic oligonucleotide
uaguuucaccccaauuaac

SEQ ID NO: 662689 - RNA, 19 nt, Artificial Sequence
  Description of Artificial Sequence: Synthetic oligonucleotide
uuacuccgaagucuuuucu

SEQ ID NO: 662690 - RNA, 19 nt, Artificial Sequence
  Description of Artificial Sequence: Synthetic oligonucleotide
ugcuaucaccugaagggcu

SEQ ID NO: 662691 - RNA, 19 nt, Artificial Sequence
  Description of Artificial Sequence: Synthetic oligonucleotide
cagcuagaacagaaguucc

SEQ ID NO: 662692 - RNA, 19 nt, Artificial Sequence
  Description of Artificial Sequence: Synthetic oligonucleotide
agauuuguagccaguguug

SEQ ID NO: 662693 - RNA, 19 nt, Artificial Sequence
  Description of Artificial Sequence: Synthetic oligonucleotide
agguauccaaggaagcgcg

SEQ ID NO: 662694 - RNA, 19 nt, Artificial Sequence
  Description of Artificial Sequence: Synthetic oligonucleotide
ugguugauucuaacccaag

SEQ ID NO: 662695 - RNA, 19 nt, Artificial Sequence
  Description of Artificial Sequence: Synthetic oligonucleotide
agguuggacgagcugaagu

SEQ ID NO: 662696 - RNA, 19 nt, Artificial Sequence
  Description of Artificial Sequence: Synthetic oligonucleotide
gaagcgcgccuacaaggcg

SEQ ID NO: 662697 - RNA, 19 nt, Artificial Sequence
  Description of Artificial Sequence: Synthetic oligonucleotide
cugaaugcuggcccauugg

SEQ ID NO: 662698 - RNA, 19 nt, Artificial Sequence
  Description of Artificial Sequence: Synthetic oligonucleotide
uccuggaaugucauuccac

SEQ ID NO: 662699 - RNA, 19 nt, Artificial Sequence
  Description of Artificial Sequence: Synthetic oligonucleotide
gguuggacgagcugaagug

SEQ ID NO: 662700 - RNA, 19 nt, Artificial Sequence
  Description of Artificial Sequence: Synthetic oligonucleotide
cugguauauggacagguca

SEQ ID NO: 662701 - RNA, 19 nt, Artificial Sequence
  Description of Artificial Sequence: Synthetic oligonucleotide
guuggacgagcugaagugg

SEQ ID NO: 662702 - RNA, 19 nt, Artificial Sequence
  Description of Artificial Sequence: Synthetic oligonucleotide
gcacuuaccauccucuagc

SEQ ID NO: 662703 - RNA, 19 nt, Artificial Sequence
  Description of Artificial Sequence: Synthetic oligonucleotide
cuguaauccauaguuucac

SEQ ID NO: 662704 - RNA, 19 nt, Artificial Sequence
  Description of Artificial Sequence: Synthetic oligonucleotide
aacaugugacaugagccaa

SEQ ID NO: 662705 - RNA, 19 nt, Artificial Sequence
  Description of Artificial Sequence: Synthetic oligonucleotide
agcucggcuaauuucccug

SEQ ID NO: 662706 - RNA, 19 nt, Artificial Sequence
  Description of Artificial Sequence: Synthetic oligonucleotide
gacucuggcauccaugugu

SEQ ID NO: 662707 - RNA, 19 nt, Artificial Sequence
  Description of Artificial Sequence: Synthetic oligonucleotide
gcuuagagaaaacaaagua

SEQ ID NO: 662708 - RNA, 19 nt, Artificial Sequence
  Description of Artificial Sequence: Synthetic oligonucleotide
aagaaugucgccacacuuu

SEQ ID NO: 662709 - RNA, 19 nt, Artificial Sequence
  Description of Artificial Sequence: Synthetic oligonucleotide
caaggaggaaguuuucaca

SEQ ID NO: 662710 - RNA, 19 nt, Artificial Sequence
  Description of Artificial Sequence: Synthetic oligonucleotide
aaggguagacaaaggugag

SEQ ID NO: 662711 - RNA, 19 nt, Artificial Sequence
  Description of Artificial Sequence: Synthetic oligonucleotide
ugguuuagguggaugucuc

SEQ ID NO: 662712 - RNA, 19 nt, Artificial Sequence
  Description of Artificial Sequence: Synthetic oligonucleotide
uacuuguaauauacauuuc

SEQ ID NO: 662713 - RNA, 19 nt, Artificial Sequence
  Description of Artificial Sequence: Synthetic oligonucleotide
cagguauccaaggaagcgc

SEQ ID NO: 662714 - RNA, 19 nt, Artificial Sequence
  Description of Artificial Sequence: Synthetic oligonucleotide
gccuucucagaagagaacg

SEQ ID NO: 662715 - RNA, 19 nt, Artificial Sequence
  Description of Artificial Sequence: Synthetic oligonucleotide
ugacgcucaacguggcacc

SEQ ID NO: 662716 - RNA, 19 nt, Artificial Sequence
  Description of Artificial Sequence: Synthetic oligonucleotide
aacccaaggaggaaguuuu

SEQ ID NO: 662717 - RNA, 19 nt, Artificial Sequence
  Description of Artificial Sequence: Synthetic oligonucleotide
cugacauagaauuccaggu

SEQ ID NO: 662718 - RNA, 19 nt, Artificial Sequence
  Description of Artificial Sequence: Synthetic oligonucleotide
agggugguaaagucacgag

SEQ ID NO: 662719 - RNA, 19 nt, Artificial Sequence
  Description of Artificial Sequence: Synthetic oligonucleotide
acuugcggaacuaaggaau

SEQ ID NO: 662720 - RNA, 19 nt, Artificial Sequence
  Description of Artificial Sequence: Synthetic oligonucleotide
gacgagccuucucagaaga

SEQ ID NO: 662721 - RNA, 19 nt, Artificial Sequence
  Description of Artificial Sequence: Synthetic oligonucleotide
cacuuaccauccucuagcc

SEQ ID NO: 662722 - RNA, 19 nt, Artificial Sequence
  Description of Artificial Sequence: Synthetic oligonucleotide
uuucuaaccacagcaucau

SEQ ID NO: 662723 - RNA, 19 nt, Artificial Sequence
  Description of Artificial Sequence: Synthetic oligonucleotide
ggaauuagcuggcuugaug

SEQ ID NO: 662724 - RNA, 19 nt, Artificial Sequence
  Description of Artificial Sequence: Synthetic oligonucleotide
agcuuagagaaaacaaagu

SEQ ID NO: 662725 - RNA, 19 nt, Artificial Sequence
  Description of Artificial Sequence: Synthetic oligonucleotide
gauauccccaccacuguca

SEQ ID NO: 662726 - RNA, 19 nt, Artificial Sequence
  Description of Artificial Sequence: Synthetic oligonucleotide
gaggaugaaugcaaagcca

SEQ ID NO: 662727 - RNA, 19 nt, Artificial Sequence
  Description of Artificial Sequence: Synthetic oligonucleotide
acaaggcgugccuccgggc

SEQ ID NO: 662728 - RNA, 19 nt, Artificial Sequence
  Description of Artificial Sequence: Synthetic oligonucleotide
ucggcuaauuucccuguuc

SEQ ID NO: 662729 - RNA, 19 nt, Artificial Sequence
  Description of Artificial Sequence: Synthetic oligonucleotide
cuuauacacucugcuacug

SEQ ID NO: 662730 - RNA, 19 nt, Artificial Sequence
  Description of Artificial Sequence: Synthetic oligonucleotide
aacguggcaccaaaagggu

SEQ ID NO: 662731 - RNA, 19 nt, Artificial Sequence
  Description of Artificial Sequence: Synthetic oligonucleotide
aauuaacuucucagaugug

SEQ ID NO: 662732 - RNA, 19 nt, Artificial Sequence
  Description of Artificial Sequence: Synthetic oligonucleotide
guauccaaggaagcgcgcc

SEQ ID NO: 662733 - RNA, 19 nt, Artificial Sequence
  Description of Artificial Sequence: Synthetic oligonucleotide
acuaggagggaagaccgca

SEQ ID NO: 662734 - RNA, 19 nt, Artificial Sequence
  Description of Artificial Sequence: Synthetic oligonucleotide
gagacaauaaacacagaau

SEQ ID NO: 662735 - RNA, 19 nt, Artificial Sequence
  Description of Artificial Sequence: Synthetic oligonucleotide
caacucacggaaacuagga

SEQ ID NO: 662736 - RNA, 19 nt, Artificial Sequence
  Description of Artificial Sequence: Synthetic oligonucleotide
agacgagccuucucagaag

SEQ ID NO: 662737 - RNA, 19 nt, Artificial Sequence
  Description of Artificial Sequence: Synthetic oligonucleotide
gcuacuguuugcugggacc

SEQ ID NO: 662738 - RNA, 19 nt, Artificial Sequence
  Description of Artificial Sequence: Synthetic oligonucleotide
ggaugagacaauaaacaca

SEQ ID NO: 662739 - RNA, 19 nt, Artificial Sequence
  Description of Artificial Sequence: Synthetic oligonucleotide
caaggcgugccuccgggcc

SEQ ID NO: 662740 - RNA, 19 nt, Artificial Sequence
  Description of Artificial Sequence: Synthetic oligonucleotide
uguuaaccaugauuccaua

SEQ ID NO: 662741 - RNA, 19 nt, Artificial Sequence
  Description of Artificial Sequence: Synthetic oligonucleotide
gagaacguuucaucuaagu

SEQ ID NO: 662742 - RNA, 19 nt, Artificial Sequence
  Description of Artificial Sequence: Synthetic oligonucleotide
cacaaggauauccccacca

SEQ ID NO: 662743 - RNA, 19 nt, Artificial Sequence
  Description of Artificial Sequence: Synthetic oligonucleotide
gaaagccagaaugggucug

SEQ ID NO: 662744 - RNA, 19 nt, Artificial Sequence
  Description of Artificial Sequence: Synthetic oligonucleotide
uuacuccaagaaugucgcc

SEQ ID NO: 662745 - RNA, 19 nt, Artificial Sequence
  Description of Artificial Sequence: Synthetic oligonucleotide
ggauauguuuggcauccug

SEQ ID NO: 662746 - RNA, 19 nt, Artificial Sequence
  Description of Artificial Sequence: Synthetic oligonucleotide
acggaaacuaggagggaag

SEQ ID NO: 662747 - RNA, 19 nt, Artificial Sequence
  Description of Artificial Sequence: Synthetic oligonucleotide
gguggcaacucacggaaac

SEQ ID NO: 662748 - RNA, 19 nt, Artificial Sequence
  Description of Artificial Sequence: Synthetic oligonucleotide
gcaacucacggaaacuagg

SEQ ID NO: 662749 - RNA, 19 nt, Artificial Sequence
  Description of Artificial Sequence: Synthetic oligonucleotide
uaacccaaggaggaaguuu

SEQ ID NO: 662750 - RNA, 19 nt, Artificial Sequence
  Description of Artificial Sequence: Synthetic oligonucleotide
cacgaggguucucaucgcc

SEQ ID NO: 662751 - RNA, 19 nt, Artificial Sequence
  Description of Artificial Sequence: Synthetic oligonucleotide
gcgaggaugaaugcaaagc

SEQ ID NO: 662752 - RNA, 19 nt, Artificial Sequence
  Description of Artificial Sequence: Synthetic oligonucleotide
ccucuagcccacuaagugc

SEQ ID NO: 662753 - RNA, 19 nt, Artificial Sequence
  Description of Artificial Sequence: Synthetic oligonucleotide
cuaugggugcuaucaccug

SEQ ID NO: 662754 - RNA, 19 nt, Artificial Sequence
  Description of Artificial Sequence: Synthetic oligonucleotide
ugggugcuaucaccugaag

SEQ ID NO: 662755 - RNA, 19 nt, Artificial Sequence
  Description of Artificial Sequence: Synthetic oligonucleotide
uccaaggaagcgcgccuac

SEQ ID NO: 662756 - RNA, 19 nt, Artificial Sequence
  Description of Artificial Sequence: Synthetic oligonucleotide
acauuucuaaccacagcau

SEQ ID NO: 662757 - RNA, 19 nt, Artificial Sequence
  Description of Artificial Sequence: Synthetic oligonucleotide
gugcuaucaccugaagggc

SEQ ID NO: 662758 - RNA, 19 nt, Artificial Sequence
  Description of Artificial Sequence: Synthetic oligonucleotide
uggcaacucacggaaacua

SEQ ID NO: 662759 - RNA, 19 nt, Artificial Sequence
  Description of Artificial Sequence: Synthetic oligonucleotide
gguuaccugaggccagagg

SEQ ID NO: 662760 - RNA, 19 nt, Artificial Sequence
  Description of Artificial Sequence: Synthetic oligonucleotide
uggcauccauguguacugg

SEQ ID NO: 662761 - RNA, 19 nt, Artificial Sequence
  Description of Artificial Sequence: Synthetic oligonucleotide
uggcuugaugguugauucu

SEQ ID NO: 662762 - RNA, 19 nt, Artificial Sequence
  Description of Artificial Sequence: Synthetic oligonucleotide
ucaucgccuuccugaagac

SEQ ID NO: 662763 - RNA, 19 nt, Artificial Sequence
  Description of Artificial Sequence: Synthetic oligonucleotide
aagcgcgccuacaaggcgu

SEQ ID NO: 662764 - RNA, 19 nt, Artificial Sequence
  Description of Artificial Sequence: Synthetic oligonucleotide
gacccuccagcuagaacag

SEQ ID NO: 662765 - RNA, 19 nt, Artificial Sequence
  Description of Artificial Sequence: Synthetic oligonucleotide
gaaucaccauuuguuggga

SEQ ID NO: 662766 - RNA, 19 nt, Artificial Sequence
  Description of Artificial Sequence: Synthetic oligonucleotide
auauccccaccacugucaa

SEQ ID NO: 662767 - RNA, 19 nt, Artificial Sequence
  Description of Artificial Sequence: Synthetic oligonucleotide
agcuagaacagaaguucca

SEQ ID NO: 662768 - RNA, 19 nt, Artificial Sequence
  Description of Artificial Sequence: Synthetic oligonucleotide
cuacaaggcgugccuccgg

SEQ ID NO: 662769 - RNA, 19 nt, Artificial Sequence
  Description of Artificial Sequence: Synthetic oligonucleotide
ugcggaacuaaggaauguu

SEQ ID NO: 662770 - RNA, 19 nt, Artificial Sequence
  Description of Artificial Sequence: Synthetic oligonucleotide
ucacgaggguucucaucgc

SEQ ID NO: 662771 - RNA, 19 nt, Artificial Sequence
  Description of Artificial Sequence: Synthetic oligonucleotide
cggaaucaccauuuguugg

SEQ ID NO: 662772 - RNA, 19 nt, Artificial Sequence
  Description of Artificial Sequence: Synthetic oligonucleotide
ugagcaagacgagccuucu

SEQ ID NO: 662773 - RNA, 19 nt, Artificial Sequence
  Description of Artificial Sequence: Synthetic oligonucleotide
accuugguucuuugaguga

SEQ ID NO: 662774 - RNA, 19 nt, Artificial Sequence
  Description of Artificial Sequence: Synthetic oligonucleotide
ccagguauccaaggaagcg

SEQ ID NO: 662775 - RNA, 19 nt, Artificial Sequence
  Description of Artificial Sequence: Synthetic oligonucleotide
cucuagcccacuaagugcu

SEQ ID NO: 662776 - RNA, 19 nt, Artificial Sequence
  Description of Artificial Sequence: Synthetic oligonucleotide
guuaagugggaagcagaca

SEQ ID NO: 662777 - RNA, 19 nt, Artificial Sequence
  Description of Artificial Sequence: Synthetic oligonucleotide
gcaagacgagccuucucag

SEQ ID NO: 662778 - RNA, 19 nt, Artificial Sequence
  Description of Artificial Sequence: Synthetic oligonucleotide
cccaccuugguucuuugag

SEQ ID NO: 662779 - RNA, 19 nt, Artificial Sequence
  Description of Artificial Sequence: Synthetic oligonucleotide
uccugucgugagccacugg

SEQ ID NO: 662780 - RNA, 19 nt, Artificial Sequence
  Description of Artificial Sequence: Synthetic oligonucleotide
agagaacguuucaucuaag

SEQ ID NO: 662781 - RNA, 19 nt, Artificial Sequence
  Description of Artificial Sequence: Synthetic oligonucleotide
uugcggaacuaaggaaugu

SEQ ID NO: 662782 - RNA, 19 nt, Artificial Sequence
  Description of Artificial Sequence: Synthetic oligonucleotide
uugaagggaucaucauauu

SEQ ID NO: 662783 - RNA, 19 nt, Artificial Sequence
  Description of Artificial Sequence: Synthetic oligonucleotide
gaauucggaaucaccauuu

SEQ ID NO: 662784 - RNA, 19 nt, Artificial Sequence
  Description of Artificial Sequence: Synthetic oligonucleotide
gggaccaguaggaauuagc

SEQ ID NO: 662785 - RNA, 19 nt, Artificial Sequence
  Description of Artificial Sequence: Synthetic oligonucleotide
augguugauucuaacccaa

SEQ ID NO: 662786 - RNA, 19 nt, Artificial Sequence
  Description of Artificial Sequence: Synthetic oligonucleotide
ucgccuuccugaagacaca

SEQ ID NO: 662787 - RNA, 19 nt, Artificial Sequence
  Description of Artificial Sequence: Synthetic oligonucleotide
gauuccaggcacagccuuc

SEQ ID NO: 662788 - RNA, 19 nt, Artificial Sequence
  Description of Artificial Sequence: Synthetic oligonucleotide
ccuugguccagcuguaauc

SEQ ID NO: 662789 - RNA, 19 nt, Artificial Sequence
  Description of Artificial Sequence: Synthetic oligonucleotide
ggcaacucacggaaacuag

SEQ ID NO: 662790 - RNA, 19 nt, Artificial Sequence
  Description of Artificial Sequence: Synthetic oligonucleotide
caaggaagcgcgccuacaa

SEQ ID NO: 662791 - RNA, 19 nt, Artificial Sequence
  Description of Artificial Sequence: Synthetic oligonucleotide
ugguuacuccaagaauguc

SEQ ID NO: 662792 - RNA, 19 nt, Artificial Sequence
  Description of Artificial Sequence: Synthetic oligonucleotide
guuuagguggaugucuccu

SEQ ID NO: 662793 - RNA, 19 nt, Artificial Sequence
  Description of Artificial Sequence: Synthetic oligonucleotide
uacuccgcaccuccuucuc

SEQ ID NO: 662794 - RNA, 19 nt, Artificial Sequence
  Description of Artificial Sequence: Synthetic oligonucleotide
ggaaacuaggagggaagac

SEQ ID NO: 662795 - RNA, 19 nt, Artificial Sequence
  Description of Artificial Sequence: Synthetic oligonucleotide
uggacgagcugaagugguu

SEQ ID NO: 662796 - RNA, 19 nt, Artificial Sequence
  Description of Artificial Sequence: Synthetic oligonucleotide
ugggucuguuaagugggaa

SEQ ID NO: 662797 - RNA, 19 nt, Artificial Sequence
  Description of Artificial Sequence: Synthetic oligonucleotide
aggugcuucaagaggcaca

SEQ ID NO: 662798 - RNA, 19 nt, Artificial Sequence
  Description of Artificial Sequence: Synthetic oligonucleotide
guccuggaaugucauucca

SEQ ID NO: 662799 - RNA, 19 nt, Artificial Sequence
  Description of Artificial Sequence: Synthetic oligonucleotide
guaaguacuugcggaacua

SEQ ID NO: 662800 - RNA, 19 nt, Artificial Sequence
  Description of Artificial Sequence: Synthetic oligonucleotide
ggauauccccaccacuguc

SEQ ID NO: 662801 - RNA, 19 nt, Artificial Sequence
  Description of Artificial Sequence: Synthetic oligonucleotide
gguaaguacuugcggaacu

SEQ ID NO: 662802 - RNA, 19 nt, Artificial Sequence
  Description of Artificial Sequence: Synthetic oligonucleotide
acacucggagcuguucuga

SEQ ID NO: 662803 - RNA, 19 nt, Artificial Sequence
  Description of Artificial Sequence: Synthetic oligonucleotide
ggauggaaauacuuguaau

SEQ ID NO: 662804 - RNA, 19 nt, Artificial Sequence
  Description of Artificial Sequence: Synthetic oligonucleotide
cugcaaagauuuguagcca

SEQ ID NO: 662805 - RNA, 19 nt, Artificial Sequence
  Description of Artificial Sequence: Synthetic oligonucleotide
ugucuccugucgugagcca

SEQ ID NO: 662806 - RNA, 19 nt, Artificial Sequence
  Description of Artificial Sequence: Synthetic oligonucleotide
agaacagcuauggcugguu

SEQ ID NO: 662807 - RNA, 19 nt, Artificial Sequence
  Description of Artificial Sequence: Synthetic oligonucleotide
aaacagcaccccagacucu

SEQ ID NO: 662808 - RNA, 19 nt, Artificial Sequence
  Description of Artificial Sequence: Synthetic oligonucleotide
cgugguaaguacuugcgga

SEQ ID NO: 662809 - RNA, 19 nt, Artificial Sequence
  Description of Artificial Sequence: Synthetic oligonucleotide
gcuugcuuauacacucugc

SEQ ID NO: 662810 - RNA, 19 nt, Artificial Sequence
  Description of Artificial Sequence: Synthetic oligonucleotide
caccccaauuaacuucuca

SEQ ID NO: 662811 - RNA, 19 nt, Artificial Sequence
  Description of Artificial Sequence: Synthetic oligonucleotide
ccccacaaguccuggaaug

SEQ ID NO: 662812 - RNA, 19 nt, Artificial Sequence
  Description of Artificial Sequence: Synthetic oligonucleotide
ccugucgugagccacugga

SEQ ID NO: 662813 - RNA, 19 nt, Artificial Sequence
  Description of Artificial Sequence: Synthetic oligonucleotide
ggaccaguaggaauuagcu

SEQ ID NO: 662814 - RNA, 19 nt, Artificial Sequence
  Description of Artificial Sequence: Synthetic oligonucleotide
guaccauuguguagucaga

SEQ ID NO: 662815 - RNA, 19 nt, Artificial Sequence
  Description of Artificial Sequence: Synthetic oligonucleotide
agcuuccuuaggauggaaa

SEQ ID NO: 662816 - RNA, 19 nt, Artificial Sequence
  Description of Artificial Sequence: Synthetic oligonucleotide
gccuacaaggcgugccucc

SEQ ID NO: 662817 - RNA, 19 nt, Artificial Sequence
  Description of Artificial Sequence: Synthetic oligonucleotide
agccagaaugggucuguua

SEQ ID NO: 662818 - RNA, 19 nt, Artificial Sequence
  Description of Artificial Sequence: Synthetic oligonucleotide
cccacuaagugcuugcuua

SEQ ID NO: 662819 - RNA, 19 nt, Artificial Sequence
  Description of Artificial Sequence: Synthetic oligonucleotide
cugguuuagguggaugucu

SEQ ID NO: 662820 - RNA, 19 nt, Artificial Sequence
  Description of Artificial Sequence: Synthetic oligonucleotide
ggugagagccugggaauug

SEQ ID NO: 662821 - RNA, 19 nt, Artificial Sequence
  Description of Artificial Sequence: Synthetic oligonucleotide
ucaccccaauuaacuucuc

SEQ ID NO: 662822 - RNA, 19 nt, Artificial Sequence
  Description of Artificial Sequence: Synthetic oligonucleotide
gucuccugucgugagccac

SEQ ID NO: 662823 - RNA, 19 nt, Artificial Sequence
  Description of Artificial Sequence: Synthetic oligonucleotide
cuagaacagaaguuccauu

SEQ ID NO: 662824 - RNA, 19 nt, Artificial Sequence
  Description of Artificial Sequence: Synthetic oligonucleotide
uugggaccaguaggaauua

SEQ ID NO: 662825 - RNA, 19 nt, Artificial Sequence
  Description of Artificial Sequence: Synthetic oligonucleotide
augggugcuaucaccugaa

SEQ ID NO: 662826 - RNA, 19 nt, Artificial Sequence
  Description of Artificial Sequence: Synthetic oligonucleotide
gguauauggacaggucaaa

SEQ ID NO: 662827 - RNA, 19 nt, Artificial Sequence
  Description of Artificial Sequence: Synthetic oligonucleotide
cuuuggaaguuuacugguu

SEQ ID NO: 662828 - RNA, 19 nt, Artificial Sequence
  Description of Artificial Sequence: Synthetic oligonucleotide
cugucgugagccacuggaa

SEQ ID NO: 662829 - RNA, 19 nt, Artificial Sequence
  Description of Artificial Sequence: Synthetic oligonucleotide
ugguuucaugacgcucaac

SEQ ID NO: 662830 - RNA, 19 nt, Artificial Sequence
  Description of Artificial Sequence: Synthetic oligonucleotide
ccuacaaggcgugccuccg

SEQ ID NO: 662831 - RNA, 19 nt, Artificial Sequence
  Description of Artificial Sequence: Synthetic oligonucleotide
cucuggcauccauguguac

SEQ ID NO: 662832 - RNA, 19 nt, Artificial Sequence
  Description of Artificial Sequence: Synthetic oligonucleotide
caugacgcucaacguggca

SEQ ID NO: 662833 - RNA, 19 nt, Artificial Sequence
  Description of Artificial Sequence: Synthetic oligonucleotide
ggacgagcugaagugguuc

SEQ ID NO: 662834 - RNA, 19 nt, Artificial Sequence
  Description of Artificial Sequence: Synthetic oligonucleotide
ggcuugaugguugauucua

SEQ ID NO: 662835 - RNA, 19 nt, Artificial Sequence
  Description of Artificial Sequence: Synthetic oligonucleotide
cauguguacugggucaacu

SEQ ID NO: 662836 - RNA, 19 nt, Artificial Sequence
  Description of Artificial Sequence: Synthetic oligonucleotide
gcugguauauggacagguc

SEQ ID NO: 662837 - RNA, 19 nt, Artificial Sequence
  Description of Artificial Sequence: Synthetic oligonucleotide
gguauccaaggaagcgcgc

SEQ ID NO: 662838 - RNA, 19 nt, Artificial Sequence
  Description of Artificial Sequence: Synthetic oligonucleotide
agggaucaucauauuucau

SEQ ID NO: 662839 - RNA, 19 nt, Artificial Sequence
  Description of Artificial Sequence: Synthetic oligonucleotide
cauugcucuccucaucaau

SEQ ID NO: 662840 - RNA, 19 nt, Artificial Sequence
  Description of Artificial Sequence: Synthetic oligonucleotide
cccaauuaacuucucagau

SEQ ID NO: 662841 - RNA, 19 nt, Artificial Sequence
  Description of Artificial Sequence: Synthetic oligonucleotide
cagcgaggaugaaugcaaa

SEQ ID NO: 662842 - RNA, 19 nt, Artificial Sequence
  Description of Artificial Sequence: Synthetic oligonucleotide
ccuguagacagaacagcua

SEQ ID NO: 662843 - RNA, 19 nt, Artificial Sequence
  Description of Artificial Sequence: Synthetic oligonucleotide
cugguuucaugacgcucaa

SEQ ID NO: 662844 - RNA, 19 nt, Artificial Sequence
  Description of Artificial Sequence: Synthetic oligonucleotide
caucgccuuccugaagaca

SEQ ID NO: 662845 - RNA, 19 nt, Artificial Sequence
  Description of Artificial Sequence: Synthetic oligonucleotide
agcgcgccuacaaggcgug

SEQ ID NO: 662846 - RNA, 19 nt, Artificial Sequence
  Description of Artificial Sequence: Synthetic oligonucleotide
gggacccuccagcuagaac

SEQ ID NO: 662847 - RNA, 19 nt, Artificial Sequence
  Description of Artificial Sequence: Synthetic oligonucleotide
ggagcuguucugaaagggu

SEQ ID NO: 662848 - RNA, 19 nt, Artificial Sequence
  Description of Artificial Sequence: Synthetic oligonucleotide
ccaauuacuccgaagucuu

SEQ ID NO: 662849 - RNA, 19 nt, Artificial Sequence
  Description of Artificial Sequence: Synthetic oligonucleotide
augguacuccgcaccuccu

SEQ ID NO: 662850 - RNA, 19 nt, Artificial Sequence
  Description of Artificial Sequence: Synthetic oligonucleotide
cggcuaauuucccuguuca

SEQ ID NO: 662851 - RNA, 19 nt, Artificial Sequence
  Description of Artificial Sequence: Synthetic oligonucleotide
guggcaacucacggaaacu

SEQ ID NO: 662852 - RNA, 19 nt, Artificial Sequence
  Description of Artificial Sequence: Synthetic oligonucleotide
ccacugucaagguacuucu

SEQ ID NO: 662853 - RNA, 19 nt, Artificial Sequence
  Description of Artificial Sequence: Synthetic oligonucleotide
acguggcaccaaaagggua

SEQ ID NO: 662854 - RNA, 19 nt, Artificial Sequence
  Description of Artificial Sequence: Synthetic oligonucleotide
agccuucccugaagcucgg

SEQ ID NO: 662855 - RNA, 19 nt, Artificial Sequence
  Description of Artificial Sequence: Synthetic oligonucleotide
ccgaagucuuuucugcaaa

SEQ ID NO: 662856 - RNA, 19 nt, Artificial Sequence
  Description of Artificial Sequence: Synthetic oligonucleotide
cacuaagugcuugcuuaua

SEQ ID NO: 662857 - RNA, 19 nt, Artificial Sequence
  Description of Artificial Sequence: Synthetic oligonucleotide
ccuguucaacacuccaucu

SEQ ID NO: 662858 - RNA, 19 nt, Artificial Sequence
  Description of Artificial Sequence: Synthetic oligonucleotide
ggaagaccgcaggcugaag

SEQ ID NO: 662859 - RNA, 19 nt, Artificial Sequence
  Description of Artificial Sequence: Synthetic oligonucleotide
caggugguauccagcuggu

SEQ ID NO: 662860 - RNA, 19 nt, Artificial Sequence
  Description of Artificial Sequence: Synthetic oligonucleotide
caauuacuccgaagucuuu

SEQ ID NO: 662861 - RNA, 19 nt, Artificial Sequence
  Description of Artificial Sequence: Synthetic oligonucleotide
agaggccgccagguaucca

SEQ ID NO: 662862 - RNA, 19 nt, Artificial Sequence
  Description of Artificial Sequence: Synthetic oligonucleotide
gggaagaccgcaggcugaa

SEQ ID NO: 662863 - RNA, 19 nt, Artificial Sequence
  Description of Artificial Sequence: Synthetic oligonucleotide
acgcucaacguggcaccaa

SEQ ID NO: 662864 - RNA, 19 nt, Artificial Sequence
  Description of Artificial Sequence: Synthetic oligonucleotide
aggugguauccagcuggua

SEQ ID NO: 662865 - RNA, 19 nt, Artificial Sequence
  Description of Artificial Sequence: Synthetic oligonucleotide
ccgccagguauccaaggaa

SEQ ID NO: 662866 - RNA, 19 nt, Artificial Sequence
  Description of Artificial Sequence: Synthetic oligonucleotide
acguuucaucuaagucaaa

SEQ ID NO: 662867 - RNA, 19 nt, Artificial Sequence
  Description of Artificial Sequence: Synthetic oligonucleotide
cgcgccuacaaggcgugcc

SEQ ID NO: 662868 - RNA, 19 nt, Artificial Sequence
  Description of Artificial Sequence: Synthetic oligonucleotide
cagucucuaugggugcuau

SEQ ID NO: 662869 - RNA, 19 nt, Artificial Sequence
  Description of Artificial Sequence: Synthetic oligonucleotide
gcgccuacaaggcgugccu

SEQ ID NO: 662870 - RNA, 19 nt, Artificial Sequence
  Description of Artificial Sequence: Synthetic oligonucleotide
gcucaacguggcaccaaaa

SEQ ID NO: 662871 - RNA, 19 nt, Artificial Sequence
  Description of Artificial Sequence: Synthetic oligonucleotide
cucggcuaauuucccuguu

SEQ ID NO: 662872 - RNA, 19 nt, Artificial Sequence
  Description of Artificial Sequence: Synthetic oligonucleotide
ccacuaagugcuugcuuau

SEQ ID NO: 662873 - RNA, 19 nt, Artificial Sequence
  Description of Artificial Sequence: Synthetic oligonucleotide
cgcucaacguggcaccaaa

SEQ ID NO: 662874 - RNA, 19 nt, Artificial Sequence
  Description of Artificial Sequence: Synthetic oligonucleotide
gcccacuaagugcuugcuu

SEQ ID NO: 662875 - RNA, 19 nt, Artificial Sequence
  Description of Artificial Sequence: Synthetic oligonucleotide
ccuggccuagcucuauuuu

SEQ ID NO: 662876 - RNA, 19 nt, Artificial Sequence
  Description of Artificial Sequence: Synthetic oligonucleotide
ggguggcaacucacggaaa

SEQ ID NO: 662877 - RNA, 19 nt, Artificial Sequence
  Description of Artificial Sequence: Synthetic oligonucleotide
cgccuacaaggcgugccuc

SEQ ID NO: 662878 - RNA, 19 nt, Artificial Sequence
  Description of Artificial Sequence: Synthetic oligonucleotide
gcgcgccuacaaggcgugc

SEQ ID NO: 662879 - RNA, 19 nt, Artificial Sequence
  Description of Artificial Sequence: Synthetic oligonucleotide
aaagauguaauauucaagg

SEQ ID NO: 662880 - RNA, 19 nt, Artificial Sequence
  Description of Artificial Sequence: Synthetic oligonucleotide
aauauguccgccuuuaguc

SEQ ID NO: 662881 - RNA, 19 nt, Artificial Sequence
  Description of Artificial Sequence: Synthetic oligonucleotide
ucgaauuuuaaucugaacc

SEQ ID NO: 662882 - RNA, 19 nt, Artificial Sequence
  Description of Artificial Sequence: Synthetic oligonucleotide
uuguggauaaaucagaaag

SEQ ID NO: 662883 - RNA, 19 nt, Artificial Sequence
  Description of Artificial Sequence: Synthetic oligonucleotide
aucaauaacaucuaucuuc

SEQ ID NO: 662884 - RNA, 19 nt, Artificial Sequence
  Description of Artificial Sequence: Synthetic oligonucleotide
aaaguuagcuuccauggac

SEQ ID NO: 662885 - RNA, 19 nt, Artificial Sequence
  Description of Artificial Sequence: Synthetic oligonucleotide
agaacuaccauccaaacug

SEQ ID NO: 662886 - RNA, 19 nt, Artificial Sequence
  Description of Artificial Sequence: Synthetic oligonucleotide
gaugagaacaucaaggacg

SEQ ID NO: 662887 - RNA, 19 nt, Artificial Sequence
  Description of Artificial Sequence: Synthetic oligonucleotide
ucauuggacaccaagaacc

SEQ ID NO: 662888 - RNA, 19 nt, Artificial Sequence
  Description of Artificial Sequence: Synthetic oligonucleotide
uuugaacuaaacuuguagg

SEQ ID NO: 662889 - RNA, 19 nt, Artificial Sequence
  Description of Artificial Sequence: Synthetic oligonucleotide
aacacgguuuacuaaagac

SEQ ID NO: 662890 - RNA, 19 nt, Artificial Sequence
  Description of Artificial Sequence: Synthetic oligonucleotide
aaaaccgaugauuuaauug

SEQ ID NO: 662891 - RNA, 19 nt, Artificial Sequence
  Description of Artificial Sequence: Synthetic oligonucleotide
uuuaaucugaaccgcaggg

SEQ ID NO: 662892 - RNA, 19 nt, Artificial Sequence
  Description of Artificial Sequence: Synthetic oligonucleotide
ugucguacaagauauacag

SEQ ID NO: 662893 - RNA, 19 nt, Artificial Sequence
  Description of Artificial Sequence: Synthetic oligonucleotide
augaguacugcuuucaugg

SEQ ID NO: 662894 - RNA, 19 nt, Artificial Sequence
  Description of Artificial Sequence: Synthetic oligonucleotide
aaaccgaugauuuaauugu

SEQ ID NO: 662895 - RNA, 19 nt, Artificial Sequence
  Description of Artificial Sequence: Synthetic oligonucleotide
ucaaggacgucauaaaagg

SEQ ID NO: 662896 - RNA, 19 nt, Artificial Sequence
  Description of Artificial Sequence: Synthetic oligonucleotide
auguguacaagucacugcc

SEQ ID NO: 662897 - RNA, 19 nt, Artificial Sequence
  Description of Artificial Sequence: Synthetic oligonucleotide
gacuagauauccaagaagg

SEQ ID NO: 662898 - RNA, 19 nt, Artificial Sequence
  Description of Artificial Sequence: Synthetic oligonucleotide
agaucaauaacaucuaucu

SEQ ID NO: 662899 - RNA, 19 nt, Artificial Sequence
  Description of Artificial Sequence: Synthetic oligonucleotide
auuaaggacacucgaagac

SEQ ID NO: 662900 - RNA, 19 nt, Artificial Sequence
  Description of Artificial Sequence: Synthetic oligonucleotide
ucugauuuggcacagcuga

SEQ ID NO: 662901 - RNA, 19 nt, Artificial Sequence
  Description of Artificial Sequence: Synthetic oligonucleotide
uuaauugcacaucaggaug

SEQ ID NO: 662902 - RNA, 19 nt, Artificial Sequence
  Description of Artificial Sequence: Synthetic oligonucleotide
aagauguaauauucaaggg

SEQ ID NO: 662903 - RNA, 19 nt, Artificial Sequence
  Description of Artificial Sequence: Synthetic oligonucleotide
uucaauaaaugcaacgccc

SEQ ID NO: 662904 - RNA, 19 nt, Artificial Sequence
  Description of Artificial Sequence: Synthetic oligonucleotide
uaguaucagacuuucauag

SEQ ID NO: 662905 - RNA, 19 nt, Artificial Sequence
  Description of Artificial Sequence: Synthetic oligonucleotide
ucuguaauaacauggcuga

SEQ ID NO: 662906 - RNA, 19 nt, Artificial Sequence
  Description of Artificial Sequence: Synthetic oligonucleotide
aaggacaacgaguggauuc

SEQ ID NO: 662907 - RNA, 19 nt, Artificial Sequence
  Description of Artificial Sequence: Synthetic oligonucleotide
aaacuauugggauaguuau

SEQ ID NO: 662908 - RNA, 19 nt, Artificial Sequence
  Description of Artificial Sequence: Synthetic oligonucleotide
auuaaauugcaaaaguuag

SEQ ID NO: 662909 - RNA, 19 nt, Artificial Sequence
  Description of Artificial Sequence: Synthetic oligonucleotide
aagacaaccuaacuaaaga

SEQ ID NO: 662910 - RNA, 19 nt, Artificial Sequence
  Description of Artificial Sequence: Synthetic oligonucleotide
uaauucucgaauuuuaauc

SEQ ID NO: 662911 - RNA, 19 nt, Artificial Sequence
  Description of Artificial Sequence: Synthetic oligonucleotide
uuucagaugcccaagaaau

SEQ ID NO: 662912 - RNA, 19 nt, Artificial Sequence
  Description of Artificial Sequence: Synthetic oligonucleotide
ucguacaagauauacagac

SEQ ID NO: 662913 - RNA, 19 nt, Artificial Sequence
  Description of Artificial Sequence: Synthetic oligonucleotide
uugaacuaaacuuguaggc

SEQ ID NO: 662914 - RNA, 19 nt, Artificial Sequence
  Description of Artificial Sequence: Synthetic oligonucleotide
uauacacaaacuauuggga

SEQ ID NO: 662915 - RNA, 19 nt, Artificial Sequence
  Description of Artificial Sequence: Synthetic oligonucleotide
ucuauuguuagaucaauaa

SEQ ID NO: 662916 - RNA, 19 nt, Artificial Sequence
  Description of Artificial Sequence: Synthetic oligonucleotide
uuuuaaucugaaccgcagg

SEQ ID NO: 662917 - RNA, 19 nt, Artificial Sequence
  Description of Artificial Sequence: Synthetic oligonucleotide
acgaaugauucccagaauc

SEQ ID NO: 662918 - RNA, 19 nt, Artificial Sequence
  Description of Artificial Sequence: Synthetic oligonucleotide
aguacuggggaucaacugg

SEQ ID NO: 662919 - RNA, 19 nt, Artificial Sequence
  Description of Artificial Sequence: Synthetic oligonucleotide
gaagaaaggacaacgagug

SEQ ID NO: 662920 - RNA, 19 nt, Artificial Sequence
  Description of Artificial Sequence: Synthetic oligonucleotide
acagucauuaagaauuucc

SEQ ID NO: 662921 - RNA, 19 nt, Artificial Sequence
  Description of Artificial Sequence: Synthetic oligonucleotide
ucaauaaaugcaacgcccc

SEQ ID NO: 662922 - RNA, 19 nt, Artificial Sequence
  Description of Artificial Sequence: Synthetic oligonucleotide
agcaggaucaacugaaguc

SEQ ID NO: 662923 - RNA, 19 nt, Artificial Sequence
  Description of Artificial Sequence: Synthetic oligonucleotide
ucaacugaagucacacugg

SEQ ID NO: 662924 - RNA, 19 nt, Artificial Sequence
  Description of Artificial Sequence: Synthetic oligonucleotide
uggugaagaacuaccaucc

SEQ ID NO: 662925 - RNA, 19 nt, Artificial Sequence
  Description of Artificial Sequence: Synthetic oligonucleotide
uguauaaucucuccugcca

SEQ ID NO: 662926 - RNA, 19 nt, Artificial Sequence
  Description of Artificial Sequence: Synthetic oligonucleotide
auagaaaucugauuuggca

SEQ ID NO: 662927 - RNA, 19 nt, Artificial Sequence
  Description of Artificial Sequence: Synthetic oligonucleotide
uuuuguacagggcuggcug

SEQ ID NO: 662928 - RNA, 19 nt, Artificial Sequence
  Description of Artificial Sequence: Synthetic oligonucleotide
auauaucugaugcucagug

SEQ ID NO: 662929 - RNA, 19 nt, Artificial Sequence
  Description of Artificial Sequence: Synthetic oligonucleotide
cauuugaagauaaagggca

SEQ ID NO: 662930 - RNA, 19 nt, Artificial Sequence
  Description of Artificial Sequence: Synthetic oligonucleotide
ugaaauauaucugaugcuc

SEQ ID NO: 662931 - RNA, 19 nt, Artificial Sequence
  Description of Artificial Sequence: Synthetic oligonucleotide
uaauuguggauaaaucaga

SEQ ID NO: 662932 - RNA, 19 nt, Artificial Sequence
  Description of Artificial Sequence: Synthetic oligonucleotide
auauguccgccuuuagucc

SEQ ID NO: 662933 - RNA, 19 nt, Artificial Sequence
  Description of Artificial Sequence: Synthetic oligonucleotide
uaaacuuguaggcuugaug

SEQ ID NO: 662934 - RNA, 19 nt, Artificial Sequence
  Description of Artificial Sequence: Synthetic oligonucleotide
aaugugggcuuaccugucc

SEQ ID NO: 662935 - RNA, 19 nt, Artificial Sequence
  Description of Artificial Sequence: Synthetic oligonucleotide
gaaggaguaguucugacga

SEQ ID NO: 662936 - RNA, 19 nt, Artificial Sequence
  Description of Artificial Sequence: Synthetic oligonucleotide
uagaaaucugauuuggcac

SEQ ID NO: 662937 - RNA, 19 nt, Artificial Sequence
  Description of Artificial Sequence: Synthetic oligonucleotide
ugaagaacuaccauccaaa

SEQ ID NO: 662938 - RNA, 19 nt, Artificial Sequence
  Description of Artificial Sequence: Synthetic oligonucleotide
aacauaggaggacaguacu

SEQ ID NO: 662939 - RNA, 19 nt, Artificial Sequence
  Description of Artificial Sequence: Synthetic oligonucleotide
uaauuagugcucuggaaug

SEQ ID NO: 662940 - RNA, 19 nt, Artificial Sequence
  Description of Artificial Sequence: Synthetic oligonucleotide
uggauaaaucagaaagucc

SEQ ID NO: 662941 - RNA, 19 nt, Artificial Sequence
  Description of Artificial Sequence: Synthetic oligonucleotide
uguggauaaaucagaaagu

SEQ ID NO: 662942 - RNA, 19 nt, Artificial Sequence
  Description of Artificial Sequence: Synthetic oligonucleotide
aggacaacuggucucugcc

SEQ ID NO: 662943 - RNA, 19 nt, Artificial Sequence
  Description of Artificial Sequence: Synthetic oligonucleotide
aauagcagcaggaucaacu

SEQ ID NO: 662944 - RNA, 19 nt, Artificial Sequence
  Description of Artificial Sequence: Synthetic oligonucleotide
uguagcaauuucacuauca

SEQ ID NO: 662945 - RNA, 19 nt, Artificial Sequence
  Description of Artificial Sequence: Synthetic oligonucleotide
acaacgaguggauuccagc

SEQ ID NO: 662946 - RNA, 19 nt, Artificial Sequence
  Description of Artificial Sequence: Synthetic oligonucleotide
agaaggaguaguucugacg

SEQ ID NO: 662947 - RNA, 19 nt, Artificial Sequence
  Description of Artificial Sequence: Synthetic oligonucleotide
accauccaaacugaaaacc

SEQ ID NO: 662948 - RNA, 19 nt, Artificial Sequence
  Description of Artificial Sequence: Synthetic oligonucleotide
aaacauaggaggacaguac

SEQ ID NO: 662949 - RNA, 19 nt, Artificial Sequence
  Description of Artificial Sequence: Synthetic oligonucleotide
auugcaaaaguuagcuucc

SEQ ID NO: 662950 - RNA, 19 nt, Artificial Sequence
  Description of Artificial Sequence: Synthetic oligonucleotide
gacuguauaaucucuccug

SEQ ID NO: 662951 - RNA, 19 nt, Artificial Sequence
  Description of Artificial Sequence: Synthetic oligonucleotide
cuugauaugcauaucucuc

SEQ ID NO: 662952 - RNA, 19 nt, Artificial Sequence
  Description of Artificial Sequence: Synthetic oligonucleotide
ugacgaaugauucccagaa

SEQ ID NO: 662953 - RNA, 19 nt, Artificial Sequence
  Description of Artificial Sequence: Synthetic oligonucleotide
uuacucuugaaaccguuga

SEQ ID NO: 662954 - RNA, 19 nt, Artificial Sequence
  Description of Artificial Sequence: Synthetic oligonucleotide
gacaccaagaaccaucuuc

SEQ ID NO: 662955 - RNA, 19 nt, Artificial Sequence
  Description of Artificial Sequence: Synthetic oligonucleotide
aagaacuaccauccaaacu

SEQ ID NO: 662956 - RNA, 19 nt, Artificial Sequence
  Description of Artificial Sequence: Synthetic oligonucleotide
acuuggacuguauaaucuc

SEQ ID NO: 662957 - RNA, 19 nt, Artificial Sequence
  Description of Artificial Sequence: Synthetic oligonucleotide
uaucucucuaacuuagcug

SEQ ID NO: 662958 - RNA, 19 nt, Artificial Sequence
  Description of Artificial Sequence: Synthetic oligonucleotide
gaauaagggaaagaaaauc

SEQ ID NO: 662959 - RNA, 19 nt, Artificial Sequence
  Description of Artificial Sequence: Synthetic oligonucleotide
ucgaagacuaguuguagca

SEQ ID NO: 662960 - RNA, 19 nt, Artificial Sequence
  Description of Artificial Sequence: Synthetic oligonucleotide
auaaaucagaaaguccuuc

SEQ ID NO: 662961 - RNA, 19 nt, Artificial Sequence
  Description of Artificial Sequence: Synthetic oligonucleotide
uaagcugucguacaagaua

SEQ ID NO: 662962 - RNA, 19 nt, Artificial Sequence
  Description of Artificial Sequence: Synthetic oligonucleotide
uguaagcugucguacaaga

SEQ ID NO: 662963 - RNA, 19 nt, Artificial Sequence
  Description of Artificial Sequence: Synthetic oligonucleotide
cuuuaguccagugagauga

SEQ ID NO: 662964 - RNA, 19 nt, Artificial Sequence
  Description of Artificial Sequence: Synthetic oligonucleotide
gaugcauuuccuuuuggca

SEQ ID NO: 662965 - RNA, 19 nt, Artificial Sequence
  Description of Artificial Sequence: Synthetic oligonucleotide
ucuugaaaccguugaauac

SEQ ID NO: 662966 - RNA, 19 nt, Artificial Sequence
  Description of Artificial Sequence: Synthetic oligonucleotide
ucccuugauaugcauaucu

SEQ ID NO: 662967 - RNA, 19 nt, Artificial Sequence
  Description of Artificial Sequence: Synthetic oligonucleotide
agauauacagacauggagu

SEQ ID NO: 662968 - RNA, 19 nt, Artificial Sequence
  Description of Artificial Sequence: Synthetic oligonucleotide
gauguguacaagucacugc

SEQ ID NO: 662969 - RNA, 19 nt, Artificial Sequence
  Description of Artificial Sequence: Synthetic oligonucleotide
ugaggugagacuauccaaa

SEQ ID NO: 662970 - RNA, 19 nt, Artificial Sequence
  Description of Artificial Sequence: Synthetic oligonucleotide
gacaaccuaacuaaagaug

SEQ ID NO: 662971 - RNA, 19 nt, Artificial Sequence
  Description of Artificial Sequence: Synthetic oligonucleotide
auaucucucuaacuuagcu

SEQ ID NO: 662972 - RNA, 19 nt, Artificial Sequence
  Description of Artificial Sequence: Synthetic oligonucleotide
gaguacugcuuucaugggg

SEQ ID NO: 662973 - RNA, 19 nt, Artificial Sequence
  Description of Artificial Sequence: Synthetic oligonucleotide
ugaacuaaacuuguaggcu

SEQ ID NO: 662974 - RNA, 19 nt, Artificial Sequence
  Description of Artificial Sequence: Synthetic oligonucleotide
ucucauuggacaccaagaa

SEQ ID NO: 662975 - RNA, 19 nt, Artificial Sequence
  Description of Artificial Sequence: Synthetic oligonucleotide
agaaaguccuucaaguguc

SEQ ID NO: 662976 - RNA, 19 nt, Artificial Sequence
  Description of Artificial Sequence: Synthetic oligonucleotide
aauuuuaaucugaaccgca

SEQ ID NO: 662977 - RNA, 19 nt, Artificial Sequence
  Description of Artificial Sequence: Synthetic oligonucleotide
uugauaugcauaucucucu

SEQ ID NO: 662978 - RNA, 19 nt, Artificial Sequence
  Description of Artificial Sequence: Synthetic oligonucleotide
aucagacuuucauaggcag

SEQ ID NO: 662979 - RNA, 19 nt, Artificial Sequence
  Description of Artificial Sequence: Synthetic oligonucleotide
ugaaugagguguaauugaa

SEQ ID NO: 662980 - RNA, 19 nt, Artificial Sequence
  Description of Artificial Sequence: Synthetic oligonucleotide
uugaaaccguugaauacug

SEQ ID NO: 662981 - RNA, 19 nt, Artificial Sequence
  Description of Artificial Sequence: Synthetic oligonucleotide
uguaggcuugaugagaaca

SEQ ID NO: 662982 - RNA, 19 nt, Artificial Sequence
  Description of Artificial Sequence: Synthetic oligonucleotide
aaucaaauauguccgccuu

SEQ ID NO: 662983 - RNA, 19 nt, Artificial Sequence
  Description of Artificial Sequence: Synthetic oligonucleotide
gauauacagacauggagua

SEQ ID NO: 662984 - RNA, 19 nt, Artificial Sequence
  Description of Artificial Sequence: Synthetic oligonucleotide
ugggauaguuaucuucuug

SEQ ID NO: 662985 - RNA, 19 nt, Artificial Sequence
  Description of Artificial Sequence: Synthetic oligonucleotide
uaauauucaagggccgucc

SEQ ID NO: 662986 - RNA, 19 nt, Artificial Sequence
  Description of Artificial Sequence: Synthetic oligonucleotide
uccaaacugaaaaccgaug

SEQ ID NO: 662987 - RNA, 19 nt, Artificial Sequence
  Description of Artificial Sequence: Synthetic oligonucleotide
acuggaauaagggaaagaa

SEQ ID NO: 662988 - RNA, 19 nt, Artificial Sequence
  Description of Artificial Sequence: Synthetic oligonucleotide
accauuguagaugaaauau

SEQ ID NO: 662989 - RNA, 19 nt, Artificial Sequence
  Description of Artificial Sequence: Synthetic oligonucleotide
auggacuagauauccaaga

SEQ ID NO: 662990 - RNA, 19 nt, Artificial Sequence
  Description of Artificial Sequence: Synthetic oligonucleotide
gacgucauaaaagggcagg

SEQ ID NO: 662991 - RNA, 19 nt, Artificial Sequence
  Description of Artificial Sequence: Synthetic oligonucleotide
auacaugagaaccccuuug

SEQ ID NO: 662992 - RNA, 19 nt, Artificial Sequence
  Description of Artificial Sequence: Synthetic oligonucleotide
caacgaguggauuccagcc

SEQ ID NO: 662993 - RNA, 19 nt, Artificial Sequence
  Description of Artificial Sequence: Synthetic oligonucleotide
acgaguggauuccagccac

SEQ ID NO: 662994 - RNA, 19 nt, Artificial Sequence
  Description of Artificial Sequence: Synthetic oligonucleotide
aaccuaacuaaagauguaa

SEQ ID NO: 662995 - RNA, 19 nt, Artificial Sequence
  Description of Artificial Sequence: Synthetic oligonucleotide
auacacaaacuauugggau

SEQ ID NO: 662996 - RNA, 19 nt, Artificial Sequence
  Description of Artificial Sequence: Synthetic oligonucleotide
uggacuguauaaucucucc

SEQ ID NO: 662997 - RNA, 19 nt, Artificial Sequence
  Description of Artificial Sequence: Synthetic oligonucleotide
uuaaucugaaccgcagggc

SEQ ID NO: 662998 - RNA, 19 nt, Artificial Sequence
  Description of Artificial Sequence: Synthetic oligonucleotide
aaccguugaauacugcuuu

SEQ ID NO: 662999 - RNA, 19 nt, Artificial Sequence
  Description of Artificial Sequence: Synthetic oligonucleotide
uugacacuggcguauggug

SEQ ID NO: 663000 - RNA, 19 nt, Artificial Sequence
  Description of Artificial Sequence: Synthetic oligonucleotide
augauuuaauuguggauaa

SEQ ID NO: 663001 - RNA, 19 nt, Artificial Sequence
  Description of Artificial Sequence: Synthetic oligonucleotide
uggacuagauauccaagaa

SEQ ID NO: 663002 - RNA, 19 nt, Artificial Sequence
  Description of Artificial Sequence: Synthetic oligonucleotide
agacaaccuaacuaaagau

SEQ ID NO: 663003 - RNA, 19 nt, Artificial Sequence
  Description of Artificial Sequence: Synthetic oligonucleotide
uggaaugguacugaguagu

SEQ ID NO: 663004 - RNA, 19 nt, Artificial Sequence
  Description of Artificial Sequence: Synthetic oligonucleotide
uuuaggugguggugcauag

SEQ ID NO: 663005 - RNA, 19 nt, Artificial Sequence
  Description of Artificial Sequence: Synthetic oligonucleotide
gacacucgaagacuaguug

SEQ ID NO: 663006 - RNA, 19 nt, Artificial Sequence
  Description of Artificial Sequence: Synthetic oligonucleotide
aucggcgucgauauaauuc

SEQ ID NO: 663007 - RNA, 19 nt, Artificial Sequence
  Description of Artificial Sequence: Synthetic oligonucleotide
guaauaacauggcugaugu

SEQ ID NO: 663008 - RNA, 19 nt, Artificial Sequence
  Description of Artificial Sequence: Synthetic oligonucleotide
acacucgaagacuaguugu

SEQ ID NO: 663009 - RNA, 19 nt, Artificial Sequence
  Description of Artificial Sequence: Synthetic oligonucleotide
ucagacuuucauaggcagc

SEQ ID NO: 663010 - RNA, 19 nt, Artificial Sequence
  Description of Artificial Sequence: Synthetic oligonucleotide
caaggacgucauaaaaggg

SEQ ID NO: 663011 - RNA, 19 nt, Artificial Sequence
  Description of Artificial Sequence: Synthetic oligonucleotide
aaaaguccuugcuugucau

SEQ ID NO: 663012 - RNA, 19 nt, Artificial Sequence
  Description of Artificial Sequence: Synthetic oligonucleotide
gaguagucuguuaaugaag

SEQ ID NO: 663013 - RNA, 19 nt, Artificial Sequence
  Description of Artificial Sequence: Synthetic oligonucleotide
aauauaucugaugcucagu

SEQ ID NO: 663014 - RNA, 19 nt, Artificial Sequence
  Description of Artificial Sequence: Synthetic oligonucleotide
uuaaggacacucgaagacu

SEQ ID NO: 663015 - RNA, 19 nt, Artificial Sequence
  Description of Artificial Sequence: Synthetic oligonucleotide
aguuuacccauuuacuuua

SEQ ID NO: 663016 - RNA, 19 nt, Artificial Sequence
  Description of Artificial Sequence: Synthetic oligonucleotide
ugggugucaaagcaaaaua

SEQ ID NO: 663017 - RNA, 19 nt, Artificial Sequence
  Description of Artificial Sequence: Synthetic oligonucleotide
ugagaaccccuuugguugg

SEQ ID NO: 663018 - RNA, 19 nt, Artificial Sequence
  Description of Artificial Sequence: Synthetic oligonucleotide
ugaacuuggacuguauaau

SEQ ID NO: 663019 - RNA, 19 nt, Artificial Sequence
  Description of Artificial Sequence: Synthetic oligonucleotide
aguggauuccagccacagc

SEQ ID NO: 663020 - RNA, 19 nt, Artificial Sequence
  Description of Artificial Sequence: Synthetic oligonucleotide
aagcccaucuaguaucaga

SEQ ID NO: 663021 - RNA, 19 nt, Artificial Sequence
  Description of Artificial Sequence: Synthetic oligonucleotide
accccugucucacuccugc

SEQ ID NO: 663022 - RNA, 19 nt, Artificial Sequence
  Description of Artificial Sequence: Synthetic oligonucleotide
aaaguccuucaaguguccg

SEQ ID NO: 663023 - RNA, 19 nt, Artificial Sequence
  Description of Artificial Sequence: Synthetic oligonucleotide
gugacagacguacugcuug

SEQ ID NO: 663024 - RNA, 19 nt, Artificial Sequence
  Description of Artificial Sequence: Synthetic oligonucleotide
aauuagugcucuggaauga

SEQ ID NO: 663025 - RNA, 19 nt, Artificial Sequence
  Description of Artificial Sequence: Synthetic oligonucleotide
gaacuuggacuguauaauc

SEQ ID NO: 663026 - RNA, 19 nt, Artificial Sequence
  Description of Artificial Sequence: Synthetic oligonucleotide
uauaucugaugcucagugu

SEQ ID NO: 663027 - RNA, 19 nt, Artificial Sequence
  Description of Artificial Sequence: Synthetic oligonucleotide
auuuuaaucugaaccgcag

SEQ ID NO: 663028 - RNA, 19 nt, Artificial Sequence
  Description of Artificial Sequence: Synthetic oligonucleotide
guucugacgaaugauuccc

SEQ ID NO: 663029 - RNA, 19 nt, Artificial Sequence
  Description of Artificial Sequence: Synthetic oligonucleotide
ugauguaagcugucguaca

SEQ ID NO: 663030 - RNA, 19 nt, Artificial Sequence
  Description of Artificial Sequence: Synthetic oligonucleotide
ucugaugcucaguguacag

SEQ ID NO: 663031 - RNA, 19 nt, Artificial Sequence
  Description of Artificial Sequence: Synthetic oligonucleotide
aacuauugggauaguuauc

SEQ ID NO: 663032 - RNA, 19 nt, Artificial Sequence
  Description of Artificial Sequence: Synthetic oligonucleotide
cauggacuagauauccaag

SEQ ID NO: 663033 - RNA, 19 nt, Artificial Sequence
  Description of Artificial Sequence: Synthetic oligonucleotide
ugaguacugcuuucauggg

SEQ ID NO: 663034 - RNA, 19 nt, Artificial Sequence
  Description of Artificial Sequence: Synthetic oligonucleotide
ugcccaagaaauagaaauc

SEQ ID NO: 663035 - RNA, 19 nt, Artificial Sequence
  Description of Artificial Sequence: Synthetic oligonucleotide
aaaaucccuugauaugcau

SEQ ID NO: 663036 - RNA, 19 nt, Artificial Sequence
  Description of Artificial Sequence: Synthetic oligonucleotide
gcaaaaguuagcuuccaug

SEQ ID NO: 663037 - RNA, 19 nt, Artificial Sequence
  Description of Artificial Sequence: Synthetic oligonucleotide
ugauacaugagaaccccuu

SEQ ID NO: 663038 - RNA, 19 nt, Artificial Sequence
  Description of Artificial Sequence: Synthetic oligonucleotide
cuuacucuugaaaccguug

SEQ ID NO: 663039 - RNA, 19 nt, Artificial Sequence
  Description of Artificial Sequence: Synthetic oligonucleotide
ugauuuggcacagcugaag

SEQ ID NO: 663040 - RNA, 19 nt, Artificial Sequence
  Description of Artificial Sequence: Synthetic oligonucleotide
auucaagggccguccaggg

SEQ ID NO: 663041 - RNA, 19 nt, Artificial Sequence
  Description of Artificial Sequence: Synthetic oligonucleotide
guggauaaaucagaaaguc

SEQ ID NO: 663042 - RNA, 19 nt, Artificial Sequence
  Description of Artificial Sequence: Synthetic oligonucleotide
gaucgggauuucuaauacc

SEQ ID NO: 663043 - RNA, 19 nt, Artificial Sequence
  Description of Artificial Sequence: Synthetic oligonucleotide
acuaaagauguaauauuca

SEQ ID NO: 663044 - RNA, 19 nt, Artificial Sequence
  Description of Artificial Sequence: Synthetic oligonucleotide
gaaugaucgggauuucuaa

SEQ ID NO: 663045 - RNA, 19 nt, Artificial Sequence
  Description of Artificial Sequence: Synthetic oligonucleotide
gugaaugagguguaauuga

SEQ ID NO: 663046 - RNA, 19 nt, Artificial Sequence
  Description of Artificial Sequence: Synthetic oligonucleotide
cuguauaaucucuccugcc

SEQ ID NO: 663047 - RNA, 19 nt, Artificial Sequence
  Description of Artificial Sequence: Synthetic oligonucleotide
caugaguacugcuuucaug

SEQ ID NO: 663048 - RNA, 19 nt, Artificial Sequence
  Description of Artificial Sequence: Synthetic oligonucleotide
guauaaucucuccugccac

SEQ ID NO: 663049 - RNA, 19 nt, Artificial Sequence
  Description of Artificial Sequence: Synthetic oligonucleotide
aacuaaacuuguaggcuug

SEQ ID NO: 663050 - RNA, 19 nt, Artificial Sequence
  Description of Artificial Sequence: Synthetic oligonucleotide
gcuacagccacugaacacg

SEQ ID NO: 663051 - RNA, 19 nt, Artificial Sequence
  Description of Artificial Sequence: Synthetic oligonucleotide
uugcuguuaagggugaggu

SEQ ID NO: 663052 - RNA, 19 nt, Artificial Sequence
  Description of Artificial Sequence: Synthetic oligonucleotide
gaaaccguugaauacugcu

SEQ ID NO: 663053 - RNA, 19 nt, Artificial Sequence
  Description of Artificial Sequence: Synthetic oligonucleotide
aagcugucguacaagauau

SEQ ID NO: 663054 - RNA, 19 nt, Artificial Sequence
  Description of Artificial Sequence: Synthetic oligonucleotide
uauguccgccuuuagucca

SEQ ID NO: 663055 - RNA, 19 nt, Artificial Sequence
  Description of Artificial Sequence: Synthetic oligonucleotide
uccgccuuuaguccaguga

SEQ ID NO: 663056 - RNA, 19 nt, Artificial Sequence
  Description of Artificial Sequence: Synthetic oligonucleotide
caaacuauugggauaguua

SEQ ID NO: 663057 - RNA, 19 nt, Artificial Sequence
  Description of Artificial Sequence: Synthetic oligonucleotide
aucgggauuucuaauaccu

SEQ ID NO: 663058 - RNA, 19 nt, Artificial Sequence
  Description of Artificial Sequence: Synthetic oligonucleotide
cucauuggacaccaagaac

SEQ ID NO: 663059 - RNA, 19 nt, Artificial Sequence
  Description of Artificial Sequence: Synthetic oligonucleotide
aaguuagcuuccauggacu

SEQ ID NO: 663060 - RNA, 19 nt, Artificial Sequence
  Description of Artificial Sequence: Synthetic oligonucleotide
ucuaacuuagcuggguguc

SEQ ID NO: 663061 - RNA, 19 nt, Artificial Sequence
  Description of Artificial Sequence: Synthetic oligonucleotide
cauuaaggacacucgaaga

SEQ ID NO: 663062 - RNA, 19 nt, Artificial Sequence
  Description of Artificial Sequence: Synthetic oligonucleotide
agcucucuauuguuagauc

SEQ ID NO: 663063 - RNA, 19 nt, Artificial Sequence
  Description of Artificial Sequence: Synthetic oligonucleotide
gaauccauccaguaaugua

SEQ ID NO: 663064 - RNA, 19 nt, Artificial Sequence
  Description of Artificial Sequence: Synthetic oligonucleotide
cuaacuaaagauguaauau

SEQ ID NO: 663065 - RNA, 19 nt, Artificial Sequence
  Description of Artificial Sequence: Synthetic oligonucleotide
ugaaaccguugaauacugc

SEQ ID NO: 663066 - RNA, 19 nt, Artificial Sequence
  Description of Artificial Sequence: Synthetic oligonucleotide
acuuagcugggugucaaag

SEQ ID NO: 663067 - RNA, 19 nt, Artificial Sequence
  Description of Artificial Sequence: Synthetic oligonucleotide
uggguaucggcgucgauau

SEQ ID NO: 663068 - RNA, 19 nt, Artificial Sequence
  Description of Artificial Sequence: Synthetic oligonucleotide
cucgaauuuuaaucugaac

SEQ ID NO: 663069 - RNA, 19 nt, Artificial Sequence
  Description of Artificial Sequence: Synthetic oligonucleotide
uacucuugaaaccguugaa

SEQ ID NO: 663070 - RNA, 19 nt, Artificial Sequence
  Description of Artificial Sequence: Synthetic oligonucleotide
ggugaaugagguguaauug

SEQ ID NO: 663071 - RNA, 19 nt, Artificial Sequence
  Description of Artificial Sequence: Synthetic oligonucleotide
aguguccguggguaucggc

SEQ ID NO: 663072 - RNA, 19 nt, Artificial Sequence
  Description of Artificial Sequence: Synthetic oligonucleotide
cuacagccacugaacacgg

SEQ ID NO: 663073 - RNA, 19 nt, Artificial Sequence
  Description of Artificial Sequence: Synthetic oligonucleotide
cugaguagucuguuaauga

SEQ ID NO: 663074 - RNA, 19 nt, Artificial Sequence
  Description of Artificial Sequence: Synthetic oligonucleotide
acacgguuuacuaaagaca

SEQ ID NO: 663075 - RNA, 19 nt, Artificial Sequence
  Description of Artificial Sequence: Synthetic oligonucleotide
gaaucaaauauguccgccu

SEQ ID NO: 663076 - RNA, 19 nt, Artificial Sequence
  Description of Artificial Sequence: Synthetic oligonucleotide
ugacagacguacugcuugc

SEQ ID NO: 663077 - RNA, 19 nt, Artificial Sequence
  Description of Artificial Sequence: Synthetic oligonucleotide
uuccuaaagggcacauuaa

SEQ ID NO: 663078 - RNA, 19 nt, Artificial Sequence
  Description of Artificial Sequence: Synthetic oligonucleotide
aaaagcccaucuaguauca

SEQ ID NO: 663079 - RNA, 19 nt, Artificial Sequence
  Description of Artificial Sequence: Synthetic oligonucleotide
gggauaguuaucuucuuga

SEQ ID NO: 663080 - RNA, 19 nt, Artificial Sequence
  Description of Artificial Sequence: Synthetic oligonucleotide
acuggcguaugguggaaug

SEQ ID NO: 663081 - RNA, 19 nt, Artificial Sequence
  Description of Artificial Sequence: Synthetic oligonucleotide
ugguuaugaccccugucuc

SEQ ID NO: 663082 - RNA, 19 nt, Artificial Sequence
  Description of Artificial Sequence: Synthetic oligonucleotide
gaguaguucugacgaauga

SEQ ID NO: 663083 - RNA, 19 nt, Artificial Sequence
  Description of Artificial Sequence: Synthetic oligonucleotide
gcacccuuacagaagaugg

SEQ ID NO: 663084 - RNA, 19 nt, Artificial Sequence
  Description of Artificial Sequence: Synthetic oligonucleotide
gccacucuucaauaaaugc

SEQ ID NO: 663085 - RNA, 19 nt, Artificial Sequence
  Description of Artificial Sequence: Synthetic oligonucleotide
uccauggacuagauaucca

SEQ ID NO: 663086 - RNA, 19 nt, Artificial Sequence
  Description of Artificial Sequence: Synthetic oligonucleotide
acagacguacugcuugcug

SEQ ID NO: 663087 - RNA, 19 nt, Artificial Sequence
  Description of Artificial Sequence: Synthetic oligonucleotide
uuagugcucuggaaugauc

SEQ ID NO: 663088 - RNA, 19 nt, Artificial Sequence
  Description of Artificial Sequence: Synthetic oligonucleotide
uucagaugcccaagaaaua

SEQ ID NO: 663089 - RNA, 19 nt, Artificial Sequence
  Description of Artificial Sequence: Synthetic oligonucleotide
uucuaauaccuuucauuuu

SEQ ID NO: 663090 - RNA, 19 nt, Artificial Sequence
  Description of Artificial Sequence: Synthetic oligonucleotide
agcugaagacaaccuaacu

SEQ ID NO: 663091 - RNA, 19 nt, Artificial Sequence
  Description of Artificial Sequence: Synthetic oligonucleotide
cauccaaacugaaaaccga

SEQ ID NO: 663092 - RNA, 19 nt, Artificial Sequence
  Description of Artificial Sequence: Synthetic oligonucleotide
ugguuggacugcuuugugu

SEQ ID NO: 663093 - RNA, 19 nt, Artificial Sequence
  Description of Artificial Sequence: Synthetic oligonucleotide
gcucucuauuguuagauca

SEQ ID NO: 663094 - RNA, 19 nt, Artificial Sequence
  Description of Artificial Sequence: Synthetic oligonucleotide
guguccguggguaucggcg

SEQ ID NO: 663095 - RNA, 19 nt, Artificial Sequence
  Description of Artificial Sequence: Synthetic oligonucleotide
cacccuuacagaagauggc

SEQ ID NO: 663096 - RNA, 19 nt, Artificial Sequence
  Description of Artificial Sequence: Synthetic oligonucleotide
aaaccguugaauacugcuu

SEQ ID NO: 663097 - RNA, 19 nt, Artificial Sequence
  Description of Artificial Sequence: Synthetic oligonucleotide
guuaugaccccugucucac

SEQ ID NO: 663098 - RNA, 19 nt, Artificial Sequence
  Description of Artificial Sequence: Synthetic oligonucleotide
uggggaucaacuggaauaa

SEQ ID NO: 663099 - RNA, 19 nt, Artificial Sequence
  Description of Artificial Sequence: Synthetic oligonucleotide
cuggggaucaacuggaaua

SEQ ID NO: 663100 - RNA, 19 nt, Artificial Sequence
  Description of Artificial Sequence: Synthetic oligonucleotide
gaggacaacuggucucugc

SEQ ID NO: 663101 - RNA, 19 nt, Artificial Sequence
  Description of Artificial Sequence: Synthetic oligonucleotide
ucuguuaaugaagguggaa

SEQ ID NO: 663102 - RNA, 19 nt, Artificial Sequence
  Description of Artificial Sequence: Synthetic oligonucleotide
aggacgucauaaaagggca

SEQ ID NO: 663103 - RNA, 19 nt, Artificial Sequence
  Description of Artificial Sequence: Synthetic oligonucleotide
acucgaagacuaguuguag

SEQ ID NO: 663104 - RNA, 19 nt, Artificial Sequence
  Description of Artificial Sequence: Synthetic oligonucleotide
guacaagucacugcccggc

SEQ ID NO: 663105 - RNA, 19 nt, Artificial Sequence
  Description of Artificial Sequence: Synthetic oligonucleotide
gacaacuggucucugccaa

SEQ ID NO: 663106 - RNA, 19 nt, Artificial Sequence
  Description of Artificial Sequence: Synthetic oligonucleotide
gcuguuaagggugagguga

SEQ ID NO: 663107 - RNA, 19 nt, Artificial Sequence
  Description of Artificial Sequence: Synthetic oligonucleotide
gaaccaucuucuuggaacu

SEQ ID NO: 663108 - RNA, 19 nt, Artificial Sequence
  Description of Artificial Sequence: Synthetic oligonucleotide
uucaagggccguccagggc

SEQ ID NO: 663109 - RNA, 19 nt, Artificial Sequence
  Description of Artificial Sequence: Synthetic oligonucleotide
acugaaaaccgaugauuua

SEQ ID NO: 663110 - RNA, 19 nt, Artificial Sequence
  Description of Artificial Sequence: Synthetic oligonucleotide
gaacuaaacuuguaggcuu

SEQ ID NO: 663111 - RNA, 19 nt, Artificial Sequence
  Description of Artificial Sequence: Synthetic oligonucleotide
uucuugggucucauuggac

SEQ ID NO: 663112 - RNA, 19 nt, Artificial Sequence
  Description of Artificial Sequence: Synthetic oligonucleotide
cucuugaaaccguugaaua

SEQ ID NO: 663113 - RNA, 19 nt, Artificial Sequence
  Description of Artificial Sequence: Synthetic oligonucleotide
aauugcacaucaggaugga

SEQ ID NO: 663114 - RNA, 19 nt, Artificial Sequence
  Description of Artificial Sequence: Synthetic oligonucleotide
ugcuguuaagggugaggug

SEQ ID NO: 663115 - RNA, 19 nt, Artificial Sequence
  Description of Artificial Sequence: Synthetic oligonucleotide
uuguagcaauuucacuauc

SEQ ID NO: 663116 - RNA, 19 nt, Artificial Sequence
  Description of Artificial Sequence: Synthetic oligonucleotide
aaggaguaguucugacgaa

SEQ ID NO: 663117 - RNA, 19 nt, Artificial Sequence
  Description of Artificial Sequence: Synthetic oligonucleotide
guaugguggaaugguacug

SEQ ID NO: 663118 - RNA, 19 nt, Artificial Sequence
  Description of Artificial Sequence: Synthetic oligonucleotide
gcauaucucucuaacuuag

SEQ ID NO: 663119 - RNA, 19 nt, Artificial Sequence
  Description of Artificial Sequence: Synthetic oligonucleotide
gcugaagacaaccuaacua

SEQ ID NO: 663120 - RNA, 19 nt, Artificial Sequence
  Description of Artificial Sequence: Synthetic oligonucleotide
gguucuacuggugaagaac

SEQ ID NO: 663121 - RNA, 19 nt, Artificial Sequence
  Description of Artificial Sequence: Synthetic oligonucleotide
cauuggacaccaagaacca

SEQ ID NO: 663122 - RNA, 19 nt, Artificial Sequence
  Description of Artificial Sequence: Synthetic oligonucleotide
cuuggaacuugaucucauc

SEQ ID NO: 663123 - RNA, 19 nt, Artificial Sequence
  Description of Artificial Sequence: Synthetic oligonucleotide
ucugccaagcaaagucgaa

SEQ ID NO: 663124 - RNA, 19 nt, Artificial Sequence
  Description of Artificial Sequence: Synthetic oligonucleotide
cagcugaagacaaccuaac

SEQ ID NO: 663125 - RNA, 19 nt, Artificial Sequence
  Description of Artificial Sequence: Synthetic oligonucleotide
acuagauauccaagaagga

SEQ ID NO: 663126 - RNA, 19 nt, Artificial Sequence
  Description of Artificial Sequence: Synthetic oligonucleotide
auguaagcugucguacaag

SEQ ID NO: 663127 - RNA, 19 nt, Artificial Sequence
  Description of Artificial Sequence: Synthetic oligonucleotide
ucucaaaugugggcuuacc

SEQ ID NO: 663128 - RNA, 19 nt, Artificial Sequence
  Description of Artificial Sequence: Synthetic oligonucleotide
aagacuaguuguagcaauu

SEQ ID NO: 663129 - RNA, 19 nt, Artificial Sequence
  Description of Artificial Sequence: Synthetic oligonucleotide
cugucguacaagauauaca

SEQ ID NO: 663130 - RNA, 19 nt, Artificial Sequence
  Description of Artificial Sequence: Synthetic oligonucleotide
gaguggauuccagccacag

SEQ ID NO: 663131 - RNA, 19 nt, Artificial Sequence
  Description of Artificial Sequence: Synthetic oligonucleotide
ggagaugauggugaaugag

SEQ ID NO: 663132 - RNA, 19 nt, Artificial Sequence
  Description of Artificial Sequence: Synthetic oligonucleotide
guaauauucaagggccguc

SEQ ID NO: 663133 - RNA, 19 nt, Artificial Sequence
  Description of Artificial Sequence: Synthetic oligonucleotide
caucuacaucagaacaguc

SEQ ID NO: 663134 - RNA, 19 nt, Artificial Sequence
  Description of Artificial Sequence: Synthetic oligonucleotide
uacugaguagucuguuaau

SEQ ID NO: 663135 - RNA, 19 nt, Artificial Sequence
  Description of Artificial Sequence: Synthetic oligonucleotide
caugaaaagcccaucuagu

SEQ ID NO: 663136 - RNA, 19 nt, Artificial Sequence
  Description of Artificial Sequence: Synthetic oligonucleotide
acauaggaggacaguacug

SEQ ID NO: 663137 - RNA, 19 nt, Artificial Sequence
  Description of Artificial Sequence: Synthetic oligonucleotide
cugguuaugaccccugucu

SEQ ID NO: 663138 - RNA, 19 nt, Artificial Sequence
  Description of Artificial Sequence: Synthetic oligonucleotide
uguccguggguaucggcgu

SEQ ID NO: 663139 - RNA, 19 nt, Artificial Sequence
  Description of Artificial Sequence: Synthetic oligonucleotide
aacuuacucuugaaaccgu

SEQ ID NO: 663140 - RNA, 19 nt, Artificial Sequence
  Description of Artificial Sequence: Synthetic oligonucleotide
ggcgucgauauaauucucg

SEQ ID NO: 663141 - RNA, 19 nt, Artificial Sequence
  Description of Artificial Sequence: Synthetic oligonucleotide
cuugaaaccguugaauacu

SEQ ID NO: 663142 - RNA, 19 nt, Artificial Sequence
  Description of Artificial Sequence: Synthetic oligonucleotide
aucaaauauguccgccuuu

SEQ ID NO: 663143 - RNA, 19 nt, Artificial Sequence
  Description of Artificial Sequence: Synthetic oligonucleotide
uuuaguccagugagaugau

SEQ ID NO: 663144 - RNA, 19 nt, Artificial Sequence
  Description of Artificial Sequence: Synthetic oligonucleotide
gcaaaggaaagaguuuacc

SEQ ID NO: 663145 - RNA, 19 nt, Artificial Sequence
  Description of Artificial Sequence: Synthetic oligonucleotide
uacagggcuggcugguuac

SEQ ID NO: 663146 - RNA, 19 nt, Artificial Sequence
  Description of Artificial Sequence: Synthetic oligonucleotide
uaacuuagcugggugucaa

SEQ ID NO: 663147 - RNA, 19 nt, Artificial Sequence
  Description of Artificial Sequence: Synthetic oligonucleotide
gaggugagacuauccaaaa

SEQ ID NO: 663148 - RNA, 19 nt, Artificial Sequence
  Description of Artificial Sequence: Synthetic oligonucleotide
ugauuuaauuguggauaaa

SEQ ID NO: 663149 - RNA, 19 nt, Artificial Sequence
  Description of Artificial Sequence: Synthetic oligonucleotide
acaugaguacugcuuucau

SEQ ID NO: 663150 - RNA, 19 nt, Artificial Sequence
  Description of Artificial Sequence: Synthetic oligonucleotide
uggcguaugguggaauggu

SEQ ID NO: 663151 - RNA, 19 nt, Artificial Sequence
  Description of Artificial Sequence: Synthetic oligonucleotide
cuggcguaugguggaaugg

SEQ ID NO: 663152 - RNA, 19 nt, Artificial Sequence
  Description of Artificial Sequence: Synthetic oligonucleotide
acuggggaucaacuggaau

SEQ ID NO: 663153 - RNA, 19 nt, Artificial Sequence
  Description of Artificial Sequence: Synthetic oligonucleotide
uucugacauaaagaugcau

SEQ ID NO: 663154 - RNA, 19 nt, Artificial Sequence
  Description of Artificial Sequence: Synthetic oligonucleotide
ccacucuucaauaaaugca

SEQ ID NO: 663155 - RNA, 19 nt, Artificial Sequence
  Description of Artificial Sequence: Synthetic oligonucleotide
gcugucguacaagauauac

SEQ ID NO: 663156 - RNA, 19 nt, Artificial Sequence
  Description of Artificial Sequence: Synthetic oligonucleotide
aggacaguacuggggauca

SEQ ID NO: 663157 - RNA, 19 nt, Artificial Sequence
  Description of Artificial Sequence: Synthetic oligonucleotide
gaacuaccauccaaacuga

SEQ ID NO: 663158 - RNA, 19 nt, Artificial Sequence
  Description of Artificial Sequence: Synthetic oligonucleotide
ucgggauuucuaauaccuu

SEQ ID NO: 663159 - RNA, 19 nt, Artificial Sequence
  Description of Artificial Sequence: Synthetic oligonucleotide
aggaguaguucugacgaau

SEQ ID NO: 663160 - RNA, 19 nt, Artificial Sequence
  Description of Artificial Sequence: Synthetic oligonucleotide
auccaaacugaaaaccgau

SEQ ID NO: 663161 - RNA, 19 nt, Artificial Sequence
  Description of Artificial Sequence: Synthetic oligonucleotide
cugacgaaugauucccaga

SEQ ID NO: 663162 - RNA, 19 nt, Artificial Sequence
  Description of Artificial Sequence: Synthetic oligonucleotide
aaaggacaacgaguggauu

SEQ ID NO: 663163 - RNA, 19 nt, Artificial Sequence
  Description of Artificial Sequence: Synthetic oligonucleotide
gugcauagccaggcaaagg

SEQ ID NO: 663164 - RNA, 19 nt, Artificial Sequence
  Description of Artificial Sequence: Synthetic oligonucleotide
accuaacuaaagauguaau

SEQ ID NO: 663165 - RNA, 19 nt, Artificial Sequence
  Description of Artificial Sequence: Synthetic oligonucleotide
ccgccuuuaguccagugag

SEQ ID NO: 663166 - RNA, 19 nt, Artificial Sequence
  Description of Artificial Sequence: Synthetic oligonucleotide
acgucauaaaagggcaggu

SEQ ID NO: 663167 - RNA, 19 nt, Artificial Sequence
  Description of Artificial Sequence: Synthetic oligonucleotide
cucuauuguuagaucaaua

SEQ ID NO: 663168 - RNA, 19 nt, Artificial Sequence
  Description of Artificial Sequence: Synthetic oligonucleotide
cuuggacuguauaaucucu

SEQ ID NO: 663169 - RNA, 19 nt, Artificial Sequence
  Description of Artificial Sequence: Synthetic oligonucleotide
aucugauuuggcacagcug

SEQ ID NO: 663170 - RNA, 19 nt, Artificial Sequence
  Description of Artificial Sequence: Synthetic oligonucleotide
ccaguaauguagaaacuga

SEQ ID NO: 663171 - RNA, 19 nt, Artificial Sequence
  Description of Artificial Sequence: Synthetic oligonucleotide
aaguguccguggguaucgg

SEQ ID NO: 663172 - RNA, 19 nt, Artificial Sequence
  Description of Artificial Sequence: Synthetic oligonucleotide
aggacacucgaagacuagu

SEQ ID NO: 663173 - RNA, 19 nt, Artificial Sequence
  Description of Artificial Sequence: Synthetic oligonucleotide
gaaaaccgaugauuuaauu

SEQ ID NO: 663174 - RNA, 19 nt, Artificial Sequence
  Description of Artificial Sequence: Synthetic oligonucleotide
auuagugcucuggaaugau

SEQ ID NO: 663175 - RNA, 19 nt, Artificial Sequence
  Description of Artificial Sequence: Synthetic oligonucleotide
gguaucggcgucgauauaa

SEQ ID NO: 663176 - RNA, 19 nt, Artificial Sequence
  Description of Artificial Sequence: Synthetic oligonucleotide
guacuggggaucaacugga

SEQ ID NO: 663177 - RNA, 19 nt, Artificial Sequence
  Description of Artificial Sequence: Synthetic oligonucleotide
agguggaauagcagcagga

SEQ ID NO: 663178 - RNA, 19 nt, Artificial Sequence
  Description of Artificial Sequence: Synthetic oligonucleotide
acguacugcuugcuguuaa

SEQ ID NO: 663179 - RNA, 19 nt, Artificial Sequence
  Description of Artificial Sequence: Synthetic oligonucleotide
ggaguaguucugacgaaug

SEQ ID NO: 663180 - RNA, 19 nt, Artificial Sequence
  Description of Artificial Sequence: Synthetic oligonucleotide
gauacaugagaaccccuuu

SEQ ID NO: 663181 - RNA, 19 nt, Artificial Sequence
  Description of Artificial Sequence: Synthetic oligonucleotide
gguuaugaccccugucuca

SEQ ID NO: 663182 - RNA, 19 nt, Artificial Sequence
  Description of Artificial Sequence: Synthetic oligonucleotide
gcacauuaaggacacucga

SEQ ID NO: 663183 - RNA, 19 nt, Artificial Sequence
  Description of Artificial Sequence: Synthetic oligonucleotide
agaaccccuuugguuggac

SEQ ID NO: 663184 - RNA, 19 nt, Artificial Sequence
  Description of Artificial Sequence: Synthetic oligonucleotide
acuaaacuuguaggcuuga

SEQ ID NO: 663185 - RNA, 19 nt, Artificial Sequence
  Description of Artificial Sequence: Synthetic oligonucleotide
cucugccaagcaaagucga

SEQ ID NO: 663186 - RNA, 19 nt, Artificial Sequence
  Description of Artificial Sequence: Synthetic oligonucleotide
cgguuuacuaaagacacug

SEQ ID NO: 663187 - RNA, 19 nt, Artificial Sequence
  Description of Artificial Sequence: Synthetic oligonucleotide
gggauuucuaauaccuuuc

SEQ ID NO: 663188 - RNA, 19 nt, Artificial Sequence
  Description of Artificial Sequence: Synthetic oligonucleotide
uuaugaccccugucucacu

SEQ ID NO: 663189 - RNA, 19 nt, Artificial Sequence
  Description of Artificial Sequence: Synthetic oligonucleotide
ggugcauagccaggcaaag

SEQ ID NO: 663190 - RNA, 19 nt, Artificial Sequence
  Description of Artificial Sequence: Synthetic oligonucleotide
agguucuacuggugaagaa

SEQ ID NO: 663191 - RNA, 19 nt, Artificial Sequence
  Description of Artificial Sequence: Synthetic oligonucleotide
ccuaacuaaagauguaaua

SEQ ID NO: 663192 - RNA, 19 nt, Artificial Sequence
  Description of Artificial Sequence: Synthetic oligonucleotide
aacuaccauccaaacugaa

SEQ ID NO: 663193 - RNA, 19 nt, Artificial Sequence
  Description of Artificial Sequence: Synthetic oligonucleotide
auggugaaugagguguaau

SEQ ID NO: 663194 - RNA, 19 nt, Artificial Sequence
  Description of Artificial Sequence: Synthetic oligonucleotide
gaaugguacugaguagucu

SEQ ID NO: 663195 - RNA, 19 nt, Artificial Sequence
  Description of Artificial Sequence: Synthetic oligonucleotide
cuggcaaaucugaugacau

SEQ ID NO: 663196 - RNA, 19 nt, Artificial Sequence
  Description of Artificial Sequence: Synthetic oligonucleotide
ugcuugacacuggcguaug

SEQ ID NO: 663197 - RNA, 19 nt, Artificial Sequence
  Description of Artificial Sequence: Synthetic oligonucleotide
gauaaaucagaaaguccuu

SEQ ID NO: 663198 - RNA, 19 nt, Artificial Sequence
  Description of Artificial Sequence: Synthetic oligonucleotide
cacucgaagacuaguugua

SEQ ID NO: 663199 - RNA, 19 nt, Artificial Sequence
  Description of Artificial Sequence: Synthetic oligonucleotide
cagacguacugcuugcugu

SEQ ID NO: 663200 - RNA, 19 nt, Artificial Sequence
  Description of Artificial Sequence: Synthetic oligonucleotide
cccauuuacuuuauacaca

SEQ ID NO: 663201 - RNA, 19 nt, Artificial Sequence
  Description of Artificial Sequence: Synthetic oligonucleotide
ugguggugacagacguacu

SEQ ID NO: 663202 - RNA, 19 nt, Artificial Sequence
  Description of Artificial Sequence: Synthetic oligonucleotide
ccgaugauuuaauugugga

SEQ ID NO: 663203 - RNA, 19 nt, Artificial Sequence
  Description of Artificial Sequence: Synthetic oligonucleotide
ggcugguuacuuucauagc

SEQ ID NO: 663204 - RNA, 19 nt, Artificial Sequence
  Description of Artificial Sequence: Synthetic oligonucleotide
augcuugacacuggcguau

SEQ ID NO: 663205 - RNA, 19 nt, Artificial Sequence
  Description of Artificial Sequence: Synthetic oligonucleotide
cuaacuuagcuggguguca

SEQ ID NO: 663206 - RNA, 19 nt, Artificial Sequence
  Description of Artificial Sequence: Synthetic oligonucleotide
gucguacaagauauacaga

SEQ ID NO: 663207 - RNA, 19 nt, Artificial Sequence
  Description of Artificial Sequence: Synthetic oligonucleotide
guagucuguuaaugaaggu

SEQ ID NO: 663208 - RNA, 19 nt, Artificial Sequence
  Description of Artificial Sequence: Synthetic oligonucleotide
caagggccguccagggcgc

SEQ ID NO: 663209 - RNA, 19 nt, Artificial Sequence
  Description of Artificial Sequence: Synthetic oligonucleotide
gcgucgauauaauucucga

SEQ ID NO: 663210 - RNA, 19 nt, Artificial Sequence
  Description of Artificial Sequence: Synthetic oligonucleotide
aagggugaggugagacuau

SEQ ID NO: 663211 - RNA, 19 nt, Artificial Sequence
  Description of Artificial Sequence: Synthetic oligonucleotide
gcguaugguggaaugguac

SEQ ID NO: 663212 - RNA, 19 nt, Artificial Sequence
  Description of Artificial Sequence: Synthetic oligonucleotide
gcuuaccuguccugaagca

SEQ ID NO: 663213 - RNA, 19 nt, Artificial Sequence
  Description of Artificial Sequence: Synthetic oligonucleotide
acgguuuacuaaagacacu

SEQ ID NO: 663214 - RNA, 19 nt, Artificial Sequence
  Description of Artificial Sequence: Synthetic oligonucleotide
ccauggacuagauauccaa

SEQ ID NO: 663215 - RNA, 19 nt, Artificial Sequence
  Description of Artificial Sequence: Synthetic oligonucleotide
acugcccggcaugggauug

SEQ ID NO: 663216 - RNA, 19 nt, Artificial Sequence
  Description of Artificial Sequence: Synthetic oligonucleotide
ggaaugguacugaguaguc

SEQ ID NO: 663217 - RNA, 19 nt, Artificial Sequence
  Description of Artificial Sequence: Synthetic oligonucleotide
gcccaagaaauagaaaucu

SEQ ID NO: 663218 - RNA, 19 nt, Artificial Sequence
  Description of Artificial Sequence: Synthetic oligonucleotide
ggacuguauaaucucuccu

SEQ ID NO: 663219 - RNA, 19 nt, Artificial Sequence
  Description of Artificial Sequence: Synthetic oligonucleotide
gaaccccuuugguuggacu

SEQ ID NO: 663220 - RNA, 19 nt, Artificial Sequence
  Description of Artificial Sequence: Synthetic oligonucleotide
gacgaaugauucccagaau

SEQ ID NO: 663221 - RNA, 19 nt, Artificial Sequence
  Description of Artificial Sequence: Synthetic oligonucleotide
ggacaacuggucucugcca

SEQ ID NO: 663222 - RNA, 19 nt, Artificial Sequence
  Description of Artificial Sequence: Synthetic oligonucleotide
aaauccaggugggcuucuu

SEQ ID NO: 663223 - RNA, 19 nt, Artificial Sequence
  Description of Artificial Sequence: Synthetic oligonucleotide
auguccgccuuuaguccag

SEQ ID NO: 663224 - RNA, 19 nt, Artificial Sequence
  Description of Artificial Sequence: Synthetic oligonucleotide
guacagggcuggcugguua

SEQ ID NO: 663225 - RNA, 19 nt, Artificial Sequence
  Description of Artificial Sequence: Synthetic oligonucleotide
cugauacaugagaaccccu

SEQ ID NO: 663226 - RNA, 19 nt, Artificial Sequence
  Description of Artificial Sequence: Synthetic oligonucleotide
cagauguguacaagucacu

SEQ ID NO: 663227 - RNA, 19 nt, Artificial Sequence
  Description of Artificial Sequence: Synthetic oligonucleotide
guccgccuuuaguccagug

SEQ ID NO: 663228 - RNA, 19 nt, Artificial Sequence
  Description of Artificial Sequence: Synthetic oligonucleotide
cagcauaacaaaaguccuu

SEQ ID NO: 663229 - RNA, 19 nt, Artificial Sequence
  Description of Artificial Sequence: Synthetic oligonucleotide
cugaaccgcagggcugcag

SEQ ID NO: 663230 - RNA, 19 nt, Artificial Sequence
  Description of Artificial Sequence: Synthetic oligonucleotide
ucugaaccgcagggcugca

SEQ ID NO: 663231 - RNA, 19 nt, Artificial Sequence
  Description of Artificial Sequence: Synthetic oligonucleotide
guaagcugucguacaagau

SEQ ID NO: 663232 - RNA, 19 nt, Artificial Sequence
  Description of Artificial Sequence: Synthetic oligonucleotide
uguccgccuuuaguccagu

SEQ ID NO: 663233 - RNA, 19 nt, Artificial Sequence
  Description of Artificial Sequence: Synthetic oligonucleotide
guccguggguaucggcguc

SEQ ID NO: 663234 - RNA, 19 nt, Artificial Sequence
  Description of Artificial Sequence: Synthetic oligonucleotide
gacguacugcuugcuguua

SEQ ID NO: 663235 - RNA, 19 nt, Artificial Sequence
  Description of Artificial Sequence: Synthetic oligonucleotide
ccauccaguaauguagaaa

SEQ ID NO: 663236 - RNA, 19 nt, Artificial Sequence
  Description of Artificial Sequence: Synthetic oligonucleotide
gaccccugucucacuccug

SEQ ID NO: 663237 - RNA, 19 nt, Artificial Sequence
  Description of Artificial Sequence: Synthetic oligonucleotide
gacagacguacugcuugcu

SEQ ID NO: 663238 - RNA, 19 nt, Artificial Sequence
  Description of Artificial Sequence: Synthetic oligonucleotide
cuaaacuuguaggcuugau

SEQ ID NO: 663239 - RNA, 19 nt, Artificial Sequence
  Description of Artificial Sequence: Synthetic oligonucleotide
gccacugaacacgguuuac

SEQ ID NO: 663240 - RNA, 19 nt, Artificial Sequence
  Description of Artificial Sequence: Synthetic oligonucleotide
acacuggcguaugguggaa

SEQ ID NO: 663241 - RNA, 19 nt, Artificial Sequence
  Description of Artificial Sequence: Synthetic oligonucleotide
ccucuguaauaacauggcu

SEQ ID NO: 663242 - RNA, 19 nt, Artificial Sequence
  Description of Artificial Sequence: Synthetic oligonucleotide
ccguugaauacugcuuuga

SEQ ID NO: 663243 - RNA, 19 nt, Artificial Sequence
  Description of Artificial Sequence: Synthetic oligonucleotide
cgucgauauaauucucgaa

SEQ ID NO: 663244 - RNA, 19 nt, Artificial Sequence
  Description of Artificial Sequence: Synthetic oligonucleotide
ggacaacgaguggauucca

SEQ ID NO: 663245 - RNA, 19 nt, Artificial Sequence
  Description of Artificial Sequence: Synthetic oligonucleotide
aagggccguccagggcgcu

SEQ ID NO: 663246 - RNA, 19 nt, Artificial Sequence
  Description of Artificial Sequence: Synthetic oligonucleotide
agcugucguacaagauaua

SEQ ID NO: 663247 - RNA, 19 nt, Artificial Sequence
  Description of Artificial Sequence: Synthetic oligonucleotide
ggcguaugguggaauggua

SEQ ID NO: 663248 - RNA, 19 nt, Artificial Sequence
  Description of Artificial Sequence: Synthetic oligonucleotide
ggacacucgaagacuaguu

SEQ ID NO: 663249 - RNA, 19 nt, Artificial Sequence
  Description of Artificial Sequence: Synthetic oligonucleotide
cuguaauaacauggcugau

SEQ ID NO: 663250 - RNA, 19 nt, Artificial Sequence
  Description of Artificial Sequence: Synthetic oligonucleotide
ggcaugggauugucagccu

SEQ ID NO: 663251 - RNA, 19 nt, Artificial Sequence
  Description of Artificial Sequence: Synthetic oligonucleotide
cggcgucgauauaauucuc

SEQ ID NO: 663252 - RNA, 19 nt, Artificial Sequence
  Description of Artificial Sequence: Synthetic oligonucleotide
cgaguggauuccagccaca

SEQ ID NO: 663253 - RNA, 19 nt, Artificial Sequence
  Description of Artificial Sequence: Synthetic oligonucleotide
cacuggcguaugguggaau

SEQ ID NO: 663254 - RNA, 19 nt, Artificial Sequence
  Description of Artificial Sequence: Synthetic oligonucleotide
ggguaucggcgucgauaua

SEQ ID NO: 663255 - RNA, 19 nt, Artificial Sequence
  Description of Artificial Sequence: Synthetic oligonucleotide
cugcccggcaugggauugu

SEQ ID NO: 663256 - RNA, 19 nt, Artificial Sequence
  Description of Artificial Sequence: Synthetic oligonucleotide
cgucauaaaagggcagguu

SEQ ID NO: 663257 - RNA, 19 nt, Artificial Sequence
  Description of Artificial Sequence: Synthetic oligonucleotide
ccguggguaucggcgucga

SEQ ID NO: 663258 - RNA, 19 nt, Artificial Sequence
  Description of Artificial Sequence: Synthetic oligonucleotide
ccccuuugguuggacugcu

SEQ ID NO: 663259 - RNA, 19 nt, Artificial Sequence
  Description of Artificial Sequence: Synthetic oligonucleotide
ggccguccagggcgcuucu

SEQ ID NO: 663260 - RNA, 19 nt, Artificial Sequence
  Description of Artificial Sequence: Synthetic oligonucleotide
gggcacccuuacagaagau

SEQ ID NO: 663261 - RNA, 19 nt, Artificial Sequence
  Description of Artificial Sequence: Synthetic oligonucleotide
cccuuugguuggacugcuu

SEQ ID NO: 663262 - RNA, 19 nt, Artificial Sequence
  Description of Artificial Sequence: Synthetic oligonucleotide
cguggguaucggcgucgau

SEQ ID NO: 663263 - RNA, 19 nt, Artificial Sequence
  Description of Artificial Sequence: Synthetic oligonucleotide
aauauaugaggcuucagcc

SEQ ID NO: 663264 - RNA, 19 nt, Artificial Sequence
  Description of Artificial Sequence: Synthetic oligonucleotide
uauaaaauuacagaggcca

SEQ ID NO: 663265 - RNA, 19 nt, Artificial Sequence
  Description of Artificial Sequence: Synthetic oligonucleotide
uauacgaccaaauauguga

SEQ ID NO: 663266 - RNA, 19 nt, Artificial Sequence
  Description of Artificial Sequence: Synthetic oligonucleotide
aaaauuacagaggccaggc

SEQ ID NO: 663267 - RNA, 19 nt, Artificial Sequence
  Description of Artificial Sequence: Synthetic oligonucleotide
aacaaauccucccgaaggc

SEQ ID NO: 663268 - RNA, 19 nt, Artificial Sequence
  Description of Artificial Sequence: Synthetic oligonucleotide
aauauugaggcccuucucu

SEQ ID NO: 663269 - RNA, 19 nt, Artificial Sequence
  Description of Artificial Sequence: Synthetic oligonucleotide
auauaugaggcuucagccc

SEQ ID NO: 663270 - RNA, 19 nt, Artificial Sequence
  Description of Artificial Sequence: Synthetic oligonucleotide
ugagguaggagccaucagg

SEQ ID NO: 663271 - RNA, 19 nt, Artificial Sequence
  Description of Artificial Sequence: Synthetic oligonucleotide
ucugguaacacagugagga

SEQ ID NO: 663272 - RNA, 19 nt, Artificial Sequence
  Description of Artificial Sequence: Synthetic oligonucleotide
gauaccaaucaccacaggc

SEQ ID NO: 663273 - RNA, 19 nt, Artificial Sequence
  Description of Artificial Sequence: Synthetic oligonucleotide
aauaguggaguuguggcgg

SEQ ID NO: 663274 - RNA, 19 nt, Artificial Sequence
  Description of Artificial Sequence: Synthetic oligonucleotide
gaccacuaagacuugaggg

SEQ ID NO: 663275 - RNA, 19 nt, Artificial Sequence
  Description of Artificial Sequence: Synthetic oligonucleotide
aucacugcgaaccuugcac

SEQ ID NO: 663276 - RNA, 19 nt, Artificial Sequence
  Description of Artificial Sequence: Synthetic oligonucleotide
uauaugaggcuucagccca

SEQ ID NO: 663277 - RNA, 19 nt, Artificial Sequence
  Description of Artificial Sequence: Synthetic oligonucleotide
aaauauugaggcccuucuc

SEQ ID NO: 663278 - RNA, 19 nt, Artificial Sequence
  Description of Artificial Sequence: Synthetic oligonucleotide
ucuguguacagcuuggggu

SEQ ID NO: 663279 - RNA, 19 nt, Artificial Sequence
  Description of Artificial Sequence: Synthetic oligonucleotide
gaugagaguauaguugacg

SEQ ID NO: 663280 - RNA, 19 nt, Artificial Sequence
  Description of Artificial Sequence: Synthetic oligonucleotide
cugcauuuagcacugacag

SEQ ID NO: 663281 - RNA, 19 nt, Artificial Sequence
  Description of Artificial Sequence: Synthetic oligonucleotide
gaugcugguagacuccugg

SEQ ID NO: 663282 - RNA, 19 nt, Artificial Sequence
  Description of Artificial Sequence: Synthetic oligonucleotide
caacaaauccucccgaagg

SEQ ID NO: 663283 - RNA, 19 nt, Artificial Sequence
  Description of Artificial Sequence: Synthetic oligonucleotide
uguauguucaccuggcagu

SEQ ID NO: 663284 - RNA, 19 nt, Artificial Sequence
  Description of Artificial Sequence: Synthetic oligonucleotide
cauaaugaugagaguauag

SEQ ID NO: 663285 - RNA, 19 nt, Artificial Sequence
  Description of Artificial Sequence: Synthetic oligonucleotide
agagccguacucuacccgc

SEQ ID NO: 663286 - RNA, 19 nt, Artificial Sequence
  Description of Artificial Sequence: Synthetic oligonucleotide
aaccuguugccuuggcccc

SEQ ID NO: 663287 - RNA, 19 nt, Artificial Sequence
  Description of Artificial Sequence: Synthetic oligonucleotide
gagaguauaguugacgcug

SEQ ID NO: 663288 - RNA, 19 nt, Artificial Sequence
  Description of Artificial Sequence: Synthetic oligonucleotide
uuugcgcccaggcagaugu

SEQ ID NO: 663289 - RNA, 19 nt, Artificial Sequence
  Description of Artificial Sequence: Synthetic oligonucleotide
augaggacagaucuuuguc

SEQ ID NO: 663290 - RNA, 19 nt, Artificial Sequence
  Description of Artificial Sequence: Synthetic oligonucleotide
caaccuguugccuuggccc

SEQ ID NO: 663291 - RNA, 19 nt, Artificial Sequence
  Description of Artificial Sequence: Synthetic oligonucleotide
auauugaggcccuucucuc

SEQ ID NO: 663292 - RNA, 19 nt, Artificial Sequence
  Description of Artificial Sequence: Synthetic oligonucleotide
ugaggauacccaauguaac

SEQ ID NO: 663293 - RNA, 19 nt, Artificial Sequence
  Description of Artificial Sequence: Synthetic oligonucleotide
auaaugaugagaguauagu

SEQ ID NO: 663294 - RNA, 19 nt, Artificial Sequence
  Description of Artificial Sequence: Synthetic oligonucleotide
auaguugacgcugaggcug

SEQ ID NO: 663295 - RNA, 19 nt, Artificial Sequence
  Description of Artificial Sequence: Synthetic oligonucleotide
uaaugaugagaguauaguu

SEQ ID NO: 663296 - RNA, 19 nt, Artificial Sequence
  Description of Artificial Sequence: Synthetic oligonucleotide
caauaguggaguuguggcg

SEQ ID NO: 663297 - RNA, 19 nt, Artificial Sequence
  Description of Artificial Sequence: Synthetic oligonucleotide
auggucgaacugcucaacc

SEQ ID NO: 663298 - RNA, 19 nt, Artificial Sequence
  Description of Artificial Sequence: Synthetic oligonucleotide
uccauaaugaugagaguau

SEQ ID NO: 663299 - RNA, 19 nt, Artificial Sequence
  Description of Artificial Sequence: Synthetic oligonucleotide
uccaccguuguguucacag

SEQ ID NO: 663300 - RNA, 19 nt, Artificial Sequence
  Description of Artificial Sequence: Synthetic oligonucleotide
uaccaaucaccacaggcca

SEQ ID NO: 663301 - RNA, 19 nt, Artificial Sequence
  Description of Artificial Sequence: Synthetic oligonucleotide
uuggauacacggcaugugu

SEQ ID NO: 663302 - RNA, 19 nt, Artificial Sequence
  Description of Artificial Sequence: Synthetic oligonucleotide
gauuccuucaccuagccau

SEQ ID NO: 663303 - RNA, 19 nt, Artificial Sequence
  Description of Artificial Sequence: Synthetic oligonucleotide
augguguuugcgcccaggc

SEQ ID NO: 663304 - RNA, 19 nt, Artificial Sequence
  Description of Artificial Sequence: Synthetic oligonucleotide
gucaauaguggaguugugg

SEQ ID NO: 663305 - RNA, 19 nt, Artificial Sequence
  Description of Artificial Sequence: Synthetic oligonucleotide
uggauuacauccacuuugu

SEQ ID NO: 663306 - RNA, 19 nt, Artificial Sequence
  Description of Artificial Sequence: Synthetic oligonucleotide
aaguccaccguuguguuca

SEQ ID NO: 663307 - RNA, 19 nt, Artificial Sequence
  Description of Artificial Sequence: Synthetic oligonucleotide
cacgaaagcggcuccagcc

SEQ ID NO: 663308 - RNA, 19 nt, Artificial Sequence
  Description of Artificial Sequence: Synthetic oligonucleotide
gaaggcgcuacgaaaacug

SEQ ID NO: 663309 - RNA, 19 nt, Artificial Sequence
  Description of Artificial Sequence: Synthetic oligonucleotide
aguauaguugacgcugagg

SEQ ID NO: 663310 - RNA, 19 nt, Artificial Sequence
  Description of Artificial Sequence: Synthetic oligonucleotide
aucgcuacaugucacugca

SEQ ID NO: 663311 - RNA, 19 nt, Artificial Sequence
  Description of Artificial Sequence: Synthetic oligonucleotide
aucuuugguccacaugguc

SEQ ID NO: 663312 - RNA, 19 nt, Artificial Sequence
  Description of Artificial Sequence: Synthetic oligonucleotide
auaguggaguuguggcggc

SEQ ID NO: 663313 - RNA, 19 nt, Artificial Sequence
  Description of Artificial Sequence: Synthetic oligonucleotide
caccguuguguucacaggg

SEQ ID NO: 663314 - RNA, 19 nt, Artificial Sequence
  Description of Artificial Sequence: Synthetic oligonucleotide
uaaugaggacagaucuuug

SEQ ID NO: 663315 - RNA, 19 nt, Artificial Sequence
  Description of Artificial Sequence: Synthetic oligonucleotide
ggagauuugcugcauuuag

SEQ ID NO: 663316 - RNA, 19 nt, Artificial Sequence
  Description of Artificial Sequence: Synthetic oligonucleotide
auaugccuaccucagggca

SEQ ID NO: 663317 - RNA, 19 nt, Artificial Sequence
  Description of Artificial Sequence: Synthetic oligonucleotide
ugagaguauaguugacgcu

SEQ ID NO: 663318 - RNA, 19 nt, Artificial Sequence
  Description of Artificial Sequence: Synthetic oligonucleotide
uuggcuaucuugguguaug

SEQ ID NO: 663319 - RNA, 19 nt, Artificial Sequence
  Description of Artificial Sequence: Synthetic oligonucleotide
auccauaaugaugagagua

SEQ ID NO: 663320 - RNA, 19 nt, Artificial Sequence
  Description of Artificial Sequence: Synthetic oligonucleotide
cuucucucuagcaagggga

SEQ ID NO: 663321 - RNA, 19 nt, Artificial Sequence
  Description of Artificial Sequence: Synthetic oligonucleotide
uggucgaacugcucaaccc

SEQ ID NO: 663322 - RNA, 19 nt, Artificial Sequence
  Description of Artificial Sequence: Synthetic oligonucleotide
cuauacgaccaaauaugug

SEQ ID NO: 663323 - RNA, 19 nt, Artificial Sequence
  Description of Artificial Sequence: Synthetic oligonucleotide
cuagccaucgcuacauguc

SEQ ID NO: 663324 - RNA, 19 nt, Artificial Sequence
  Description of Artificial Sequence: Synthetic oligonucleotide
acacgaaagcggcuccagc

SEQ ID NO: 663325 - RNA, 19 nt, Artificial Sequence
  Description of Artificial Sequence: Synthetic oligonucleotide
aaacacccgcauccucggc

SEQ ID NO: 663326 - RNA, 19 nt, Artificial Sequence
  Description of Artificial Sequence: Synthetic oligonucleotide
caugaugucuggccguggg

SEQ ID NO: 663327 - RNA, 19 nt, Artificial Sequence
  Description of Artificial Sequence: Synthetic oligonucleotide
agugaggauacccaaugua

SEQ ID NO: 663328 - RNA, 19 nt, Artificial Sequence
  Description of Artificial Sequence: Synthetic oligonucleotide
aggauaaagacagcaccag

SEQ ID NO: 663329 - RNA, 19 nt, Artificial Sequence
  Description of Artificial Sequence: Synthetic oligonucleotide
uaugccuaccucagggcac

SEQ ID NO: 663330 - RNA, 19 nt, Artificial Sequence
  Description of Artificial Sequence: Synthetic oligonucleotide
auuuagcacugacagugga

SEQ ID NO: 663331 - RNA, 19 nt, Artificial Sequence
  Description of Artificial Sequence: Synthetic oligonucleotide
uucaccuagccaucgcuac

SEQ ID NO: 663332 - RNA, 19 nt, Artificial Sequence
  Description of Artificial Sequence: Synthetic oligonucleotide
agguccuaggccccagggc

SEQ ID NO: 663333 - RNA, 19 nt, Artificial Sequence
  Description of Artificial Sequence: Synthetic oligonucleotide
gcuacgaaaacuguagccc

SEQ ID NO: 663334 - RNA, 19 nt, Artificial Sequence
  Description of Artificial Sequence: Synthetic oligonucleotide
aggccgugcaaucacccgg

SEQ ID NO: 663335 - RNA, 19 nt, Artificial Sequence
  Description of Artificial Sequence: Synthetic oligonucleotide
cucagagccguacucuacc

SEQ ID NO: 663336 - RNA, 19 nt, Artificial Sequence
  Description of Artificial Sequence: Synthetic oligonucleotide
auacgaccaaauaugugag

SEQ ID NO: 663337 - RNA, 19 nt, Artificial Sequence
  Description of Artificial Sequence: Synthetic oligonucleotide
gguccgcuggauuacaucc

SEQ ID NO: 663338 - RNA, 19 nt, Artificial Sequence
  Description of Artificial Sequence: Synthetic oligonucleotide
caggauaaagacagcacca

SEQ ID NO: 663339 - RNA, 19 nt, Artificial Sequence
  Description of Artificial Sequence: Synthetic oligonucleotide
cuggucauccuucauccac

SEQ ID NO: 663340 - RNA, 19 nt, Artificial Sequence
  Description of Artificial Sequence: Synthetic oligonucleotide
ucugggcgugucaaggucu

SEQ ID NO: 663341 - RNA, 19 nt, Artificial Sequence
  Description of Artificial Sequence: Synthetic oligonucleotide
gagggugacucaaaccucc

SEQ ID NO: 663342 - RNA, 19 nt, Artificial Sequence
  Description of Artificial Sequence: Synthetic oligonucleotide
acgucaauaguggaguugu

SEQ ID NO: 663343 - RNA, 19 nt, Artificial Sequence
  Description of Artificial Sequence: Synthetic oligonucleotide
ugugcaugugugugugugc

SEQ ID NO: 663344 - RNA, 19 nt, Artificial Sequence
  Description of Artificial Sequence: Synthetic oligonucleotide
gggagauuccuucaccuag

SEQ ID NO: 663345 - RNA, 19 nt, Artificial Sequence
  Description of Artificial Sequence: Synthetic oligonucleotide
ccauaugccuaccucaggg

SEQ ID NO: 663346 - RNA, 19 nt, Artificial Sequence
  Description of Artificial Sequence: Synthetic oligonucleotide
guuguguucacagggugug

SEQ ID NO: 663347 - RNA, 19 nt, Artificial Sequence
  Description of Artificial Sequence: Synthetic oligonucleotide
uauugaggcccuucucucu

SEQ ID NO: 663348 - RNA, 19 nt, Artificial Sequence
  Description of Artificial Sequence: Synthetic oligonucleotide
gcuaucuugguguauguuc

SEQ ID NO: 663349 - RNA, 19 nt, Artificial Sequence
  Description of Artificial Sequence: Synthetic oligonucleotide
uguuuguggguuuggcuau

SEQ ID NO: 663350 - RNA, 19 nt, Artificial Sequence
  Description of Artificial Sequence: Synthetic oligonucleotide
ugaugagaguauaguugac

SEQ ID NO: 663351 - RNA, 19 nt, Artificial Sequence
  Description of Artificial Sequence: Synthetic oligonucleotide
ucaaggucuggucauccuu

SEQ ID NO: 663352 - RNA, 19 nt, Artificial Sequence
  Description of Artificial Sequence: Synthetic oligonucleotide
agccgggauaccaaucacc

SEQ ID NO: 663353 - RNA, 19 nt, Artificial Sequence
  Description of Artificial Sequence: Synthetic oligonucleotide
gugcaugugugugugugcg

SEQ ID NO: 663354 - RNA, 19 nt, Artificial Sequence
  Description of Artificial Sequence: Synthetic oligonucleotide
acacaacaaauccucccga

SEQ ID NO: 663355 - RNA, 19 nt, Artificial Sequence
  Description of Artificial Sequence: Synthetic oligonucleotide
uggauacacggcaugugua

SEQ ID NO: 663356 - RNA, 19 nt, Artificial Sequence
  Description of Artificial Sequence: Synthetic oligonucleotide
ucucgggaugccccugggg

SEQ ID NO: 663357 - RNA, 19 nt, Artificial Sequence
  Description of Artificial Sequence: Synthetic oligonucleotide
uugacgcugaggcugccaa

SEQ ID NO: 663358 - RNA, 19 nt, Artificial Sequence
  Description of Artificial Sequence: Synthetic oligonucleotide
ugucaaggucuggucaucc

SEQ ID NO: 663359 - RNA, 19 nt, Artificial Sequence
  Description of Artificial Sequence: Synthetic oligonucleotide
ggcaacaguagccuccaag

SEQ ID NO: 663360 - RNA, 19 nt, Artificial Sequence
  Description of Artificial Sequence: Synthetic oligonucleotide
uacaggccgugcaaucacc

SEQ ID NO: 663361 - RNA, 19 nt, Artificial Sequence
  Description of Artificial Sequence: Synthetic oligonucleotide
acggcauguguauuugcca

SEQ ID NO: 663362 - RNA, 19 nt, Artificial Sequence
  Description of Artificial Sequence: Synthetic oligonucleotide
ucaccuagccaucgcuaca

SEQ ID NO: 663363 - RNA, 19 nt, Artificial Sequence
  Description of Artificial Sequence: Synthetic oligonucleotide
auugugcggccaucuuugg

SEQ ID NO: 663364 - RNA, 19 nt, Artificial Sequence
  Description of Artificial Sequence: Synthetic oligonucleotide
caucuauacgaccaaauau

SEQ ID NO: 663365 - RNA, 19 nt, Artificial Sequence
  Description of Artificial Sequence: Synthetic oligonucleotide
cacuuuguagguggcauug

SEQ ID NO: 663366 - RNA, 19 nt, Artificial Sequence
  Description of Artificial Sequence: Synthetic oligonucleotide
ggcccuaggauacucuucc

SEQ ID NO: 663367 - RNA, 19 nt, Artificial Sequence
  Description of Artificial Sequence: Synthetic oligonucleotide
acaggccgugcaaucaccc

SEQ ID NO: 663368 - RNA, 19 nt, Artificial Sequence
  Description of Artificial Sequence: Synthetic oligonucleotide
acgaaagcggcuccagcca

SEQ ID NO: 663369 - RNA, 19 nt, Artificial Sequence
  Description of Artificial Sequence: Synthetic oligonucleotide
aaucacccggcgccucauc

SEQ ID NO: 663370 - RNA, 19 nt, Artificial Sequence
  Description of Artificial Sequence: Synthetic oligonucleotide
aggccgugaccacacauca

SEQ ID NO: 663371 - RNA, 19 nt, Artificial Sequence
  Description of Artificial Sequence: Synthetic oligonucleotide
uuccuucaccuagccaucg

SEQ ID NO: 663372 - RNA, 19 nt, Artificial Sequence
  Description of Artificial Sequence: Synthetic oligonucleotide
ugugugugcgugugugugu

SEQ ID NO: 663373 - RNA, 19 nt, Artificial Sequence
  Description of Artificial Sequence: Synthetic oligonucleotide
uaucuugguguauguucac

SEQ ID NO: 663374 - RNA, 19 nt, Artificial Sequence
  Description of Artificial Sequence: Synthetic oligonucleotide
ggcgcuacgaaaacuguag

SEQ ID NO: 663375 - RNA, 19 nt, Artificial Sequence
  Description of Artificial Sequence: Synthetic oligonucleotide
gugaggauacccaauguaa

SEQ ID NO: 663376 - RNA, 19 nt, Artificial Sequence
  Description of Artificial Sequence: Synthetic oligonucleotide
uacgaccaaauaugugagu

SEQ ID NO: 663377 - RNA, 19 nt, Artificial Sequence
  Description of Artificial Sequence: Synthetic oligonucleotide
cucggucucgggaugcccc

SEQ ID NO: 663378 - RNA, 19 nt, Artificial Sequence
  Description of Artificial Sequence: Synthetic oligonucleotide
gcuacaugucacugcaaag

SEQ ID NO: 663379 - RNA, 19 nt, Artificial Sequence
  Description of Artificial Sequence: Synthetic oligonucleotide
aaagccguugguggccuug

SEQ ID NO: 663380 - RNA, 19 nt, Artificial Sequence
  Description of Artificial Sequence: Synthetic oligonucleotide
acgcugaggcugccaaagc

SEQ ID NO: 663381 - RNA, 19 nt, Artificial Sequence
  Description of Artificial Sequence: Synthetic oligonucleotide
cuaccucagggcacagugc

SEQ ID NO: 663382 - RNA, 19 nt, Artificial Sequence
  Description of Artificial Sequence: Synthetic oligonucleotide
auuugcauuuguaaauguu

SEQ ID NO: 663383 - RNA, 19 nt, Artificial Sequence
  Description of Artificial Sequence: Synthetic oligonucleotide
aggccgugcccacugcugg

SEQ ID NO: 663384 - RNA, 19 nt, Artificial Sequence
  Description of Artificial Sequence: Synthetic oligonucleotide
ugucccagccuuccuuaca

SEQ ID NO: 663385 - RNA, 19 nt, Artificial Sequence
  Description of Artificial Sequence: Synthetic oligonucleotide
acuaagacuugagggagau

SEQ ID NO: 663386 - RNA, 19 nt, Artificial Sequence
  Description of Artificial Sequence: Synthetic oligonucleotide
agauuccuucaccuagcca

SEQ ID NO: 663387 - RNA, 19 nt, Artificial Sequence
  Description of Artificial Sequence: Synthetic oligonucleotide
ugugugugugcgugugugu

SEQ ID NO: 663388 - RNA, 19 nt, Artificial Sequence
  Description of Artificial Sequence: Synthetic oligonucleotide
caucuuggagggcugcgug

SEQ ID NO: 663389 - RNA, 19 nt, Artificial Sequence
  Description of Artificial Sequence: Synthetic oligonucleotide
cagagccguacucuacccg

SEQ ID NO: 663390 - RNA, 19 nt, Artificial Sequence
  Description of Artificial Sequence: Synthetic oligonucleotide
gaaaacuguagcccauggu

SEQ ID NO: 663391 - RNA, 19 nt, Artificial Sequence
  Description of Artificial Sequence: Synthetic oligonucleotide
guuggauacacggcaugug

SEQ ID NO: 663392 - RNA, 19 nt, Artificial Sequence
  Description of Artificial Sequence: Synthetic oligonucleotide
uggucaacggugguggguc

SEQ ID NO: 663393 - RNA, 19 nt, Artificial Sequence
  Description of Artificial Sequence: Synthetic oligonucleotide
gugugcaugugugugugug

SEQ ID NO: 663394 - RNA, 19 nt, Artificial Sequence
  Description of Artificial Sequence: Synthetic oligonucleotide
caauccucccaaccuguug

SEQ ID NO: 663395 - RNA, 19 nt, Artificial Sequence
  Description of Artificial Sequence: Synthetic oligonucleotide
ugaggcccuucucucuagc

SEQ ID NO: 663396 - RNA, 19 nt, Artificial Sequence
  Description of Artificial Sequence: Synthetic oligonucleotide
cuacaggccgugcaaucac

SEQ ID NO: 663397 - RNA, 19 nt, Artificial Sequence
  Description of Artificial Sequence: Synthetic oligonucleotide
ugugugugugugcgugugu

SEQ ID NO: 663398 - RNA, 19 nt, Artificial Sequence
  Description of Artificial Sequence: Synthetic oligonucleotide
gguggauccaugcuccuca

SEQ ID NO: 663399 - RNA, 19 nt, Artificial Sequence
  Description of Artificial Sequence: Synthetic oligonucleotide
guacucuacccgcuucagc

SEQ ID NO: 663400 - RNA, 19 nt, Artificial Sequence
  Description of Artificial Sequence: Synthetic oligonucleotide
acgaaaggguaugugugca

SEQ ID NO: 663401 - RNA, 19 nt, Artificial Sequence
  Description of Artificial Sequence: Synthetic oligonucleotide
gguccuaggccccagggca

SEQ ID NO: 663402 - RNA, 19 nt, Artificial Sequence
  Description of Artificial Sequence: Synthetic oligonucleotide
uaccaaccgggcacugcag

SEQ ID NO: 663403 - RNA, 19 nt, Artificial Sequence
  Description of Artificial Sequence: Synthetic oligonucleotide
cauggucaacggugguggg

SEQ ID NO: 663404 - RNA, 19 nt, Artificial Sequence
  Description of Artificial Sequence: Synthetic oligonucleotide
cacacgaaaggguaugugu

SEQ ID NO: 663405 - RNA, 19 nt, Artificial Sequence
  Description of Artificial Sequence: Synthetic oligonucleotide
uugagccgcacggagcuac

SEQ ID NO: 663406 - RNA, 19 nt, Artificial Sequence
  Description of Artificial Sequence: Synthetic oligonucleotide
cacauggucaacgguggug

SEQ ID NO: 663407 - RNA, 19 nt, Artificial Sequence
  Description of Artificial Sequence: Synthetic oligonucleotide
aguuguggcggcccucaga

SEQ ID NO: 663408 - RNA, 19 nt, Artificial Sequence
  Description of Artificial Sequence: Synthetic oligonucleotide
cuguguacagcuuggggua

SEQ ID NO: 663409 - RNA, 19 nt, Artificial Sequence
  Description of Artificial Sequence: Synthetic oligonucleotide
ucgaacugcucaacccauc

SEQ ID NO: 663410 - RNA, 19 nt, Artificial Sequence
  Description of Artificial Sequence: Synthetic oligonucleotide
agaguauaguugacgcuga

SEQ ID NO: 663411 - RNA, 19 nt, Artificial Sequence
  Description of Artificial Sequence: Synthetic oligonucleotide
gugugugugcgugugugug

SEQ ID NO: 663412 - RNA, 19 nt, Artificial Sequence
  Description of Artificial Sequence: Synthetic oligonucleotide
acgaaaacuguagcccaug

SEQ ID NO: 663413 - RNA, 19 nt, Artificial Sequence
  Description of Artificial Sequence: Synthetic oligonucleotide
cacugcgaaccuugcacug

SEQ ID NO: 663414 - RNA, 19 nt, Artificial Sequence
  Description of Artificial Sequence: Synthetic oligonucleotide
gugugugugugcgugugug

SEQ ID NO: 663415 - RNA, 19 nt, Artificial Sequence
  Description of Artificial Sequence: Synthetic oligonucleotide
ggucgaacugcucaaccca

SEQ ID NO: 663416 - RNA, 19 nt, Artificial Sequence
  Description of Artificial Sequence: Synthetic oligonucleotide
caggccgugcaaucacccg

SEQ ID NO: 663417 - RNA, 19 nt, Artificial Sequence
  Description of Artificial Sequence: Synthetic oligonucleotide
aaggcgcuacgaaaacugu

SEQ ID NO: 663418 - RNA, 19 nt, Artificial Sequence
  Description of Artificial Sequence: Synthetic oligonucleotide
cacgucaauaguggaguug

SEQ ID NO: 663419 - RNA, 19 nt, Artificial Sequence
  Description of Artificial Sequence: Synthetic oligonucleotide
uuuguggguuuggcuaucu

SEQ ID NO: 663420 - RNA, 19 nt, Artificial Sequence
  Description of Artificial Sequence: Synthetic oligonucleotide
cuagcaaggggagggugac

SEQ ID NO: 663421 - RNA, 19 nt, Artificial Sequence
  Description of Artificial Sequence: Synthetic oligonucleotide
ggcaguugagccagaagcc

SEQ ID NO: 663422 - RNA, 19 nt, Artificial Sequence
  Description of Artificial Sequence: Synthetic oligonucleotide
ggaggcaacaguagccucc

SEQ ID NO: 663423 - RNA, 19 nt, Artificial Sequence
  Description of Artificial Sequence: Synthetic oligonucleotide
ugccgggcccgagagauga

SEQ ID NO: 663424 - RNA, 19 nt, Artificial Sequence
  Description of Artificial Sequence: Synthetic oligonucleotide
ugguagacuccugggcacc

SEQ ID NO: 663425 - RNA, 19 nt, Artificial Sequence
  Description of Artificial Sequence: Synthetic oligonucleotide
agccaucgcuacaugucac

SEQ ID NO: 663426 - RNA, 19 nt, Artificial Sequence
  Description of Artificial Sequence: Synthetic oligonucleotide
uccacacgaaaggguaugu

SEQ ID NO: 663427 - RNA, 19 nt, Artificial Sequence
  Description of Artificial Sequence: Synthetic oligonucleotide
ucaacgguggugggucccc

SEQ ID NO: 663428 - RNA, 19 nt, Artificial Sequence
  Description of Artificial Sequence: Synthetic oligonucleotide
acggagcuaccuacaggcc

SEQ ID NO: 663429 - RNA, 19 nt, Artificial Sequence
  Description of Artificial Sequence: Synthetic oligonucleotide
cacaacaaauccucccgaa

SEQ ID NO: 663430 - RNA, 19 nt, Artificial Sequence
  Description of Artificial Sequence: Synthetic oligonucleotide
augugugugugugcgugug

SEQ ID NO: 663431 - RNA, 19 nt, Artificial Sequence
  Description of Artificial Sequence: Synthetic oligonucleotide
caaccgggcacugcagccg

SEQ ID NO: 663432 - RNA, 19 nt, Artificial Sequence
  Description of Artificial Sequence: Synthetic oligonucleotide
gucugguaacacagugagg

SEQ ID NO: 663433 - RNA, 19 nt, Artificial Sequence
  Description of Artificial Sequence: Synthetic oligonucleotide
cuccacacgaaaggguaug

SEQ ID NO: 663434 - RNA, 19 nt, Artificial Sequence
  Description of Artificial Sequence: Synthetic oligonucleotide
cugcucaacccauccagga

SEQ ID NO: 663435 - RNA, 19 nt, Artificial Sequence
  Description of Artificial Sequence: Synthetic oligonucleotide
ugcaugugugugugugcgu

SEQ ID NO: 663436 - RNA, 19 nt, Artificial Sequence
  Description of Artificial Sequence: Synthetic oligonucleotide
ugugugcaugugugugugu

SEQ ID NO: 663437 - RNA, 19 nt, Artificial Sequence
  Description of Artificial Sequence: Synthetic oligonucleotide
ugugugcgugugugugugc

SEQ ID NO: 663438 - RNA, 19 nt, Artificial Sequence
  Description of Artificial Sequence: Synthetic oligonucleotide
caccugcccgguuggauac

SEQ ID NO: 663439 - RNA, 19 nt, Artificial Sequence
  Description of Artificial Sequence: Synthetic oligonucleotide
gugugugcgugugugugug

SEQ ID NO: 663440 - RNA, 19 nt, Artificial Sequence
  Description of Artificial Sequence: Synthetic oligonucleotide
aguccaccguuguguucac

SEQ ID NO: 663441 - RNA, 19 nt, Artificial Sequence
  Description of Artificial Sequence: Synthetic oligonucleotide
cucugggcgugucaagguc

SEQ ID NO: 663442 - RNA, 19 nt, Artificial Sequence
  Description of Artificial Sequence: Synthetic oligonucleotide
ggggacgaugcccaggcac

SEQ ID NO: 663443 - RNA, 19 nt, Artificial Sequence
  Description of Artificial Sequence: Synthetic oligonucleotide
agcggguccgcuggauuac

SEQ ID NO: 663444 - RNA, 19 nt, Artificial Sequence
  Description of Artificial Sequence: Synthetic oligonucleotide
gaagcgaggccgugcccac

SEQ ID NO: 663445 - RNA, 19 nt, Artificial Sequence
  Description of Artificial Sequence: Synthetic oligonucleotide
gcauguguauuugccacug

SEQ ID NO: 663446 - RNA, 19 nt, Artificial Sequence
  Description of Artificial Sequence: Synthetic oligonucleotide
ggauaccaaucaccacagg

SEQ ID NO: 663447 - RNA, 19 nt, Artificial Sequence
  Description of Artificial Sequence: Synthetic oligonucleotide
cucaaaccuccgggcaugg

SEQ ID NO: 663448 - RNA, 19 nt, Artificial Sequence
  Description of Artificial Sequence: Synthetic oligonucleotide
uccgggcauggucgaacug

SEQ ID NO: 663449 - RNA, 19 nt, Artificial Sequence
  Description of Artificial Sequence: Synthetic oligonucleotide
cauggucgaacugcucaac

SEQ ID NO: 663450 - RNA, 19 nt, Artificial Sequence
  Description of Artificial Sequence: Synthetic oligonucleotide
gcacggagcuaccuacagg

SEQ ID NO: 663451 - RNA, 19 nt, Artificial Sequence
  Description of Artificial Sequence: Synthetic oligonucleotide
gcaugugugugugugcgug

SEQ ID NO: 663452 - RNA, 19 nt, Artificial Sequence
  Description of Artificial Sequence: Synthetic oligonucleotide
agggugacucaaaccuccg

SEQ ID NO: 663453 - RNA, 19 nt, Artificial Sequence
  Description of Artificial Sequence: Synthetic oligonucleotide
cacuaagacuugagggaga

SEQ ID NO: 663454 - RNA, 19 nt, Artificial Sequence
  Description of Artificial Sequence: Synthetic oligonucleotide
cuucaccuagccaucgcua

SEQ ID NO: 663455 - RNA, 19 nt, Artificial Sequence
  Description of Artificial Sequence: Synthetic oligonucleotide
uggauugugcggccaucuu

SEQ ID NO: 663456 - RNA, 19 nt, Artificial Sequence
  Description of Artificial Sequence: Synthetic oligonucleotide
auggucaacgguggugggu

SEQ ID NO: 663457 - RNA, 19 nt, Artificial Sequence
  Description of Artificial Sequence: Synthetic oligonucleotide
uguggauugugcggccauc

SEQ ID NO: 663458 - RNA, 19 nt, Artificial Sequence
  Description of Artificial Sequence: Synthetic oligonucleotide
cugcaaagucacacaacaa

SEQ ID NO: 663459 - RNA, 19 nt, Artificial Sequence
  Description of Artificial Sequence: Synthetic oligonucleotide
ucggucucgggaugccccu

SEQ ID NO: 663460 - RNA, 19 nt, Artificial Sequence
  Description of Artificial Sequence: Synthetic oligonucleotide
accguuguguucacagggu

SEQ ID NO: 663461 - RNA, 19 nt, Artificial Sequence
  Description of Artificial Sequence: Synthetic oligonucleotide
cacccggcgccucaucuug

SEQ ID NO: 663462 - RNA, 19 nt, Artificial Sequence
  Description of Artificial Sequence: Synthetic oligonucleotide
ccaaccuguugccuuggcc

SEQ ID NO: 663463 - RNA, 19 nt, Artificial Sequence
  Description of Artificial Sequence: Synthetic oligonucleotide
accagccgggauaccaauc

SEQ ID NO: 663464 - RNA, 19 nt, Artificial Sequence
  Description of Artificial Sequence: Synthetic oligonucleotide
uacccgcuucagccacugg

SEQ ID NO: 663465 - RNA, 19 nt, Artificial Sequence
  Description of Artificial Sequence: Synthetic oligonucleotide
cgggauaccaaucaccaca

SEQ ID NO: 663466 - RNA, 19 nt, Artificial Sequence
  Description of Artificial Sequence: Synthetic oligonucleotide
gaggccgugcccacugcug

SEQ ID NO: 663467 - RNA, 19 nt, Artificial Sequence
  Description of Artificial Sequence: Synthetic oligonucleotide
ggucucgggaugccccugg

SEQ ID NO: 663468 - RNA, 19 nt, Artificial Sequence
  Description of Artificial Sequence: Synthetic oligonucleotide
ggcuucacaucacugcgaa

SEQ ID NO: 663469 - RNA, 19 nt, Artificial Sequence
  Description of Artificial Sequence: Synthetic oligonucleotide
augguggauccaugcuccu

SEQ ID NO: 663470 - RNA, 19 nt, Artificial Sequence
  Description of Artificial Sequence: Synthetic oligonucleotide
guuuggggucugguaacac

SEQ ID NO: 663471 - RNA, 19 nt, Artificial Sequence
  Description of Artificial Sequence: Synthetic oligonucleotide
agcauacauggaggcaaca

SEQ ID NO: 663472 - RNA, 19 nt, Artificial Sequence
  Description of Artificial Sequence: Synthetic oligonucleotide
augccuaccucagggcaca

SEQ ID NO: 663473 - RNA, 19 nt, Artificial Sequence
  Description of Artificial Sequence: Synthetic oligonucleotide
uaccuacaggccgugcaau

SEQ ID NO: 663474 - RNA, 19 nt, Artificial Sequence
  Description of Artificial Sequence: Synthetic oligonucleotide
gguguauguucaccuggca

SEQ ID NO: 663475 - RNA, 19 nt, Artificial Sequence
  Description of Artificial Sequence: Synthetic oligonucleotide
cugcccgguuggauacacg

SEQ ID NO: 663476 - RNA, 19 nt, Artificial Sequence
  Description of Artificial Sequence: Synthetic oligonucleotide
cuaccacagggcccuagga

SEQ ID NO: 663477 - RNA, 19 nt, Artificial Sequence
  Description of Artificial Sequence: Synthetic oligonucleotide
gcgcuacgaaaacuguagc

SEQ ID NO: 663478 - RNA, 19 nt, Artificial Sequence
  Description of Artificial Sequence: Synthetic oligonucleotide
ccaccguuguguucacagg

SEQ ID NO: 663479 - RNA, 19 nt, Artificial Sequence
  Description of Artificial Sequence: Synthetic oligonucleotide
gucaacggugguggguccc

SEQ ID NO: 663480 - RNA, 19 nt, Artificial Sequence
  Description of Artificial Sequence: Synthetic oligonucleotide
cagccgggauaccaaucac

SEQ ID NO: 663481 - RNA, 19 nt, Artificial Sequence
  Description of Artificial Sequence: Synthetic oligonucleotide
gccgggauaccaaucacca

SEQ ID NO: 663482 - RNA, 19 nt, Artificial Sequence
  Description of Artificial Sequence: Synthetic oligonucleotide
ggccuugcacacauaaaca

SEQ ID NO: 663483 - RNA, 19 nt, Artificial Sequence
  Description of Artificial Sequence: Synthetic oligonucleotide
gugugcgugugugugugca

SEQ ID NO: 663484 - RNA, 19 nt, Artificial Sequence
  Description of Artificial Sequence: Synthetic oligonucleotide
ccacggcuaaugaggacag

SEQ ID NO: 663485 - RNA, 19 nt, Artificial Sequence
  Description of Artificial Sequence: Synthetic oligonucleotide
gugaagcgaggccgugccc

SEQ ID NO: 663486 - RNA, 19 nt, Artificial Sequence
  Description of Artificial Sequence: Synthetic oligonucleotide
ccacagggcccuaggauac

SEQ ID NO: 663487 - RNA, 19 nt, Artificial Sequence
  Description of Artificial Sequence: Synthetic oligonucleotide
uccucccaaccuguugccu

SEQ ID NO: 663488 - RNA, 19 nt, Artificial Sequence
  Description of Artificial Sequence: Synthetic oligonucleotide
gcgugucaaggucugguca

SEQ ID NO: 663489 - RNA, 19 nt, Artificial Sequence
  Description of Artificial Sequence: Synthetic oligonucleotide
ccgggcauggucgaacugc

SEQ ID NO: 663490 - RNA, 19 nt, Artificial Sequence
  Description of Artificial Sequence: Synthetic oligonucleotide
ccaaucaccacaggccaug

SEQ ID NO: 663491 - RNA, 19 nt, Artificial Sequence
  Description of Artificial Sequence: Synthetic oligonucleotide
cggcauguguauuugccac

SEQ ID NO: 663492 - RNA, 19 nt, Artificial Sequence
  Description of Artificial Sequence: Synthetic oligonucleotide
gccgcacggagcuaccuac

SEQ ID NO: 663493 - RNA, 19 nt, Artificial Sequence
  Description of Artificial Sequence: Synthetic oligonucleotide
guaggagccaucaggccgu

SEQ ID NO: 663494 - RNA, 19 nt, Artificial Sequence
  Description of Artificial Sequence: Synthetic oligonucleotide
cgugaagcgaggccgugcc

SEQ ID NO: 663495 - RNA, 19 nt, Artificial Sequence
  Description of Artificial Sequence: Synthetic oligonucleotide
ggauacacggcauguguau

SEQ ID NO: 663496 - RNA, 19 nt, Artificial Sequence
  Description of Artificial Sequence: Synthetic oligonucleotide
ugcgugaagcgaggccgug

SEQ ID NO: 663497 - RNA, 19 nt, Artificial Sequence
  Description of Artificial Sequence: Synthetic oligonucleotide
caaauccucccgaaggcuu

SEQ ID NO: 663498 - RNA, 19 nt, Artificial Sequence
  Description of Artificial Sequence: Synthetic oligonucleotide
cuacccgcuucagccacug

SEQ ID NO: 663499 - RNA, 19 nt, Artificial Sequence
  Description of Artificial Sequence: Synthetic oligonucleotide
ggccaugaccacuaagacu

SEQ ID NO: 663500 - RNA, 19 nt, Artificial Sequence
  Description of Artificial Sequence: Synthetic oligonucleotide
caccucggucucgggaugc

SEQ ID NO: 663501 - RNA, 19 nt, Artificial Sequence
  Description of Artificial Sequence: Synthetic oligonucleotide
guuuguggguuuggcuauc

SEQ ID NO: 663502 - RNA, 19 nt, Artificial Sequence
  Description of Artificial Sequence: Synthetic oligonucleotide
gguagacuccugggcaccc

SEQ ID NO: 663503 - RNA, 19 nt, Artificial Sequence
  Description of Artificial Sequence: Synthetic oligonucleotide
ccagccgggauaccaauca

SEQ ID NO: 663504 - RNA, 19 nt, Artificial Sequence
  Description of Artificial Sequence: Synthetic oligonucleotide
ggucaacgguggugggucc

SEQ ID NO: 663505 - RNA, 19 nt, Artificial Sequence
  Description of Artificial Sequence: Synthetic oligonucleotide
gucaaggucuggucauccu

SEQ ID NO: 663506 - RNA, 19 nt, Artificial Sequence
  Description of Artificial Sequence: Synthetic oligonucleotide
agccgcacggagcuaccua

SEQ ID NO: 663507 - RNA, 19 nt, Artificial Sequence
  Description of Artificial Sequence: Synthetic oligonucleotide
gccguugguggccuugcac

SEQ ID NO: 663508 - RNA, 19 nt, Artificial Sequence
  Description of Artificial Sequence: Synthetic oligonucleotide
agccguacucuacccgcuu

SEQ ID NO: 663509 - RNA, 19 nt, Artificial Sequence
  Description of Artificial Sequence: Synthetic oligonucleotide
cccacggcuaaugaggaca

SEQ ID NO: 663510 - RNA, 19 nt, Artificial Sequence
  Description of Artificial Sequence: Synthetic oligonucleotide
guuugcgcccaggcagaug

SEQ ID NO: 663511 - RNA, 19 nt, Artificial Sequence
  Description of Artificial Sequence: Synthetic oligonucleotide
aggcgcuacgaaaacugua

SEQ ID NO: 663512 - RNA, 19 nt, Artificial Sequence
  Description of Artificial Sequence: Synthetic oligonucleotide
ggagggugacucaaaccuc

SEQ ID NO: 663513 - RNA, 19 nt, Artificial Sequence
  Description of Artificial Sequence: Synthetic oligonucleotide
gggacgaugcccaggcaca

SEQ ID NO: 663514 - RNA, 19 nt, Artificial Sequence
  Description of Artificial Sequence: Synthetic oligonucleotide
ccaucgcuacaugucacug

SEQ ID NO: 663515 - RNA, 19 nt, Artificial Sequence
  Description of Artificial Sequence: Synthetic oligonucleotide
gguuggauacacggcaugu

SEQ ID NO: 663516 - RNA, 19 nt, Artificial Sequence
  Description of Artificial Sequence: Synthetic oligonucleotide
ggguccgcuggauuacauc

SEQ ID NO: 663517 - RNA, 19 nt, Artificial Sequence
  Description of Artificial Sequence: Synthetic oligonucleotide
guggauugugcggccaucu

SEQ ID NO: 663518 - RNA, 19 nt, Artificial Sequence
  Description of Artificial Sequence: Synthetic oligonucleotide
ggccgugcaaucacccggc

SEQ ID NO: 663519 - RNA, 19 nt, Artificial Sequence
  Description of Artificial Sequence: Synthetic oligonucleotide
aagcgaggccgugcccacu

SEQ ID NO: 663520 - RNA, 19 nt, Artificial Sequence
  Description of Artificial Sequence: Synthetic oligonucleotide
caugugugugugugcgugu

SEQ ID NO: 663521 - RNA, 19 nt, Artificial Sequence
  Description of Artificial Sequence: Synthetic oligonucleotide
ggauugugcggccaucuuu

SEQ ID NO: 663522 - RNA, 19 nt, Artificial Sequence
  Description of Artificial Sequence: Synthetic oligonucleotide
gcuucacaucacugcgaac

SEQ ID NO: 663523 - RNA, 19 nt, Artificial Sequence
  Description of Artificial Sequence: Synthetic oligonucleotide
gcaaucacccggcgccuca

SEQ ID NO: 663524 - RNA, 19 nt, Artificial Sequence
  Description of Artificial Sequence: Synthetic oligonucleotide
ggccgugggugcccacugg

SEQ ID NO: 663525 - RNA, 19 nt, Artificial Sequence
  Description of Artificial Sequence: Synthetic oligonucleotide
gccgugcaaucacccggcg

SEQ ID NO: 663526 - RNA, 19 nt, Artificial Sequence
  Description of Artificial Sequence: Synthetic oligonucleotide
ugccuaccucagggcacag

SEQ ID NO: 663527 - RNA, 19 nt, Artificial Sequence
  Description of Artificial Sequence: Synthetic oligonucleotide
gggguacagcuuggggccg

SEQ ID NO: 663528 - RNA, 19 nt, Artificial Sequence
  Description of Artificial Sequence: Synthetic oligonucleotide
ggagcuaccuacaggccgu

SEQ ID NO: 663529 - RNA, 19 nt, Artificial Sequence
  Description of Artificial Sequence: Synthetic oligonucleotide
ccgggauaccaaucaccac

SEQ ID NO: 663530 - RNA, 19 nt, Artificial Sequence
  Description of Artificial Sequence: Synthetic oligonucleotide
ccuacaggccgugcaauca

SEQ ID NO: 663531 - RNA, 19 nt, Artificial Sequence
  Description of Artificial Sequence: Synthetic oligonucleotide
acccggcgccucaucuugg

SEQ ID NO: 663532 - RNA, 19 nt, Artificial Sequence
  Description of Artificial Sequence: Synthetic oligonucleotide
gccguacucuacccgcuuc

SEQ ID NO: 663533 - RNA, 19 nt, Artificial Sequence
  Description of Artificial Sequence: Synthetic oligonucleotide
cgaaagcggcuccagccac

SEQ ID NO: 663534 - RNA, 19 nt, Artificial Sequence
  Description of Artificial Sequence: Synthetic oligonucleotide
ccggcaguugagccagaag

SEQ ID NO: 663535 - RNA, 19 nt, Artificial Sequence
  Description of Artificial Sequence: Synthetic oligonucleotide
cgcuacaugucacugcaaa

SEQ ID NO: 663536 - RNA, 19 nt, Artificial Sequence
  Description of Artificial Sequence: Synthetic oligonucleotide
ccauaaugaugagaguaua

SEQ ID NO: 663537 - RNA, 19 nt, Artificial Sequence
  Description of Artificial Sequence: Synthetic oligonucleotide
ccuagccaucgcuacaugu

SEQ ID NO: 663538 - RNA, 19 nt, Artificial Sequence
  Description of Artificial Sequence: Synthetic oligonucleotide
gucgaacugcucaacccau

SEQ ID NO: 663539 - RNA, 19 nt, Artificial Sequence
  Description of Artificial Sequence: Synthetic oligonucleotide
ggaaggcgcuacgaaaacu

SEQ ID NO: 663540 - RNA, 19 nt, Artificial Sequence
  Description of Artificial Sequence: Synthetic oligonucleotide
gcgugaagcgaggccgugc

SEQ ID NO: 663541 - RNA, 19 nt, Artificial Sequence
  Description of Artificial Sequence: Synthetic oligonucleotide
cugccgggcccgagagaug

SEQ ID NO: 663542 - RNA, 19 nt, Artificial Sequence
  Description of Artificial Sequence: Synthetic oligonucleotide
ccggugaaccuugcccucc

SEQ ID NO: 663543 - RNA, 19 nt, Artificial Sequence
  Description of Artificial Sequence: Synthetic oligonucleotide
ugguggccuugcacacaua

SEQ ID NO: 663544 - RNA, 19 nt, Artificial Sequence
  Description of Artificial Sequence: Synthetic oligonucleotide
gagccguacucuacccgcu

SEQ ID NO: 663545 - RNA, 19 nt, Artificial Sequence
  Description of Artificial Sequence: Synthetic oligonucleotide
caccuagccaucgcuacau

SEQ ID NO: 663546 - RNA, 19 nt, Artificial Sequence
  Description of Artificial Sequence: Synthetic oligonucleotide
cuccgggcauggucgaacu

SEQ ID NO: 663547 - RNA, 19 nt, Artificial Sequence
  Description of Artificial Sequence: Synthetic oligonucleotide
cgucaauaguggaguugug

SEQ ID NO: 663548 - RNA, 19 nt, Artificial Sequence
  Description of Artificial Sequence: Synthetic oligonucleotide
gccggugaaccuugcccuc

SEQ ID NO: 663549 - RNA, 19 nt, Artificial Sequence
  Description of Artificial Sequence: Synthetic oligonucleotide
cguacucuacccgcuucag

SEQ ID NO: 663550 - RNA, 19 nt, Artificial Sequence
  Description of Artificial Sequence: Synthetic oligonucleotide
cgguuggauacacggcaug

SEQ ID NO: 663551 - RNA, 19 nt, Artificial Sequence
  Description of Artificial Sequence: Synthetic oligonucleotide
cccaaccuguugccuuggc

SEQ ID NO: 663552 - RNA, 19 nt, Artificial Sequence
  Description of Artificial Sequence: Synthetic oligonucleotide
cugcgugaagcgaggccgu

SEQ ID NO: 663553 - RNA, 19 nt, Artificial Sequence
  Description of Artificial Sequence: Synthetic oligonucleotide
cagggcccuaggauacucu

SEQ ID NO: 663554 - RNA, 19 nt, Artificial Sequence
  Description of Artificial Sequence: Synthetic oligonucleotide
gcuaaugaggacagaucuu

SEQ ID NO: 663555 - RNA, 19 nt, Artificial Sequence
  Description of Artificial Sequence: Synthetic oligonucleotide
gcccacggcuaaugaggac

SEQ ID NO: 663556 - RNA, 19 nt, Artificial Sequence
  Description of Artificial Sequence: Synthetic oligonucleotide
ccaccucggucucgggaug

SEQ ID NO: 663557 - RNA, 19 nt, Artificial Sequence
  Description of Artificial Sequence: Synthetic oligonucleotide
ggccgugaccacacaucac

SEQ ID NO: 663558 - RNA, 19 nt, Artificial Sequence
  Description of Artificial Sequence: Synthetic oligonucleotide
ccucggucucgggaugccc

SEQ ID NO: 663559 - RNA, 19 nt, Artificial Sequence
  Description of Artificial Sequence: Synthetic oligonucleotide
cguuguguucacagggugu

SEQ ID NO: 663560 - RNA, 19 nt, Artificial Sequence
  Description of Artificial Sequence: Synthetic oligonucleotide
ccggcgccucaucuuggag

SEQ ID NO: 663561 - RNA, 19 nt, Artificial Sequence
  Description of Artificial Sequence: Synthetic oligonucleotide
ccacaugaugucuggccgu

SEQ ID NO: 663562 - RNA, 19 nt, Artificial Sequence
  Description of Artificial Sequence: Synthetic oligonucleotide
guccaccguuguguucaca

SEQ ID NO: 663563 - RNA, 19 nt, Artificial Sequence
  Description of Artificial Sequence: Synthetic oligonucleotide
gagccgcacggagcuaccu

SEQ ID NO: 663564 - RNA, 19 nt, Artificial Sequence
  Description of Artificial Sequence: Synthetic oligonucleotide
accuccgggcauggucgaa

SEQ ID NO: 663565 - RNA, 19 nt, Artificial Sequence
  Description of Artificial Sequence: Synthetic oligonucleotide
cccgcuucagccacuggau

SEQ ID NO: 663566 - RNA, 19 nt, Artificial Sequence
  Description of Artificial Sequence: Synthetic oligonucleotide
cuugagccgcacggagcua

SEQ ID NO: 663567 - RNA, 19 nt, Artificial Sequence
  Description of Artificial Sequence: Synthetic oligonucleotide
ggcuaucuugguguauguu

SEQ ID NO: 663568 - RNA, 19 nt, Artificial Sequence
  Description of Artificial Sequence: Synthetic oligonucleotide
cuggccgugggugcccacu

SEQ ID NO: 663569 - RNA, 19 nt, Artificial Sequence
  Description of Artificial Sequence: Synthetic oligonucleotide
ggagcggguccgcuggauu

SEQ ID NO: 663570 - RNA, 19 nt, Artificial Sequence
  Description of Artificial Sequence: Synthetic oligonucleotide
ccucccaaccuguugccuu

SEQ ID NO: 663571 - RNA, 19 nt, Artificial Sequence
  Description of Artificial Sequence: Synthetic oligonucleotide
ccugccgggcccgagagau

SEQ ID NO: 663572 - RNA, 19 nt, Artificial Sequence
  Description of Artificial Sequence: Synthetic oligonucleotide
gcgcagaugcaggggcaca

SEQ ID NO: 663573 - RNA, 19 nt, Artificial Sequence
  Description of Artificial Sequence: Synthetic oligonucleotide
ccuccacacgaaaggguau

SEQ ID NO: 663574 - RNA, 19 nt, Artificial Sequence
  Description of Artificial Sequence: Synthetic oligonucleotide
cccggcgccucaucuugga

SEQ ID NO: 663575 - RNA, 19 nt, Artificial Sequence
  Description of Artificial Sequence: Synthetic oligonucleotide
gccggcaguugagccagaa

SEQ ID NO: 663576 - RNA, 19 nt, Artificial Sequence
  Description of Artificial Sequence: Synthetic oligonucleotide
cacagggcccuaggauacu

SEQ ID NO: 663577 - RNA, 19 nt, Artificial Sequence
  Description of Artificial Sequence: Synthetic oligonucleotide
ccgguuggauacacggcau

SEQ ID NO: 663578 - RNA, 19 nt, Artificial Sequence
  Description of Artificial Sequence: Synthetic oligonucleotide
gcggguccgcuggauuaca

SEQ ID NO: 663579 - RNA, 19 nt, Artificial Sequence
  Description of Artificial Sequence: Synthetic oligonucleotide
ugccuaccacagggcccua

SEQ ID NO: 663580 - RNA, 19 nt, Artificial Sequence
  Description of Artificial Sequence: Synthetic oligonucleotide
cccuaccaaccgggcacug

SEQ ID NO: 663581 - RNA, 19 nt, Artificial Sequence
  Description of Artificial Sequence: Synthetic oligonucleotide
cggugaaccuugcccucca

SEQ ID NO: 663582 - RNA, 19 nt, Artificial Sequence
  Description of Artificial Sequence: Synthetic oligonucleotide
gccgggcccgagagaugag

SEQ ID NO: 663583 - RNA, 19 nt, Artificial Sequence
  Description of Artificial Sequence: Synthetic oligonucleotide
caaagccguugguggccuu

SEQ ID NO: 663584 - RNA, 19 nt, Artificial Sequence
  Description of Artificial Sequence: Synthetic oligonucleotide
ccgcuggauuacauccacu

SEQ ID NO: 663585 - RNA, 19 nt, Artificial Sequence
  Description of Artificial Sequence: Synthetic oligonucleotide
ccacgucaauaguggaguu

SEQ ID NO: 663586 - RNA, 19 nt, Artificial Sequence
  Description of Artificial Sequence: Synthetic oligonucleotide
gccuaccucagggcacagu

SEQ ID NO: 663587 - RNA, 19 nt, Artificial Sequence
  Description of Artificial Sequence: Synthetic oligonucleotide
cggucucgggaugccccug

SEQ ID NO: 663588 - RNA, 19 nt, Artificial Sequence
  Description of Artificial Sequence: Synthetic oligonucleotide
ccccuaccaaccgggcacu

SEQ ID NO: 663589 - RNA, 19 nt, Artificial Sequence
  Description of Artificial Sequence: Synthetic oligonucleotide
cggguccgcuggauuacau

SEQ ID NO: 663590 - RNA, 19 nt, Artificial Sequence
  Description of Artificial Sequence: Synthetic oligonucleotide
aauuagauuacucaguggg

SEQ ID NO: 663591 - RNA, 19 nt, Artificial Sequence
  Description of Artificial Sequence: Synthetic oligonucleotide
auuauaucgaaauauugcc

SEQ ID NO: 663592 - RNA, 19 nt, Artificial Sequence
  Description of Artificial Sequence: Synthetic oligonucleotide
aauagaauaccaaucauac

SEQ ID NO: 663593 - RNA, 19 nt, Artificial Sequence
  Description of Artificial Sequence: Synthetic oligonucleotide
aaaugauuacaauagacug

SEQ ID NO: 663594 - RNA, 19 nt, Artificial Sequence
  Description of Artificial Sequence: Synthetic oligonucleotide
aaaucuauaagcuagucaa

SEQ ID NO: 663595 - RNA, 19 nt, Artificial Sequence
  Description of Artificial Sequence: Synthetic oligonucleotide
auauucuuuaccuugacag

SEQ ID NO: 663596 - RNA, 19 nt, Artificial Sequence
  Description of Artificial Sequence: Synthetic oligonucleotide
aaugaaaucuauaagcuag

SEQ ID NO: 663597 - RNA, 19 nt, Artificial Sequence
  Description of Artificial Sequence: Synthetic oligonucleotide
aauccuugaacacuacucg

SEQ ID NO: 663598 - RNA, 19 nt, Artificial Sequence
  Description of Artificial Sequence: Synthetic oligonucleotide
aauguugucaauauuguag

SEQ ID NO: 663599 - RNA, 19 nt, Artificial Sequence
  Description of Artificial Sequence: Synthetic oligonucleotide
uuaauugcauauuuguagc

SEQ ID NO: 663600 - RNA, 19 nt, Artificial Sequence
  Description of Artificial Sequence: Synthetic oligonucleotide
auaucugacgguuuguacg

SEQ ID NO: 663601 - RNA, 19 nt, Artificial Sequence
  Description of Artificial Sequence: Synthetic oligonucleotide
aauaaaacaaccacgagua

SEQ ID NO: 663602 - RNA, 19 nt, Artificial Sequence
  Description of Artificial Sequence: Synthetic oligonucleotide
ugacgauacauuuagcugc

SEQ ID NO: 663603 - RNA, 19 nt, Artificial Sequence
  Description of Artificial Sequence: Synthetic oligonucleotide
uacucuaaauccuaaagac

SEQ ID NO: 663604 - RNA, 19 nt, Artificial Sequence
  Description of Artificial Sequence: Synthetic oligonucleotide
aaauuagauuacucagugg

SEQ ID NO: 663605 - RNA, 19 nt, Artificial Sequence
  Description of Artificial Sequence: Synthetic oligonucleotide
agaucuagcaaauaagaga

SEQ ID NO: 663606 - RNA, 19 nt, Artificial Sequence
  Description of Artificial Sequence: Synthetic oligonucleotide
uugucaauauuguaggcag

SEQ ID NO: 663607 - RNA, 19 nt, Artificial Sequence
  Description of Artificial Sequence: Synthetic oligonucleotide
ugugcagacgccaucaacc

SEQ ID NO: 663608 - RNA, 19 nt, Artificial Sequence
  Description of Artificial Sequence: Synthetic oligonucleotide
uuuaccuugacaggaauag

SEQ ID NO: 663609 - RNA, 19 nt, Artificial Sequence
  Description of Artificial Sequence: Synthetic oligonucleotide
cacaaauuagauuacucag

SEQ ID NO: 663610 - RNA, 19 nt, Artificial Sequence
  Description of Artificial Sequence: Synthetic oligonucleotide
ucaugcauguacaaaauuc

SEQ ID NO: 663611 - RNA, 19 nt, Artificial Sequence
  Description of Artificial Sequence: Synthetic oligonucleotide
caaagcacauucauuaacc

SEQ ID NO: 663612 - RNA, 19 nt, Artificial Sequence
  Description of Artificial Sequence: Synthetic oligonucleotide
aaauuaacuucuucacuug

SEQ ID NO: 663613 - RNA, 19 nt, Artificial Sequence
  Description of Artificial Sequence: Synthetic oligonucleotide
ucucaaagcacauucauua

SEQ ID NO: 663614 - RNA, 19 nt, Artificial Sequence
  Description of Artificial Sequence: Synthetic oligonucleotide
uuacuuaucuuucuucucu

SEQ ID NO: 663615 - RNA, 19 nt, Artificial Sequence
  Description of Artificial Sequence: Synthetic oligonucleotide
ugaaccaugcuccagugga

SEQ ID NO: 663616 - RNA, 19 nt, Artificial Sequence
  Description of Artificial Sequence: Synthetic oligonucleotide
acugucgaugaucugauag

SEQ ID NO: 663617 - RNA, 19 nt, Artificial Sequence
  Description of Artificial Sequence: Synthetic oligonucleotide
aaaugcaauguuuauguuu

SEQ ID NO: 663618 - RNA, 19 nt, Artificial Sequence
  Description of Artificial Sequence: Synthetic oligonucleotide
gacgccaucaaccaggaac

SEQ ID NO: 663619 - RNA, 19 nt, Artificial Sequence
  Description of Artificial Sequence: Synthetic oligonucleotide
acuacucgcugccacaacc

SEQ ID NO: 663620 - RNA, 19 nt, Artificial Sequence
  Description of Artificial Sequence: Synthetic oligonucleotide
uaauagaauaccaaucaua

SEQ ID NO: 663621 - RNA, 19 nt, Artificial Sequence
  Description of Artificial Sequence: Synthetic oligonucleotide
aagagaugacauuacagaa

SEQ ID NO: 663622 - RNA, 19 nt, Artificial Sequence
  Description of Artificial Sequence: Synthetic oligonucleotide
uaagcuagucaauuacagg

SEQ ID NO: 663623 - RNA, 19 nt, Artificial Sequence
  Description of Artificial Sequence: Synthetic oligonucleotide
auagacuguaacuauaaaa

SEQ ID NO: 663624 - RNA, 19 nt, Artificial Sequence
  Description of Artificial Sequence: Synthetic oligonucleotide
uuauaucgaaauauugccu

SEQ ID NO: 663625 - RNA, 19 nt, Artificial Sequence
  Description of Artificial Sequence: Synthetic oligonucleotide
ugcauguacaaaauucuca

SEQ ID NO: 663626 - RNA, 19 nt, Artificial Sequence
  Description of Artificial Sequence: Synthetic oligonucleotide
caaaaggccauuuuggauc

SEQ ID NO: 663627 - RNA, 19 nt, Artificial Sequence
  Description of Artificial Sequence: Synthetic oligonucleotide
ugugcccauacuuauaucu

SEQ ID NO: 663628 - RNA, 19 nt, Artificial Sequence
  Description of Artificial Sequence: Synthetic oligonucleotide
uuuaaaucacuuacuggcu

SEQ ID NO: 663629 - RNA, 19 nt, Artificial Sequence
  Description of Artificial Sequence: Synthetic oligonucleotide
uauaucgaaauauugccua

SEQ ID NO: 663630 - RNA, 19 nt, Artificial Sequence
  Description of Artificial Sequence: Synthetic oligonucleotide
uuucagaagcagcauaugu

SEQ ID NO: 663631 - RNA, 19 nt, Artificial Sequence
  Description of Artificial Sequence: Synthetic oligonucleotide
uuccauauucuuuaccuug

SEQ ID NO: 663632 - RNA, 19 nt, Artificial Sequence
  Description of Artificial Sequence: Synthetic oligonucleotide
uguuaucugagaucaagcu

SEQ ID NO: 663633 - RNA, 19 nt, Artificial Sequence
  Description of Artificial Sequence: Synthetic oligonucleotide
aacgcaauuugccacugug

SEQ ID NO: 663634 - RNA, 19 nt, Artificial Sequence
  Description of Artificial Sequence: Synthetic oligonucleotide
aaugauuacaauagacugu

SEQ ID NO: 663635 - RNA, 19 nt, Artificial Sequence
  Description of Artificial Sequence: Synthetic oligonucleotide
acuaaaccccagcucaccc

SEQ ID NO: 663636 - RNA, 19 nt, Artificial Sequence
  Description of Artificial Sequence: Synthetic oligonucleotide
aaaugaaaucuauaagcua

SEQ ID NO: 663637 - RNA, 19 nt, Artificial Sequence
  Description of Artificial Sequence: Synthetic oligonucleotide
uuacagaacuucauggcac

SEQ ID NO: 663638 - RNA, 19 nt, Artificial Sequence
  Description of Artificial Sequence: Synthetic oligonucleotide
aaccauuauaucgaaauau

SEQ ID NO: 663639 - RNA, 19 nt, Artificial Sequence
  Description of Artificial Sequence: Synthetic oligonucleotide
cuauaagcuagucaauuac

SEQ ID NO: 663640 - RNA, 19 nt, Artificial Sequence
  Description of Artificial Sequence: Synthetic oligonucleotide
gacgcuauccaccaaagga

SEQ ID NO: 663641 - RNA, 19 nt, Artificial Sequence
  Description of Artificial Sequence: Synthetic oligonucleotide
auuuagcuuauauugcuga

SEQ ID NO: 663642 - RNA, 19 nt, Artificial Sequence
  Description of Artificial Sequence: Synthetic oligonucleotide
auaucgaaauauugccuac

SEQ ID NO: 663643 - RNA, 19 nt, Artificial Sequence
  Description of Artificial Sequence: Synthetic oligonucleotide
cacgcuuuccuuuacgccg

SEQ ID NO: 663644 - RNA, 19 nt, Artificial Sequence
  Description of Artificial Sequence: Synthetic oligonucleotide
uuuaagaucaugguuuuau

SEQ ID NO: 663645 - RNA, 19 nt, Artificial Sequence
  Description of Artificial Sequence: Synthetic oligonucleotide
agaguaaguuuucuuuagg

SEQ ID NO: 663646 - RNA, 19 nt, Artificial Sequence
  Description of Artificial Sequence: Synthetic oligonucleotide
ucugggacgaguuugcuuc

SEQ ID NO: 663647 - RNA, 19 nt, Artificial Sequence
  Description of Artificial Sequence: Synthetic oligonucleotide
acuuauaucugacgguuug

SEQ ID NO: 663648 - RNA, 19 nt, Artificial Sequence
  Description of Artificial Sequence: Synthetic oligonucleotide
aucgaaauauugccuacuc

SEQ ID NO: 663649 - RNA, 19 nt, Artificial Sequence
  Description of Artificial Sequence: Synthetic oligonucleotide
gaaguugugaggaggggcg

SEQ ID NO: 663650 - RNA, 19 nt, Artificial Sequence
  Description of Artificial Sequence: Synthetic oligonucleotide
aaaacaaccacgaguauuu

SEQ ID NO: 663651 - RNA, 19 nt, Artificial Sequence
  Description of Artificial Sequence: Synthetic oligonucleotide
uagcaaauaagagaugaca

SEQ ID NO: 663652 - RNA, 19 nt, Artificial Sequence
  Description of Artificial Sequence: Synthetic oligonucleotide
guugaaugcgcucucggag

SEQ ID NO: 663653 - RNA, 19 nt, Artificial Sequence
  Description of Artificial Sequence: Synthetic oligonucleotide
aggagcuacugacaguuac

SEQ ID NO: 663654 - RNA, 19 nt, Artificial Sequence
  Description of Artificial Sequence: Synthetic oligonucleotide
gauuccauauucuuuaccu

SEQ ID NO: 663655 - RNA, 19 nt, Artificial Sequence
  Description of Artificial Sequence: Synthetic oligonucleotide
guuuguacgguuucugcag

SEQ ID NO: 663656 - RNA, 19 nt, Artificial Sequence
  Description of Artificial Sequence: Synthetic oligonucleotide
auccuuacugccuuggucu

SEQ ID NO: 663657 - RNA, 19 nt, Artificial Sequence
  Description of Artificial Sequence: Synthetic oligonucleotide
auaccaaucauacuucaaa

SEQ ID NO: 663658 - RNA, 19 nt, Artificial Sequence
  Description of Artificial Sequence: Synthetic oligonucleotide
agagaugacauuacagaac

SEQ ID NO: 663659 - RNA, 19 nt, Artificial Sequence
  Description of Artificial Sequence: Synthetic oligonucleotide
aaauauugccuacucuaaa

SEQ ID NO: 663660 - RNA, 19 nt, Artificial Sequence
  Description of Artificial Sequence: Synthetic oligonucleotide
ucacuuacuggcuuuuagc

SEQ ID NO: 663661 - RNA, 19 nt, Artificial Sequence
  Description of Artificial Sequence: Synthetic oligonucleotide
uuugacuaaaccccagcuc

SEQ ID NO: 663662 - RNA, 19 nt, Artificial Sequence
  Description of Artificial Sequence: Synthetic oligonucleotide
uucgcaguuuucuucacca

SEQ ID NO: 663663 - RNA, 19 nt, Artificial Sequence
  Description of Artificial Sequence: Synthetic oligonucleotide
uaauuacuuacuucaauuu

SEQ ID NO: 663664 - RNA, 19 nt, Artificial Sequence
  Description of Artificial Sequence: Synthetic oligonucleotide
ugucuauccugucuuuugc

SEQ ID NO: 663665 - RNA, 19 nt, Artificial Sequence
  Description of Artificial Sequence: Synthetic oligonucleotide
aauauuguaggcagugaga

SEQ ID NO: 663666 - RNA, 19 nt, Artificial Sequence
  Description of Artificial Sequence: Synthetic oligonucleotide
auaagcuagucaauuacag

SEQ ID NO: 663667 - RNA, 19 nt, Artificial Sequence
  Description of Artificial Sequence: Synthetic oligonucleotide
uccuaaagacuuaaagaaa

SEQ ID NO: 663668 - RNA, 19 nt, Artificial Sequence
  Description of Artificial Sequence: Synthetic oligonucleotide
auauguggaaagugauuuc

SEQ ID NO: 663669 - RNA, 19 nt, Artificial Sequence
  Description of Artificial Sequence: Synthetic oligonucleotide
uacaauagacuguaacuau

SEQ ID NO: 663670 - RNA, 19 nt, Artificial Sequence
  Description of Artificial Sequence: Synthetic oligonucleotide
ucuauaagcuagucaauua

SEQ ID NO: 663671 - RNA, 19 nt, Artificial Sequence
  Description of Artificial Sequence: Synthetic oligonucleotide
agaacugucgaugaucuga

SEQ ID NO: 663672 - RNA, 19 nt, Artificial Sequence
  Description of Artificial Sequence: Synthetic oligonucleotide
uccaggagcggauuucccg

SEQ ID NO: 663673 - RNA, 19 nt, Artificial Sequence
  Description of Artificial Sequence: Synthetic oligonucleotide
gagaugacauuacagaacu

SEQ ID NO: 663674 - RNA, 19 nt, Artificial Sequence
  Description of Artificial Sequence: Synthetic oligonucleotide
aaaccauuauaucgaaaua

SEQ ID NO: 663675 - RNA, 19 nt, Artificial Sequence
  Description of Artificial Sequence: Synthetic oligonucleotide
uuaaaucacuuacuggcuu

SEQ ID NO: 663676 - RNA, 19 nt, Artificial Sequence
  Description of Artificial Sequence: Synthetic oligonucleotide
uauaucugacgguuuguac

SEQ ID NO: 663677 - RNA, 19 nt, Artificial Sequence
  Description of Artificial Sequence: Synthetic oligonucleotide
ggaagcaccugacagaaug

SEQ ID NO: 663678 - RNA, 19 nt, Artificial Sequence
  Description of Artificial Sequence: Synthetic oligonucleotide
uuggauccuaguaggcagg

SEQ ID NO: 663679 - RNA, 19 nt, Artificial Sequence
  Description of Artificial Sequence: Synthetic oligonucleotide
auugugcccauacuuauau

SEQ ID NO: 663680 - RNA, 19 nt, Artificial Sequence
  Description of Artificial Sequence: Synthetic oligonucleotide
ggcagcacaaauuagauua

SEQ ID NO: 663681 - RNA, 19 nt, Artificial Sequence
  Description of Artificial Sequence: Synthetic oligonucleotide
agaugaaccaugcuccagu

SEQ ID NO: 663682 - RNA, 19 nt, Artificial Sequence
  Description of Artificial Sequence: Synthetic oligonucleotide
aucccugccagacaaguug

SEQ ID NO: 663683 - RNA, 19 nt, Artificial Sequence
  Description of Artificial Sequence: Synthetic oligonucleotide
uaauugcauauuuguagcu

SEQ ID NO: 663684 - RNA, 19 nt, Artificial Sequence
  Description of Artificial Sequence: Synthetic oligonucleotide
auuacagguucagaaauga

SEQ ID NO: 663685 - RNA, 19 nt, Artificial Sequence
  Description of Artificial Sequence: Synthetic oligonucleotide
cauucggggaguucuuucg

SEQ ID NO: 663686 - RNA, 19 nt, Artificial Sequence
  Description of Artificial Sequence: Synthetic oligonucleotide
ucgaaauauugccuacucu

SEQ ID NO: 663687 - RNA, 19 nt, Artificial Sequence
  Description of Artificial Sequence: Synthetic oligonucleotide
auaugggcagcacaaauua

SEQ ID NO: 663688 - RNA, 19 nt, Artificial Sequence
  Description of Artificial Sequence: Synthetic oligonucleotide
aauagguuccuuccuuuua

SEQ ID NO: 663689 - RNA, 19 nt, Artificial Sequence
  Description of Artificial Sequence: Synthetic oligonucleotide
gaucuagcaaauaagagau

SEQ ID NO: 663690 - RNA, 19 nt, Artificial Sequence
  Description of Artificial Sequence: Synthetic oligonucleotide
uccuuuacgccgugcaucc

SEQ ID NO: 663691 - RNA, 19 nt, Artificial Sequence
  Description of Artificial Sequence: Synthetic oligonucleotide
ugguugaaugcgcucucgg

SEQ ID NO: 663692 - RNA, 19 nt, Artificial Sequence
  Description of Artificial Sequence: Synthetic oligonucleotide
auauaucacuaucagcaaa

SEQ ID NO: 663693 - RNA, 19 nt, Artificial Sequence
  Description of Artificial Sequence: Synthetic oligonucleotide
caguggguuauuuaaaaca

SEQ ID NO: 663694 - RNA, 19 nt, Artificial Sequence
  Description of Artificial Sequence: Synthetic oligonucleotide
agcacaaauuagauuacuc

SEQ ID NO: 663695 - RNA, 19 nt, Artificial Sequence
  Description of Artificial Sequence: Synthetic oligonucleotide
ucucucuuaagagacucug

SEQ ID NO: 663696 - RNA, 19 nt, Artificial Sequence
  Description of Artificial Sequence: Synthetic oligonucleotide
acuccaaucccugccagac

SEQ ID NO: 663697 - RNA, 19 nt, Artificial Sequence
  Description of Artificial Sequence: Synthetic oligonucleotide
ucggaguuuagaagcaccu

SEQ ID NO: 663698 - RNA, 19 nt, Artificial Sequence
  Description of Artificial Sequence: Synthetic oligonucleotide
gauguggacgcuauccacc

SEQ ID NO: 663699 - RNA, 19 nt, Artificial Sequence
  Description of Artificial Sequence: Synthetic oligonucleotide
uuagcugcacacuccaauc

SEQ ID NO: 663700 - RNA, 19 nt, Artificial Sequence
  Description of Artificial Sequence: Synthetic oligonucleotide
augagcauauaugggcagc

SEQ ID NO: 663701 - RNA, 19 nt, Artificial Sequence
  Description of Artificial Sequence: Synthetic oligonucleotide
uuuagcuuauauugcugaa

SEQ ID NO: 663702 - RNA, 19 nt, Artificial Sequence
  Description of Artificial Sequence: Synthetic oligonucleotide
ugcauugugcccauacuua

SEQ ID NO: 663703 - RNA, 19 nt, Artificial Sequence
  Description of Artificial Sequence: Synthetic oligonucleotide
gaugaaccaugcuccagug

SEQ ID NO: 663704 - RNA, 19 nt, Artificial Sequence
  Description of Artificial Sequence: Synthetic oligonucleotide
uuagauuacucaguggguu

SEQ ID NO: 663705 - RNA, 19 nt, Artificial Sequence
  Description of Artificial Sequence: Synthetic oligonucleotide
gucaauauuguaggcagug

SEQ ID NO: 663706 - RNA, 19 nt, Artificial Sequence
  Description of Artificial Sequence: Synthetic oligonucleotide
aacacuacucgcugccaca

SEQ ID NO: 663707 - RNA, 19 nt, Artificial Sequence
  Description of Artificial Sequence: Synthetic oligonucleotide
gacaggaauagguuccuuc

SEQ ID NO: 663708 - RNA, 19 nt, Artificial Sequence
  Description of Artificial Sequence: Synthetic oligonucleotide
cuugaacacuacucgcugc

SEQ ID NO: 663709 - RNA, 19 nt, Artificial Sequence
  Description of Artificial Sequence: Synthetic oligonucleotide
ggagaguguaaucaaaaca

SEQ ID NO: 663710 - RNA, 19 nt, Artificial Sequence
  Description of Artificial Sequence: Synthetic oligonucleotide
augauuacaauagacugua

SEQ ID NO: 663711 - RNA, 19 nt, Artificial Sequence
  Description of Artificial Sequence: Synthetic oligonucleotide
acgaguauuuaauugcaua

SEQ ID NO: 663712 - RNA, 19 nt, Artificial Sequence
  Description of Artificial Sequence: Synthetic oligonucleotide
ugcaauguuuauguuuuac

SEQ ID NO: 663713 - RNA, 19 nt, Artificial Sequence
  Description of Artificial Sequence: Synthetic oligonucleotide
augucuauccugucuuuug

SEQ ID NO: 663714 - RNA, 19 nt, Artificial Sequence
  Description of Artificial Sequence: Synthetic oligonucleotide
ugcccauacuuauaucuga

SEQ ID NO: 663715 - RNA, 19 nt, Artificial Sequence
  Description of Artificial Sequence: Synthetic oligonucleotide
cucaaggagagugugcccc

SEQ ID NO: 663716 - RNA, 19 nt, Artificial Sequence
  Description of Artificial Sequence: Synthetic oligonucleotide
cucggaguuuagaagcacc

SEQ ID NO: 663717 - RNA, 19 nt, Artificial Sequence
  Description of Artificial Sequence: Synthetic oligonucleotide
uuaccuugacaggaauagg

SEQ ID NO: 663718 - RNA, 19 nt, Artificial Sequence
  Description of Artificial Sequence: Synthetic oligonucleotide
ugccuuggucuauugaaga

SEQ ID NO: 663719 - RNA, 19 nt, Artificial Sequence
  Description of Artificial Sequence: Synthetic oligonucleotide
uggacgcuauccaccaaag

SEQ ID NO: 663720 - RNA, 19 nt, Artificial Sequence
  Description of Artificial Sequence: Synthetic oligonucleotide
aaacuccaaugacugagua

SEQ ID NO: 663721 - RNA, 19 nt, Artificial Sequence
  Description of Artificial Sequence: Synthetic oligonucleotide
caacguugauagcagaguc

SEQ ID NO: 663722 - RNA, 19 nt, Artificial Sequence
  Description of Artificial Sequence: Synthetic oligonucleotide
uuaaaucaaaaggccauuu

SEQ ID NO: 663723 - RNA, 19 nt, Artificial Sequence
  Description of Artificial Sequence: Synthetic oligonucleotide
aguggguuauuuaaaacau

SEQ ID NO: 663724 - RNA, 19 nt, Artificial Sequence
  Description of Artificial Sequence: Synthetic oligonucleotide
uuaagaucaugguuuuauu

SEQ ID NO: 663725 - RNA, 19 nt, Artificial Sequence
  Description of Artificial Sequence: Synthetic oligonucleotide
caugagcauauaugggcag

SEQ ID NO: 663726 - RNA, 19 nt, Artificial Sequence
  Description of Artificial Sequence: Synthetic oligonucleotide
ccuacucuaaauccuaaag

SEQ ID NO: 663727 - RNA, 19 nt, Artificial Sequence
  Description of Artificial Sequence: Synthetic oligonucleotide
ccauuuuggauccuaguag

SEQ ID NO: 663728 - RNA, 19 nt, Artificial Sequence
  Description of Artificial Sequence: Synthetic oligonucleotide
gcuccuuugacuaaacccc

SEQ ID NO: 663729 - RNA, 19 nt, Artificial Sequence
  Description of Artificial Sequence: Synthetic oligonucleotide
ugucaauauuguaggcagu

SEQ ID NO: 663730 - RNA, 19 nt, Artificial Sequence
  Description of Artificial Sequence: Synthetic oligonucleotide
ucuuuaccuugacaggaau

SEQ ID NO: 663731 - RNA, 19 nt, Artificial Sequence
  Description of Artificial Sequence: Synthetic oligonucleotide
gaaccugaagaaccccgcc

SEQ ID NO: 663732 - RNA, 19 nt, Artificial Sequence
  Description of Artificial Sequence: Synthetic oligonucleotide
ugucgaugaucugauaguc

SEQ ID NO: 663733 - RNA, 19 nt, Artificial Sequence
  Description of Artificial Sequence: Synthetic oligonucleotide
uguaggucacucccagaac

SEQ ID NO: 663734 - RNA, 19 nt, Artificial Sequence
  Description of Artificial Sequence: Synthetic oligonucleotide
acgcaauuugccacugugc

SEQ ID NO: 663735 - RNA, 19 nt, Artificial Sequence
  Description of Artificial Sequence: Synthetic oligonucleotide
acucuaaauccuaaagacu

SEQ ID NO: 663736 - RNA, 19 nt, Artificial Sequence
  Description of Artificial Sequence: Synthetic oligonucleotide
acaaccacgaguauuuaau

SEQ ID NO: 663737 - RNA, 19 nt, Artificial Sequence
  Description of Artificial Sequence: Synthetic oligonucleotide
guacgguuucugcagacac

SEQ ID NO: 663738 - RNA, 19 nt, Artificial Sequence
  Description of Artificial Sequence: Synthetic oligonucleotide
uaucgaaauauugccuacu

SEQ ID NO: 663739 - RNA, 19 nt, Artificial Sequence
  Description of Artificial Sequence: Synthetic oligonucleotide
agguucagaaaugauuaca

SEQ ID NO: 663740 - RNA, 19 nt, Artificial Sequence
  Description of Artificial Sequence: Synthetic oligonucleotide
caauuugccacugugcaga

SEQ ID NO: 663741 - RNA, 19 nt, Artificial Sequence
  Description of Artificial Sequence: Synthetic oligonucleotide
auugccuacucuaaauccu

SEQ ID NO: 663742 - RNA, 19 nt, Artificial Sequence
  Description of Artificial Sequence: Synthetic oligonucleotide
agugugccccgucugcuuc

SEQ ID NO: 663743 - RNA, 19 nt, Artificial Sequence
  Description of Artificial Sequence: Synthetic oligonucleotide
ugucucucuuaagagacuc

SEQ ID NO: 663744 - RNA, 19 nt, Artificial Sequence
  Description of Artificial Sequence: Synthetic oligonucleotide
acuuacuggcuuuuagcau

SEQ ID NO: 663745 - RNA, 19 nt, Artificial Sequence
  Description of Artificial Sequence: Synthetic oligonucleotide
aauaccaaucauacuucaa

SEQ ID NO: 663746 - RNA, 19 nt, Artificial Sequence
  Description of Artificial Sequence: Synthetic oligonucleotide
ugccaacgcaauuugccac

SEQ ID NO: 663747 - RNA, 19 nt, Artificial Sequence
  Description of Artificial Sequence: Synthetic oligonucleotide
uagauuacucaguggguua

SEQ ID NO: 663748 - RNA, 19 nt, Artificial Sequence
  Description of Artificial Sequence: Synthetic oligonucleotide
uuauaucugacgguuugua

SEQ ID NO: 663749 - RNA, 19 nt, Artificial Sequence
  Description of Artificial Sequence: Synthetic oligonucleotide
gaagaaccccgccugccug

SEQ ID NO: 663750 - RNA, 19 nt, Artificial Sequence
  Description of Artificial Sequence: Synthetic oligonucleotide
ugcauccuuacugccuugg

SEQ ID NO: 663751 - RNA, 19 nt, Artificial Sequence
  Description of Artificial Sequence: Synthetic oligonucleotide
aaguugugaggaggggcgg

SEQ ID NO: 663752 - RNA, 19 nt, Artificial Sequence
  Description of Artificial Sequence: Synthetic oligonucleotide
uguagaggccccuggugac

SEQ ID NO: 663753 - RNA, 19 nt, Artificial Sequence
  Description of Artificial Sequence: Synthetic oligonucleotide
aaccccgccugccugacau

SEQ ID NO: 663754 - RNA, 19 nt, Artificial Sequence
  Description of Artificial Sequence: Synthetic oligonucleotide
aucuauaagcuagucaauu

SEQ ID NO: 663755 - RNA, 19 nt, Artificial Sequence
  Description of Artificial Sequence: Synthetic oligonucleotide
uuacagguucagaaaugau

SEQ ID NO: 663756 - RNA, 19 nt, Artificial Sequence
  Description of Artificial Sequence: Synthetic oligonucleotide
uuggucuauugaagaaccu

SEQ ID NO: 663757 - RNA, 19 nt, Artificial Sequence
  Description of Artificial Sequence: Synthetic oligonucleotide
auuagauuacucagugggu

SEQ ID NO: 663758 - RNA, 19 nt, Artificial Sequence
  Description of Artificial Sequence: Synthetic oligonucleotide
uggauugcuuuuccaguaa

SEQ ID NO: 663759 - RNA, 19 nt, Artificial Sequence
  Description of Artificial Sequence: Synthetic oligonucleotide
aaucuauaagcuagucaau

SEQ ID NO: 663760 - RNA, 19 nt, Artificial Sequence
  Description of Artificial Sequence: Synthetic oligonucleotide
accaacguugauagcagag

SEQ ID NO: 663761 - RNA, 19 nt, Artificial Sequence
  Description of Artificial Sequence: Synthetic oligonucleotide
cauccuuacugccuugguc

SEQ ID NO: 663762 - RNA, 19 nt, Artificial Sequence
  Description of Artificial Sequence: Synthetic oligonucleotide
uugccuacucuaaauccua

SEQ ID NO: 663763 - RNA, 19 nt, Artificial Sequence
  Description of Artificial Sequence: Synthetic oligonucleotide
auguggacgcuauccacca

SEQ ID NO: 663764 - RNA, 19 nt, Artificial Sequence
  Description of Artificial Sequence: Synthetic oligonucleotide
cuagucaauuacagguuca

SEQ ID NO: 663765 - RNA, 19 nt, Artificial Sequence
  Description of Artificial Sequence: Synthetic oligonucleotide
aggaauagguuccuuccuu

SEQ ID NO: 663766 - RNA, 19 nt, Artificial Sequence
  Description of Artificial Sequence: Synthetic oligonucleotide
ucugguugaaugcgcucuc

SEQ ID NO: 663767 - RNA, 19 nt, Artificial Sequence
  Description of Artificial Sequence: Synthetic oligonucleotide
uuuacgccgugcauccuua

SEQ ID NO: 663768 - RNA, 19 nt, Artificial Sequence
  Description of Artificial Sequence: Synthetic oligonucleotide
ucugcuucgcaguuuucuu

SEQ ID NO: 663769 - RNA, 19 nt, Artificial Sequence
  Description of Artificial Sequence: Synthetic oligonucleotide
gacuaaaccccagcucacc

SEQ ID NO: 663770 - RNA, 19 nt, Artificial Sequence
  Description of Artificial Sequence: Synthetic oligonucleotide
uugucucucuuaagagacu

SEQ ID NO: 663771 - RNA, 19 nt, Artificial Sequence
  Description of Artificial Sequence: Synthetic oligonucleotide
ugacgguuuguacgguuuc

SEQ ID NO: 663772 - RNA, 19 nt, Artificial Sequence
  Description of Artificial Sequence: Synthetic oligonucleotide
agccaauaauaauuacuua

SEQ ID NO: 663773 - RNA, 19 nt, Artificial Sequence
  Description of Artificial Sequence: Synthetic oligonucleotide
uacuuauaucugacgguuu

SEQ ID NO: 663774 - RNA, 19 nt, Artificial Sequence
  Description of Artificial Sequence: Synthetic oligonucleotide
cauacuuauaucugacggu

SEQ ID NO: 663775 - RNA, 19 nt, Artificial Sequence
  Description of Artificial Sequence: Synthetic oligonucleotide
ugauuacaauagacuguaa

SEQ ID NO: 663776 - RNA, 19 nt, Artificial Sequence
  Description of Artificial Sequence: Synthetic oligonucleotide
ggucuauugaagaaccuga

SEQ ID NO: 663777 - RNA, 19 nt, Artificial Sequence
  Description of Artificial Sequence: Synthetic oligonucleotide
auagcagaguccaccacgu

SEQ ID NO: 663778 - RNA, 19 nt, Artificial Sequence
  Description of Artificial Sequence: Synthetic oligonucleotide
ggcuuugaugccaauguug

SEQ ID NO: 663779 - RNA, 19 nt, Artificial Sequence
  Description of Artificial Sequence: Synthetic oligonucleotide
agcauauguggaaagugau

SEQ ID NO: 663780 - RNA, 19 nt, Artificial Sequence
  Description of Artificial Sequence: Synthetic oligonucleotide
gacgauacauuuagcugca

SEQ ID NO: 663781 - RNA, 19 nt, Artificial Sequence
  Description of Artificial Sequence: Synthetic oligonucleotide
gcuagucaauuacagguuc

SEQ ID NO: 663782 - RNA, 19 nt, Artificial Sequence
  Description of Artificial Sequence: Synthetic oligonucleotide
aguugugaggaggggcggg

SEQ ID NO: 663783 - RNA, 19 nt, Artificial Sequence
  Description of Artificial Sequence: Synthetic oligonucleotide
aguccucaaggagagugug

SEQ ID NO: 663784 - RNA, 19 nt, Artificial Sequence
  Description of Artificial Sequence: Synthetic oligonucleotide
aggagagugugccccgucu

SEQ ID NO: 663785 - RNA, 19 nt, Artificial Sequence
  Description of Artificial Sequence: Synthetic oligonucleotide
aagagacucugggacgagu

SEQ ID NO: 663786 - RNA, 19 nt, Artificial Sequence
  Description of Artificial Sequence: Synthetic oligonucleotide
agcagcauauguggaaagu

SEQ ID NO: 663787 - RNA, 19 nt, Artificial Sequence
  Description of Artificial Sequence: Synthetic oligonucleotide
auuguugacgauacauuua

SEQ ID NO: 663788 - RNA, 19 nt, Artificial Sequence
  Description of Artificial Sequence: Synthetic oligonucleotide
ugccuacucuaaauccuaa

SEQ ID NO: 663789 - RNA, 19 nt, Artificial Sequence
  Description of Artificial Sequence: Synthetic oligonucleotide
cuucggugacucagagggg

SEQ ID NO: 663790 - RNA, 19 nt, Artificial Sequence
  Description of Artificial Sequence: Synthetic oligonucleotide
acgcuauccaccaaaggau

SEQ ID NO: 663791 - RNA, 19 nt, Artificial Sequence
  Description of Artificial Sequence: Synthetic oligonucleotide
uacgccgugcauccuuacu

SEQ ID NO: 663792 - RNA, 19 nt, Artificial Sequence
  Description of Artificial Sequence: Synthetic oligonucleotide
ugagaccaacguugauagc

SEQ ID NO: 663793 - RNA, 19 nt, Artificial Sequence
  Description of Artificial Sequence: Synthetic oligonucleotide
agggguauggucccuggua

SEQ ID NO: 663794 - RNA, 19 nt, Artificial Sequence
  Description of Artificial Sequence: Synthetic oligonucleotide
ugaacacuacucgcugcca

SEQ ID NO: 663795 - RNA, 19 nt, Artificial Sequence
  Description of Artificial Sequence: Synthetic oligonucleotide
uagguuccuuccuuuuaaa

SEQ ID NO: 663796 - RNA, 19 nt, Artificial Sequence
  Description of Artificial Sequence: Synthetic oligonucleotide
agauuacucaguggguuau

SEQ ID NO: 663797 - RNA, 19 nt, Artificial Sequence
  Description of Artificial Sequence: Synthetic oligonucleotide
cuggacucacuuccaccgg

SEQ ID NO: 663798 - RNA, 19 nt, Artificial Sequence
  Description of Artificial Sequence: Synthetic oligonucleotide
auuacucaguggguuauuu

SEQ ID NO: 663799 - RNA, 19 nt, Artificial Sequence
  Description of Artificial Sequence: Synthetic oligonucleotide
cuuugacuaaaccccagcu

SEQ ID NO: 663800 - RNA, 19 nt, Artificial Sequence
  Description of Artificial Sequence: Synthetic oligonucleotide
gagaacugucgaugaucug

SEQ ID NO: 663801 - RNA, 19 nt, Artificial Sequence
  Description of Artificial Sequence: Synthetic oligonucleotide
cuaaaccccagcucaccca

SEQ ID NO: 663802 - RNA, 19 nt, Artificial Sequence
  Description of Artificial Sequence: Synthetic oligonucleotide
cuuuaccuugacaggaaua

SEQ ID NO: 663803 - RNA, 19 nt, Artificial Sequence
  Description of Artificial Sequence: Synthetic oligonucleotide
ucugacgguuuguacgguu

SEQ ID NO: 663804 - RNA, 19 nt, Artificial Sequence
  Description of Artificial Sequence: Synthetic oligonucleotide
aucaagcuuuaagaucaug

SEQ ID NO: 663805 - RNA, 19 nt, Artificial Sequence
  Description of Artificial Sequence: Synthetic oligonucleotide
cuaucagcaaaugcaaugu

SEQ ID NO: 663806 - RNA, 19 nt, Artificial Sequence
  Description of Artificial Sequence: Synthetic oligonucleotide
cuugacguguggggcaagc

SEQ ID NO: 663807 - RNA, 19 nt, Artificial Sequence
  Description of Artificial Sequence: Synthetic oligonucleotide
agacuuaaagaaacauuuu

SEQ ID NO: 663808 - RNA, 19 nt, Artificial Sequence
  Description of Artificial Sequence: Synthetic oligonucleotide
cugguugaaugcgcucucg

SEQ ID NO: 663809 - RNA, 19 nt, Artificial Sequence
  Description of Artificial Sequence: Synthetic oligonucleotide
cagcuccuuugacuaaacc

SEQ ID NO: 663810 - RNA, 19 nt, Artificial Sequence
  Description of Artificial Sequence: Synthetic oligonucleotide
agacaaguugaaaauccuu

SEQ ID NO: 663811 - RNA, 19 nt, Artificial Sequence
  Description of Artificial Sequence: Synthetic oligonucleotide
ugggacgaguuugcuuccg

SEQ ID NO: 663812 - RNA, 19 nt, Artificial Sequence
  Description of Artificial Sequence: Synthetic oligonucleotide
guagaggccccuggugacg

SEQ ID NO: 663813 - RNA, 19 nt, Artificial Sequence
  Description of Artificial Sequence: Synthetic oligonucleotide
acgguuuguacgguuucug

SEQ ID NO: 663814 - RNA, 19 nt, Artificial Sequence
  Description of Artificial Sequence: Synthetic oligonucleotide
gugcagacgccaucaacca

SEQ ID NO: 663815 - RNA, 19 nt, Artificial Sequence
  Description of Artificial Sequence: Synthetic oligonucleotide
ggacgcuauccaccaaagg

SEQ ID NO: 663816 - RNA, 19 nt, Artificial Sequence
  Description of Artificial Sequence: Synthetic oligonucleotide
auccuaguaggcaggagau

SEQ ID NO: 663817 - RNA, 19 nt, Artificial Sequence
  Description of Artificial Sequence: Synthetic oligonucleotide
ccuuugacuaaaccccagc

SEQ ID NO: 663818 - RNA, 19 nt, Artificial Sequence
  Description of Artificial Sequence: Synthetic oligonucleotide
guggacgcuauccaccaaa

SEQ ID NO: 663819 - RNA, 19 nt, Artificial Sequence
  Description of Artificial Sequence: Synthetic oligonucleotide
ugcgcucucggaguuuaga

SEQ ID NO: 663820 - RNA, 19 nt, Artificial Sequence
  Description of Artificial Sequence: Synthetic oligonucleotide
cucucggaguuuagaagca

SEQ ID NO: 663821 - RNA, 19 nt, Artificial Sequence
  Description of Artificial Sequence: Synthetic oligonucleotide
gguugaaugcgcucucgga

SEQ ID NO: 663822 - RNA, 19 nt, Artificial Sequence
  Description of Artificial Sequence: Synthetic oligonucleotide
cugggacgaguuugcuucc

SEQ ID NO: 663823 - RNA, 19 nt, Artificial Sequence
  Description of Artificial Sequence: Synthetic oligonucleotide
cagaacuucauggcacguc

SEQ ID NO: 663824 - RNA, 19 nt, Artificial Sequence
  Description of Artificial Sequence: Synthetic oligonucleotide
uugugcccauacuuauauc

SEQ ID NO: 663825 - RNA, 19 nt, Artificial Sequence
  Description of Artificial Sequence: Synthetic oligonucleotide
gagcauauaugggcagcac

SEQ ID NO: 663826 - RNA, 19 nt, Artificial Sequence
  Description of Artificial Sequence: Synthetic oligonucleotide
uucuugacguguggggcaa

SEQ ID NO: 663827 - RNA, 19 nt, Artificial Sequence
  Description of Artificial Sequence: Synthetic oligonucleotide
aggagcggauuucccgucu

SEQ ID NO: 663828 - RNA, 19 nt, Artificial Sequence
  Description of Artificial Sequence: Synthetic oligonucleotide
aacugucgaugaucugaua

SEQ ID NO: 663829 - RNA, 19 nt, Artificial Sequence
  Description of Artificial Sequence: Synthetic oligonucleotide
gcauauuuguagcuuuaaa

SEQ ID NO: 663830 - RNA, 19 nt, Artificial Sequence
  Description of Artificial Sequence: Synthetic oligonucleotide
gacguguggggcaagcucu

SEQ ID NO: 663831 - RNA, 19 nt, Artificial Sequence
  Description of Artificial Sequence: Synthetic oligonucleotide
gucuauugaagaaccugaa

SEQ ID NO: 663832 - RNA, 19 nt, Artificial Sequence
  Description of Artificial Sequence: Synthetic oligonucleotide
cagacaaguugaaaauccu

SEQ ID NO: 663833 - RNA, 19 nt, Artificial Sequence
  Description of Artificial Sequence: Synthetic oligonucleotide
ccuggugacggcuggacuc

SEQ ID NO: 663834 - RNA, 19 nt, Artificial Sequence
  Description of Artificial Sequence: Synthetic oligonucleotide
cugucgaugaucugauagu

SEQ ID NO: 663835 - RNA, 19 nt, Artificial Sequence
  Description of Artificial Sequence: Synthetic oligonucleotide
cccacgcuuuccuuuacgc

SEQ ID NO: 663836 - RNA, 19 nt, Artificial Sequence
  Description of Artificial Sequence: Synthetic oligonucleotide
agcuagucaauuacagguu

SEQ ID NO: 663837 - RNA, 19 nt, Artificial Sequence
  Description of Artificial Sequence: Synthetic oligonucleotide
guauggucccugguagaug

SEQ ID NO: 663838 - RNA, 19 nt, Artificial Sequence
  Description of Artificial Sequence: Synthetic oligonucleotide
ccaugagcauauaugggca

SEQ ID NO: 663839 - RNA, 19 nt, Artificial Sequence
  Description of Artificial Sequence: Synthetic oligonucleotide
ggucacucccagaacuucc

SEQ ID NO: 663840 - RNA, 19 nt, Artificial Sequence
  Description of Artificial Sequence: Synthetic oligonucleotide
aggcagugagaccaacguu

SEQ ID NO: 663841 - RNA, 19 nt, Artificial Sequence
  Description of Artificial Sequence: Synthetic oligonucleotide
acgauacauuuagcugcac

SEQ ID NO: 663842 - RNA, 19 nt, Artificial Sequence
  Description of Artificial Sequence: Synthetic oligonucleotide
gaauagguuccuuccuuuu

SEQ ID NO: 663843 - RNA, 19 nt, Artificial Sequence
  Description of Artificial Sequence: Synthetic oligonucleotide
ggagagugugccccgucug

SEQ ID NO: 663844 - RNA, 19 nt, Artificial Sequence
  Description of Artificial Sequence: Synthetic oligonucleotide
acagaacuucauggcacgu

SEQ ID NO: 663845 - RNA, 19 nt, Artificial Sequence
  Description of Artificial Sequence: Synthetic oligonucleotide
ccacgcuuuccuuuacgcc

SEQ ID NO: 663846 - RNA, 19 nt, Artificial Sequence
  Description of Artificial Sequence: Synthetic oligonucleotide
accuugacaggaauagguu

SEQ ID NO: 663847 - RNA, 19 nt, Artificial Sequence
  Description of Artificial Sequence: Synthetic oligonucleotide
gaacuucauggcacgucca

SEQ ID NO: 663848 - RNA, 19 nt, Artificial Sequence
  Description of Artificial Sequence: Synthetic oligonucleotide
uguggacgcuauccaccaa

SEQ ID NO: 663849 - RNA, 19 nt, Artificial Sequence
  Description of Artificial Sequence: Synthetic oligonucleotide
agaaccccgccugccugac

SEQ ID NO: 663850 - RNA, 19 nt, Artificial Sequence
  Description of Artificial Sequence: Synthetic oligonucleotide
uccuaguaggcaggagauc

SEQ ID NO: 663851 - RNA, 19 nt, Artificial Sequence
  Description of Artificial Sequence: Synthetic oligonucleotide
uuacgccgugcauccuuac

SEQ ID NO: 663852 - RNA, 19 nt, Artificial Sequence
  Description of Artificial Sequence: Synthetic oligonucleotide
auggcacguccauggccag

SEQ ID NO: 663853 - RNA, 19 nt, Artificial Sequence
  Description of Artificial Sequence: Synthetic oligonucleotide
cccugguagaugaaccaug

SEQ ID NO: 663854 - RNA, 19 nt, Artificial Sequence
  Description of Artificial Sequence: Synthetic oligonucleotide
uggcacguccauggccagg

SEQ ID NO: 663855 - RNA, 19 nt, Artificial Sequence
  Description of Artificial Sequence: Synthetic oligonucleotide
gaagcaccugacagaaugu

SEQ ID NO: 663856 - RNA, 19 nt, Artificial Sequence
  Description of Artificial Sequence: Synthetic oligonucleotide
ggauugcuuuuccaguaaa

SEQ ID NO: 663857 - RNA, 19 nt, Artificial Sequence
  Description of Artificial Sequence: Synthetic oligonucleotide
gacuuucgcugcuccucca

SEQ ID NO: 663858 - RNA, 19 nt, Artificial Sequence
  Description of Artificial Sequence: Synthetic oligonucleotide
gaacugucgaugaucugau

SEQ ID NO: 663859 - RNA, 19 nt, Artificial Sequence
  Description of Artificial Sequence: Synthetic oligonucleotide
uugcuauguagaggccccu

SEQ ID NO: 663860 - RNA, 19 nt, Artificial Sequence
  Description of Artificial Sequence: Synthetic oligonucleotide
caggagcggauuucccguc

SEQ ID NO: 663861 - RNA, 19 nt, Artificial Sequence
  Description of Artificial Sequence: Synthetic oligonucleotide
aaaggccauuuuggauccu

SEQ ID NO: 663862 - RNA, 19 nt, Artificial Sequence
  Description of Artificial Sequence: Synthetic oligonucleotide
guggguuauuuaaaacaua

SEQ ID NO: 663863 - RNA, 19 nt, Artificial Sequence
  Description of Artificial Sequence: Synthetic oligonucleotide
cuauguagaggccccuggu

SEQ ID NO: 663864 - RNA, 19 nt, Artificial Sequence
  Description of Artificial Sequence: Synthetic oligonucleotide
acguuguguguagcuucuc

SEQ ID NO: 663865 - RNA, 19 nt, Artificial Sequence
  Description of Artificial Sequence: Synthetic oligonucleotide
cuuauaucugacgguuugu

SEQ ID NO: 663866 - RNA, 19 nt, Artificial Sequence
  Description of Artificial Sequence: Synthetic oligonucleotide
uccauucggggaguucuuu

SEQ ID NO: 663867 - RNA, 19 nt, Artificial Sequence
  Description of Artificial Sequence: Synthetic oligonucleotide
cuaguaggcaggagaucua

SEQ ID NO: 663868 - RNA, 19 nt, Artificial Sequence
  Description of Artificial Sequence: Synthetic oligonucleotide
cugcauugugcccauacuu

SEQ ID NO: 663869 - RNA, 19 nt, Artificial Sequence
  Description of Artificial Sequence: Synthetic oligonucleotide
acgcuuuccuuuacgccgu

SEQ ID NO: 663870 - RNA, 19 nt, Artificial Sequence
  Description of Artificial Sequence: Synthetic oligonucleotide
cacuacucgcugccacaac

SEQ ID NO: 663871 - RNA, 19 nt, Artificial Sequence
  Description of Artificial Sequence: Synthetic oligonucleotide
cgcucucggaguuuagaag

SEQ ID NO: 663872 - RNA, 19 nt, Artificial Sequence
  Description of Artificial Sequence: Synthetic oligonucleotide
gugcauccuuacugccuug

SEQ ID NO: 663873 - RNA, 19 nt, Artificial Sequence
  Description of Artificial Sequence: Synthetic oligonucleotide
ccuaguaggcaggagaucu

SEQ ID NO: 663874 - RNA, 19 nt, Artificial Sequence
  Description of Artificial Sequence: Synthetic oligonucleotide
auuuagcugcacacuccaa

SEQ ID NO: 663875 - RNA, 19 nt, Artificial Sequence
  Description of Artificial Sequence: Synthetic oligonucleotide
gacgguuuguacgguuucu

SEQ ID NO: 663876 - RNA, 19 nt, Artificial Sequence
  Description of Artificial Sequence: Synthetic oligonucleotide
cacguuguguguagcuucu

SEQ ID NO: 663877 - RNA, 19 nt, Artificial Sequence
  Description of Artificial Sequence: Synthetic oligonucleotide
cgaguauuuaauugcauau

SEQ ID NO: 663878 - RNA, 19 nt, Artificial Sequence
  Description of Artificial Sequence: Synthetic oligonucleotide
cacgaguauuuaauugcau

SEQ ID NO: 663879 - RNA, 19 nt, Artificial Sequence
  Description of Artificial Sequence: Synthetic oligonucleotide
aucugacgguuuguacggu

SEQ ID NO: 663880 - RNA, 19 nt, Artificial Sequence
  Description of Artificial Sequence: Synthetic oligonucleotide
cuggugacggcuggacuca

SEQ ID NO: 663881 - RNA, 19 nt, Artificial Sequence
  Description of Artificial Sequence: Synthetic oligonucleotide
ggaauagguuccuuccuuu

SEQ ID NO: 663882 - RNA, 19 nt, Artificial Sequence
  Description of Artificial Sequence: Synthetic oligonucleotide
cuuuacgccgugcauccuu

SEQ ID NO: 663883 - RNA, 19 nt, Artificial Sequence
  Description of Artificial Sequence: Synthetic oligonucleotide
ggguauggucccugguaga

SEQ ID NO: 663884 - RNA, 19 nt, Artificial Sequence
  Description of Artificial Sequence: Synthetic oligonucleotide
gcuuugcuauguagaggcc

SEQ ID NO: 663885 - RNA, 19 nt, Artificial Sequence
  Description of Artificial Sequence: Synthetic oligonucleotide
gcgcucucggaguuuagaa

SEQ ID NO: 663886 - RNA, 19 nt, Artificial Sequence
  Description of Artificial Sequence: Synthetic oligonucleotide
cugacgguuuguacgguuu

SEQ ID NO: 663887 - RNA, 19 nt, Artificial Sequence
  Description of Artificial Sequence: Synthetic oligonucleotide
cuuucgcugcuccuccagu

SEQ ID NO: 663888 - RNA, 19 nt, Artificial Sequence
  Description of Artificial Sequence: Synthetic oligonucleotide
gccaacgcaauuugccacu

SEQ ID NO: 663889 - RNA, 19 nt, Artificial Sequence
  Description of Artificial Sequence: Synthetic oligonucleotide
ggagcuacugacaguuacu

SEQ ID NO: 663890 - RNA, 19 nt, Artificial Sequence
  Description of Artificial Sequence: Synthetic oligonucleotide
gaaccaugcuccaguggau

SEQ ID NO: 663891 - RNA, 19 nt, Artificial Sequence
  Description of Artificial Sequence: Synthetic oligonucleotide
uggugacggcuggacucac

SEQ ID NO: 663892 - RNA, 19 nt, Artificial Sequence
  Description of Artificial Sequence: Synthetic oligonucleotide
gaucaagcuuuaagaucau

SEQ ID NO: 663893 - RNA, 19 nt, Artificial Sequence
  Description of Artificial Sequence: Synthetic oligonucleotide
gauuacucaguggguuauu

SEQ ID NO: 663894 - RNA, 19 nt, Artificial Sequence
  Description of Artificial Sequence: Synthetic oligonucleotide
agacgccaucaaccaggaa

SEQ ID NO: 663895 - RNA, 19 nt, Artificial Sequence
  Description of Artificial Sequence: Synthetic oligonucleotide
ccaacgcaauuugccacug

SEQ ID NO: 663896 - RNA, 19 nt, Artificial Sequence
  Description of Artificial Sequence: Synthetic oligonucleotide
gaaccccgccugccugaca

SEQ ID NO: 663897 - RNA, 19 nt, Artificial Sequence
  Description of Artificial Sequence: Synthetic oligonucleotide
gggcaagcucuuugccaac

SEQ ID NO: 663898 - RNA, 19 nt, Artificial Sequence
  Description of Artificial Sequence: Synthetic oligonucleotide
gaggagcuacugacaguua

SEQ ID NO: 663899 - RNA, 19 nt, Artificial Sequence
  Description of Artificial Sequence: Synthetic oligonucleotide
augcgcucucggaguuuag

SEQ ID NO: 663900 - RNA, 19 nt, Artificial Sequence
  Description of Artificial Sequence: Synthetic oligonucleotide
gagcggauuucccgucuuu

SEQ ID NO: 663901 - RNA, 19 nt, Artificial Sequence
  Description of Artificial Sequence: Synthetic oligonucleotide
ccaacguugauagcagagu

SEQ ID NO: 663902 - RNA, 19 nt, Artificial Sequence
  Description of Artificial Sequence: Synthetic oligonucleotide
aggaagcaccugacagaau

SEQ ID NO: 663903 - RNA, 19 nt, Artificial Sequence
  Description of Artificial Sequence: Synthetic oligonucleotide
gcauauguggaaagugauu

SEQ ID NO: 663904 - RNA, 19 nt, Artificial Sequence
  Description of Artificial Sequence: Synthetic oligonucleotide
caacgcaauuugccacugu

SEQ ID NO: 663905 - RNA, 19 nt, Artificial Sequence
  Description of Artificial Sequence: Synthetic oligonucleotide
acguguggggcaagcucuu

SEQ ID NO: 663906 - RNA, 19 nt, Artificial Sequence
  Description of Artificial Sequence: Synthetic oligonucleotide
gggcagcacaaauuagauu

SEQ ID NO: 663907 - RNA, 19 nt, Artificial Sequence
  Description of Artificial Sequence: Synthetic oligonucleotide
ccaccacguuguguguagc

SEQ ID NO: 663908 - RNA, 19 nt, Artificial Sequence
  Description of Artificial Sequence: Synthetic oligonucleotide
gcauccuuacugccuuggu

SEQ ID NO: 663909 - RNA, 19 nt, Artificial Sequence
  Description of Artificial Sequence: Synthetic oligonucleotide
gccacaaccauggcaccau

SEQ ID NO: 663910 - RNA, 19 nt, Artificial Sequence
  Description of Artificial Sequence: Synthetic oligonucleotide
ggagcggauuucccgucuu

SEQ ID NO: 663911 - RNA, 19 nt, Artificial Sequence
  Description of Artificial Sequence: Synthetic oligonucleotide
cucgcuccauucggggagu

SEQ ID NO: 663912 - RNA, 19 nt, Artificial Sequence
  Description of Artificial Sequence: Synthetic oligonucleotide
ggacucacuuccaccgguu

SEQ ID NO: 663913 - RNA, 19 nt, Artificial Sequence
  Description of Artificial Sequence: Synthetic oligonucleotide
ggugacggcuggacucacu

SEQ ID NO: 663914 - RNA, 19 nt, Artificial Sequence
  Description of Artificial Sequence: Synthetic oligonucleotide
ccgucugcuucgcaguuuu

SEQ ID NO: 663915 - RNA, 19 nt, Artificial Sequence
  Description of Artificial Sequence: Synthetic oligonucleotide
cgcuuuccuuuacgccgug

SEQ ID NO: 663916 - RNA, 19 nt, Artificial Sequence
  Description of Artificial Sequence: Synthetic oligonucleotide
cccuagcugaggagcuacu

SEQ ID NO: 663917 - RNA, 19 nt, Artificial Sequence
  Description of Artificial Sequence: Synthetic oligonucleotide
gcacguccauggccaggcu

SEQ ID NO: 663918 - RNA, 19 nt, Artificial Sequence
  Description of Artificial Sequence: Synthetic oligonucleotide
ccuuacugccuuggucuau

SEQ ID NO: 663919 - RNA, 19 nt, Artificial Sequence
  Description of Artificial Sequence: Synthetic oligonucleotide
ccuuuacgccgugcauccu

SEQ ID NO: 663920 - RNA, 19 nt, Artificial Sequence
  Description of Artificial Sequence: Synthetic oligonucleotide
cccgucugcuucgcaguuu

SEQ ID NO: 663921 - RNA, 19 nt, Artificial Sequence
  Description of Artificial Sequence: Synthetic oligonucleotide
cgguuucugcagacacauu

SEQ ID NO: 663922 - RNA, 19 nt, Artificial Sequence
  Description of Artificial Sequence: Synthetic oligonucleotide
aauagauuacacuacauag

SEQ ID NO: 663923 - RNA, 19 nt, Artificial Sequence
  Description of Artificial Sequence: Synthetic oligonucleotide
aaauaaguuauacaggguc

SEQ ID NO: 663924 - RNA, 19 nt, Artificial Sequence
  Description of Artificial Sequence: Synthetic oligonucleotide
ugaaauaaguuauacaggg

SEQ ID NO: 663925 - RNA, 19 nt, Artificial Sequence
  Description of Artificial Sequence: Synthetic oligonucleotide
auuauagucaaguauugcc

SEQ ID NO: 663926 - RNA, 19 nt, Artificial Sequence
  Description of Artificial Sequence: Synthetic oligonucleotide
aaugguacccauaagaaac

SEQ ID NO: 663927 - RNA, 19 nt, Artificial Sequence
  Description of Artificial Sequence: Synthetic oligonucleotide
uguuagaggaucaucaagg

SEQ ID NO: 663928 - RNA, 19 nt, Artificial Sequence
  Description of Artificial Sequence: Synthetic oligonucleotide
acaauuguuacauuauagc

SEQ ID NO: 663929 - RNA, 19 nt, Artificial Sequence
  Description of Artificial Sequence: Synthetic oligonucleotide
ugauacaacacucugaacu

SEQ ID NO: 663930 - RNA, 19 nt, Artificial Sequence
  Description of Artificial Sequence: Synthetic oligonucleotide
aauugugacugauucauuc

SEQ ID NO: 663931 - RNA, 19 nt, Artificial Sequence
  Description of Artificial Sequence: Synthetic oligonucleotide
aaauaugacaaacuggggu

SEQ ID NO: 663932 - RNA, 19 nt, Artificial Sequence
  Description of Artificial Sequence: Synthetic oligonucleotide
aacguaauggaauagauua

SEQ ID NO: 663933 - RNA, 19 nt, Artificial Sequence
  Description of Artificial Sequence: Synthetic oligonucleotide
aaucaaaucuguaauaauc

SEQ ID NO: 663934 - RNA, 19 nt, Artificial Sequence
  Description of Artificial Sequence: Synthetic oligonucleotide
aauagcaauggcuugauau

SEQ ID NO: 663935 - RNA, 19 nt, Artificial Sequence
  Description of Artificial Sequence: Synthetic oligonucleotide
aacaacauauucuuuaaga

SEQ ID NO: 663936 - RNA, 19 nt, Artificial Sequence
  Description of Artificial Sequence: Synthetic oligonucleotide
aauuuuaauuggcugauga

SEQ ID NO: 663937 - RNA, 19 nt, Artificial Sequence
  Description of Artificial Sequence: Synthetic oligonucleotide
aaguuuauaaggcaaucag

SEQ ID NO: 663938 - RNA, 19 nt, Artificial Sequence
  Description of Artificial Sequence: Synthetic oligonucleotide
ugaauguccauaaagccag

SEQ ID NO: 663939 - RNA, 19 nt, Artificial Sequence
  Description of Artificial Sequence: Synthetic oligonucleotide
uaaauuauagucaaguauu

SEQ ID NO: 663940 - RNA, 19 nt, Artificial Sequence
  Description of Artificial Sequence: Synthetic oligonucleotide
aacuauaauguguuuaucu

SEQ ID NO: 663941 - RNA, 19 nt, Artificial Sequence
  Description of Artificial Sequence: Synthetic oligonucleotide
uuucauugauauuugaacc

SEQ ID NO: 663942 - RNA, 19 nt, Artificial Sequence
  Description of Artificial Sequence: Synthetic oligonucleotide
auuauagcagaugugaugg

SEQ ID NO: 663943 - RNA, 19 nt, Artificial Sequence
  Description of Artificial Sequence: Synthetic oligonucleotide
uuuaagaagucucaucuug

SEQ ID NO: 663944 - RNA, 19 nt, Artificial Sequence
  Description of Artificial Sequence: Synthetic oligonucleotide
uguaaucaaaucuuaaaga

SEQ ID NO: 663945 - RNA, 19 nt, Artificial Sequence
  Description of Artificial Sequence: Synthetic oligonucleotide
uuugacguaagucuuagac

SEQ ID NO: 663946 - RNA, 19 nt, Artificial Sequence
  Description of Artificial Sequence: Synthetic oligonucleotide
uaaacuauuaacuaagauu

SEQ ID NO: 663947 - RNA, 19 nt, Artificial Sequence
  Description of Artificial Sequence: Synthetic oligonucleotide
uauuguuccaaauaugaca

SEQ ID NO: 663948 - RNA, 19 nt, Artificial Sequence
  Description of Artificial Sequence: Synthetic oligonucleotide
uaagauugaaaauugggac

SEQ ID NO: 663949 - RNA, 19 nt, Artificial Sequence
  Description of Artificial Sequence: Synthetic oligonucleotide
uagaggaucaucaaggacu

SEQ ID NO: 663950 - RNA, 19 nt, Artificial Sequence
  Description of Artificial Sequence: Synthetic oligonucleotide
uuuauuccaucauagaaga

SEQ ID NO: 663951 - RNA, 19 nt, Artificial Sequence
  Description of Artificial Sequence: Synthetic oligonucleotide
uuauaaggcaaucagaauu

SEQ ID NO: 663952 - RNA, 19 nt, Artificial Sequence
  Description of Artificial Sequence: Synthetic oligonucleotide
aauuauagucaaguauugc

SEQ ID NO: 663953 - RNA, 19 nt, Artificial Sequence
  Description of Artificial Sequence: Synthetic oligonucleotide
uauuuaucuuuaauuagcc

SEQ ID NO: 663954 - RNA, 19 nt, Artificial Sequence
  Description of Artificial Sequence: Synthetic oligonucleotide
ugagagagaaacguaaugg

SEQ ID NO: 663955 - RNA, 19 nt, Artificial Sequence
  Description of Artificial Sequence: Synthetic oligonucleotide
aguauuuaucuuuaauuag

SEQ ID NO: 663956 - RNA, 19 nt, Artificial Sequence
  Description of Artificial Sequence: Synthetic oligonucleotide
gaugcuuuaauccuggaca

SEQ ID NO: 663957 - RNA, 19 nt, Artificial Sequence
  Description of Artificial Sequence: Synthetic oligonucleotide
aucaaaucuguaauaaucc

SEQ ID NO: 663958 - RNA, 19 nt, Artificial Sequence
  Description of Artificial Sequence: Synthetic oligonucleotide
aagauugaaaauugggaca

SEQ ID NO: 663959 - RNA, 19 nt, Artificial Sequence
  Description of Artificial Sequence: Synthetic oligonucleotide
uguccauaaagccagugag

SEQ ID NO: 663960 - RNA, 19 nt, Artificial Sequence
  Description of Artificial Sequence: Synthetic oligonucleotide
ugaaaagacaguguaauca

SEQ ID NO: 663961 - RNA, 19 nt, Artificial Sequence
  Description of Artificial Sequence: Synthetic oligonucleotide
uuagacaucacuucagugu

SEQ ID NO: 663962 - RNA, 19 nt, Artificial Sequence
  Description of Artificial Sequence: Synthetic oligonucleotide
uuauagucaaguauugcca

SEQ ID NO: 663963 - RNA, 19 nt, Artificial Sequence
  Description of Artificial Sequence: Synthetic oligonucleotide
agagauaaugcacuauuuc

SEQ ID NO: 663964 - RNA, 19 nt, Artificial Sequence
  Description of Artificial Sequence: Synthetic oligonucleotide
acaagauauaaacaguucu

SEQ ID NO: 663965 - RNA, 19 nt, Artificial Sequence
  Description of Artificial Sequence: Synthetic oligonucleotide
guguaaucaaaucuuaaag

SEQ ID NO: 663966 - RNA, 19 nt, Artificial Sequence
  Description of Artificial Sequence: Synthetic oligonucleotide
cauagaauucccaucuugg

SEQ ID NO: 663967 - RNA, 19 nt, Artificial Sequence
  Description of Artificial Sequence: Synthetic oligonucleotide
uuuuaauuggcugaugaug

SEQ ID NO: 663968 - RNA, 19 nt, Artificial Sequence
  Description of Artificial Sequence: Synthetic oligonucleotide
auagaauucccaucuuggc

SEQ ID NO: 663969 - RNA, 19 nt, Artificial Sequence
  Description of Artificial Sequence: Synthetic oligonucleotide
ugggcuauccuuauuaaug

SEQ ID NO: 663970 - RNA, 19 nt, Artificial Sequence
  Description of Artificial Sequence: Synthetic oligonucleotide
aacaauuguuacauuauag

SEQ ID NO: 663971 - RNA, 19 nt, Artificial Sequence
  Description of Artificial Sequence: Synthetic oligonucleotide
agaagaaacaguccaccac

SEQ ID NO: 663972 - RNA, 19 nt, Artificial Sequence
  Description of Artificial Sequence: Synthetic oligonucleotide
acuacauagaauucccauc

SEQ ID NO: 663973 - RNA, 19 nt, Artificial Sequence
  Description of Artificial Sequence: Synthetic oligonucleotide
uuuguuaaccuucauuuau

SEQ ID NO: 663974 - RNA, 19 nt, Artificial Sequence
  Description of Artificial Sequence: Synthetic oligonucleotide
guuugucuaaauuauaguc

SEQ ID NO: 663975 - RNA, 19 nt, Artificial Sequence
  Description of Artificial Sequence: Synthetic oligonucleotide
uuauaucaauugcagagga

SEQ ID NO: 663976 - RNA, 19 nt, Artificial Sequence
  Description of Artificial Sequence: Synthetic oligonucleotide
uauagucaaguauugccag

SEQ ID NO: 663977 - RNA, 19 nt, Artificial Sequence
  Description of Artificial Sequence: Synthetic oligonucleotide
aaucccuuaaguauuuauc

SEQ ID NO: 663978 - RNA, 19 nt, Artificial Sequence
  Description of Artificial Sequence: Synthetic oligonucleotide
ugacguaagucuuagacau

SEQ ID NO: 663979 - RNA, 19 nt, Artificial Sequence
  Description of Artificial Sequence: Synthetic oligonucleotide
aucuuaaagaugcuuacca

SEQ ID NO: 663980 - RNA, 19 nt, Artificial Sequence
  Description of Artificial Sequence: Synthetic oligonucleotide
auuauaucaauugcagagg

SEQ ID NO: 663981 - RNA, 19 nt, Artificial Sequence
  Description of Artificial Sequence: Synthetic oligonucleotide
aaacaguucuuucuuaaaa

SEQ ID NO: 663982 - RNA, 19 nt, Artificial Sequence
  Description of Artificial Sequence: Synthetic oligonucleotide
uacacuacauagaauuccc

SEQ ID NO: 663983 - RNA, 19 nt, Artificial Sequence
  Description of Artificial Sequence: Synthetic oligonucleotide
aauuuguuagaggaucauc

SEQ ID NO: 663984 - RNA, 19 nt, Artificial Sequence
  Description of Artificial Sequence: Synthetic oligonucleotide
gaauugcucacugugagcc

SEQ ID NO: 663985 - RNA, 19 nt, Artificial Sequence
  Description of Artificial Sequence: Synthetic oligonucleotide
uuuaauuagccuaggcuaa

SEQ ID NO: 663986 - RNA, 19 nt, Artificial Sequence
  Description of Artificial Sequence: Synthetic oligonucleotide
uuaaagaugcuuaccagua

SEQ ID NO: 663987 - RNA, 19 nt, Artificial Sequence
  Description of Artificial Sequence: Synthetic oligonucleotide
ugaaugguacccauaagaa

SEQ ID NO: 663988 - RNA, 19 nt, Artificial Sequence
  Description of Artificial Sequence: Synthetic oligonucleotide
acuuauaaagacaaaguca

SEQ ID NO: 663989 - RNA, 19 nt, Artificial Sequence
  Description of Artificial Sequence: Synthetic oligonucleotide
cuaagauugaaaauuggga

SEQ ID NO: 663990 - RNA, 19 nt, Artificial Sequence
  Description of Artificial Sequence: Synthetic oligonucleotide
uuugaauugcucacuguga

SEQ ID NO: 663991 - RNA, 19 nt, Artificial Sequence
  Description of Artificial Sequence: Synthetic oligonucleotide
aacaagauauaaacaguuc

SEQ ID NO: 663992 - RNA, 19 nt, Artificial Sequence
  Description of Artificial Sequence: Synthetic oligonucleotide
uauaacagugccuuuguau

SEQ ID NO: 663993 - RNA, 19 nt, Artificial Sequence
  Description of Artificial Sequence: Synthetic oligonucleotide
uccucaugaaauaaguuau

SEQ ID NO: 663994 - RNA, 19 nt, Artificial Sequence
  Description of Artificial Sequence: Synthetic oligonucleotide
uacaacugacaaaauauuc

SEQ ID NO: 663995 - RNA, 19 nt, Artificial Sequence
  Description of Artificial Sequence: Synthetic oligonucleotide
ucuaaaugaucucuuuuaa

SEQ ID NO: 663996 - RNA, 19 nt, Artificial Sequence
  Description of Artificial Sequence: Synthetic oligonucleotide
guaauaauccacuuuagua

SEQ ID NO: 663997 - RNA, 19 nt, Artificial Sequence
  Description of Artificial Sequence: Synthetic oligonucleotide
uaagucuuagacaucacuu

SEQ ID NO: 663998 - RNA, 19 nt, Artificial Sequence
  Description of Artificial Sequence: Synthetic oligonucleotide
uggaauagauuacacuaca

SEQ ID NO: 663999 - RNA, 19 nt, Artificial Sequence
  Description of Artificial Sequence: Synthetic oligonucleotide
aauugcucacugugagccc

SEQ ID NO: 664000 - RNA, 19 nt, Artificial Sequence
  Description of Artificial Sequence: Synthetic oligonucleotide
uuacacuacauagaauucc

SEQ ID NO: 664001 - RNA, 19 nt, Artificial Sequence
  Description of Artificial Sequence: Synthetic oligonucleotide
uuuugcuagagcuauuguc

SEQ ID NO: 664002 - RNA, 19 nt, Artificial Sequence
  Description of Artificial Sequence: Synthetic oligonucleotide
cuaaaugaucucuuuuaag

SEQ ID NO: 664003 - RNA, 19 nt, Artificial Sequence
  Description of Artificial Sequence: Synthetic oligonucleotide
aaauuauagucaaguauug

SEQ ID NO: 664004 - RNA, 19 nt, Artificial Sequence
  Description of Artificial Sequence: Synthetic oligonucleotide
uguucaaugcuguuacagc

SEQ ID NO: 664005 - RNA, 19 nt, Artificial Sequence
  Description of Artificial Sequence: Synthetic oligonucleotide
uucgaauauaaacuauuaa

SEQ ID NO: 664006 - RNA, 19 nt, Artificial Sequence
  Description of Artificial Sequence: Synthetic oligonucleotide
ugguaaaucuuuaauguuu

SEQ ID NO: 664007 - RNA, 19 nt, Artificial Sequence
  Description of Artificial Sequence: Synthetic oligonucleotide
ucguauaacaauuguuaca

SEQ ID NO: 664008 - RNA, 19 nt, Artificial Sequence
  Description of Artificial Sequence: Synthetic oligonucleotide
uggcuagcaaagcagaugu

SEQ ID NO: 664009 - RNA, 19 nt, Artificial Sequence
  Description of Artificial Sequence: Synthetic oligonucleotide
augcuuaccaguauuuggc

SEQ ID NO: 664010 - RNA, 19 nt, Artificial Sequence
  Description of Artificial Sequence: Synthetic oligonucleotide
uuaacaaggcagcagcuau

SEQ ID NO: 664011 - RNA, 19 nt, Artificial Sequence
  Description of Artificial Sequence: Synthetic oligonucleotide
cuuuaauuagccuaggcua

SEQ ID NO: 664012 - RNA, 19 nt, Artificial Sequence
  Description of Artificial Sequence: Synthetic oligonucleotide
gacauugucaaagaaccug

SEQ ID NO: 664013 - RNA, 19 nt, Artificial Sequence
  Description of Artificial Sequence: Synthetic oligonucleotide
uauugucguauaacaauug

SEQ ID NO: 664014 - RNA, 19 nt, Artificial Sequence
  Description of Artificial Sequence: Synthetic oligonucleotide
ugccauugacuuaaauagg

SEQ ID NO: 664015 - RNA, 19 nt, Artificial Sequence
  Description of Artificial Sequence: Synthetic oligonucleotide
agagcuauugucguauaac

SEQ ID NO: 664016 - RNA, 19 nt, Artificial Sequence
  Description of Artificial Sequence: Synthetic oligonucleotide
uucaauagguagcacacua

SEQ ID NO: 664017 - RNA, 19 nt, Artificial Sequence
  Description of Artificial Sequence: Synthetic oligonucleotide
aaagaugcuuaccaguauu

SEQ ID NO: 664018 - RNA, 19 nt, Artificial Sequence
  Description of Artificial Sequence: Synthetic oligonucleotide
cauuauagcagaugugaug

SEQ ID NO: 664019 - RNA, 19 nt, Artificial Sequence
  Description of Artificial Sequence: Synthetic oligonucleotide
auuuguuagaggaucauca

SEQ ID NO: 664020 - RNA, 19 nt, Artificial Sequence
  Description of Artificial Sequence: Synthetic oligonucleotide
uuaagcuucucaguaaaac

SEQ ID NO: 664021 - RNA, 19 nt, Artificial Sequence
  Description of Artificial Sequence: Synthetic oligonucleotide
guacccauaagaaacauuc

SEQ ID NO: 664022 - RNA, 19 nt, Artificial Sequence
  Description of Artificial Sequence: Synthetic oligonucleotide
ugcagacucagaaaauuac

SEQ ID NO: 664023 - RNA, 19 nt, Artificial Sequence
  Description of Artificial Sequence: Synthetic oligonucleotide
acaacuuauuugcuuaaca

SEQ ID NO: 664024 - RNA, 19 nt, Artificial Sequence
  Description of Artificial Sequence: Synthetic oligonucleotide
aguuugucuaaauuauagu

SEQ ID NO: 664025 - RNA, 19 nt, Artificial Sequence
  Description of Artificial Sequence: Synthetic oligonucleotide
guuuauaaggcaaucagaa

SEQ ID NO: 664026 - RNA, 19 nt, Artificial Sequence
  Description of Artificial Sequence: Synthetic oligonucleotide
aaaggguuggugacaauag

SEQ ID NO: 664027 - RNA, 19 nt, Artificial Sequence
  Description of Artificial Sequence: Synthetic oligonucleotide
auugacuuaaauaggcuug

SEQ ID NO: 664028 - RNA, 19 nt, Artificial Sequence
  Description of Artificial Sequence: Synthetic oligonucleotide
caaaccauuucugaguuac

SEQ ID NO: 664029 - RNA, 19 nt, Artificial Sequence
  Description of Artificial Sequence: Synthetic oligonucleotide
uugauauagugacucuucu

SEQ ID NO: 664030 - RNA, 19 nt, Artificial Sequence
  Description of Artificial Sequence: Synthetic oligonucleotide
agaggagaauucuuugaag

SEQ ID NO: 664031 - RNA, 19 nt, Artificial Sequence
  Description of Artificial Sequence: Synthetic oligonucleotide
auugucguauaacaauugu

SEQ ID NO: 664032 - RNA, 19 nt, Artificial Sequence
  Description of Artificial Sequence: Synthetic oligonucleotide
cuugauauagugacucuuc

SEQ ID NO: 664033 - RNA, 19 nt, Artificial Sequence
  Description of Artificial Sequence: Synthetic oligonucleotide
aagaagucucaucuugcca

SEQ ID NO: 664034 - RNA, 19 nt, Artificial Sequence
  Description of Artificial Sequence: Synthetic oligonucleotide
gacugggucaauuaauaca

SEQ ID NO: 664035 - RNA, 19 nt, Artificial Sequence
  Description of Artificial Sequence: Synthetic oligonucleotide
uuagaggaucaucaaggac

SEQ ID NO: 664036 - RNA, 19 nt, Artificial Sequence
  Description of Artificial Sequence: Synthetic oligonucleotide
cauaaagccagugagucuc

SEQ ID NO: 664037 - RNA, 19 nt, Artificial Sequence
  Description of Artificial Sequence: Synthetic oligonucleotide
gaauagauuacacuacaua

SEQ ID NO: 664038 - RNA, 19 nt, Artificial Sequence
  Description of Artificial Sequence: Synthetic oligonucleotide
aaaugacauaaaguucauc

SEQ ID NO: 664039 - RNA, 19 nt, Artificial Sequence
  Description of Artificial Sequence: Synthetic oligonucleotide
agcucaucgcccuuugacg

SEQ ID NO: 664040 - RNA, 19 nt, Artificial Sequence
  Description of Artificial Sequence: Synthetic oligonucleotide
uguuuugcuagagcuauug

SEQ ID NO: 664041 - RNA, 19 nt, Artificial Sequence
  Description of Artificial Sequence: Synthetic oligonucleotide
aaucugauauuguuccaaa

SEQ ID NO: 664042 - RNA, 19 nt, Artificial Sequence
  Description of Artificial Sequence: Synthetic oligonucleotide
acaacugacaaaauauuca

SEQ ID NO: 664043 - RNA, 19 nt, Artificial Sequence
  Description of Artificial Sequence: Synthetic oligonucleotide
ugaugcuuuaauccuggac

SEQ ID NO: 664044 - RNA, 19 nt, Artificial Sequence
  Description of Artificial Sequence: Synthetic oligonucleotide
augagagagaaacguaaug

SEQ ID NO: 664045 - RNA, 19 nt, Artificial Sequence
  Description of Artificial Sequence: Synthetic oligonucleotide
auauuguuccaaauaugac

SEQ ID NO: 664046 - RNA, 19 nt, Artificial Sequence
  Description of Artificial Sequence: Synthetic oligonucleotide
ugcuuggaaaccuggagcu

SEQ ID NO: 664047 - RNA, 19 nt, Artificial Sequence
  Description of Artificial Sequence: Synthetic oligonucleotide
aauuagccuaggcuaaaau

SEQ ID NO: 664048 - RNA, 19 nt, Artificial Sequence
  Description of Artificial Sequence: Synthetic oligonucleotide
augacauaaaguucaucca

SEQ ID NO: 664049 - RNA, 19 nt, Artificial Sequence
  Description of Artificial Sequence: Synthetic oligonucleotide
ucuaaaccucuuuugguaa

SEQ ID NO: 664050 - RNA, 19 nt, Artificial Sequence
  Description of Artificial Sequence: Synthetic oligonucleotide
ucccaguuguaaaauggcc

SEQ ID NO: 664051 - RNA, 19 nt, Artificial Sequence
  Description of Artificial Sequence: Synthetic oligonucleotide
agcccgauauucuaaaccu

SEQ ID NO: 664052 - RNA, 19 nt, Artificial Sequence
  Description of Artificial Sequence: Synthetic oligonucleotide
aguauugccagucccaguu

SEQ ID NO: 664053 - RNA, 19 nt, Artificial Sequence
  Description of Artificial Sequence: Synthetic oligonucleotide
gagagagaaacguaaugga

SEQ ID NO: 664054 - RNA, 19 nt, Artificial Sequence
  Description of Artificial Sequence: Synthetic oligonucleotide
gagcccgauauucuaaacc

SEQ ID NO: 664055 - RNA, 19 nt, Artificial Sequence
  Description of Artificial Sequence: Synthetic oligonucleotide
uguuaaccuucauuuauaa

SEQ ID NO: 664056 - RNA, 19 nt, Artificial Sequence
  Description of Artificial Sequence: Synthetic oligonucleotide
cugaaugguacccauaaga

SEQ ID NO: 664057 - RNA, 19 nt, Artificial Sequence
  Description of Artificial Sequence: Synthetic oligonucleotide
acuuugaauauuaggaaca

SEQ ID NO: 664058 - RNA, 19 nt, Artificial Sequence
  Description of Artificial Sequence: Synthetic oligonucleotide
uaacaauuguuacauuaua

SEQ ID NO: 664059 - RNA, 19 nt, Artificial Sequence
  Description of Artificial Sequence: Synthetic oligonucleotide
aaguuauacagggucuuug

SEQ ID NO: 664060 - RNA, 19 nt, Artificial Sequence
  Description of Artificial Sequence: Synthetic oligonucleotide
uuuauaaggcaaucagaau

SEQ ID NO: 664061 - RNA, 19 nt, Artificial Sequence
  Description of Artificial Sequence: Synthetic oligonucleotide
uguguuuaucuuaucucuc

SEQ ID NO: 664062 - RNA, 19 nt, Artificial Sequence
  Description of Artificial Sequence: Synthetic oligonucleotide
uuauaaagacaaagucacu

SEQ ID NO: 664063 - RNA, 19 nt, Artificial Sequence
  Description of Artificial Sequence: Synthetic oligonucleotide
gagcuauugucguauaaca

SEQ ID NO: 664064 - RNA, 19 nt, Artificial Sequence
  Description of Artificial Sequence: Synthetic oligonucleotide
ugggucaauuaauacaaaa

SEQ ID NO: 664065 - RNA, 19 nt, Artificial Sequence
  Description of Artificial Sequence: Synthetic oligonucleotide
auugugacugauucauucu

SEQ ID NO: 664066 - RNA, 19 nt, Artificial Sequence
  Description of Artificial Sequence: Synthetic oligonucleotide
cucuguuugcagaaugagc

SEQ ID NO: 664067 - RNA, 19 nt, Artificial Sequence
  Description of Artificial Sequence: Synthetic oligonucleotide
acaacucaaauaccaauaa

SEQ ID NO: 664068 - RNA, 19 nt, Artificial Sequence
  Description of Artificial Sequence: Synthetic oligonucleotide
ugccuuuguauauaagcac

SEQ ID NO: 664069 - RNA, 19 nt, Artificial Sequence
  Description of Artificial Sequence: Synthetic oligonucleotide
cauauguuuugcuagagcu

SEQ ID NO: 664070 - RNA, 19 nt, Artificial Sequence
  Description of Artificial Sequence: Synthetic oligonucleotide
auauagugacucuucuuca

SEQ ID NO: 664071 - RNA, 19 nt, Artificial Sequence
  Description of Artificial Sequence: Synthetic oligonucleotide
cuuagacaucacuucagug

SEQ ID NO: 664072 - RNA, 19 nt, Artificial Sequence
  Description of Artificial Sequence: Synthetic oligonucleotide
ucauugauauuugaacccu

SEQ ID NO: 664073 - RNA, 19 nt, Artificial Sequence
  Description of Artificial Sequence: Synthetic oligonucleotide
agagaaacguaauggaaua

SEQ ID NO: 664074 - RNA, 19 nt, Artificial Sequence
  Description of Artificial Sequence: Synthetic oligonucleotide
aacccugcugaacauuuga

SEQ ID NO: 664075 - RNA, 19 nt, Artificial Sequence
  Description of Artificial Sequence: Synthetic oligonucleotide
gucguauaacaauuguuac

SEQ ID NO: 664076 - RNA, 19 nt, Artificial Sequence
  Description of Artificial Sequence: Synthetic oligonucleotide
gaaguuuauaaggcaauca

SEQ ID NO: 664077 - RNA, 19 nt, Artificial Sequence
  Description of Artificial Sequence: Synthetic oligonucleotide
agacucagaaaauuacuau

SEQ ID NO: 664078 - RNA, 19 nt, Artificial Sequence
  Description of Artificial Sequence: Synthetic oligonucleotide
aaugggcuauccuuauuaa

SEQ ID NO: 664079 - RNA, 19 nt, Artificial Sequence
  Description of Artificial Sequence: Synthetic oligonucleotide
cuaaauuauagucaaguau

SEQ ID NO: 664080 - RNA, 19 nt, Artificial Sequence
  Description of Artificial Sequence: Synthetic oligonucleotide
agcacacuaaugaaaagug

SEQ ID NO: 664081 - RNA, 19 nt, Artificial Sequence
  Description of Artificial Sequence: Synthetic oligonucleotide
aucugcaugcuuggaaacc

SEQ ID NO: 664082 - RNA, 19 nt, Artificial Sequence
  Description of Artificial Sequence: Synthetic oligonucleotide
ugaauugcucacugugagc

SEQ ID NO: 664083 - RNA, 19 nt, Artificial Sequence
  Description of Artificial Sequence: Synthetic oligonucleotide
ccaaguguguauaacagug

SEQ ID NO: 664084 - RNA, 19 nt, Artificial Sequence
  Description of Artificial Sequence: Synthetic oligonucleotide
agaaacguaauggaauaga

SEQ ID NO: 664085 - RNA, 19 nt, Artificial Sequence
  Description of Artificial Sequence: Synthetic oligonucleotide
guacugaaguggcugaaug

SEQ ID NO: 664086 - RNA, 19 nt, Artificial Sequence
  Description of Artificial Sequence: Synthetic oligonucleotide
acuauuaacuaagauugaa

SEQ ID NO: 664087 - RNA, 19 nt, Artificial Sequence
  Description of Artificial Sequence: Synthetic oligonucleotide
uugucguauaacaauuguu

SEQ ID NO: 664088 - RNA, 19 nt, Artificial Sequence
  Description of Artificial Sequence: Synthetic oligonucleotide
cuuugaaguuuauaaggca

SEQ ID NO: 664089 - RNA, 19 nt, Artificial Sequence
  Description of Artificial Sequence: Synthetic oligonucleotide
agaaaggauuucuuguaaa

SEQ ID NO: 664090 - RNA, 19 nt, Artificial Sequence
  Description of Artificial Sequence: Synthetic oligonucleotide
ugacaauagcaauggcuug

SEQ ID NO: 664091 - RNA, 19 nt, Artificial Sequence
  Description of Artificial Sequence: Synthetic oligonucleotide
uauugccagucccaguugu

SEQ ID NO: 664092 - RNA, 19 nt, Artificial Sequence
  Description of Artificial Sequence: Synthetic oligonucleotide
agauugaaaauugggacau

SEQ ID NO: 664093 - RNA, 19 nt, Artificial Sequence
  Description of Artificial Sequence: Synthetic oligonucleotide
gacaucacuucaguguaag

SEQ ID NO: 664094 - RNA, 19 nt, Artificial Sequence
  Description of Artificial Sequence: Synthetic oligonucleotide
uagccuaggcuaaaauaca

SEQ ID NO: 664095 - RNA, 19 nt, Artificial Sequence
  Description of Artificial Sequence: Synthetic oligonucleotide
uugaaaagacaguguaauc

SEQ ID NO: 664096 - RNA, 19 nt, Artificial Sequence
  Description of Artificial Sequence: Synthetic oligonucleotide
auaauagauuuuaauacuu

SEQ ID NO: 664097 - RNA, 19 nt, Artificial Sequence
  Description of Artificial Sequence: Synthetic oligonucleotide
ugaguacugaaguggcuga

SEQ ID NO: 664098 - RNA, 19 nt, Artificial Sequence
  Description of Artificial Sequence: Synthetic oligonucleotide
auaaugcacuauuucaguu

SEQ ID NO: 664099 - RNA, 19 nt, Artificial Sequence
  Description of Artificial Sequence: Synthetic oligonucleotide
uaaagaugcuuaccaguau

SEQ ID NO: 664100 - RNA, 19 nt, Artificial Sequence
  Description of Artificial Sequence: Synthetic oligonucleotide
caacucaaauaccaauaac

SEQ ID NO: 664101 - RNA, 19 nt, Artificial Sequence
  Description of Artificial Sequence: Synthetic oligonucleotide
agaugugaugguucgaaua

SEQ ID NO: 664102 - RNA, 19 nt, Artificial Sequence
  Description of Artificial Sequence: Synthetic oligonucleotide
uccaguaaucuucacuauu

SEQ ID NO: 664103 - RNA, 19 nt, Artificial Sequence
  Description of Artificial Sequence: Synthetic oligonucleotide
gagaaacguaauggaauag

SEQ ID NO: 664104 - RNA, 19 nt, Artificial Sequence
  Description of Artificial Sequence: Synthetic oligonucleotide
ucaaucugauauuguucca

SEQ ID NO: 664105 - RNA, 19 nt, Artificial Sequence
  Description of Artificial Sequence: Synthetic oligonucleotide
ugaacccugcugaacauuu

SEQ ID NO: 664106 - RNA, 19 nt, Artificial Sequence
  Description of Artificial Sequence: Synthetic oligonucleotide
guuagaggaucaucaagga

SEQ ID NO: 664107 - RNA, 19 nt, Artificial Sequence
  Description of Artificial Sequence: Synthetic oligonucleotide
ucaaccaaguguguauaac

SEQ ID NO: 664108 - RNA, 19 nt, Artificial Sequence
  Description of Artificial Sequence: Synthetic oligonucleotide
accaaguguguauaacagu

SEQ ID NO: 664109 - RNA, 19 nt, Artificial Sequence
  Description of Artificial Sequence: Synthetic oligonucleotide
caacugacaaaauauucaa

SEQ ID NO: 664110 - RNA, 19 nt, Artificial Sequence
  Description of Artificial Sequence: Synthetic oligonucleotide
gaugugaugguucgaauau

SEQ ID NO: 664111 - RNA, 19 nt, Artificial Sequence
  Description of Artificial Sequence: Synthetic oligonucleotide
cuauaauguguuuaucuua

SEQ ID NO: 664112 - RNA, 19 nt, Artificial Sequence
  Description of Artificial Sequence: Synthetic oligonucleotide
acguaauggaauagauuac

SEQ ID NO: 664113 - RNA, 19 nt, Artificial Sequence
  Description of Artificial Sequence: Synthetic oligonucleotide
guguauaacagugccuuug

SEQ ID NO: 664114 - RNA, 19 nt, Artificial Sequence
  Description of Artificial Sequence: Synthetic oligonucleotide
uggcuugauauagugacuc

SEQ ID NO: 664115 - RNA, 19 nt, Artificial Sequence
  Description of Artificial Sequence: Synthetic oligonucleotide
auagucaaguauugccagu

SEQ ID NO: 664116 - RNA, 19 nt, Artificial Sequence
  Description of Artificial Sequence: Synthetic oligonucleotide
uugcuuaacaaggcagcag

SEQ ID NO: 664117 - RNA, 19 nt, Artificial Sequence
  Description of Artificial Sequence: Synthetic oligonucleotide
ugauauagugacucuucuu

SEQ ID NO: 664118 - RNA, 19 nt, Artificial Sequence
  Description of Artificial Sequence: Synthetic oligonucleotide
gcuagcaaagcagauguag

SEQ ID NO: 664119 - RNA, 19 nt, Artificial Sequence
  Description of Artificial Sequence: Synthetic oligonucleotide
aaacguaauggaauagauu

SEQ ID NO: 664120 - RNA, 19 nt, Artificial Sequence
  Description of Artificial Sequence: Synthetic oligonucleotide
augcuuuaauccuggacaa

SEQ ID NO: 664121 - RNA, 19 nt, Artificial Sequence
  Description of Artificial Sequence: Synthetic oligonucleotide
uaggaacaacuuauuugcu

SEQ ID NO: 664122 - RNA, 19 nt, Artificial Sequence
  Description of Artificial Sequence: Synthetic oligonucleotide
acauugucaaagaaccugu

SEQ ID NO: 664123 - RNA, 19 nt, Artificial Sequence
  Description of Artificial Sequence: Synthetic oligonucleotide
acucagaaaauuacuauuu

SEQ ID NO: 664124 - RNA, 19 nt, Artificial Sequence
  Description of Artificial Sequence: Synthetic oligonucleotide
aacuauuaacuaagauuga

SEQ ID NO: 664125 - RNA, 19 nt, Artificial Sequence
  Description of Artificial Sequence: Synthetic oligonucleotide
auaaaacuauaauguguuu

SEQ ID NO: 664126 - RNA, 19 nt, Artificial Sequence
  Description of Artificial Sequence: Synthetic oligonucleotide
uggauucuuuaaucaaauc

SEQ ID NO: 664127 - RNA, 19 nt, Artificial Sequence
  Description of Artificial Sequence: Synthetic oligonucleotide
aaaccuggagcugacugaa

SEQ ID NO: 664128 - RNA, 19 nt, Artificial Sequence
  Description of Artificial Sequence: Synthetic oligonucleotide
aaaaugacauaaaguucau

SEQ ID NO: 664129 - RNA, 19 nt, Artificial Sequence
  Description of Artificial Sequence: Synthetic oligonucleotide
uagagcuauugucguauaa

SEQ ID NO: 664130 - RNA, 19 nt, Artificial Sequence
  Description of Artificial Sequence: Synthetic oligonucleotide
cuuaccaguauuuggccaa

SEQ ID NO: 664131 - RNA, 19 nt, Artificial Sequence
  Description of Artificial Sequence: Synthetic oligonucleotide
ugacugauucauucuuggu

SEQ ID NO: 664132 - RNA, 19 nt, Artificial Sequence
  Description of Artificial Sequence: Synthetic oligonucleotide
gccauugacuuaaauaggc

SEQ ID NO: 664133 - RNA, 19 nt, Artificial Sequence
  Description of Artificial Sequence: Synthetic oligonucleotide
cugauauuguuccaaauau

SEQ ID NO: 664134 - RNA, 19 nt, Artificial Sequence
  Description of Artificial Sequence: Synthetic oligonucleotide
agaggaucaucaaggacug

SEQ ID NO: 664135 - RNA, 19 nt, Artificial Sequence
  Description of Artificial Sequence: Synthetic oligonucleotide
gacucagaaaauuacuauu

SEQ ID NO: 664136 - RNA, 19 nt, Artificial Sequence
  Description of Artificial Sequence: Synthetic oligonucleotide
agaugcuuaccaguauuug

SEQ ID NO: 664137 - RNA, 19 nt, Artificial Sequence
  Description of Artificial Sequence: Synthetic oligonucleotide
gugccuuuguauauaagca

SEQ ID NO: 664138 - RNA, 19 nt, Artificial Sequence
  Description of Artificial Sequence: Synthetic oligonucleotide
uuugaacccugcugaacau

SEQ ID NO: 664139 - RNA, 19 nt, Artificial Sequence
  Description of Artificial Sequence: Synthetic oligonucleotide
aggguuggugacaauagca

SEQ ID NO: 664140 - RNA, 19 nt, Artificial Sequence
  Description of Artificial Sequence: Synthetic oligonucleotide
uuucaauagguagcacacu

SEQ ID NO: 664141 - RNA, 19 nt, Artificial Sequence
  Description of Artificial Sequence: Synthetic oligonucleotide
aagaugcuuaccaguauuu

SEQ ID NO: 664142 - RNA, 19 nt, Artificial Sequence
  Description of Artificial Sequence: Synthetic oligonucleotide
gaacaacuuauuugcuuaa

SEQ ID NO: 664143 - RNA, 19 nt, Artificial Sequence
  Description of Artificial Sequence: Synthetic oligonucleotide
caacacgcucauuggauuc

SEQ ID NO: 664144 - RNA, 19 nt, Artificial Sequence
  Description of Artificial Sequence: Synthetic oligonucleotide
uuaauuagccuaggcuaaa

SEQ ID NO: 664145 - RNA, 19 nt, Artificial Sequence
  Description of Artificial Sequence: Synthetic oligonucleotide
cagaaugagcccaaggacu

SEQ ID NO: 664146 - RNA, 19 nt, Artificial Sequence
  Description of Artificial Sequence: Synthetic oligonucleotide
uuaauuggcugaugauguu

SEQ ID NO: 664147 - RNA, 19 nt, Artificial Sequence
  Description of Artificial Sequence: Synthetic oligonucleotide
aaacccaacucaggaauuu

SEQ ID NO: 664148 - RNA, 19 nt, Artificial Sequence
  Description of Artificial Sequence: Synthetic oligonucleotide
aaccuguucaaugcuguua

SEQ ID NO: 664149 - RNA, 19 nt, Artificial Sequence
  Description of Artificial Sequence: Synthetic oligonucleotide
aagucucaucuugccauug

SEQ ID NO: 664150 - RNA, 19 nt, Artificial Sequence
  Description of Artificial Sequence: Synthetic oligonucleotide
guuauacagggucuuugaa

SEQ ID NO: 664151 - RNA, 19 nt, Artificial Sequence
  Description of Artificial Sequence: Synthetic oligonucleotide
cacugugagcccgauauuc

SEQ ID NO: 664152 - RNA, 19 nt, Artificial Sequence
  Description of Artificial Sequence: Synthetic oligonucleotide
ugagcccgauauucuaaac

SEQ ID NO: 664153 - RNA, 19 nt, Artificial Sequence
  Description of Artificial Sequence: Synthetic oligonucleotide
agcagcuauaaaacuauaa

SEQ ID NO: 664154 - RNA, 19 nt, Artificial Sequence
  Description of Artificial Sequence: Synthetic oligonucleotide
ggccuuuauuccaucauag

SEQ ID NO: 664155 - RNA, 19 nt, Artificial Sequence
  Description of Artificial Sequence: Synthetic oligonucleotide
aaccuucauuuauaaucuu

SEQ ID NO: 664156 - RNA, 19 nt, Artificial Sequence
  Description of Artificial Sequence: Synthetic oligonucleotide
gucccaguuguaaaauggc

SEQ ID NO: 664157 - RNA, 19 nt, Artificial Sequence
  Description of Artificial Sequence: Synthetic oligonucleotide
augggcuauccuuauuaau

SEQ ID NO: 664158 - RNA, 19 nt, Artificial Sequence
  Description of Artificial Sequence: Synthetic oligonucleotide
caauggcuugauauaguga

SEQ ID NO: 664159 - RNA, 19 nt, Artificial Sequence
  Description of Artificial Sequence: Synthetic oligonucleotide
aguguguauaacagugccu

SEQ ID NO: 664160 - RNA, 19 nt, Artificial Sequence
  Description of Artificial Sequence: Synthetic oligonucleotide
guucgaauauaaacuauua

SEQ ID NO: 664161 - RNA, 19 nt, Artificial Sequence
  Description of Artificial Sequence: Synthetic oligonucleotide
caagauauaaacaguucuu

SEQ ID NO: 664162 - RNA, 19 nt, Artificial Sequence
  Description of Artificial Sequence: Synthetic oligonucleotide
cucaggaauuuucaauuaa

SEQ ID NO: 664163 - RNA, 19 nt, Artificial Sequence
  Description of Artificial Sequence: Synthetic oligonucleotide
ggcagucaaucugauauug

SEQ ID NO: 664164 - RNA, 19 nt, Artificial Sequence
  Description of Artificial Sequence: Synthetic oligonucleotide
aucaauugcagaggagaau

SEQ ID NO: 664165 - RNA, 19 nt, Artificial Sequence
  Description of Artificial Sequence: Synthetic oligonucleotide
uguguauaacagugccuuu

SEQ ID NO: 664166 - RNA, 19 nt, Artificial Sequence
  Description of Artificial Sequence: Synthetic oligonucleotide
acauuauagcagaugugau

SEQ ID NO: 664167 - RNA, 19 nt, Artificial Sequence
  Description of Artificial Sequence: Synthetic oligonucleotide
gggcuauccuuauuaauga

SEQ ID NO: 664168 - RNA, 19 nt, Artificial Sequence
  Description of Artificial Sequence: Synthetic oligonucleotide
agcuauugucguauaacaa

SEQ ID NO: 664169 - RNA, 19 nt, Artificial Sequence
  Description of Artificial Sequence: Synthetic oligonucleotide
gcuauccuuauuaaugaca

SEQ ID NO: 664170 - RNA, 19 nt, Artificial Sequence
  Description of Artificial Sequence: Synthetic oligonucleotide
acgcucauuggauucuuua

SEQ ID NO: 664171 - RNA, 19 nt, Artificial Sequence
  Description of Artificial Sequence: Synthetic oligonucleotide
acaguguaaucaaaucuua

SEQ ID NO: 664172 - RNA, 19 nt, Artificial Sequence
  Description of Artificial Sequence: Synthetic oligonucleotide
ucgcccuuugacguaaguc

SEQ ID NO: 664173 - RNA, 19 nt, Artificial Sequence
  Description of Artificial Sequence: Synthetic oligonucleotide
aaaccauuucugaguuaca

SEQ ID NO: 664174 - RNA, 19 nt, Artificial Sequence
  Description of Artificial Sequence: Synthetic oligonucleotide
ugaaggcaaugggcuaucc

SEQ ID NO: 664175 - RNA, 19 nt, Artificial Sequence
  Description of Artificial Sequence: Synthetic oligonucleotide
augguacccauaagaaaca

SEQ ID NO: 664176 - RNA, 19 nt, Artificial Sequence
  Description of Artificial Sequence: Synthetic oligonucleotide
agguagcacacuaaugaaa

SEQ ID NO: 664177 - RNA, 19 nt, Artificial Sequence
  Description of Artificial Sequence: Synthetic oligonucleotide
ugcuuuaauccuggacaac

SEQ ID NO: 664178 - RNA, 19 nt, Artificial Sequence
  Description of Artificial Sequence: Synthetic oligonucleotide
ggacugggucaauuaauac

SEQ ID NO: 664179 - RNA, 19 nt, Artificial Sequence
  Description of Artificial Sequence: Synthetic oligonucleotide
uaugacaaacuggggucau

SEQ ID NO: 664180 - RNA, 19 nt, Artificial Sequence
  Description of Artificial Sequence: Synthetic oligonucleotide
ccuaggcuaaaauacaaua

SEQ ID NO: 664181 - RNA, 19 nt, Artificial Sequence
  Description of Artificial Sequence: Synthetic oligonucleotide
ugcuagagcuauugucgua

SEQ ID NO: 664182 - RNA, 19 nt, Artificial Sequence
  Description of Artificial Sequence: Synthetic oligonucleotide
gaaggcaaugggcuauccu

SEQ ID NO: 664183 - RNA, 19 nt, Artificial Sequence
  Description of Artificial Sequence: Synthetic oligonucleotide
cacuacauagaauucccau

SEQ ID NO: 664184 - RNA, 19 nt, Artificial Sequence
  Description of Artificial Sequence: Synthetic oligonucleotide
cagcaaaccauuucugagu

SEQ ID NO: 664185 - RNA, 19 nt, Artificial Sequence
  Description of Artificial Sequence: Synthetic oligonucleotide
cugcagacucagaaaauua

SEQ ID NO: 664186 - RNA, 19 nt, Artificial Sequence
  Description of Artificial Sequence: Synthetic oligonucleotide
ggcuauccuuauuaaugac

SEQ ID NO: 664187 - RNA, 19 nt, Artificial Sequence
  Description of Artificial Sequence: Synthetic oligonucleotide
aguguaagcuggaggaaua

SEQ ID NO: 664188 - RNA, 19 nt, Artificial Sequence
  Description of Artificial Sequence: Synthetic oligonucleotide
guguguauaacagugccuu

SEQ ID NO: 664189 - RNA, 19 nt, Artificial Sequence
  Description of Artificial Sequence: Synthetic oligonucleotide
uugaaagcucaucgcccuu

SEQ ID NO: 664190 - RNA, 19 nt, Artificial Sequence
  Description of Artificial Sequence: Synthetic oligonucleotide
ccaugagagagaaacguaa

SEQ ID NO: 664191 - RNA, 19 nt, Artificial Sequence
  Description of Artificial Sequence: Synthetic oligonucleotide
ugguacccauaagaaacau

SEQ ID NO: 664192 - RNA, 19 nt, Artificial Sequence
  Description of Artificial Sequence: Synthetic oligonucleotide
cuuaacaaggcagcagcua

SEQ ID NO: 664193 - RNA, 19 nt, Artificial Sequence
  Description of Artificial Sequence: Synthetic oligonucleotide
acacuacauagaauuccca

SEQ ID NO: 664194 - RNA, 19 nt, Artificial Sequence
  Description of Artificial Sequence: Synthetic oligonucleotide
agccuaggcuaaaauacaa

SEQ ID NO: 664195 - RNA, 19 nt, Artificial Sequence
  Description of Artificial Sequence: Synthetic oligonucleotide
auaaggcaaucagaauuuu

SEQ ID NO: 664196 - RNA, 19 nt, Artificial Sequence
  Description of Artificial Sequence: Synthetic oligonucleotide
gugagcccgauauucuaaa

SEQ ID NO: 664197 - RNA, 19 nt, Artificial Sequence
  Description of Artificial Sequence: Synthetic oligonucleotide
augacaaacuggggucaug

SEQ ID NO: 664198 - RNA, 19 nt, Artificial Sequence
  Description of Artificial Sequence: Synthetic oligonucleotide
guuuugcuagagcuauugu

SEQ ID NO: 664199 - RNA, 19 nt, Artificial Sequence
  Description of Artificial Sequence: Synthetic oligonucleotide
cagggucuuugaaaacuga

SEQ ID NO: 664200 - RNA, 19 nt, Artificial Sequence
  Description of Artificial Sequence: Synthetic oligonucleotide
uggcugaaugguacccaua

SEQ ID NO: 664201 - RNA, 19 nt, Artificial Sequence
  Description of Artificial Sequence: Synthetic oligonucleotide
ccuuugacguaagucuuag

SEQ ID NO: 664202 - RNA, 19 nt, Artificial Sequence
  Description of Artificial Sequence: Synthetic oligonucleotide
cauucuaaaugaucucuuu

SEQ ID NO: 664203 - RNA, 19 nt, Artificial Sequence
  Description of Artificial Sequence: Synthetic oligonucleotide
ucacugugagcccgauauu

SEQ ID NO: 664204 - RNA, 19 nt, Artificial Sequence
  Description of Artificial Sequence: Synthetic oligonucleotide
cuuugacguaagucuuaga

SEQ ID NO: 664205 - RNA, 19 nt, Artificial Sequence
  Description of Artificial Sequence: Synthetic oligonucleotide
aucgcccuuugacguaagu

SEQ ID NO: 664206 - RNA, 19 nt, Artificial Sequence
  Description of Artificial Sequence: Synthetic oligonucleotide
auaaagccagugagucucu

SEQ ID NO: 664207 - RNA, 19 nt, Artificial Sequence
  Description of Artificial Sequence: Synthetic oligonucleotide
uaccaguauuuggccaaac

SEQ ID NO: 664208 - RNA, 19 nt, Artificial Sequence
  Description of Artificial Sequence: Synthetic oligonucleotide
cguaauggaauagauuaca

SEQ ID NO: 664209 - RNA, 19 nt, Artificial Sequence
  Description of Artificial Sequence: Synthetic oligonucleotide
gauugaaaauugggacaua

SEQ ID NO: 664210 - RNA, 19 nt, Artificial Sequence
  Description of Artificial Sequence: Synthetic oligonucleotide
ggguuggugacaauagcaa

SEQ ID NO: 664211 - RNA, 19 nt, Artificial Sequence
  Description of Artificial Sequence: Synthetic oligonucleotide
gaguacugaaguggcugaa

SEQ ID NO: 664212 - RNA, 19 nt, Artificial Sequence
  Description of Artificial Sequence: Synthetic oligonucleotide
gaagucucaucuugccauu

SEQ ID NO: 664213 - RNA, 19 nt, Artificial Sequence
  Description of Artificial Sequence: Synthetic oligonucleotide
cugugagcccgauauucua

SEQ ID NO: 664214 - RNA, 19 nt, Artificial Sequence
  Description of Artificial Sequence: Synthetic oligonucleotide
gugaugguucgaauauaaa

SEQ ID NO: 664215 - RNA, 19 nt, Artificial Sequence
  Description of Artificial Sequence: Synthetic oligonucleotide
guauauaagcacagaccau

SEQ ID NO: 664216 - RNA, 19 nt, Artificial Sequence
  Description of Artificial Sequence: Synthetic oligonucleotide
cugggucaauuaauacaaa

SEQ ID NO: 664217 - RNA, 19 nt, Artificial Sequence
  Description of Artificial Sequence: Synthetic oligonucleotide
gacaaacuggggucaugau

SEQ ID NO: 664218 - RNA, 19 nt, Artificial Sequence
  Description of Artificial Sequence: Synthetic oligonucleotide
cccgauauucuaaaccucu

SEQ ID NO: 664219 - RNA, 19 nt, Artificial Sequence
  Description of Artificial Sequence: Synthetic oligonucleotide
gcucaucgcccuuugacgu

SEQ ID NO: 664220 - RNA, 19 nt, Artificial Sequence
  Description of Artificial Sequence: Synthetic oligonucleotide
gccaaacccaacucaggaa

SEQ ID NO: 664221 - RNA, 19 nt, Artificial Sequence
  Description of Artificial Sequence: Synthetic oligonucleotide
caucgcccuuugacguaag

SEQ ID NO: 664222 - RNA, 19 nt, Artificial Sequence
  Description of Artificial Sequence: Synthetic oligonucleotide
guauaacaauuguuacauu

SEQ ID NO: 664223 - RNA, 19 nt, Artificial Sequence
  Description of Artificial Sequence: Synthetic oligonucleotide
uggggucaugaugcuuuaa

SEQ ID NO: 664224 - RNA, 19 nt, Artificial Sequence
  Description of Artificial Sequence: Synthetic oligonucleotide
gcuagagcuauugucguau

SEQ ID NO: 664225 - RNA, 19 nt, Artificial Sequence
  Description of Artificial Sequence: Synthetic oligonucleotide
cucaucgcccuuugacgua

SEQ ID NO: 664226 - RNA, 19 nt, Artificial Sequence
  Description of Artificial Sequence: Synthetic oligonucleotide
gaauguccauaaagccagu

SEQ ID NO: 664227 - RNA, 19 nt, Artificial Sequence
  Description of Artificial Sequence: Synthetic oligonucleotide
auguuuugcuagagcuauu

SEQ ID NO: 664228 - RNA, 19 nt, Artificial Sequence
  Description of Artificial Sequence: Synthetic oligonucleotide
guguaagcuggaggaauau

SEQ ID NO: 664229 - RNA, 19 nt, Artificial Sequence
  Description of Artificial Sequence: Synthetic oligonucleotide
gcuugauauagugacucuu

SEQ ID NO: 664230 - RNA, 19 nt, Artificial Sequence
  Description of Artificial Sequence: Synthetic oligonucleotide
gcccgauauucuaaaccuc

SEQ ID NO: 664231 - RNA, 19 nt, Artificial Sequence
  Description of Artificial Sequence: Synthetic oligonucleotide
gcuuaacaaggcagcagcu

SEQ ID NO: 664232 - RNA, 19 nt, Artificial Sequence
  Description of Artificial Sequence: Synthetic oligonucleotide
gguacccauaagaaacauu

SEQ ID NO: 664233 - RNA, 19 nt, Artificial Sequence
  Description of Artificial Sequence: Synthetic oligonucleotide
cccuuugacguaagucuua

SEQ ID NO: 664234 - RNA, 19 nt, Artificial Sequence
  Description of Artificial Sequence: Synthetic oligonucleotide
gccuaggcuaaaauacaau

SEQ ID NO: 664235 - RNA, 19 nt, Artificial Sequence
  Description of Artificial Sequence: Synthetic oligonucleotide
cacgcucauuggauucuuu

SEQ ID NO: 664236 - RNA, 19 nt, Artificial Sequence
  Description of Artificial Sequence: Synthetic oligonucleotide
ggcuagcaaagcagaugua

SEQ ID NO: 664237 - RNA, 19 nt, Artificial Sequence
  Description of Artificial Sequence: Synthetic oligonucleotide
ccgauauucuaaaccucuu

SEQ ID NO: 664238 - RNA, 19 nt, Artificial Sequence
  Description of Artificial Sequence: Synthetic oligonucleotide
gcucacugugagcccgaua

SEQ ID NO: 664239 - RNA, 19 nt, Artificial Sequence
  Description of Artificial Sequence: Synthetic oligonucleotide
gcccuuugacguaagucuu

SEQ ID NO: 664240 - RNA, 19 nt, Artificial Sequence
  Description of Artificial Sequence: Synthetic oligonucleotide
aaauuagcaaacugcaagc

SEQ ID NO: 664241 - RNA, 19 nt, Artificial Sequence
  Description of Artificial Sequence: Synthetic oligonucleotide
ugucauuagagucugaagg

SEQ ID NO: 664242 - RNA, 19 nt, Artificial Sequence
  Description of Artificial Sequence: Synthetic oligonucleotide
uaacauauauauuugaccc

SEQ ID NO: 664243 - RNA, 19 nt, Artificial Sequence
  Description of Artificial Sequence: Synthetic oligonucleotide
gaaaacauggaauugcggg

SEQ ID NO: 664244 - RNA, 19 nt, Artificial Sequence
  Description of Artificial Sequence: Synthetic oligonucleotide
aauuacuuuauaccagggc

SEQ ID NO: 664245 - RNA, 19 nt, Artificial Sequence
  Description of Artificial Sequence: Synthetic oligonucleotide
uaugguaucuaauaaagcc

SEQ ID NO: 664246 - RNA, 19 nt, Artificial Sequence
  Description of Artificial Sequence: Synthetic oligonucleotide
uauagugauacccuggccg

SEQ ID NO: 664247 - RNA, 19 nt, Artificial Sequence
  Description of Artificial Sequence: Synthetic oligonucleotide
uguaauauauacauggaga

SEQ ID NO: 664248 - RNA, 19 nt, Artificial Sequence
  Description of Artificial Sequence: Synthetic oligonucleotide
aauaaauuuaccuccuucu

SEQ ID NO: 664249 - RNA, 19 nt, Artificial Sequence
  Description of Artificial Sequence: Synthetic oligonucleotide
agugaaauggcuuuacugg

SEQ ID NO: 664250 - RNA, 19 nt, Artificial Sequence
  Description of Artificial Sequence: Synthetic oligonucleotide
agaauaacccacuggaacc

SEQ ID NO: 664251 - RNA, 19 nt, Artificial Sequence
  Description of Artificial Sequence: Synthetic oligonucleotide
ucugacaacagaauaaccc

SEQ ID NO: 664252 - RNA, 19 nt, Artificial Sequence
  Description of Artificial Sequence: Synthetic oligonucleotide
aaauucuaaaucuaccuca

SEQ ID NO: 664253 - RNA, 19 nt, Artificial Sequence
  Description of Artificial Sequence: Synthetic oligonucleotide
uuaauuuacuauuggaaag

SEQ ID NO: 664254 - RNA, 19 nt, Artificial Sequence
  Description of Artificial Sequence: Synthetic oligonucleotide
agauaaauauucuaucuuc

SEQ ID NO: 664255 - RNA, 19 nt, Artificial Sequence
  Description of Artificial Sequence: Synthetic oligonucleotide
aaucuuaacggauaaggug

SEQ ID NO: 664256 - RNA, 19 nt, Artificial Sequence
  Description of Artificial Sequence: Synthetic oligonucleotide
ugcauuuagauaaauauuc

SEQ ID NO: 664257 - RNA, 19 nt, Artificial Sequence
  Description of Artificial Sequence: Synthetic oligonucleotide
ucuaccucaaguuauacca

SEQ ID NO: 664258 - RNA, 19 nt, Artificial Sequence
  Description of Artificial Sequence: Synthetic oligonucleotide
aaaauaaucugacaacaga

SEQ ID NO: 664259 - RNA, 19 nt, Artificial Sequence
  Description of Artificial Sequence: Synthetic oligonucleotide
auuacuuuauaccagggcu

SEQ ID NO: 664260 - RNA, 19 nt, Artificial Sequence
  Description of Artificial Sequence: Synthetic oligonucleotide
uguuuaucugcauagcuag

SEQ ID NO: 664261 - RNA, 19 nt, Artificial Sequence
  Description of Artificial Sequence: Synthetic oligonucleotide
ucuaaauucuaaaucuacc

SEQ ID NO: 664262 - RNA, 19 nt, Artificial Sequence
  Description of Artificial Sequence: Synthetic oligonucleotide
uuagauaaauauucuaucu

SEQ ID NO: 664263 - RNA, 19 nt, Artificial Sequence
  Description of Artificial Sequence: Synthetic oligonucleotide
ugugggugcacuuaugugg

SEQ ID NO: 664264 - RNA, 19 nt, Artificial Sequence
  Description of Artificial Sequence: Synthetic oligonucleotide
ucaaacgaagacaugagcu

SEQ ID NO: 664265 - RNA, 19 nt, Artificial Sequence
  Description of Artificial Sequence: Synthetic oligonucleotide
aauauucuaucuuccuuuc

SEQ ID NO: 664266 - RNA, 19 nt, Artificial Sequence
  Description of Artificial Sequence: Synthetic oligonucleotide
acugccaauuaauaaacac

SEQ ID NO: 664267 - RNA, 19 nt, Artificial Sequence
  Description of Artificial Sequence: Synthetic oligonucleotide
cuaugauaaauaaauuagc

SEQ ID NO: 664268 - RNA, 19 nt, Artificial Sequence
  Description of Artificial Sequence: Synthetic oligonucleotide
guaucauuuauacaugugc

SEQ ID NO: 664269 - RNA, 19 nt, Artificial Sequence
  Description of Artificial Sequence: Synthetic oligonucleotide
uaauguguaucauuuauac

SEQ ID NO: 664270 - RNA, 19 nt, Artificial Sequence
  Description of Artificial Sequence: Synthetic oligonucleotide
uggauuucaggcuaagggg

SEQ ID NO: 664271 - RNA, 19 nt, Artificial Sequence
  Description of Artificial Sequence: Synthetic oligonucleotide
uugacuucuauguagacaa

SEQ ID NO: 664272 - RNA, 19 nt, Artificial Sequence
  Description of Artificial Sequence: Synthetic oligonucleotide
uuuagauaaauauucuauc

SEQ ID NO: 664273 - RNA, 19 nt, Artificial Sequence
  Description of Artificial Sequence: Synthetic oligonucleotide
ugaaauaaucuuaacggau

SEQ ID NO: 664274 - RNA, 19 nt, Artificial Sequence
  Description of Artificial Sequence: Synthetic oligonucleotide
uccauauaauuuacaaucc

SEQ ID NO: 664275 - RNA, 19 nt, Artificial Sequence
  Description of Artificial Sequence: Synthetic oligonucleotide
uuagcaaacugcaagccac

SEQ ID NO: 664276 - RNA, 19 nt, Artificial Sequence
  Description of Artificial Sequence: Synthetic oligonucleotide
uuaaaugccuuccuccuug

SEQ ID NO: 664277 - RNA, 19 nt, Artificial Sequence
  Description of Artificial Sequence: Synthetic oligonucleotide
ucauacauauaauagugaa

SEQ ID NO: 664278 - RNA, 19 nt, Artificial Sequence
  Description of Artificial Sequence: Synthetic oligonucleotide
uauaccaauaacuccacaa

SEQ ID NO: 664279 - RNA, 19 nt, Artificial Sequence
  Description of Artificial Sequence: Synthetic oligonucleotide
ucuauuacuuugaaauuac

SEQ ID NO: 664280 - RNA, 19 nt, Artificial Sequence
  Description of Artificial Sequence: Synthetic oligonucleotide
uuucuaaaagaaaccagcu

SEQ ID NO: 664281 - RNA, 19 nt, Artificial Sequence
  Description of Artificial Sequence: Synthetic oligonucleotide
ucugccauuaaaacaaccu

SEQ ID NO: 664282 - RNA, 19 nt, Artificial Sequence
  Description of Artificial Sequence: Synthetic oligonucleotide
uccacaugaaacauggaac

SEQ ID NO: 664283 - RNA, 19 nt, Artificial Sequence
  Description of Artificial Sequence: Synthetic oligonucleotide
ugccauuaaaacaaccuca

SEQ ID NO: 664284 - RNA, 19 nt, Artificial Sequence
  Description of Artificial Sequence: Synthetic oligonucleotide
aucagauugacauaccgga

SEQ ID NO: 664285 - RNA, 19 nt, Artificial Sequence
  Description of Artificial Sequence: Synthetic oligonucleotide
uuauggaagagauuugggu

SEQ ID NO: 664286 - RNA, 19 nt, Artificial Sequence
  Description of Artificial Sequence: Synthetic oligonucleotide
uauggaagagauuuggguc

SEQ ID NO: 664287 - RNA, 19 nt, Artificial Sequence
  Description of Artificial Sequence: Synthetic oligonucleotide
auucauacauauaauagug

SEQ ID NO: 664288 - RNA, 19 nt, Artificial Sequence
  Description of Artificial Sequence: Synthetic oligonucleotide
uuuacaauccauguaacau

SEQ ID NO: 664289 - RNA, 19 nt, Artificial Sequence
  Description of Artificial Sequence: Synthetic oligonucleotide
aaaccagcuuguaagaguc

SEQ ID NO: 664290 - RNA, 19 nt, Artificial Sequence
  Description of Artificial Sequence: Synthetic oligonucleotide
uacauuguccuucauuaca

SEQ ID NO: 664291 - RNA, 19 nt, Artificial Sequence
  Description of Artificial Sequence: Synthetic oligonucleotide
aguuauaccaauaacucca

SEQ ID NO: 664292 - RNA, 19 nt, Artificial Sequence
  Description of Artificial Sequence: Synthetic oligonucleotide
uuaacggauaagguguugg

SEQ ID NO: 664293 - RNA, 19 nt, Artificial Sequence
  Description of Artificial Sequence: Synthetic oligonucleotide
aacaucacagaggaguauc

SEQ ID NO: 664294 - RNA, 19 nt, Artificial Sequence
  Description of Artificial Sequence: Synthetic oligonucleotide
ucuuaucagaaagaaacug

SEQ ID NO: 664295 - RNA, 19 nt, Artificial Sequence
  Description of Artificial Sequence: Synthetic oligonucleotide
acuaugguaucuaauaaag

SEQ ID NO: 664296 - RNA, 19 nt, Artificial Sequence
  Description of Artificial Sequence: Synthetic oligonucleotide
uagugaaauggcuuuacug

SEQ ID NO: 664297 - RNA, 19 nt, Artificial Sequence
  Description of Artificial Sequence: Synthetic oligonucleotide
aauguguaucauuuauaca

SEQ ID NO: 664298 - RNA, 19 nt, Artificial Sequence
  Description of Artificial Sequence: Synthetic oligonucleotide
aaccuguucagucuagcug

SEQ ID NO: 664299 - RNA, 19 nt, Artificial Sequence
  Description of Artificial Sequence: Synthetic oligonucleotide
ucauacauacccauguuua

SEQ ID NO: 664300 - RNA, 19 nt, Artificial Sequence
  Description of Artificial Sequence: Synthetic oligonucleotide
auaaagccaugucaacagc

SEQ ID NO: 664301 - RNA, 19 nt, Artificial Sequence
  Description of Artificial Sequence: Synthetic oligonucleotide
ugaucuuugucauuagagu

SEQ ID NO: 664302 - RNA, 19 nt, Artificial Sequence
  Description of Artificial Sequence: Synthetic oligonucleotide
aauccaauuuugauccuac

SEQ ID NO: 664303 - RNA, 19 nt, Artificial Sequence
  Description of Artificial Sequence: Synthetic oligonucleotide
ucgaguuuuccucaaagaa

SEQ ID NO: 664304 - RNA, 19 nt, Artificial Sequence
  Description of Artificial Sequence: Synthetic oligonucleotide
uuugaacacaauagguucu

SEQ ID NO: 664305 - RNA, 19 nt, Artificial Sequence
  Description of Artificial Sequence: Synthetic oligonucleotide
uguaucauuuauacaugug

SEQ ID NO: 664306 - RNA, 19 nt, Artificial Sequence
  Description of Artificial Sequence: Synthetic oligonucleotide
uucauacauauaauaguga

SEQ ID NO: 664307 - RNA, 19 nt, Artificial Sequence
  Description of Artificial Sequence: Synthetic oligonucleotide
uuaauacacaucagaucag

SEQ ID NO: 664308 - RNA, 19 nt, Artificial Sequence
  Description of Artificial Sequence: Synthetic oligonucleotide
uauuugacccauuucuucu

SEQ ID NO: 664309 - RNA, 19 nt, Artificial Sequence
  Description of Artificial Sequence: Synthetic oligonucleotide
uacauacccauguuuaucu

SEQ ID NO: 664310 - RNA, 19 nt, Artificial Sequence
  Description of Artificial Sequence: Synthetic oligonucleotide
uauauauuugacccauuuc

SEQ ID NO: 664311 - RNA, 19 nt, Artificial Sequence
  Description of Artificial Sequence: Synthetic oligonucleotide
ugggcagugaucuuuguca

SEQ ID NO: 664312 - RNA, 19 nt, Artificial Sequence
  Description of Artificial Sequence: Synthetic oligonucleotide
uggaucaaagugcuugucc

SEQ ID NO: 664313 - RNA, 19 nt, Artificial Sequence
  Description of Artificial Sequence: Synthetic oligonucleotide
uccauagugugaaauggug

SEQ ID NO: 664314 - RNA, 19 nt, Artificial Sequence
  Description of Artificial Sequence: Synthetic oligonucleotide
gaguaucaaacucucuucc

SEQ ID NO: 664315 - RNA, 19 nt, Artificial Sequence
  Description of Artificial Sequence: Synthetic oligonucleotide
caucagauugacauaccgg

SEQ ID NO: 664316 - RNA, 19 nt, Artificial Sequence
  Description of Artificial Sequence: Synthetic oligonucleotide
ucugacacuuuaaaaucca

SEQ ID NO: 664317 - RNA, 19 nt, Artificial Sequence
  Description of Artificial Sequence: Synthetic oligonucleotide
uaccaauaacuccacaaac

SEQ ID NO: 664318 - RNA, 19 nt, Artificial Sequence
  Description of Artificial Sequence: Synthetic oligonucleotide
auauacauggagauaaugu

SEQ ID NO: 664319 - RNA, 19 nt, Artificial Sequence
  Description of Artificial Sequence: Synthetic oligonucleotide
agauugacauaccggauug

SEQ ID NO: 664320 - RNA, 19 nt, Artificial Sequence
  Description of Artificial Sequence: Synthetic oligonucleotide
augagcucgaguuuuccuc

SEQ ID NO: 664321 - RNA, 19 nt, Artificial Sequence
  Description of Artificial Sequence: Synthetic oligonucleotide
uuaaaucuuauggaagaga

SEQ ID NO: 664322 - RNA, 19 nt, Artificial Sequence
  Description of Artificial Sequence: Synthetic oligonucleotide
cuaugguaucuaauaaagc

SEQ ID NO: 664323 - RNA, 19 nt, Artificial Sequence
  Description of Artificial Sequence: Synthetic oligonucleotide
uauauacauggagauaaug

SEQ ID NO: 664324 - RNA, 19 nt, Artificial Sequence
  Description of Artificial Sequence: Synthetic oligonucleotide
aacacaauagguucuucuu

SEQ ID NO: 664325 - RNA, 19 nt, Artificial Sequence
  Description of Artificial Sequence: Synthetic oligonucleotide
ugguaucuaauaaagccau

SEQ ID NO: 664326 - RNA, 19 nt, Artificial Sequence
  Description of Artificial Sequence: Synthetic oligonucleotide
gagauauagugauacccug

SEQ ID NO: 664327 - RNA, 19 nt, Artificial Sequence
  Description of Artificial Sequence: Synthetic oligonucleotide
aguuagggaaacaaugguc

SEQ ID NO: 664328 - RNA, 19 nt, Artificial Sequence
  Description of Artificial Sequence: Synthetic oligonucleotide
aucuuaacggauaaggugu

SEQ ID NO: 664329 - RNA, 19 nt, Artificial Sequence
  Description of Artificial Sequence: Synthetic oligonucleotide
cauguaucccugaacuucc

SEQ ID NO: 664330 - RNA, 19 nt, Artificial Sequence
  Description of Artificial Sequence: Synthetic oligonucleotide
gaaacucucgauuuggugu

SEQ ID NO: 664331 - RNA, 19 nt, Artificial Sequence
  Description of Artificial Sequence: Synthetic oligonucleotide
aaucuaccucaaguuauac

SEQ ID NO: 664332 - RNA, 19 nt, Artificial Sequence
  Description of Artificial Sequence: Synthetic oligonucleotide
guaugggaccucuacacag

SEQ ID NO: 664333 - RNA, 19 nt, Artificial Sequence
  Description of Artificial Sequence: Synthetic oligonucleotide
uaauacacaucagaucagc

SEQ ID NO: 664334 - RNA, 19 nt, Artificial Sequence
  Description of Artificial Sequence: Synthetic oligonucleotide
uacauggagauaaugugua

SEQ ID NO: 664335 - RNA, 19 nt, Artificial Sequence
  Description of Artificial Sequence: Synthetic oligonucleotide
auacauuguccuucauuac

SEQ ID NO: 664336 - RNA, 19 nt, Artificial Sequence
  Description of Artificial Sequence: Synthetic oligonucleotide
uuugacuucuauguagaca

SEQ ID NO: 664337 - RNA, 19 nt, Artificial Sequence
  Description of Artificial Sequence: Synthetic oligonucleotide
auacaugcacccuucucuc

SEQ ID NO: 664338 - RNA, 19 nt, Artificial Sequence
  Description of Artificial Sequence: Synthetic oligonucleotide
aauaaucugacaacagaau

SEQ ID NO: 664339 - RNA, 19 nt, Artificial Sequence
  Description of Artificial Sequence: Synthetic oligonucleotide
ucauuagagucugaaggag

SEQ ID NO: 664340 - RNA, 19 nt, Artificial Sequence
  Description of Artificial Sequence: Synthetic oligonucleotide
aaagcuucgaucacaucug

SEQ ID NO: 664341 - RNA, 19 nt, Artificial Sequence
  Description of Artificial Sequence: Synthetic oligonucleotide
uuacaauccauguaacaua

SEQ ID NO: 664342 - RNA, 19 nt, Artificial Sequence
  Description of Artificial Sequence: Synthetic oligonucleotide
ugucgguucccuuuccagg

SEQ ID NO: 664343 - RNA, 19 nt, Artificial Sequence
  Description of Artificial Sequence: Synthetic oligonucleotide
cugauuaauacacaucaga

SEQ ID NO: 664344 - RNA, 19 nt, Artificial Sequence
  Description of Artificial Sequence: Synthetic oligonucleotide
ugugauugcugucuucacu

SEQ ID NO: 664345 - RNA, 19 nt, Artificial Sequence
  Description of Artificial Sequence: Synthetic oligonucleotide
cauagcuagauccacuguc

SEQ ID NO: 664346 - RNA, 19 nt, Artificial Sequence
  Description of Artificial Sequence: Synthetic oligonucleotide
ugacauaccggauuggguu

SEQ ID NO: 664347 - RNA, 19 nt, Artificial Sequence
  Description of Artificial Sequence: Synthetic oligonucleotide
uguaagagucacuauggua

SEQ ID NO: 664348 - RNA, 19 nt, Artificial Sequence
  Description of Artificial Sequence: Synthetic oligonucleotide
ucuacgauuccuucaguaa

SEQ ID NO: 664349 - RNA, 19 nt, Artificial Sequence
  Description of Artificial Sequence: Synthetic oligonucleotide
acggauaagguguuggcca

SEQ ID NO: 664350 - RNA, 19 nt, Artificial Sequence
  Description of Artificial Sequence: Synthetic oligonucleotide
ucaugcguguguaugcgug

SEQ ID NO: 664351 - RNA, 19 nt, Artificial Sequence
  Description of Artificial Sequence: Synthetic oligonucleotide
cucaaguuauaccaauaac

SEQ ID NO: 664352 - RNA, 19 nt, Artificial Sequence
  Description of Artificial Sequence: Synthetic oligonucleotide
aggaguaucaaacucucuu

SEQ ID NO: 664353 - RNA, 19 nt, Artificial Sequence
  Description of Artificial Sequence: Synthetic oligonucleotide
auaccaauaacuccacaaa

SEQ ID NO: 664354 - RNA, 19 nt, Artificial Sequence
  Description of Artificial Sequence: Synthetic oligonucleotide
caaacgaagacaugagcuc

SEQ ID NO: 664355 - RNA, 19 nt, Artificial Sequence
  Description of Artificial Sequence: Synthetic oligonucleotide
agauauagugauacccugg

SEQ ID NO: 664356 - RNA, 19 nt, Artificial Sequence
  Description of Artificial Sequence: Synthetic oligonucleotide
auacauacccauguuuauc

SEQ ID NO: 664357 - RNA, 19 nt, Artificial Sequence
  Description of Artificial Sequence: Synthetic oligonucleotide
cauuguacucauacauacc

SEQ ID NO: 664358 - RNA, 19 nt, Artificial Sequence
  Description of Artificial Sequence: Synthetic oligonucleotide
uuacuuuauaccagggcuu

SEQ ID NO: 664359 - RNA, 19 nt, Artificial Sequence
  Description of Artificial Sequence: Synthetic oligonucleotide
uuucuacaguaaaaugaac

SEQ ID NO: 664360 - RNA, 19 nt, Artificial Sequence
  Description of Artificial Sequence: Synthetic oligonucleotide
cugccaauuaauaaacaca

SEQ ID NO: 664361 - RNA, 19 nt, Artificial Sequence
  Description of Artificial Sequence: Synthetic oligonucleotide
gucgguucccuuuccaggg

SEQ ID NO: 664362 - RNA, 19 nt, Artificial Sequence
  Description of Artificial Sequence: Synthetic oligonucleotide
aaugccucuaugauaaaua

SEQ ID NO: 664363 - RNA, 19 nt, Artificial Sequence
  Description of Artificial Sequence: Synthetic oligonucleotide
uccacguaagucccaaccu

SEQ ID NO: 664364 - RNA, 19 nt, Artificial Sequence
  Description of Artificial Sequence: Synthetic oligonucleotide
ggaauugcggggcaguuag

SEQ ID NO: 664365 - RNA, 19 nt, Artificial Sequence
  Description of Artificial Sequence: Synthetic oligonucleotide
aauucuaaaucuaccucaa

SEQ ID NO: 664366 - RNA, 19 nt, Artificial Sequence
  Description of Artificial Sequence: Synthetic oligonucleotide
auagugauacccuggccga

SEQ ID NO: 664367 - RNA, 19 nt, Artificial Sequence
  Description of Artificial Sequence: Synthetic oligonucleotide
auacccuggccgaauagcc

SEQ ID NO: 664368 - RNA, 19 nt, Artificial Sequence
  Description of Artificial Sequence: Synthetic oligonucleotide
uaacggauaagguguuggc

SEQ ID NO: 664369 - RNA, 19 nt, Artificial Sequence
  Description of Artificial Sequence: Synthetic oligonucleotide
acaauggucaaagugggau

SEQ ID NO: 664370 - RNA, 19 nt, Artificial Sequence
  Description of Artificial Sequence: Synthetic oligonucleotide
uggguuugacaaagcuucg

SEQ ID NO: 664371 - RNA, 19 nt, Artificial Sequence
  Description of Artificial Sequence: Synthetic oligonucleotide
uacagucaaauguauguuu

SEQ ID NO: 664372 - RNA, 19 nt, Artificial Sequence
  Description of Artificial Sequence: Synthetic oligonucleotide
auaccagggcuucaaacga

SEQ ID NO: 664373 - RNA, 19 nt, Artificial Sequence
  Description of Artificial Sequence: Synthetic oligonucleotide
ugagcucgaguuuuccuca

SEQ ID NO: 664374 - RNA, 19 nt, Artificial Sequence
  Description of Artificial Sequence: Synthetic oligonucleotide
uguggauuucaggcuaagg

SEQ ID NO: 664375 - RNA, 19 nt, Artificial Sequence
  Description of Artificial Sequence: Synthetic oligonucleotide
uuauaccaauaacuccaca

SEQ ID NO: 664376 - RNA, 19 nt, Artificial Sequence
  Description of Artificial Sequence: Synthetic oligonucleotide
uacgauuccuucaguaaau

SEQ ID NO: 664377 - RNA, 19 nt, Artificial Sequence
  Description of Artificial Sequence: Synthetic oligonucleotide
uggccgaauagccugcaca

SEQ ID NO: 664378 - RNA, 19 nt, Artificial Sequence
  Description of Artificial Sequence: Synthetic oligonucleotide
auacauggagauaaugugu

SEQ ID NO: 664379 - RNA, 19 nt, Artificial Sequence
  Description of Artificial Sequence: Synthetic oligonucleotide
cucaaacuauuucuauuac

SEQ ID NO: 664380 - RNA, 19 nt, Artificial Sequence
  Description of Artificial Sequence: Synthetic oligonucleotide
cugccauuaaaacaaccuc

SEQ ID NO: 664381 - RNA, 19 nt, Artificial Sequence
  Description of Artificial Sequence: Synthetic oligonucleotide
gauacccuggccgaauagc

SEQ ID NO: 664382 - RNA, 19 nt, Artificial Sequence
  Description of Artificial Sequence: Synthetic oligonucleotide
uugacaaagcuucgaucac

SEQ ID NO: 664383 - RNA, 19 nt, Artificial Sequence
  Description of Artificial Sequence: Synthetic oligonucleotide
ugcauaucuggaaggccug

SEQ ID NO: 664384 - RNA, 19 nt, Artificial Sequence
  Description of Artificial Sequence: Synthetic oligonucleotide
ucuagcugaaauccugauu

SEQ ID NO: 664385 - RNA, 19 nt, Artificial Sequence
  Description of Artificial Sequence: Synthetic oligonucleotide
ugauacccuggccgaauag

SEQ ID NO: 664386 - RNA, 19 nt, Artificial Sequence
  Description of Artificial Sequence: Synthetic oligonucleotide
guuugacaaagcuucgauc

SEQ ID NO: 664387 - RNA, 19 nt, Artificial Sequence
  Description of Artificial Sequence: Synthetic oligonucleotide
gggagauauagugauaccc

SEQ ID NO: 664388 - RNA, 19 nt, Artificial Sequence
  Description of Artificial Sequence: Synthetic oligonucleotide
gcaguuagggaaacaaugg

SEQ ID NO: 664389 - RNA, 19 nt, Artificial Sequence
  Description of Artificial Sequence: Synthetic oligonucleotide
uuuauaccagggcuucaaa

SEQ ID NO: 664390 - RNA, 19 nt, Artificial Sequence
  Description of Artificial Sequence: Synthetic oligonucleotide
aaauccugauuaauacaca

SEQ ID NO: 664391 - RNA, 19 nt, Artificial Sequence
  Description of Artificial Sequence: Synthetic oligonucleotide
ugcauaugugucuggcaca

SEQ ID NO: 664392 - RNA, 19 nt, Artificial Sequence
  Description of Artificial Sequence: Synthetic oligonucleotide
uuuaaaugccuuccuccuu

SEQ ID NO: 664393 - RNA, 19 nt, Artificial Sequence
  Description of Artificial Sequence: Synthetic oligonucleotide
ucagauugacauaccggau

SEQ ID NO: 664394 - RNA, 19 nt, Artificial Sequence
  Description of Artificial Sequence: Synthetic oligonucleotide
cacucaugcguguguaugc

SEQ ID NO: 664395 - RNA, 19 nt, Artificial Sequence
  Description of Artificial Sequence: Synthetic oligonucleotide
aacauggaauugcggggca

SEQ ID NO: 664396 - RNA, 19 nt, Artificial Sequence
  Description of Artificial Sequence: Synthetic oligonucleotide
ugggucacugccaauuaau

SEQ ID NO: 664397 - RNA, 19 nt, Artificial Sequence
  Description of Artificial Sequence: Synthetic oligonucleotide
ugcacuucucaaacuauuu

SEQ ID NO: 664398 - RNA, 19 nt, Artificial Sequence
  Description of Artificial Sequence: Synthetic oligonucleotide
agccgugcauaucuggaag

SEQ ID NO: 664399 - RNA, 19 nt, Artificial Sequence
  Description of Artificial Sequence: Synthetic oligonucleotide
uggugcuaugcacuucuca

SEQ ID NO: 664400 - RNA, 19 nt, Artificial Sequence
  Description of Artificial Sequence: Synthetic oligonucleotide
uggcuuuagccuguagccg

SEQ ID NO: 664401 - RNA, 19 nt, Artificial Sequence
  Description of Artificial Sequence: Synthetic oligonucleotide
uagcaaacugcaagccacc

SEQ ID NO: 664402 - RNA, 19 nt, Artificial Sequence
  Description of Artificial Sequence: Synthetic oligonucleotide
uuagggaaacaauggucaa

SEQ ID NO: 664403 - RNA, 19 nt, Artificial Sequence
  Description of Artificial Sequence: Synthetic oligonucleotide
augccucuaugauaaauaa

SEQ ID NO: 664404 - RNA, 19 nt, Artificial Sequence
  Description of Artificial Sequence: Synthetic oligonucleotide
guggccaauaaauuuaccu

SEQ ID NO: 664405 - RNA, 19 nt, Artificial Sequence
  Description of Artificial Sequence: Synthetic oligonucleotide
cacuuauguggcugggugc

SEQ ID NO: 664406 - RNA, 19 nt, Artificial Sequence
  Description of Artificial Sequence: Synthetic oligonucleotide
gauugacauaccggauugg

SEQ ID NO: 664407 - RNA, 19 nt, Artificial Sequence
  Description of Artificial Sequence: Synthetic oligonucleotide
ggcaguuagggaaacaaug

SEQ ID NO: 664408 - RNA, 19 nt, Artificial Sequence
  Description of Artificial Sequence: Synthetic oligonucleotide
cugcuacccucaaacaggc

SEQ ID NO: 664409 - RNA, 19 nt, Artificial Sequence
  Description of Artificial Sequence: Synthetic oligonucleotide
uagcuagauccacugucug

SEQ ID NO: 664410 - RNA, 19 nt, Artificial Sequence
  Description of Artificial Sequence: Synthetic oligonucleotide
caauaacuccacaaacuga

SEQ ID NO: 664411 - RNA, 19 nt, Artificial Sequence
  Description of Artificial Sequence: Synthetic oligonucleotide
gaaaccagcuuguaagagu

SEQ ID NO: 664412 - RNA, 19 nt, Artificial Sequence
  Description of Artificial Sequence: Synthetic oligonucleotide
auauucuaucuuccuuucu

SEQ ID NO: 664413 - RNA, 19 nt, Artificial Sequence
  Description of Artificial Sequence: Synthetic oligonucleotide
uugcggggcaguuagggaa

SEQ ID NO: 664414 - RNA, 19 nt, Artificial Sequence
  Description of Artificial Sequence: Synthetic oligonucleotide
uccgguggccaauaaauuu

SEQ ID NO: 664415 - RNA, 19 nt, Artificial Sequence
  Description of Artificial Sequence: Synthetic oligonucleotide
cauagugugaaauggugcu

SEQ ID NO: 664416 - RNA, 19 nt, Artificial Sequence
  Description of Artificial Sequence: Synthetic oligonucleotide
ugccucuaugauaaauaaa

SEQ ID NO: 664417 - RNA, 19 nt, Artificial Sequence
  Description of Artificial Sequence: Synthetic oligonucleotide
ggggcgagaacugugauug

SEQ ID NO: 664418 - RNA, 19 nt, Artificial Sequence
  Description of Artificial Sequence: Synthetic oligonucleotide
aucuacgauuccuucagua

SEQ ID NO: 664419 - RNA, 19 nt, Artificial Sequence
  Description of Artificial Sequence: Synthetic oligonucleotide
acuuauguggcugggugca

SEQ ID NO: 664420 - RNA, 19 nt, Artificial Sequence
  Description of Artificial Sequence: Synthetic oligonucleotide
ucauuccgaagggagauau

SEQ ID NO: 664421 - RNA, 19 nt, Artificial Sequence
  Description of Artificial Sequence: Synthetic oligonucleotide
uacuuuauaccagggcuuc

SEQ ID NO: 664422 - RNA, 19 nt, Artificial Sequence
  Description of Artificial Sequence: Synthetic oligonucleotide
cacguaagucccaaccuuc

SEQ ID NO: 664423 - RNA, 19 nt, Artificial Sequence
  Description of Artificial Sequence: Synthetic oligonucleotide
auagcuagauccacugucu

SEQ ID NO: 664424 - RNA, 19 nt, Artificial Sequence
  Description of Artificial Sequence: Synthetic oligonucleotide
ccauagugugaaauggugc

SEQ ID NO: 664425 - RNA, 19 nt, Artificial Sequence
  Description of Artificial Sequence: Synthetic oligonucleotide
aagagucacuaugguaucu

SEQ ID NO: 664426 - RNA, 19 nt, Artificial Sequence
  Description of Artificial Sequence: Synthetic oligonucleotide
ccaucagauugacauaccg

SEQ ID NO: 664427 - RNA, 19 nt, Artificial Sequence
  Description of Artificial Sequence: Synthetic oligonucleotide
ggaguaucaaacucucuuc

SEQ ID NO: 664428 - RNA, 19 nt, Artificial Sequence
  Description of Artificial Sequence: Synthetic oligonucleotide
cacuaugguaucuaauaaa

SEQ ID NO: 664429 - RNA, 19 nt, Artificial Sequence
  Description of Artificial Sequence: Synthetic oligonucleotide
gaauagccugcacaggcaa

SEQ ID NO: 664430 - RNA, 19 nt, Artificial Sequence
  Description of Artificial Sequence: Synthetic oligonucleotide
ucauuacauguuccacgga

SEQ ID NO: 664431 - RNA, 19 nt, Artificial Sequence
  Description of Artificial Sequence: Synthetic oligonucleotide
ugucuggcacauaaucuuu

SEQ ID NO: 664432 - RNA, 19 nt, Artificial Sequence
  Description of Artificial Sequence: Synthetic oligonucleotide
ucuuaacggauaagguguu

SEQ ID NO: 664433 - RNA, 19 nt, Artificial Sequence
  Description of Artificial Sequence: Synthetic oligonucleotide
ucaaagugggauguuccau

SEQ ID NO: 664434 - RNA, 19 nt, Artificial Sequence
  Description of Artificial Sequence: Synthetic oligonucleotide
acauggaacugggguaugg

SEQ ID NO: 664435 - RNA, 19 nt, Artificial Sequence
  Description of Artificial Sequence: Synthetic oligonucleotide
cuacgauuccuucaguaaa

SEQ ID NO: 664436 - RNA, 19 nt, Artificial Sequence
  Description of Artificial Sequence: Synthetic oligonucleotide
acacucaugcguguguaug

SEQ ID NO: 664437 - RNA, 19 nt, Artificial Sequence
  Description of Artificial Sequence: Synthetic oligonucleotide
guaagucccaaccuucuua

SEQ ID NO: 664438 - RNA, 19 nt, Artificial Sequence
  Description of Artificial Sequence: Synthetic oligonucleotide
cauuguccuucauuacaug

SEQ ID NO: 664439 - RNA, 19 nt, Artificial Sequence
  Description of Artificial Sequence: Synthetic oligonucleotide
ggccgaauagccugcacag

SEQ ID NO: 664440 - RNA, 19 nt, Artificial Sequence
  Description of Artificial Sequence: Synthetic oligonucleotide
ggguaugggaccucuacac

SEQ ID NO: 664441 - RNA, 19 nt, Artificial Sequence
  Description of Artificial Sequence: Synthetic oligonucleotide
guuauaccaauaacuccac

SEQ ID NO: 664442 - RNA, 19 nt, Artificial Sequence
  Description of Artificial Sequence: Synthetic oligonucleotide
uguguguguguguguguga

SEQ ID NO: 664443 - RNA, 19 nt, Artificial Sequence
  Description of Artificial Sequence: Synthetic oligonucleotide
auagccugcacaggcaaga

SEQ ID NO: 664444 - RNA, 19 nt, Artificial Sequence
  Description of Artificial Sequence: Synthetic oligonucleotide
cucgaguuuuccucaaaga

SEQ ID NO: 664445 - RNA, 19 nt, Artificial Sequence
  Description of Artificial Sequence: Synthetic oligonucleotide
ccgaauagccugcacaggc

SEQ ID NO: 664446 - RNA, 19 nt, Artificial Sequence
  Description of Artificial Sequence: Synthetic oligonucleotide
guagccgcucuucccauug

SEQ ID NO: 664447 - RNA, 19 nt, Artificial Sequence
  Description of Artificial Sequence: Synthetic oligonucleotide
ugugugugugugaucuuuu

SEQ ID NO: 664448 - RNA, 19 nt, Artificial Sequence
  Description of Artificial Sequence: Synthetic oligonucleotide
cuaaggggugcuucucaug

SEQ ID NO: 664449 - RNA, 19 nt, Artificial Sequence
  Description of Artificial Sequence: Synthetic oligonucleotide
ucucgauuugguguggauu

SEQ ID NO: 664450 - RNA, 19 nt, Artificial Sequence
  Description of Artificial Sequence: Synthetic oligonucleotide
cauguuuaucugcauagcu

SEQ ID NO: 664451 - RNA, 19 nt, Artificial Sequence
  Description of Artificial Sequence: Synthetic oligonucleotide
auccaauuuugauccuaca

SEQ ID NO: 664452 - RNA, 19 nt, Artificial Sequence
  Description of Artificial Sequence: Synthetic oligonucleotide
gcacuuauguggcugggug

SEQ ID NO: 664453 - RNA, 19 nt, Artificial Sequence
  Description of Artificial Sequence: Synthetic oligonucleotide
auggaucaaagugcuuguc

SEQ ID NO: 664454 - RNA, 19 nt, Artificial Sequence
  Description of Artificial Sequence: Synthetic oligonucleotide
cacaugaaacauggaacug

SEQ ID NO: 664455 - RNA, 19 nt, Artificial Sequence
  Description of Artificial Sequence: Synthetic oligonucleotide
aucagaucagccaaauaua

SEQ ID NO: 664456 - RNA, 19 nt, Artificial Sequence
  Description of Artificial Sequence: Synthetic oligonucleotide
gccacuaucccaucuacga

SEQ ID NO: 664457 - RNA, 19 nt, Artificial Sequence
  Description of Artificial Sequence: Synthetic oligonucleotide
ugugugugugugugugugu

SEQ ID NO: 664458 - RNA, 19 nt, Artificial Sequence
  Description of Artificial Sequence: Synthetic oligonucleotide
auugcggggcaguuaggga

SEQ ID NO: 664459 - RNA, 19 nt, Artificial Sequence
  Description of Artificial Sequence: Synthetic oligonucleotide
gugggugcacuuauguggc

SEQ ID NO: 664460 - RNA, 19 nt, Artificial Sequence
  Description of Artificial Sequence: Synthetic oligonucleotide
aacaauggucaaaguggga

SEQ ID NO: 664461 - RNA, 19 nt, Artificial Sequence
  Description of Artificial Sequence: Synthetic oligonucleotide
ccauguaacauauauauuu

SEQ ID NO: 664462 - RNA, 19 nt, Artificial Sequence
  Description of Artificial Sequence: Synthetic oligonucleotide
uacccuggccgaauagccu

SEQ ID NO: 664463 - RNA, 19 nt, Artificial Sequence
  Description of Artificial Sequence: Synthetic oligonucleotide
accugucgguucccuuucc

SEQ ID NO: 664464 - RNA, 19 nt, Artificial Sequence
  Description of Artificial Sequence: Synthetic oligonucleotide
agacuggcaaucauuucca

SEQ ID NO: 664465 - RNA, 19 nt, Artificial Sequence
  Description of Artificial Sequence: Synthetic oligonucleotide
gauccgguggccaauaaau

SEQ ID NO: 664466 - RNA, 19 nt, Artificial Sequence
  Description of Artificial Sequence: Synthetic oligonucleotide
uacaugcacccuucucucu

SEQ ID NO: 664467 - RNA, 19 nt, Artificial Sequence
  Description of Artificial Sequence: Synthetic oligonucleotide
gugugugugugugugugug

SEQ ID NO: 664468 - RNA, 19 nt, Artificial Sequence
  Description of Artificial Sequence: Synthetic oligonucleotide
ugcgugugggugcacuuau

SEQ ID NO: 664469 - RNA, 19 nt, Artificial Sequence
  Description of Artificial Sequence: Synthetic oligonucleotide
ccugauuaauacacaucag

SEQ ID NO: 664470 - RNA, 19 nt, Artificial Sequence
  Description of Artificial Sequence: Synthetic oligonucleotide
agugugugugugugugugu

SEQ ID NO: 664471 - RNA, 19 nt, Artificial Sequence
  Description of Artificial Sequence: Synthetic oligonucleotide
agaccugucgguucccuuu

SEQ ID NO: 664472 - RNA, 19 nt, Artificial Sequence
  Description of Artificial Sequence: Synthetic oligonucleotide
agauccgguggccaauaaa

SEQ ID NO: 664473 - RNA, 19 nt, Artificial Sequence
  Description of Artificial Sequence: Synthetic oligonucleotide
acaugcacccuucucucua

SEQ ID NO: 664474 - RNA, 19 nt, Artificial Sequence
  Description of Artificial Sequence: Synthetic oligonucleotide
agucuagcugaaauccuga

SEQ ID NO: 664475 - RNA, 19 nt, Artificial Sequence
  Description of Artificial Sequence: Synthetic oligonucleotide
gaauaacccacuggaaccu

SEQ ID NO: 664476 - RNA, 19 nt, Artificial Sequence
  Description of Artificial Sequence: Synthetic oligonucleotide
gccgugcauaucuggaagg

SEQ ID NO: 664477 - RNA, 19 nt, Artificial Sequence
  Description of Artificial Sequence: Synthetic oligonucleotide
gagucacuaugguaucuaa

SEQ ID NO: 664478 - RNA, 19 nt, Artificial Sequence
  Description of Artificial Sequence: Synthetic oligonucleotide
cuuaacggauaagguguug

SEQ ID NO: 664479 - RNA, 19 nt, Artificial Sequence
  Description of Artificial Sequence: Synthetic oligonucleotide
gaaccuguucagucuagcu

SEQ ID NO: 664480 - RNA, 19 nt, Artificial Sequence
  Description of Artificial Sequence: Synthetic oligonucleotide
ugacuucuauguagacaaa

SEQ ID NO: 664481 - RNA, 19 nt, Artificial Sequence
  Description of Artificial Sequence: Synthetic oligonucleotide
ggucacugccaauuaauaa

SEQ ID NO: 664482 - RNA, 19 nt, Artificial Sequence
  Description of Artificial Sequence: Synthetic oligonucleotide
gugugugugugugugaucu

SEQ ID NO: 664483 - RNA, 19 nt, Artificial Sequence
  Description of Artificial Sequence: Synthetic oligonucleotide
ugugugugugugugugauc

SEQ ID NO: 664484 - RNA, 19 nt, Artificial Sequence
  Description of Artificial Sequence: Synthetic oligonucleotide
uuagccuguagccgcucuu

SEQ ID NO: 664485 - RNA, 19 nt, Artificial Sequence
  Description of Artificial Sequence: Synthetic oligonucleotide
cugggcagugaucuuuguc

SEQ ID NO: 664486 - RNA, 19 nt, Artificial Sequence
  Description of Artificial Sequence: Synthetic oligonucleotide
ugguuccucucauuccgaa

SEQ ID NO: 664487 - RNA, 19 nt, Artificial Sequence
  Description of Artificial Sequence: Synthetic oligonucleotide
aagauccgguggccaauaa

SEQ ID NO: 664488 - RNA, 19 nt, Artificial Sequence
  Description of Artificial Sequence: Synthetic oligonucleotide
uacacucaugcguguguau

SEQ ID NO: 664489 - RNA, 19 nt, Artificial Sequence
  Description of Artificial Sequence: Synthetic oligonucleotide
ugcacuuauguggcugggu

SEQ ID NO: 664490 - RNA, 19 nt, Artificial Sequence
  Description of Artificial Sequence: Synthetic oligonucleotide
gaauugcggggcaguuagg

SEQ ID NO: 664491 - RNA, 19 nt, Artificial Sequence
  Description of Artificial Sequence: Synthetic oligonucleotide
acauaccggauuggguuug

SEQ ID NO: 664492 - RNA, 19 nt, Artificial Sequence
  Description of Artificial Sequence: Synthetic oligonucleotide
uaugcgugugggugcacuu

SEQ ID NO: 664493 - RNA, 19 nt, Artificial Sequence
  Description of Artificial Sequence: Synthetic oligonucleotide
cacugccaauuaauaaaca

SEQ ID NO: 664494 - RNA, 19 nt, Artificial Sequence
  Description of Artificial Sequence: Synthetic oligonucleotide
agagucacuaugguaucua

SEQ ID NO: 664495 - RNA, 19 nt, Artificial Sequence
  Description of Artificial Sequence: Synthetic oligonucleotide
cuaccucaaguuauaccaa

SEQ ID NO: 664496 - RNA, 19 nt, Artificial Sequence
  Description of Artificial Sequence: Synthetic oligonucleotide
ucgguucccuuuccagggu

SEQ ID NO: 664497 - RNA, 19 nt, Artificial Sequence
  Description of Artificial Sequence: Synthetic oligonucleotide
auaccggauuggguuugac

SEQ ID NO: 664498 - RNA, 19 nt, Artificial Sequence
  Description of Artificial Sequence: Synthetic oligonucleotide
gguaugggaccucuacaca

SEQ ID NO: 664499 - RNA, 19 nt, Artificial Sequence
  Description of Artificial Sequence: Synthetic oligonucleotide
ggagauauagugauacccu

SEQ ID NO: 664500 - RNA, 19 nt, Artificial Sequence
  Description of Artificial Sequence: Synthetic oligonucleotide
gugucuggcacauaaucuu

SEQ ID NO: 664501 - RNA, 19 nt, Artificial Sequence
  Description of Artificial Sequence: Synthetic oligonucleotide
cucacuggagggagaccug

SEQ ID NO: 664502 - RNA, 19 nt, Artificial Sequence
  Description of Artificial Sequence: Synthetic oligonucleotide
acuuccacguaagucccaa

SEQ ID NO: 664503 - RNA, 19 nt, Artificial Sequence
  Description of Artificial Sequence: Synthetic oligonucleotide
cuaucccaucuacgauucc

SEQ ID NO: 664504 - RNA, 19 nt, Artificial Sequence
  Description of Artificial Sequence: Synthetic oligonucleotide
uggcuuuacugggguaaug

SEQ ID NO: 664505 - RNA, 19 nt, Artificial Sequence
  Description of Artificial Sequence: Synthetic oligonucleotide
uguccggccuccucaugaa

SEQ ID NO: 664506 - RNA, 19 nt, Artificial Sequence
  Description of Artificial Sequence: Synthetic oligonucleotide
agugauacccuggccgaau

SEQ ID NO: 664507 - RNA, 19 nt, Artificial Sequence
  Description of Artificial Sequence: Synthetic oligonucleotide
gguaucuaauaaagccaug

SEQ ID NO: 664508 - RNA, 19 nt, Artificial Sequence
  Description of Artificial Sequence: Synthetic oligonucleotide
cagcuuguaagagucacua

SEQ ID NO: 664509 - RNA, 19 nt, Artificial Sequence
  Description of Artificial Sequence: Synthetic oligonucleotide
acguaagucccaaccuucu

SEQ ID NO: 664510 - RNA, 19 nt, Artificial Sequence
  Description of Artificial Sequence: Synthetic oligonucleotide
gcuucucaugaagauggcc

SEQ ID NO: 664511 - RNA, 19 nt, Artificial Sequence
  Description of Artificial Sequence: Synthetic oligonucleotide
caguuagggaaacaauggu

SEQ ID NO: 664512 - RNA, 19 nt, Artificial Sequence
  Description of Artificial Sequence: Synthetic oligonucleotide
gcguguguaugcguguggg

SEQ ID NO: 664513 - RNA, 19 nt, Artificial Sequence
  Description of Artificial Sequence: Synthetic oligonucleotide
caggcaagauccgguggcc

SEQ ID NO: 664514 - RNA, 19 nt, Artificial Sequence
  Description of Artificial Sequence: Synthetic oligonucleotide
cucauacauacccauguuu

SEQ ID NO: 664515 - RNA, 19 nt, Artificial Sequence
  Description of Artificial Sequence: Synthetic oligonucleotide
uacccauguuuaucugcau

SEQ ID NO: 664516 - RNA, 19 nt, Artificial Sequence
  Description of Artificial Sequence: Synthetic oligonucleotide
gacauaccggauuggguuu

SEQ ID NO: 664517 - RNA, 19 nt, Artificial Sequence
  Description of Artificial Sequence: Synthetic oligonucleotide
ggauuucaggcuaaggggu

SEQ ID NO: 664518 - RNA, 19 nt, Artificial Sequence
  Description of Artificial Sequence: Synthetic oligonucleotide
ccucaaguuauaccaauaa

SEQ ID NO: 664519 - RNA, 19 nt, Artificial Sequence
  Description of Artificial Sequence: Synthetic oligonucleotide
gguuugacaaagcuucgau

SEQ ID NO: 664520 - RNA, 19 nt, Artificial Sequence
  Description of Artificial Sequence: Synthetic oligonucleotide
gugcacuuauguggcuggg

SEQ ID NO: 664521 - RNA, 19 nt, Artificial Sequence
  Description of Artificial Sequence: Synthetic oligonucleotide
cagauugacauaccggauu

SEQ ID NO: 664522 - RNA, 19 nt, Artificial Sequence
  Description of Artificial Sequence: Synthetic oligonucleotide
ggaaccuguucagucuagc

SEQ ID NO: 664523 - RNA, 19 nt, Artificial Sequence
  Description of Artificial Sequence: Synthetic oligonucleotide
ugugugugugugugaucuu

SEQ ID NO: 664524 - RNA, 19 nt, Artificial Sequence
  Description of Artificial Sequence: Synthetic oligonucleotide
gaagggagauauagugaua

SEQ ID NO: 664525 - RNA, 19 nt, Artificial Sequence
  Description of Artificial Sequence: Synthetic oligonucleotide
agcucgaguuuuccucaaa

SEQ ID NO: 664526 - RNA, 19 nt, Artificial Sequence
  Description of Artificial Sequence: Synthetic oligonucleotide
caugagcucgaguuuuccu

SEQ ID NO: 664527 - RNA, 19 nt, Artificial Sequence
  Description of Artificial Sequence: Synthetic oligonucleotide
uagugauacccuggccgaa

SEQ ID NO: 664528 - RNA, 19 nt, Artificial Sequence
  Description of Artificial Sequence: Synthetic oligonucleotide
augcacccuucucucuaga

SEQ ID NO: 664529 - RNA, 19 nt, Artificial Sequence
  Description of Artificial Sequence: Synthetic oligonucleotide
ccgaagggagauauaguga

SEQ ID NO: 664530 - RNA, 19 nt, Artificial Sequence
  Description of Artificial Sequence: Synthetic oligonucleotide
ggggcaguuagggaaacaa

SEQ ID NO: 664531 - RNA, 19 nt, Artificial Sequence
  Description of Artificial Sequence: Synthetic oligonucleotide
aucccaucuacgauuccuu

SEQ ID NO: 664532 - RNA, 19 nt, Artificial Sequence
  Description of Artificial Sequence: Synthetic oligonucleotide
aggcaagauccgguggcca

SEQ ID NO: 664533 - RNA, 19 nt, Artificial Sequence
  Description of Artificial Sequence: Synthetic oligonucleotide
agccgcucuucccauugua

SEQ ID NO: 664534 - RNA, 19 nt, Artificial Sequence
  Description of Artificial Sequence: Synthetic oligonucleotide
guacacucaugcgugugua

SEQ ID NO: 664535 - RNA, 19 nt, Artificial Sequence
  Description of Artificial Sequence: Synthetic oligonucleotide
cuggccgaauagccugcac

SEQ ID NO: 664536 - RNA, 19 nt, Artificial Sequence
  Description of Artificial Sequence: Synthetic oligonucleotide
gggauguuccauaguguga

SEQ ID NO: 664537 - RNA, 19 nt, Artificial Sequence
  Description of Artificial Sequence: Synthetic oligonucleotide
gccgaauagccugcacagg

SEQ ID NO: 664538 - RNA, 19 nt, Artificial Sequence
  Description of Artificial Sequence: Synthetic oligonucleotide
gugauacccuggccgaaua

SEQ ID NO: 664539 - RNA, 19 nt, Artificial Sequence
  Description of Artificial Sequence: Synthetic oligonucleotide
gucuagcugaaauccugau

SEQ ID NO: 664540 - RNA, 19 nt, Artificial Sequence
  Description of Artificial Sequence: Synthetic oligonucleotide
cauauauauuugacccauu

SEQ ID NO: 664541 - RNA, 19 nt, Artificial Sequence
  Description of Artificial Sequence: Synthetic oligonucleotide
gaggaguaucaaacucucu

SEQ ID NO: 664542 - RNA, 19 nt, Artificial Sequence
  Description of Artificial Sequence: Synthetic oligonucleotide
guccggccuccucaugaac

SEQ ID NO: 664543 - RNA, 19 nt, Artificial Sequence
  Description of Artificial Sequence: Synthetic oligonucleotide
gugggauguuccauagugu

SEQ ID NO: 664544 - RNA, 19 nt, Artificial Sequence
  Description of Artificial Sequence: Synthetic oligonucleotide
cgugcauaucuggaaggcc

SEQ ID NO: 664545 - RNA, 19 nt, Artificial Sequence
  Description of Artificial Sequence: Synthetic oligonucleotide
gugugugugugugugugau

SEQ ID NO: 664546 - RNA, 19 nt, Artificial Sequence
  Description of Artificial Sequence: Synthetic oligonucleotide
gcagccgugcauaucugga

SEQ ID NO: 664547 - RNA, 19 nt, Artificial Sequence
  Description of Artificial Sequence: Synthetic oligonucleotide
guaugcgugugggugcacu

SEQ ID NO: 664548 - RNA, 19 nt, Artificial Sequence
  Description of Artificial Sequence: Synthetic oligonucleotide
augcgugugggugcacuua

SEQ ID NO: 664549 - RNA, 19 nt, Artificial Sequence
  Description of Artificial Sequence: Synthetic oligonucleotide
gggcuucaaacgaagacau

SEQ ID NO: 664550 - RNA, 19 nt, Artificial Sequence
  Description of Artificial Sequence: Synthetic oligonucleotide
cucaugcguguguaugcgu

SEQ ID NO: 664551 - RNA, 19 nt, Artificial Sequence
  Description of Artificial Sequence: Synthetic oligonucleotide
gccgcucuucccauuguac

SEQ ID NO: 664552 - RNA, 19 nt, Artificial Sequence
  Description of Artificial Sequence: Synthetic oligonucleotide
gugugugugugugaucuuu

SEQ ID NO: 664553 - RNA, 19 nt, Artificial Sequence
  Description of Artificial Sequence: Synthetic oligonucleotide
cccucaaacaggccagaga

SEQ ID NO: 664554 - RNA, 19 nt, Artificial Sequence
  Description of Artificial Sequence: Synthetic oligonucleotide
ggcgagaacugugauugcu

SEQ ID NO: 664555 - RNA, 19 nt, Artificial Sequence
  Description of Artificial Sequence: Synthetic oligonucleotide
cauaccggauuggguuuga

SEQ ID NO: 664556 - RNA, 19 nt, Artificial Sequence
  Description of Artificial Sequence: Synthetic oligonucleotide
gggcgagaacugugauugc

SEQ ID NO: 664557 - RNA, 19 nt, Artificial Sequence
  Description of Artificial Sequence: Synthetic oligonucleotide
cgaauagccugcacaggca

SEQ ID NO: 664558 - RNA, 19 nt, Artificial Sequence
  Description of Artificial Sequence: Synthetic oligonucleotide
caucuacgauuccuucagu

SEQ ID NO: 664559 - RNA, 19 nt, Artificial Sequence
  Description of Artificial Sequence: Synthetic oligonucleotide
gcuaaggggugcuucucau

SEQ ID NO: 664560 - RNA, 19 nt, Artificial Sequence
  Description of Artificial Sequence: Synthetic oligonucleotide
gcauaugugucuggcacau

SEQ ID NO: 664561 - RNA, 19 nt, Artificial Sequence
  Description of Artificial Sequence: Synthetic oligonucleotide
ccuugggauguuuugguuu

SEQ ID NO: 664562 - RNA, 19 nt, Artificial Sequence
  Description of Artificial Sequence: Synthetic oligonucleotide
gagaccugucgguucccuu

SEQ ID NO: 664563 - RNA, 19 nt, Artificial Sequence
  Description of Artificial Sequence: Synthetic oligonucleotide
cucucgauuugguguggau

SEQ ID NO: 664564 - RNA, 19 nt, Artificial Sequence
  Description of Artificial Sequence: Synthetic oligonucleotide
cucauuccgaagggagaua

SEQ ID NO: 664565 - RNA, 19 nt, Artificial Sequence
  Description of Artificial Sequence: Synthetic oligonucleotide
cgggguucucuccuucuac

SEQ ID NO: 664566 - RNA, 19 nt, Artificial Sequence
  Description of Artificial Sequence: Synthetic oligonucleotide
ggguaaugauacagucaaa

SEQ ID NO: 664567 - RNA, 19 nt, Artificial Sequence
  Description of Artificial Sequence: Synthetic oligonucleotide
cuccuucuacuuccucacu

SEQ ID NO: 664568 - RNA, 19 nt, Artificial Sequence
  Description of Artificial Sequence: Synthetic oligonucleotide
ccuguucagucuagcugaa

SEQ ID NO: 664569 - RNA, 19 nt, Artificial Sequence
  Description of Artificial Sequence: Synthetic oligonucleotide
ccagcuuguaagagucacu

SEQ ID NO: 664570 - RNA, 19 nt, Artificial Sequence
  Description of Artificial Sequence: Synthetic oligonucleotide
ggauaagguguuggccacu

SEQ ID NO: 664571 - RNA, 19 nt, Artificial Sequence
  Description of Artificial Sequence: Synthetic oligonucleotide
gggcaguuagggaaacaau

SEQ ID NO: 664572 - RNA, 19 nt, Artificial Sequence
  Description of Artificial Sequence: Synthetic oligonucleotide
ccacguaagucccaaccuu

SEQ ID NO: 664573 - RNA, 19 nt, Artificial Sequence
  Description of Artificial Sequence: Synthetic oligonucleotide
ggcagugaucuuugucauu

SEQ ID NO: 664574 - RNA, 19 nt, Artificial Sequence
  Description of Artificial Sequence: Synthetic oligonucleotide
ggaccucuacacagauucu

SEQ ID NO: 664575 - RNA, 19 nt, Artificial Sequence
  Description of Artificial Sequence: Synthetic oligonucleotide
cuuauguggcugggugcau

SEQ ID NO: 664576 - RNA, 19 nt, Artificial Sequence
  Description of Artificial Sequence: Synthetic oligonucleotide
ggagggagaccugucgguu

SEQ ID NO: 664577 - RNA, 19 nt, Artificial Sequence
  Description of Artificial Sequence: Synthetic oligonucleotide
ggagaccugucgguucccu

SEQ ID NO: 664578 - RNA, 19 nt, Artificial Sequence
  Description of Artificial Sequence: Synthetic oligonucleotide
gcaagauccgguggccaau

SEQ ID NO: 664579 - RNA, 19 nt, Artificial Sequence
  Description of Artificial Sequence: Synthetic oligonucleotide
ccgggguucucuccuucua

SEQ ID NO: 664580 - RNA, 19 nt, Artificial Sequence
  Description of Artificial Sequence: Synthetic oligonucleotide
aauacaaugauguacucag

SEQ ID NO: 664581 - RNA, 19 nt, Artificial Sequence
  Description of Artificial Sequence: Synthetic oligonucleotide
aauauuagccaacucugcc

SEQ ID NO: 664582 - RNA, 19 nt, Artificial Sequence
  Description of Artificial Sequence: Synthetic oligonucleotide
uuuaguuuugcuuaggaag

SEQ ID NO: 664583 - RNA, 19 nt, Artificial Sequence
  Description of Artificial Sequence: Synthetic oligonucleotide
ucaacaauaaauuugcgug

SEQ ID NO: 664584 - RNA, 19 nt, Artificial Sequence
  Description of Artificial Sequence: Synthetic oligonucleotide
uuaaggucaauauacaaag

SEQ ID NO: 664585 - RNA, 19 nt, Artificial Sequence
  Description of Artificial Sequence: Synthetic oligonucleotide
cuuguagugacauugaccc

SEQ ID NO: 664586 - RNA, 19 nt, Artificial Sequence
  Description of Artificial Sequence: Synthetic oligonucleotide
ucagaguuaauauugauac

SEQ ID NO: 664587 - RNA, 19 nt, Artificial Sequence
  Description of Artificial Sequence: Synthetic oligonucleotide
uaagucguugauuauaacg

SEQ ID NO: 664588 - RNA, 19 nt, Artificial Sequence
  Description of Artificial Sequence: Synthetic oligonucleotide
aauacugaucuuuaaguug

SEQ ID NO: 664589 - RNA, 19 nt, Artificial Sequence
  Description of Artificial Sequence: Synthetic oligonucleotide
aagucguugauuauaacgc

SEQ ID NO: 664590 - RNA, 19 nt, Artificial Sequence
  Description of Artificial Sequence: Synthetic oligonucleotide
auugcuaugacccagugga

SEQ ID NO: 664591 - RNA, 19 nt, Artificial Sequence
  Description of Artificial Sequence: Synthetic oligonucleotide
gauggauuaagacauucgg

SEQ ID NO: 664592 - RNA, 19 nt, Artificial Sequence
  Description of Artificial Sequence: Synthetic oligonucleotide
uuaauauugauacugggua

SEQ ID NO: 664593 - RNA, 19 nt, Artificial Sequence
  Description of Artificial Sequence: Synthetic oligonucleotide
ucauguucaaccaacaggu

SEQ ID NO: 664594 - RNA, 19 nt, Artificial Sequence
  Description of Artificial Sequence: Synthetic oligonucleotide
uuaaacauggccauucgug

SEQ ID NO: 664595 - RNA, 19 nt, Artificial Sequence
  Description of Artificial Sequence: Synthetic oligonucleotide
ucaauauuagccaacucug

SEQ ID NO: 664596 - RNA, 19 nt, Artificial Sequence
  Description of Artificial Sequence: Synthetic oligonucleotide
aaauuugcguguuuucuuc

SEQ ID NO: 664597 - RNA, 19 nt, Artificial Sequence
  Description of Artificial Sequence: Synthetic oligonucleotide
gauaagaugaggcucguug

SEQ ID NO: 664598 - RNA, 19 nt, Artificial Sequence
  Description of Artificial Sequence: Synthetic oligonucleotide
uuaguuuugcuuaggaagc

SEQ ID NO: 664599 - RNA, 19 nt, Artificial Sequence
  Description of Artificial Sequence: Synthetic oligonucleotide
agagaauacaaugauguac

SEQ ID NO: 664600 - RNA, 19 nt, Artificial Sequence
  Description of Artificial Sequence: Synthetic oligonucleotide
ugguaaaucacccaacucu

SEQ ID NO: 664601 - RNA, 19 nt, Artificial Sequence
  Description of Artificial Sequence: Synthetic oligonucleotide
uuuaaggucaauauacaaa

SEQ ID NO: 664602 - RNA, 19 nt, Artificial Sequence
  Description of Artificial Sequence: Synthetic oligonucleotide
guugaguuaauucucaaac

SEQ ID NO: 664603 - RNA, 19 nt, Artificial Sequence
  Description of Artificial Sequence: Synthetic oligonucleotide
uauacaaagucaccuuagg

SEQ ID NO: 664604 - RNA, 19 nt, Artificial Sequence
  Description of Artificial Sequence: Synthetic oligonucleotide
cuaucuguaacuaucuuug

SEQ ID NO: 664605 - RNA, 19 nt, Artificial Sequence
  Description of Artificial Sequence: Synthetic oligonucleotide
uauucaaacacucucucuc

SEQ ID NO: 664606 - RNA, 19 nt, Artificial Sequence
  Description of Artificial Sequence: Synthetic oligonucleotide
uuaguaacagugucuaaag

SEQ ID NO: 664607 - RNA, 19 nt, Artificial Sequence
  Description of Artificial Sequence: Synthetic oligonucleotide
auacugaucuuuaaguugc

SEQ ID NO: 664608 - RNA, 19 nt, Artificial Sequence
  Description of Artificial Sequence: Synthetic oligonucleotide
cuaucuuugacguuguaac

SEQ ID NO: 664609 - RNA, 19 nt, Artificial Sequence
  Description of Artificial Sequence: Synthetic oligonucleotide
uaaguugcuguuuaagcag

SEQ ID NO: 664610 - RNA, 19 nt, Artificial Sequence
  Description of Artificial Sequence: Synthetic oligonucleotide
cuuaggaagcuagagaugg

SEQ ID NO: 664611 - RNA, 19 nt, Artificial Sequence
  Description of Artificial Sequence: Synthetic oligonucleotide
ugagucauacauacugugg

SEQ ID NO: 664612 - RNA, 19 nt, Artificial Sequence
  Description of Artificial Sequence: Synthetic oligonucleotide
uaaaugucgcucuucaagc

SEQ ID NO: 664613 - RNA, 19 nt, Artificial Sequence
  Description of Artificial Sequence: Synthetic oligonucleotide
uguucaaccaacagguggc

SEQ ID NO: 664614 - RNA, 19 nt, Artificial Sequence
  Description of Artificial Sequence: Synthetic oligonucleotide
aguuaauauugauacuggg

SEQ ID NO: 664615 - RNA, 19 nt, Artificial Sequence
  Description of Artificial Sequence: Synthetic oligonucleotide
agggaauuacugaagaugc

SEQ ID NO: 664616 - RNA, 19 nt, Artificial Sequence
  Description of Artificial Sequence: Synthetic oligonucleotide
cucucucucaauauuagcc

SEQ ID NO: 664617 - RNA, 19 nt, Artificial Sequence
  Description of Artificial Sequence: Synthetic oligonucleotide
gaaaucucagcucucgaag

SEQ ID NO: 664618 - RNA, 19 nt, Artificial Sequence
  Description of Artificial Sequence: Synthetic oligonucleotide
uguuauucaaacacucucu

SEQ ID NO: 664619 - RNA, 19 nt, Artificial Sequence
  Description of Artificial Sequence: Synthetic oligonucleotide
ugauggauuaagacauucg

SEQ ID NO: 664620 - RNA, 19 nt, Artificial Sequence
  Description of Artificial Sequence: Synthetic oligonucleotide
ugcuaugugacucacuaac

SEQ ID NO: 664621 - RNA, 19 nt, Artificial Sequence
  Description of Artificial Sequence: Synthetic oligonucleotide
ucuuguagugacauugacc

SEQ ID NO: 664622 - RNA, 19 nt, Artificial Sequence
  Description of Artificial Sequence: Synthetic oligonucleotide
auaagaugaggcucguugg

SEQ ID NO: 664623 - RNA, 19 nt, Artificial Sequence
  Description of Artificial Sequence: Synthetic oligonucleotide
agaauuuggagauucggcu

SEQ ID NO: 664624 - RNA, 19 nt, Artificial Sequence
  Description of Artificial Sequence: Synthetic oligonucleotide
uuuucagagagccaucuaa

SEQ ID NO: 664625 - RNA, 19 nt, Artificial Sequence
  Description of Artificial Sequence: Synthetic oligonucleotide
uggauuaagacauucggau

SEQ ID NO: 664626 - RNA, 19 nt, Artificial Sequence
  Description of Artificial Sequence: Synthetic oligonucleotide
uucucgagcucucauaagc

SEQ ID NO: 664627 - RNA, 19 nt, Artificial Sequence
  Description of Artificial Sequence: Synthetic oligonucleotide
uuugguaaaucacccaacu

SEQ ID NO: 664628 - RNA, 19 nt, Artificial Sequence
  Description of Artificial Sequence: Synthetic oligonucleotide
auauugucgcuucuuacuc

SEQ ID NO: 664629 - RNA, 19 nt, Artificial Sequence
  Description of Artificial Sequence: Synthetic oligonucleotide
aucaacaauaaauuugcgu

SEQ ID NO: 664630 - RNA, 19 nt, Artificial Sequence
  Description of Artificial Sequence: Synthetic oligonucleotide
aacagugucuaaagaauac

SEQ ID NO: 664631 - RNA, 19 nt, Artificial Sequence
  Description of Artificial Sequence: Synthetic oligonucleotide
uggaagaugaagagaauac

SEQ ID NO: 664632 - RNA, 19 nt, Artificial Sequence
  Description of Artificial Sequence: Synthetic oligonucleotide
ugaguuaauucucaaacuu

SEQ ID NO: 664633 - RNA, 19 nt, Artificial Sequence
  Description of Artificial Sequence: Synthetic oligonucleotide
gaugcuauuugccaacaug

SEQ ID NO: 664634 - RNA, 19 nt, Artificial Sequence
  Description of Artificial Sequence: Synthetic oligonucleotide
guaacuaucuuugacguug

SEQ ID NO: 664635 - RNA, 19 nt, Artificial Sequence
  Description of Artificial Sequence: Synthetic oligonucleotide
ucaccuuagggaauuacug

SEQ ID NO: 664636 - RNA, 19 nt, Artificial Sequence
  Description of Artificial Sequence: Synthetic oligonucleotide
auuaggauaagaugaggcu

SEQ ID NO: 664637 - RNA, 19 nt, Artificial Sequence
  Description of Artificial Sequence: Synthetic oligonucleotide
uuuaguaacagugucuaaa

SEQ ID NO: 664638 - RNA, 19 nt, Artificial Sequence
  Description of Artificial Sequence: Synthetic oligonucleotide
ugcuuaggaagcuagagau

SEQ ID NO: 664639 - RNA, 19 nt, Artificial Sequence
  Description of Artificial Sequence: Synthetic oligonucleotide
ucuuggguagucucgcucg

SEQ ID NO: 664640 - RNA, 19 nt, Artificial Sequence
  Description of Artificial Sequence: Synthetic oligonucleotide
uggguauuaggauaagaug

SEQ ID NO: 664641 - RNA, 19 nt, Artificial Sequence
  Description of Artificial Sequence: Synthetic oligonucleotide
ucguugauuauaacgcugc

SEQ ID NO: 664642 - RNA, 19 nt, Artificial Sequence
  Description of Artificial Sequence: Synthetic oligonucleotide
uguugcuuguuauucaaac

SEQ ID NO: 664643 - RNA, 19 nt, Artificial Sequence
  Description of Artificial Sequence: Synthetic oligonucleotide
cugagucucauguucaacc

SEQ ID NO: 664644 - RNA, 19 nt, Artificial Sequence
  Description of Artificial Sequence: Synthetic oligonucleotide
gauucguuuagcuucaucu

SEQ ID NO: 664645 - RNA, 19 nt, Artificial Sequence
  Description of Artificial Sequence: Synthetic oligonucleotide
auuauaacgcugcauuugu

SEQ ID NO: 664646 - RNA, 19 nt, Artificial Sequence
  Description of Artificial Sequence: Synthetic oligonucleotide
uguucuagucguucaauug

SEQ ID NO: 664647 - RNA, 19 nt, Artificial Sequence
  Description of Artificial Sequence: Synthetic oligonucleotide
uauugcuaugacccagugg

SEQ ID NO: 664648 - RNA, 19 nt, Artificial Sequence
  Description of Artificial Sequence: Synthetic oligonucleotide
ucucguggcguuuaaguag

SEQ ID NO: 664649 - RNA, 19 nt, Artificial Sequence
  Description of Artificial Sequence: Synthetic oligonucleotide
acuucguugaaucuugggu

SEQ ID NO: 664650 - RNA, 19 nt, Artificial Sequence
  Description of Artificial Sequence: Synthetic oligonucleotide
augcuauuugccaacaugg

SEQ ID NO: 664651 - RNA, 19 nt, Artificial Sequence
  Description of Artificial Sequence: Synthetic oligonucleotide
aaaucucagcucucgaagu

SEQ ID NO: 664652 - RNA, 19 nt, Artificial Sequence
  Description of Artificial Sequence: Synthetic oligonucleotide
aucuuugacguuguaacac

SEQ ID NO: 664653 - RNA, 19 nt, Artificial Sequence
  Description of Artificial Sequence: Synthetic oligonucleotide
auucguuuagcuucaucuc

SEQ ID NO: 664654 - RNA, 19 nt, Artificial Sequence
  Description of Artificial Sequence: Synthetic oligonucleotide
ucagagagccaucuaauuc

SEQ ID NO: 664655 - RNA, 19 nt, Artificial Sequence
  Description of Artificial Sequence: Synthetic oligonucleotide
uauaacgcugcauuuguuc

SEQ ID NO: 664656 - RNA, 19 nt, Artificial Sequence
  Description of Artificial Sequence: Synthetic oligonucleotide
ugucgcuucuuacucauca

SEQ ID NO: 664657 - RNA, 19 nt, Artificial Sequence
  Description of Artificial Sequence: Synthetic oligonucleotide
uuugauucguuuagcuuca

SEQ ID NO: 664658 - RNA, 19 nt, Artificial Sequence
  Description of Artificial Sequence: Synthetic oligonucleotide
uucguugaaucuuggguag

SEQ ID NO: 664659 - RNA, 19 nt, Artificial Sequence
  Description of Artificial Sequence: Synthetic oligonucleotide
uugaguuaauucucaaacu

SEQ ID NO: 664660 - RNA, 19 nt, Artificial Sequence
  Description of Artificial Sequence: Synthetic oligonucleotide
aaugcuugcuauugcuaug

SEQ ID NO: 664661 - RNA, 19 nt, Artificial Sequence
  Description of Artificial Sequence: Synthetic oligonucleotide
gaugaggcucguuggacgg

SEQ ID NO: 664662 - RNA, 19 nt, Artificial Sequence
  Description of Artificial Sequence: Synthetic oligonucleotide
auauuagccaacucugccu

SEQ ID NO: 664663 - RNA, 19 nt, Artificial Sequence
  Description of Artificial Sequence: Synthetic oligonucleotide
gauacuggguauuaggaua

SEQ ID NO: 664664 - RNA, 19 nt, Artificial Sequence
  Description of Artificial Sequence: Synthetic oligonucleotide
uuaggauaagaugaggcuc

SEQ ID NO: 664665 - RNA, 19 nt, Artificial Sequence
  Description of Artificial Sequence: Synthetic oligonucleotide
auugcaacuggagaucccg

SEQ ID NO: 664666 - RNA, 19 nt, Artificial Sequence
  Description of Artificial Sequence: Synthetic oligonucleotide
agagccaucuaauucuugu

SEQ ID NO: 664667 - RNA, 19 nt, Artificial Sequence
  Description of Artificial Sequence: Synthetic oligonucleotide
ugugagucauacauacugu

SEQ ID NO: 664668 - RNA, 19 nt, Artificial Sequence
  Description of Artificial Sequence: Synthetic oligonucleotide
ucacuaucuguaacuaucu

SEQ ID NO: 664669 - RNA, 19 nt, Artificial Sequence
  Description of Artificial Sequence: Synthetic oligonucleotide
caaggugggaauaggguag

SEQ ID NO: 664670 - RNA, 19 nt, Artificial Sequence
  Description of Artificial Sequence: Synthetic oligonucleotide
uuucuuguaaaugucgcuc

SEQ ID NO: 664671 - RNA, 19 nt, Artificial Sequence
  Description of Artificial Sequence: Synthetic oligonucleotide
cuguuuaagcagcuggugc

SEQ ID NO: 664672 - RNA, 19 nt, Artificial Sequence
  Description of Artificial Sequence: Synthetic oligonucleotide
auaacgcugcauuuguucu

SEQ ID NO: 664673 - RNA, 19 nt, Artificial Sequence
  Description of Artificial Sequence: Synthetic oligonucleotide
aagaugaaacaggcgauug

SEQ ID NO: 664674 - RNA, 19 nt, Artificial Sequence
  Description of Artificial Sequence: Synthetic oligonucleotide
uaauauugauacuggguau

SEQ ID NO: 664675 - RNA, 19 nt, Artificial Sequence
  Description of Artificial Sequence: Synthetic oligonucleotide
caguuugccauugagcugc

SEQ ID NO: 664676 - RNA, 19 nt, Artificial Sequence
  Description of Artificial Sequence: Synthetic oligonucleotide
uugacguuguaacacucac

SEQ ID NO: 664677 - RNA, 19 nt, Artificial Sequence
  Description of Artificial Sequence: Synthetic oligonucleotide
ucguuuagcuucaucucgc

SEQ ID NO: 664678 - RNA, 19 nt, Artificial Sequence
  Description of Artificial Sequence: Synthetic oligonucleotide
aaacaggcgauugucuuug

SEQ ID NO: 664679 - RNA, 19 nt, Artificial Sequence
  Description of Artificial Sequence: Synthetic oligonucleotide
gaauuuggagauucggcuc

SEQ ID NO: 664680 - RNA, 19 nt, Artificial Sequence
  Description of Artificial Sequence: Synthetic oligonucleotide
ugucuuuaguuuugcuuag

SEQ ID NO: 664681 - RNA, 19 nt, Artificial Sequence
  Description of Artificial Sequence: Synthetic oligonucleotide
uugcguguuuucuucaaug

SEQ ID NO: 664682 - RNA, 19 nt, Artificial Sequence
  Description of Artificial Sequence: Synthetic oligonucleotide
uaagaugaggcucguugga

SEQ ID NO: 664683 - RNA, 19 nt, Artificial Sequence
  Description of Artificial Sequence: Synthetic oligonucleotide
ucaucucgcaagcgguucg

SEQ ID NO: 664684 - RNA, 19 nt, Artificial Sequence
  Description of Artificial Sequence: Synthetic oligonucleotide
aauauugauacuggguauu

SEQ ID NO: 664685 - RNA, 19 nt, Artificial Sequence
  Description of Artificial Sequence: Synthetic oligonucleotide
agccaucuaauucuuguug

SEQ ID NO: 664686 - RNA, 19 nt, Artificial Sequence
  Description of Artificial Sequence: Synthetic oligonucleotide
cuucacauugcaacuggag

SEQ ID NO: 664687 - RNA, 19 nt, Artificial Sequence
  Description of Artificial Sequence: Synthetic oligonucleotide
auaagucguugauuauaac

SEQ ID NO: 664688 - RNA, 19 nt, Artificial Sequence
  Description of Artificial Sequence: Synthetic oligonucleotide
ugucuuaguuuguuugccc

SEQ ID NO: 664689 - RNA, 19 nt, Artificial Sequence
  Description of Artificial Sequence: Synthetic oligonucleotide
uaucuuugacguuguaaca

SEQ ID NO: 664690 - RNA, 19 nt, Artificial Sequence
  Description of Artificial Sequence: Synthetic oligonucleotide
ugcuauuugccaacauggc

SEQ ID NO: 664691 - RNA, 19 nt, Artificial Sequence
  Description of Artificial Sequence: Synthetic oligonucleotide
gaugaaacaggcgauuguc

SEQ ID NO: 664692 - RNA, 19 nt, Artificial Sequence
  Description of Artificial Sequence: Synthetic oligonucleotide
ucauauugucgcuucuuac

SEQ ID NO: 664693 - RNA, 19 nt, Artificial Sequence
  Description of Artificial Sequence: Synthetic oligonucleotide
acuucuacaccaucaacaa

SEQ ID NO: 664694 - RNA, 19 nt, Artificial Sequence
  Description of Artificial Sequence: Synthetic oligonucleotide
uguugaguuaauucucaaa

SEQ ID NO: 664695 - RNA, 19 nt, Artificial Sequence
  Description of Artificial Sequence: Synthetic oligonucleotide
uggagucuguuccucagca

SEQ ID NO: 664696 - RNA, 19 nt, Artificial Sequence
  Description of Artificial Sequence: Synthetic oligonucleotide
agucucauguucaaccaac

SEQ ID NO: 664697 - RNA, 19 nt, Artificial Sequence
  Description of Artificial Sequence: Synthetic oligonucleotide
ucucaagauucucaauuuc

SEQ ID NO: 664698 - RNA, 19 nt, Artificial Sequence
  Description of Artificial Sequence: Synthetic oligonucleotide
ucggacauuggcuucacau

SEQ ID NO: 664699 - RNA, 19 nt, Artificial Sequence
  Description of Artificial Sequence: Synthetic oligonucleotide
uuucagagagccaucuaau

SEQ ID NO: 664700 - RNA, 19 nt, Artificial Sequence
  Description of Artificial Sequence: Synthetic oligonucleotide
agauucucaauuuccuggu

SEQ ID NO: 664701 - RNA, 19 nt, Artificial Sequence
  Description of Artificial Sequence: Synthetic oligonucleotide
uucaagcucccaaaucgca

SEQ ID NO: 664702 - RNA, 19 nt, Artificial Sequence
  Description of Artificial Sequence: Synthetic oligonucleotide
cucaauauuagccaacucu

SEQ ID NO: 664703 - RNA, 19 nt, Artificial Sequence
  Description of Artificial Sequence: Synthetic oligonucleotide
aacauggccuagcaucugu

SEQ ID NO: 664704 - RNA, 19 nt, Artificial Sequence
  Description of Artificial Sequence: Synthetic oligonucleotide
ucuacaccaucaacaauaa

SEQ ID NO: 664705 - RNA, 19 nt, Artificial Sequence
  Description of Artificial Sequence: Synthetic oligonucleotide
uuuugcuuaggaagcuaga

SEQ ID NO: 664706 - RNA, 19 nt, Artificial Sequence
  Description of Artificial Sequence: Synthetic oligonucleotide
guauuaggauaagaugagg

SEQ ID NO: 664707 - RNA, 19 nt, Artificial Sequence
  Description of Artificial Sequence: Synthetic oligonucleotide
cuucaagcucccaaaucgc

SEQ ID NO: 664708 - RNA, 19 nt, Artificial Sequence
  Description of Artificial Sequence: Synthetic oligonucleotide
ucgagcucucauaagcugu

SEQ ID NO: 664709 - RNA, 19 nt, Artificial Sequence
  Description of Artificial Sequence: Synthetic oligonucleotide
aggucaauauacaaaguca

SEQ ID NO: 664710 - RNA, 19 nt, Artificial Sequence
  Description of Artificial Sequence: Synthetic oligonucleotide
ugcguguuuucuucaaugu

SEQ ID NO: 664711 - RNA, 19 nt, Artificial Sequence
  Description of Artificial Sequence: Synthetic oligonucleotide
gugagucauacauacugug

SEQ ID NO: 664712 - RNA, 19 nt, Artificial Sequence
  Description of Artificial Sequence: Synthetic oligonucleotide
ggguauuaggauaagauga

SEQ ID NO: 664713 - RNA, 19 nt, Artificial Sequence
  Description of Artificial Sequence: Synthetic oligonucleotide
uccucaauaagucguugau

SEQ ID NO: 664714 - RNA, 19 nt, Artificial Sequence
  Description of Artificial Sequence: Synthetic oligonucleotide
uucuagucguucaauuguc

SEQ ID NO: 664715 - RNA, 19 nt, Artificial Sequence
  Description of Artificial Sequence: Synthetic oligonucleotide
ucuagucguucaauugucu

SEQ ID NO: 664716 - RNA, 19 nt, Artificial Sequence
  Description of Artificial Sequence: Synthetic oligonucleotide
cuuacucaucaucuccugc

SEQ ID NO: 664717 - RNA, 19 nt, Artificial Sequence
  Description of Artificial Sequence: Synthetic oligonucleotide
ucucucaauauuagccaac

SEQ ID NO: 664718 - RNA, 19 nt, Artificial Sequence
  Description of Artificial Sequence: Synthetic oligonucleotide
uuugaugcugagccauucu

SEQ ID NO: 664719 - RNA, 19 nt, Artificial Sequence
  Description of Artificial Sequence: Synthetic oligonucleotide
ucucgagcucucauaagcu

SEQ ID NO: 664720 - RNA, 19 nt, Artificial Sequence
  Description of Artificial Sequence: Synthetic oligonucleotide
agaaaucucagcucucgaa

SEQ ID NO: 664721 - RNA, 19 nt, Artificial Sequence
  Description of Artificial Sequence: Synthetic oligonucleotide
caaaucgcagcuucucgag

SEQ ID NO: 664722 - RNA, 19 nt, Artificial Sequence
  Description of Artificial Sequence: Synthetic oligonucleotide
cuauuugccaacauggccu

SEQ ID NO: 664723 - RNA, 19 nt, Artificial Sequence
  Description of Artificial Sequence: Synthetic oligonucleotide
uauugauacuggguauuag

SEQ ID NO: 664724 - RNA, 19 nt, Artificial Sequence
  Description of Artificial Sequence: Synthetic oligonucleotide
ucgggcucugcuuucacug

SEQ ID NO: 664725 - RNA, 19 nt, Artificial Sequence
  Description of Artificial Sequence: Synthetic oligonucleotide
ucucuuguagugacauuga

SEQ ID NO: 664726 - RNA, 19 nt, Artificial Sequence
  Description of Artificial Sequence: Synthetic oligonucleotide
cucguggcguuuaaguagc

SEQ ID NO: 664727 - RNA, 19 nt, Artificial Sequence
  Description of Artificial Sequence: Synthetic oligonucleotide
guuuugcuuaggaagcuag

SEQ ID NO: 664728 - RNA, 19 nt, Artificial Sequence
  Description of Artificial Sequence: Synthetic oligonucleotide
uuccucaauaagucguuga

SEQ ID NO: 664729 - RNA, 19 nt, Artificial Sequence
  Description of Artificial Sequence: Synthetic oligonucleotide
agaaaccgcaauuccucag

SEQ ID NO: 664730 - RNA, 19 nt, Artificial Sequence
  Description of Artificial Sequence: Synthetic oligonucleotide
uugguaaaucacccaacuc

SEQ ID NO: 664731 - RNA, 19 nt, Artificial Sequence
  Description of Artificial Sequence: Synthetic oligonucleotide
uauugucgcuucuuacuca

SEQ ID NO: 664732 - RNA, 19 nt, Artificial Sequence
  Description of Artificial Sequence: Synthetic oligonucleotide
cacuccuuuaacucuuggc

SEQ ID NO: 664733 - RNA, 19 nt, Artificial Sequence
  Description of Artificial Sequence: Synthetic oligonucleotide
ugaaacaggcgauugucuu

SEQ ID NO: 664734 - RNA, 19 nt, Artificial Sequence
  Description of Artificial Sequence: Synthetic oligonucleotide
agucguugauuauaacgcu

SEQ ID NO: 664735 - RNA, 19 nt, Artificial Sequence
  Description of Artificial Sequence: Synthetic oligonucleotide
gucacuaucuguaacuauc

SEQ ID NO: 664736 - RNA, 19 nt, Artificial Sequence
  Description of Artificial Sequence: Synthetic oligonucleotide
ucuccacuccuuuaacucu

SEQ ID NO: 664737 - RNA, 19 nt, Artificial Sequence
  Description of Artificial Sequence: Synthetic oligonucleotide
gaaugcaaggugggaauag

SEQ ID NO: 664738 - RNA, 19 nt, Artificial Sequence
  Description of Artificial Sequence: Synthetic oligonucleotide
accuuagggaauuacugaa

SEQ ID NO: 664739 - RNA, 19 nt, Artificial Sequence
  Description of Artificial Sequence: Synthetic oligonucleotide
gaaucuuggguagucucgc

SEQ ID NO: 664740 - RNA, 19 nt, Artificial Sequence
  Description of Artificial Sequence: Synthetic oligonucleotide
uuugugagucauacauacu

SEQ ID NO: 664741 - RNA, 19 nt, Artificial Sequence
  Description of Artificial Sequence: Synthetic oligonucleotide
guucguauguucuuguucu

SEQ ID NO: 664742 - RNA, 19 nt, Artificial Sequence
  Description of Artificial Sequence: Synthetic oligonucleotide
agaugaaacaggcgauugu

SEQ ID NO: 664743 - RNA, 19 nt, Artificial Sequence
  Description of Artificial Sequence: Synthetic oligonucleotide
gcuauuugccaacauggcc

SEQ ID NO: 664744 - RNA, 19 nt, Artificial Sequence
  Description of Artificial Sequence: Synthetic oligonucleotide
ugcuucugaacaaauucuu

SEQ ID NO: 664745 - RNA, 19 nt, Artificial Sequence
  Description of Artificial Sequence: Synthetic oligonucleotide
aagcuagagauggacaaau

SEQ ID NO: 664746 - RNA, 19 nt, Artificial Sequence
  Description of Artificial Sequence: Synthetic oligonucleotide
ucguauguucuuguucuag

SEQ ID NO: 664747 - RNA, 19 nt, Artificial Sequence
  Description of Artificial Sequence: Synthetic oligonucleotide
agcgccugaaaaucugcuc

SEQ ID NO: 664748 - RNA, 19 nt, Artificial Sequence
  Description of Artificial Sequence: Synthetic oligonucleotide
gguauuaggauaagaugag

SEQ ID NO: 664749 - RNA, 19 nt, Artificial Sequence
  Description of Artificial Sequence: Synthetic oligonucleotide
ucacuucguugaaucuugg

SEQ ID NO: 664750 - RNA, 19 nt, Artificial Sequence
  Description of Artificial Sequence: Synthetic oligonucleotide
uggagucacuaucuguaac

SEQ ID NO: 664751 - RNA, 19 nt, Artificial Sequence
  Description of Artificial Sequence: Synthetic oligonucleotide
aaaucacccaacucuccuu

SEQ ID NO: 664752 - RNA, 19 nt, Artificial Sequence
  Description of Artificial Sequence: Synthetic oligonucleotide
ugggaauaggguagaauuu

SEQ ID NO: 664753 - RNA, 19 nt, Artificial Sequence
  Description of Artificial Sequence: Synthetic oligonucleotide
gacguuguaacacucacuu

SEQ ID NO: 664754 - RNA, 19 nt, Artificial Sequence
  Description of Artificial Sequence: Synthetic oligonucleotide
ggucaauauacaaagucac

SEQ ID NO: 664755 - RNA, 19 nt, Artificial Sequence
  Description of Artificial Sequence: Synthetic oligonucleotide
uaggaagcuagagauggac

SEQ ID NO: 664756 - RNA, 19 nt, Artificial Sequence
  Description of Artificial Sequence: Synthetic oligonucleotide
uuaguuuguuugcccuuca

SEQ ID NO: 664757 - RNA, 19 nt, Artificial Sequence
  Description of Artificial Sequence: Synthetic oligonucleotide
aaguuccugacgucugaga

SEQ ID NO: 664758 - RNA, 19 nt, Artificial Sequence
  Description of Artificial Sequence: Synthetic oligonucleotide
cuucguugaaucuugggua

SEQ ID NO: 664759 - RNA, 19 nt, Artificial Sequence
  Description of Artificial Sequence: Synthetic oligonucleotide
ugacguuguaacacucacu

SEQ ID NO: 664760 - RNA, 19 nt, Artificial Sequence
  Description of Artificial Sequence: Synthetic oligonucleotide
uggaaugcaaggugggaau

SEQ ID NO: 664761 - RNA, 19 nt, Artificial Sequence
  Description of Artificial Sequence: Synthetic oligonucleotide
ugugacucacuaacuugcu

SEQ ID NO: 664762 - RNA, 19 nt, Artificial Sequence
  Description of Artificial Sequence: Synthetic oligonucleotide
aaagucaccuuagggaauu

SEQ ID NO: 664763 - RNA, 19 nt, Artificial Sequence
  Description of Artificial Sequence: Synthetic oligonucleotide
cugacgucugagaaaccgc

SEQ ID NO: 664764 - RNA, 19 nt, Artificial Sequence
  Description of Artificial Sequence: Synthetic oligonucleotide
aguagcugaugucucugca

SEQ ID NO: 664765 - RNA, 19 nt, Artificial Sequence
  Description of Artificial Sequence: Synthetic oligonucleotide
uggacaaauucaagucacu

SEQ ID NO: 664766 - RNA, 19 nt, Artificial Sequence
  Description of Artificial Sequence: Synthetic oligonucleotide
ucaauaagucguugauuau

SEQ ID NO: 664767 - RNA, 19 nt, Artificial Sequence
  Description of Artificial Sequence: Synthetic oligonucleotide
aacgcugcauuuguucugu

SEQ ID NO: 664768 - RNA, 19 nt, Artificial Sequence
  Description of Artificial Sequence: Synthetic oligonucleotide
uuaggaagcuagagaugga

SEQ ID NO: 664769 - RNA, 19 nt, Artificial Sequence
  Description of Artificial Sequence: Synthetic oligonucleotide
cucgcaagcgguucguaug

SEQ ID NO: 664770 - RNA, 19 nt, Artificial Sequence
  Description of Artificial Sequence: Synthetic oligonucleotide
caguggaaugcaagguggg

SEQ ID NO: 664771 - RNA, 19 nt, Artificial Sequence
  Description of Artificial Sequence: Synthetic oligonucleotide
cacuucguugaaucuuggg

SEQ ID NO: 664772 - RNA, 19 nt, Artificial Sequence
  Description of Artificial Sequence: Synthetic oligonucleotide
cuuugacguuguaacacuc

SEQ ID NO: 664773 - RNA, 19 nt, Artificial Sequence
  Description of Artificial Sequence: Synthetic oligonucleotide
acagugucuaaagaauaca

SEQ ID NO: 664774 - RNA, 19 nt, Artificial Sequence
  Description of Artificial Sequence: Synthetic oligonucleotide
auggauuaagacauucgga

SEQ ID NO: 664775 - RNA, 19 nt, Artificial Sequence
  Description of Artificial Sequence: Synthetic oligonucleotide
ggagaaaucucagcucucg

SEQ ID NO: 664776 - RNA, 19 nt, Artificial Sequence
  Description of Artificial Sequence: Synthetic oligonucleotide
aagcucccaaaucgcagcu

SEQ ID NO: 664777 - RNA, 19 nt, Artificial Sequence
  Description of Artificial Sequence: Synthetic oligonucleotide
uguacucagaagccacauc

SEQ ID NO: 664778 - RNA, 19 nt, Artificial Sequence
  Description of Artificial Sequence: Synthetic oligonucleotide
uuguucuagucguucaauu

SEQ ID NO: 664779 - RNA, 19 nt, Artificial Sequence
  Description of Artificial Sequence: Synthetic oligonucleotide
acguuguaacacucacuuc

SEQ ID NO: 664780 - RNA, 19 nt, Artificial Sequence
  Description of Artificial Sequence: Synthetic oligonucleotide
uucucguggcguuuaagua

SEQ ID NO: 664781 - RNA, 19 nt, Artificial Sequence
  Description of Artificial Sequence: Synthetic oligonucleotide
cugucuuaguuuguuugcc

SEQ ID NO: 664782 - RNA, 19 nt, Artificial Sequence
  Description of Artificial Sequence: Synthetic oligonucleotide
uucagagagccaucuaauu

SEQ ID NO: 664783 - RNA, 19 nt, Artificial Sequence
  Description of Artificial Sequence: Synthetic oligonucleotide
ucgcaagcgguucguaugu

SEQ ID NO: 664784 - RNA, 19 nt, Artificial Sequence
  Description of Artificial Sequence: Synthetic oligonucleotide
cuaugacccaguggaaugc

SEQ ID NO: 664785 - RNA, 19 nt, Artificial Sequence
  Description of Artificial Sequence: Synthetic oligonucleotide
ucuggaauuuggacagcuc

SEQ ID NO: 664786 - RNA, 19 nt, Artificial Sequence
  Description of Artificial Sequence: Synthetic oligonucleotide
caggcgauugucuuuguga

SEQ ID NO: 664787 - RNA, 19 nt, Artificial Sequence
  Description of Artificial Sequence: Synthetic oligonucleotide
aaaccgcaauuccucaguu

SEQ ID NO: 664788 - RNA, 19 nt, Artificial Sequence
  Description of Artificial Sequence: Synthetic oligonucleotide
guucuagucguucaauugu

SEQ ID NO: 664789 - RNA, 19 nt, Artificial Sequence
  Description of Artificial Sequence: Synthetic oligonucleotide
cauauugucgcuucuuacu

SEQ ID NO: 664790 - RNA, 19 nt, Artificial Sequence
  Description of Artificial Sequence: Synthetic oligonucleotide
cuuaguuuguuugcccuuc

SEQ ID NO: 664791 - RNA, 19 nt, Artificial Sequence
  Description of Artificial Sequence: Synthetic oligonucleotide
aagaugcuauuugccaaca

SEQ ID NO: 664792 - RNA, 19 nt, Artificial Sequence
  Description of Artificial Sequence: Synthetic oligonucleotide
cagugucuaaagaauacaa

SEQ ID NO: 664793 - RNA, 19 nt, Artificial Sequence
  Description of Artificial Sequence: Synthetic oligonucleotide
cucgagcucucauaagcug

SEQ ID NO: 664794 - RNA, 19 nt, Artificial Sequence
  Description of Artificial Sequence: Synthetic oligonucleotide
gagaaaccgcaauuccuca

SEQ ID NO: 664795 - RNA, 19 nt, Artificial Sequence
  Description of Artificial Sequence: Synthetic oligonucleotide
ugauucguuuagcuucauc

SEQ ID NO: 664796 - RNA, 19 nt, Artificial Sequence
  Description of Artificial Sequence: Synthetic oligonucleotide
caauuccucaauaagucgu

SEQ ID NO: 664797 - RNA, 19 nt, Artificial Sequence
  Description of Artificial Sequence: Synthetic oligonucleotide
agugucuaaagaauacaau

SEQ ID NO: 664798 - RNA, 19 nt, Artificial Sequence
  Description of Artificial Sequence: Synthetic oligonucleotide
uuuugaugcugagccauuc

SEQ ID NO: 664799 - RNA, 19 nt, Artificial Sequence
  Description of Artificial Sequence: Synthetic oligonucleotide
cucuuguagugacauugac

SEQ ID NO: 664800 - RNA, 19 nt, Artificial Sequence
  Description of Artificial Sequence: Synthetic oligonucleotide
gucguugauuauaacgcug

SEQ ID NO: 664801 - RNA, 19 nt, Artificial Sequence
  Description of Artificial Sequence: Synthetic oligonucleotide
ugucuuugugagucauaca

SEQ ID NO: 664802 - RNA, 19 nt, Artificial Sequence
  Description of Artificial Sequence: Synthetic oligonucleotide
ucacuaacuugcucaacuu

SEQ ID NO: 664803 - RNA, 19 nt, Artificial Sequence
  Description of Artificial Sequence: Synthetic oligonucleotide
uugcaacuggagaucccgc

SEQ ID NO: 664804 - RNA, 19 nt, Artificial Sequence
  Description of Artificial Sequence: Synthetic oligonucleotide
guuaauucucaaacuuuuc

SEQ ID NO: 664805 - RNA, 19 nt, Artificial Sequence
  Description of Artificial Sequence: Synthetic oligonucleotide
gggaauaggguagaauuug

SEQ ID NO: 664806 - RNA, 19 nt, Artificial Sequence
  Description of Artificial Sequence: Synthetic oligonucleotide
ucuuguaaaugucgcucuu

SEQ ID NO: 664807 - RNA, 19 nt, Artificial Sequence
  Description of Artificial Sequence: Synthetic oligonucleotide
gcuaugacccaguggaaug

SEQ ID NO: 664808 - RNA, 19 nt, Artificial Sequence
  Description of Artificial Sequence: Synthetic oligonucleotide
guaaaucacccaacucucc

SEQ ID NO: 664809 - RNA, 19 nt, Artificial Sequence
  Description of Artificial Sequence: Synthetic oligonucleotide
ucuuaguuuguuugcccuu

SEQ ID NO: 664810 - RNA, 19 nt, Artificial Sequence
  Description of Artificial Sequence: Synthetic oligonucleotide
cuggucauauugucgcuuc

SEQ ID NO: 664811 - RNA, 19 nt, Artificial Sequence
  Description of Artificial Sequence: Synthetic oligonucleotide
uggcagucuuuuaguaaca

SEQ ID NO: 664812 - RNA, 19 nt, Artificial Sequence
  Description of Artificial Sequence: Synthetic oligonucleotide
uggcguuuaaguagcugau

SEQ ID NO: 664813 - RNA, 19 nt, Artificial Sequence
  Description of Artificial Sequence: Synthetic oligonucleotide
uucuugucucuuguaguga

SEQ ID NO: 664814 - RNA, 19 nt, Artificial Sequence
  Description of Artificial Sequence: Synthetic oligonucleotide
gcgccugaaaaucugcucc

SEQ ID NO: 664815 - RNA, 19 nt, Artificial Sequence
  Description of Artificial Sequence: Synthetic oligonucleotide
cuugcgguuucuuagcaua

SEQ ID NO: 664816 - RNA, 19 nt, Artificial Sequence
  Description of Artificial Sequence: Synthetic oligonucleotide
uuauaacgcugcauuuguu

SEQ ID NO: 664817 - RNA, 19 nt, Artificial Sequence
  Description of Artificial Sequence: Synthetic oligonucleotide
agucacuaucuguaacuau

SEQ ID NO: 664818 - RNA, 19 nt, Artificial Sequence
  Description of Artificial Sequence: Synthetic oligonucleotide
ucacccaacucuccuuuau

SEQ ID NO: 664819 - RNA, 19 nt, Artificial Sequence
  Description of Artificial Sequence: Synthetic oligonucleotide
cauguucaaccaacaggug

SEQ ID NO: 664820 - RNA, 19 nt, Artificial Sequence
  Description of Artificial Sequence: Synthetic oligonucleotide
uacaauauuuaaggucaau

SEQ ID NO: 664821 - RNA, 19 nt, Artificial Sequence
  Description of Artificial Sequence: Synthetic oligonucleotide
caccuuagggaauuacuga

SEQ ID NO: 664822 - RNA, 19 nt, Artificial Sequence
  Description of Artificial Sequence: Synthetic oligonucleotide
ucaauuuccuggucauauu

SEQ ID NO: 664823 - RNA, 19 nt, Artificial Sequence
  Description of Artificial Sequence: Synthetic oligonucleotide
ugcuaugacccaguggaau

SEQ ID NO: 664824 - RNA, 19 nt, Artificial Sequence
  Description of Artificial Sequence: Synthetic oligonucleotide
gcuugcuauugcuaugacc

SEQ ID NO: 664825 - RNA, 19 nt, Artificial Sequence
  Description of Artificial Sequence: Synthetic oligonucleotide
uggccauucgugucuuggc

SEQ ID NO: 664826 - RNA, 19 nt, Artificial Sequence
  Description of Artificial Sequence: Synthetic oligonucleotide
augcuugcuauugcuauga

SEQ ID NO: 664827 - RNA, 19 nt, Artificial Sequence
  Description of Artificial Sequence: Synthetic oligonucleotide
cuauugcuaugacccagug

SEQ ID NO: 664828 - RNA, 19 nt, Artificial Sequence
  Description of Artificial Sequence: Synthetic oligonucleotide
cuggguauuaggauaagau

SEQ ID NO: 664829 - RNA, 19 nt, Artificial Sequence
  Description of Artificial Sequence: Synthetic oligonucleotide
uaguuuugcuuaggaagcu

SEQ ID NO: 664830 - RNA, 19 nt, Artificial Sequence
  Description of Artificial Sequence: Synthetic oligonucleotide
uugacccacugucuuuagu

SEQ ID NO: 664831 - RNA, 19 nt, Artificial Sequence
  Description of Artificial Sequence: Synthetic oligonucleotide
gucugagaaaccgcaauuc

SEQ ID NO: 664832 - RNA, 19 nt, Artificial Sequence
  Description of Artificial Sequence: Synthetic oligonucleotide
cuuguuauucaaacacucu

SEQ ID NO: 664833 - RNA, 19 nt, Artificial Sequence
  Description of Artificial Sequence: Synthetic oligonucleotide
caacaauaaauuugcgugu

SEQ ID NO: 664834 - RNA, 19 nt, Artificial Sequence
  Description of Artificial Sequence: Synthetic oligonucleotide
uuguagugacauugaccca

SEQ ID NO: 664835 - RNA, 19 nt, Artificial Sequence
  Description of Artificial Sequence: Synthetic oligonucleotide
uacugaucuuuaaguugcu

SEQ ID NO: 664836 - RNA, 19 nt, Artificial Sequence
  Description of Artificial Sequence: Synthetic oligonucleotide
gucuaaagaauacaauauu

SEQ ID NO: 664837 - RNA, 19 nt, Artificial Sequence
  Description of Artificial Sequence: Synthetic oligonucleotide
gaauuacugaagaugcuau

SEQ ID NO: 664838 - RNA, 19 nt, Artificial Sequence
  Description of Artificial Sequence: Synthetic oligonucleotide
uaugacccaguggaaugca

SEQ ID NO: 664839 - RNA, 19 nt, Artificial Sequence
  Description of Artificial Sequence: Synthetic oligonucleotide
aaccgcaauuccucaguuu

SEQ ID NO: 664840 - RNA, 19 nt, Artificial Sequence
  Description of Artificial Sequence: Synthetic oligonucleotide
uggucauauugucgcuucu

SEQ ID NO: 664841 - RNA, 19 nt, Artificial Sequence
  Description of Artificial Sequence: Synthetic oligonucleotide
uggccuagcaucugucuua

SEQ ID NO: 664842 - RNA, 19 nt, Artificial Sequence
  Description of Artificial Sequence: Synthetic oligonucleotide
uggagaaaucucagcucuc

SEQ ID NO: 664843 - RNA, 19 nt, Artificial Sequence
  Description of Artificial Sequence: Synthetic oligonucleotide
cacauugcaacuggagauc

SEQ ID NO: 664844 - RNA, 19 nt, Artificial Sequence
  Description of Artificial Sequence: Synthetic oligonucleotide
ucucgcaagcgguucguau

SEQ ID NO: 664845 - RNA, 19 nt, Artificial Sequence
  Description of Artificial Sequence: Synthetic oligonucleotide
ggcuucacuucguugaauc

SEQ ID NO: 664846 - RNA, 19 nt, Artificial Sequence
  Description of Artificial Sequence: Synthetic oligonucleotide
uugcgguuucuuagcauau

SEQ ID NO: 664847 - RNA, 19 nt, Artificial Sequence
  Description of Artificial Sequence: Synthetic oligonucleotide
augaaacaggcgauugucu

SEQ ID NO: 664848 - RNA, 19 nt, Artificial Sequence
  Description of Artificial Sequence: Synthetic oligonucleotide
ucuugcgguuucuuagcau

SEQ ID NO: 664849 - RNA, 19 nt, Artificial Sequence
  Description of Artificial Sequence: Synthetic oligonucleotide
gcuuguuauucaaacacuc

SEQ ID NO: 664850 - RNA, 19 nt, Artificial Sequence
  Description of Artificial Sequence: Synthetic oligonucleotide
agauucggcucugugcuga

SEQ ID NO: 664851 - RNA, 19 nt, Artificial Sequence
  Description of Artificial Sequence: Synthetic oligonucleotide
ggagauucggcucugugcu

SEQ ID NO: 664852 - RNA, 19 nt, Artificial Sequence
  Description of Artificial Sequence: Synthetic oligonucleotide
agcgguucguauguucuug

SEQ ID NO: 664853 - RNA, 19 nt, Artificial Sequence
  Description of Artificial Sequence: Synthetic oligonucleotide
auauugauacuggguauua

SEQ ID NO: 664854 - RNA, 19 nt, Artificial Sequence
  Description of Artificial Sequence: Synthetic oligonucleotide
uucaucucgcaagcgguuc

SEQ ID NO: 664855 - RNA, 19 nt, Artificial Sequence
  Description of Artificial Sequence: Synthetic oligonucleotide
ugaggcucguuggacggug

SEQ ID NO: 664856 - RNA, 19 nt, Artificial Sequence
  Description of Artificial Sequence: Synthetic oligonucleotide
gcucguuggacggugaggc

SEQ ID NO: 664857 - RNA, 19 nt, Artificial Sequence
  Description of Artificial Sequence: Synthetic oligonucleotide
cuucucguggcguuuaagu

SEQ ID NO: 664858 - RNA, 19 nt, Artificial Sequence
  Description of Artificial Sequence: Synthetic oligonucleotide
cauuauuuucucuggcagu

SEQ ID NO: 664859 - RNA, 19 nt, Artificial Sequence
  Description of Artificial Sequence: Synthetic oligonucleotide
gucuuaguuuguuugcccu

SEQ ID NO: 664860 - RNA, 19 nt, Artificial Sequence
  Description of Artificial Sequence: Synthetic oligonucleotide
acauugacccacugucuuu

SEQ ID NO: 664861 - RNA, 19 nt, Artificial Sequence
  Description of Artificial Sequence: Synthetic oligonucleotide
aggaagcuagagauggaca

SEQ ID NO: 664862 - RNA, 19 nt, Artificial Sequence
  Description of Artificial Sequence: Synthetic oligonucleotide
ucagugcuaugugacucac

SEQ ID NO: 664863 - RNA, 19 nt, Artificial Sequence
  Description of Artificial Sequence: Synthetic oligonucleotide
cucucgaaguuccugacgu

SEQ ID NO: 664864 - RNA, 19 nt, Artificial Sequence
  Description of Artificial Sequence: Synthetic oligonucleotide
agacagaaugcuugcuauu

SEQ ID NO: 664865 - RNA, 19 nt, Artificial Sequence
  Description of Artificial Sequence: Synthetic oligonucleotide
auggccuagcaucugucuu

SEQ ID NO: 664866 - RNA, 19 nt, Artificial Sequence
  Description of Artificial Sequence: Synthetic oligonucleotide
ugcuugcuauugcuaugac

SEQ ID NO: 664867 - RNA, 19 nt, Artificial Sequence
  Description of Artificial Sequence: Synthetic oligonucleotide
gagauucggcucugugcug

SEQ ID NO: 664868 - RNA, 19 nt, Artificial Sequence
  Description of Artificial Sequence: Synthetic oligonucleotide
gugacucacuaacuugcuc

SEQ ID NO: 664869 - RNA, 19 nt, Artificial Sequence
  Description of Artificial Sequence: Synthetic oligonucleotide
ggaauuacugaagaugcua

SEQ ID NO: 664870 - RNA, 19 nt, Artificial Sequence
  Description of Artificial Sequence: Synthetic oligonucleotide
aagcgguucguauguucuu

SEQ ID NO: 664871 - RNA, 19 nt, Artificial Sequence
  Description of Artificial Sequence: Synthetic oligonucleotide
agaugcuauuugccaacau

SEQ ID NO: 664872 - RNA, 19 nt, Artificial Sequence
  Description of Artificial Sequence: Synthetic oligonucleotide
gaagcuagagauggacaaa

SEQ ID NO: 664873 - RNA, 19 nt, Artificial Sequence
  Description of Artificial Sequence: Synthetic oligonucleotide
aaaccacugagaagaugaa

SEQ ID NO: 664874 - RNA, 19 nt, Artificial Sequence
  Description of Artificial Sequence: Synthetic oligonucleotide
ucgcucguuccugagucug

SEQ ID NO: 664875 - RNA, 19 nt, Artificial Sequence
  Description of Artificial Sequence: Synthetic oligonucleotide
aacaggcgauugucuuugu

SEQ ID NO: 664876 - RNA, 19 nt, Artificial Sequence
  Description of Artificial Sequence: Synthetic oligonucleotide
agcuucgggcucugcuuuc

SEQ ID NO: 664877 - RNA, 19 nt, Artificial Sequence
  Description of Artificial Sequence: Synthetic oligonucleotide
aacuaucuuugacguugua

SEQ ID NO: 664878 - RNA, 19 nt, Artificial Sequence
  Description of Artificial Sequence: Synthetic oligonucleotide
ucccaaaucgcagcuucuc

SEQ ID NO: 664879 - RNA, 19 nt, Artificial Sequence
  Description of Artificial Sequence: Synthetic oligonucleotide
gcucucgaaguuccugacg

SEQ ID NO: 664880 - RNA, 19 nt, Artificial Sequence
  Description of Artificial Sequence: Synthetic oligonucleotide
cccaaaucgcagcuucucg

SEQ ID NO: 664881 - RNA, 19 nt, Artificial Sequence
  Description of Artificial Sequence: Synthetic oligonucleotide
guuccugacgucugagaaa

SEQ ID NO: 664882 - RNA, 19 nt, Artificial Sequence
  Description of Artificial Sequence: Synthetic oligonucleotide
caacuucaucugucccugg

SEQ ID NO: 664883 - RNA, 19 nt, Artificial Sequence
  Description of Artificial Sequence: Synthetic oligonucleotide
agcuucucgagcucucaua

SEQ ID NO: 664884 - RNA, 19 nt, Artificial Sequence
  Description of Artificial Sequence: Synthetic oligonucleotide
uucguauguucuuguucua

SEQ ID NO: 664885 - RNA, 19 nt, Artificial Sequence
  Description of Artificial Sequence: Synthetic oligonucleotide
guagucucgcucguuccug

SEQ ID NO: 664886 - RNA, 19 nt, Artificial Sequence
  Description of Artificial Sequence: Synthetic oligonucleotide
gaaacaggcgauugucuuu

SEQ ID NO: 664887 - RNA, 19 nt, Artificial Sequence
  Description of Artificial Sequence: Synthetic oligonucleotide
cacugguacuuccugugca

SEQ ID NO: 664888 - RNA, 19 nt, Artificial Sequence
  Description of Artificial Sequence: Synthetic oligonucleotide
agaaugcuugcuauugcua

SEQ ID NO: 664889 - RNA, 19 nt, Artificial Sequence
  Description of Artificial Sequence: Synthetic oligonucleotide
caagcgguucguauguucu

SEQ ID NO: 664890 - RNA, 19 nt, Artificial Sequence
  Description of Artificial Sequence: Synthetic oligonucleotide
cagcucucgaaguuccuga

SEQ ID NO: 664891 - RNA, 19 nt, Artificial Sequence
  Description of Artificial Sequence: Synthetic oligonucleotide
gagucacuaucuguaacua

SEQ ID NO: 664892 - RNA, 19 nt, Artificial Sequence
  Description of Artificial Sequence: Synthetic oligonucleotide
aggcucguuggacggugag

SEQ ID NO: 664893 - RNA, 19 nt, Artificial Sequence
  Description of Artificial Sequence: Synthetic oligonucleotide
uguggcuguugaguuaauu

SEQ ID NO: 664894 - RNA, 19 nt, Artificial Sequence
  Description of Artificial Sequence: Synthetic oligonucleotide
acgguccuggucuggugug

SEQ ID NO: 664895 - RNA, 19 nt, Artificial Sequence
  Description of Artificial Sequence: Synthetic oligonucleotide
cuguguuccucaucuaacu

SEQ ID NO: 664896 - RNA, 19 nt, Artificial Sequence
  Description of Artificial Sequence: Synthetic oligonucleotide
gagagccaucuaauucuug

SEQ ID NO: 664897 - RNA, 19 nt, Artificial Sequence
  Description of Artificial Sequence: Synthetic oligonucleotide
aguuuugcuuaggaagcua

SEQ ID NO: 664898 - RNA, 19 nt, Artificial Sequence
  Description of Artificial Sequence: Synthetic oligonucleotide
auacaauauuuaaggucaa

SEQ ID NO: 664899 - RNA, 19 nt, Artificial Sequence
  Description of Artificial Sequence: Synthetic oligonucleotide
uccugacgucugagaaacc

SEQ ID NO: 664900 - RNA, 19 nt, Artificial Sequence
  Description of Artificial Sequence: Synthetic oligonucleotide
ucguugaaucuuggguagu

SEQ ID NO: 664901 - RNA, 19 nt, Artificial Sequence
  Description of Artificial Sequence: Synthetic oligonucleotide
cuguugaguuaauucucaa

SEQ ID NO: 664902 - RNA, 19 nt, Artificial Sequence
  Description of Artificial Sequence: Synthetic oligonucleotide
cguuguaacacucacuucu

SEQ ID NO: 664903 - RNA, 19 nt, Artificial Sequence
  Description of Artificial Sequence: Synthetic oligonucleotide
gucaccuuagggaauuacu

SEQ ID NO: 664904 - RNA, 19 nt, Artificial Sequence
  Description of Artificial Sequence: Synthetic oligonucleotide
gaagaugaaacaggcgauu

SEQ ID NO: 664905 - RNA, 19 nt, Artificial Sequence
  Description of Artificial Sequence: Synthetic oligonucleotide
gcuguguuccucaucuaac

SEQ ID NO: 664906 - RNA, 19 nt, Artificial Sequence
  Description of Artificial Sequence: Synthetic oligonucleotide
ccaaaucgcagcuucucga

SEQ ID NO: 664907 - RNA, 19 nt, Artificial Sequence
  Description of Artificial Sequence: Synthetic oligonucleotide
acauccagacagaaugcuu

SEQ ID NO: 664908 - RNA, 19 nt, Artificial Sequence
  Description of Artificial Sequence: Synthetic oligonucleotide
gcuuaggaagcuagagaug

SEQ ID NO: 664909 - RNA, 19 nt, Artificial Sequence
  Description of Artificial Sequence: Synthetic oligonucleotide
ucccgcauuuggcucucau

SEQ ID NO: 664910 - RNA, 19 nt, Artificial Sequence
  Description of Artificial Sequence: Synthetic oligonucleotide
ccauucgugucuuggcuuc

SEQ ID NO: 664911 - RNA, 19 nt, Artificial Sequence
  Description of Artificial Sequence: Synthetic oligonucleotide
cucuggcagucuuuuagua

SEQ ID NO: 664912 - RNA, 19 nt, Artificial Sequence
  Description of Artificial Sequence: Synthetic oligonucleotide
uccuucucguggcguuuaa

SEQ ID NO: 664913 - RNA, 19 nt, Artificial Sequence
  Description of Artificial Sequence: Synthetic oligonucleotide
cauugacccacugucuuua

SEQ ID NO: 664914 - RNA, 19 nt, Artificial Sequence
  Description of Artificial Sequence: Synthetic oligonucleotide
gcaagcgguucguauguuc

SEQ ID NO: 664915 - RNA, 19 nt, Artificial Sequence
  Description of Artificial Sequence: Synthetic oligonucleotide
aggauaagaugaggcucgu

SEQ ID NO: 664916 - RNA, 19 nt, Artificial Sequence
  Description of Artificial Sequence: Synthetic oligonucleotide
ggagucuguuccucagcac

SEQ ID NO: 664917 - RNA, 19 nt, Artificial Sequence
  Description of Artificial Sequence: Synthetic oligonucleotide
ucguggcguuuaaguagcu

SEQ ID NO: 664918 - RNA, 19 nt, Artificial Sequence
  Description of Artificial Sequence: Synthetic oligonucleotide
ugcgguuucuuagcauauu

SEQ ID NO: 664919 - RNA, 19 nt, Artificial Sequence
  Description of Artificial Sequence: Synthetic oligonucleotide
aucacccaacucuccuuua

SEQ ID NO: 664920 - RNA, 19 nt, Artificial Sequence
  Description of Artificial Sequence: Synthetic oligonucleotide
ggcucguuggacggugagg

SEQ ID NO: 664921 - RNA, 19 nt, Artificial Sequence
  Description of Artificial Sequence: Synthetic oligonucleotide
gagccaucuaauucuuguu

SEQ ID NO: 664922 - RNA, 19 nt, Artificial Sequence
  Description of Artificial Sequence: Synthetic oligonucleotide
ggauuaagacauucggauu

SEQ ID NO: 664923 - RNA, 19 nt, Artificial Sequence
  Description of Artificial Sequence: Synthetic oligonucleotide
gacccacugucuuuaguuu

SEQ ID NO: 664924 - RNA, 19 nt, Artificial Sequence
  Description of Artificial Sequence: Synthetic oligonucleotide
cauacauacuguggaagau

SEQ ID NO: 664925 - RNA, 19 nt, Artificial Sequence
  Description of Artificial Sequence: Synthetic oligonucleotide
gggguugccugugugguca

SEQ ID NO: 664926 - RNA, 19 nt, Artificial Sequence
  Description of Artificial Sequence: Synthetic oligonucleotide
caacauggccuagcaucug

SEQ ID NO: 664927 - RNA, 19 nt, Artificial Sequence
  Description of Artificial Sequence: Synthetic oligonucleotide
gcaauuccucaguuuugga

SEQ ID NO: 664928 - RNA, 19 nt, Artificial Sequence
  Description of Artificial Sequence: Synthetic oligonucleotide
ccgcauuuggcucucaugu

SEQ ID NO: 664929 - RNA, 19 nt, Artificial Sequence
  Description of Artificial Sequence: Synthetic oligonucleotide
caaagucaccuuagggaau

SEQ ID NO: 664930 - RNA, 19 nt, Artificial Sequence
  Description of Artificial Sequence: Synthetic oligonucleotide
aagucaccuuagggaauua

SEQ ID NO: 664931 - RNA, 19 nt, Artificial Sequence
  Description of Artificial Sequence: Synthetic oligonucleotide
cccgcauuuggcucucaug

SEQ ID NO: 664932 - RNA, 19 nt, Artificial Sequence
  Description of Artificial Sequence: Synthetic oligonucleotide
cgccugaaaaucugcuccc

SEQ ID NO: 664933 - RNA, 19 nt, Artificial Sequence
  Description of Artificial Sequence: Synthetic oligonucleotide
ccuagcaucugucuuaguu

SEQ ID NO: 664934 - RNA, 19 nt, Artificial Sequence
  Description of Artificial Sequence: Synthetic oligonucleotide
caaacuccucuuccagugu

SEQ ID NO: 664935 - RNA, 19 nt, Artificial Sequence
  Description of Artificial Sequence: Synthetic oligonucleotide
uugauucguuuagcuucau

SEQ ID NO: 664936 - RNA, 19 nt, Artificial Sequence
  Description of Artificial Sequence: Synthetic oligonucleotide
gguagucucgcucguuccu

SEQ ID NO: 664937 - RNA, 19 nt, Artificial Sequence
  Description of Artificial Sequence: Synthetic oligonucleotide
gagcuucgggcucugcuuu

SEQ ID NO: 664938 - RNA, 19 nt, Artificial Sequence
  Description of Artificial Sequence: Synthetic oligonucleotide
augacccaguggaaugcaa

SEQ ID NO: 664939 - RNA, 19 nt, Artificial Sequence
  Description of Artificial Sequence: Synthetic oligonucleotide
gcuucacuucguugaaucu

SEQ ID NO: 664940 - RNA, 19 nt, Artificial Sequence
  Description of Artificial Sequence: Synthetic oligonucleotide
ggccauucgugucuuggcu

SEQ ID NO: 664941 - RNA, 19 nt, Artificial Sequence
  Description of Artificial Sequence: Synthetic oligonucleotide
cauucgugucuuggcuuca

SEQ ID NO: 664942 - RNA, 19 nt, Artificial Sequence
  Description of Artificial Sequence: Synthetic oligonucleotide
ggaaugcaaggugggaaua

SEQ ID NO: 664943 - RNA, 19 nt, Artificial Sequence
  Description of Artificial Sequence: Synthetic oligonucleotide
cuuggguagucucgcucgu

SEQ ID NO: 664944 - RNA, 19 nt, Artificial Sequence
  Description of Artificial Sequence: Synthetic oligonucleotide
gaggcucguuggacgguga

SEQ ID NO: 664945 - RNA, 19 nt, Artificial Sequence
  Description of Artificial Sequence: Synthetic oligonucleotide
aguuugccauugagcugcu

SEQ ID NO: 664946 - RNA, 19 nt, Artificial Sequence
  Description of Artificial Sequence: Synthetic oligonucleotide
caacuggagaucccgcauu

SEQ ID NO: 664947 - RNA, 19 nt, Artificial Sequence
  Description of Artificial Sequence: Synthetic oligonucleotide
cucguuccugagucugucu

SEQ ID NO: 664948 - RNA, 19 nt, Artificial Sequence
  Description of Artificial Sequence: Synthetic oligonucleotide
gauucggcucugugcugau

SEQ ID NO: 664949 - RNA, 19 nt, Artificial Sequence
  Description of Artificial Sequence: Synthetic oligonucleotide
gcuauugcuaugacccagu

SEQ ID NO: 664950 - RNA, 19 nt, Artificial Sequence
  Description of Artificial Sequence: Synthetic oligonucleotide
ccuucucguggcguuuaag

SEQ ID NO: 664951 - RNA, 19 nt, Artificial Sequence
  Description of Artificial Sequence: Synthetic oligonucleotide
agcucccaaaucgcagcuu

SEQ ID NO: 664952 - RNA, 19 nt, Artificial Sequence
  Description of Artificial Sequence: Synthetic oligonucleotide
cacuaucuguaacuaucuu

SEQ ID NO: 664953 - RNA, 19 nt, Artificial Sequence
  Description of Artificial Sequence: Synthetic oligonucleotide
cucggacauuggcuucaca

SEQ ID NO: 664954 - RNA, 19 nt, Artificial Sequence
  Description of Artificial Sequence: Synthetic oligonucleotide
gggaauuacugaagaugcu

SEQ ID NO: 664955 - RNA, 19 nt, Artificial Sequence
  Description of Artificial Sequence: Synthetic oligonucleotide
gcucguuccugagucuguc

SEQ ID NO: 664956 - RNA, 19 nt, Artificial Sequence
  Description of Artificial Sequence: Synthetic oligonucleotide
ggcgauugucuuugugagu

SEQ ID NO: 664957 - RNA, 19 nt, Artificial Sequence
  Description of Artificial Sequence: Synthetic oligonucleotide
aucucgcaagcgguucgua

SEQ ID NO: 664958 - RNA, 19 nt, Artificial Sequence
  Description of Artificial Sequence: Synthetic oligonucleotide
cguuuagcuucaucucgca

SEQ ID NO: 664959 - RNA, 19 nt, Artificial Sequence
  Description of Artificial Sequence: Synthetic oligonucleotide
acgcugcauuuguucuguu

SEQ ID NO: 664960 - RNA, 19 nt, Artificial Sequence
  Description of Artificial Sequence: Synthetic oligonucleotide
cagugcuaugugacucacu

SEQ ID NO: 664961 - RNA, 19 nt, Artificial Sequence
  Description of Artificial Sequence: Synthetic oligonucleotide
cucguuggacggugaggcu

SEQ ID NO: 664962 - RNA, 19 nt, Artificial Sequence
  Description of Artificial Sequence: Synthetic oligonucleotide
cguggcguuuaaguagcug

SEQ ID NO: 664963 - RNA, 19 nt, Artificial Sequence
  Description of Artificial Sequence: Synthetic oligonucleotide
cucgcucguuccugagucu

SEQ ID NO: 664964 - RNA, 19 nt, Artificial Sequence
  Description of Artificial Sequence: Synthetic oligonucleotide
gcgguucguauguucuugu

SEQ ID NO: 664965 - RNA, 19 nt, Artificial Sequence
  Description of Artificial Sequence: Synthetic oligonucleotide
gggcucugcuuucacuggu

SEQ ID NO: 664966 - RNA, 19 nt, Artificial Sequence
  Description of Artificial Sequence: Synthetic oligonucleotide
guuggacggugaggcugca

SEQ ID NO: 664967 - RNA, 19 nt, Artificial Sequence
  Description of Artificial Sequence: Synthetic oligonucleotide
ccugcucaaagcgccugaa

SEQ ID NO: 664968 - RNA, 19 nt, Artificial Sequence
  Description of Artificial Sequence: Synthetic oligonucleotide
ggauaagaugaggcucguu

SEQ ID NO: 664969 - RNA, 19 nt, Artificial Sequence
  Description of Artificial Sequence: Synthetic oligonucleotide
cgcugcauuuguucuguuu

SEQ ID NO: 664970 - RNA, 19 nt, Artificial Sequence
  Description of Artificial Sequence: Synthetic oligonucleotide
gccuagcaucugucuuagu

SEQ ID NO: 664971 - RNA, 19 nt, Artificial Sequence
  Description of Artificial Sequence: Synthetic oligonucleotide
ccucagggguugccugugu

SEQ ID NO: 664972 - RNA, 19 nt, Artificial Sequence
  Description of Artificial Sequence: Synthetic oligonucleotide
cgcucguuccugagucugu

SEQ ID NO: 664973 - RNA, 19 nt, Artificial Sequence
  Description of Artificial Sequence: Synthetic oligonucleotide
cgcaagcgguucguauguu

SEQ ID NO: 664974 - RNA, 19 nt, Artificial Sequence
  Description of Artificial Sequence: Synthetic oligonucleotide
auacauaucauuccaaugg

SEQ ID NO: 664975 - RNA, 19 nt, Artificial Sequence
  Description of Artificial Sequence: Synthetic oligonucleotide
gauaauuagacauaacaug

SEQ ID NO: 664976 - RNA, 19 nt, Artificial Sequence
  Description of Artificial Sequence: Synthetic oligonucleotide
aacaugugaugacaaaucc

SEQ ID NO: 664977 - RNA, 19 nt, Artificial Sequence
  Description of Artificial Sequence: Synthetic oligonucleotide
aaucuuagagaaaagacac

SEQ ID NO: 664978 - RNA, 19 nt, Artificial Sequence
  Description of Artificial Sequence: Synthetic oligonucleotide
auacauauaauccugagcu

SEQ ID NO: 664979 - RNA, 19 nt, Artificial Sequence
  Description of Artificial Sequence: Synthetic oligonucleotide
aauaagguaacuauaaucu

SEQ ID NO: 664980 - RNA, 19 nt, Artificial Sequence
  Description of Artificial Sequence: Synthetic oligonucleotide
aagaguuuagaccauuaac

SEQ ID NO: 664981 - RNA, 19 nt, Artificial Sequence
  Description of Artificial Sequence: Synthetic oligonucleotide
uaugagauaagcaauugcc

SEQ ID NO: 664982 - RNA, 19 nt, Artificial Sequence
  Description of Artificial Sequence: Synthetic oligonucleotide
aaguuuaccauccaaguug

SEQ ID NO: 664983 - RNA, 19 nt, Artificial Sequence
  Description of Artificial Sequence: Synthetic oligonucleotide
ugaaguauuauaaaacaug

SEQ ID NO: 664984 - RNA, 19 nt, Artificial Sequence
  Description of Artificial Sequence: Synthetic oligonucleotide
aagacugauaauuagacau

SEQ ID NO: 664985 - RNA, 19 nt, Artificial Sequence
  Description of Artificial Sequence: Synthetic oligonucleotide
uacuaauuuacucagguca

SEQ ID NO: 664986 - RNA, 19 nt, Artificial Sequence
  Description of Artificial Sequence: Synthetic oligonucleotide
ugugauguguccaaaagag

SEQ ID NO: 664987 - RNA, 19 nt, Artificial Sequence
  Description of Artificial Sequence: Synthetic oligonucleotide
acuaccaaaauauuguauc

SEQ ID NO: 664988 - RNA, 19 nt, Artificial Sequence
  Description of Artificial Sequence: Synthetic oligonucleotide
ucuuagguuaaaauuacag

SEQ ID NO: 664989 - RNA, 19 nt, Artificial Sequence
  Description of Artificial Sequence: Synthetic oligonucleotide
uuuaaagcaagcaauucug

SEQ ID NO: 664990 - RNA, 19 nt, Artificial Sequence
  Description of Artificial Sequence: Synthetic oligonucleotide
ugcauuuauacauuuauca

SEQ ID NO: 664991 - RNA, 19 nt, Artificial Sequence
  Description of Artificial Sequence: Synthetic oligonucleotide
uauuaguguauuuucaaag

SEQ ID NO: 664992 - RNA, 19 nt, Artificial Sequence
  Description of Artificial Sequence: Synthetic oligonucleotide
aaacugugcauuuaaccac

SEQ ID NO: 664993 - RNA, 19 nt, Artificial Sequence
  Description of Artificial Sequence: Synthetic oligonucleotide
agguauuuuaauuuacuac

SEQ ID NO: 664994 - RNA, 19 nt, Artificial Sequence
  Description of Artificial Sequence: Synthetic oligonucleotide
aauaauuccuccgaaacug

SEQ ID NO: 664995 - RNA, 19 nt, Artificial Sequence
  Description of Artificial Sequence: Synthetic oligonucleotide
uuagguuaaaauuacagua

SEQ ID NO: 664996 - RNA, 19 nt, Artificial Sequence
  Description of Artificial Sequence: Synthetic oligonucleotide
uguaaauaugucuuggaug

SEQ ID NO: 664997 - RNA, 19 nt, Artificial Sequence
  Description of Artificial Sequence: Synthetic oligonucleotide
aguguauuuucaaagauac

SEQ ID NO: 664998 - RNA, 19 nt, Artificial Sequence
  Description of Artificial Sequence: Synthetic oligonucleotide
uauuucacuccaaacuucg

SEQ ID NO: 664999 - RNA, 19 nt, Artificial Sequence
  Description of Artificial Sequence: Synthetic oligonucleotide
ucuacaauuugaaagaguu

SEQ ID NO: 665000 - RNA, 19 nt, Artificial Sequence
  Description of Artificial Sequence: Synthetic oligonucleotide
uuaacucucgaauaauucc

SEQ ID NO: 665001 - RNA, 19 nt, Artificial Sequence
  Description of Artificial Sequence: Synthetic oligonucleotide
aaguaugauaaccuagcag

SEQ ID NO: 665002 - RNA, 19 nt, Artificial Sequence
  Description of Artificial Sequence: Synthetic oligonucleotide
uaagcaauugcccaagaca

SEQ ID NO: 665003 - RNA, 19 nt, Artificial Sequence
  Description of Artificial Sequence: Synthetic oligonucleotide
uuuggaaucacauacuaau

SEQ ID NO: 665004 - RNA, 19 nt, Artificial Sequence
  Description of Artificial Sequence: Synthetic oligonucleotide
uccacuaggauaaaugaug

SEQ ID NO: 665005 - RNA, 19 nt, Artificial Sequence
  Description of Artificial Sequence: Synthetic oligonucleotide
uaaaagacugauaauuaga

SEQ ID NO: 665006 - RNA, 19 nt, Artificial Sequence
  Description of Artificial Sequence: Synthetic oligonucleotide
aagcauauaauaucuagaa

SEQ ID NO: 665007 - RNA, 19 nt, Artificial Sequence
  Description of Artificial Sequence: Synthetic oligonucleotide
ugagcuacugcauuuauac

SEQ ID NO: 665008 - RNA, 19 nt, Artificial Sequence
  Description of Artificial Sequence: Synthetic oligonucleotide
uuaagcaaaacuguguuca

SEQ ID NO: 665009 - RNA, 19 nt, Artificial Sequence
  Description of Artificial Sequence: Synthetic oligonucleotide
aacugacucuuauugcacc

SEQ ID NO: 665010 - RNA, 19 nt, Artificial Sequence
  Description of Artificial Sequence: Synthetic oligonucleotide
ucuaauucuacaauuugaa

SEQ ID NO: 665011 - RNA, 19 nt, Artificial Sequence
  Description of Artificial Sequence: Synthetic oligonucleotide
aaaugagcauuacggggcc

SEQ ID NO: 665012 - RNA, 19 nt, Artificial Sequence
  Description of Artificial Sequence: Synthetic oligonucleotide
acaagcauauaauaucuag

SEQ ID NO: 665013 - RNA, 19 nt, Artificial Sequence
  Description of Artificial Sequence: Synthetic oligonucleotide
aagagaaucuaaugcuaac

SEQ ID NO: 665014 - RNA, 19 nt, Artificial Sequence
  Description of Artificial Sequence: Synthetic oligonucleotide
ucacauacuaauuuacuca

SEQ ID NO: 665015 - RNA, 19 nt, Artificial Sequence
  Description of Artificial Sequence: Synthetic oligonucleotide
guuaauuaugcgucgacag

SEQ ID NO: 665016 - RNA, 19 nt, Artificial Sequence
  Description of Artificial Sequence: Synthetic oligonucleotide
uggagaaauauguucaccc

SEQ ID NO: 665017 - RNA, 19 nt, Artificial Sequence
  Description of Artificial Sequence: Synthetic oligonucleotide
aaucuuagguuaaaauuac

SEQ ID NO: 665018 - RNA, 19 nt, Artificial Sequence
  Description of Artificial Sequence: Synthetic oligonucleotide
aaaggaauacauccagcag

SEQ ID NO: 665019 - RNA, 19 nt, Artificial Sequence
  Description of Artificial Sequence: Synthetic oligonucleotide
aaaggcgcacuuuauuuuc

SEQ ID NO: 665020 - RNA, 19 nt, Artificial Sequence
  Description of Artificial Sequence: Synthetic oligonucleotide
uguguccuuacauaugagg

SEQ ID NO: 665021 - RNA, 19 nt, Artificial Sequence
  Description of Artificial Sequence: Synthetic oligonucleotide
aaagauacauauaauccug

SEQ ID NO: 665022 - RNA, 19 nt, Artificial Sequence
  Description of Artificial Sequence: Synthetic oligonucleotide
augcauauugcuuagauuu

SEQ ID NO: 665023 - RNA, 19 nt, Artificial Sequence
  Description of Artificial Sequence: Synthetic oligonucleotide
uuaucaagaacuacuggac

SEQ ID NO: 665024 - RNA, 19 nt, Artificial Sequence
  Description of Artificial Sequence: Synthetic oligonucleotide
ucuaacauauuucuucccu

SEQ ID NO: 665025 - RNA, 19 nt, Artificial Sequence
  Description of Artificial Sequence: Synthetic oligonucleotide
ugggaaucgucacagauga

SEQ ID NO: 665026 - RNA, 19 nt, Artificial Sequence
  Description of Artificial Sequence: Synthetic oligonucleotide
aauugcccaagacacguag

SEQ ID NO: 665027 - RNA, 19 nt, Artificial Sequence
  Description of Artificial Sequence: Synthetic oligonucleotide
uucacuccaaacuucgcgg

SEQ ID NO: 665028 - RNA, 19 nt, Artificial Sequence
  Description of Artificial Sequence: Synthetic oligonucleotide
ugcaggaugccauagauuc

SEQ ID NO: 665029 - RNA, 19 nt, Artificial Sequence
  Description of Artificial Sequence: Synthetic oligonucleotide
uuuugauuggcguagcuuc

SEQ ID NO: 665030 - RNA, 19 nt, Artificial Sequence
  Description of Artificial Sequence: Synthetic oligonucleotide
uaagcugagucauucauac

SEQ ID NO: 665031 - RNA, 19 nt, Artificial Sequence
  Description of Artificial Sequence: Synthetic oligonucleotide
uccaacauauccaacugug

SEQ ID NO: 665032 - RNA, 19 nt, Artificial Sequence
  Description of Artificial Sequence: Synthetic oligonucleotide
uccaaguaugauaaccuag

SEQ ID NO: 665033 - RNA, 19 nt, Artificial Sequence
  Description of Artificial Sequence: Synthetic oligonucleotide
auaacugacucuuauugca

SEQ ID NO: 665034 - RNA, 19 nt, Artificial Sequence
  Description of Artificial Sequence: Synthetic oligonucleotide
uguagugagcaucuguuca

SEQ ID NO: 665035 - RNA, 19 nt, Artificial Sequence
  Description of Artificial Sequence: Synthetic oligonucleotide
auuggcguagcuucauugc

SEQ ID NO: 665036 - RNA, 19 nt, Artificial Sequence
  Description of Artificial Sequence: Synthetic oligonucleotide
ugacauacgcacagcagcg

SEQ ID NO: 665037 - RNA, 19 nt, Artificial Sequence
  Description of Artificial Sequence: Synthetic oligonucleotide
gauaacugacucuuauugc

SEQ ID NO: 665038 - RNA, 19 nt, Artificial Sequence
  Description of Artificial Sequence: Synthetic oligonucleotide
caugaaaucuccuugaaaa

SEQ ID NO: 665039 - RNA, 19 nt, Artificial Sequence
  Description of Artificial Sequence: Synthetic oligonucleotide
uugaaaguacacucaauca

SEQ ID NO: 665040 - RNA, 19 nt, Artificial Sequence
  Description of Artificial Sequence: Synthetic oligonucleotide
agcugagucauucauaccu

SEQ ID NO: 665041 - RNA, 19 nt, Artificial Sequence
  Description of Artificial Sequence: Synthetic oligonucleotide
uaaaugaugugaugugucc

SEQ ID NO: 665042 - RNA, 19 nt, Artificial Sequence
  Description of Artificial Sequence: Synthetic oligonucleotide
aaagacugauaauuagaca

SEQ ID NO: 665043 - RNA, 19 nt, Artificial Sequence
  Description of Artificial Sequence: Synthetic oligonucleotide
agaaaugguuaagagaauc

SEQ ID NO: 665044 - RNA, 19 nt, Artificial Sequence
  Description of Artificial Sequence: Synthetic oligonucleotide
auuaaucaggaacauaaau

SEQ ID NO: 665045 - RNA, 19 nt, Artificial Sequence
  Description of Artificial Sequence: Synthetic oligonucleotide
auuuacucaggucauguca

SEQ ID NO: 665046 - RNA, 19 nt, Artificial Sequence
  Description of Artificial Sequence: Synthetic oligonucleotide
uguacuguagugagcaucu

SEQ ID NO: 665047 - RNA, 19 nt, Artificial Sequence
  Description of Artificial Sequence: Synthetic oligonucleotide
auaagcaauugcccaagac

SEQ ID NO: 665048 - RNA, 19 nt, Artificial Sequence
  Description of Artificial Sequence: Synthetic oligonucleotide
uaauuagacauaacaugug

SEQ ID NO: 665049 - RNA, 19 nt, Artificial Sequence
  Description of Artificial Sequence: Synthetic oligonucleotide
uaagguaacuauaaucuua

SEQ ID NO: 665050 - RNA, 19 nt, Artificial Sequence
  Description of Artificial Sequence: Synthetic oligonucleotide
agacauaacaugugaugac

SEQ ID NO: 665051 - RNA, 19 nt, Artificial Sequence
  Description of Artificial Sequence: Synthetic oligonucleotide
agaguuuagaccauuaacu

SEQ ID NO: 665052 - RNA, 19 nt, Artificial Sequence
  Description of Artificial Sequence: Synthetic oligonucleotide
ucuuucuacaaacaacaaa

SEQ ID NO: 665053 - RNA, 19 nt, Artificial Sequence
  Description of Artificial Sequence: Synthetic oligonucleotide
uuuacucaggucaugucac

SEQ ID NO: 665054 - RNA, 19 nt, Artificial Sequence
  Description of Artificial Sequence: Synthetic oligonucleotide
uaacuauaaucuuagguua

SEQ ID NO: 665055 - RNA, 19 nt, Artificial Sequence
  Description of Artificial Sequence: Synthetic oligonucleotide
ugauccauuuucuugaaua

SEQ ID NO: 665056 - RNA, 19 nt, Artificial Sequence
  Description of Artificial Sequence: Synthetic oligonucleotide
uaacucucgaauaauuccu

SEQ ID NO: 665057 - RNA, 19 nt, Artificial Sequence
  Description of Artificial Sequence: Synthetic oligonucleotide
ugcacuaccuacugaagag

SEQ ID NO: 665058 - RNA, 19 nt, Artificial Sequence
  Description of Artificial Sequence: Synthetic oligonucleotide
uccuaagcgaaguuuuagg

SEQ ID NO: 665059 - RNA, 19 nt, Artificial Sequence
  Description of Artificial Sequence: Synthetic oligonucleotide
uagacauaacaugugauga

SEQ ID NO: 665060 - RNA, 19 nt, Artificial Sequence
  Description of Artificial Sequence: Synthetic oligonucleotide
auaaccuagcagcaaaaug

SEQ ID NO: 665061 - RNA, 19 nt, Artificial Sequence
  Description of Artificial Sequence: Synthetic oligonucleotide
augagauaagcaauugccc

SEQ ID NO: 665062 - RNA, 19 nt, Artificial Sequence
  Description of Artificial Sequence: Synthetic oligonucleotide
ucggacauccuauucgccg

SEQ ID NO: 665063 - RNA, 19 nt, Artificial Sequence
  Description of Artificial Sequence: Synthetic oligonucleotide
auuuacuaccaaaauauug

SEQ ID NO: 665064 - RNA, 19 nt, Artificial Sequence
  Description of Artificial Sequence: Synthetic oligonucleotide
uggcaaugcagguugagcc

SEQ ID NO: 665065 - RNA, 19 nt, Artificial Sequence
  Description of Artificial Sequence: Synthetic oligonucleotide
aaguaucucaagaagaaaa

SEQ ID NO: 665066 - RNA, 19 nt, Artificial Sequence
  Description of Artificial Sequence: Synthetic oligonucleotide
gagguuuacauguauuuca

SEQ ID NO: 665067 - RNA, 19 nt, Artificial Sequence
  Description of Artificial Sequence: Synthetic oligonucleotide
uaucaagaacuacuggaca

SEQ ID NO: 665068 - RNA, 19 nt, Artificial Sequence
  Description of Artificial Sequence: Synthetic oligonucleotide
uguccuuacauaugaggag

SEQ ID NO: 665069 - RNA, 19 nt, Artificial Sequence
  Description of Artificial Sequence: Synthetic oligonucleotide
ucuuauugcaccccaguaa

SEQ ID NO: 665070 - RNA, 19 nt, Artificial Sequence
  Description of Artificial Sequence: Synthetic oligonucleotide
uucagggguagauuuaagc

SEQ ID NO: 665071 - RNA, 19 nt, Artificial Sequence
  Description of Artificial Sequence: Synthetic oligonucleotide
cagaaaugagcauuacggg

SEQ ID NO: 665072 - RNA, 19 nt, Artificial Sequence
  Description of Artificial Sequence: Synthetic oligonucleotide
cuagaaauguuucucugac

SEQ ID NO: 665073 - RNA, 19 nt, Artificial Sequence
  Description of Artificial Sequence: Synthetic oligonucleotide
uuaauuaugcgucgacagu

SEQ ID NO: 665074 - RNA, 19 nt, Artificial Sequence
  Description of Artificial Sequence: Synthetic oligonucleotide
guugcaugaaaucuccuug

SEQ ID NO: 665075 - RNA, 19 nt, Artificial Sequence
  Description of Artificial Sequence: Synthetic oligonucleotide
uguaaguauaaaugugaac

SEQ ID NO: 665076 - RNA, 19 nt, Artificial Sequence
  Description of Artificial Sequence: Synthetic oligonucleotide
uuuaccauccaaguugaug

SEQ ID NO: 665077 - RNA, 19 nt, Artificial Sequence
  Description of Artificial Sequence: Synthetic oligonucleotide
uucagcuaaugcaggaugc

SEQ ID NO: 665078 - RNA, 19 nt, Artificial Sequence
  Description of Artificial Sequence: Synthetic oligonucleotide
aagugcacuaccuacugaa

SEQ ID NO: 665079 - RNA, 19 nt, Artificial Sequence
  Description of Artificial Sequence: Synthetic oligonucleotide
auagauccagaccagauuu

SEQ ID NO: 665080 - RNA, 19 nt, Artificial Sequence
  Description of Artificial Sequence: Synthetic oligonucleotide
gaauccacuaggauaaaug

SEQ ID NO: 665081 - RNA, 19 nt, Artificial Sequence
  Description of Artificial Sequence: Synthetic oligonucleotide
acuacuggacacucucacc

SEQ ID NO: 665082 - RNA, 19 nt, Artificial Sequence
  Description of Artificial Sequence: Synthetic oligonucleotide
cauaucauuccaaugguga

SEQ ID NO: 665083 - RNA, 19 nt, Artificial Sequence
  Description of Artificial Sequence: Synthetic oligonucleotide
ucggauaaggcaaaucaaa

SEQ ID NO: 665084 - RNA, 19 nt, Artificial Sequence
  Description of Artificial Sequence: Synthetic oligonucleotide
gaguuuagaccauuaacuc

SEQ ID NO: 665085 - RNA, 19 nt, Artificial Sequence
  Description of Artificial Sequence: Synthetic oligonucleotide
agaguguugaaccucaguu

SEQ ID NO: 665086 - RNA, 19 nt, Artificial Sequence
  Description of Artificial Sequence: Synthetic oligonucleotide
uuaaagcaagcaauucugu

SEQ ID NO: 665087 - RNA, 19 nt, Artificial Sequence
  Description of Artificial Sequence: Synthetic oligonucleotide
ugguuaagagaaucuaaug

SEQ ID NO: 665088 - RNA, 19 nt, Artificial Sequence
  Description of Artificial Sequence: Synthetic oligonucleotide
uuugggaaucgucacagau

SEQ ID NO: 665089 - RNA, 19 nt, Artificial Sequence
  Description of Artificial Sequence: Synthetic oligonucleotide
gugacauacgcacagcagc

SEQ ID NO: 665090 - RNA, 19 nt, Artificial Sequence
  Description of Artificial Sequence: Synthetic oligonucleotide
uuccaauggugacauacgc

SEQ ID NO: 665091 - RNA, 19 nt, Artificial Sequence
  Description of Artificial Sequence: Synthetic oligonucleotide
uuaugcgucgacaguuggg

SEQ ID NO: 665092 - RNA, 19 nt, Artificial Sequence
  Description of Artificial Sequence: Synthetic oligonucleotide
aguacacucaaucaauuuu

SEQ ID NO: 665093 - RNA, 19 nt, Artificial Sequence
  Description of Artificial Sequence: Synthetic oligonucleotide
guaacuauaaucuuagguu

SEQ ID NO: 665094 - RNA, 19 nt, Artificial Sequence
  Description of Artificial Sequence: Synthetic oligonucleotide
uaaggcaaaucaaaccuau

SEQ ID NO: 665095 - RNA, 19 nt, Artificial Sequence
  Description of Artificial Sequence: Synthetic oligonucleotide
cauguauuucacuccaaac

SEQ ID NO: 665096 - RNA, 19 nt, Artificial Sequence
  Description of Artificial Sequence: Synthetic oligonucleotide
auauaauguacuguaguga

SEQ ID NO: 665097 - RNA, 19 nt, Artificial Sequence
  Description of Artificial Sequence: Synthetic oligonucleotide
gauuggcguagcuucauug

SEQ ID NO: 665098 - RNA, 19 nt, Artificial Sequence
  Description of Artificial Sequence: Synthetic oligonucleotide
caagguuaauuaugcgucg

SEQ ID NO: 665099 - RNA, 19 nt, Artificial Sequence
  Description of Artificial Sequence: Synthetic oligonucleotide
ugaauaagcugagucauuc

SEQ ID NO: 665100 - RNA, 19 nt, Artificial Sequence
  Description of Artificial Sequence: Synthetic oligonucleotide
gucucggacauccuauucg

SEQ ID NO: 665101 - RNA, 19 nt, Artificial Sequence
  Description of Artificial Sequence: Synthetic oligonucleotide
uaguguauuuucaaagaua

SEQ ID NO: 665102 - RNA, 19 nt, Artificial Sequence
  Description of Artificial Sequence: Synthetic oligonucleotide
cauuccaauggugacauac

SEQ ID NO: 665103 - RNA, 19 nt, Artificial Sequence
  Description of Artificial Sequence: Synthetic oligonucleotide
uggcaauggcuguauacgg

SEQ ID NO: 665104 - RNA, 19 nt, Artificial Sequence
  Description of Artificial Sequence: Synthetic oligonucleotide
uacaaagcaggauggaauc

SEQ ID NO: 665105 - RNA, 19 nt, Artificial Sequence
  Description of Artificial Sequence: Synthetic oligonucleotide
ugaaccuauuguagaaaca

SEQ ID NO: 665106 - RNA, 19 nt, Artificial Sequence
  Description of Artificial Sequence: Synthetic oligonucleotide
guuuagaccauuaacucuc

SEQ ID NO: 665107 - RNA, 19 nt, Artificial Sequence
  Description of Artificial Sequence: Synthetic oligonucleotide
auuaugcgucgacaguugg

SEQ ID NO: 665108 - RNA, 19 nt, Artificial Sequence
  Description of Artificial Sequence: Synthetic oligonucleotide
agguuaauuaugcgucgac

SEQ ID NO: 665109 - RNA, 19 nt, Artificial Sequence
  Description of Artificial Sequence: Synthetic oligonucleotide
uuuaagcaaaacuguguuc

SEQ ID NO: 665110 - RNA, 19 nt, Artificial Sequence
  Description of Artificial Sequence: Synthetic oligonucleotide
auuccuccgaaacugaaaa

SEQ ID NO: 665111 - RNA, 19 nt, Artificial Sequence
  Description of Artificial Sequence: Synthetic oligonucleotide
gagaugaugaaguauuaua

SEQ ID NO: 665112 - RNA, 19 nt, Artificial Sequence
  Description of Artificial Sequence: Synthetic oligonucleotide
aaugguuaagagaaucuaa

SEQ ID NO: 665113 - RNA, 19 nt, Artificial Sequence
  Description of Artificial Sequence: Synthetic oligonucleotide
aauaugucuuggaugagau

SEQ ID NO: 665114 - RNA, 19 nt, Artificial Sequence
  Description of Artificial Sequence: Synthetic oligonucleotide
uauuaaucaggaacauaaa

SEQ ID NO: 665115 - RNA, 19 nt, Artificial Sequence
  Description of Artificial Sequence: Synthetic oligonucleotide
aaaucaaaccuaugagaua

SEQ ID NO: 665116 - RNA, 19 nt, Artificial Sequence
  Description of Artificial Sequence: Synthetic oligonucleotide
aagacacguagguugcaug

SEQ ID NO: 665117 - RNA, 19 nt, Artificial Sequence
  Description of Artificial Sequence: Synthetic oligonucleotide
uccaauggugacauacgca

SEQ ID NO: 665118 - RNA, 19 nt, Artificial Sequence
  Description of Artificial Sequence: Synthetic oligonucleotide
guuaguccaacuccaauga

SEQ ID NO: 665119 - RNA, 19 nt, Artificial Sequence
  Description of Artificial Sequence: Synthetic oligonucleotide
ucuacggaaagggagugca

SEQ ID NO: 665120 - RNA, 19 nt, Artificial Sequence
  Description of Artificial Sequence: Synthetic oligonucleotide
gaacuugcauauaauguac

SEQ ID NO: 665121 - RNA, 19 nt, Artificial Sequence
  Description of Artificial Sequence: Synthetic oligonucleotide
uuugauuggcguagcuuca

SEQ ID NO: 665122 - RNA, 19 nt, Artificial Sequence
  Description of Artificial Sequence: Synthetic oligonucleotide
aaaugguuaagagaaucua

SEQ ID NO: 665123 - RNA, 19 nt, Artificial Sequence
  Description of Artificial Sequence: Synthetic oligonucleotide
cuggcaauggcuguauacg

SEQ ID NO: 665124 - RNA, 19 nt, Artificial Sequence
  Description of Artificial Sequence: Synthetic oligonucleotide
uauacaaagcaggauggaa

SEQ ID NO: 665125 - RNA, 19 nt, Artificial Sequence
  Description of Artificial Sequence: Synthetic oligonucleotide
uuguccuuuggaaucacau

SEQ ID NO: 665126 - RNA, 19 nt, Artificial Sequence
  Description of Artificial Sequence: Synthetic oligonucleotide
augccauagauucucuuca

SEQ ID NO: 665127 - RNA, 19 nt, Artificial Sequence
  Description of Artificial Sequence: Synthetic oligonucleotide
uuaggaaaccaugaagauc

SEQ ID NO: 665128 - RNA, 19 nt, Artificial Sequence
  Description of Artificial Sequence: Synthetic oligonucleotide
aguuuuaggaaaccaugaa

SEQ ID NO: 665129 - RNA, 19 nt, Artificial Sequence
  Description of Artificial Sequence: Synthetic oligonucleotide
aagcgaaguuuuaggaaac

SEQ ID NO: 665130 - RNA, 19 nt, Artificial Sequence
  Description of Artificial Sequence: Synthetic oligonucleotide
caagcauauaauaucuaga

SEQ ID NO: 665131 - RNA, 19 nt, Artificial Sequence
  Description of Artificial Sequence: Synthetic oligonucleotide
gugaaccuauuguagaaac

SEQ ID NO: 665132 - RNA, 19 nt, Artificial Sequence
  Description of Artificial Sequence: Synthetic oligonucleotide
uaacugacucuuauugcac

SEQ ID NO: 665133 - RNA, 19 nt, Artificial Sequence
  Description of Artificial Sequence: Synthetic oligonucleotide
aucgucacagaugagcaag

SEQ ID NO: 665134 - RNA, 19 nt, Artificial Sequence
  Description of Artificial Sequence: Synthetic oligonucleotide
agagaaucuaaugcuaaca

SEQ ID NO: 665135 - RNA, 19 nt, Artificial Sequence
  Description of Artificial Sequence: Synthetic oligonucleotide
uaauuaugcgucgacaguu

SEQ ID NO: 665136 - RNA, 19 nt, Artificial Sequence
  Description of Artificial Sequence: Synthetic oligonucleotide
acaaaggcgcacuuuauuu

SEQ ID NO: 665137 - RNA, 19 nt, Artificial Sequence
  Description of Artificial Sequence: Synthetic oligonucleotide
uaucauuccaauggugaca

SEQ ID NO: 665138 - RNA, 19 nt, Artificial Sequence
  Description of Artificial Sequence: Synthetic oligonucleotide
aagacucacaaagucuuga

SEQ ID NO: 665139 - RNA, 19 nt, Artificial Sequence
  Description of Artificial Sequence: Synthetic oligonucleotide
aucacgggaaccccacugg

SEQ ID NO: 665140 - RNA, 19 nt, Artificial Sequence
  Description of Artificial Sequence: Synthetic oligonucleotide
acauacgcacagcagcguc

SEQ ID NO: 665141 - RNA, 19 nt, Artificial Sequence
  Description of Artificial Sequence: Synthetic oligonucleotide
acguagguugcaugaaauc

SEQ ID NO: 665142 - RNA, 19 nt, Artificial Sequence
  Description of Artificial Sequence: Synthetic oligonucleotide
caaguaauggaauaacugu

SEQ ID NO: 665143 - RNA, 19 nt, Artificial Sequence
  Description of Artificial Sequence: Synthetic oligonucleotide
aacuguguucaggauaacu

SEQ ID NO: 665144 - RNA, 19 nt, Artificial Sequence
  Description of Artificial Sequence: Synthetic oligonucleotide
ccaaguaugauaaccuagc

SEQ ID NO: 665145 - RNA, 19 nt, Artificial Sequence
  Description of Artificial Sequence: Synthetic oligonucleotide
uugaugagugauuggcaca

SEQ ID NO: 665146 - RNA, 19 nt, Artificial Sequence
  Description of Artificial Sequence: Synthetic oligonucleotide
agcauauaauaucuagaaa

SEQ ID NO: 665147 - RNA, 19 nt, Artificial Sequence
  Description of Artificial Sequence: Synthetic oligonucleotide
ucgugaauccuaagcgaag

SEQ ID NO: 665148 - RNA, 19 nt, Artificial Sequence
  Description of Artificial Sequence: Synthetic oligonucleotide
aauuaugcgucgacaguug

SEQ ID NO: 665149 - RNA, 19 nt, Artificial Sequence
  Description of Artificial Sequence: Synthetic oligonucleotide
uaugcgucgacaguugggu

SEQ ID NO: 665150 - RNA, 19 nt, Artificial Sequence
  Description of Artificial Sequence: Synthetic oligonucleotide
uaaagcaagcaauucuguu

SEQ ID NO: 665151 - RNA, 19 nt, Artificial Sequence
  Description of Artificial Sequence: Synthetic oligonucleotide
uuggcguagcuucauugca

SEQ ID NO: 665152 - RNA, 19 nt, Artificial Sequence
  Description of Artificial Sequence: Synthetic oligonucleotide
ucgaauaauuccuccgaaa

SEQ ID NO: 665153 - RNA, 19 nt, Artificial Sequence
  Description of Artificial Sequence: Synthetic oligonucleotide
aaacccggcagugcaagag

SEQ ID NO: 665154 - RNA, 19 nt, Artificial Sequence
  Description of Artificial Sequence: Synthetic oligonucleotide
auggaauccacuaggauaa

SEQ ID NO: 665155 - RNA, 19 nt, Artificial Sequence
  Description of Artificial Sequence: Synthetic oligonucleotide
agacacguagguugcauga

SEQ ID NO: 665156 - RNA, 19 nt, Artificial Sequence
  Description of Artificial Sequence: Synthetic oligonucleotide
ggaaucgucacagaugagc

SEQ ID NO: 665157 - RNA, 19 nt, Artificial Sequence
  Description of Artificial Sequence: Synthetic oligonucleotide
caacauauccaacugugga

SEQ ID NO: 665158 - RNA, 19 nt, Artificial Sequence
  Description of Artificial Sequence: Synthetic oligonucleotide
cuuagguuaaaauuacagu

SEQ ID NO: 665159 - RNA, 19 nt, Artificial Sequence
  Description of Artificial Sequence: Synthetic oligonucleotide
acaauuugaaagaguuuag

SEQ ID NO: 665160 - RNA, 19 nt, Artificial Sequence
  Description of Artificial Sequence: Synthetic oligonucleotide
gaaucgucacagaugagca

SEQ ID NO: 665161 - RNA, 19 nt, Artificial Sequence
  Description of Artificial Sequence: Synthetic oligonucleotide
agcauuacggggccaaggu

SEQ ID NO: 665162 - RNA, 19 nt, Artificial Sequence
  Description of Artificial Sequence: Synthetic oligonucleotide
uucacccuagguauuuuaa

SEQ ID NO: 665163 - RNA, 19 nt, Artificial Sequence
  Description of Artificial Sequence: Synthetic oligonucleotide
uauucgccgagaugugucc

SEQ ID NO: 665164 - RNA, 19 nt, Artificial Sequence
  Description of Artificial Sequence: Synthetic oligonucleotide
agcgaaguuuuaggaaacc

SEQ ID NO: 665165 - RNA, 19 nt, Artificial Sequence
  Description of Artificial Sequence: Synthetic oligonucleotide
ugcaaacugugcauuuaac

SEQ ID NO: 665166 - RNA, 19 nt, Artificial Sequence
  Description of Artificial Sequence: Synthetic oligonucleotide
agacacuuauccaacauau

SEQ ID NO: 665167 - RNA, 19 nt, Artificial Sequence
  Description of Artificial Sequence: Synthetic oligonucleotide
ugcgucgacaguugggucu

SEQ ID NO: 665168 - RNA, 19 nt, Artificial Sequence
  Description of Artificial Sequence: Synthetic oligonucleotide
ccaagguuaauuaugcguc

SEQ ID NO: 665169 - RNA, 19 nt, Artificial Sequence
  Description of Artificial Sequence: Synthetic oligonucleotide
aggaauguguuuccgcagu

SEQ ID NO: 665170 - RNA, 19 nt, Artificial Sequence
  Description of Artificial Sequence: Synthetic oligonucleotide
gcaaguaauggaauaacug

SEQ ID NO: 665171 - RNA, 19 nt, Artificial Sequence
  Description of Artificial Sequence: Synthetic oligonucleotide
ugcaaccccguguaaauau

SEQ ID NO: 665172 - RNA, 19 nt, Artificial Sequence
  Description of Artificial Sequence: Synthetic oligonucleotide
uucaggaaagacucacaaa

SEQ ID NO: 665173 - RNA, 19 nt, Artificial Sequence
  Description of Artificial Sequence: Synthetic oligonucleotide
aacuauaaucuuagguuaa

SEQ ID NO: 665174 - RNA, 19 nt, Artificial Sequence
  Description of Artificial Sequence: Synthetic oligonucleotide
auauaauccugagcuacug

SEQ ID NO: 665175 - RNA, 19 nt, Artificial Sequence
  Description of Artificial Sequence: Synthetic oligonucleotide
gauuuaagcaaaacugugu

SEQ ID NO: 665176 - RNA, 19 nt, Artificial Sequence
  Description of Artificial Sequence: Synthetic oligonucleotide
uccuuacauaugaggagac

SEQ ID NO: 665177 - RNA, 19 nt, Artificial Sequence
  Description of Artificial Sequence: Synthetic oligonucleotide
gauaaaugaugugaugugu

SEQ ID NO: 665178 - RNA, 19 nt, Artificial Sequence
  Description of Artificial Sequence: Synthetic oligonucleotide
aagguuaauuaugcgucga

SEQ ID NO: 665179 - RNA, 19 nt, Artificial Sequence
  Description of Artificial Sequence: Synthetic oligonucleotide
cagaugagcaaguaaugga

SEQ ID NO: 665180 - RNA, 19 nt, Artificial Sequence
  Description of Artificial Sequence: Synthetic oligonucleotide
aacuugcauauaauguacu

SEQ ID NO: 665181 - RNA, 19 nt, Artificial Sequence
  Description of Artificial Sequence: Synthetic oligonucleotide
uaauuccuccgaaacugaa

SEQ ID NO: 665182 - RNA, 19 nt, Artificial Sequence
  Description of Artificial Sequence: Synthetic oligonucleotide
accccguguaaauaugucu

SEQ ID NO: 665183 - RNA, 19 nt, Artificial Sequence
  Description of Artificial Sequence: Synthetic oligonucleotide
cuauucgccgagauguguc

SEQ ID NO: 665184 - RNA, 19 nt, Artificial Sequence
  Description of Artificial Sequence: Synthetic oligonucleotide
auacaaagcaggauggaau

SEQ ID NO: 665185 - RNA, 19 nt, Artificial Sequence
  Description of Artificial Sequence: Synthetic oligonucleotide
acccuagguauuuuaauuu

SEQ ID NO: 665186 - RNA, 19 nt, Artificial Sequence
  Description of Artificial Sequence: Synthetic oligonucleotide
uaugauaaccuagcagcaa

SEQ ID NO: 665187 - RNA, 19 nt, Artificial Sequence
  Description of Artificial Sequence: Synthetic oligonucleotide
acacgcgacaguugaucac

SEQ ID NO: 665188 - RNA, 19 nt, Artificial Sequence
  Description of Artificial Sequence: Synthetic oligonucleotide
cacgcgacaguugaucacg

SEQ ID NO: 665189 - RNA, 19 nt, Artificial Sequence
  Description of Artificial Sequence: Synthetic oligonucleotide
aaucgucacagaugagcaa

SEQ ID NO: 665190 - RNA, 19 nt, Artificial Sequence
  Description of Artificial Sequence: Synthetic oligonucleotide
auuagacauaacaugugau

SEQ ID NO: 665191 - RNA, 19 nt, Artificial Sequence
  Description of Artificial Sequence: Synthetic oligonucleotide
uguauacggaggugggagu

SEQ ID NO: 665192 - RNA, 19 nt, Artificial Sequence
  Description of Artificial Sequence: Synthetic oligonucleotide
cuaagcgaaguuuuaggaa

SEQ ID NO: 665193 - RNA, 19 nt, Artificial Sequence
  Description of Artificial Sequence: Synthetic oligonucleotide
agcaaguaauggaauaacu

SEQ ID NO: 665194 - RNA, 19 nt, Artificial Sequence
  Description of Artificial Sequence: Synthetic oligonucleotide
uaaauaugucuuggaugag

SEQ ID NO: 665195 - RNA, 19 nt, Artificial Sequence
  Description of Artificial Sequence: Synthetic oligonucleotide
uacggaaagggagugcaac

SEQ ID NO: 665196 - RNA, 19 nt, Artificial Sequence
  Description of Artificial Sequence: Synthetic oligonucleotide
cuguguucaggauaacuga

SEQ ID NO: 665197 - RNA, 19 nt, Artificial Sequence
  Description of Artificial Sequence: Synthetic oligonucleotide
acauacuaauuuacucagg

SEQ ID NO: 665198 - RNA, 19 nt, Artificial Sequence
  Description of Artificial Sequence: Synthetic oligonucleotide
ugagaugaugaaguauuau

SEQ ID NO: 665199 - RNA, 19 nt, Artificial Sequence
  Description of Artificial Sequence: Synthetic oligonucleotide
gcucggauaaggcaaauca

SEQ ID NO: 665200 - RNA, 19 nt, Artificial Sequence
  Description of Artificial Sequence: Synthetic oligonucleotide
gcaauggcuguauacggag

SEQ ID NO: 665201 - RNA, 19 nt, Artificial Sequence
  Description of Artificial Sequence: Synthetic oligonucleotide
gagcaaguaauggaauaac

SEQ ID NO: 665202 - RNA, 19 nt, Artificial Sequence
  Description of Artificial Sequence: Synthetic oligonucleotide
aaccccguguaaauauguc

SEQ ID NO: 665203 - RNA, 19 nt, Artificial Sequence
  Description of Artificial Sequence: Synthetic oligonucleotide
ugcauauugcuuagauuuu

SEQ ID NO: 665204 - RNA, 19 nt, Artificial Sequence
  Description of Artificial Sequence: Synthetic oligonucleotide
uuagaccauuaacucucga

SEQ ID NO: 665205 - RNA, 19 nt, Artificial Sequence
  Description of Artificial Sequence: Synthetic oligonucleotide
gcugaugaaguuuaccauc

SEQ ID NO: 665206 - RNA, 19 nt, Artificial Sequence
  Description of Artificial Sequence: Synthetic oligonucleotide
uucgcgguaaguacauuuu

SEQ ID NO: 665207 - RNA, 19 nt, Artificial Sequence
  Description of Artificial Sequence: Synthetic oligonucleotide
aguuuaccauccaaguuga

SEQ ID NO: 665208 - RNA, 19 nt, Artificial Sequence
  Description of Artificial Sequence: Synthetic oligonucleotide
cauuacggggccaagguua

SEQ ID NO: 665209 - RNA, 19 nt, Artificial Sequence
  Description of Artificial Sequence: Synthetic oligonucleotide
aauuccuccgaaacugaaa

SEQ ID NO: 665210 - RNA, 19 nt, Artificial Sequence
  Description of Artificial Sequence: Synthetic oligonucleotide
gcccaagacacguagguug

SEQ ID NO: 665211 - RNA, 19 nt, Artificial Sequence
  Description of Artificial Sequence: Synthetic oligonucleotide
gagauguguccuuacauau

SEQ ID NO: 665212 - RNA, 19 nt, Artificial Sequence
  Description of Artificial Sequence: Synthetic oligonucleotide
guagguugcaugaaaucuc

SEQ ID NO: 665213 - RNA, 19 nt, Artificial Sequence
  Description of Artificial Sequence: Synthetic oligonucleotide
aguaacaagcucggauaag

SEQ ID NO: 665214 - RNA, 19 nt, Artificial Sequence
  Description of Artificial Sequence: Synthetic oligonucleotide
aaaacccggcagugcaaga

SEQ ID NO: 665215 - RNA, 19 nt, Artificial Sequence
  Description of Artificial Sequence: Synthetic oligonucleotide
ggcaaaacauucuguaauc

SEQ ID NO: 665216 - RNA, 19 nt, Artificial Sequence
  Description of Artificial Sequence: Synthetic oligonucleotide
auaccuggucagcugagaa

SEQ ID NO: 665217 - RNA, 19 nt, Artificial Sequence
  Description of Artificial Sequence: Synthetic oligonucleotide
ugggucucggacauccuau

SEQ ID NO: 665218 - RNA, 19 nt, Artificial Sequence
  Description of Artificial Sequence: Synthetic oligonucleotide
auguaaguauaaaugugaa

SEQ ID NO: 665219 - RNA, 19 nt, Artificial Sequence
  Description of Artificial Sequence: Synthetic oligonucleotide
gauaagcaauugcccaaga

SEQ ID NO: 665220 - RNA, 19 nt, Artificial Sequence
  Description of Artificial Sequence: Synthetic oligonucleotide
uguugaaccucaguuccau

SEQ ID NO: 665221 - RNA, 19 nt, Artificial Sequence
  Description of Artificial Sequence: Synthetic oligonucleotide
aaggcaaaucaaaccuaug

SEQ ID NO: 665222 - RNA, 19 nt, Artificial Sequence
  Description of Artificial Sequence: Synthetic oligonucleotide
agacucacaaagucuugaa

SEQ ID NO: 665223 - RNA, 19 nt, Artificial Sequence
  Description of Artificial Sequence: Synthetic oligonucleotide
guccuuacauaugaggaga

SEQ ID NO: 665224 - RNA, 19 nt, Artificial Sequence
  Description of Artificial Sequence: Synthetic oligonucleotide
ugccauagauucucuucac

SEQ ID NO: 665225 - RNA, 19 nt, Artificial Sequence
  Description of Artificial Sequence: Synthetic oligonucleotide
guaugauaaccuagcagca

SEQ ID NO: 665226 - RNA, 19 nt, Artificial Sequence
  Description of Artificial Sequence: Synthetic oligonucleotide
aggauaacugacucuuauu

SEQ ID NO: 665227 - RNA, 19 nt, Artificial Sequence
  Description of Artificial Sequence: Synthetic oligonucleotide
uggcugcacaaguaucuca

SEQ ID NO: 665228 - RNA, 19 nt, Artificial Sequence
  Description of Artificial Sequence: Synthetic oligonucleotide
uuacucaggucaugucacu

SEQ ID NO: 665229 - RNA, 19 nt, Artificial Sequence
  Description of Artificial Sequence: Synthetic oligonucleotide
cuguagugagcaucuguuc

SEQ ID NO: 665230 - RNA, 19 nt, Artificial Sequence
  Description of Artificial Sequence: Synthetic oligonucleotide
uugccagaguguugaaccu

SEQ ID NO: 665231 - RNA, 19 nt, Artificial Sequence
  Description of Artificial Sequence: Synthetic oligonucleotide
agcaauugcccaagacacg

SEQ ID NO: 665232 - RNA, 19 nt, Artificial Sequence
  Description of Artificial Sequence: Synthetic oligonucleotide
gaaguuuaccauccaaguu

SEQ ID NO: 665233 - RNA, 19 nt, Artificial Sequence
  Description of Artificial Sequence: Synthetic oligonucleotide
gaugagugauuggcacacg

SEQ ID NO: 665234 - RNA, 19 nt, Artificial Sequence
  Description of Artificial Sequence: Synthetic oligonucleotide
ucacgggaaccccacuggu

SEQ ID NO: 665235 - RNA, 19 nt, Artificial Sequence
  Description of Artificial Sequence: Synthetic oligonucleotide
acauccuauucgccgagau

SEQ ID NO: 665236 - RNA, 19 nt, Artificial Sequence
  Description of Artificial Sequence: Synthetic oligonucleotide
ugaaagaguuuagaccauu

SEQ ID NO: 665237 - RNA, 19 nt, Artificial Sequence
  Description of Artificial Sequence: Synthetic oligonucleotide
gaagugcacuaccuacuga

SEQ ID NO: 665238 - RNA, 19 nt, Artificial Sequence
  Description of Artificial Sequence: Synthetic oligonucleotide
uaccuggucagcugagaaa

SEQ ID NO: 665239 - RNA, 19 nt, Artificial Sequence
  Description of Artificial Sequence: Synthetic oligonucleotide
aagaacuacuggacacucu

SEQ ID NO: 665240 - RNA, 19 nt, Artificial Sequence
  Description of Artificial Sequence: Synthetic oligonucleotide
ggggaagugcacuaccuac

SEQ ID NO: 665241 - RNA, 19 nt, Artificial Sequence
  Description of Artificial Sequence: Synthetic oligonucleotide
gaaagaguuuagaccauua

SEQ ID NO: 665242 - RNA, 19 nt, Artificial Sequence
  Description of Artificial Sequence: Synthetic oligonucleotide
caagaacuacuggacacuc

SEQ ID NO: 665243 - RNA, 19 nt, Artificial Sequence
  Description of Artificial Sequence: Synthetic oligonucleotide
acauaacaugugaugacaa

SEQ ID NO: 665244 - RNA, 19 nt, Artificial Sequence
  Description of Artificial Sequence: Synthetic oligonucleotide
guguaaauaugucuuggau

SEQ ID NO: 665245 - RNA, 19 nt, Artificial Sequence
  Description of Artificial Sequence: Synthetic oligonucleotide
auaauuccuccgaaacuga

SEQ ID NO: 665246 - RNA, 19 nt, Artificial Sequence
  Description of Artificial Sequence: Synthetic oligonucleotide
cucggauaaggcaaaucaa

SEQ ID NO: 665247 - RNA, 19 nt, Artificial Sequence
  Description of Artificial Sequence: Synthetic oligonucleotide
uucccggacuggcaauggc

SEQ ID NO: 665248 - RNA, 19 nt, Artificial Sequence
  Description of Artificial Sequence: Synthetic oligonucleotide
cucggacauccuauucgcc

SEQ ID NO: 665249 - RNA, 19 nt, Artificial Sequence
  Description of Artificial Sequence: Synthetic oligonucleotide
agcucggauaaggcaaauc

SEQ ID NO: 665250 - RNA, 19 nt, Artificial Sequence
  Description of Artificial Sequence: Synthetic oligonucleotide
acauaugaggagacaauua

SEQ ID NO: 665251 - RNA, 19 nt, Artificial Sequence
  Description of Artificial Sequence: Synthetic oligonucleotide
ccauggucuacggaaaggg

SEQ ID NO: 665252 - RNA, 19 nt, Artificial Sequence
  Description of Artificial Sequence: Synthetic oligonucleotide
aauccuaagcgaaguuuua

SEQ ID NO: 665253 - RNA, 19 nt, Artificial Sequence
  Description of Artificial Sequence: Synthetic oligonucleotide
auaaggcaaaucaaaccua

SEQ ID NO: 665254 - RNA, 19 nt, Artificial Sequence
  Description of Artificial Sequence: Synthetic oligonucleotide
gaaccccacugguucccgg

SEQ ID NO: 665255 - RNA, 19 nt, Artificial Sequence
  Description of Artificial Sequence: Synthetic oligonucleotide
agugcacuaccuacugaag

SEQ ID NO: 665256 - RNA, 19 nt, Artificial Sequence
  Description of Artificial Sequence: Synthetic oligonucleotide
augcgucgacaguuggguc

SEQ ID NO: 665257 - RNA, 19 nt, Artificial Sequence
  Description of Artificial Sequence: Synthetic oligonucleotide
aacuucgcgguaaguacau

SEQ ID NO: 665258 - RNA, 19 nt, Artificial Sequence
  Description of Artificial Sequence: Synthetic oligonucleotide
gguuaauuaugcgucgaca

SEQ ID NO: 665259 - RNA, 19 nt, Artificial Sequence
  Description of Artificial Sequence: Synthetic oligonucleotide
gcaagagcugccuucguga

SEQ ID NO: 665260 - RNA, 19 nt, Artificial Sequence
  Description of Artificial Sequence: Synthetic oligonucleotide
ggugacauacgcacagcag

SEQ ID NO: 665261 - RNA, 19 nt, Artificial Sequence
  Description of Artificial Sequence: Synthetic oligonucleotide
aaccucaguuccauccaca

SEQ ID NO: 665262 - RNA, 19 nt, Artificial Sequence
  Description of Artificial Sequence: Synthetic oligonucleotide
accccaguaacaagcucgg

SEQ ID NO: 665263 - RNA, 19 nt, Artificial Sequence
  Description of Artificial Sequence: Synthetic oligonucleotide
caauuacaaggacaucuaa

SEQ ID NO: 665264 - RNA, 19 nt, Artificial Sequence
  Description of Artificial Sequence: Synthetic oligonucleotide
accccacugguucccggac

SEQ ID NO: 665265 - RNA, 19 nt, Artificial Sequence
  Description of Artificial Sequence: Synthetic oligonucleotide
ccuaagcgaaguuuuagga

SEQ ID NO: 665266 - RNA, 19 nt, Artificial Sequence
  Description of Artificial Sequence: Synthetic oligonucleotide
gaauccuaagcgaaguuuu

SEQ ID NO: 665267 - RNA, 19 nt, Artificial Sequence
  Description of Artificial Sequence: Synthetic oligonucleotide
aucuuagguuaaaauuaca

SEQ ID NO: 665268 - RNA, 19 nt, Artificial Sequence
  Description of Artificial Sequence: Synthetic oligonucleotide
aaugagcauuacggggcca

SEQ ID NO: 665269 - RNA, 19 nt, Artificial Sequence
  Description of Artificial Sequence: Synthetic oligonucleotide
gggccaagguuaauuaugc

SEQ ID NO: 665270 - RNA, 19 nt, Artificial Sequence
  Description of Artificial Sequence: Synthetic oligonucleotide
ggccaagguuaauuaugcg

SEQ ID NO: 665271 - RNA, 19 nt, Artificial Sequence
  Description of Artificial Sequence: Synthetic oligonucleotide
auaagcugagucauucaua

SEQ ID NO: 665272 - RNA, 19 nt, Artificial Sequence
  Description of Artificial Sequence: Synthetic oligonucleotide
ggaauguguuuccgcagug

SEQ ID NO: 665273 - RNA, 19 nt, Artificial Sequence
  Description of Artificial Sequence: Synthetic oligonucleotide
cauauaauccugagcuacu

SEQ ID NO: 665274 - RNA, 19 nt, Artificial Sequence
  Description of Artificial Sequence: Synthetic oligonucleotide
ugauuggcguagcuucauu

SEQ ID NO: 665275 - RNA, 19 nt, Artificial Sequence
  Description of Artificial Sequence: Synthetic oligonucleotide
gccaagguuaauuaugcgu

SEQ ID NO: 665276 - RNA, 19 nt, Artificial Sequence
  Description of Artificial Sequence: Synthetic oligonucleotide
cacacgcgacaguugauca

SEQ ID NO: 665277 - RNA, 19 nt, Artificial Sequence
  Description of Artificial Sequence: Synthetic oligonucleotide
agacugauaauuagacaua

SEQ ID NO: 665278 - RNA, 19 nt, Artificial Sequence
  Description of Artificial Sequence: Synthetic oligonucleotide
cugugcauuuaaccacaug

SEQ ID NO: 665279 - RNA, 19 nt, Artificial Sequence
  Description of Artificial Sequence: Synthetic oligonucleotide
uauacggaggugggaguuc

SEQ ID NO: 665280 - RNA, 19 nt, Artificial Sequence
  Description of Artificial Sequence: Synthetic oligonucleotide
cucgaauaauuccuccgaa

SEQ ID NO: 665281 - RNA, 19 nt, Artificial Sequence
  Description of Artificial Sequence: Synthetic oligonucleotide
uugagccgguuguucuuca

SEQ ID NO: 665282 - RNA, 19 nt, Artificial Sequence
  Description of Artificial Sequence: Synthetic oligonucleotide
cauuaacucucgaauaauu

SEQ ID NO: 665283 - RNA, 19 nt, Artificial Sequence
  Description of Artificial Sequence: Synthetic oligonucleotide
gcgacaguugaucacggga

SEQ ID NO: 665284 - RNA, 19 nt, Artificial Sequence
  Description of Artificial Sequence: Synthetic oligonucleotide
auacggaggugggaguuca

SEQ ID NO: 665285 - RNA, 19 nt, Artificial Sequence
  Description of Artificial Sequence: Synthetic oligonucleotide
ccguguaaauaugucuugg

SEQ ID NO: 665286 - RNA, 19 nt, Artificial Sequence
  Description of Artificial Sequence: Synthetic oligonucleotide
gauaaccuagcagcaaaau

SEQ ID NO: 665287 - RNA, 19 nt, Artificial Sequence
  Description of Artificial Sequence: Synthetic oligonucleotide
cauccaaguugaugaguga

SEQ ID NO: 665288 - RNA, 19 nt, Artificial Sequence
  Description of Artificial Sequence: Synthetic oligonucleotide
ugccuucgugaauccuaag

SEQ ID NO: 665289 - RNA, 19 nt, Artificial Sequence
  Description of Artificial Sequence: Synthetic oligonucleotide
ggcuguauacggagguggg

SEQ ID NO: 665290 - RNA, 19 nt, Artificial Sequence
  Description of Artificial Sequence: Synthetic oligonucleotide
gugcauuuaaccacaugcu

SEQ ID NO: 665291 - RNA, 19 nt, Artificial Sequence
  Description of Artificial Sequence: Synthetic oligonucleotide
guucccggacuggcaaugg

SEQ ID NO: 665292 - RNA, 19 nt, Artificial Sequence
  Description of Artificial Sequence: Synthetic oligonucleotide
uccugagcuacugcauuua

SEQ ID NO: 665293 - RNA, 19 nt, Artificial Sequence
  Description of Artificial Sequence: Synthetic oligonucleotide
gucgacaguugggucucgg

SEQ ID NO: 665294 - RNA, 19 nt, Artificial Sequence
  Description of Artificial Sequence: Synthetic oligonucleotide
gucuacggaaagggagugc

SEQ ID NO: 665295 - RNA, 19 nt, Artificial Sequence
  Description of Artificial Sequence: Synthetic oligonucleotide
auuacggggccaagguuaa

SEQ ID NO: 665296 - RNA, 19 nt, Artificial Sequence
  Description of Artificial Sequence: Synthetic oligonucleotide
auguucacccuagguauuu

SEQ ID NO: 665297 - RNA, 19 nt, Artificial Sequence
  Description of Artificial Sequence: Synthetic oligonucleotide
uucgccgagauguguccuu

SEQ ID NO: 665298 - RNA, 19 nt, Artificial Sequence
  Description of Artificial Sequence: Synthetic oligonucleotide
cccguguaaauaugucuug

SEQ ID NO: 665299 - RNA, 19 nt, Artificial Sequence
  Description of Artificial Sequence: Synthetic oligonucleotide
cuucgcgguaaguacauuu

SEQ ID NO: 665300 - RNA, 19 nt, Artificial Sequence
  Description of Artificial Sequence: Synthetic oligonucleotide
cacccuagguauuuuaauu

SEQ ID NO: 665301 - RNA, 19 nt, Artificial Sequence
  Description of Artificial Sequence: Synthetic oligonucleotide
aaugcagguugagccgguu

SEQ ID NO: 665302 - RNA, 19 nt, Artificial Sequence
  Description of Artificial Sequence: Synthetic oligonucleotide
gauuggcaaugcagguuga

SEQ ID NO: 665303 - RNA, 19 nt, Artificial Sequence
  Description of Artificial Sequence: Synthetic oligonucleotide
cugccuucgugaauccuaa

SEQ ID NO: 665304 - RNA, 19 nt, Artificial Sequence
  Description of Artificial Sequence: Synthetic oligonucleotide
caggauaacugacucuuau

SEQ ID NO: 665305 - RNA, 19 nt, Artificial Sequence
  Description of Artificial Sequence: Synthetic oligonucleotide
auucgccgagauguguccu

SEQ ID NO: 665306 - RNA, 19 nt, Artificial Sequence
  Description of Artificial Sequence: Synthetic oligonucleotide
gcgaaguuuuaggaaacca

SEQ ID NO: 665307 - RNA, 19 nt, Artificial Sequence
  Description of Artificial Sequence: Synthetic oligonucleotide
cacuaccuacugaagagau

SEQ ID NO: 665308 - RNA, 19 nt, Artificial Sequence
  Description of Artificial Sequence: Synthetic oligonucleotide
ggucuacggaaagggagug

SEQ ID NO: 665309 - RNA, 19 nt, Artificial Sequence
  Description of Artificial Sequence: Synthetic oligonucleotide
acgcgacaguugaucacgg

SEQ ID NO: 665310 - RNA, 19 nt, Artificial Sequence
  Description of Artificial Sequence: Synthetic oligonucleotide
cacguagguugcaugaaau

SEQ ID NO: 665311 - RNA, 19 nt, Artificial Sequence
  Description of Artificial Sequence: Synthetic oligonucleotide
caaaggcgcacuuuauuuu

SEQ ID NO: 665312 - RNA, 19 nt, Artificial Sequence
  Description of Artificial Sequence: Synthetic oligonucleotide
ggucucggacauccuauuc

SEQ ID NO: 665313 - RNA, 19 nt, Artificial Sequence
  Description of Artificial Sequence: Synthetic oligonucleotide
gcaauugcccaagacacgu

SEQ ID NO: 665314 - RNA, 19 nt, Artificial Sequence
  Description of Artificial Sequence: Synthetic oligonucleotide
acuaccuacugaagagauu

SEQ ID NO: 665315 - RNA, 19 nt, Artificial Sequence
  Description of Artificial Sequence: Synthetic oligonucleotide
gggagugcaaccccgugua

SEQ ID NO: 665316 - RNA, 19 nt, Artificial Sequence
  Description of Artificial Sequence: Synthetic oligonucleotide
aagcucggauaaggcaaau

SEQ ID NO: 665317 - RNA, 19 nt, Artificial Sequence
  Description of Artificial Sequence: Synthetic oligonucleotide
ggucaugucacugucuaau

SEQ ID NO: 665318 - RNA, 19 nt, Artificial Sequence
  Description of Artificial Sequence: Synthetic oligonucleotide
gacauccuauucgccgaga

SEQ ID NO: 665319 - RNA, 19 nt, Artificial Sequence
  Description of Artificial Sequence: Synthetic oligonucleotide
cauaccuggucagcugaga

SEQ ID NO: 665320 - RNA, 19 nt, Artificial Sequence
  Description of Artificial Sequence: Synthetic oligonucleotide
ccuuuggaaucacauacua

SEQ ID NO: 665321 - RNA, 19 nt, Artificial Sequence
  Description of Artificial Sequence: Synthetic oligonucleotide
guacuguagugagcaucug

SEQ ID NO: 665322 - RNA, 19 nt, Artificial Sequence
  Description of Artificial Sequence: Synthetic oligonucleotide
cgacaguugggucucggac

SEQ ID NO: 665323 - RNA, 19 nt, Artificial Sequence
  Description of Artificial Sequence: Synthetic oligonucleotide
cuacggaaagggagugcaa

SEQ ID NO: 665324 - RNA, 19 nt, Artificial Sequence
  Description of Artificial Sequence: Synthetic oligonucleotide
gcaaccccguguaaauaug

SEQ ID NO: 665325 - RNA, 19 nt, Artificial Sequence
  Description of Artificial Sequence: Synthetic oligonucleotide
ccacuaggauaaaugaugu

SEQ ID NO: 665326 - RNA, 19 nt, Artificial Sequence
  Description of Artificial Sequence: Synthetic oligonucleotide
ccaaacuucgcgguaagua

SEQ ID NO: 665327 - RNA, 19 nt, Artificial Sequence
  Description of Artificial Sequence: Synthetic oligonucleotide
acugugcauuuaaccacau

SEQ ID NO: 665328 - RNA, 19 nt, Artificial Sequence
  Description of Artificial Sequence: Synthetic oligonucleotide
gacauacgcacagcagcgu

SEQ ID NO: 665329 - RNA, 19 nt, Artificial Sequence
  Description of Artificial Sequence: Synthetic oligonucleotide
gcacacgcgacaguugauc

SEQ ID NO: 665330 - RNA, 19 nt, Artificial Sequence
  Description of Artificial Sequence: Synthetic oligonucleotide
ucgccgagauguguccuua

SEQ ID NO: 665331 - RNA, 19 nt, Artificial Sequence
  Description of Artificial Sequence: Synthetic oligonucleotide
gcacuaccuacugaagaga

SEQ ID NO: 665332 - RNA, 19 nt, Artificial Sequence
  Description of Artificial Sequence: Synthetic oligonucleotide
ggaaccccacugguucccg

SEQ ID NO: 665333 - RNA, 19 nt, Artificial Sequence
  Description of Artificial Sequence: Synthetic oligonucleotide
gugaauccuaagcgaaguu

SEQ ID NO: 665334 - RNA, 19 nt, Artificial Sequence
  Description of Artificial Sequence: Synthetic oligonucleotide
cagaguguugaaccucagu

SEQ ID NO: 665335 - RNA, 19 nt, Artificial Sequence
  Description of Artificial Sequence: Synthetic oligonucleotide
ggcauuuugccagaguguu

SEQ ID NO: 665336 - RNA, 19 nt, Artificial Sequence
  Description of Artificial Sequence: Synthetic oligonucleotide
gguuuugauuggcguagcu

SEQ ID NO: 665337 - RNA, 19 nt, Artificial Sequence
  Description of Artificial Sequence: Synthetic oligonucleotide
ggguuuugauuggcguagc

SEQ ID NO: 665338 - RNA, 19 nt, Artificial Sequence
  Description of Artificial Sequence: Synthetic oligonucleotide
cgacaguugaucacgggaa

SEQ ID NO: 665339 - RNA, 19 nt, Artificial Sequence
  Description of Artificial Sequence: Synthetic oligonucleotide
ggauggaauccacuaggau

SEQ ID NO: 665340 - RNA, 19 nt, Artificial Sequence
  Description of Artificial Sequence: Synthetic oligonucleotide
guguccacacaccacccuu

SEQ ID NO: 665341 - RNA, 19 nt, Artificial Sequence
  Description of Artificial Sequence: Synthetic oligonucleotide
guauacggaggugggaguu

SEQ ID NO: 665342 - RNA, 19 nt, Artificial Sequence
  Description of Artificial Sequence: Synthetic oligonucleotide
ccuggucagcugagaaaug

SEQ ID NO: 665343 - RNA, 19 nt, Artificial Sequence
  Description of Artificial Sequence: Synthetic oligonucleotide
ccgguuguucuucagaaau

SEQ ID NO: 665344 - RNA, 19 nt, Artificial Sequence
  Description of Artificial Sequence: Synthetic oligonucleotide
ccuuacauaugaggagaca

SEQ ID NO: 665345 - RNA, 19 nt, Artificial Sequence
  Description of Artificial Sequence: Synthetic oligonucleotide
cguagcuucauugcaaacu

SEQ ID NO: 665346 - RNA, 19 nt, Artificial Sequence
  Description of Artificial Sequence: Synthetic oligonucleotide
gggaaucgucacagaugag

SEQ ID NO: 665347 - RNA, 19 nt, Artificial Sequence
  Description of Artificial Sequence: Synthetic oligonucleotide
cgcgacaguugaucacggg

SEQ ID NO: 665348 - RNA, 19 nt, Artificial Sequence
  Description of Artificial Sequence: Synthetic oligonucleotide
uuguaccuucuggcuggau

SEQ ID NO: 665349 - RNA, 19 nt, Artificial Sequence
  Description of Artificial Sequence: Synthetic oligonucleotide
gugcaaccccguguaaaua

SEQ ID NO: 665350 - RNA, 19 nt, Artificial Sequence
  Description of Artificial Sequence: Synthetic oligonucleotide
uuacggggccaagguuaau

SEQ ID NO: 665351 - RNA, 19 nt, Artificial Sequence
  Description of Artificial Sequence: Synthetic oligonucleotide
acuucgcgguaaguacauu

SEQ ID NO: 665352 - RNA, 19 nt, Artificial Sequence
  Description of Artificial Sequence: Synthetic oligonucleotide
gggcauuuugccagagugu

SEQ ID NO: 665353 - RNA, 19 nt, Artificial Sequence
  Description of Artificial Sequence: Synthetic oligonucleotide
cccggcagugcaagagcug

SEQ ID NO: 665354 - RNA, 19 nt, Artificial Sequence
  Description of Artificial Sequence: Synthetic oligonucleotide
aggaaaccaugaagaucuu

SEQ ID NO: 665355 - RNA, 19 nt, Artificial Sequence
  Description of Artificial Sequence: Synthetic oligonucleotide
ggagugcaaccccguguaa

SEQ ID NO: 665356 - RNA, 19 nt, Artificial Sequence
  Description of Artificial Sequence: Synthetic oligonucleotide
gcgucgacaguugggucuc

SEQ ID NO: 665357 - RNA, 19 nt, Artificial Sequence
  Description of Artificial Sequence: Synthetic oligonucleotide
cacgggaaccccacugguu

SEQ ID NO: 665358 - RNA, 19 nt, Artificial Sequence
  Description of Artificial Sequence: Synthetic oligonucleotide
gcauuacggggccaagguu

SEQ ID NO: 665359 - RNA, 19 nt, Artificial Sequence
  Description of Artificial Sequence: Synthetic oligonucleotide
cgugaauccuaagcgaagu

SEQ ID NO: 665360 - RNA, 19 nt, Artificial Sequence
  Description of Artificial Sequence: Synthetic oligonucleotide
guuuaccauccaaguugau

SEQ ID NO: 665361 - RNA, 19 nt, Artificial Sequence
  Description of Artificial Sequence: Synthetic oligonucleotide
ccuauucgccgagaugugu

SEQ ID NO: 665362 - RNA, 19 nt, Artificial Sequence
  Description of Artificial Sequence: Synthetic oligonucleotide
ccggggaagugcacuaccu

SEQ ID NO: 665363 - RNA, 19 nt, Artificial Sequence
  Description of Artificial Sequence: Synthetic oligonucleotide
caccacccuuguaccuucu

SEQ ID NO: 665364 - RNA, 19 nt, Artificial Sequence
  Description of Artificial Sequence: Synthetic oligonucleotide
cgucgacaguugggucucg

SEQ ID NO: 665365 - RNA, 19 nt, Artificial Sequence
  Description of Artificial Sequence: Synthetic oligonucleotide
ccccaguaacaagcucgga

SEQ ID NO: 665366 - RNA, 19 nt, Artificial Sequence
  Description of Artificial Sequence: Synthetic oligonucleotide
cggggccaagguuaauuau

SEQ ID NO: 665367 - RNA, 19 nt, Artificial Sequence
  Description of Artificial Sequence: Synthetic oligonucleotide
aauagagugugcuucuugc

SEQ ID NO: 665368 - RNA, 19 nt, Artificial Sequence
  Description of Artificial Sequence: Synthetic oligonucleotide
uucacugauaccaugaaca

SEQ ID NO: 665369 - RNA, 19 nt, Artificial Sequence
  Description of Artificial Sequence: Synthetic oligonucleotide
guagaaaucacagaagggg

SEQ ID NO: 665370 - RNA, 19 nt, Artificial Sequence
  Description of Artificial Sequence: Synthetic oligonucleotide
uuuacuguccucaugggca

SEQ ID NO: 665371 - RNA, 19 nt, Artificial Sequence
  Description of Artificial Sequence: Synthetic oligonucleotide
uguacucuaaggcagcuag

SEQ ID NO: 665372 - RNA, 19 nt, Artificial Sequence
  Description of Artificial Sequence: Synthetic oligonucleotide
auaggaaugugagacaccc

SEQ ID NO: 665373 - RNA, 19 nt, Artificial Sequence
  Description of Artificial Sequence: Synthetic oligonucleotide
aaggaugagaucuuacucu

SEQ ID NO: 665374 - RNA, 19 nt, Artificial Sequence
  Description of Artificial Sequence: Synthetic oligonucleotide
ucugucuaaagaaggauga

SEQ ID NO: 665375 - RNA, 19 nt, Artificial Sequence
  Description of Artificial Sequence: Synthetic oligonucleotide
uuuaaauagagugugcuuc

SEQ ID NO: 665376 - RNA, 19 nt, Artificial Sequence
  Description of Artificial Sequence: Synthetic oligonucleotide
agccauaaccaacaguccc

SEQ ID NO: 665377 - RNA, 19 nt, Artificial Sequence
  Description of Artificial Sequence: Synthetic oligonucleotide
gguagaagccuuuaaauag

SEQ ID NO: 665378 - RNA, 19 nt, Artificial Sequence
  Description of Artificial Sequence: Synthetic oligonucleotide
uagaaaucacagaaggggc

SEQ ID NO: 665379 - RNA, 19 nt, Artificial Sequence
  Description of Artificial Sequence: Synthetic oligonucleotide
agugagcgcacacaauucc

SEQ ID NO: 665380 - RNA, 19 nt, Artificial Sequence
  Description of Artificial Sequence: Synthetic oligonucleotide
uaccggagagacaaggugg

SEQ ID NO: 665381 - RNA, 19 nt, Artificial Sequence
  Description of Artificial Sequence: Synthetic oligonucleotide
ucucacuuacacuugaggu

SEQ ID NO: 665382 - RNA, 19 nt, Artificial Sequence
  Description of Artificial Sequence: Synthetic oligonucleotide
cuuauagugcugcagggcc

SEQ ID NO: 665383 - RNA, 19 nt, Artificial Sequence
  Description of Artificial Sequence: Synthetic oligonucleotide
uugguaucagcauaggcga

SEQ ID NO: 665384 - RNA, 19 nt, Artificial Sequence
  Description of Artificial Sequence: Synthetic oligonucleotide
cucucugcucaauagacgg

SEQ ID NO: 665385 - RNA, 19 nt, Artificial Sequence
  Description of Artificial Sequence: Synthetic oligonucleotide
aaauagagugugcuucuug

SEQ ID NO: 665386 - RNA, 19 nt, Artificial Sequence
  Description of Artificial Sequence: Synthetic oligonucleotide
acaggcauaguuuucugag

SEQ ID NO: 665387 - RNA, 19 nt, Artificial Sequence
  Description of Artificial Sequence: Synthetic oligonucleotide
ucguuguacucuaaggcag

SEQ ID NO: 665388 - RNA, 19 nt, Artificial Sequence
  Description of Artificial Sequence: Synthetic oligonucleotide
guauguguaccuuauagga

SEQ ID NO: 665389 - RNA, 19 nt, Artificial Sequence
  Description of Artificial Sequence: Synthetic oligonucleotide
ugggauacaucucggauga

SEQ ID NO: 665390 - RNA, 19 nt, Artificial Sequence
  Description of Artificial Sequence: Synthetic oligonucleotide
uaaccaacagucccuguag

SEQ ID NO: 665391 - RNA, 19 nt, Artificial Sequence
  Description of Artificial Sequence: Synthetic oligonucleotide
gacuuuguaggcucugggg

SEQ ID NO: 665392 - RNA, 19 nt, Artificial Sequence
  Description of Artificial Sequence: Synthetic oligonucleotide
aguucacgcaugcuguggc

SEQ ID NO: 665393 - RNA, 19 nt, Artificial Sequence
  Description of Artificial Sequence: Synthetic oligonucleotide
uguacaucccacuuuugga

SEQ ID NO: 665394 - RNA, 19 nt, Artificial Sequence
  Description of Artificial Sequence: Synthetic oligonucleotide
agaacccuuauagugcugc

SEQ ID NO: 665395 - RNA, 19 nt, Artificial Sequence
  Description of Artificial Sequence: Synthetic oligonucleotide
uuauaggaaugugagacac

SEQ ID NO: 665396 - RNA, 19 nt, Artificial Sequence
  Description of Artificial Sequence: Synthetic oligonucleotide
gauaaggguacgcacuccc

SEQ ID NO: 665397 - RNA, 19 nt, Artificial Sequence
  Description of Artificial Sequence: Synthetic oligonucleotide
uaagugagcgcacacaauu

SEQ ID NO: 665398 - RNA, 19 nt, Artificial Sequence
  Description of Artificial Sequence: Synthetic oligonucleotide
aguagcucagcaccuuccc

SEQ ID NO: 665399 - RNA, 19 nt, Artificial Sequence
  Description of Artificial Sequence: Synthetic oligonucleotide
ugcucguuguacucuaagg

SEQ ID NO: 665400 - RNA, 19 nt, Artificial Sequence
  Description of Artificial Sequence: Synthetic oligonucleotide
acccuuauagugcugcagg

SEQ ID NO: 665401 - RNA, 19 nt, Artificial Sequence
  Description of Artificial Sequence: Synthetic oligonucleotide
acaguugugcucuccuccc

SEQ ID NO: 665402 - RNA, 19 nt, Artificial Sequence
  Description of Artificial Sequence: Synthetic oligonucleotide
gaaugcauacccuaggucu

SEQ ID NO: 665403 - RNA, 19 nt, Artificial Sequence
  Description of Artificial Sequence: Synthetic oligonucleotide
uggggacgcacaaacaugc

SEQ ID NO: 665404 - RNA, 19 nt, Artificial Sequence
  Description of Artificial Sequence: Synthetic oligonucleotide
ugugcaaugcucugcuucc

SEQ ID NO: 665405 - RNA, 19 nt, Artificial Sequence
  Description of Artificial Sequence: Synthetic oligonucleotide
auagagugugcuucuugcg

SEQ ID NO: 665406 - RNA, 19 nt, Artificial Sequence
  Description of Artificial Sequence: Synthetic oligonucleotide
uguuuccuagauguagugg

SEQ ID NO: 665407 - RNA, 19 nt, Artificial Sequence
  Description of Artificial Sequence: Synthetic oligonucleotide
uauguguaccuuauaggaa

SEQ ID NO: 665408 - RNA, 19 nt, Artificial Sequence
  Description of Artificial Sequence: Synthetic oligonucleotide
ucauaccggagagacaagg

SEQ ID NO: 665409 - RNA, 19 nt, Artificial Sequence
  Description of Artificial Sequence: Synthetic oligonucleotide
auguguaccuuauaggaau

SEQ ID NO: 665410 - RNA, 19 nt, Artificial Sequence
  Description of Artificial Sequence: Synthetic oligonucleotide
auacccuaggucuggcccc

SEQ ID NO: 665411 - RNA, 19 nt, Artificial Sequence
  Description of Artificial Sequence: Synthetic oligonucleotide
agaaguguucagauuuugc

SEQ ID NO: 665412 - RNA, 19 nt, Artificial Sequence
  Description of Artificial Sequence: Synthetic oligonucleotide
aggauaaggguacgcacuc

SEQ ID NO: 665413 - RNA, 19 nt, Artificial Sequence
  Description of Artificial Sequence: Synthetic oligonucleotide
aagaaggaugagaucuuac

SEQ ID NO: 665414 - RNA, 19 nt, Artificial Sequence
  Description of Artificial Sequence: Synthetic oligonucleotide
gauuuugcaguggucagug

SEQ ID NO: 665415 - RNA, 19 nt, Artificial Sequence
  Description of Artificial Sequence: Synthetic oligonucleotide
agcaacacggaagaacugg

SEQ ID NO: 665416 - RNA, 19 nt, Artificial Sequence
  Description of Artificial Sequence: Synthetic oligonucleotide
uuacacucuggucuggccu

SEQ ID NO: 665417 - RNA, 19 nt, Artificial Sequence
  Description of Artificial Sequence: Synthetic oligonucleotide
aggcaucugaccucugagc

SEQ ID NO: 665418 - RNA, 19 nt, Artificial Sequence
  Description of Artificial Sequence: Synthetic oligonucleotide
ugguuccuaucaaugaugu

SEQ ID NO: 665419 - RNA, 19 nt, Artificial Sequence
  Description of Artificial Sequence: Synthetic oligonucleotide
cauacccuaggucuggccc

SEQ ID NO: 665420 - RNA, 19 nt, Artificial Sequence
  Description of Artificial Sequence: Synthetic oligonucleotide
aggaugagaucuuacucug

SEQ ID NO: 665421 - RNA, 19 nt, Artificial Sequence
  Description of Artificial Sequence: Synthetic oligonucleotide
ugaggauaaggguacgcac

SEQ ID NO: 665422 - RNA, 19 nt, Artificial Sequence
  Description of Artificial Sequence: Synthetic oligonucleotide
uaaggguacgcacucccug

SEQ ID NO: 665423 - RNA, 19 nt, Artificial Sequence
  Description of Artificial Sequence: Synthetic oligonucleotide
ugucaaaacuggcuuggcu

SEQ ID NO: 665424 - RNA, 19 nt, Artificial Sequence
  Description of Artificial Sequence: Synthetic oligonucleotide
ugguagaagccuuuaaaua

SEQ ID NO: 665425 - RNA, 19 nt, Artificial Sequence
  Description of Artificial Sequence: Synthetic oligonucleotide
uaacagcaccgcaaucugg

SEQ ID NO: 665426 - RNA, 19 nt, Artificial Sequence
  Description of Artificial Sequence: Synthetic oligonucleotide
auaccggagagacaaggug

SEQ ID NO: 665427 - RNA, 19 nt, Artificial Sequence
  Description of Artificial Sequence: Synthetic oligonucleotide
aaugcucugcuuccuauua

SEQ ID NO: 665428 - RNA, 19 nt, Artificial Sequence
  Description of Artificial Sequence: Synthetic oligonucleotide
caaccuguagaucccagag

SEQ ID NO: 665429 - RNA, 19 nt, Artificial Sequence
  Description of Artificial Sequence: Synthetic oligonucleotide
cucucacuuacacuugagg

SEQ ID NO: 665430 - RNA, 19 nt, Artificial Sequence
  Description of Artificial Sequence: Synthetic oligonucleotide
ucauccggauagcugacca

SEQ ID NO: 665431 - RNA, 19 nt, Artificial Sequence
  Description of Artificial Sequence: Synthetic oligonucleotide
ccuuauaggaaugugagac

SEQ ID NO: 665432 - RNA, 19 nt, Artificial Sequence
  Description of Artificial Sequence: Synthetic oligonucleotide
gaggguucagaccccaacc

SEQ ID NO: 665433 - RNA, 19 nt, Artificial Sequence
  Description of Artificial Sequence: Synthetic oligonucleotide
uguguaccuuauaggaaug

SEQ ID NO: 665434 - RNA, 19 nt, Artificial Sequence
  Description of Artificial Sequence: Synthetic oligonucleotide
uccuauuaacagcaccgca

SEQ ID NO: 665435 - RNA, 19 nt, Artificial Sequence
  Description of Artificial Sequence: Synthetic oligonucleotide
cguacaaacugguagaagc

SEQ ID NO: 665436 - RNA, 19 nt, Artificial Sequence
  Description of Artificial Sequence: Synthetic oligonucleotide
auccggauagcugaccagc

SEQ ID NO: 665437 - RNA, 19 nt, Artificial Sequence
  Description of Artificial Sequence: Synthetic oligonucleotide
guuuacuguccucaugggc

SEQ ID NO: 665438 - RNA, 19 nt, Artificial Sequence
  Description of Artificial Sequence: Synthetic oligonucleotide
uacucuaaggcagcuagca

SEQ ID NO: 665439 - RNA, 19 nt, Artificial Sequence
  Description of Artificial Sequence: Synthetic oligonucleotide
ugaaugcauacccuagguc

SEQ ID NO: 665440 - RNA, 19 nt, Artificial Sequence
  Description of Artificial Sequence: Synthetic oligonucleotide
uguaccuuauaggaaugug

SEQ ID NO: 665441 - RNA, 19 nt, Artificial Sequence
  Description of Artificial Sequence: Synthetic oligonucleotide
agcauaggcgaaccugugg

SEQ ID NO: 665442 - RNA, 19 nt, Artificial Sequence
  Description of Artificial Sequence: Synthetic oligonucleotide
aaugcauacccuaggucug

SEQ ID NO: 665443 - RNA, 19 nt, Artificial Sequence
  Description of Artificial Sequence: Synthetic oligonucleotide
agccuuuaaauagagugug

SEQ ID NO: 665444 - RNA, 19 nt, Artificial Sequence
  Description of Artificial Sequence: Synthetic oligonucleotide
caccuagggagagagaggg

SEQ ID NO: 665445 - RNA, 19 nt, Artificial Sequence
  Description of Artificial Sequence: Synthetic oligonucleotide
uggaaaagcacugugucuu

SEQ ID NO: 665446 - RNA, 19 nt, Artificial Sequence
  Description of Artificial Sequence: Synthetic oligonucleotide
uguucagauuuugcagugg

SEQ ID NO: 665447 - RNA, 19 nt, Artificial Sequence
  Description of Artificial Sequence: Synthetic oligonucleotide
aagugagcgcacacaauuc

SEQ ID NO: 665448 - RNA, 19 nt, Artificial Sequence
  Description of Artificial Sequence: Synthetic oligonucleotide
auaaccaacagucccugua

SEQ ID NO: 665449 - RNA, 19 nt, Artificial Sequence
  Description of Artificial Sequence: Synthetic oligonucleotide
gggucguacaaacugguag

SEQ ID NO: 665450 - RNA, 19 nt, Artificial Sequence
  Description of Artificial Sequence: Synthetic oligonucleotide
uccgaaggcacaguugugc

SEQ ID NO: 665451 - RNA, 19 nt, Artificial Sequence
  Description of Artificial Sequence: Synthetic oligonucleotide
ugguucauccggauagcug

SEQ ID NO: 665452 - RNA, 19 nt, Artificial Sequence
  Description of Artificial Sequence: Synthetic oligonucleotide
cuugcgguccucagcaaag

SEQ ID NO: 665453 - RNA, 19 nt, Artificial Sequence
  Description of Artificial Sequence: Synthetic oligonucleotide
caugggcaagcuccgaagg

SEQ ID NO: 665454 - RNA, 19 nt, Artificial Sequence
  Description of Artificial Sequence: Synthetic oligonucleotide
gaaccuguggucacaauca

SEQ ID NO: 665455 - RNA, 19 nt, Artificial Sequence
  Description of Artificial Sequence: Synthetic oligonucleotide
ucucucacuuacacuugag

SEQ ID NO: 665456 - RNA, 19 nt, Artificial Sequence
  Description of Artificial Sequence: Synthetic oligonucleotide
uggagauaccugcuaggca

SEQ ID NO: 665457 - RNA, 19 nt, Artificial Sequence
  Description of Artificial Sequence: Synthetic oligonucleotide
cacggaagaacugggauac

SEQ ID NO: 665458 - RNA, 19 nt, Artificial Sequence
  Description of Artificial Sequence: Synthetic oligonucleotide
agccuugcggacaucagac

SEQ ID NO: 665459 - RNA, 19 nt, Artificial Sequence
  Description of Artificial Sequence: Synthetic oligonucleotide
gguucauccggauagcuga

SEQ ID NO: 665460 - RNA, 19 nt, Artificial Sequence
  Description of Artificial Sequence: Synthetic oligonucleotide
uccuaucaaugaugugugg

SEQ ID NO: 665461 - RNA, 19 nt, Artificial Sequence
  Description of Artificial Sequence: Synthetic oligonucleotide
gguagaaaucacagaaggg

SEQ ID NO: 665462 - RNA, 19 nt, Artificial Sequence
  Description of Artificial Sequence: Synthetic oligonucleotide
gguggggucguacaaacug

SEQ ID NO: 665463 - RNA, 19 nt, Artificial Sequence
  Description of Artificial Sequence: Synthetic oligonucleotide
ugcucugcuuccuauuaac

SEQ ID NO: 665464 - RNA, 19 nt, Artificial Sequence
  Description of Artificial Sequence: Synthetic oligonucleotide
ggauacaucucggaugacg

SEQ ID NO: 665465 - RNA, 19 nt, Artificial Sequence
  Description of Artificial Sequence: Synthetic oligonucleotide
uuccuagauguaguggugc

SEQ ID NO: 665466 - RNA, 19 nt, Artificial Sequence
  Description of Artificial Sequence: Synthetic oligonucleotide
gcucguuguacucuaaggc

SEQ ID NO: 665467 - RNA, 19 nt, Artificial Sequence
  Description of Artificial Sequence: Synthetic oligonucleotide
ugggaaugguaucugcauc

SEQ ID NO: 665468 - RNA, 19 nt, Artificial Sequence
  Description of Artificial Sequence: Synthetic oligonucleotide
gucccuguagccccuauug

SEQ ID NO: 665469 - RNA, 19 nt, Artificial Sequence
  Description of Artificial Sequence: Synthetic oligonucleotide
uuccuauuaacagcaccgc

SEQ ID NO: 665470 - RNA, 19 nt, Artificial Sequence
  Description of Artificial Sequence: Synthetic oligonucleotide
caucagaccuuacacucug

SEQ ID NO: 665471 - RNA, 19 nt, Artificial Sequence
  Description of Artificial Sequence: Synthetic oligonucleotide
gaccuuacacucuggucug

SEQ ID NO: 665472 - RNA, 19 nt, Artificial Sequence
  Description of Artificial Sequence: Synthetic oligonucleotide
cuuacacucuggucuggcc

SEQ ID NO: 665473 - RNA, 19 nt, Artificial Sequence
  Description of Artificial Sequence: Synthetic oligonucleotide
ugagcugcccuccgguggc

SEQ ID NO: 665474 - RNA, 19 nt, Artificial Sequence
  Description of Artificial Sequence: Synthetic oligonucleotide
agacggccucuucucauac

SEQ ID NO: 665475 - RNA, 19 nt, Artificial Sequence
  Description of Artificial Sequence: Synthetic oligonucleotide
uucagauuuugcagugguc

SEQ ID NO: 665476 - RNA, 19 nt, Artificial Sequence
  Description of Artificial Sequence: Synthetic oligonucleotide
uccggauagcugaccagcc

SEQ ID NO: 665477 - RNA, 19 nt, Artificial Sequence
  Description of Artificial Sequence: Synthetic oligonucleotide
ucaggguguauguguaccu

SEQ ID NO: 665478 - RNA, 19 nt, Artificial Sequence
  Description of Artificial Sequence: Synthetic oligonucleotide
uggcagaccaguucacgca

SEQ ID NO: 665479 - RNA, 19 nt, Artificial Sequence
  Description of Artificial Sequence: Synthetic oligonucleotide
ugcaaccuguagaucccag

SEQ ID NO: 665480 - RNA, 19 nt, Artificial Sequence
  Description of Artificial Sequence: Synthetic oligonucleotide
ugggacugaagcaccagua

SEQ ID NO: 665481 - RNA, 19 nt, Artificial Sequence
  Description of Artificial Sequence: Synthetic oligonucleotide
gguucagaccccaaccugg

SEQ ID NO: 665482 - RNA, 19 nt, Artificial Sequence
  Description of Artificial Sequence: Synthetic oligonucleotide
cgguagaaaucacagaagg

SEQ ID NO: 665483 - RNA, 19 nt, Artificial Sequence
  Description of Artificial Sequence: Synthetic oligonucleotide
gagaaguguucagauuuug

SEQ ID NO: 665484 - RNA, 19 nt, Artificial Sequence
  Description of Artificial Sequence: Synthetic oligonucleotide
gaagaagcugauacuccug

SEQ ID NO: 665485 - RNA, 19 nt, Artificial Sequence
  Description of Artificial Sequence: Synthetic oligonucleotide
ccuaucaaugauguguggg

SEQ ID NO: 665486 - RNA, 19 nt, Artificial Sequence
  Description of Artificial Sequence: Synthetic oligonucleotide
aggguucagaccccaaccu

SEQ ID NO: 665487 - RNA, 19 nt, Artificial Sequence
  Description of Artificial Sequence: Synthetic oligonucleotide
accuuauaggaaugugaga

SEQ ID NO: 665488 - RNA, 19 nt, Artificial Sequence
  Description of Artificial Sequence: Synthetic oligonucleotide
uuggcucaaugcuugcuuc

SEQ ID NO: 665489 - RNA, 19 nt, Artificial Sequence
  Description of Artificial Sequence: Synthetic oligonucleotide
gaacugggauacaucucgg

SEQ ID NO: 665490 - RNA, 19 nt, Artificial Sequence
  Description of Artificial Sequence: Synthetic oligonucleotide
ucguacaaacugguagaag

SEQ ID NO: 665491 - RNA, 19 nt, Artificial Sequence
  Description of Artificial Sequence: Synthetic oligonucleotide
gauacaucucggaugacgu

SEQ ID NO: 665492 - RNA, 19 nt, Artificial Sequence
  Description of Artificial Sequence: Synthetic oligonucleotide
cguaaaggugucaaaacug

SEQ ID NO: 665493 - RNA, 19 nt, Artificial Sequence
  Description of Artificial Sequence: Synthetic oligonucleotide
cagaccaguucacgcaugc

SEQ ID NO: 665494 - RNA, 19 nt, Artificial Sequence
  Description of Artificial Sequence: Synthetic oligonucleotide
auaggcgaaccugugguca

SEQ ID NO: 665495 - RNA, 19 nt, Artificial Sequence
  Description of Artificial Sequence: Synthetic oligonucleotide
aaucagggccucuggggau

SEQ ID NO: 665496 - RNA, 19 nt, Artificial Sequence
  Description of Artificial Sequence: Synthetic oligonucleotide
auacaucucggaugacgug

SEQ ID NO: 665497 - RNA, 19 nt, Artificial Sequence
  Description of Artificial Sequence: Synthetic oligonucleotide
ugggcaagcuccgaaggca

SEQ ID NO: 665498 - RNA, 19 nt, Artificial Sequence
  Description of Artificial Sequence: Synthetic oligonucleotide
ucggaugacguggccaaag

SEQ ID NO: 665499 - RNA, 19 nt, Artificial Sequence
  Description of Artificial Sequence: Synthetic oligonucleotide
uugcggacaucagacaggu

SEQ ID NO: 665500 - RNA, 19 nt, Artificial Sequence
  Description of Artificial Sequence: Synthetic oligonucleotide
gcuuccuauuaacagcacc

SEQ ID NO: 665501 - RNA, 19 nt, Artificial Sequence
  Description of Artificial Sequence: Synthetic oligonucleotide
gagaucuuacucugggucu

SEQ ID NO: 665502 - RNA, 19 nt, Artificial Sequence
  Description of Artificial Sequence: Synthetic oligonucleotide
aggcaggcccaucaggucu

SEQ ID NO: 665503 - RNA, 19 nt, Artificial Sequence
  Description of Artificial Sequence: Synthetic oligonucleotide
uguaugccuuuagagcugu

SEQ ID NO: 665504 - RNA, 19 nt, Artificial Sequence
  Description of Artificial Sequence: Synthetic oligonucleotide
cuaucaaugaugugugggu

SEQ ID NO: 665505 - RNA, 19 nt, Artificial Sequence
  Description of Artificial Sequence: Synthetic oligonucleotide
guggggucguacaaacugg

SEQ ID NO: 665506 - RNA, 19 nt, Artificial Sequence
  Description of Artificial Sequence: Synthetic oligonucleotide
uaccugcuaggcacuguag

SEQ ID NO: 665507 - RNA, 19 nt, Artificial Sequence
  Description of Artificial Sequence: Synthetic oligonucleotide
uguguggguucuccagaca

SEQ ID NO: 665508 - RNA, 19 nt, Artificial Sequence
  Description of Artificial Sequence: Synthetic oligonucleotide
ggucguacaaacugguaga

SEQ ID NO: 665509 - RNA, 19 nt, Artificial Sequence
  Description of Artificial Sequence: Synthetic oligonucleotide
uaucagcauaggcgaaccu

SEQ ID NO: 665510 - RNA, 19 nt, Artificial Sequence
  Description of Artificial Sequence: Synthetic oligonucleotide
uggcucaaugcuugcuuca

SEQ ID NO: 665511 - RNA, 19 nt, Artificial Sequence
  Description of Artificial Sequence: Synthetic oligonucleotide
uaggaaugugagacaccca

SEQ ID NO: 665512 - RNA, 19 nt, Artificial Sequence
  Description of Artificial Sequence: Synthetic oligonucleotide
aaugcuugcuucacugaua

SEQ ID NO: 665513 - RNA, 19 nt, Artificial Sequence
  Description of Artificial Sequence: Synthetic oligonucleotide
cuaggucuggccccucagc

SEQ ID NO: 665514 - RNA, 19 nt, Artificial Sequence
  Description of Artificial Sequence: Synthetic oligonucleotide
auugcuuacuccacucaga

SEQ ID NO: 665515 - RNA, 19 nt, Artificial Sequence
  Description of Artificial Sequence: Synthetic oligonucleotide
gagccuugcggacaucaga

SEQ ID NO: 665516 - RNA, 19 nt, Artificial Sequence
  Description of Artificial Sequence: Synthetic oligonucleotide
ugcuuacuccacucagacu

SEQ ID NO: 665517 - RNA, 19 nt, Artificial Sequence
  Description of Artificial Sequence: Synthetic oligonucleotide
uguuagcuggaagcagaug

SEQ ID NO: 665518 - RNA, 19 nt, Artificial Sequence
  Description of Artificial Sequence: Synthetic oligonucleotide
aggcagguaagagaagcca

SEQ ID NO: 665519 - RNA, 19 nt, Artificial Sequence
  Description of Artificial Sequence: Synthetic oligonucleotide
agggccugcguaaaggugu

SEQ ID NO: 665520 - RNA, 19 nt, Artificial Sequence
  Description of Artificial Sequence: Synthetic oligonucleotide
guucagauuuugcaguggu

SEQ ID NO: 665521 - RNA, 19 nt, Artificial Sequence
  Description of Artificial Sequence: Synthetic oligonucleotide
cauccggauagcugaccag

SEQ ID NO: 665522 - RNA, 19 nt, Artificial Sequence
  Description of Artificial Sequence: Synthetic oligonucleotide
ugugccgcuggugaggaua

SEQ ID NO: 665523 - RNA, 19 nt, Artificial Sequence
  Description of Artificial Sequence: Synthetic oligonucleotide
cauaggcgaaccugugguc

SEQ ID NO: 665524 - RNA, 19 nt, Artificial Sequence
  Description of Artificial Sequence: Synthetic oligonucleotide
cugcucguuguacucuaag

SEQ ID NO: 665525 - RNA, 19 nt, Artificial Sequence
  Description of Artificial Sequence: Synthetic oligonucleotide
gugaggauaaggguacgca

SEQ ID NO: 665526 - RNA, 19 nt, Artificial Sequence
  Description of Artificial Sequence: Synthetic oligonucleotide
uucauccggauagcugacc

SEQ ID NO: 665527 - RNA, 19 nt, Artificial Sequence
  Description of Artificial Sequence: Synthetic oligonucleotide
acaggccgggcacacaaau

SEQ ID NO: 665528 - RNA, 19 nt, Artificial Sequence
  Description of Artificial Sequence: Synthetic oligonucleotide
gaggauaaggguacgcacu

SEQ ID NO: 665529 - RNA, 19 nt, Artificial Sequence
  Description of Artificial Sequence: Synthetic oligonucleotide
ugguuucaggguguaugug

SEQ ID NO: 665530 - RNA, 19 nt, Artificial Sequence
  Description of Artificial Sequence: Synthetic oligonucleotide
ccuauuaacagcaccgcaa

SEQ ID NO: 665531 - RNA, 19 nt, Artificial Sequence
  Description of Artificial Sequence: Synthetic oligonucleotide
uaggcgaaccuguggucac

SEQ ID NO: 665532 - RNA, 19 nt, Artificial Sequence
  Description of Artificial Sequence: Synthetic oligonucleotide
uugugguggggacgcacaa

SEQ ID NO: 665533 - RNA, 19 nt, Artificial Sequence
  Description of Artificial Sequence: Synthetic oligonucleotide
aggguguauguguaccuua

SEQ ID NO: 665534 - RNA, 19 nt, Artificial Sequence
  Description of Artificial Sequence: Synthetic oligonucleotide
ugguaucagcauaggcgaa

SEQ ID NO: 665535 - RNA, 19 nt, Artificial Sequence
  Description of Artificial Sequence: Synthetic oligonucleotide
gaacccuuauagugcugca

SEQ ID NO: 665536 - RNA, 19 nt, Artificial Sequence
  Description of Artificial Sequence: Synthetic oligonucleotide
aucucggaugacguggcca

SEQ ID NO: 665537 - RNA, 19 nt, Artificial Sequence
  Description of Artificial Sequence: Synthetic oligonucleotide
acggaccucggcugggcag

SEQ ID NO: 665538 - RNA, 19 nt, Artificial Sequence
  Description of Artificial Sequence: Synthetic oligonucleotide
guggcuugugguggggacg

SEQ ID NO: 665539 - RNA, 19 nt, Artificial Sequence
  Description of Artificial Sequence: Synthetic oligonucleotide
ccuauugcuuacuccacuc

SEQ ID NO: 665540 - RNA, 19 nt, Artificial Sequence
  Description of Artificial Sequence: Synthetic oligonucleotide
guggggacgcacaaacaug

SEQ ID NO: 665541 - RNA, 19 nt, Artificial Sequence
  Description of Artificial Sequence: Synthetic oligonucleotide
uagccccuauugcuuacuc

SEQ ID NO: 665542 - RNA, 19 nt, Artificial Sequence
  Description of Artificial Sequence: Synthetic oligonucleotide
gguaucagcauaggcgaac

SEQ ID NO: 665543 - RNA, 19 nt, Artificial Sequence
  Description of Artificial Sequence: Synthetic oligonucleotide
cuauuaacagcaccgcaau

SEQ ID NO: 665544 - RNA, 19 nt, Artificial Sequence
  Description of Artificial Sequence: Synthetic oligonucleotide
cucauaccggagagacaag

SEQ ID NO: 665545 - RNA, 19 nt, Artificial Sequence
  Description of Artificial Sequence: Synthetic oligonucleotide
gauagcugaccagccugac

SEQ ID NO: 665546 - RNA, 19 nt, Artificial Sequence
  Description of Artificial Sequence: Synthetic oligonucleotide
cugcguaaaggugucaaaa

SEQ ID NO: 665547 - RNA, 19 nt, Artificial Sequence
  Description of Artificial Sequence: Synthetic oligonucleotide
gggaaugguaucugcaucu

SEQ ID NO: 665548 - RNA, 19 nt, Artificial Sequence
  Description of Artificial Sequence: Synthetic oligonucleotide
caacacggaagaacuggga

SEQ ID NO: 665549 - RNA, 19 nt, Artificial Sequence
  Description of Artificial Sequence: Synthetic oligonucleotide
gacgcacaaacaugccaaa

SEQ ID NO: 665550 - RNA, 19 nt, Artificial Sequence
  Description of Artificial Sequence: Synthetic oligonucleotide
augcucugcuuccuauuaa

SEQ ID NO: 665551 - RNA, 19 nt, Artificial Sequence
  Description of Artificial Sequence: Synthetic oligonucleotide
ccugggaccuggcagcucc

SEQ ID NO: 665552 - RNA, 19 nt, Artificial Sequence
  Description of Artificial Sequence: Synthetic oligonucleotide
cugcucaauagacggccuc

SEQ ID NO: 665553 - RNA, 19 nt, Artificial Sequence
  Description of Artificial Sequence: Synthetic oligonucleotide
gagcaacacggaagaacug

SEQ ID NO: 665554 - RNA, 19 nt, Artificial Sequence
  Description of Artificial Sequence: Synthetic oligonucleotide
guacucuaaggcagcuagc

SEQ ID NO: 665555 - RNA, 19 nt, Artificial Sequence
  Description of Artificial Sequence: Synthetic oligonucleotide
ugguaucaucagaccuuac

SEQ ID NO: 665556 - RNA, 19 nt, Artificial Sequence
  Description of Artificial Sequence: Synthetic oligonucleotide
ugauacuccugugggccuc

SEQ ID NO: 665557 - RNA, 19 nt, Artificial Sequence
  Description of Artificial Sequence: Synthetic oligonucleotide
guagccuccuugacagcag

SEQ ID NO: 665558 - RNA, 19 nt, Artificial Sequence
  Description of Artificial Sequence: Synthetic oligonucleotide
agaucuuacucugggucuu

SEQ ID NO: 665559 - RNA, 19 nt, Artificial Sequence
  Description of Artificial Sequence: Synthetic oligonucleotide
ugcauacccuaggucuggc

SEQ ID NO: 665560 - RNA, 19 nt, Artificial Sequence
  Description of Artificial Sequence: Synthetic oligonucleotide
ccuuauagugcugcagggc

SEQ ID NO: 665561 - RNA, 19 nt, Artificial Sequence
  Description of Artificial Sequence: Synthetic oligonucleotide
gggacgcacaaacaugcca

SEQ ID NO: 665562 - RNA, 19 nt, Artificial Sequence
  Description of Artificial Sequence: Synthetic oligonucleotide
ggccuugguaucagcauag

SEQ ID NO: 665563 - RNA, 19 nt, Artificial Sequence
  Description of Artificial Sequence: Synthetic oligonucleotide
ggaguugcaguugccaaca

SEQ ID NO: 665564 - RNA, 19 nt, Artificial Sequence
  Description of Artificial Sequence: Synthetic oligonucleotide
uacgcacucccuggcagac

SEQ ID NO: 665565 - RNA, 19 nt, Artificial Sequence
  Description of Artificial Sequence: Synthetic oligonucleotide
agauaccugcuaggcacug

SEQ ID NO: 665566 - RNA, 19 nt, Artificial Sequence
  Description of Artificial Sequence: Synthetic oligonucleotide
gcguaaaggugucaaaacu

SEQ ID NO: 665567 - RNA, 19 nt, Artificial Sequence
  Description of Artificial Sequence: Synthetic oligonucleotide
gguuccuaucaaugaugug

SEQ ID NO: 665568 - RNA, 19 nt, Artificial Sequence
  Description of Artificial Sequence: Synthetic oligonucleotide
agugugccgcuggugagga

SEQ ID NO: 665569 - RNA, 19 nt, Artificial Sequence
  Description of Artificial Sequence: Synthetic oligonucleotide
cggacaucagacagguagg

SEQ ID NO: 665570 - RNA, 19 nt, Artificial Sequence
  Description of Artificial Sequence: Synthetic oligonucleotide
uugcgguccucagcaaaga

SEQ ID NO: 665571 - RNA, 19 nt, Artificial Sequence
  Description of Artificial Sequence: Synthetic oligonucleotide
ggacgcacaaacaugccaa

SEQ ID NO: 665572 - RNA, 19 nt, Artificial Sequence
  Description of Artificial Sequence: Synthetic oligonucleotide
gugagcgcacacaauucca

SEQ ID NO: 665573 - RNA, 19 nt, Artificial Sequence
  Description of Artificial Sequence: Synthetic oligonucleotide
cauaccggagagacaaggu

SEQ ID NO: 665574 - RNA, 19 nt, Artificial Sequence
  Description of Artificial Sequence: Synthetic oligonucleotide
accuuacacucuggucugg

SEQ ID NO: 665575 - RNA, 19 nt, Artificial Sequence
  Description of Artificial Sequence: Synthetic oligonucleotide
uuguacucuaaggcagcua

SEQ ID NO: 665576 - RNA, 19 nt, Artificial Sequence
  Description of Artificial Sequence: Synthetic oligonucleotide
acuuacacuugaggucaca

SEQ ID NO: 665577 - RNA, 19 nt, Artificial Sequence
  Description of Artificial Sequence: Synthetic oligonucleotide
cagcaccgcaaucuggaca

SEQ ID NO: 665578 - RNA, 19 nt, Artificial Sequence
  Description of Artificial Sequence: Synthetic oligonucleotide
gcauaggcgaaccuguggu

SEQ ID NO: 665579 - RNA, 19 nt, Artificial Sequence
  Description of Artificial Sequence: Synthetic oligonucleotide
guacgcacucccuggcaga

SEQ ID NO: 665580 - RNA, 19 nt, Artificial Sequence
  Description of Artificial Sequence: Synthetic oligonucleotide
cucaugggcaagcuccgaa

SEQ ID NO: 665581 - RNA, 19 nt, Artificial Sequence
  Description of Artificial Sequence: Synthetic oligonucleotide
cacuuacacuugaggucac

SEQ ID NO: 665582 - RNA, 19 nt, Artificial Sequence
  Description of Artificial Sequence: Synthetic oligonucleotide
gucguacaaacugguagaa

SEQ ID NO: 665583 - RNA, 19 nt, Artificial Sequence
  Description of Artificial Sequence: Synthetic oligonucleotide
ggagggcuaagugagcgca

SEQ ID NO: 665584 - RNA, 19 nt, Artificial Sequence
  Description of Artificial Sequence: Synthetic oligonucleotide
guucagaccccaaccugga

SEQ ID NO: 665585 - RNA, 19 nt, Artificial Sequence
  Description of Artificial Sequence: Synthetic oligonucleotide
guucauccggauagcugac

SEQ ID NO: 665586 - RNA, 19 nt, Artificial Sequence
  Description of Artificial Sequence: Synthetic oligonucleotide
gguggggacgcacaaacau

SEQ ID NO: 665587 - RNA, 19 nt, Artificial Sequence
  Description of Artificial Sequence: Synthetic oligonucleotide
agaggccuguggagauacc

SEQ ID NO: 665588 - RNA, 19 nt, Artificial Sequence
  Description of Artificial Sequence: Synthetic oligonucleotide
agucccuguagccccuauu

SEQ ID NO: 665589 - RNA, 19 nt, Artificial Sequence
  Description of Artificial Sequence: Synthetic oligonucleotide
gcaaccuguagaucccaga

SEQ ID NO: 665590 - RNA, 19 nt, Artificial Sequence
  Description of Artificial Sequence: Synthetic oligonucleotide
ggggcuucggccagaagac

SEQ ID NO: 665591 - RNA, 19 nt, Artificial Sequence
  Description of Artificial Sequence: Synthetic oligonucleotide
ggauaaggguacgcacucc

SEQ ID NO: 665592 - RNA, 19 nt, Artificial Sequence
  Description of Artificial Sequence: Synthetic oligonucleotide
gccgggcacacaaaugaag

SEQ ID NO: 665593 - RNA, 19 nt, Artificial Sequence
  Description of Artificial Sequence: Synthetic oligonucleotide
aguugccaacaggcccggc

SEQ ID NO: 665594 - RNA, 19 nt, Artificial Sequence
  Description of Artificial Sequence: Synthetic oligonucleotide
cgcacacaauuccagugcc

SEQ ID NO: 665595 - RNA, 19 nt, Artificial Sequence
  Description of Artificial Sequence: Synthetic oligonucleotide
uacccuaggucuggccccu

SEQ ID NO: 665596 - RNA, 19 nt, Artificial Sequence
  Description of Artificial Sequence: Synthetic oligonucleotide
gagggcuaagugagcgcac

SEQ ID NO: 665597 - RNA, 19 nt, Artificial Sequence
  Description of Artificial Sequence: Synthetic oligonucleotide
cuaagugagcgcacacaau

SEQ ID NO: 665598 - RNA, 19 nt, Artificial Sequence
  Description of Artificial Sequence: Synthetic oligonucleotide
guguaccuuauaggaaugu

SEQ ID NO: 665599 - RNA, 19 nt, Artificial Sequence
  Description of Artificial Sequence: Synthetic oligonucleotide
ccuaggucuggccccucag

SEQ ID NO: 665600 - RNA, 19 nt, Artificial Sequence
  Description of Artificial Sequence: Synthetic oligonucleotide
gcucugcuuccuauuaaca

SEQ ID NO: 665601 - RNA, 19 nt, Artificial Sequence
  Description of Artificial Sequence: Synthetic oligonucleotide
cuguuagcuggaagcagau

SEQ ID NO: 665602 - RNA, 19 nt, Artificial Sequence
  Description of Artificial Sequence: Synthetic oligonucleotide
agcgccuugcccaggucau

SEQ ID NO: 665603 - RNA, 19 nt, Artificial Sequence
  Description of Artificial Sequence: Synthetic oligonucleotide
ccccuauugcuuacuccac

SEQ ID NO: 665604 - RNA, 19 nt, Artificial Sequence
  Description of Artificial Sequence: Synthetic oligonucleotide
uggcugcaaccuguagauc

SEQ ID NO: 665605 - RNA, 19 nt, Artificial Sequence
  Description of Artificial Sequence: Synthetic oligonucleotide
gggcaagcuccgaaggcac

SEQ ID NO: 665606 - RNA, 19 nt, Artificial Sequence
  Description of Artificial Sequence: Synthetic oligonucleotide
accgcaaucuggacacauu

SEQ ID NO: 665607 - RNA, 19 nt, Artificial Sequence
  Description of Artificial Sequence: Synthetic oligonucleotide
gcacaugucugcaggaagu

SEQ ID NO: 665608 - RNA, 19 nt, Artificial Sequence
  Description of Artificial Sequence: Synthetic oligonucleotide
aggcgaaccuguggucaca

SEQ ID NO: 665609 - RNA, 19 nt, Artificial Sequence
  Description of Artificial Sequence: Synthetic oligonucleotide
gcuugugguggggucguac

SEQ ID NO: 665610 - RNA, 19 nt, Artificial Sequence
  Description of Artificial Sequence: Synthetic oligonucleotide
acggaagaacugggauaca

SEQ ID NO: 665611 - RNA, 19 nt, Artificial Sequence
  Description of Artificial Sequence: Synthetic oligonucleotide
accuagggagagagagggu

SEQ ID NO: 665612 - RNA, 19 nt, Artificial Sequence
  Description of Artificial Sequence: Synthetic oligonucleotide
ggggacgcacaaacaugcc

SEQ ID NO: 665613 - RNA, 19 nt, Artificial Sequence
  Description of Artificial Sequence: Synthetic oligonucleotide
gggcacaugcacauccaaa

SEQ ID NO: 665614 - RNA, 19 nt, Artificial Sequence
  Description of Artificial Sequence: Synthetic oligonucleotide
ggguacgcacucccuggca

SEQ ID NO: 665615 - RNA, 19 nt, Artificial Sequence
  Description of Artificial Sequence: Synthetic oligonucleotide
gcucuggggugguaucauc

SEQ ID NO: 665616 - RNA, 19 nt, Artificial Sequence
  Description of Artificial Sequence: Synthetic oligonucleotide
gcagaccaguucacgcaug

SEQ ID NO: 665617 - RNA, 19 nt, Artificial Sequence
  Description of Artificial Sequence: Synthetic oligonucleotide
ggcuucggccagaagaccu

SEQ ID NO: 665618 - RNA, 19 nt, Artificial Sequence
  Description of Artificial Sequence: Synthetic oligonucleotide
gccugcguaaaggugucaa

SEQ ID NO: 665619 - RNA, 19 nt, Artificial Sequence
  Description of Artificial Sequence: Synthetic oligonucleotide
cacggaccucggcugggca

SEQ ID NO: 665620 - RNA, 19 nt, Artificial Sequence
  Description of Artificial Sequence: Synthetic oligonucleotide
ccugcguaaaggugucaaa

SEQ ID NO: 665621 - RNA, 19 nt, Artificial Sequence
  Description of Artificial Sequence: Synthetic oligonucleotide
guagccccuauugcuuacu

SEQ ID NO: 665622 - RNA, 19 nt, Artificial Sequence
  Description of Artificial Sequence: Synthetic oligonucleotide
cuagaggccuguggagaua

SEQ ID NO: 665623 - RNA, 19 nt, Artificial Sequence
  Description of Artificial Sequence: Synthetic oligonucleotide
guaugccuuuagagcuguc

SEQ ID NO: 665624 - RNA, 19 nt, Artificial Sequence
  Description of Artificial Sequence: Synthetic oligonucleotide
ggguguauguguaccuuau

SEQ ID NO: 665625 - RNA, 19 nt, Artificial Sequence
  Description of Artificial Sequence: Synthetic oligonucleotide
ggcaagcuccgaaggcaca

SEQ ID NO: 665626 - RNA, 19 nt, Artificial Sequence
  Description of Artificial Sequence: Synthetic oligonucleotide
ggagaaguguucagauuuu

SEQ ID NO: 665627 - RNA, 19 nt, Artificial Sequence
  Description of Artificial Sequence: Synthetic oligonucleotide
cugauaccaugaacagcuu

SEQ ID NO: 665628 - RNA, 19 nt, Artificial Sequence
  Description of Artificial Sequence: Synthetic oligonucleotide
ggcgaaccuguggucacaa

SEQ ID NO: 665629 - RNA, 19 nt, Artificial Sequence
  Description of Artificial Sequence: Synthetic oligonucleotide
gguccucagcaaagaggca

SEQ ID NO: 665630 - RNA, 19 nt, Artificial Sequence
  Description of Artificial Sequence: Synthetic oligonucleotide
cccuccgguggcugguuuc

SEQ ID NO: 665631 - RNA, 19 nt, Artificial Sequence
  Description of Artificial Sequence: Synthetic oligonucleotide
ugcuugugguggggucgua

SEQ ID NO: 665632 - RNA, 19 nt, Artificial Sequence
  Description of Artificial Sequence: Synthetic oligonucleotide
gggccugcguaaagguguc

SEQ ID NO: 665633 - RNA, 19 nt, Artificial Sequence
  Description of Artificial Sequence: Synthetic oligonucleotide
caggguguauguguaccuu

SEQ ID NO: 665634 - RNA, 19 nt, Artificial Sequence
  Description of Artificial Sequence: Synthetic oligonucleotide
caccgcaaucuggacacau

SEQ ID NO: 665635 - RNA, 19 nt, Artificial Sequence
  Description of Artificial Sequence: Synthetic oligonucleotide
gggauacaucucggaugac

SEQ ID NO: 665636 - RNA, 19 nt, Artificial Sequence
  Description of Artificial Sequence: Synthetic oligonucleotide
ccacggaccucggcugggc

SEQ ID NO: 665637 - RNA, 19 nt, Artificial Sequence
  Description of Artificial Sequence: Synthetic oligonucleotide
cucggaugacguggccaaa

SEQ ID NO: 665638 - RNA, 19 nt, Artificial Sequence
  Description of Artificial Sequence: Synthetic oligonucleotide
cccuuguuuccuagaugua

SEQ ID NO: 665639 - RNA, 19 nt, Artificial Sequence
  Description of Artificial Sequence: Synthetic oligonucleotide
cgggcacacaaaugaagcu

SEQ ID NO: 665640 - RNA, 19 nt, Artificial Sequence
  Description of Artificial Sequence: Synthetic oligonucleotide
cccuaggucuggccccuca

SEQ ID NO: 665641 - RNA, 19 nt, Artificial Sequence
  Description of Artificial Sequence: Synthetic oligonucleotide
ggccugcguaaagguguca

SEQ ID NO: 665642 - RNA, 19 nt, Artificial Sequence
  Description of Artificial Sequence: Synthetic oligonucleotide
ggacacugagggaccuggu

SEQ ID NO: 665643 - RNA, 19 nt, Artificial Sequence
  Description of Artificial Sequence: Synthetic oligonucleotide
ccucggcugggcagaaacu

SEQ ID NO: 665644 - RNA, 19 nt, Artificial Sequence
  Description of Artificial Sequence: Synthetic oligonucleotide
caggcccggcagcgguaga

SEQ ID NO: 665645 - RNA, 19 nt, Artificial Sequence
  Description of Artificial Sequence: Synthetic oligonucleotide
cggcagcgguagaaaucac

SEQ ID NO: 665646 - RNA, 19 nt, Artificial Sequence
  Description of Artificial Sequence: Synthetic oligonucleotide
ccuagauguaguggugcuu

SEQ ID NO: 665647 - RNA, 19 nt, Artificial Sequence
  Description of Artificial Sequence: Synthetic oligonucleotide
cggaugacguggccaaagu

SEQ ID NO: 665648 - RNA, 19 nt, Artificial Sequence
  Description of Artificial Sequence: Synthetic oligonucleotide
cagucccuguagccccuau

SEQ ID NO: 665649 - RNA, 19 nt, Artificial Sequence
  Description of Artificial Sequence: Synthetic oligonucleotide
cggaccucggcugggcaga

SEQ ID NO: 665650 - RNA, 19 nt, Artificial Sequence
  Description of Artificial Sequence: Synthetic oligonucleotide
gcaccgcaaucuggacaca

SEQ ID NO: 665651 - RNA, 19 nt, Artificial Sequence
  Description of Artificial Sequence: Synthetic oligonucleotide
gcgaaccuguggucacaau

SEQ ID NO: 665652 - RNA, 19 nt, Artificial Sequence
  Description of Artificial Sequence: Synthetic oligonucleotide
ggaccucggcugggcagaa

SEQ ID NO: 665653 - RNA, 19 nt, Artificial Sequence
  Description of Artificial Sequence: Synthetic oligonucleotide
gugugccgcuggugaggau

SEQ ID NO: 665654 - RNA, 19 nt, Artificial Sequence
  Description of Artificial Sequence: Synthetic oligonucleotide
ccccugcuugugguaggca

SEQ ID NO: 665655 - RNA, 19 nt, Artificial Sequence
  Description of Artificial Sequence: Synthetic oligonucleotide
gcccuccgguggcugguuu

SEQ ID NO: 665656 - RNA, 19 nt, Artificial Sequence
  Description of Artificial Sequence: Synthetic oligonucleotide
ugacauauaacuuagacgg

SEQ ID NO: 665657 - RNA, 19 nt, Artificial Sequence
  Description of Artificial Sequence: Synthetic oligonucleotide
uguaaauucaagcuuguag

SEQ ID NO: 665658 - RNA, 19 nt, Artificial Sequence
  Description of Artificial Sequence: Synthetic oligonucleotide
aggaaguuaauauggaacc

SEQ ID NO: 665659 - RNA, 19 nt, Artificial Sequence
  Description of Artificial Sequence: Synthetic oligonucleotide
uacgucagcuguuagaugg

SEQ ID NO: 665660 - RNA, 19 nt, Artificial Sequence
  Description of Artificial Sequence: Synthetic oligonucleotide
augacauauaacuuagacg

SEQ ID NO: 665661 - RNA, 19 nt, Artificial Sequence
  Description of Artificial Sequence: Synthetic oligonucleotide
agaaguuggguauuuugcc

SEQ ID NO: 665662 - RNA, 19 nt, Artificial Sequence
  Description of Artificial Sequence: Synthetic oligonucleotide
uauaacuuagacgggaagg

SEQ ID NO: 665663 - RNA, 19 nt, Artificial Sequence
  Description of Artificial Sequence: Synthetic oligonucleotide
aggaaugucgaagugaccc

SEQ ID NO: 665664 - RNA, 19 nt, Artificial Sequence
  Description of Artificial Sequence: Synthetic oligonucleotide
ugauuucucauccuaagca

SEQ ID NO: 665665 - RNA, 19 nt, Artificial Sequence
  Description of Artificial Sequence: Synthetic oligonucleotide
aaguuugccaugcacauga

SEQ ID NO: 665666 - RNA, 19 nt, Artificial Sequence
  Description of Artificial Sequence: Synthetic oligonucleotide
aaacuaggaaguuaauaug

SEQ ID NO: 665667 - RNA, 19 nt, Artificial Sequence
  Description of Artificial Sequence: Synthetic oligonucleotide
uuuacacagauguaguuac

SEQ ID NO: 665668 - RNA, 19 nt, Artificial Sequence
  Description of Artificial Sequence: Synthetic oligonucleotide
ugcuguaaauucaagcuug

SEQ ID NO: 665669 - RNA, 19 nt, Artificial Sequence
  Description of Artificial Sequence: Synthetic oligonucleotide
aauuccuaauugccgacag

SEQ ID NO: 665670 - RNA, 19 nt, Artificial Sequence
  Description of Artificial Sequence: Synthetic oligonucleotide
uaaggaaugucgaagugac

SEQ ID NO: 665671 - RNA, 19 nt, Artificial Sequence
  Description of Artificial Sequence: Synthetic oligonucleotide
uggacaauauugcaaacac

SEQ ID NO: 665672 - RNA, 19 nt, Artificial Sequence
  Description of Artificial Sequence: Synthetic oligonucleotide
aaauuuguaccucaagaua

SEQ ID NO: 665673 - RNA, 19 nt, Artificial Sequence
  Description of Artificial Sequence: Synthetic oligonucleotide
uuucaggcuaccauggagc

SEQ ID NO: 665674 - RNA, 19 nt, Artificial Sequence
  Description of Artificial Sequence: Synthetic oligonucleotide
agugcuaugggcaagacca

SEQ ID NO: 665675 - RNA, 19 nt, Artificial Sequence
  Description of Artificial Sequence: Synthetic oligonucleotide
guuaauauggaacccaaga

SEQ ID NO: 665676 - RNA, 19 nt, Artificial Sequence
  Description of Artificial Sequence: Synthetic oligonucleotide
aaguuggguauuuugccag

SEQ ID NO: 665677 - RNA, 19 nt, Artificial Sequence
  Description of Artificial Sequence: Synthetic oligonucleotide
uuugauucugaguagcuaa

SEQ ID NO: 665678 - RNA, 19 nt, Artificial Sequence
  Description of Artificial Sequence: Synthetic oligonucleotide
caagcuuguaguuuguagc

SEQ ID NO: 665679 - RNA, 19 nt, Artificial Sequence
  Description of Artificial Sequence: Synthetic oligonucleotide
caugacauauaacuuagac

SEQ ID NO: 665680 - RNA, 19 nt, Artificial Sequence
  Description of Artificial Sequence: Synthetic oligonucleotide
aagugcuaugggcaagacc

SEQ ID NO: 665681 - RNA, 19 nt, Artificial Sequence
  Description of Artificial Sequence: Synthetic oligonucleotide
aaagguguaaauuccuaau

SEQ ID NO: 665682 - RNA, 19 nt, Artificial Sequence
  Description of Artificial Sequence: Synthetic oligonucleotide
uuguaaucucuugugaagg

SEQ ID NO: 665683 - RNA, 19 nt, Artificial Sequence
  Description of Artificial Sequence: Synthetic oligonucleotide
uguaaucucuugugaaggg

SEQ ID NO: 665684 - RNA, 19 nt, Artificial Sequence
  Description of Artificial Sequence: Synthetic oligonucleotide
uaugccaggucuaucagcu

SEQ ID NO: 665685 - RNA, 19 nt, Artificial Sequence
  Description of Artificial Sequence: Synthetic oligonucleotide
cuaagauagagcaaaacaa

SEQ ID NO: 665686 - RNA, 19 nt, Artificial Sequence
  Description of Artificial Sequence: Synthetic oligonucleotide
auaacuuagacgggaaggg

SEQ ID NO: 665687 - RNA, 19 nt, Artificial Sequence
  Description of Artificial Sequence: Synthetic oligonucleotide
ucaagcuuguaguuuguag

SEQ ID NO: 665688 - RNA, 19 nt, Artificial Sequence
  Description of Artificial Sequence: Synthetic oligonucleotide
uguacaucugucugcaggc

SEQ ID NO: 665689 - RNA, 19 nt, Artificial Sequence
  Description of Artificial Sequence: Synthetic oligonucleotide
gaaacuaggaaguuaauau

SEQ ID NO: 665690 - RNA, 19 nt, Artificial Sequence
  Description of Artificial Sequence: Synthetic oligonucleotide
agcagguuuugucauaauc

SEQ ID NO: 665691 - RNA, 19 nt, Artificial Sequence
  Description of Artificial Sequence: Synthetic oligonucleotide
uucaccguuguuuaagucu

SEQ ID NO: 665692 - RNA, 19 nt, Artificial Sequence
  Description of Artificial Sequence: Synthetic oligonucleotide
auaaggguuuucuuuagca

SEQ ID NO: 665693 - RNA, 19 nt, Artificial Sequence
  Description of Artificial Sequence: Synthetic oligonucleotide
uguuuaagucuaugagucg

SEQ ID NO: 665694 - RNA, 19 nt, Artificial Sequence
  Description of Artificial Sequence: Synthetic oligonucleotide
guaacaaaaggcucuggcc

SEQ ID NO: 665695 - RNA, 19 nt, Artificial Sequence
  Description of Artificial Sequence: Synthetic oligonucleotide
guuguaaucucuugugaag

SEQ ID NO: 665696 - RNA, 19 nt, Artificial Sequence
  Description of Artificial Sequence: Synthetic oligonucleotide
uaaugcagacuccaagcag

SEQ ID NO: 665697 - RNA, 19 nt, Artificial Sequence
  Description of Artificial Sequence: Synthetic oligonucleotide
gauuucucauccuaagcac

SEQ ID NO: 665698 - RNA, 19 nt, Artificial Sequence
  Description of Artificial Sequence: Synthetic oligonucleotide
uuucguaaccuguucagcu

SEQ ID NO: 665699 - RNA, 19 nt, Artificial Sequence
  Description of Artificial Sequence: Synthetic oligonucleotide
cacaugacauauaacuuag

SEQ ID NO: 665700 - RNA, 19 nt, Artificial Sequence
  Description of Artificial Sequence: Synthetic oligonucleotide
aagacagccaucagucacc

SEQ ID NO: 665701 - RNA, 19 nt, Artificial Sequence
  Description of Artificial Sequence: Synthetic oligonucleotide
ugaguagagcauuccaugc

SEQ ID NO: 665702 - RNA, 19 nt, Artificial Sequence
  Description of Artificial Sequence: Synthetic oligonucleotide
aaaucuguguuaaugacuu

SEQ ID NO: 665703 - RNA, 19 nt, Artificial Sequence
  Description of Artificial Sequence: Synthetic oligonucleotide
guaaauucaagcuuguagu

SEQ ID NO: 665704 - RNA, 19 nt, Artificial Sequence
  Description of Artificial Sequence: Synthetic oligonucleotide
uaugagucguucaaggcau

SEQ ID NO: 665705 - RNA, 19 nt, Artificial Sequence
  Description of Artificial Sequence: Synthetic oligonucleotide
cuuuguuaagugcuauggg

SEQ ID NO: 665706 - RNA, 19 nt, Artificial Sequence
  Description of Artificial Sequence: Synthetic oligonucleotide
uguuguaaucucuugugaa

SEQ ID NO: 665707 - RNA, 19 nt, Artificial Sequence
  Description of Artificial Sequence: Synthetic oligonucleotide
aucaauaaagcccacuauu

SEQ ID NO: 665708 - RNA, 19 nt, Artificial Sequence
  Description of Artificial Sequence: Synthetic oligonucleotide
ucuaugagucguucaaggc

SEQ ID NO: 665709 - RNA, 19 nt, Artificial Sequence
  Description of Artificial Sequence: Synthetic oligonucleotide
gaaggggaccaucaguucc

SEQ ID NO: 665710 - RNA, 19 nt, Artificial Sequence
  Description of Artificial Sequence: Synthetic oligonucleotide
uuauauucaagggcuaaga

SEQ ID NO: 665711 - RNA, 19 nt, Artificial Sequence
  Description of Artificial Sequence: Synthetic oligonucleotide
augucaagaauugggaauc

SEQ ID NO: 665712 - RNA, 19 nt, Artificial Sequence
  Description of Artificial Sequence: Synthetic oligonucleotide
uuugaaacucagugucagg

SEQ ID NO: 665713 - RNA, 19 nt, Artificial Sequence
  Description of Artificial Sequence: Synthetic oligonucleotide
ucguucaaggcauucuaag

SEQ ID NO: 665714 - RNA, 19 nt, Artificial Sequence
  Description of Artificial Sequence: Synthetic oligonucleotide
uguuccuaaaugaaaucau

SEQ ID NO: 665715 - RNA, 19 nt, Artificial Sequence
  Description of Artificial Sequence: Synthetic oligonucleotide
aagguguaaauuccuaauu

SEQ ID NO: 665716 - RNA, 19 nt, Artificial Sequence
  Description of Artificial Sequence: Synthetic oligonucleotide
gguguaaauuccuaauugc

SEQ ID NO: 665717 - RNA, 19 nt, Artificial Sequence
  Description of Artificial Sequence: Synthetic oligonucleotide
auugcaaacaccaacuaau

SEQ ID NO: 665718 - RNA, 19 nt, Artificial Sequence
  Description of Artificial Sequence: Synthetic oligonucleotide
accaucaguucccaaagug

SEQ ID NO: 665719 - RNA, 19 nt, Artificial Sequence
  Description of Artificial Sequence: Synthetic oligonucleotide
ugugaguagagcauuccau

SEQ ID NO: 665720 - RNA, 19 nt, Artificial Sequence
  Description of Artificial Sequence: Synthetic oligonucleotide
gucgaagugacccucugcc

SEQ ID NO: 665721 - RNA, 19 nt, Artificial Sequence
  Description of Artificial Sequence: Synthetic oligonucleotide
guucaaggcauucuaagga

SEQ ID NO: 665722 - RNA, 19 nt, Artificial Sequence
  Description of Artificial Sequence: Synthetic oligonucleotide
aaaaccaccagugcuguaa

SEQ ID NO: 665723 - RNA, 19 nt, Artificial Sequence
  Description of Artificial Sequence: Synthetic oligonucleotide
aguuguacaauugccacca

SEQ ID NO: 665724 - RNA, 19 nt, Artificial Sequence
  Description of Artificial Sequence: Synthetic oligonucleotide
aaaugggacccaacugugc

SEQ ID NO: 665725 - RNA, 19 nt, Artificial Sequence
  Description of Artificial Sequence: Synthetic oligonucleotide
acauccauuaccaccacag

SEQ ID NO: 665726 - RNA, 19 nt, Artificial Sequence
  Description of Artificial Sequence: Synthetic oligonucleotide
uaguuuguagccauguguu

SEQ ID NO: 665727 - RNA, 19 nt, Artificial Sequence
  Description of Artificial Sequence: Synthetic oligonucleotide
uggaaagcgacacauccau

SEQ ID NO: 665728 - RNA, 19 nt, Artificial Sequence
  Description of Artificial Sequence: Synthetic oligonucleotide
uucaagggcuaagauagag

SEQ ID NO: 665729 - RNA, 19 nt, Artificial Sequence
  Description of Artificial Sequence: Synthetic oligonucleotide
accuaguuguacaauugcc

SEQ ID NO: 665730 - RNA, 19 nt, Artificial Sequence
  Description of Artificial Sequence: Synthetic oligonucleotide
aguuggguauuuugccagc

SEQ ID NO: 665731 - RNA, 19 nt, Artificial Sequence
  Description of Artificial Sequence: Synthetic oligonucleotide
cuacuuucaggcuaccaug

SEQ ID NO: 665732 - RNA, 19 nt, Artificial Sequence
  Description of Artificial Sequence: Synthetic oligonucleotide
uguaguuuguagccaugug

SEQ ID NO: 665733 - RNA, 19 nt, Artificial Sequence
  Description of Artificial Sequence: Synthetic oligonucleotide
ucguaaccuguucagcucc

SEQ ID NO: 665734 - RNA, 19 nt, Artificial Sequence
  Description of Artificial Sequence: Synthetic oligonucleotide
gaccuaguuguacaauugc

SEQ ID NO: 665735 - RNA, 19 nt, Artificial Sequence
  Description of Artificial Sequence: Synthetic oligonucleotide
gaaagcgacacauccauua

SEQ ID NO: 665736 - RNA, 19 nt, Artificial Sequence
  Description of Artificial Sequence: Synthetic oligonucleotide
gaaguuaauauggaaccca

SEQ ID NO: 665737 - RNA, 19 nt, Artificial Sequence
  Description of Artificial Sequence: Synthetic oligonucleotide
uguacuuaggcaaguucaa

SEQ ID NO: 665738 - RNA, 19 nt, Artificial Sequence
  Description of Artificial Sequence: Synthetic oligonucleotide
uugugaguagagcauucca

SEQ ID NO: 665739 - RNA, 19 nt, Artificial Sequence
  Description of Artificial Sequence: Synthetic oligonucleotide
agagcauuccaugccauuc

SEQ ID NO: 665740 - RNA, 19 nt, Artificial Sequence
  Description of Artificial Sequence: Synthetic oligonucleotide
aguuuguagccauguguuc

SEQ ID NO: 665741 - RNA, 19 nt, Artificial Sequence
  Description of Artificial Sequence: Synthetic oligonucleotide
gaaguuggguauuuugcca

SEQ ID NO: 665742 - RNA, 19 nt, Artificial Sequence
  Description of Artificial Sequence: Synthetic oligonucleotide
uaaauucaagcuuguaguu

SEQ ID NO: 665743 - RNA, 19 nt, Artificial Sequence
  Description of Artificial Sequence: Synthetic oligonucleotide
aaauagcaucgucaagcca

SEQ ID NO: 665744 - RNA, 19 nt, Artificial Sequence
  Description of Artificial Sequence: Synthetic oligonucleotide
uuuccaaacauagacugua

SEQ ID NO: 665745 - RNA, 19 nt, Artificial Sequence
  Description of Artificial Sequence: Synthetic oligonucleotide
uccuuauagaaugucugug

SEQ ID NO: 665746 - RNA, 19 nt, Artificial Sequence
  Description of Artificial Sequence: Synthetic oligonucleotide
cuuucaggcuaccauggag

SEQ ID NO: 665747 - RNA, 19 nt, Artificial Sequence
  Description of Artificial Sequence: Synthetic oligonucleotide
auuugauuggcugaguuuu

SEQ ID NO: 665748 - RNA, 19 nt, Artificial Sequence
  Description of Artificial Sequence: Synthetic oligonucleotide
cugauuucucauccuaagc

SEQ ID NO: 665749 - RNA, 19 nt, Artificial Sequence
  Description of Artificial Sequence: Synthetic oligonucleotide
uauaucaauaaagcccacu

SEQ ID NO: 665750 - RNA, 19 nt, Artificial Sequence
  Description of Artificial Sequence: Synthetic oligonucleotide
uggaaaggcguguaugcca

SEQ ID NO: 665751 - RNA, 19 nt, Artificial Sequence
  Description of Artificial Sequence: Synthetic oligonucleotide
ucuaaggaaucagugcucu

SEQ ID NO: 665752 - RNA, 19 nt, Artificial Sequence
  Description of Artificial Sequence: Synthetic oligonucleotide
uaaauuccuaauugccgac

SEQ ID NO: 665753 - RNA, 19 nt, Artificial Sequence
  Description of Artificial Sequence: Synthetic oligonucleotide
auauguuccuaaaugaaau

SEQ ID NO: 665754 - RNA, 19 nt, Artificial Sequence
  Description of Artificial Sequence: Synthetic oligonucleotide
uggggauaggaucaauuuc

SEQ ID NO: 665755 - RNA, 19 nt, Artificial Sequence
  Description of Artificial Sequence: Synthetic oligonucleotide
agcaauuugauuggcugag

SEQ ID NO: 665756 - RNA, 19 nt, Artificial Sequence
  Description of Artificial Sequence: Synthetic oligonucleotide
caucacauucguucagugc

SEQ ID NO: 665757 - RNA, 19 nt, Artificial Sequence
  Description of Artificial Sequence: Synthetic oligonucleotide
cuaugagucguucaaggca

SEQ ID NO: 665758 - RNA, 19 nt, Artificial Sequence
  Description of Artificial Sequence: Synthetic oligonucleotide
uuuggggauaggaucaauu

SEQ ID NO: 665759 - RNA, 19 nt, Artificial Sequence
  Description of Artificial Sequence: Synthetic oligonucleotide
aaauucaagcuuguaguuu

SEQ ID NO: 665760 - RNA, 19 nt, Artificial Sequence
  Description of Artificial Sequence: Synthetic oligonucleotide
gacauauaacuuagacggg

SEQ ID NO: 665761 - RNA, 19 nt, Artificial Sequence
  Description of Artificial Sequence: Synthetic oligonucleotide
aacagcauggaaaggcgug

SEQ ID NO: 665762 - RNA, 19 nt, Artificial Sequence
  Description of Artificial Sequence: Synthetic oligonucleotide
ucucuugugaaggggacca

SEQ ID NO: 665763 - RNA, 19 nt, Artificial Sequence
  Description of Artificial Sequence: Synthetic oligonucleotide
aaggaaucagugcucugaa

SEQ ID NO: 665764 - RNA, 19 nt, Artificial Sequence
  Description of Artificial Sequence: Synthetic oligonucleotide
caucuguaacaaaaggcuc

SEQ ID NO: 665765 - RNA, 19 nt, Artificial Sequence
  Description of Artificial Sequence: Synthetic oligonucleotide
cuaagcacaguaguuuaag

SEQ ID NO: 665766 - RNA, 19 nt, Artificial Sequence
  Description of Artificial Sequence: Synthetic oligonucleotide
cauauguuccuaaaugaaa

SEQ ID NO: 665767 - RNA, 19 nt, Artificial Sequence
  Description of Artificial Sequence: Synthetic oligonucleotide
ucaccguuguuuaagucua

SEQ ID NO: 665768 - RNA, 19 nt, Artificial Sequence
  Description of Artificial Sequence: Synthetic oligonucleotide
guucaaauagcaucgucaa

SEQ ID NO: 665769 - RNA, 19 nt, Artificial Sequence
  Description of Artificial Sequence: Synthetic oligonucleotide
uguuaaugacuuuggggau

SEQ ID NO: 665770 - RNA, 19 nt, Artificial Sequence
  Description of Artificial Sequence: Synthetic oligonucleotide
acaguaguuuaagaauguc

SEQ ID NO: 665771 - RNA, 19 nt, Artificial Sequence
  Description of Artificial Sequence: Synthetic oligonucleotide
uggguauuuugccagcaau

SEQ ID NO: 665772 - RNA, 19 nt, Artificial Sequence
  Description of Artificial Sequence: Synthetic oligonucleotide
cugaaaugggacccaacug

SEQ ID NO: 665773 - RNA, 19 nt, Artificial Sequence
  Description of Artificial Sequence: Synthetic oligonucleotide
caccaacuaaugcagacuc

SEQ ID NO: 665774 - RNA, 19 nt, Artificial Sequence
  Description of Artificial Sequence: Synthetic oligonucleotide
uuagauggccacacuugac

SEQ ID NO: 665775 - RNA, 19 nt, Artificial Sequence
  Description of Artificial Sequence: Synthetic oligonucleotide
cauguuacucagugcuucc

SEQ ID NO: 665776 - RNA, 19 nt, Artificial Sequence
  Description of Artificial Sequence: Synthetic oligonucleotide
gccuggacaaaacuggagg

SEQ ID NO: 665777 - RNA, 19 nt, Artificial Sequence
  Description of Artificial Sequence: Synthetic oligonucleotide
uucuaaggaaucagugcuc

SEQ ID NO: 665778 - RNA, 19 nt, Artificial Sequence
  Description of Artificial Sequence: Synthetic oligonucleotide
uuggggauaggaucaauuu

SEQ ID NO: 665779 - RNA, 19 nt, Artificial Sequence
  Description of Artificial Sequence: Synthetic oligonucleotide
agaagcaccugagcauugc

SEQ ID NO: 665780 - RNA, 19 nt, Artificial Sequence
  Description of Artificial Sequence: Synthetic oligonucleotide
ucacauucguucagugcug

SEQ ID NO: 665781 - RNA, 19 nt, Artificial Sequence
  Description of Artificial Sequence: Synthetic oligonucleotide
uggaaugcggcaucugggu

SEQ ID NO: 665782 - RNA, 19 nt, Artificial Sequence
  Description of Artificial Sequence: Synthetic oligonucleotide
ugccuggacaaaacuggag

SEQ ID NO: 665783 - RNA, 19 nt, Artificial Sequence
  Description of Artificial Sequence: Synthetic oligonucleotide
aacuuagacgggaagggaa

SEQ ID NO: 665784 - RNA, 19 nt, Artificial Sequence
  Description of Artificial Sequence: Synthetic oligonucleotide
uucaggcuaccauggagca

SEQ ID NO: 665785 - RNA, 19 nt, Artificial Sequence
  Description of Artificial Sequence: Synthetic oligonucleotide
guaguuuguagccaugugu

SEQ ID NO: 665786 - RNA, 19 nt, Artificial Sequence
  Description of Artificial Sequence: Synthetic oligonucleotide
aaguuaauauggaacccaa

SEQ ID NO: 665787 - RNA, 19 nt, Artificial Sequence
  Description of Artificial Sequence: Synthetic oligonucleotide
auaaagcccacuauuucca

SEQ ID NO: 665788 - RNA, 19 nt, Artificial Sequence
  Description of Artificial Sequence: Synthetic oligonucleotide
cacaaggggccaucaauag

SEQ ID NO: 665789 - RNA, 19 nt, Artificial Sequence
  Description of Artificial Sequence: Synthetic oligonucleotide
aggcguguaugccaggucu

SEQ ID NO: 665790 - RNA, 19 nt, Artificial Sequence
  Description of Artificial Sequence: Synthetic oligonucleotide
gacuuuggggauaggauca

SEQ ID NO: 665791 - RNA, 19 nt, Artificial Sequence
  Description of Artificial Sequence: Synthetic oligonucleotide
uuaagaucuucuguacauc

SEQ ID NO: 665792 - RNA, 19 nt, Artificial Sequence
  Description of Artificial Sequence: Synthetic oligonucleotide
ccuggcaaggaauugcucc

SEQ ID NO: 665793 - RNA, 19 nt, Artificial Sequence
  Description of Artificial Sequence: Synthetic oligonucleotide
uccuaagcacaguaguuua

SEQ ID NO: 665794 - RNA, 19 nt, Artificial Sequence
  Description of Artificial Sequence: Synthetic oligonucleotide
aagucuguaugcaggggug

SEQ ID NO: 665795 - RNA, 19 nt, Artificial Sequence
  Description of Artificial Sequence: Synthetic oligonucleotide
auugccaccauuccuucua

SEQ ID NO: 665796 - RNA, 19 nt, Artificial Sequence
  Description of Artificial Sequence: Synthetic oligonucleotide
uucguaaccuguucagcuc

SEQ ID NO: 665797 - RNA, 19 nt, Artificial Sequence
  Description of Artificial Sequence: Synthetic oligonucleotide
uggaaauaucagcuauauc

SEQ ID NO: 665798 - RNA, 19 nt, Artificial Sequence
  Description of Artificial Sequence: Synthetic oligonucleotide
uuugauuggcugaguuuuc

SEQ ID NO: 665799 - RNA, 19 nt, Artificial Sequence
  Description of Artificial Sequence: Synthetic oligonucleotide
caugcacaugacauauaac

SEQ ID NO: 665800 - RNA, 19 nt, Artificial Sequence
  Description of Artificial Sequence: Synthetic oligonucleotide
gcugauuucucauccuaag

SEQ ID NO: 665801 - RNA, 19 nt, Artificial Sequence
  Description of Artificial Sequence: Synthetic oligonucleotide
cuugugaguagagcauucc

SEQ ID NO: 665802 - RNA, 19 nt, Artificial Sequence
  Description of Artificial Sequence: Synthetic oligonucleotide
ggucgggucauggaaagcg

SEQ ID NO: 665803 - RNA, 19 nt, Artificial Sequence
  Description of Artificial Sequence: Synthetic oligonucleotide
agcgacacauccauuacca

SEQ ID NO: 665804 - RNA, 19 nt, Artificial Sequence
  Description of Artificial Sequence: Synthetic oligonucleotide
aaaccaccagugcuguaaa

SEQ ID NO: 665805 - RNA, 19 nt, Artificial Sequence
  Description of Artificial Sequence: Synthetic oligonucleotide
aggaccuaguuguacaauu

SEQ ID NO: 665806 - RNA, 19 nt, Artificial Sequence
  Description of Artificial Sequence: Synthetic oligonucleotide
accaacuaaugcagacucc

SEQ ID NO: 665807 - RNA, 19 nt, Artificial Sequence
  Description of Artificial Sequence: Synthetic oligonucleotide
uaacuuagacgggaaggga

SEQ ID NO: 665808 - RNA, 19 nt, Artificial Sequence
  Description of Artificial Sequence: Synthetic oligonucleotide
gacgggaagggaaagggga

SEQ ID NO: 665809 - RNA, 19 nt, Artificial Sequence
  Description of Artificial Sequence: Synthetic oligonucleotide
ugaguagcuaaggaauguc

SEQ ID NO: 665810 - RNA, 19 nt, Artificial Sequence
  Description of Artificial Sequence: Synthetic oligonucleotide
aguuaauauggaacccaag

SEQ ID NO: 665811 - RNA, 19 nt, Artificial Sequence
  Description of Artificial Sequence: Synthetic oligonucleotide
acauauguuccuaaaugaa

SEQ ID NO: 665812 - RNA, 19 nt, Artificial Sequence
  Description of Artificial Sequence: Synthetic oligonucleotide
agucuaugagucguucaag

SEQ ID NO: 665813 - RNA, 19 nt, Artificial Sequence
  Description of Artificial Sequence: Synthetic oligonucleotide
ucagggagcuuccuugcau

SEQ ID NO: 665814 - RNA, 19 nt, Artificial Sequence
  Description of Artificial Sequence: Synthetic oligonucleotide
acaaggggccaucaauagu

SEQ ID NO: 665815 - RNA, 19 nt, Artificial Sequence
  Description of Artificial Sequence: Synthetic oligonucleotide
ucauggaaagcgacacauc

SEQ ID NO: 665816 - RNA, 19 nt, Artificial Sequence
  Description of Artificial Sequence: Synthetic oligonucleotide
cuuaagaucuucuguacau

SEQ ID NO: 665817 - RNA, 19 nt, Artificial Sequence
  Description of Artificial Sequence: Synthetic oligonucleotide
acuccuuuaagcaggucca

SEQ ID NO: 665818 - RNA, 19 nt, Artificial Sequence
  Description of Artificial Sequence: Synthetic oligonucleotide
agucguucaaggcauucua

SEQ ID NO: 665819 - RNA, 19 nt, Artificial Sequence
  Description of Artificial Sequence: Synthetic oligonucleotide
guguuguaaucucuuguga

SEQ ID NO: 665820 - RNA, 19 nt, Artificial Sequence
  Description of Artificial Sequence: Synthetic oligonucleotide
uccuaauugccgacagaaa

SEQ ID NO: 665821 - RNA, 19 nt, Artificial Sequence
  Description of Artificial Sequence: Synthetic oligonucleotide
acaaaaggcucuggccugg

SEQ ID NO: 665822 - RNA, 19 nt, Artificial Sequence
  Description of Artificial Sequence: Synthetic oligonucleotide
auucuugcuggacaauauu

SEQ ID NO: 665823 - RNA, 19 nt, Artificial Sequence
  Description of Artificial Sequence: Synthetic oligonucleotide
caugggugagcuggaaugc

SEQ ID NO: 665824 - RNA, 19 nt, Artificial Sequence
  Description of Artificial Sequence: Synthetic oligonucleotide
aauugccgacagaaacuag

SEQ ID NO: 665825 - RNA, 19 nt, Artificial Sequence
  Description of Artificial Sequence: Synthetic oligonucleotide
aguucccaaagugaugaga

SEQ ID NO: 665826 - RNA, 19 nt, Artificial Sequence
  Description of Artificial Sequence: Synthetic oligonucleotide
ucgaagugacccucugcca

SEQ ID NO: 665827 - RNA, 19 nt, Artificial Sequence
  Description of Artificial Sequence: Synthetic oligonucleotide
ggcuaaagguguaaauucc

SEQ ID NO: 665828 - RNA, 19 nt, Artificial Sequence
  Description of Artificial Sequence: Synthetic oligonucleotide
uuggguauuuugccagcaa

SEQ ID NO: 665829 - RNA, 19 nt, Artificial Sequence
  Description of Artificial Sequence: Synthetic oligonucleotide
cuuagacgggaagggaaag

SEQ ID NO: 665830 - RNA, 19 nt, Artificial Sequence
  Description of Artificial Sequence: Synthetic oligonucleotide
gcauucuaaggaaucagug

SEQ ID NO: 665831 - RNA, 19 nt, Artificial Sequence
  Description of Artificial Sequence: Synthetic oligonucleotide
cauucguucagugcugcuc

SEQ ID NO: 665832 - RNA, 19 nt, Artificial Sequence
  Description of Artificial Sequence: Synthetic oligonucleotide
auuccuaauugccgacaga

SEQ ID NO: 665833 - RNA, 19 nt, Artificial Sequence
  Description of Artificial Sequence: Synthetic oligonucleotide
cuauaucaauaaagcccac

SEQ ID NO: 665834 - RNA, 19 nt, Artificial Sequence
  Description of Artificial Sequence: Synthetic oligonucleotide
cuuguacgucagcuguuag

SEQ ID NO: 665835 - RNA, 19 nt, Artificial Sequence
  Description of Artificial Sequence: Synthetic oligonucleotide
augacuuuggggauaggau

SEQ ID NO: 665836 - RNA, 19 nt, Artificial Sequence
  Description of Artificial Sequence: Synthetic oligonucleotide
uguguucaaauagcaucgu

SEQ ID NO: 665837 - RNA, 19 nt, Artificial Sequence
  Description of Artificial Sequence: Synthetic oligonucleotide
cacgggagagguucugggc

SEQ ID NO: 665838 - RNA, 19 nt, Artificial Sequence
  Description of Artificial Sequence: Synthetic oligonucleotide
gaaugucgaagugacccuc

SEQ ID NO: 665839 - RNA, 19 nt, Artificial Sequence
  Description of Artificial Sequence: Synthetic oligonucleotide
gacucuucuaucagugcuc

SEQ ID NO: 665840 - RNA, 19 nt, Artificial Sequence
  Description of Artificial Sequence: Synthetic oligonucleotide
uguccgccacuccuuuaag

SEQ ID NO: 665841 - RNA, 19 nt, Artificial Sequence
  Description of Artificial Sequence: Synthetic oligonucleotide
uuacucagugcuuccugua

SEQ ID NO: 665842 - RNA, 19 nt, Artificial Sequence
  Description of Artificial Sequence: Synthetic oligonucleotide
uggguuugauccagacagu

SEQ ID NO: 665843 - RNA, 19 nt, Artificial Sequence
  Description of Artificial Sequence: Synthetic oligonucleotide
auguccgccacuccuuuaa

SEQ ID NO: 665844 - RNA, 19 nt, Artificial Sequence
  Description of Artificial Sequence: Synthetic oligonucleotide
guacacagaaguuggguau

SEQ ID NO: 665845 - RNA, 19 nt, Artificial Sequence
  Description of Artificial Sequence: Synthetic oligonucleotide
gaauuauauucaagggcua

SEQ ID NO: 665846 - RNA, 19 nt, Artificial Sequence
  Description of Artificial Sequence: Synthetic oligonucleotide
augucgaagugacccucug

SEQ ID NO: 665847 - RNA, 19 nt, Artificial Sequence
  Description of Artificial Sequence: Synthetic oligonucleotide
acgucagcuguuagauggc

SEQ ID NO: 665848 - RNA, 19 nt, Artificial Sequence
  Description of Artificial Sequence: Synthetic oligonucleotide
cacauucguucagugcugc

SEQ ID NO: 665849 - RNA, 19 nt, Artificial Sequence
  Description of Artificial Sequence: Synthetic oligonucleotide
aacuggagggcuggaaaua

SEQ ID NO: 665850 - RNA, 19 nt, Artificial Sequence
  Description of Artificial Sequence: Synthetic oligonucleotide
guaccucaagauacagcag

SEQ ID NO: 665851 - RNA, 19 nt, Artificial Sequence
  Description of Artificial Sequence: Synthetic oligonucleotide
accguuguuuaagucuaug

SEQ ID NO: 665852 - RNA, 19 nt, Artificial Sequence
  Description of Artificial Sequence: Synthetic oligonucleotide
ugagucguucaaggcauuc

SEQ ID NO: 665853 - RNA, 19 nt, Artificial Sequence
  Description of Artificial Sequence: Synthetic oligonucleotide
guuaaugacuuuggggaua

SEQ ID NO: 665854 - RNA, 19 nt, Artificial Sequence
  Description of Artificial Sequence: Synthetic oligonucleotide
caucaguucccaaagugau

SEQ ID NO: 665855 - RNA, 19 nt, Artificial Sequence
  Description of Artificial Sequence: Synthetic oligonucleotide
guacgucagcuguuagaug

SEQ ID NO: 665856 - RNA, 19 nt, Artificial Sequence
  Description of Artificial Sequence: Synthetic oligonucleotide
ugggcauaacugcguuugu

SEQ ID NO: 665857 - RNA, 19 nt, Artificial Sequence
  Description of Artificial Sequence: Synthetic oligonucleotide
ggaccuaguuguacaauug

SEQ ID NO: 665858 - RNA, 19 nt, Artificial Sequence
  Description of Artificial Sequence: Synthetic oligonucleotide
ccuguaagguguuguaauc

SEQ ID NO: 665859 - RNA, 19 nt, Artificial Sequence
  Description of Artificial Sequence: Synthetic oligonucleotide
ggugcuuccgcugguauuc

SEQ ID NO: 665860 - RNA, 19 nt, Artificial Sequence
  Description of Artificial Sequence: Synthetic oligonucleotide
aagggcuaagauagagcaa

SEQ ID NO: 665861 - RNA, 19 nt, Artificial Sequence
  Description of Artificial Sequence: Synthetic oligonucleotide
agugucagguuuguacuua

SEQ ID NO: 665862 - RNA, 19 nt, Artificial Sequence
  Description of Artificial Sequence: Synthetic oligonucleotide
ggaaugcggcaucugggug

SEQ ID NO: 665863 - RNA, 19 nt, Artificial Sequence
  Description of Artificial Sequence: Synthetic oligonucleotide
aggucgggucauggaaagc

SEQ ID NO: 665864 - RNA, 19 nt, Artificial Sequence
  Description of Artificial Sequence: Synthetic oligonucleotide
gucauggaaagcgacacau

SEQ ID NO: 665865 - RNA, 19 nt, Artificial Sequence
  Description of Artificial Sequence: Synthetic oligonucleotide
acauucguucagugcugcu

SEQ ID NO: 665866 - RNA, 19 nt, Artificial Sequence
  Description of Artificial Sequence: Synthetic oligonucleotide
caaguuugccaugcacaug

SEQ ID NO: 665867 - RNA, 19 nt, Artificial Sequence
  Description of Artificial Sequence: Synthetic oligonucleotide
accuguucagcuccuuaua

SEQ ID NO: 665868 - RNA, 19 nt, Artificial Sequence
  Description of Artificial Sequence: Synthetic oligonucleotide
uucaagcuuguaguuugua

SEQ ID NO: 665869 - RNA, 19 nt, Artificial Sequence
  Description of Artificial Sequence: Synthetic oligonucleotide
cacaggucgggucauggaa

SEQ ID NO: 665870 - RNA, 19 nt, Artificial Sequence
  Description of Artificial Sequence: Synthetic oligonucleotide
agucuguaugcaggggugu

SEQ ID NO: 665871 - RNA, 19 nt, Artificial Sequence
  Description of Artificial Sequence: Synthetic oligonucleotide
ucugggcauaacugcguuu

SEQ ID NO: 665872 - RNA, 19 nt, Artificial Sequence
  Description of Artificial Sequence: Synthetic oligonucleotide
uccccauaaggguuuucuu

SEQ ID NO: 665873 - RNA, 19 nt, Artificial Sequence
  Description of Artificial Sequence: Synthetic oligonucleotide
acuuguacgucagcuguua

SEQ ID NO: 665874 - RNA, 19 nt, Artificial Sequence
  Description of Artificial Sequence: Synthetic oligonucleotide
ccaucaguucccaaaguga

SEQ ID NO: 665875 - RNA, 19 nt, Artificial Sequence
  Description of Artificial Sequence: Synthetic oligonucleotide
caguucccaaagugaugag

SEQ ID NO: 665876 - RNA, 19 nt, Artificial Sequence
  Description of Artificial Sequence: Synthetic oligonucleotide
ggcuaagauagagcaaaac

SEQ ID NO: 665877 - RNA, 19 nt, Artificial Sequence
  Description of Artificial Sequence: Synthetic oligonucleotide
aaccuggcuaaagguguaa

SEQ ID NO: 665878 - RNA, 19 nt, Artificial Sequence
  Description of Artificial Sequence: Synthetic oligonucleotide
guaagguguuguaaucucu

SEQ ID NO: 665879 - RNA, 19 nt, Artificial Sequence
  Description of Artificial Sequence: Synthetic oligonucleotide
acaugacauauaacuuaga

SEQ ID NO: 665880 - RNA, 19 nt, Artificial Sequence
  Description of Artificial Sequence: Synthetic oligonucleotide
ccaugcacaugacauauaa

SEQ ID NO: 665881 - RNA, 19 nt, Artificial Sequence
  Description of Artificial Sequence: Synthetic oligonucleotide
acaggucgggucauggaaa

SEQ ID NO: 665882 - RNA, 19 nt, Artificial Sequence
  Description of Artificial Sequence: Synthetic oligonucleotide
cuguaagguguuguaaucu

SEQ ID NO: 665883 - RNA, 19 nt, Artificial Sequence
  Description of Artificial Sequence: Synthetic oligonucleotide
cgccacuccuuuaagcagg

SEQ ID NO: 665884 - RNA, 19 nt, Artificial Sequence
  Description of Artificial Sequence: Synthetic oligonucleotide
caggcuaccauggagcagu

SEQ ID NO: 665885 - RNA, 19 nt, Artificial Sequence
  Description of Artificial Sequence: Synthetic oligonucleotide
ccauguuacucagugcuuc

SEQ ID NO: 665886 - RNA, 19 nt, Artificial Sequence
  Description of Artificial Sequence: Synthetic oligonucleotide
ggagcuuccuugcauuucu

SEQ ID NO: 665887 - RNA, 19 nt, Artificial Sequence
  Description of Artificial Sequence: Synthetic oligonucleotide
ccguuguuuaagucuauga

SEQ ID NO: 665888 - RNA, 19 nt, Artificial Sequence
  Description of Artificial Sequence: Synthetic oligonucleotide
ccacgggagagguucuggg

SEQ ID NO: 665889 - RNA, 19 nt, Artificial Sequence
  Description of Artificial Sequence: Synthetic oligonucleotide
ccuuauagaaugucugugu

SEQ ID NO: 665890 - RNA, 19 nt, Artificial Sequence
  Description of Artificial Sequence: Synthetic oligonucleotide
aggugcuuccgcugguauu

SEQ ID NO: 665891 - RNA, 19 nt, Artificial Sequence
  Description of Artificial Sequence: Synthetic oligonucleotide
augcagacuccaagcaggu

SEQ ID NO: 665892 - RNA, 19 nt, Artificial Sequence
  Description of Artificial Sequence: Synthetic oligonucleotide
cauccuaagcacaguaguu

SEQ ID NO: 665893 - RNA, 19 nt, Artificial Sequence
  Description of Artificial Sequence: Synthetic oligonucleotide
agggugcacucccucucga

SEQ ID NO: 665894 - RNA, 19 nt, Artificial Sequence
  Description of Artificial Sequence: Synthetic oligonucleotide
cccauaaggguuuucuuua

SEQ ID NO: 665895 - RNA, 19 nt, Artificial Sequence
  Description of Artificial Sequence: Synthetic oligonucleotide
cuguuagauggccacacuu

SEQ ID NO: 665896 - RNA, 19 nt, Artificial Sequence
  Description of Artificial Sequence: Synthetic oligonucleotide
ccgacagaaacuaggaagu

SEQ ID NO: 665897 - RNA, 19 nt, Artificial Sequence
  Description of Artificial Sequence: Synthetic oligonucleotide
ggcauaacugcguuuguuu

SEQ ID NO: 665898 - RNA, 19 nt, Artificial Sequence
  Description of Artificial Sequence: Synthetic oligonucleotide
gguauuuugccagcaauuu

SEQ ID NO: 665899 - RNA, 19 nt, Artificial Sequence
  Description of Artificial Sequence: Synthetic oligonucleotide
caggcucaaagagagacau

SEQ ID NO: 665900 - RNA, 19 nt, Artificial Sequence
  Description of Artificial Sequence: Synthetic oligonucleotide
acuuuggggauaggaucaa

SEQ ID NO: 665901 - RNA, 19 nt, Artificial Sequence
  Description of Artificial Sequence: Synthetic oligonucleotide
caacagcauggaaaggcgu

SEQ ID NO: 665902 - RNA, 19 nt, Artificial Sequence
  Description of Artificial Sequence: Synthetic oligonucleotide
gcuaaagguguaaauuccu

SEQ ID NO: 665903 - RNA, 19 nt, Artificial Sequence
  Description of Artificial Sequence: Synthetic oligonucleotide
ggaaugucgaagugacccu

SEQ ID NO: 665904 - RNA, 19 nt, Artificial Sequence
  Description of Artificial Sequence: Synthetic oligonucleotide
cugaguagcuaaggaaugu

SEQ ID NO: 665905 - RNA, 19 nt, Artificial Sequence
  Description of Artificial Sequence: Synthetic oligonucleotide
gcuuguaguuuguagccau

SEQ ID NO: 665906 - RNA, 19 nt, Artificial Sequence
  Description of Artificial Sequence: Synthetic oligonucleotide
caggucuaucagcuuucca

SEQ ID NO: 665907 - RNA, 19 nt, Artificial Sequence
  Description of Artificial Sequence: Synthetic oligonucleotide
agacuccaagcagguuuug

SEQ ID NO: 665908 - RNA, 19 nt, Artificial Sequence
  Description of Artificial Sequence: Synthetic oligonucleotide
ggcauucuaaggaaucagu

SEQ ID NO: 665909 - RNA, 19 nt, Artificial Sequence
  Description of Artificial Sequence: Synthetic oligonucleotide
cauccauuaccaccacagu

SEQ ID NO: 665910 - RNA, 19 nt, Artificial Sequence
  Description of Artificial Sequence: Synthetic oligonucleotide
caucugaaaugggacccaa

SEQ ID NO: 665911 - RNA, 19 nt, Artificial Sequence
  Description of Artificial Sequence: Synthetic oligonucleotide
ccaaguuugccaugcacau

SEQ ID NO: 665912 - RNA, 19 nt, Artificial Sequence
  Description of Artificial Sequence: Synthetic oligonucleotide
ccaggucuaucagcuuucc

SEQ ID NO: 665913 - RNA, 19 nt, Artificial Sequence
  Description of Artificial Sequence: Synthetic oligonucleotide
caugaacaggagugguuuu

SEQ ID NO: 665914 - RNA, 19 nt, Artificial Sequence
  Description of Artificial Sequence: Synthetic oligonucleotide
cguucagugcugcucccug

SEQ ID NO: 665915 - RNA, 19 nt, Artificial Sequence
  Description of Artificial Sequence: Synthetic oligonucleotide
ggggugugauguugugguc

SEQ ID NO: 665916 - RNA, 19 nt, Artificial Sequence
  Description of Artificial Sequence: Synthetic oligonucleotide
cauaggcagcauacucagu

SEQ ID NO: 665917 - RNA, 19 nt, Artificial Sequence
  Description of Artificial Sequence: Synthetic oligonucleotide
guagagcauuccaugccau

SEQ ID NO: 665918 - RNA, 19 nt, Artificial Sequence
  Description of Artificial Sequence: Synthetic oligonucleotide
gacccaacugugccauuuu

SEQ ID NO: 665919 - RNA, 19 nt, Artificial Sequence
  Description of Artificial Sequence: Synthetic oligonucleotide
gguuuguacuuaggcaagu

SEQ ID NO: 665920 - RNA, 19 nt, Artificial Sequence
  Description of Artificial Sequence: Synthetic oligonucleotide
gucaagaauugggaaucuu

SEQ ID NO: 665921 - RNA, 19 nt, Artificial Sequence
  Description of Artificial Sequence: Synthetic oligonucleotide
gacuuguacgucagcuguu

SEQ ID NO: 665922 - RNA, 19 nt, Artificial Sequence
  Description of Artificial Sequence: Synthetic oligonucleotide
augagucguucaaggcauu

SEQ ID NO: 665923 - RNA, 19 nt, Artificial Sequence
  Description of Artificial Sequence: Synthetic oligonucleotide
ccuucaccguuguuuaagu

SEQ ID NO: 665924 - RNA, 19 nt, Artificial Sequence
  Description of Artificial Sequence: Synthetic oligonucleotide
uccuccccauaaggguuuu

SEQ ID NO: 665925 - RNA, 19 nt, Artificial Sequence
  Description of Artificial Sequence: Synthetic oligonucleotide
ccccauaaggguuuucuuu

SEQ ID NO: 665926 - RNA, 19 nt, Artificial Sequence
  Description of Artificial Sequence: Synthetic oligonucleotide
cuguugcucucacuucuuu

SEQ ID NO: 665927 - RNA, 19 nt, Artificial Sequence
  Description of Artificial Sequence: Synthetic oligonucleotide
gcacucccucucgagcaug

SEQ ID NO: 665928 - RNA, 19 nt, Artificial Sequence
  Description of Artificial Sequence: Synthetic oligonucleotide
ggaauugcuccaccccauu

SEQ ID NO: 665929 - RNA, 19 nt, Artificial Sequence
  Description of Artificial Sequence: Synthetic oligonucleotide
gcaauuugauuggcugagu

SEQ ID NO: 665930 - RNA, 19 nt, Artificial Sequence
  Description of Artificial Sequence: Synthetic oligonucleotide
cuuuggggauaggaucaau

SEQ ID NO: 665931 - RNA, 19 nt, Artificial Sequence
  Description of Artificial Sequence: Synthetic oligonucleotide
caggaccuaguuguacaau

SEQ ID NO: 665932 - RNA, 19 nt, Artificial Sequence
  Description of Artificial Sequence: Synthetic oligonucleotide
ggcguguaugccaggucua

SEQ ID NO: 665933 - RNA, 19 nt, Artificial Sequence
  Description of Artificial Sequence: Synthetic oligonucleotide
gggauaggaucaauuucuu

SEQ ID NO: 665934 - RNA, 19 nt, Artificial Sequence
  Description of Artificial Sequence: Synthetic oligonucleotide
cguguaugccaggucuauc

SEQ ID NO: 665935 - RNA, 19 nt, Artificial Sequence
  Description of Artificial Sequence: Synthetic oligonucleotide
ggacccaacugugccauuu

SEQ ID NO: 665936 - RNA, 19 nt, Artificial Sequence
  Description of Artificial Sequence: Synthetic oligonucleotide
caccguuguuuaagucuau

SEQ ID NO: 665937 - RNA, 19 nt, Artificial Sequence
  Description of Artificial Sequence: Synthetic oligonucleotide
gggcauaacugcguuuguu

SEQ ID NO: 665938 - RNA, 19 nt, Artificial Sequence
  Description of Artificial Sequence: Synthetic oligonucleotide
ggggaccaucaguucccaa

SEQ ID NO: 665939 - RNA, 19 nt, Artificial Sequence
  Description of Artificial Sequence: Synthetic oligonucleotide
ccugagcauugccacugua

SEQ ID NO: 665940 - RNA, 19 nt, Artificial Sequence
  Description of Artificial Sequence: Synthetic oligonucleotide
ggaaagcgacacauccauu

SEQ ID NO: 665941 - RNA, 19 nt, Artificial Sequence
  Description of Artificial Sequence: Synthetic oligonucleotide
gcguguaugccaggucuau

SEQ ID NO: 665942 - RNA, 19 nt, Artificial Sequence
  Description of Artificial Sequence: Synthetic oligonucleotide
cguaaccuguucagcuccu

SEQ ID NO: 665943 - RNA, 19 nt, Artificial Sequence
  Description of Artificial Sequence: Synthetic oligonucleotide
guuaacaaaauccuggugg

SEQ ID NO: 665944 - RNA, 19 nt, Artificial Sequence
  Description of Artificial Sequence: Synthetic oligonucleotide
aacacgaagaagcugaaag

SEQ ID NO: 665945 - RNA, 19 nt, Artificial Sequence
  Description of Artificial Sequence: Synthetic oligonucleotide
gauuaauuccccuggaagg

SEQ ID NO: 665946 - RNA, 19 nt, Artificial Sequence
  Description of Artificial Sequence: Synthetic oligonucleotide
augacauauacauuuguac

SEQ ID NO: 665947 - RNA, 19 nt, Artificial Sequence
  Description of Artificial Sequence: Synthetic oligonucleotide
ugagacaugacauauacau

SEQ ID NO: 665948 - RNA, 19 nt, Artificial Sequence
  Description of Artificial Sequence: Synthetic oligonucleotide
aagccuuguagauuggucg

SEQ ID NO: 665949 - RNA, 19 nt, Artificial Sequence
  Description of Artificial Sequence: Synthetic oligonucleotide
acuaccaucaugaugauag

SEQ ID NO: 665950 - RNA, 19 nt, Artificial Sequence
  Description of Artificial Sequence: Synthetic oligonucleotide
ugcuauuacaccaugggac

SEQ ID NO: 665951 - RNA, 19 nt, Artificial Sequence
  Description of Artificial Sequence: Synthetic oligonucleotide
ugaaaggugagacugugga

SEQ ID NO: 665952 - RNA, 19 nt, Artificial Sequence
  Description of Artificial Sequence: Synthetic oligonucleotide
auaaggcuaaggcagagag

SEQ ID NO: 665953 - RNA, 19 nt, Artificial Sequence
  Description of Artificial Sequence: Synthetic oligonucleotide
gaaacagcgucacugaaug

SEQ ID NO: 665954 - RNA, 19 nt, Artificial Sequence
  Description of Artificial Sequence: Synthetic oligonucleotide
agauuaauuccccuggaag

SEQ ID NO: 665955 - RNA, 19 nt, Artificial Sequence
  Description of Artificial Sequence: Synthetic oligonucleotide
aggaacaagacaaaauccc

SEQ ID NO: 665956 - RNA, 19 nt, Artificial Sequence
  Description of Artificial Sequence: Synthetic oligonucleotide
uuuacauccacuggguccg

SEQ ID NO: 665957 - RNA, 19 nt, Artificial Sequence
  Description of Artificial Sequence: Synthetic oligonucleotide
uauaguucuggacugacau

SEQ ID NO: 665958 - RNA, 19 nt, Artificial Sequence
  Description of Artificial Sequence: Synthetic oligonucleotide
cuuaugaagccuaagcaug

SEQ ID NO: 665959 - RNA, 19 nt, Artificial Sequence
  Description of Artificial Sequence: Synthetic oligonucleotide
aagcugaaagaauugucag

SEQ ID NO: 665960 - RNA, 19 nt, Artificial Sequence
  Description of Artificial Sequence: Synthetic oligonucleotide
uguagaaccuccacuuccg

SEQ ID NO: 665961 - RNA, 19 nt, Artificial Sequence
  Description of Artificial Sequence: Synthetic oligonucleotide
gaagccuaagcaugaaagg

SEQ ID NO: 665962 - RNA, 19 nt, Artificial Sequence
  Description of Artificial Sequence: Synthetic oligonucleotide
uguagugacaccuguggag

SEQ ID NO: 665963 - RNA, 19 nt, Artificial Sequence
  Description of Artificial Sequence: Synthetic oligonucleotide
uuggucgguaccaacaaag

SEQ ID NO: 665964 - RNA, 19 nt, Artificial Sequence
  Description of Artificial Sequence: Synthetic oligonucleotide
aguggaaagggaccuagac

SEQ ID NO: 665965 - RNA, 19 nt, Artificial Sequence
  Description of Artificial Sequence: Synthetic oligonucleotide
ugaagaucacaaaccaaag

SEQ ID NO: 665966 - RNA, 19 nt, Artificial Sequence
  Description of Artificial Sequence: Synthetic oligonucleotide
agacaugacauauacauuu

SEQ ID NO: 665967 - RNA, 19 nt, Artificial Sequence
  Description of Artificial Sequence: Synthetic oligonucleotide
agggaugacagcaugaggg

SEQ ID NO: 665968 - RNA, 19 nt, Artificial Sequence
  Description of Artificial Sequence: Synthetic oligonucleotide
aagggguuuacauccacug

SEQ ID NO: 665969 - RNA, 19 nt, Artificial Sequence
  Description of Artificial Sequence: Synthetic oligonucleotide
aaaauugagacaugacaua

SEQ ID NO: 665970 - RNA, 19 nt, Artificial Sequence
  Description of Artificial Sequence: Synthetic oligonucleotide
uaguucuggacugacaucc

SEQ ID NO: 665971 - RNA, 19 nt, Artificial Sequence
  Description of Artificial Sequence: Synthetic oligonucleotide
aacggugaccuccuaagug

SEQ ID NO: 665972 - RNA, 19 nt, Artificial Sequence
  Description of Artificial Sequence: Synthetic oligonucleotide
aggucaagccugcagaggg

SEQ ID NO: 665973 - RNA, 19 nt, Artificial Sequence
  Description of Artificial Sequence: Synthetic oligonucleotide
agaccugaaagccuuguag

SEQ ID NO: 665974 - RNA, 19 nt, Artificial Sequence
  Description of Artificial Sequence: Synthetic oligonucleotide
ggaacccucagaaagaugg

SEQ ID NO: 665975 - RNA, 19 nt, Artificial Sequence
  Description of Artificial Sequence: Synthetic oligonucleotide
aaauugagacaugacauau

SEQ ID NO: 665976 - RNA, 19 nt, Artificial Sequence
  Description of Artificial Sequence: Synthetic oligonucleotide
cuguauaaggcacccacgg

SEQ ID NO: 665977 - RNA, 19 nt, Artificial Sequence
  Description of Artificial Sequence: Synthetic oligonucleotide
uagagggucacgacuauug

SEQ ID NO: 665978 - RNA, 19 nt, Artificial Sequence
  Description of Artificial Sequence: Synthetic oligonucleotide
acugguucccaaguuaggc

SEQ ID NO: 665979 - RNA, 19 nt, Artificial Sequence
  Description of Artificial Sequence: Synthetic oligonucleotide
aaguuaggcaagccaauca

SEQ ID NO: 665980 - RNA, 19 nt, Artificial Sequence
  Description of Artificial Sequence: Synthetic oligonucleotide
agcgcuacugccuucgguc

SEQ ID NO: 665981 - RNA, 19 nt, Artificial Sequence
  Description of Artificial Sequence: Synthetic oligonucleotide
aaacagcgucacugaaugc

SEQ ID NO: 665982 - RNA, 19 nt, Artificial Sequence
  Description of Artificial Sequence: Synthetic oligonucleotide
aggaagauuaauuccccug

SEQ ID NO: 665983 - RNA, 19 nt, Artificial Sequence
  Description of Artificial Sequence: Synthetic oligonucleotide
guagaugccuauuugacaa

SEQ ID NO: 665984 - RNA, 19 nt, Artificial Sequence
  Description of Artificial Sequence: Synthetic oligonucleotide
gaaagcugacuacugagga

SEQ ID NO: 665985 - RNA, 19 nt, Artificial Sequence
  Description of Artificial Sequence: Synthetic oligonucleotide
aggauauaguucuggacug

SEQ ID NO: 665986 - RNA, 19 nt, Artificial Sequence
  Description of Artificial Sequence: Synthetic oligonucleotide
ggugcuauuacaccauggg

SEQ ID NO: 665987 - RNA, 19 nt, Artificial Sequence
  Description of Artificial Sequence: Synthetic oligonucleotide
uuguagauuggucgguacc

SEQ ID NO: 665988 - RNA, 19 nt, Artificial Sequence
  Description of Artificial Sequence: Synthetic oligonucleotide
uaaggcuaaggcagagagg

SEQ ID NO: 665989 - RNA, 19 nt, Artificial Sequence
  Description of Artificial Sequence: Synthetic oligonucleotide
uuuguugucugaaaaucuu

SEQ ID NO: 665990 - RNA, 19 nt, Artificial Sequence
  Description of Artificial Sequence: Synthetic oligonucleotide
uuuaagaggugaguauugc

SEQ ID NO: 665991 - RNA, 19 nt, Artificial Sequence
  Description of Artificial Sequence: Synthetic oligonucleotide
gugucgaaggccgacaugg

SEQ ID NO: 665992 - RNA, 19 nt, Artificial Sequence
  Description of Artificial Sequence: Synthetic oligonucleotide
guagaaggcauguacccgc

SEQ ID NO: 665993 - RNA, 19 nt, Artificial Sequence
  Description of Artificial Sequence: Synthetic oligonucleotide
aagauuaauuccccuggaa

SEQ ID NO: 665994 - RNA, 19 nt, Artificial Sequence
  Description of Artificial Sequence: Synthetic oligonucleotide
aguagaugccuauuugaca

SEQ ID NO: 665995 - RNA, 19 nt, Artificial Sequence
  Description of Artificial Sequence: Synthetic oligonucleotide
uugaccgggcaccaugagg

SEQ ID NO: 665996 - RNA, 19 nt, Artificial Sequence
  Description of Artificial Sequence: Synthetic oligonucleotide
uggucgguaccaacaaagg

SEQ ID NO: 665997 - RNA, 19 nt, Artificial Sequence
  Description of Artificial Sequence: Synthetic oligonucleotide
ucuagggaugacagcauga

SEQ ID NO: 665998 - RNA, 19 nt, Artificial Sequence
  Description of Artificial Sequence: Synthetic oligonucleotide
uguagauuggucgguacca

SEQ ID NO: 665999 - RNA, 19 nt, Artificial Sequence
  Description of Artificial Sequence: Synthetic oligonucleotide
aauuccugguacagugagc

SEQ ID NO: 666000 - RNA, 19 nt, Artificial Sequence
  Description of Artificial Sequence: Synthetic oligonucleotide
acccuaggaguuuuaagag

SEQ ID NO: 666001 - RNA, 19 nt, Artificial Sequence
  Description of Artificial Sequence: Synthetic oligonucleotide
caucgcgcaguguagacag

SEQ ID NO: 666002 - RNA, 19 nt, Artificial Sequence
  Description of Artificial Sequence: Synthetic oligonucleotide
accuagacuccacuguggg

SEQ ID NO: 666003 - RNA, 19 nt, Artificial Sequence
  Description of Artificial Sequence: Synthetic oligonucleotide
uguauaaggcacccacgga

SEQ ID NO: 666004 - RNA, 19 nt, Artificial Sequence
  Description of Artificial Sequence: Synthetic oligonucleotide
cacuguauaaggcacccac

SEQ ID NO: 666005 - RNA, 19 nt, Artificial Sequence
  Description of Artificial Sequence: Synthetic oligonucleotide
auuaccauucaguggcucu

SEQ ID NO: 666006 - RNA, 19 nt, Artificial Sequence
  Description of Artificial Sequence: Synthetic oligonucleotide
agccuuguagauuggucgg

SEQ ID NO: 666007 - RNA, 19 nt, Artificial Sequence
  Description of Artificial Sequence: Synthetic oligonucleotide
agccaaaacaacagagggc

SEQ ID NO: 666008 - RNA, 19 nt, Artificial Sequence
  Description of Artificial Sequence: Synthetic oligonucleotide
gauggggcaggaauaaggc

SEQ ID NO: 666009 - RNA, 19 nt, Artificial Sequence
  Description of Artificial Sequence: Synthetic oligonucleotide
uguggguaugggaggaacc

SEQ ID NO: 666010 - RNA, 19 nt, Artificial Sequence
  Description of Artificial Sequence: Synthetic oligonucleotide
auaguucuggacugacauc

SEQ ID NO: 666011 - RNA, 19 nt, Artificial Sequence
  Description of Artificial Sequence: Synthetic oligonucleotide
guguagaaccuccacuucc

SEQ ID NO: 666012 - RNA, 19 nt, Artificial Sequence
  Description of Artificial Sequence: Synthetic oligonucleotide
ucggcagggaucuccgugg

SEQ ID NO: 666013 - RNA, 19 nt, Artificial Sequence
  Description of Artificial Sequence: Synthetic oligonucleotide
gucacgacuauugugagga

SEQ ID NO: 666014 - RNA, 19 nt, Artificial Sequence
  Description of Artificial Sequence: Synthetic oligonucleotide
ugucacuguagugacaccu

SEQ ID NO: 666015 - RNA, 19 nt, Artificial Sequence
  Description of Artificial Sequence: Synthetic oligonucleotide
aguuaggcaagccaaucau

SEQ ID NO: 666016 - RNA, 19 nt, Artificial Sequence
  Description of Artificial Sequence: Synthetic oligonucleotide
uaggaguuuuaagagguga

SEQ ID NO: 666017 - RNA, 19 nt, Artificial Sequence
  Description of Artificial Sequence: Synthetic oligonucleotide
uccauuagcggcauugcuu

SEQ ID NO: 666018 - RNA, 19 nt, Artificial Sequence
  Description of Artificial Sequence: Synthetic oligonucleotide
uucaguggcucuagggaug

SEQ ID NO: 666019 - RNA, 19 nt, Artificial Sequence
  Description of Artificial Sequence: Synthetic oligonucleotide
agacaaaaucccugccagg

SEQ ID NO: 666020 - RNA, 19 nt, Artificial Sequence
  Description of Artificial Sequence: Synthetic oligonucleotide
cacccuaggaguuuuaaga

SEQ ID NO: 666021 - RNA, 19 nt, Artificial Sequence
  Description of Artificial Sequence: Synthetic oligonucleotide
ugacaggaaccguuguugc

SEQ ID NO: 666022 - RNA, 19 nt, Artificial Sequence
  Description of Artificial Sequence: Synthetic oligonucleotide
aaggcacccacggaaagug

SEQ ID NO: 666023 - RNA, 19 nt, Artificial Sequence
  Description of Artificial Sequence: Synthetic oligonucleotide
agggguuuacauccacugg

SEQ ID NO: 666024 - RNA, 19 nt, Artificial Sequence
  Description of Artificial Sequence: Synthetic oligonucleotide
ccaucaugaugauagauac

SEQ ID NO: 666025 - RNA, 19 nt, Artificial Sequence
  Description of Artificial Sequence: Synthetic oligonucleotide
uugugaaccaggccaggca

SEQ ID NO: 666026 - RNA, 19 nt, Artificial Sequence
  Description of Artificial Sequence: Synthetic oligonucleotide
uuugccgcaguguucugca

SEQ ID NO: 666027 - RNA, 19 nt, Artificial Sequence
  Description of Artificial Sequence: Synthetic oligonucleotide
acggugaccuccuaagugu

SEQ ID NO: 666028 - RNA, 19 nt, Artificial Sequence
  Description of Artificial Sequence: Synthetic oligonucleotide
aaggugcuauuacaccaug

SEQ ID NO: 666029 - RNA, 19 nt, Artificial Sequence
  Description of Artificial Sequence: Synthetic oligonucleotide
uguaaguuugccgcagugu

SEQ ID NO: 666030 - RNA, 19 nt, Artificial Sequence
  Description of Artificial Sequence: Synthetic oligonucleotide
uugagacaugacauauaca

SEQ ID NO: 666031 - RNA, 19 nt, Artificial Sequence
  Description of Artificial Sequence: Synthetic oligonucleotide
ugcccuucccuuaugugga

SEQ ID NO: 666032 - RNA, 19 nt, Artificial Sequence
  Description of Artificial Sequence: Synthetic oligonucleotide
augaaguagaugccuauuu

SEQ ID NO: 666033 - RNA, 19 nt, Artificial Sequence
  Description of Artificial Sequence: Synthetic oligonucleotide
aauaaggcuaaggcagaga

SEQ ID NO: 666034 - RNA, 19 nt, Artificial Sequence
  Description of Artificial Sequence: Synthetic oligonucleotide
cauggaggaaaauaccaga

SEQ ID NO: 666035 - RNA, 19 nt, Artificial Sequence
  Description of Artificial Sequence: Synthetic oligonucleotide
gagggucacgacuauugug

SEQ ID NO: 666036 - RNA, 19 nt, Artificial Sequence
  Description of Artificial Sequence: Synthetic oligonucleotide
auuacaccaugggacagag

SEQ ID NO: 666037 - RNA, 19 nt, Artificial Sequence
  Description of Artificial Sequence: Synthetic oligonucleotide
gauauaguucuggacugac

SEQ ID NO: 666038 - RNA, 19 nt, Artificial Sequence
  Description of Artificial Sequence: Synthetic oligonucleotide
cauauccgcugguagucgg

SEQ ID NO: 666039 - RNA, 19 nt, Artificial Sequence
  Description of Artificial Sequence: Synthetic oligonucleotide
ugguucccaaguuaggcaa

SEQ ID NO: 666040 - RNA, 19 nt, Artificial Sequence
  Description of Artificial Sequence: Synthetic oligonucleotide
uugcauauccgcugguagu

SEQ ID NO: 666041 - RNA, 19 nt, Artificial Sequence
  Description of Artificial Sequence: Synthetic oligonucleotide
acauggaggaaaauaccag

SEQ ID NO: 666042 - RNA, 19 nt, Artificial Sequence
  Description of Artificial Sequence: Synthetic oligonucleotide
gacaugacauauacauuug

SEQ ID NO: 666043 - RNA, 19 nt, Artificial Sequence
  Description of Artificial Sequence: Synthetic oligonucleotide
acugcggaagguucuguug

SEQ ID NO: 666044 - RNA, 19 nt, Artificial Sequence
  Description of Artificial Sequence: Synthetic oligonucleotide
uccgcgaaaggguuagugu

SEQ ID NO: 666045 - RNA, 19 nt, Artificial Sequence
  Description of Artificial Sequence: Synthetic oligonucleotide
gcauaaccacuguauaagg

SEQ ID NO: 666046 - RNA, 19 nt, Artificial Sequence
  Description of Artificial Sequence: Synthetic oligonucleotide
acuguauaaggcacccacg

SEQ ID NO: 666047 - RNA, 19 nt, Artificial Sequence
  Description of Artificial Sequence: Synthetic oligonucleotide
uaauuccccuggaagguuc

SEQ ID NO: 666048 - RNA, 19 nt, Artificial Sequence
  Description of Artificial Sequence: Synthetic oligonucleotide
aaagggaccuagacuccac

SEQ ID NO: 666049 - RNA, 19 nt, Artificial Sequence
  Description of Artificial Sequence: Synthetic oligonucleotide
auguaaguuugccgcagug

SEQ ID NO: 666050 - RNA, 19 nt, Artificial Sequence
  Description of Artificial Sequence: Synthetic oligonucleotide
agggucacgacuauuguga

SEQ ID NO: 666051 - RNA, 19 nt, Artificial Sequence
  Description of Artificial Sequence: Synthetic oligonucleotide
agcucagcggcuuuccugu

SEQ ID NO: 666052 - RNA, 19 nt, Artificial Sequence
  Description of Artificial Sequence: Synthetic oligonucleotide
ugaaccaggccaggcaugc

SEQ ID NO: 666053 - RNA, 19 nt, Artificial Sequence
  Description of Artificial Sequence: Synthetic oligonucleotide
acgacuauugugaggaaca

SEQ ID NO: 666054 - RNA, 19 nt, Artificial Sequence
  Description of Artificial Sequence: Synthetic oligonucleotide
agccacuaccaucaugaug

SEQ ID NO: 666055 - RNA, 19 nt, Artificial Sequence
  Description of Artificial Sequence: Synthetic oligonucleotide
uauuacaccaugggacaga

SEQ ID NO: 666056 - RNA, 19 nt, Artificial Sequence
  Description of Artificial Sequence: Synthetic oligonucleotide
ucgcgcaguguagacaggg

SEQ ID NO: 666057 - RNA, 19 nt, Artificial Sequence
  Description of Artificial Sequence: Synthetic oligonucleotide
agcgucacugaaugcaaca

SEQ ID NO: 666058 - RNA, 19 nt, Artificial Sequence
  Description of Artificial Sequence: Synthetic oligonucleotide
gaagagugagagcccagca

SEQ ID NO: 666059 - RNA, 19 nt, Artificial Sequence
  Description of Artificial Sequence: Synthetic oligonucleotide
gugaucggaggccagcggc

SEQ ID NO: 666060 - RNA, 19 nt, Artificial Sequence
  Description of Artificial Sequence: Synthetic oligonucleotide
aagggaccuagacuccacu

SEQ ID NO: 666061 - RNA, 19 nt, Artificial Sequence
  Description of Artificial Sequence: Synthetic oligonucleotide
ugggcauaaccacuguaua

SEQ ID NO: 666062 - RNA, 19 nt, Artificial Sequence
  Description of Artificial Sequence: Synthetic oligonucleotide
caugaaaggugagacugug

SEQ ID NO: 666063 - RNA, 19 nt, Artificial Sequence
  Description of Artificial Sequence: Synthetic oligonucleotide
gguuucaacggugaccucc

SEQ ID NO: 666064 - RNA, 19 nt, Artificial Sequence
  Description of Artificial Sequence: Synthetic oligonucleotide
auguacccgcugcaggagg

SEQ ID NO: 666065 - RNA, 19 nt, Artificial Sequence
  Description of Artificial Sequence: Synthetic oligonucleotide
ugcauauccgcugguaguc

SEQ ID NO: 666066 - RNA, 19 nt, Artificial Sequence
  Description of Artificial Sequence: Synthetic oligonucleotide
gauuggucgguaccaacaa

SEQ ID NO: 666067 - RNA, 19 nt, Artificial Sequence
  Description of Artificial Sequence: Synthetic oligonucleotide
ugucccugucccuuccugc

SEQ ID NO: 666068 - RNA, 19 nt, Artificial Sequence
  Description of Artificial Sequence: Synthetic oligonucleotide
agccuaagcaugaaaggug

SEQ ID NO: 666069 - RNA, 19 nt, Artificial Sequence
  Description of Artificial Sequence: Synthetic oligonucleotide
gaggugaguauugcugaag

SEQ ID NO: 666070 - RNA, 19 nt, Artificial Sequence
  Description of Artificial Sequence: Synthetic oligonucleotide
gagaagggauugaauucag

SEQ ID NO: 666071 - RNA, 19 nt, Artificial Sequence
  Description of Artificial Sequence: Synthetic oligonucleotide
aacucucgcuccuugcguu

SEQ ID NO: 666072 - RNA, 19 nt, Artificial Sequence
  Description of Artificial Sequence: Synthetic oligonucleotide
gaccuagacuccacugugg

SEQ ID NO: 666073 - RNA, 19 nt, Artificial Sequence
  Description of Artificial Sequence: Synthetic oligonucleotide
gcuauuacaccaugggaca

SEQ ID NO: 666074 - RNA, 19 nt, Artificial Sequence
  Description of Artificial Sequence: Synthetic oligonucleotide
uggugaucggaggccagcg

SEQ ID NO: 666075 - RNA, 19 nt, Artificial Sequence
  Description of Artificial Sequence: Synthetic oligonucleotide
uuagugucgaaggccgaca

SEQ ID NO: 666076 - RNA, 19 nt, Artificial Sequence
  Description of Artificial Sequence: Synthetic oligonucleotide
aucuaaaguggagcccugg

SEQ ID NO: 666077 - RNA, 19 nt, Artificial Sequence
  Description of Artificial Sequence: Synthetic oligonucleotide
gaccuccuaagugucacug

SEQ ID NO: 666078 - RNA, 19 nt, Artificial Sequence
  Description of Artificial Sequence: Synthetic oligonucleotide
agggaccuagacuccacug

SEQ ID NO: 666079 - RNA, 19 nt, Artificial Sequence
  Description of Artificial Sequence: Synthetic oligonucleotide
gugcuauuacaccauggga

SEQ ID NO: 666080 - RNA, 19 nt, Artificial Sequence
  Description of Artificial Sequence: Synthetic oligonucleotide
cugugcugggcauaaccac

SEQ ID NO: 666081 - RNA, 19 nt, Artificial Sequence
  Description of Artificial Sequence: Synthetic oligonucleotide
ggguuagugucgaaggccg

SEQ ID NO: 666082 - RNA, 19 nt, Artificial Sequence
  Description of Artificial Sequence: Synthetic oligonucleotide
ccauuagcggcauugcuug

SEQ ID NO: 666083 - RNA, 19 nt, Artificial Sequence
  Description of Artificial Sequence: Synthetic oligonucleotide
uagaaggcauguacccgcu

SEQ ID NO: 666084 - RNA, 19 nt, Artificial Sequence
  Description of Artificial Sequence: Synthetic oligonucleotide
aauugagacaugacauaua

SEQ ID NO: 666085 - RNA, 19 nt, Artificial Sequence
  Description of Artificial Sequence: Synthetic oligonucleotide
cuauuacaccaugggacag

SEQ ID NO: 666086 - RNA, 19 nt, Artificial Sequence
  Description of Artificial Sequence: Synthetic oligonucleotide
auuagcggcauugcuugug

SEQ ID NO: 666087 - RNA, 19 nt, Artificial Sequence
  Description of Artificial Sequence: Synthetic oligonucleotide
gaggccagcggcgaucucc

SEQ ID NO: 666088 - RNA, 19 nt, Artificial Sequence
  Description of Artificial Sequence: Synthetic oligonucleotide
augaaaggugagacugugg

SEQ ID NO: 666089 - RNA, 19 nt, Artificial Sequence
  Description of Artificial Sequence: Synthetic oligonucleotide
cuaagcaugaaaggugaga

SEQ ID NO: 666090 - RNA, 19 nt, Artificial Sequence
  Description of Artificial Sequence: Synthetic oligonucleotide
ggcgguagaaggcauguac

SEQ ID NO: 666091 - RNA, 19 nt, Artificial Sequence
  Description of Artificial Sequence: Synthetic oligonucleotide
uccgcgagcgcuacugccu

SEQ ID NO: 666092 - RNA, 19 nt, Artificial Sequence
  Description of Artificial Sequence: Synthetic oligonucleotide
ccagccacuaccaucauga

SEQ ID NO: 666093 - RNA, 19 nt, Artificial Sequence
  Description of Artificial Sequence: Synthetic oligonucleotide
accaucaugaugauagaua

SEQ ID NO: 666094 - RNA, 19 nt, Artificial Sequence
  Description of Artificial Sequence: Synthetic oligonucleotide
ugaggcguuggcugugcug

SEQ ID NO: 666095 - RNA, 19 nt, Artificial Sequence
  Description of Artificial Sequence: Synthetic oligonucleotide
cugguagucggcagggauc

SEQ ID NO: 666096 - RNA, 19 nt, Artificial Sequence
  Description of Artificial Sequence: Synthetic oligonucleotide
guagucggcagggaucucc

SEQ ID NO: 666097 - RNA, 19 nt, Artificial Sequence
  Description of Artificial Sequence: Synthetic oligonucleotide
caggaaccguuguugcugc

SEQ ID NO: 666098 - RNA, 19 nt, Artificial Sequence
  Description of Artificial Sequence: Synthetic oligonucleotide
auauccgcugguagucggc

SEQ ID NO: 666099 - RNA, 19 nt, Artificial Sequence
  Description of Artificial Sequence: Synthetic oligonucleotide
cucuagggaugacagcaug

SEQ ID NO: 666100 - RNA, 19 nt, Artificial Sequence
  Description of Artificial Sequence: Synthetic oligonucleotide
uaccaucaugaugauagau

SEQ ID NO: 666101 - RNA, 19 nt, Artificial Sequence
  Description of Artificial Sequence: Synthetic oligonucleotide
aggugcuauuacaccaugg

SEQ ID NO: 666102 - RNA, 19 nt, Artificial Sequence
  Description of Artificial Sequence: Synthetic oligonucleotide
auggaggaaaauaccagaa

SEQ ID NO: 666103 - RNA, 19 nt, Artificial Sequence
  Description of Artificial Sequence: Synthetic oligonucleotide
ggcauguacccgcugcagg

SEQ ID NO: 666104 - RNA, 19 nt, Artificial Sequence
  Description of Artificial Sequence: Synthetic oligonucleotide
cacgacuauugugaggaac

SEQ ID NO: 666105 - RNA, 19 nt, Artificial Sequence
  Description of Artificial Sequence: Synthetic oligonucleotide
aaccguuguugcugcauuu

SEQ ID NO: 666106 - RNA, 19 nt, Artificial Sequence
  Description of Artificial Sequence: Synthetic oligonucleotide
ccuuauguggaagggaaag

SEQ ID NO: 666107 - RNA, 19 nt, Artificial Sequence
  Description of Artificial Sequence: Synthetic oligonucleotide
ugccuucggucacucagac

SEQ ID NO: 666108 - RNA, 19 nt, Artificial Sequence
  Description of Artificial Sequence: Synthetic oligonucleotide
ggugagacuguggaggccc

SEQ ID NO: 666109 - RNA, 19 nt, Artificial Sequence
  Description of Artificial Sequence: Synthetic oligonucleotide
cccuaggaguuuuaagagg

SEQ ID NO: 666110 - RNA, 19 nt, Artificial Sequence
  Description of Artificial Sequence: Synthetic oligonucleotide
guaugggaggaacccucag

SEQ ID NO: 666111 - RNA, 19 nt, Artificial Sequence
  Description of Artificial Sequence: Synthetic oligonucleotide
agugucgaaggccgacaug

SEQ ID NO: 666112 - RNA, 19 nt, Artificial Sequence
  Description of Artificial Sequence: Synthetic oligonucleotide
uccugccugcaggauauag

SEQ ID NO: 666113 - RNA, 19 nt, Artificial Sequence
  Description of Artificial Sequence: Synthetic oligonucleotide
ggaccuagacuccacugug

SEQ ID NO: 666114 - RNA, 19 nt, Artificial Sequence
  Description of Artificial Sequence: Synthetic oligonucleotide
uaccauucaguggcucuag

SEQ ID NO: 666115 - RNA, 19 nt, Artificial Sequence
  Description of Artificial Sequence: Synthetic oligonucleotide
agaaacagcgucacugaau

SEQ ID NO: 666116 - RNA, 19 nt, Artificial Sequence
  Description of Artificial Sequence: Synthetic oligonucleotide
gucggcagggaucuccgug

SEQ ID NO: 666117 - RNA, 19 nt, Artificial Sequence
  Description of Artificial Sequence: Synthetic oligonucleotide
uuaccauucaguggcucua

SEQ ID NO: 666118 - RNA, 19 nt, Artificial Sequence
  Description of Artificial Sequence: Synthetic oligonucleotide
auuggucgguaccaacaaa

SEQ ID NO: 666119 - RNA, 19 nt, Artificial Sequence
  Description of Artificial Sequence: Synthetic oligonucleotide
guaaguuugccgcaguguu

SEQ ID NO: 666120 - RNA, 19 nt, Artificial Sequence
  Description of Artificial Sequence: Synthetic oligonucleotide
guuagugucgaaggccgac

SEQ ID NO: 666121 - RNA, 19 nt, Artificial Sequence
  Description of Artificial Sequence: Synthetic oligonucleotide
ugcaagccaaccacugguu

SEQ ID NO: 666122 - RNA, 19 nt, Artificial Sequence
  Description of Artificial Sequence: Synthetic oligonucleotide
ggucacgacuauugugagg

SEQ ID NO: 666123 - RNA, 19 nt, Artificial Sequence
  Description of Artificial Sequence: Synthetic oligonucleotide
gcggcauugcuugugaacc

SEQ ID NO: 666124 - RNA, 19 nt, Artificial Sequence
  Description of Artificial Sequence: Synthetic oligonucleotide
ucagaccugaaagccuugu

SEQ ID NO: 666125 - RNA, 19 nt, Artificial Sequence
  Description of Artificial Sequence: Synthetic oligonucleotide
guaagggcccaucgcgcag

SEQ ID NO: 666126 - RNA, 19 nt, Artificial Sequence
  Description of Artificial Sequence: Synthetic oligonucleotide
gaacccucagaaagauggc

SEQ ID NO: 666127 - RNA, 19 nt, Artificial Sequence
  Description of Artificial Sequence: Synthetic oligonucleotide
cacggaaagugcagcucag

SEQ ID NO: 666128 - RNA, 19 nt, Artificial Sequence
  Description of Artificial Sequence: Synthetic oligonucleotide
ugcggaagguucuguugcu

SEQ ID NO: 666129 - RNA, 19 nt, Artificial Sequence
  Description of Artificial Sequence: Synthetic oligonucleotide
agagauaguaaagcaucuu

SEQ ID NO: 666130 - RNA, 19 nt, Artificial Sequence
  Description of Artificial Sequence: Synthetic oligonucleotide
caaucaucuggaugaagua

SEQ ID NO: 666131 - RNA, 19 nt, Artificial Sequence
  Description of Artificial Sequence: Synthetic oligonucleotide
uauccgcugguagucggca

SEQ ID NO: 666132 - RNA, 19 nt, Artificial Sequence
  Description of Artificial Sequence: Synthetic oligonucleotide
ccccaauacaggucaagcc

SEQ ID NO: 666133 - RNA, 19 nt, Artificial Sequence
  Description of Artificial Sequence: Synthetic oligonucleotide
uggcugucauuaccauuca

SEQ ID NO: 666134 - RNA, 19 nt, Artificial Sequence
  Description of Artificial Sequence: Synthetic oligonucleotide
aucuccgcgagcgcuacug

SEQ ID NO: 666135 - RNA, 19 nt, Artificial Sequence
  Description of Artificial Sequence: Synthetic oligonucleotide
ugccgaagcaggccugccu

SEQ ID NO: 666136 - RNA, 19 nt, Artificial Sequence
  Description of Artificial Sequence: Synthetic oligonucleotide
ggucgguaccaacaaagga

SEQ ID NO: 666137 - RNA, 19 nt, Artificial Sequence
  Description of Artificial Sequence: Synthetic oligonucleotide
accguuguugcugcauuug

SEQ ID NO: 666138 - RNA, 19 nt, Artificial Sequence
  Description of Artificial Sequence: Synthetic oligonucleotide
ggucacagagggauccugg

SEQ ID NO: 666139 - RNA, 19 nt, Artificial Sequence
  Description of Artificial Sequence: Synthetic oligonucleotide
accuccuaagugucacugu

SEQ ID NO: 666140 - RNA, 19 nt, Artificial Sequence
  Description of Artificial Sequence: Synthetic oligonucleotide
ucuccgcgagcgcuacugc

SEQ ID NO: 666141 - RNA, 19 nt, Artificial Sequence
  Description of Artificial Sequence: Synthetic oligonucleotide
cuccgcgagcgcuacugcc

SEQ ID NO: 666142 - RNA, 19 nt, Artificial Sequence
  Description of Artificial Sequence: Synthetic oligonucleotide
cagguuucaacggugaccu

SEQ ID NO: 666143 - RNA, 19 nt, Artificial Sequence
  Description of Artificial Sequence: Synthetic oligonucleotide
aaggcuugaccgggcacca

SEQ ID NO: 666144 - RNA, 19 nt, Artificial Sequence
  Description of Artificial Sequence: Synthetic oligonucleotide
ucggcgguagaaggcaugu

SEQ ID NO: 666145 - RNA, 19 nt, Artificial Sequence
  Description of Artificial Sequence: Synthetic oligonucleotide
gugaccuccuaagugucac

SEQ ID NO: 666146 - RNA, 19 nt, Artificial Sequence
  Description of Artificial Sequence: Synthetic oligonucleotide
uggguaugggaggaacccu

SEQ ID NO: 666147 - RNA, 19 nt, Artificial Sequence
  Description of Artificial Sequence: Synthetic oligonucleotide
cuguagugacaccugugga

SEQ ID NO: 666148 - RNA, 19 nt, Artificial Sequence
  Description of Artificial Sequence: Synthetic oligonucleotide
uuacaccaugggacagaga

SEQ ID NO: 666149 - RNA, 19 nt, Artificial Sequence
  Description of Artificial Sequence: Synthetic oligonucleotide
cugacuacugaggaaggaa

SEQ ID NO: 666150 - RNA, 19 nt, Artificial Sequence
  Description of Artificial Sequence: Synthetic oligonucleotide
ugaccuccuaagugucacu

SEQ ID NO: 666151 - RNA, 19 nt, Artificial Sequence
  Description of Artificial Sequence: Synthetic oligonucleotide
cuugaccgggcaccaugag

SEQ ID NO: 666152 - RNA, 19 nt, Artificial Sequence
  Description of Artificial Sequence: Synthetic oligonucleotide
gcggcgaucuccgcgagcg

SEQ ID NO: 666153 - RNA, 19 nt, Artificial Sequence
  Description of Artificial Sequence: Synthetic oligonucleotide
aagggcccaucgcgcagug

SEQ ID NO: 666154 - RNA, 19 nt, Artificial Sequence
  Description of Artificial Sequence: Synthetic oligonucleotide
guccgcgaaaggguuagug

SEQ ID NO: 666155 - RNA, 19 nt, Artificial Sequence
  Description of Artificial Sequence: Synthetic oligonucleotide
cauuaccauucaguggcuc

SEQ ID NO: 666156 - RNA, 19 nt, Artificial Sequence
  Description of Artificial Sequence: Synthetic oligonucleotide
ccuaggaguuuuaagaggu

SEQ ID NO: 666157 - RNA, 19 nt, Artificial Sequence
  Description of Artificial Sequence: Synthetic oligonucleotide
cgcgaaaggguuagugucg

SEQ ID NO: 666158 - RNA, 19 nt, Artificial Sequence
  Description of Artificial Sequence: Synthetic oligonucleotide
uaagggcccaucgcgcagu

SEQ ID NO: 666159 - RNA, 19 nt, Artificial Sequence
  Description of Artificial Sequence: Synthetic oligonucleotide
ccgacauggugaucggagg

SEQ ID NO: 666160 - RNA, 19 nt, Artificial Sequence
  Description of Artificial Sequence: Synthetic oligonucleotide
cagcgucacugaaugcaac

SEQ ID NO: 666161 - RNA, 19 nt, Artificial Sequence
  Description of Artificial Sequence: Synthetic oligonucleotide
gcgguagaaggcauguacc

SEQ ID NO: 666162 - RNA, 19 nt, Artificial Sequence
  Description of Artificial Sequence: Synthetic oligonucleotide
gacaggaaccguuguugcu

SEQ ID NO: 666163 - RNA, 19 nt, Artificial Sequence
  Description of Artificial Sequence: Synthetic oligonucleotide
ggcuugaccgggcaccaug

SEQ ID NO: 666164 - RNA, 19 nt, Artificial Sequence
  Description of Artificial Sequence: Synthetic oligonucleotide
guagccucaggagggcccc

SEQ ID NO: 666165 - RNA, 19 nt, Artificial Sequence
  Description of Artificial Sequence: Synthetic oligonucleotide
ccgcgaaaggguuaguguc

SEQ ID NO: 666166 - RNA, 19 nt, Artificial Sequence
  Description of Artificial Sequence: Synthetic oligonucleotide
cuguggaggccccaauaca

SEQ ID NO: 666167 - RNA, 19 nt, Artificial Sequence
  Description of Artificial Sequence: Synthetic oligonucleotide
cuaccaucaugaugauaga

SEQ ID NO: 666168 - RNA, 19 nt, Artificial Sequence
  Description of Artificial Sequence: Synthetic oligonucleotide
gggucacgacuauugugag

SEQ ID NO: 666169 - RNA, 19 nt, Artificial Sequence
  Description of Artificial Sequence: Synthetic oligonucleotide
cccaaguuaggcaagccaa

SEQ ID NO: 666170 - RNA, 19 nt, Artificial Sequence
  Description of Artificial Sequence: Synthetic oligonucleotide
gguaagggcccaucgcgca

SEQ ID NO: 666171 - RNA, 19 nt, Artificial Sequence
  Description of Artificial Sequence: Synthetic oligonucleotide
agguuucaacggugaccuc

SEQ ID NO: 666172 - RNA, 19 nt, Artificial Sequence
  Description of Artificial Sequence: Synthetic oligonucleotide
agcacugcggaagguucug

SEQ ID NO: 666173 - RNA, 19 nt, Artificial Sequence
  Description of Artificial Sequence: Synthetic oligonucleotide
agcacucaguguagaaccu

SEQ ID NO: 666174 - RNA, 19 nt, Artificial Sequence
  Description of Artificial Sequence: Synthetic oligonucleotide
acagcgucacugaaugcaa

SEQ ID NO: 666175 - RNA, 19 nt, Artificial Sequence
  Description of Artificial Sequence: Synthetic oligonucleotide
gggcacaaggugcuauuac

SEQ ID NO: 666176 - RNA, 19 nt, Artificial Sequence
  Description of Artificial Sequence: Synthetic oligonucleotide
gaugaaguagaugccuauu

SEQ ID NO: 666177 - RNA, 19 nt, Artificial Sequence
  Description of Artificial Sequence: Synthetic oligonucleotide
gcauauccgcugguagucg

SEQ ID NO: 666178 - RNA, 19 nt, Artificial Sequence
  Description of Artificial Sequence: Synthetic oligonucleotide
gaacacgaagaagcugaaa

SEQ ID NO: 666179 - RNA, 19 nt, Artificial Sequence
  Description of Artificial Sequence: Synthetic oligonucleotide
ucacgacuauugugaggaa

SEQ ID NO: 666180 - RNA, 19 nt, Artificial Sequence
  Description of Artificial Sequence: Synthetic oligonucleotide
gagggauccuggaaggggu

SEQ ID NO: 666181 - RNA, 19 nt, Artificial Sequence
  Description of Artificial Sequence: Synthetic oligonucleotide
gugaaccaggccaggcaug

SEQ ID NO: 666182 - RNA, 19 nt, Artificial Sequence
  Description of Artificial Sequence: Synthetic oligonucleotide
cacaaguggaaagggaccu

SEQ ID NO: 666183 - RNA, 19 nt, Artificial Sequence
  Description of Artificial Sequence: Synthetic oligonucleotide
gcaagccaaccacugguuc

SEQ ID NO: 666184 - RNA, 19 nt, Artificial Sequence
  Description of Artificial Sequence: Synthetic oligonucleotide
ccgggcaccaugaggguag

SEQ ID NO: 666185 - RNA, 19 nt, Artificial Sequence
  Description of Artificial Sequence: Synthetic oligonucleotide
guagauuggucgguaccaa

SEQ ID NO: 666186 - RNA, 19 nt, Artificial Sequence
  Description of Artificial Sequence: Synthetic oligonucleotide
caggcaugcaagcagguuu

SEQ ID NO: 666187 - RNA, 19 nt, Artificial Sequence
  Description of Artificial Sequence: Synthetic oligonucleotide
uggguccgcgaaaggguua

SEQ ID NO: 666188 - RNA, 19 nt, Artificial Sequence
  Description of Artificial Sequence: Synthetic oligonucleotide
gguucccaaguuaggcaag

SEQ ID NO: 666189 - RNA, 19 nt, Artificial Sequence
  Description of Artificial Sequence: Synthetic oligonucleotide
gaaccguuguugcugcauu

SEQ ID NO: 666190 - RNA, 19 nt, Artificial Sequence
  Description of Artificial Sequence: Synthetic oligonucleotide
auagagggucacgacuauu

SEQ ID NO: 666191 - RNA, 19 nt, Artificial Sequence
  Description of Artificial Sequence: Synthetic oligonucleotide
uagcggcauugcuugugaa

SEQ ID NO: 666192 - RNA, 19 nt, Artificial Sequence
  Description of Artificial Sequence: Synthetic oligonucleotide
aggaacccucagaaagaug

SEQ ID NO: 666193 - RNA, 19 nt, Artificial Sequence
  Description of Artificial Sequence: Synthetic oligonucleotide
caaggugcuauuacaccau

SEQ ID NO: 666194 - RNA, 19 nt, Artificial Sequence
  Description of Artificial Sequence: Synthetic oligonucleotide
uacugccuucggucacuca

SEQ ID NO: 666195 - RNA, 19 nt, Artificial Sequence
  Description of Artificial Sequence: Synthetic oligonucleotide
ggauauaguucuggacuga

SEQ ID NO: 666196 - RNA, 19 nt, Artificial Sequence
  Description of Artificial Sequence: Synthetic oligonucleotide
caacagccugaggcguugg

SEQ ID NO: 666197 - RNA, 19 nt, Artificial Sequence
  Description of Artificial Sequence: Synthetic oligonucleotide
gcgagcgcuacugccuucg

SEQ ID NO: 666198 - RNA, 19 nt, Artificial Sequence
  Description of Artificial Sequence: Synthetic oligonucleotide
ggguccgcgaaaggguuag

SEQ ID NO: 666199 - RNA, 19 nt, Artificial Sequence
  Description of Artificial Sequence: Synthetic oligonucleotide
aggaaccguuguugcugca

SEQ ID NO: 666200 - RNA, 19 nt, Artificial Sequence
  Description of Artificial Sequence: Synthetic oligonucleotide
agucggcagggaucuccgu

SEQ ID NO: 666201 - RNA, 19 nt, Artificial Sequence
  Description of Artificial Sequence: Synthetic oligonucleotide
gggaccuagacuccacugu

SEQ ID NO: 666202 - RNA, 19 nt, Artificial Sequence
  Description of Artificial Sequence: Synthetic oligonucleotide
ucggaggccagcggcgauc

SEQ ID NO: 666203 - RNA, 19 nt, Artificial Sequence
  Description of Artificial Sequence: Synthetic oligonucleotide
cauguaaguuugccgcagu

SEQ ID NO: 666204 - RNA, 19 nt, Artificial Sequence
  Description of Artificial Sequence: Synthetic oligonucleotide
gguaugggaggaacccuca

SEQ ID NO: 666205 - RNA, 19 nt, Artificial Sequence
  Description of Artificial Sequence: Synthetic oligonucleotide
agggcacaaggugcuauua

SEQ ID NO: 666206 - RNA, 19 nt, Artificial Sequence
  Description of Artificial Sequence: Synthetic oligonucleotide
gggcccaucgcgcagugua

SEQ ID NO: 666207 - RNA, 19 nt, Artificial Sequence
  Description of Artificial Sequence: Synthetic oligonucleotide
uugccgcaguguucugcaa

SEQ ID NO: 666208 - RNA, 19 nt, Artificial Sequence
  Description of Artificial Sequence: Synthetic oligonucleotide
gagcgcuacugccuucggu

SEQ ID NO: 666209 - RNA, 19 nt, Artificial Sequence
  Description of Artificial Sequence: Synthetic oligonucleotide
aucggaggccagcggcgau

SEQ ID NO: 666210 - RNA, 19 nt, Artificial Sequence
  Description of Artificial Sequence: Synthetic oligonucleotide
cccaucgcgcaguguagac

SEQ ID NO: 666211 - RNA, 19 nt, Artificial Sequence
  Description of Artificial Sequence: Synthetic oligonucleotide
gcgaaaggguuagugucga

SEQ ID NO: 666212 - RNA, 19 nt, Artificial Sequence
  Description of Artificial Sequence: Synthetic oligonucleotide
caacggugaccuccuaagu

SEQ ID NO: 666213 - RNA, 19 nt, Artificial Sequence
  Description of Artificial Sequence: Synthetic oligonucleotide
gaaccaggccaggcaugca

SEQ ID NO: 666214 - RNA, 19 nt, Artificial Sequence
  Description of Artificial Sequence: Synthetic oligonucleotide
gcuugaccgggcaccauga

SEQ ID NO: 666215 - RNA, 19 nt, Artificial Sequence
  Description of Artificial Sequence: Synthetic oligonucleotide
gcacucaguguagaaccuc

SEQ ID NO: 666216 - RNA, 19 nt, Artificial Sequence
  Description of Artificial Sequence: Synthetic oligonucleotide
gcgcuacugccuucgguca

SEQ ID NO: 666217 - RNA, 19 nt, Artificial Sequence
  Description of Artificial Sequence: Synthetic oligonucleotide
ccagcggcgaucuccgcga

SEQ ID NO: 666218 - RNA, 19 nt, Artificial Sequence
  Description of Artificial Sequence: Synthetic oligonucleotide
gccgcaguguucugcaacu

SEQ ID NO: 666219 - RNA, 19 nt, Artificial Sequence
  Description of Artificial Sequence: Synthetic oligonucleotide
cauagagggucacgacuau

SEQ ID NO: 666220 - RNA, 19 nt, Artificial Sequence
  Description of Artificial Sequence: Synthetic oligonucleotide
ggcccaucgcgcaguguag

SEQ ID NO: 666221 - RNA, 19 nt, Artificial Sequence
  Description of Artificial Sequence: Synthetic oligonucleotide
cuugugugacaggaaccgu

SEQ ID NO: 666222 - RNA, 19 nt, Artificial Sequence
  Description of Artificial Sequence: Synthetic oligonucleotide
gguggcugucauuaccauu

SEQ ID NO: 666223 - RNA, 19 nt, Artificial Sequence
  Description of Artificial Sequence: Synthetic oligonucleotide
caguguagacagggcugca

SEQ ID NO: 666224 - RNA, 19 nt, Artificial Sequence
  Description of Artificial Sequence: Synthetic oligonucleotide
cccuucccuuauguggaag

SEQ ID NO: 666225 - RNA, 19 nt, Artificial Sequence
  Description of Artificial Sequence: Synthetic oligonucleotide
acgcugggugagggaagga

SEQ ID NO: 666226 - RNA, 19 nt, Artificial Sequence
  Description of Artificial Sequence: Synthetic oligonucleotide
gaucuccgcgagcgcuacu

SEQ ID NO: 666227 - RNA, 19 nt, Artificial Sequence
  Description of Artificial Sequence: Synthetic oligonucleotide
gucccucaagagggcagaa

SEQ ID NO: 666228 - RNA, 19 nt, Artificial Sequence
  Description of Artificial Sequence: Synthetic oligonucleotide
ccaucgcgcaguguagaca

SEQ ID NO: 666229 - RNA, 19 nt, Artificial Sequence
  Description of Artificial Sequence: Synthetic oligonucleotide
gcccaucgcgcaguguaga

SEQ ID NO: 666230 - RNA, 19 nt, Artificial Sequence
  Description of Artificial Sequence: Synthetic oligonucleotide
cgcuacugccuucggucac

SEQ ID NO: 666231 - RNA, 19 nt, Artificial Sequence
  Description of Artificial Sequence: Synthetic oligonucleotide
ccuagacuccacugugggu

SEQ ID NO: 666232 - RNA, 19 nt, Artificial Sequence
  Description of Artificial Sequence: Synthetic oligonucleotide
ccguggagaaguccugaua

SEQ ID NO: 666233 - RNA, 19 nt, Artificial Sequence
  Description of Artificial Sequence: Synthetic oligonucleotide
ccguuguugcugcauuugu

SEQ ID NO: 666234 - RNA, 19 nt, Artificial Sequence
  Description of Artificial Sequence: Synthetic oligonucleotide
ggccgacauggugaucgga

SEQ ID NO: 666235 - RNA, 19 nt, Artificial Sequence
  Description of Artificial Sequence: Synthetic oligonucleotide
ggugucccugucccuuccu

SEQ ID NO: 666236 - RNA, 19 nt, Artificial Sequence
  Description of Artificial Sequence: Synthetic oligonucleotide
gguagucggcagggaucuc

SEQ ID NO: 666237 - RNA, 19 nt, Artificial Sequence
  Description of Artificial Sequence: Synthetic oligonucleotide
cgaucuccgcgagcgcuac

SEQ ID NO: 666238 - RNA, 19 nt, Artificial Sequence
  Description of Artificial Sequence: Synthetic oligonucleotide
gcagagaggcagagucccu

SEQ ID NO: 666239 - RNA, 19 nt, Artificial Sequence
  Description of Artificial Sequence: Synthetic oligonucleotide
ggaggccagcggcgaucuc

SEQ ID NO: 666240 - RNA, 19 nt, Artificial Sequence
  Description of Artificial Sequence: Synthetic oligonucleotide
gcacugcggaagguucugu

SEQ ID NO: 666241 - RNA, 19 nt, Artificial Sequence
  Description of Artificial Sequence: Synthetic oligonucleotide
cagccacccuaggaguuuu

SEQ ID NO: 666242 - RNA, 19 nt, Artificial Sequence
  Description of Artificial Sequence: Synthetic oligonucleotide
cgcgagcgcuacugccuuc

SEQ ID NO: 666243 - RNA, 19 nt, Artificial Sequence
  Description of Artificial Sequence: Synthetic oligonucleotide
cgacuauugugaggaacau

SEQ ID NO: 666244 - RNA, 19 nt, Artificial Sequence
  Description of Artificial Sequence: Synthetic oligonucleotide
gguccgcgaaaggguuagu

SEQ ID NO: 666245 - RNA, 19 nt, Artificial Sequence
  Description of Artificial Sequence: Synthetic oligonucleotide
ugcaauguaaccuagacca

SEQ ID NO: 666246 - RNA, 19 nt, Artificial Sequence
  Description of Artificial Sequence: Synthetic oligonucleotide
acaaauagcaccaaacccc

SEQ ID NO: 666247 - RNA, 19 nt, Artificial Sequence
  Description of Artificial Sequence: Synthetic oligonucleotide
gaaacuaggauuucgugcc

SEQ ID NO: 666248 - RNA, 19 nt, Artificial Sequence
  Description of Artificial Sequence: Synthetic oligonucleotide
ucuuguaccaccaggaaca

SEQ ID NO: 666249 - RNA, 19 nt, Artificial Sequence
  Description of Artificial Sequence: Synthetic oligonucleotide
ucagaaauuagaccaauga

SEQ ID NO: 666250 - RNA, 19 nt, Artificial Sequence
  Description of Artificial Sequence: Synthetic oligonucleotide
aauuagaccaaugagguaa

SEQ ID NO: 666251 - RNA, 19 nt, Artificial Sequence
  Description of Artificial Sequence: Synthetic oligonucleotide
ugucucaugcaacagaccc

SEQ ID NO: 666252 - RNA, 19 nt, Artificial Sequence
  Description of Artificial Sequence: Synthetic oligonucleotide
uccauuacaaauagcacca

SEQ ID NO: 666253 - RNA, 19 nt, Artificial Sequence
  Description of Artificial Sequence: Synthetic oligonucleotide
cagugcaccaacaaaagcg

SEQ ID NO: 666254 - RNA, 19 nt, Artificial Sequence
  Description of Artificial Sequence: Synthetic oligonucleotide
aacgcaaccgcccacgcuc

SEQ ID NO: 666255 - RNA, 19 nt, Artificial Sequence
  Description of Artificial Sequence: Synthetic oligonucleotide
aaagcgcagagcaugagcg

SEQ ID NO: 666256 - RNA, 19 nt, Artificial Sequence
  Description of Artificial Sequence: Synthetic oligonucleotide
agcaucaccuagcaaaugg

SEQ ID NO: 666257 - RNA, 19 nt, Artificial Sequence
  Description of Artificial Sequence: Synthetic oligonucleotide
aaagagguuagcgaaagga

SEQ ID NO: 666258 - RNA, 19 nt, Artificial Sequence
  Description of Artificial Sequence: Synthetic oligonucleotide
aagaacgccagccacggug

SEQ ID NO: 666259 - RNA, 19 nt, Artificial Sequence
  Description of Artificial Sequence: Synthetic oligonucleotide
aacaaaagcgcagagcaug

SEQ ID NO: 666260 - RNA, 19 nt, Artificial Sequence
  Description of Artificial Sequence: Synthetic oligonucleotide
ucuccuagaacaacacggg

SEQ ID NO: 666261 - RNA, 19 nt, Artificial Sequence
  Description of Artificial Sequence: Synthetic oligonucleotide
uggucugccacgaagaggu

SEQ ID NO: 666262 - RNA, 19 nt, Artificial Sequence
  Description of Artificial Sequence: Synthetic oligonucleotide
gaucaccacauacaguagg

SEQ ID NO: 666263 - RNA, 19 nt, Artificial Sequence
  Description of Artificial Sequence: Synthetic oligonucleotide
aguugggaucaccacauac

SEQ ID NO: 666264 - RNA, 19 nt, Artificial Sequence
  Description of Artificial Sequence: Synthetic oligonucleotide
uguaaccuagaccacugcc

SEQ ID NO: 666265 - RNA, 19 nt, Artificial Sequence
  Description of Artificial Sequence: Synthetic oligonucleotide
uugauguaacacagcaccg

SEQ ID NO: 666266 - RNA, 19 nt, Artificial Sequence
  Description of Artificial Sequence: Synthetic oligonucleotide
gaagacaggacgaaacuag

SEQ ID NO: 666267 - RNA, 19 nt, Artificial Sequence
  Description of Artificial Sequence: Synthetic oligonucleotide
aacacgggagcgcagcagg

SEQ ID NO: 666268 - RNA, 19 nt, Artificial Sequence
  Description of Artificial Sequence: Synthetic oligonucleotide
gauugaagcggcgaaggcg

SEQ ID NO: 666269 - RNA, 19 nt, Artificial Sequence
  Description of Artificial Sequence: Synthetic oligonucleotide
aaaagagguuagcgaaagg

SEQ ID NO: 666270 - RNA, 19 nt, Artificial Sequence
  Description of Artificial Sequence: Synthetic oligonucleotide
agcaccgccacuaugaggg

SEQ ID NO: 666271 - RNA, 19 nt, Artificial Sequence
  Description of Artificial Sequence: Synthetic oligonucleotide
acuaugagggucgaauggc

SEQ ID NO: 666272 - RNA, 19 nt, Artificial Sequence
  Description of Artificial Sequence: Synthetic oligonucleotide
agaccagugggucagcccg

SEQ ID NO: 666273 - RNA, 19 nt, Artificial Sequence
  Description of Artificial Sequence: Synthetic oligonucleotide
aacaacacgggagcgcagc

SEQ ID NO: 666274 - RNA, 19 nt, Artificial Sequence
  Description of Artificial Sequence: Synthetic oligonucleotide
aguagaacagccacaacuc

SEQ ID NO: 666275 - RNA, 19 nt, Artificial Sequence
  Description of Artificial Sequence: Synthetic oligonucleotide
ucggcggucauccucaaug

SEQ ID NO: 666276 - RNA, 19 nt, Artificial Sequence
  Description of Artificial Sequence: Synthetic oligonucleotide
agcgccuucagaucugccc

SEQ ID NO: 666277 - RNA, 19 nt, Artificial Sequence
  Description of Artificial Sequence: Synthetic oligonucleotide
agagcuacuaucuccgaug

SEQ ID NO: 666278 - RNA, 19 nt, Artificial Sequence
  Description of Artificial Sequence: Synthetic oligonucleotide
gaaaagagguuagcgaaag

SEQ ID NO: 666279 - RNA, 19 nt, Artificial Sequence
  Description of Artificial Sequence: Synthetic oligonucleotide
agugcaccaacaaaagcgc

SEQ ID NO: 666280 - RNA, 19 nt, Artificial Sequence
  Description of Artificial Sequence: Synthetic oligonucleotide
uuucgauuguaccugucac

SEQ ID NO: 666281 - RNA, 19 nt, Artificial Sequence
  Description of Artificial Sequence: Synthetic oligonucleotide
uagaccaaugagguaaggg

SEQ ID NO: 666282 - RNA, 19 nt, Artificial Sequence
  Description of Artificial Sequence: Synthetic oligonucleotide
uggaagaacgccagccacg

SEQ ID NO: 666283 - RNA, 19 nt, Artificial Sequence
  Description of Artificial Sequence: Synthetic oligonucleotide
acgaaaagagguuagcgaa

SEQ ID NO: 666284 - RNA, 19 nt, Artificial Sequence
  Description of Artificial Sequence: Synthetic oligonucleotide
gugagcaacagcuucucag

SEQ ID NO: 666285 - RNA, 19 nt, Artificial Sequence
  Description of Artificial Sequence: Synthetic oligonucleotide
uaaccuagaccacugccca

SEQ ID NO: 666286 - RNA, 19 nt, Artificial Sequence
  Description of Artificial Sequence: Synthetic oligonucleotide
aauccggucaucugagggu

SEQ ID NO: 666287 - RNA, 19 nt, Artificial Sequence
  Description of Artificial Sequence: Synthetic oligonucleotide
ugggacaaaccagugaugc

SEQ ID NO: 666288 - RNA, 19 nt, Artificial Sequence
  Description of Artificial Sequence: Synthetic oligonucleotide
gacgaaaagagguuagcga

SEQ ID NO: 666289 - RNA, 19 nt, Artificial Sequence
  Description of Artificial Sequence: Synthetic oligonucleotide
aacggcgccgugucggacc

SEQ ID NO: 666290 - RNA, 19 nt, Artificial Sequence
  Description of Artificial Sequence: Synthetic oligonucleotide
aauguaaccuagaccacug

SEQ ID NO: 666291 - RNA, 19 nt, Artificial Sequence
  Description of Artificial Sequence: Synthetic oligonucleotide
uuuggagccugcaauguaa

SEQ ID NO: 666292 - RNA, 19 nt, Artificial Sequence
  Description of Artificial Sequence: Synthetic oligonucleotide
caaugaacauggcagugcc

SEQ ID NO: 666293 - RNA, 19 nt, Artificial Sequence
  Description of Artificial Sequence: Synthetic oligonucleotide
uguggaguugagcccgucg

SEQ ID NO: 666294 - RNA, 19 nt, Artificial Sequence
  Description of Artificial Sequence: Synthetic oligonucleotide
acuaggauuucgugccagc

SEQ ID NO: 666295 - RNA, 19 nt, Artificial Sequence
  Description of Artificial Sequence: Synthetic oligonucleotide
agccacaacucccagaccu

SEQ ID NO: 666296 - RNA, 19 nt, Artificial Sequence
  Description of Artificial Sequence: Synthetic oligonucleotide
aaugggacagcacgaucug

SEQ ID NO: 666297 - RNA, 19 nt, Artificial Sequence
  Description of Artificial Sequence: Synthetic oligonucleotide
ucgaguugggaucaccaca

SEQ ID NO: 666298 - RNA, 19 nt, Artificial Sequence
  Description of Artificial Sequence: Synthetic oligonucleotide
cacuaugagggucgaaugg

SEQ ID NO: 666299 - RNA, 19 nt, Artificial Sequence
  Description of Artificial Sequence: Synthetic oligonucleotide
aucccggguggccagacgc

SEQ ID NO: 666300 - RNA, 19 nt, Artificial Sequence
  Description of Artificial Sequence: Synthetic oligonucleotide
aaugaacauggcagugccc

SEQ ID NO: 666301 - RNA, 19 nt, Artificial Sequence
  Description of Artificial Sequence: Synthetic oligonucleotide
ucccagaagaacgcaaccg

SEQ ID NO: 666302 - RNA, 19 nt, Artificial Sequence
  Description of Artificial Sequence: Synthetic oligonucleotide
ugauguaacacagcaccgc

SEQ ID NO: 666303 - RNA, 19 nt, Artificial Sequence
  Description of Artificial Sequence: Synthetic oligonucleotide
ugcgaggaguuucccaccg

SEQ ID NO: 666304 - RNA, 19 nt, Artificial Sequence
  Description of Artificial Sequence: Synthetic oligonucleotide
aucaccuagcaaaugggac

SEQ ID NO: 666305 - RNA, 19 nt, Artificial Sequence
  Description of Artificial Sequence: Synthetic oligonucleotide
uccgacgaaaagagguuag

SEQ ID NO: 666306 - RNA, 19 nt, Artificial Sequence
  Description of Artificial Sequence: Synthetic oligonucleotide
ugguccgucaucuggguca

SEQ ID NO: 666307 - RNA, 19 nt, Artificial Sequence
  Description of Artificial Sequence: Synthetic oligonucleotide
ucaggcaugugaugagucc

SEQ ID NO: 666308 - RNA, 19 nt, Artificial Sequence
  Description of Artificial Sequence: Synthetic oligonucleotide
gagguuagcgaaaggacug

SEQ ID NO: 666309 - RNA, 19 nt, Artificial Sequence
  Description of Artificial Sequence: Synthetic oligonucleotide
uucucagaugagcacgcug

SEQ ID NO: 666310 - RNA, 19 nt, Artificial Sequence
  Description of Artificial Sequence: Synthetic oligonucleotide
guggaguugagcccgucgg

SEQ ID NO: 666311 - RNA, 19 nt, Artificial Sequence
  Description of Artificial Sequence: Synthetic oligonucleotide
ugagcauccgacuccgcug

SEQ ID NO: 666312 - RNA, 19 nt, Artificial Sequence
  Description of Artificial Sequence: Synthetic oligonucleotide
cuaugagggucgaauggcc

SEQ ID NO: 666313 - RNA, 19 nt, Artificial Sequence
  Description of Artificial Sequence: Synthetic oligonucleotide
uagcgaaaggacugcgagg

SEQ ID NO: 666314 - RNA, 19 nt, Artificial Sequence
  Description of Artificial Sequence: Synthetic oligonucleotide
guaaccuagaccacugccc

SEQ ID NO: 666315 - RNA, 19 nt, Artificial Sequence
  Description of Artificial Sequence: Synthetic oligonucleotide
aggauugaagcggcgaagg

SEQ ID NO: 666316 - RNA, 19 nt, Artificial Sequence
  Description of Artificial Sequence: Synthetic oligonucleotide
cugcaauguaaccuagacc

SEQ ID NO: 666317 - RNA, 19 nt, Artificial Sequence
  Description of Artificial Sequence: Synthetic oligonucleotide
caccacauacaguaggaug

SEQ ID NO: 666318 - RNA, 19 nt, Artificial Sequence
  Description of Artificial Sequence: Synthetic oligonucleotide
ugcauguggaguugagccc

SEQ ID NO: 666319 - RNA, 19 nt, Artificial Sequence
  Description of Artificial Sequence: Synthetic oligonucleotide
gagcuacuaucuccgaugc

SEQ ID NO: 666320 - RNA, 19 nt, Artificial Sequence
  Description of Artificial Sequence: Synthetic oligonucleotide
ucggacccagccauggucc

SEQ ID NO: 666321 - RNA, 19 nt, Artificial Sequence
  Description of Artificial Sequence: Synthetic oligonucleotide
gcggucagaaauuagacca

SEQ ID NO: 666322 - RNA, 19 nt, Artificial Sequence
  Description of Artificial Sequence: Synthetic oligonucleotide
aaauuagaccaaugaggua

SEQ ID NO: 666323 - RNA, 19 nt, Artificial Sequence
  Description of Artificial Sequence: Synthetic oligonucleotide
agcgaaaggacugcgagga

SEQ ID NO: 666324 - RNA, 19 nt, Artificial Sequence
  Description of Artificial Sequence: Synthetic oligonucleotide
aaccuagaccacugcccac

SEQ ID NO: 666325 - RNA, 19 nt, Artificial Sequence
  Description of Artificial Sequence: Synthetic oligonucleotide
acgaaacuaggauuucgug

SEQ ID NO: 666326 - RNA, 19 nt, Artificial Sequence
  Description of Artificial Sequence: Synthetic oligonucleotide
cggaacucagacaagaagg

SEQ ID NO: 666327 - RNA, 19 nt, Artificial Sequence
  Description of Artificial Sequence: Synthetic oligonucleotide
gguuccgacagagaggacg

SEQ ID NO: 666328 - RNA, 19 nt, Artificial Sequence
  Description of Artificial Sequence: Synthetic oligonucleotide
guagaacagccacaacucc

SEQ ID NO: 666329 - RNA, 19 nt, Artificial Sequence
  Description of Artificial Sequence: Synthetic oligonucleotide
cuaucuccgaugcugaaga

SEQ ID NO: 666330 - RNA, 19 nt, Artificial Sequence
  Description of Artificial Sequence: Synthetic oligonucleotide
gacugucagaggaagaaca

SEQ ID NO: 666331 - RNA, 19 nt, Artificial Sequence
  Description of Artificial Sequence: Synthetic oligonucleotide
aacuaggauuucgugccag

SEQ ID NO: 666332 - RNA, 19 nt, Artificial Sequence
  Description of Artificial Sequence: Synthetic oligonucleotide
gaugucuggaagaacgcca

SEQ ID NO: 666333 - RNA, 19 nt, Artificial Sequence
  Description of Artificial Sequence: Synthetic oligonucleotide
uggugucacccgcaaagcc

SEQ ID NO: 666334 - RNA, 19 nt, Artificial Sequence
  Description of Artificial Sequence: Synthetic oligonucleotide
agaacgcaaccgcccacgc

SEQ ID NO: 666335 - RNA, 19 nt, Artificial Sequence
  Description of Artificial Sequence: Synthetic oligonucleotide
cuaggauuucgugccagcg

SEQ ID NO: 666336 - RNA, 19 nt, Artificial Sequence
  Description of Artificial Sequence: Synthetic oligonucleotide
ugacaaaagccacggcagu

SEQ ID NO: 666337 - RNA, 19 nt, Artificial Sequence
  Description of Artificial Sequence: Synthetic oligonucleotide
guacuuucgauuguaccug

SEQ ID NO: 666338 - RNA, 19 nt, Artificial Sequence
  Description of Artificial Sequence: Synthetic oligonucleotide
uccggucccaccuccgacg

SEQ ID NO: 666339 - RNA, 19 nt, Artificial Sequence
  Description of Artificial Sequence: Synthetic oligonucleotide
acaggacgaaacuaggauu

SEQ ID NO: 666340 - RNA, 19 nt, Artificial Sequence
  Description of Artificial Sequence: Synthetic oligonucleotide
ccuagaacaacacgggagc

SEQ ID NO: 666341 - RNA, 19 nt, Artificial Sequence
  Description of Artificial Sequence: Synthetic oligonucleotide
aaacuaggauuucgugcca

SEQ ID NO: 666342 - RNA, 19 nt, Artificial Sequence
  Description of Artificial Sequence: Synthetic oligonucleotide
aaacccugggcuucgucau

SEQ ID NO: 666343 - RNA, 19 nt, Artificial Sequence
  Description of Artificial Sequence: Synthetic oligonucleotide
caugagcgagaacugcagg

SEQ ID NO: 666344 - RNA, 19 nt, Artificial Sequence
  Description of Artificial Sequence: Synthetic oligonucleotide
gcuacuaucuccgaugcug

SEQ ID NO: 666345 - RNA, 19 nt, Artificial Sequence
  Description of Artificial Sequence: Synthetic oligonucleotide
uggacaacagggucucccc

SEQ ID NO: 666346 - RNA, 19 nt, Artificial Sequence
  Description of Artificial Sequence: Synthetic oligonucleotide
acaacucccagaccuggug

SEQ ID NO: 666347 - RNA, 19 nt, Artificial Sequence
  Description of Artificial Sequence: Synthetic oligonucleotide
ggacaaaccagugaugcgc

SEQ ID NO: 666348 - RNA, 19 nt, Artificial Sequence
  Description of Artificial Sequence: Synthetic oligonucleotide
acgcgugagaugcagguga

SEQ ID NO: 666349 - RNA, 19 nt, Artificial Sequence
  Description of Artificial Sequence: Synthetic oligonucleotide
aaugaggccagagcuacua

SEQ ID NO: 666350 - RNA, 19 nt, Artificial Sequence
  Description of Artificial Sequence: Synthetic oligonucleotide
aagccacggcagugaagcc

SEQ ID NO: 666351 - RNA, 19 nt, Artificial Sequence
  Description of Artificial Sequence: Synthetic oligonucleotide
gaagaacacgagucuccag

SEQ ID NO: 666352 - RNA, 19 nt, Artificial Sequence
  Description of Artificial Sequence: Synthetic oligonucleotide
ucuggaaccccaucucuuc

SEQ ID NO: 666353 - RNA, 19 nt, Artificial Sequence
  Description of Artificial Sequence: Synthetic oligonucleotide
aacugcucgaugucuggaa

SEQ ID NO: 666354 - RNA, 19 nt, Artificial Sequence
  Description of Artificial Sequence: Synthetic oligonucleotide
agguuagcgaaaggacugc

SEQ ID NO: 666355 - RNA, 19 nt, Artificial Sequence
  Description of Artificial Sequence: Synthetic oligonucleotide
acuaucuccgaugcugaag

SEQ ID NO: 666356 - RNA, 19 nt, Artificial Sequence
  Description of Artificial Sequence: Synthetic oligonucleotide
cuagcaaaugggacagcac

SEQ ID NO: 666357 - RNA, 19 nt, Artificial Sequence
  Description of Artificial Sequence: Synthetic oligonucleotide
ccuaauagacaggacaacc

SEQ ID NO: 666358 - RNA, 19 nt, Artificial Sequence
  Description of Artificial Sequence: Synthetic oligonucleotide
cgaaacuaggauuucgugc

SEQ ID NO: 666359 - RNA, 19 nt, Artificial Sequence
  Description of Artificial Sequence: Synthetic oligonucleotide
aggacugcgaggaguuucc

SEQ ID NO: 666360 - RNA, 19 nt, Artificial Sequence
  Description of Artificial Sequence: Synthetic oligonucleotide
acgcuggacacagggaccc

SEQ ID NO: 666361 - RNA, 19 nt, Artificial Sequence
  Description of Artificial Sequence: Synthetic oligonucleotide
caaaccagugaugcgcugc

SEQ ID NO: 666362 - RNA, 19 nt, Artificial Sequence
  Description of Artificial Sequence: Synthetic oligonucleotide
cuuucgauuguaccuguca

SEQ ID NO: 666363 - RNA, 19 nt, Artificial Sequence
  Description of Artificial Sequence: Synthetic oligonucleotide
uggugccaacaccauguag

SEQ ID NO: 666364 - RNA, 19 nt, Artificial Sequence
  Description of Artificial Sequence: Synthetic oligonucleotide
gguacuuucgauuguaccu

SEQ ID NO: 666365 - RNA, 19 nt, Artificial Sequence
  Description of Artificial Sequence: Synthetic oligonucleotide
accgcccacgcuccggucc

SEQ ID NO: 666366 - RNA, 19 nt, Artificial Sequence
  Description of Artificial Sequence: Synthetic oligonucleotide
acgcugguccgucaucugg

SEQ ID NO: 666367 - RNA, 19 nt, Artificial Sequence
  Description of Artificial Sequence: Synthetic oligonucleotide
accuccgacgaaaagaggu

SEQ ID NO: 666368 - RNA, 19 nt, Artificial Sequence
  Description of Artificial Sequence: Synthetic oligonucleotide
ugaggaacggcgccguguc

SEQ ID NO: 666369 - RNA, 19 nt, Artificial Sequence
  Description of Artificial Sequence: Synthetic oligonucleotide
aggcggucagaaauuagac

SEQ ID NO: 666370 - RNA, 19 nt, Artificial Sequence
  Description of Artificial Sequence: Synthetic oligonucleotide
cacccagguagccaaacac

SEQ ID NO: 666371 - RNA, 19 nt, Artificial Sequence
  Description of Artificial Sequence: Synthetic oligonucleotide
ugaggccagagcuacuauc

SEQ ID NO: 666372 - RNA, 19 nt, Artificial Sequence
  Description of Artificial Sequence: Synthetic oligonucleotide
ucgcugaggcaccacaauc

SEQ ID NO: 666373 - RNA, 19 nt, Artificial Sequence
  Description of Artificial Sequence: Synthetic oligonucleotide
gaggauugaagcggcgaag

SEQ ID NO: 666374 - RNA, 19 nt, Artificial Sequence
  Description of Artificial Sequence: Synthetic oligonucleotide
agcccgucggcggucaucc

SEQ ID NO: 666375 - RNA, 19 nt, Artificial Sequence
  Description of Artificial Sequence: Synthetic oligonucleotide
aggcgcggagcccaggagg

SEQ ID NO: 666376 - RNA, 19 nt, Artificial Sequence
  Description of Artificial Sequence: Synthetic oligonucleotide
aaucccggguggccagacg

SEQ ID NO: 666377 - RNA, 19 nt, Artificial Sequence
  Description of Artificial Sequence: Synthetic oligonucleotide
cagagcaugagcgagaacu

SEQ ID NO: 666378 - RNA, 19 nt, Artificial Sequence
  Description of Artificial Sequence: Synthetic oligonucleotide
auuagaccaaugagguaag

SEQ ID NO: 666379 - RNA, 19 nt, Artificial Sequence
  Description of Artificial Sequence: Synthetic oligonucleotide
agcacgaucuggaaggccu

SEQ ID NO: 666380 - RNA, 19 nt, Artificial Sequence
  Description of Artificial Sequence: Synthetic oligonucleotide
gaucagagugggcgcaaug

SEQ ID NO: 666381 - RNA, 19 nt, Artificial Sequence
  Description of Artificial Sequence: Synthetic oligonucleotide
cacgaugcuaccucgggca

SEQ ID NO: 666382 - RNA, 19 nt, Artificial Sequence
  Description of Artificial Sequence: Synthetic oligonucleotide
gacagagaggacgcgugag

SEQ ID NO: 666383 - RNA, 19 nt, Artificial Sequence
  Description of Artificial Sequence: Synthetic oligonucleotide
uuucccaccgccggcuagg

SEQ ID NO: 666384 - RNA, 19 nt, Artificial Sequence
  Description of Artificial Sequence: Synthetic oligonucleotide
augagggucgaauggcccu

SEQ ID NO: 666385 - RNA, 19 nt, Artificial Sequence
  Description of Artificial Sequence: Synthetic oligonucleotide
uaacacagcaccgccacua

SEQ ID NO: 666386 - RNA, 19 nt, Artificial Sequence
  Description of Artificial Sequence: Synthetic oligonucleotide
acgaugcuaccucgggcac

SEQ ID NO: 666387 - RNA, 19 nt, Artificial Sequence
  Description of Artificial Sequence: Synthetic oligonucleotide
aggaacggcgccgugucgg

SEQ ID NO: 666388 - RNA, 19 nt, Artificial Sequence
  Description of Artificial Sequence: Synthetic oligonucleotide
gaggaguuucccaccgccg

SEQ ID NO: 666389 - RNA, 19 nt, Artificial Sequence
  Description of Artificial Sequence: Synthetic oligonucleotide
ugagguacuuucgauugua

SEQ ID NO: 666390 - RNA, 19 nt, Artificial Sequence
  Description of Artificial Sequence: Synthetic oligonucleotide
gaagacgcugagcauccga

SEQ ID NO: 666391 - RNA, 19 nt, Artificial Sequence
  Description of Artificial Sequence: Synthetic oligonucleotide
guuccgacagagaggacgc

SEQ ID NO: 666392 - RNA, 19 nt, Artificial Sequence
  Description of Artificial Sequence: Synthetic oligonucleotide
cugagugccgcuccacagc

SEQ ID NO: 666393 - RNA, 19 nt, Artificial Sequence
  Description of Artificial Sequence: Synthetic oligonucleotide
caucaccuagcaaauggga

SEQ ID NO: 666394 - RNA, 19 nt, Artificial Sequence
  Description of Artificial Sequence: Synthetic oligonucleotide
accgccacuaugagggucg

SEQ ID NO: 666395 - RNA, 19 nt, Artificial Sequence
  Description of Artificial Sequence: Synthetic oligonucleotide
augucuggaagaacgccag

SEQ ID NO: 666396 - RNA, 19 nt, Artificial Sequence
  Description of Artificial Sequence: Synthetic oligonucleotide
ggcggucagaaauuagacc

SEQ ID NO: 666397 - RNA, 19 nt, Artificial Sequence
  Description of Artificial Sequence: Synthetic oligonucleotide
gacuccgcuggucugccac

SEQ ID NO: 666398 - RNA, 19 nt, Artificial Sequence
  Description of Artificial Sequence: Synthetic oligonucleotide
ggacgaaacuaggauuucg

SEQ ID NO: 666399 - RNA, 19 nt, Artificial Sequence
  Description of Artificial Sequence: Synthetic oligonucleotide
agaaagacgaggacccagu

SEQ ID NO: 666400 - RNA, 19 nt, Artificial Sequence
  Description of Artificial Sequence: Synthetic oligonucleotide
aaccugagugccgcuccac

SEQ ID NO: 666401 - RNA, 19 nt, Artificial Sequence
  Description of Artificial Sequence: Synthetic oligonucleotide
cuacuaucuccgaugcuga

SEQ ID NO: 666402 - RNA, 19 nt, Artificial Sequence
  Description of Artificial Sequence: Synthetic oligonucleotide
ggacuugggauuccccagg

SEQ ID NO: 666403 - RNA, 19 nt, Artificial Sequence
  Description of Artificial Sequence: Synthetic oligonucleotide
cccauguaguguuugggag

SEQ ID NO: 666404 - RNA, 19 nt, Artificial Sequence
  Description of Artificial Sequence: Synthetic oligonucleotide
agacccugcauguggaguu

SEQ ID NO: 666405 - RNA, 19 nt, Artificial Sequence
  Description of Artificial Sequence: Synthetic oligonucleotide
agcaaaugggacagcacga

SEQ ID NO: 666406 - RNA, 19 nt, Artificial Sequence
  Description of Artificial Sequence: Synthetic oligonucleotide
gcaugugaugaguccaaag

SEQ ID NO: 666407 - RNA, 19 nt, Artificial Sequence
  Description of Artificial Sequence: Synthetic oligonucleotide
gggacaaaccagugaugcg

SEQ ID NO: 666408 - RNA, 19 nt, Artificial Sequence
  Description of Artificial Sequence: Synthetic oligonucleotide
ccagaagaacgcaaccgcc

SEQ ID NO: 666409 - RNA, 19 nt, Artificial Sequence
  Description of Artificial Sequence: Synthetic oligonucleotide
caaauagcaccaaaccccu

SEQ ID NO: 666410 - RNA, 19 nt, Artificial Sequence
  Description of Artificial Sequence: Synthetic oligonucleotide
ugguggaguaacuggccuc

SEQ ID NO: 666411 - RNA, 19 nt, Artificial Sequence
  Description of Artificial Sequence: Synthetic oligonucleotide
cuaggagcgugcuccgaug

SEQ ID NO: 666412 - RNA, 19 nt, Artificial Sequence
  Description of Artificial Sequence: Synthetic oligonucleotide
ucgaauggcccugggacaa

SEQ ID NO: 666413 - RNA, 19 nt, Artificial Sequence
  Description of Artificial Sequence: Synthetic oligonucleotide
uagaacggccucgcugagg

SEQ ID NO: 666414 - RNA, 19 nt, Artificial Sequence
  Description of Artificial Sequence: Synthetic oligonucleotide
agagcaugagcgagaacug

SEQ ID NO: 666415 - RNA, 19 nt, Artificial Sequence
  Description of Artificial Sequence: Synthetic oligonucleotide
acaaaagcgcagagcauga

SEQ ID NO: 666416 - RNA, 19 nt, Artificial Sequence
  Description of Artificial Sequence: Synthetic oligonucleotide
acggcgccgugucggaccc

SEQ ID NO: 666417 - RNA, 19 nt, Artificial Sequence
  Description of Artificial Sequence: Synthetic oligonucleotide
ucgugcuccccggacuugg

SEQ ID NO: 666418 - RNA, 19 nt, Artificial Sequence
  Description of Artificial Sequence: Synthetic oligonucleotide
gaucucgugcuccccggac

SEQ ID NO: 666419 - RNA, 19 nt, Artificial Sequence
  Description of Artificial Sequence: Synthetic oligonucleotide
guaguguuugggagcuggg

SEQ ID NO: 666420 - RNA, 19 nt, Artificial Sequence
  Description of Artificial Sequence: Synthetic oligonucleotide
cagugggucagcccgagga

SEQ ID NO: 666421 - RNA, 19 nt, Artificial Sequence
  Description of Artificial Sequence: Synthetic oligonucleotide
aggucggcgaucagagugg

SEQ ID NO: 666422 - RNA, 19 nt, Artificial Sequence
  Description of Artificial Sequence: Synthetic oligonucleotide
aggacgaaacuaggauuuc

SEQ ID NO: 666423 - RNA, 19 nt, Artificial Sequence
  Description of Artificial Sequence: Synthetic oligonucleotide
ugagggucgaauggcccug

SEQ ID NO: 666424 - RNA, 19 nt, Artificial Sequence
  Description of Artificial Sequence: Synthetic oligonucleotide
ggguagaacggccucgcug

SEQ ID NO: 666425 - RNA, 19 nt, Artificial Sequence
  Description of Artificial Sequence: Synthetic oligonucleotide
agacaggacgaaacuagga

SEQ ID NO: 666426 - RNA, 19 nt, Artificial Sequence
  Description of Artificial Sequence: Synthetic oligonucleotide
acaacacgggagcgcagca

SEQ ID NO: 666427 - RNA, 19 nt, Artificial Sequence
  Description of Artificial Sequence: Synthetic oligonucleotide
gacgaaacuaggauuucgu

SEQ ID NO: 666428 - RNA, 19 nt, Artificial Sequence
  Description of Artificial Sequence: Synthetic oligonucleotide
ugcuccccggacuugggau

SEQ ID NO: 666429 - RNA, 19 nt, Artificial Sequence
  Description of Artificial Sequence: Synthetic oligonucleotide
gguccugucucaugcaaca

SEQ ID NO: 666430 - RNA, 19 nt, Artificial Sequence
  Description of Artificial Sequence: Synthetic oligonucleotide
ggagcgucgaguugggauc

SEQ ID NO: 666431 - RNA, 19 nt, Artificial Sequence
  Description of Artificial Sequence: Synthetic oligonucleotide
gucgaauggcccugggaca

SEQ ID NO: 666432 - RNA, 19 nt, Artificial Sequence
  Description of Artificial Sequence: Synthetic oligonucleotide
agcgugcuccgaugcacag

SEQ ID NO: 666433 - RNA, 19 nt, Artificial Sequence
  Description of Artificial Sequence: Synthetic oligonucleotide
gugucggacccagccaugg

SEQ ID NO: 666434 - RNA, 19 nt, Artificial Sequence
  Description of Artificial Sequence: Synthetic oligonucleotide
cccaccgccggcuaggagc

SEQ ID NO: 666435 - RNA, 19 nt, Artificial Sequence
  Description of Artificial Sequence: Synthetic oligonucleotide
gaggaacggcgccgugucg

SEQ ID NO: 666436 - RNA, 19 nt, Artificial Sequence
  Description of Artificial Sequence: Synthetic oligonucleotide
gguuagcgaaaggacugcg

SEQ ID NO: 666437 - RNA, 19 nt, Artificial Sequence
  Description of Artificial Sequence: Synthetic oligonucleotide
cuuguaccaccaggaacag

SEQ ID NO: 666438 - RNA, 19 nt, Artificial Sequence
  Description of Artificial Sequence: Synthetic oligonucleotide
gaaccccaucucuucccug

SEQ ID NO: 666439 - RNA, 19 nt, Artificial Sequence
  Description of Artificial Sequence: Synthetic oligonucleotide
cuaccucgggcacaggcca

SEQ ID NO: 666440 - RNA, 19 nt, Artificial Sequence
  Description of Artificial Sequence: Synthetic oligonucleotide
acuuucgauuguaccuguc

SEQ ID NO: 666441 - RNA, 19 nt, Artificial Sequence
  Description of Artificial Sequence: Synthetic oligonucleotide
ggcgcaaugguggaguaac

SEQ ID NO: 666442 - RNA, 19 nt, Artificial Sequence
  Description of Artificial Sequence: Synthetic oligonucleotide
cugggcugcccauguagug

SEQ ID NO: 666443 - RNA, 19 nt, Artificial Sequence
  Description of Artificial Sequence: Synthetic oligonucleotide
guuagcgaaaggacugcga

SEQ ID NO: 666444 - RNA, 19 nt, Artificial Sequence
  Description of Artificial Sequence: Synthetic oligonucleotide
gaagcgcucucuggggaug

SEQ ID NO: 666445 - RNA, 19 nt, Artificial Sequence
  Description of Artificial Sequence: Synthetic oligonucleotide
cuccgaugcugaagaacug

SEQ ID NO: 666446 - RNA, 19 nt, Artificial Sequence
  Description of Artificial Sequence: Synthetic oligonucleotide
acccggguagaacggccuc

SEQ ID NO: 666447 - RNA, 19 nt, Artificial Sequence
  Description of Artificial Sequence: Synthetic oligonucleotide
cucgcgguccgggaucucg

SEQ ID NO: 666448 - RNA, 19 nt, Artificial Sequence
  Description of Artificial Sequence: Synthetic oligonucleotide
caaaagcgcagagcaugag

SEQ ID NO: 666449 - RNA, 19 nt, Artificial Sequence
  Description of Artificial Sequence: Synthetic oligonucleotide
agaacgccagccacgguga

SEQ ID NO: 666450 - RNA, 19 nt, Artificial Sequence
  Description of Artificial Sequence: Synthetic oligonucleotide
caccuccgacgaaaagagg

SEQ ID NO: 666451 - RNA, 19 nt, Artificial Sequence
  Description of Artificial Sequence: Synthetic oligonucleotide
acccucgcgguccgggauc

SEQ ID NO: 666452 - RNA, 19 nt, Artificial Sequence
  Description of Artificial Sequence: Synthetic oligonucleotide
cagugaugcgcugcagacc

SEQ ID NO: 666453 - RNA, 19 nt, Artificial Sequence
  Description of Artificial Sequence: Synthetic oligonucleotide
uaccucgggcacaggccag

SEQ ID NO: 666454 - RNA, 19 nt, Artificial Sequence
  Description of Artificial Sequence: Synthetic oligonucleotide
ccagugcaccaacaaaagc

SEQ ID NO: 666455 - RNA, 19 nt, Artificial Sequence
  Description of Artificial Sequence: Synthetic oligonucleotide
ugaugcgcugcagacccuc

SEQ ID NO: 666456 - RNA, 19 nt, Artificial Sequence
  Description of Artificial Sequence: Synthetic oligonucleotide
gguugauguaacacagcac

SEQ ID NO: 666457 - RNA, 19 nt, Artificial Sequence
  Description of Artificial Sequence: Synthetic oligonucleotide
aaccgcccacgcuccgguc

SEQ ID NO: 666458 - RNA, 19 nt, Artificial Sequence
  Description of Artificial Sequence: Synthetic oligonucleotide
ugucggacccagccauggu

SEQ ID NO: 666459 - RNA, 19 nt, Artificial Sequence
  Description of Artificial Sequence: Synthetic oligonucleotide
gucauucccucugguuccg

SEQ ID NO: 666460 - RNA, 19 nt, Artificial Sequence
  Description of Artificial Sequence: Synthetic oligonucleotide
agcuacuaucuccgaugcu

SEQ ID NO: 666461 - RNA, 19 nt, Artificial Sequence
  Description of Artificial Sequence: Synthetic oligonucleotide
accuagcaaaugggacagc

SEQ ID NO: 666462 - RNA, 19 nt, Artificial Sequence
  Description of Artificial Sequence: Synthetic oligonucleotide
ccggcuaggagcgugcucc

SEQ ID NO: 666463 - RNA, 19 nt, Artificial Sequence
  Description of Artificial Sequence: Synthetic oligonucleotide
cgacgaaaagagguuagcg

SEQ ID NO: 666464 - RNA, 19 nt, Artificial Sequence
  Description of Artificial Sequence: Synthetic oligonucleotide
uuccgacagagaggacgcg

SEQ ID NO: 666465 - RNA, 19 nt, Artificial Sequence
  Description of Artificial Sequence: Synthetic oligonucleotide
gucaggcaugugaugaguc

SEQ ID NO: 666466 - RNA, 19 nt, Artificial Sequence
  Description of Artificial Sequence: Synthetic oligonucleotide
ccacuaugagggucgaaug

SEQ ID NO: 666467 - RNA, 19 nt, Artificial Sequence
  Description of Artificial Sequence: Synthetic oligonucleotide
agggucgaauggcccuggg

SEQ ID NO: 666468 - RNA, 19 nt, Artificial Sequence
  Description of Artificial Sequence: Synthetic oligonucleotide
aguggagcgucgaguuggg

SEQ ID NO: 666469 - RNA, 19 nt, Artificial Sequence
  Description of Artificial Sequence: Synthetic oligonucleotide
caggcaugugaugagucca

SEQ ID NO: 666470 - RNA, 19 nt, Artificial Sequence
  Description of Artificial Sequence: Synthetic oligonucleotide
gacgcugguccgucaucug

SEQ ID NO: 666471 - RNA, 19 nt, Artificial Sequence
  Description of Artificial Sequence: Synthetic oligonucleotide
ugccaacaccauguagcug

SEQ ID NO: 666472 - RNA, 19 nt, Artificial Sequence
  Description of Artificial Sequence: Synthetic oligonucleotide
gagggucgaauggcccugg

SEQ ID NO: 666473 - RNA, 19 nt, Artificial Sequence
  Description of Artificial Sequence: Synthetic oligonucleotide
gcccugacaaucccgggug

SEQ ID NO: 666474 - RNA, 19 nt, Artificial Sequence
  Description of Artificial Sequence: Synthetic oligonucleotide
ccggugacaaaagccacgg

SEQ ID NO: 666475 - RNA, 19 nt, Artificial Sequence
  Description of Artificial Sequence: Synthetic oligonucleotide
caauguaaccuagaccacu

SEQ ID NO: 666476 - RNA, 19 nt, Artificial Sequence
  Description of Artificial Sequence: Synthetic oligonucleotide
agaagacgcugagcauccg

SEQ ID NO: 666477 - RNA, 19 nt, Artificial Sequence
  Description of Artificial Sequence: Synthetic oligonucleotide
ggucucuccuagaacaaca

SEQ ID NO: 666478 - RNA, 19 nt, Artificial Sequence
  Description of Artificial Sequence: Synthetic oligonucleotide
acgaucuggaaggccucag

SEQ ID NO: 666479 - RNA, 19 nt, Artificial Sequence
  Description of Artificial Sequence: Synthetic oligonucleotide
cacgagucuccagggagac

SEQ ID NO: 666480 - RNA, 19 nt, Artificial Sequence
  Description of Artificial Sequence: Synthetic oligonucleotide
gggucaucggcuuggcuga

SEQ ID NO: 666481 - RNA, 19 nt, Artificial Sequence
  Description of Artificial Sequence: Synthetic oligonucleotide
gcacaugagguacuuucga

SEQ ID NO: 666482 - RNA, 19 nt, Artificial Sequence
  Description of Artificial Sequence: Synthetic oligonucleotide
cacgauggcccaguucaug

SEQ ID NO: 666483 - RNA, 19 nt, Artificial Sequence
  Description of Artificial Sequence: Synthetic oligonucleotide
cgucauucccucugguucc

SEQ ID NO: 666484 - RNA, 19 nt, Artificial Sequence
  Description of Artificial Sequence: Synthetic oligonucleotide
acacgagucuccagggaga

SEQ ID NO: 666485 - RNA, 19 nt, Artificial Sequence
  Description of Artificial Sequence: Synthetic oligonucleotide
ccugagugccgcuccacag

SEQ ID NO: 666486 - RNA, 19 nt, Artificial Sequence
  Description of Artificial Sequence: Synthetic oligonucleotide
acgcaaccgcccacgcucc

SEQ ID NO: 666487 - RNA, 19 nt, Artificial Sequence
  Description of Artificial Sequence: Synthetic oligonucleotide
agguagccaaacacuggug

SEQ ID NO: 666488 - RNA, 19 nt, Artificial Sequence
  Description of Artificial Sequence: Synthetic oligonucleotide
gccacgaagaggucggcga

SEQ ID NO: 666489 - RNA, 19 nt, Artificial Sequence
  Description of Artificial Sequence: Synthetic oligonucleotide
caacacgggagcgcagcag

SEQ ID NO: 666490 - RNA, 19 nt, Artificial Sequence
  Description of Artificial Sequence: Synthetic oligonucleotide
gugccaacaccauguagcu

SEQ ID NO: 666491 - RNA, 19 nt, Artificial Sequence
  Description of Artificial Sequence: Synthetic oligonucleotide
agugggcgcaaugguggag

SEQ ID NO: 666492 - RNA, 19 nt, Artificial Sequence
  Description of Artificial Sequence: Synthetic oligonucleotide
aggacgcgugagaugcagg

SEQ ID NO: 666493 - RNA, 19 nt, Artificial Sequence
  Description of Artificial Sequence: Synthetic oligonucleotide
ggacauaucccagggcuuc

SEQ ID NO: 666494 - RNA, 19 nt, Artificial Sequence
  Description of Artificial Sequence: Synthetic oligonucleotide
ggucccagaagaacgcaac

SEQ ID NO: 666495 - RNA, 19 nt, Artificial Sequence
  Description of Artificial Sequence: Synthetic oligonucleotide
ucccggguggccagacgcu

SEQ ID NO: 666496 - RNA, 19 nt, Artificial Sequence
  Description of Artificial Sequence: Synthetic oligonucleotide
cagcacagaccaguggguc

SEQ ID NO: 666497 - RNA, 19 nt, Artificial Sequence
  Description of Artificial Sequence: Synthetic oligonucleotide
ucgcgguccgggaucucgu

SEQ ID NO: 666498 - RNA, 19 nt, Artificial Sequence
  Description of Artificial Sequence: Synthetic oligonucleotide
cacggugaagcgguccaug

SEQ ID NO: 666499 - RNA, 19 nt, Artificial Sequence
  Description of Artificial Sequence: Synthetic oligonucleotide
gccggugacaaaagccacg

SEQ ID NO: 666500 - RNA, 19 nt, Artificial Sequence
  Description of Artificial Sequence: Synthetic oligonucleotide
ggaucaccacauacaguag

SEQ ID NO: 666501 - RNA, 19 nt, Artificial Sequence
  Description of Artificial Sequence: Synthetic oligonucleotide
auccgacuccgcuggucug

SEQ ID NO: 666502 - RNA, 19 nt, Artificial Sequence
  Description of Artificial Sequence: Synthetic oligonucleotide
cacggcagugaagccgagg

SEQ ID NO: 666503 - RNA, 19 nt, Artificial Sequence
  Description of Artificial Sequence: Synthetic oligonucleotide
aggggcccugacaaucccg

SEQ ID NO: 666504 - RNA, 19 nt, Artificial Sequence
  Description of Artificial Sequence: Synthetic oligonucleotide
gaggcaccacaauccgguc

SEQ ID NO: 666505 - RNA, 19 nt, Artificial Sequence
  Description of Artificial Sequence: Synthetic oligonucleotide
ccacaauccggucaucuga

SEQ ID NO: 666506 - RNA, 19 nt, Artificial Sequence
  Description of Artificial Sequence: Synthetic oligonucleotide
acggccucgcugaggcacc

SEQ ID NO: 666507 - RNA, 19 nt, Artificial Sequence
  Description of Artificial Sequence: Synthetic oligonucleotide
cgaggaguuucccaccgcc

SEQ ID NO: 666508 - RNA, 19 nt, Artificial Sequence
  Description of Artificial Sequence: Synthetic oligonucleotide
gagcgucgaguugggauca

SEQ ID NO: 666509 - RNA, 19 nt, Artificial Sequence
  Description of Artificial Sequence: Synthetic oligonucleotide
cacaugagguacuuucgau

SEQ ID NO: 666510 - RNA, 19 nt, Artificial Sequence
  Description of Artificial Sequence: Synthetic oligonucleotide
ccaccgccggcuaggagcg

SEQ ID NO: 666511 - RNA, 19 nt, Artificial Sequence
  Description of Artificial Sequence: Synthetic oligonucleotide
cagcacgaucuggaaggcc

SEQ ID NO: 666512 - RNA, 19 nt, Artificial Sequence
  Description of Artificial Sequence: Synthetic oligonucleotide
ucccaccgccggcuaggag

SEQ ID NO: 666513 - RNA, 19 nt, Artificial Sequence
  Description of Artificial Sequence: Synthetic oligonucleotide
agggagccggugacaaaag

SEQ ID NO: 666514 - RNA, 19 nt, Artificial Sequence
  Description of Artificial Sequence: Synthetic oligonucleotide
guccgggaucucgugcucc

SEQ ID NO: 666515 - RNA, 19 nt, Artificial Sequence
  Description of Artificial Sequence: Synthetic oligonucleotide
gaccuggugucacccgcaa

SEQ ID NO: 666516 - RNA, 19 nt, Artificial Sequence
  Description of Artificial Sequence: Synthetic oligonucleotide
cagcaucaccuagcaaaug

SEQ ID NO: 666517 - RNA, 19 nt, Artificial Sequence
  Description of Artificial Sequence: Synthetic oligonucleotide
ggacaacagggucucccca

SEQ ID NO: 666518 - RNA, 19 nt, Artificial Sequence
  Description of Artificial Sequence: Synthetic oligonucleotide
ugggcgcaaugguggagua

SEQ ID NO: 666519 - RNA, 19 nt, Artificial Sequence
  Description of Artificial Sequence: Synthetic oligonucleotide
gaacgcaaccgcccacgcu

SEQ ID NO: 666520 - RNA, 19 nt, Artificial Sequence
  Description of Artificial Sequence: Synthetic oligonucleotide
ccgacgaaaagagguuagc

SEQ ID NO: 666521 - RNA, 19 nt, Artificial Sequence
  Description of Artificial Sequence: Synthetic oligonucleotide
caacucccagaccuggugu

SEQ ID NO: 666522 - RNA, 19 nt, Artificial Sequence
  Description of Artificial Sequence: Synthetic oligonucleotide
cagcgccuucagaucugcc

SEQ ID NO: 666523 - RNA, 19 nt, Artificial Sequence
  Description of Artificial Sequence: Synthetic oligonucleotide
accgccggcuaggagcgug

SEQ ID NO: 666524 - RNA, 19 nt, Artificial Sequence
  Description of Artificial Sequence: Synthetic oligonucleotide
agcgucgaguugggaucac

SEQ ID NO: 666525 - RNA, 19 nt, Artificial Sequence
  Description of Artificial Sequence: Synthetic oligonucleotide
ggucggcgaucagaguggg

SEQ ID NO: 666526 - RNA, 19 nt, Artificial Sequence
  Description of Artificial Sequence: Synthetic oligonucleotide
gccagccacggugaagcgg

SEQ ID NO: 666527 - RNA, 19 nt, Artificial Sequence
  Description of Artificial Sequence: Synthetic oligonucleotide
agggucucuccuagaacaa

SEQ ID NO: 666528 - RNA, 19 nt, Artificial Sequence
  Description of Artificial Sequence: Synthetic oligonucleotide
cccaccuccgacgaaaaga

SEQ ID NO: 666529 - RNA, 19 nt, Artificial Sequence
  Description of Artificial Sequence: Synthetic oligonucleotide
ggacgcgugagaugcaggu

SEQ ID NO: 666530 - RNA, 19 nt, Artificial Sequence
  Description of Artificial Sequence: Synthetic oligonucleotide
cuccgacgaaaagagguua

SEQ ID NO: 666531 - RNA, 19 nt, Artificial Sequence
  Description of Artificial Sequence: Synthetic oligonucleotide
ccugacaaucccggguggc

SEQ ID NO: 666532 - RNA, 19 nt, Artificial Sequence
  Description of Artificial Sequence: Synthetic oligonucleotide
cuccccggacuugggauuc

SEQ ID NO: 666533 - RNA, 19 nt, Artificial Sequence
  Description of Artificial Sequence: Synthetic oligonucleotide
cccuaauagacaggacaac

SEQ ID NO: 666534 - RNA, 19 nt, Artificial Sequence
  Description of Artificial Sequence: Synthetic oligonucleotide
gcaguagaacagccacaac

SEQ ID NO: 666535 - RNA, 19 nt, Artificial Sequence
  Description of Artificial Sequence: Synthetic oligonucleotide
gcucuuguaccaccaggaa

SEQ ID NO: 666536 - RNA, 19 nt, Artificial Sequence
  Description of Artificial Sequence: Synthetic oligonucleotide
ugguuccgacagagaggac

SEQ ID NO: 666537 - RNA, 19 nt, Artificial Sequence
  Description of Artificial Sequence: Synthetic oligonucleotide
ggcgcggagcccaggaggc

SEQ ID NO: 666538 - RNA, 19 nt, Artificial Sequence
  Description of Artificial Sequence: Synthetic oligonucleotide
gcgaaaggacugcgaggag

SEQ ID NO: 666539 - RNA, 19 nt, Artificial Sequence
  Description of Artificial Sequence: Synthetic oligonucleotide
acauaucccagggcuucuu

SEQ ID NO: 666540 - RNA, 19 nt, Artificial Sequence
  Description of Artificial Sequence: Synthetic oligonucleotide
caaucccggguggccagac

SEQ ID NO: 666541 - RNA, 19 nt, Artificial Sequence
  Description of Artificial Sequence: Synthetic oligonucleotide
ggccacgaugcuaccucgg

SEQ ID NO: 666542 - RNA, 19 nt, Artificial Sequence
  Description of Artificial Sequence: Synthetic oligonucleotide
caccgccacuaugaggguc

SEQ ID NO: 666543 - RNA, 19 nt, Artificial Sequence
  Description of Artificial Sequence: Synthetic oligonucleotide
ggucccaccuccgacgaaa

SEQ ID NO: 666544 - RNA, 19 nt, Artificial Sequence
  Description of Artificial Sequence: Synthetic oligonucleotide
cucagcaguggagcgucga

SEQ ID NO: 666545 - RNA, 19 nt, Artificial Sequence
  Description of Artificial Sequence: Synthetic oligonucleotide
ggacccggguagaacggcc

SEQ ID NO: 666546 - RNA, 19 nt, Artificial Sequence
  Description of Artificial Sequence: Synthetic oligonucleotide
auguaguguuugggagcug

SEQ ID NO: 666547 - RNA, 19 nt, Artificial Sequence
  Description of Artificial Sequence: Synthetic oligonucleotide
cccugacaaucccgggugg

SEQ ID NO: 666548 - RNA, 19 nt, Artificial Sequence
  Description of Artificial Sequence: Synthetic oligonucleotide
cagagcuacuaucuccgau

SEQ ID NO: 666549 - RNA, 19 nt, Artificial Sequence
  Description of Artificial Sequence: Synthetic oligonucleotide
acaaucccggguggccaga

SEQ ID NO: 666550 - RNA, 19 nt, Artificial Sequence
  Description of Artificial Sequence: Synthetic oligonucleotide
gcgguccgggaucucgugc

SEQ ID NO: 666551 - RNA, 19 nt, Artificial Sequence
  Description of Artificial Sequence: Synthetic oligonucleotide
gccacuaugagggucgaau

SEQ ID NO: 666552 - RNA, 19 nt, Artificial Sequence
  Description of Artificial Sequence: Synthetic oligonucleotide
gcccggaacucagacaaga

SEQ ID NO: 666553 - RNA, 19 nt, Artificial Sequence
  Description of Artificial Sequence: Synthetic oligonucleotide
gugcuccccggacuuggga

SEQ ID NO: 666554 - RNA, 19 nt, Artificial Sequence
  Description of Artificial Sequence: Synthetic oligonucleotide
cgaaaagagguuagcgaaa

SEQ ID NO: 666555 - RNA, 19 nt, Artificial Sequence
  Description of Artificial Sequence: Synthetic oligonucleotide
gcgugagaugcaggugacg

SEQ ID NO: 666556 - RNA, 19 nt, Artificial Sequence
  Description of Artificial Sequence: Synthetic oligonucleotide
uccgucggaggcggucaga

SEQ ID NO: 666557 - RNA, 19 nt, Artificial Sequence
  Description of Artificial Sequence: Synthetic oligonucleotide
gcaaccgcccacgcuccgg

SEQ ID NO: 666558 - RNA, 19 nt, Artificial Sequence
  Description of Artificial Sequence: Synthetic oligonucleotide
gaccagugggucagcccga

SEQ ID NO: 666559 - RNA, 19 nt, Artificial Sequence
  Description of Artificial Sequence: Synthetic oligonucleotide
acacagggacccggguaga

SEQ ID NO: 666560 - RNA, 19 nt, Artificial Sequence
  Description of Artificial Sequence: Synthetic oligonucleotide
gauuucgugccagcgccuu

SEQ ID NO: 666561 - RNA, 19 nt, Artificial Sequence
  Description of Artificial Sequence: Synthetic oligonucleotide
gugggcgcaaugguggagu

SEQ ID NO: 666562 - RNA, 19 nt, Artificial Sequence
  Description of Artificial Sequence: Synthetic oligonucleotide
gaacggcgccgugucggac

SEQ ID NO: 666563 - RNA, 19 nt, Artificial Sequence
  Description of Artificial Sequence: Synthetic oligonucleotide
caccagggaccagaaggca

SEQ ID NO: 666564 - RNA, 19 nt, Artificial Sequence
  Description of Artificial Sequence: Synthetic oligonucleotide
accccuugggcugcccuaa

SEQ ID NO: 666565 - RNA, 19 nt, Artificial Sequence
  Description of Artificial Sequence: Synthetic oligonucleotide
cgucgaguugggaucacca

SEQ ID NO: 666566 - RNA, 19 nt, Artificial Sequence
  Description of Artificial Sequence: Synthetic oligonucleotide
ccgcaaagcccagugccag

SEQ ID NO: 666567 - RNA, 19 nt, Artificial Sequence
  Description of Artificial Sequence: Synthetic oligonucleotide
ccagccacggugaagcggu

SEQ ID NO: 666568 - RNA, 19 nt, Artificial Sequence
  Description of Artificial Sequence: Synthetic oligonucleotide
ggcgccgugucggacccag

SEQ ID NO: 666569 - RNA, 19 nt, Artificial Sequence
  Description of Artificial Sequence: Synthetic oligonucleotide
guugagcccgucggcgguc

SEQ ID NO: 666570 - RNA, 19 nt, Artificial Sequence
  Description of Artificial Sequence: Synthetic oligonucleotide
cgccgugucggacccagcc

SEQ ID NO: 666571 - RNA, 19 nt, Artificial Sequence
  Description of Artificial Sequence: Synthetic oligonucleotide
cugccacgaagaggucggc

SEQ ID NO: 666572 - RNA, 19 nt, Artificial Sequence
  Description of Artificial Sequence: Synthetic oligonucleotide
cccggacuugggauucccc

SEQ ID NO: 666573 - RNA, 19 nt, Artificial Sequence
  Description of Artificial Sequence: Synthetic oligonucleotide
gccucgcugaggcaccaca

SEQ ID NO: 666574 - RNA, 19 nt, Artificial Sequence
  Description of Artificial Sequence: Synthetic oligonucleotide
ggcccugacaaucccgggu

SEQ ID NO: 666575 - RNA, 19 nt, Artificial Sequence
  Description of Artificial Sequence: Synthetic oligonucleotide
ggcgaucagagugggcgca

SEQ ID NO: 666576 - RNA, 19 nt, Artificial Sequence
  Description of Artificial Sequence: Synthetic oligonucleotide
ggaacggcgccgugucgga

SEQ ID NO: 666577 - RNA, 19 nt, Artificial Sequence
  Description of Artificial Sequence: Synthetic oligonucleotide
gggaaccugagugccgcuc

SEQ ID NO: 666578 - RNA, 19 nt, Artificial Sequence
  Description of Artificial Sequence: Synthetic oligonucleotide
gacccggguagaacggccu

SEQ ID NO: 666579 - RNA, 19 nt, Artificial Sequence
  Description of Artificial Sequence: Synthetic oligonucleotide
gcgguccauguaguucagg

SEQ ID NO: 666580 - RNA, 19 nt, Artificial Sequence
  Description of Artificial Sequence: Synthetic oligonucleotide
gccgugucggacccagcca

SEQ ID NO: 666581 - RNA, 19 nt, Artificial Sequence
  Description of Artificial Sequence: Synthetic oligonucleotide
ccggguagaacggccucgc

SEQ ID NO: 666582 - RNA, 19 nt, Artificial Sequence
  Description of Artificial Sequence: Synthetic oligonucleotide
cucgcugaggcaccacaau

SEQ ID NO: 666583 - RNA, 19 nt, Artificial Sequence
  Description of Artificial Sequence: Synthetic oligonucleotide
gcuaggagcgugcuccgau

SEQ ID NO: 666584 - RNA, 19 nt, Artificial Sequence
  Description of Artificial Sequence: Synthetic oligonucleotide
ggacugcgaggaguuuccc

SEQ ID NO: 666585 - RNA, 19 nt, Artificial Sequence
  Description of Artificial Sequence: Synthetic oligonucleotide
ccucagcaguggagcgucg

SEQ ID NO: 666586 - RNA, 19 nt, Artificial Sequence
  Description of Artificial Sequence: Synthetic oligonucleotide
gcaaaugggacagcacgau

SEQ ID NO: 666587 - RNA, 19 nt, Artificial Sequence
  Description of Artificial Sequence: Synthetic oligonucleotide
cagugccagucuccagcca

SEQ ID NO: 666588 - RNA, 19 nt, Artificial Sequence
  Description of Artificial Sequence: Synthetic oligonucleotide
gcgucgaguugggaucacc

SEQ ID NO: 666589 - RNA, 19 nt, Artificial Sequence
  Description of Artificial Sequence: Synthetic oligonucleotide
cauguggaguugagcccgu

SEQ ID NO: 666590 - RNA, 19 nt, Artificial Sequence
  Description of Artificial Sequence: Synthetic oligonucleotide
gacccucgcgguccgggau

SEQ ID NO: 666591 - RNA, 19 nt, Artificial Sequence
  Description of Artificial Sequence: Synthetic oligonucleotide
cgaggauugaagcggcgaa

SEQ ID NO: 666592 - RNA, 19 nt, Artificial Sequence
  Description of Artificial Sequence: Synthetic oligonucleotide
ccagugggucagcccgagg

SEQ ID NO: 666593 - RNA, 19 nt, Artificial Sequence
  Description of Artificial Sequence: Synthetic oligonucleotide
cgcgugagaugcaggugac

SEQ ID NO: 666594 - RNA, 19 nt, Artificial Sequence
  Description of Artificial Sequence: Synthetic oligonucleotide
cacgggagcgcagcaggaa

SEQ ID NO: 666595 - RNA, 19 nt, Artificial Sequence
  Description of Artificial Sequence: Synthetic oligonucleotide
gugcuccgaugcacagagc

SEQ ID NO: 666596 - RNA, 19 nt, Artificial Sequence
  Description of Artificial Sequence: Synthetic oligonucleotide
cgugagaugcaggugacgu

SEQ ID NO: 666597 - RNA, 19 nt, Artificial Sequence
  Description of Artificial Sequence: Synthetic oligonucleotide
caaccgcccacgcuccggu

SEQ ID NO: 666598 - RNA, 19 nt, Artificial Sequence
  Description of Artificial Sequence: Synthetic oligonucleotide
cccggaacucagacaagaa

SEQ ID NO: 666599 - RNA, 19 nt, Artificial Sequence
  Description of Artificial Sequence: Synthetic oligonucleotide
ccagagcuacuaucuccga

SEQ ID NO: 666600 - RNA, 19 nt, Artificial Sequence
  Description of Artificial Sequence: Synthetic oligonucleotide
ccucgcugaggcaccacaa

SEQ ID NO: 666601 - RNA, 19 nt, Artificial Sequence
  Description of Artificial Sequence: Synthetic oligonucleotide
gucccaccuccgacgaaaa

SEQ ID NO: 666602 - RNA, 19 nt, Artificial Sequence
  Description of Artificial Sequence: Synthetic oligonucleotide
ccaccaugagguggggcuc

SEQ ID NO: 666603 - RNA, 19 nt, Artificial Sequence
  Description of Artificial Sequence: Synthetic oligonucleotide
ccgcccacgcuccgguccc

SEQ ID NO: 666604 - RNA, 19 nt, Artificial Sequence
  Description of Artificial Sequence: Synthetic oligonucleotide
ccgccggcuaggagcgugc

SEQ ID NO: 666605 - RNA, 19 nt, Artificial Sequence
  Description of Artificial Sequence: Synthetic oligonucleotide
gcugguccgucaucugggu

SEQ ID NO: 666606 - RNA, 19 nt, Artificial Sequence
  Description of Artificial Sequence: Synthetic oligonucleotide
cccacgcuccggucccacc

SEQ ID NO: 666607 - RNA, 19 nt, Artificial Sequence
  Description of Artificial Sequence: Synthetic oligonucleotide
cgugucggacccagccaug

SEQ ID NO: 666608 - RNA, 19 nt, Artificial Sequence
  Description of Artificial Sequence: Synthetic oligonucleotide
agcgcucucuggggaugaa

SEQ ID NO: 666609 - RNA, 19 nt, Artificial Sequence
  Description of Artificial Sequence: Synthetic oligonucleotide
ccgacuccgcuggucugcc

SEQ ID NO: 666610 - RNA, 19 nt, Artificial Sequence
  Description of Artificial Sequence: Synthetic oligonucleotide
gucacccgcaaagcccagu

SEQ ID NO: 666611 - RNA, 19 nt, Artificial Sequence
  Description of Artificial Sequence: Synthetic oligonucleotide
gccagacgcugguccguca

SEQ ID NO: 666612 - RNA, 19 nt, Artificial Sequence
  Description of Artificial Sequence: Synthetic oligonucleotide
gccggcuaggagcgugcuc

SEQ ID NO: 666613 - RNA, 19 nt, Artificial Sequence
  Description of Artificial Sequence: Synthetic oligonucleotide
ggccagacgcugguccguc

SEQ ID NO: 666614 - RNA, 19 nt, Artificial Sequence
  Description of Artificial Sequence: Synthetic oligonucleotide
cggcggucauccucaauga

SEQ ID NO: 666615 - RNA, 19 nt, Artificial Sequence
  Description of Artificial Sequence: Synthetic oligonucleotide
ccccggacuugggauuccc

SEQ ID NO: 666616 - RNA, 19 nt, Artificial Sequence
  Description of Artificial Sequence: Synthetic oligonucleotide
ccgcaccacccagugcacc

SEQ ID NO: 666617 - RNA, 19 nt, Artificial Sequence
  Description of Artificial Sequence: Synthetic oligonucleotide
ccuccgacgaaaagagguu

SEQ ID NO: 666618 - RNA, 19 nt, Artificial Sequence
  Description of Artificial Sequence: Synthetic oligonucleotide
gcgaaggcggcggcugauc

SEQ ID NO: 666619 - RNA, 19 nt, Artificial Sequence
  Description of Artificial Sequence: Synthetic oligonucleotide
ccggucccaccuccgacga

SEQ ID NO: 666620 - RNA, 19 nt, Artificial Sequence
  Description of Artificial Sequence: Synthetic oligonucleotide
gggcgcaaugguggaguaa

SEQ ID NO: 666621 - RNA, 19 nt, Artificial Sequence
  Description of Artificial Sequence: Synthetic oligonucleotide
gcgaucagagugggcgcaa

SEQ ID NO: 666622 - RNA, 19 nt, Artificial Sequence
  Description of Artificial Sequence: Synthetic oligonucleotide
ccacgcuccggucccaccu

SEQ ID NO: 666623 - RNA, 19 nt, Artificial Sequence
  Description of Artificial Sequence: Synthetic oligonucleotide
gucggcggucauccucaau

SEQ ID NO: 666624 - RNA, 19 nt, Artificial Sequence
  Description of Artificial Sequence: Synthetic oligonucleotide
ccgugucggacccagccau

SEQ ID NO: 666625 - RNA, 19 nt, Artificial Sequence
  Description of Artificial Sequence: Synthetic oligonucleotide
cgcgguccgggaucucgug

SEQ ID NO: 666626 - RNA, 19 nt, Artificial Sequence
  Description of Artificial Sequence: Synthetic oligonucleotide
cgcaaccgcccacgcuccg

SEQ ID NO: 666627 - RNA, 19 nt, Artificial Sequence
  Description of Artificial Sequence: Synthetic oligonucleotide
gcuccccggacuugggauu

SEQ ID NO: 666628 - RNA, 19 nt, Artificial Sequence
  Description of Artificial Sequence: Synthetic oligonucleotide
ggagcgcagcaggaaugcu

SEQ ID NO: 666629 - RNA, 19 nt, Artificial Sequence
  Description of Artificial Sequence: Synthetic oligonucleotide
gugaugcgcugcagacccu

SEQ ID NO: 666630 - RNA, 19 nt, Artificial Sequence
  Description of Artificial Sequence: Synthetic oligonucleotide
cccuugggcugcccuaaua

SEQ ID NO: 666631 - RNA, 19 nt, Artificial Sequence
  Description of Artificial Sequence: Synthetic oligonucleotide
ccagacgcugguccgucau

SEQ ID NO: 666632 - RNA, 19 nt, Artificial Sequence
  Description of Artificial Sequence: Synthetic oligonucleotide
gcgcaaugguggaguaacu

SEQ ID NO: 666633 - RNA, 19 nt, Artificial Sequence
  Description of Artificial Sequence: Synthetic oligonucleotide
gcaccgccacuaugagggu

SEQ ID NO: 666634 - RNA, 19 nt, Artificial Sequence
  Description of Artificial Sequence: Synthetic oligonucleotide
gcgccgugucggacccagc

SEQ ID NO: 666635 - RNA, 19 nt, Artificial Sequence
  Description of Artificial Sequence: Synthetic oligonucleotide
ccugggcaccucccagggu

SEQ ID NO: 666636 - RNA, 19 nt, Artificial Sequence
  Description of Artificial Sequence: Synthetic oligonucleotide
ccgccacuaugagggucga

SEQ ID NO: 666637 - RNA, 19 nt, Artificial Sequence
  Description of Artificial Sequence: Synthetic oligonucleotide
cccucgcgguccgggaucu

SEQ ID NO: 666638 - RNA, 19 nt, Artificial Sequence
  Description of Artificial Sequence: Synthetic oligonucleotide
cggguagaacggccucgcu

SEQ ID NO: 666639 - RNA, 19 nt, Artificial Sequence
  Description of Artificial Sequence: Synthetic oligonucleotide
cggucccaccuccgacgaa

SEQ ID NO: 666640 - RNA, 19 nt, Artificial Sequence
  Description of Artificial Sequence: Synthetic oligonucleotide
cgccacuaugagggucgaa

SEQ ID NO: 666641 - RNA, 19 nt, Artificial Sequence
  Description of Artificial Sequence: Synthetic oligonucleotide
caccgccggcuaggagcgu

SEQ ID NO: 666642 - RNA, 19 nt, Artificial Sequence
  Description of Artificial Sequence: Synthetic oligonucleotide
ccccuugggcugcccuaau

SEQ ID NO: 666643 - RNA, 19 nt, Artificial Sequence
  Description of Artificial Sequence: Synthetic oligonucleotide
cgccggcuaggagcgugcu

SEQ ID NO: 666644 - RNA, 19 nt, Artificial Sequence
  Description of Artificial Sequence: Synthetic oligonucleotide
aauuacuauagacaaaggg

SEQ ID NO: 666645 - RNA, 19 nt, Artificial Sequence
  Description of Artificial Sequence: Synthetic oligonucleotide
acuuauaaaacauguugcc

SEQ ID NO: 666646 - RNA, 19 nt, Artificial Sequence
  Description of Artificial Sequence: Synthetic oligonucleotide
aauucacucagaauaaccc

SEQ ID NO: 666647 - RNA, 19 nt, Artificial Sequence
  Description of Artificial Sequence: Synthetic oligonucleotide
aaauauguuagguuuucuc

SEQ ID NO: 666648 - RNA, 19 nt, Artificial Sequence
  Description of Artificial Sequence: Synthetic oligonucleotide
aauauguuagguuuucuca

SEQ ID NO: 666649 - RNA, 19 nt, Artificial Sequence
  Description of Artificial Sequence: Synthetic oligonucleotide
aaccgauuaaccuugagau

SEQ ID NO: 666650 - RNA, 19 nt, Artificial Sequence
  Description of Artificial Sequence: Synthetic oligonucleotide
auagaauuggcauuuaggu

SEQ ID NO: 666651 - RNA, 19 nt, Artificial Sequence
  Description of Artificial Sequence: Synthetic oligonucleotide
ucuuguauaaaguuuuaug

SEQ ID NO: 666652 - RNA, 19 nt, Artificial Sequence
  Description of Artificial Sequence: Synthetic oligonucleotide
aaagcaauaguccuugaau

SEQ ID NO: 666653 - RNA, 19 nt, Artificial Sequence
  Description of Artificial Sequence: Synthetic oligonucleotide
aaagcacugacacauacau

SEQ ID NO: 666654 - RNA, 19 nt, Artificial Sequence
  Description of Artificial Sequence: Synthetic oligonucleotide
acuaucacucacuuuaguc

SEQ ID NO: 666655 - RNA, 19 nt, Artificial Sequence
  Description of Artificial Sequence: Synthetic oligonucleotide
aaagcuauacaggauuaac

SEQ ID NO: 666656 - RNA, 19 nt, Artificial Sequence
  Description of Artificial Sequence: Synthetic oligonucleotide
uuuaucacggucaaauggu

SEQ ID NO: 666657 - RNA, 19 nt, Artificial Sequence
  Description of Artificial Sequence: Synthetic oligonucleotide
acauauauggaucugacua

SEQ ID NO: 666658 - RNA, 19 nt, Artificial Sequence
  Description of Artificial Sequence: Synthetic oligonucleotide
cacuuauaaaacauguugc

SEQ ID NO: 666659 - RNA, 19 nt, Artificial Sequence
  Description of Artificial Sequence: Synthetic oligonucleotide
ucuuaaauccaggaggagg

SEQ ID NO: 666660 - RNA, 19 nt, Artificial Sequence
  Description of Artificial Sequence: Synthetic oligonucleotide
uuuaugaugaauguccaug

SEQ ID NO: 666661 - RNA, 19 nt, Artificial Sequence
  Description of Artificial Sequence: Synthetic oligonucleotide
aguugaagaaugaugacac

SEQ ID NO: 666662 - RNA, 19 nt, Artificial Sequence
  Description of Artificial Sequence: Synthetic oligonucleotide
ucuuaaagguucuuggccc

SEQ ID NO: 666663 - RNA, 19 nt, Artificial Sequence
  Description of Artificial Sequence: Synthetic oligonucleotide
ugugcagaaacuaucacuc

SEQ ID NO: 666664 - RNA, 19 nt, Artificial Sequence
  Description of Artificial Sequence: Synthetic oligonucleotide
aacccagguuuucaaaagc

SEQ ID NO: 666665 - RNA, 19 nt, Artificial Sequence
  Description of Artificial Sequence: Synthetic oligonucleotide
uuacgcuauaguuaacugg

SEQ ID NO: 666666 - RNA, 19 nt, Artificial Sequence
  Description of Artificial Sequence: Synthetic oligonucleotide
aaaccgauuaaccuugaga

SEQ ID NO: 666667 - RNA, 19 nt, Artificial Sequence
  Description of Artificial Sequence: Synthetic oligonucleotide
ugcaggaccgaucauaggc

SEQ ID NO: 666668 - RNA, 19 nt, Artificial Sequence
  Description of Artificial Sequence: Synthetic oligonucleotide
aacucuaugcuucauuaga

SEQ ID NO: 666669 - RNA, 19 nt, Artificial Sequence
  Description of Artificial Sequence: Synthetic oligonucleotide
auuacuauagacaaagggu

SEQ ID NO: 666670 - RNA, 19 nt, Artificial Sequence
  Description of Artificial Sequence: Synthetic oligonucleotide
uacgcuauaguuaacuggu

SEQ ID NO: 666671 - RNA, 19 nt, Artificial Sequence
  Description of Artificial Sequence: Synthetic oligonucleotide
uuacuauagacaaaggguu

SEQ ID NO: 666672 - RNA, 19 nt, Artificial Sequence
  Description of Artificial Sequence: Synthetic oligonucleotide
uucacucagaauaacccag

SEQ ID NO: 666673 - RNA, 19 nt, Artificial Sequence
  Description of Artificial Sequence: Synthetic oligonucleotide
cuugauucguuguaugagg

SEQ ID NO: 666674 - RNA, 19 nt, Artificial Sequence
  Description of Artificial Sequence: Synthetic oligonucleotide
uguuauguacauauaugga

SEQ ID NO: 666675 - RNA, 19 nt, Artificial Sequence
  Description of Artificial Sequence: Synthetic oligonucleotide
uuaucucccgauuugggag

SEQ ID NO: 666676 - RNA, 19 nt, Artificial Sequence
  Description of Artificial Sequence: Synthetic oligonucleotide
aagcuauacaggauuaacg

SEQ ID NO: 666677 - RNA, 19 nt, Artificial Sequence
  Description of Artificial Sequence: Synthetic oligonucleotide
ugugaaaccgguauuuagu

SEQ ID NO: 666678 - RNA, 19 nt, Artificial Sequence
  Description of Artificial Sequence: Synthetic oligonucleotide
aaugguauccucucuuggu

SEQ ID NO: 666679 - RNA, 19 nt, Artificial Sequence
  Description of Artificial Sequence: Synthetic oligonucleotide
ugguuuagaugaaucauca

SEQ ID NO: 666680 - RNA, 19 nt, Artificial Sequence
  Description of Artificial Sequence: Synthetic oligonucleotide
auuaacgcuccaguaaacc

SEQ ID NO: 666681 - RNA, 19 nt, Artificial Sequence
  Description of Artificial Sequence: Synthetic oligonucleotide
aagacuuaaugaaaccagg

SEQ ID NO: 666682 - RNA, 19 nt, Artificial Sequence
  Description of Artificial Sequence: Synthetic oligonucleotide
cugaucaaagcacugacac

SEQ ID NO: 666683 - RNA, 19 nt, Artificial Sequence
  Description of Artificial Sequence: Synthetic oligonucleotide
uugggcgagaccaugaaga

SEQ ID NO: 666684 - RNA, 19 nt, Artificial Sequence
  Description of Artificial Sequence: Synthetic oligonucleotide
caauaguccuugaauaagc

SEQ ID NO: 666685 - RNA, 19 nt, Artificial Sequence
  Description of Artificial Sequence: Synthetic oligonucleotide
uaacgcuccaguaaaccag

SEQ ID NO: 666686 - RNA, 19 nt, Artificial Sequence
  Description of Artificial Sequence: Synthetic oligonucleotide
uguuguuacgcuauaguua

SEQ ID NO: 666687 - RNA, 19 nt, Artificial Sequence
  Description of Artificial Sequence: Synthetic oligonucleotide
aaacucuaugcuucauuag

SEQ ID NO: 666688 - RNA, 19 nt, Artificial Sequence
  Description of Artificial Sequence: Synthetic oligonucleotide
ugcaaccgggcucaggucg

SEQ ID NO: 666689 - RNA, 19 nt, Artificial Sequence
  Description of Artificial Sequence: Synthetic oligonucleotide
aagcaauaguccuugaaua

SEQ ID NO: 666690 - RNA, 19 nt, Artificial Sequence
  Description of Artificial Sequence: Synthetic oligonucleotide
cuaugcuucauuagaacug

SEQ ID NO: 666691 - RNA, 19 nt, Artificial Sequence
  Description of Artificial Sequence: Synthetic oligonucleotide
gaagacaggaguccuagac

SEQ ID NO: 666692 - RNA, 19 nt, Artificial Sequence
  Description of Artificial Sequence: Synthetic oligonucleotide
cucuuaaagguucuuggcc

SEQ ID NO: 666693 - RNA, 19 nt, Artificial Sequence
  Description of Artificial Sequence: Synthetic oligonucleotide
gauugguuuagaugaauca

SEQ ID NO: 666694 - RNA, 19 nt, Artificial Sequence
  Description of Artificial Sequence: Synthetic oligonucleotide
ucaaacucuguuguuacgc

SEQ ID NO: 666695 - RNA, 19 nt, Artificial Sequence
  Description of Artificial Sequence: Synthetic oligonucleotide
ucuguaauuaggaggcaga

SEQ ID NO: 666696 - RNA, 19 nt, Artificial Sequence
  Description of Artificial Sequence: Synthetic oligonucleotide
ucuguuguuacgcuauagu

SEQ ID NO: 666697 - RNA, 19 nt, Artificial Sequence
  Description of Artificial Sequence: Synthetic oligonucleotide
aucacggucaaaugguauc

SEQ ID NO: 666698 - RNA, 19 nt, Artificial Sequence
  Description of Artificial Sequence: Synthetic oligonucleotide
uucgcugagacgcacaguc

SEQ ID NO: 666699 - RNA, 19 nt, Artificial Sequence
  Description of Artificial Sequence: Synthetic oligonucleotide
uagccauucgcugagacgc

SEQ ID NO: 666700 - RNA, 19 nt, Artificial Sequence
  Description of Artificial Sequence: Synthetic oligonucleotide
uuuagguuuuaucucccga

SEQ ID NO: 666701 - RNA, 19 nt, Artificial Sequence
  Description of Artificial Sequence: Synthetic oligonucleotide
uuaacgcuccaguaaacca

SEQ ID NO: 666702 - RNA, 19 nt, Artificial Sequence
  Description of Artificial Sequence: Synthetic oligonucleotide
uugguuuagaugaaucauc

SEQ ID NO: 666703 - RNA, 19 nt, Artificial Sequence
  Description of Artificial Sequence: Synthetic oligonucleotide
accugcaagaaaugcauag

SEQ ID NO: 666704 - RNA, 19 nt, Artificial Sequence
  Description of Artificial Sequence: Synthetic oligonucleotide
aggaguccuagacuugugc

SEQ ID NO: 666705 - RNA, 19 nt, Artificial Sequence
  Description of Artificial Sequence: Synthetic oligonucleotide
ucucuuaaagguucuuggc

SEQ ID NO: 666706 - RNA, 19 nt, Artificial Sequence
  Description of Artificial Sequence: Synthetic oligonucleotide
aaugcaggaccgaucauag

SEQ ID NO: 666707 - RNA, 19 nt, Artificial Sequence
  Description of Artificial Sequence: Synthetic oligonucleotide
acauacaucacucccacua

SEQ ID NO: 666708 - RNA, 19 nt, Artificial Sequence
  Description of Artificial Sequence: Synthetic oligonucleotide
ucuuaucccuuccugacaa

SEQ ID NO: 666709 - RNA, 19 nt, Artificial Sequence
  Description of Artificial Sequence: Synthetic oligonucleotide
caugauucucuugugauug

SEQ ID NO: 666710 - RNA, 19 nt, Artificial Sequence
  Description of Artificial Sequence: Synthetic oligonucleotide
guuguuacgcuauaguuaa

SEQ ID NO: 666711 - RNA, 19 nt, Artificial Sequence
  Description of Artificial Sequence: Synthetic oligonucleotide
guuguaugaggacacuugc

SEQ ID NO: 666712 - RNA, 19 nt, Artificial Sequence
  Description of Artificial Sequence: Synthetic oligonucleotide
ugauugguuuagaugaauc

SEQ ID NO: 666713 - RNA, 19 nt, Artificial Sequence
  Description of Artificial Sequence: Synthetic oligonucleotide
uugauucguuguaugagga

SEQ ID NO: 666714 - RNA, 19 nt, Artificial Sequence
  Description of Artificial Sequence: Synthetic oligonucleotide
acaaaugaaauggacaaau

SEQ ID NO: 666715 - RNA, 19 nt, Artificial Sequence
  Description of Artificial Sequence: Synthetic oligonucleotide
ucacuuuagucaaagggua

SEQ ID NO: 666716 - RNA, 19 nt, Artificial Sequence
  Description of Artificial Sequence: Synthetic oligonucleotide
aauaacccagguuuucaaa

SEQ ID NO: 666717 - RNA, 19 nt, Artificial Sequence
  Description of Artificial Sequence: Synthetic oligonucleotide
gguauuuaguucuugggac

SEQ ID NO: 666718 - RNA, 19 nt, Artificial Sequence
  Description of Artificial Sequence: Synthetic oligonucleotide
uacaucacucccacuagug

SEQ ID NO: 666719 - RNA, 19 nt, Artificial Sequence
  Description of Artificial Sequence: Synthetic oligonucleotide
auuuagguuuuaucucccg

SEQ ID NO: 666720 - RNA, 19 nt, Artificial Sequence
  Description of Artificial Sequence: Synthetic oligonucleotide
gaaaccgguauuuaguucu

SEQ ID NO: 666721 - RNA, 19 nt, Artificial Sequence
  Description of Artificial Sequence: Synthetic oligonucleotide
ugacuaucccaugugaagc

SEQ ID NO: 666722 - RNA, 19 nt, Artificial Sequence
  Description of Artificial Sequence: Synthetic oligonucleotide
cauaaaucgggaaucagaa

SEQ ID NO: 666723 - RNA, 19 nt, Artificial Sequence
  Description of Artificial Sequence: Synthetic oligonucleotide
uaacccagguuuucaaaag

SEQ ID NO: 666724 - RNA, 19 nt, Artificial Sequence
  Description of Artificial Sequence: Synthetic oligonucleotide
caagaugcagacaguuugg

SEQ ID NO: 666725 - RNA, 19 nt, Artificial Sequence
  Description of Artificial Sequence: Synthetic oligonucleotide
uguuacgcuauaguuaacu

SEQ ID NO: 666726 - RNA, 19 nt, Artificial Sequence
  Description of Artificial Sequence: Synthetic oligonucleotide
aacgcuccaguaaaccagc

SEQ ID NO: 666727 - RNA, 19 nt, Artificial Sequence
  Description of Artificial Sequence: Synthetic oligonucleotide
ugauuuucgccucuguuuu

SEQ ID NO: 666728 - RNA, 19 nt, Artificial Sequence
  Description of Artificial Sequence: Synthetic oligonucleotide
auucacucagaauaaccca

SEQ ID NO: 666729 - RNA, 19 nt, Artificial Sequence
  Description of Artificial Sequence: Synthetic oligonucleotide
augugaaaccgguauuuag

SEQ ID NO: 666730 - RNA, 19 nt, Artificial Sequence
  Description of Artificial Sequence: Synthetic oligonucleotide
uaagcuacuuacacuagua

SEQ ID NO: 666731 - RNA, 19 nt, Artificial Sequence
  Description of Artificial Sequence: Synthetic oligonucleotide
ugagugaguuaauuuaaaa

SEQ ID NO: 666732 - RNA, 19 nt, Artificial Sequence
  Description of Artificial Sequence: Synthetic oligonucleotide
uacagaguuagcagaacaa

SEQ ID NO: 666733 - RNA, 19 nt, Artificial Sequence
  Description of Artificial Sequence: Synthetic oligonucleotide
ugagugacuuccuuguuuc

SEQ ID NO: 666734 - RNA, 19 nt, Artificial Sequence
  Description of Artificial Sequence: Synthetic oligonucleotide
aguguuauguacauauaug

SEQ ID NO: 666735 - RNA, 19 nt, Artificial Sequence
  Description of Artificial Sequence: Synthetic oligonucleotide
uuagguuuuaucucccgau

SEQ ID NO: 666736 - RNA, 19 nt, Artificial Sequence
  Description of Artificial Sequence: Synthetic oligonucleotide
uugauuuucgccucuguuu

SEQ ID NO: 666737 - RNA, 19 nt, Artificial Sequence
  Description of Artificial Sequence: Synthetic oligonucleotide
uucaaacucuguuguuacg

SEQ ID NO: 666738 - RNA, 19 nt, Artificial Sequence
  Description of Artificial Sequence: Synthetic oligonucleotide
cugacuaucccaugugaag

SEQ ID NO: 666739 - RNA, 19 nt, Artificial Sequence
  Description of Artificial Sequence: Synthetic oligonucleotide
auauauggaucugacuauc

SEQ ID NO: 666740 - RNA, 19 nt, Artificial Sequence
  Description of Artificial Sequence: Synthetic oligonucleotide
aauucuaugcagacaacaa

SEQ ID NO: 666741 - RNA, 19 nt, Artificial Sequence
  Description of Artificial Sequence: Synthetic oligonucleotide
auaagcuacuuacacuagu

SEQ ID NO: 666742 - RNA, 19 nt, Artificial Sequence
  Description of Artificial Sequence: Synthetic oligonucleotide
uuguguuuaacagcuuaag

SEQ ID NO: 666743 - RNA, 19 nt, Artificial Sequence
  Description of Artificial Sequence: Synthetic oligonucleotide
aaaucgggaaucagaaugu

SEQ ID NO: 666744 - RNA, 19 nt, Artificial Sequence
  Description of Artificial Sequence: Synthetic oligonucleotide
acaggauuaacgcuccagu

SEQ ID NO: 666745 - RNA, 19 nt, Artificial Sequence
  Description of Artificial Sequence: Synthetic oligonucleotide
ucugacuaucccaugugaa

SEQ ID NO: 666746 - RNA, 19 nt, Artificial Sequence
  Description of Artificial Sequence: Synthetic oligonucleotide
ugcaagaaaugcauagaau

SEQ ID NO: 666747 - RNA, 19 nt, Artificial Sequence
  Description of Artificial Sequence: Synthetic oligonucleotide
uacuauagacaaaggguuc

SEQ ID NO: 666748 - RNA, 19 nt, Artificial Sequence
  Description of Artificial Sequence: Synthetic oligonucleotide
uguccaauucuaugcagac

SEQ ID NO: 666749 - RNA, 19 nt, Artificial Sequence
  Description of Artificial Sequence: Synthetic oligonucleotide
aauaagcuacuuacacuag

SEQ ID NO: 666750 - RNA, 19 nt, Artificial Sequence
  Description of Artificial Sequence: Synthetic oligonucleotide
guuacgcuauaguuaacug

SEQ ID NO: 666751 - RNA, 19 nt, Artificial Sequence
  Description of Artificial Sequence: Synthetic oligonucleotide
acagaguuagcagaacaag

SEQ ID NO: 666752 - RNA, 19 nt, Artificial Sequence
  Description of Artificial Sequence: Synthetic oligonucleotide
uacauauauggaucugacu

SEQ ID NO: 666753 - RNA, 19 nt, Artificial Sequence
  Description of Artificial Sequence: Synthetic oligonucleotide
aggccuuuggaggagaguc

SEQ ID NO: 666754 - RNA, 19 nt, Artificial Sequence
  Description of Artificial Sequence: Synthetic oligonucleotide
aggauuaacgcuccaguaa

SEQ ID NO: 666755 - RNA, 19 nt, Artificial Sequence
  Description of Artificial Sequence: Synthetic oligonucleotide
aguuagcagaacaagaaaa

SEQ ID NO: 666756 - RNA, 19 nt, Artificial Sequence
  Description of Artificial Sequence: Synthetic oligonucleotide
aaagguucuuggcccaagu

SEQ ID NO: 666757 - RNA, 19 nt, Artificial Sequence
  Description of Artificial Sequence: Synthetic oligonucleotide
accgauuaaccuugagauc

SEQ ID NO: 666758 - RNA, 19 nt, Artificial Sequence
  Description of Artificial Sequence: Synthetic oligonucleotide
ugccaugugaaaccgguau

SEQ ID NO: 666759 - RNA, 19 nt, Artificial Sequence
  Description of Artificial Sequence: Synthetic oligonucleotide
gucgcgugcuccuugaagc

SEQ ID NO: 666760 - RNA, 19 nt, Artificial Sequence
  Description of Artificial Sequence: Synthetic oligonucleotide
gaucugacuaucccaugug

SEQ ID NO: 666761 - RNA, 19 nt, Artificial Sequence
  Description of Artificial Sequence: Synthetic oligonucleotide
ucuucaauucacucagaau

SEQ ID NO: 666762 - RNA, 19 nt, Artificial Sequence
  Description of Artificial Sequence: Synthetic oligonucleotide
gacacuauuaagaaauacu

SEQ ID NO: 666763 - RNA, 19 nt, Artificial Sequence
  Description of Artificial Sequence: Synthetic oligonucleotide
uuagaugaaucaucaucuc

SEQ ID NO: 666764 - RNA, 19 nt, Artificial Sequence
  Description of Artificial Sequence: Synthetic oligonucleotide
acauaaaucgggaaucaga

SEQ ID NO: 666765 - RNA, 19 nt, Artificial Sequence
  Description of Artificial Sequence: Synthetic oligonucleotide
ugaguugaagaaugaugac

SEQ ID NO: 666766 - RNA, 19 nt, Artificial Sequence
  Description of Artificial Sequence: Synthetic oligonucleotide
agacagaucggucuccgga

SEQ ID NO: 666767 - RNA, 19 nt, Artificial Sequence
  Description of Artificial Sequence: Synthetic oligonucleotide
acuauagacaaaggguucu

SEQ ID NO: 666768 - RNA, 19 nt, Artificial Sequence
  Description of Artificial Sequence: Synthetic oligonucleotide
ugguauccucucuuggugc

SEQ ID NO: 666769 - RNA, 19 nt, Artificial Sequence
  Description of Artificial Sequence: Synthetic oligonucleotide
cauacaucacucccacuag

SEQ ID NO: 666770 - RNA, 19 nt, Artificial Sequence
  Description of Artificial Sequence: Synthetic oligonucleotide
ugucgcgugcuccuugaag

SEQ ID NO: 666771 - RNA, 19 nt, Artificial Sequence
  Description of Artificial Sequence: Synthetic oligonucleotide
ucggucuccggauuuguca

SEQ ID NO: 666772 - RNA, 19 nt, Artificial Sequence
  Description of Artificial Sequence: Synthetic oligonucleotide
ucacggucaaaugguaucc

SEQ ID NO: 666773 - RNA, 19 nt, Artificial Sequence
  Description of Artificial Sequence: Synthetic oligonucleotide
uuuaguucuugggacuucu

SEQ ID NO: 666774 - RNA, 19 nt, Artificial Sequence
  Description of Artificial Sequence: Synthetic oligonucleotide
aggucuguccaauucuaug

SEQ ID NO: 666775 - RNA, 19 nt, Artificial Sequence
  Description of Artificial Sequence: Synthetic oligonucleotide
cuucuugauucguuguaug

SEQ ID NO: 666776 - RNA, 19 nt, Artificial Sequence
  Description of Artificial Sequence: Synthetic oligonucleotide
aaguucacauaaaucggga

SEQ ID NO: 666777 - RNA, 19 nt, Artificial Sequence
  Description of Artificial Sequence: Synthetic oligonucleotide
gaugagugaguuaauuuaa

SEQ ID NO: 666778 - RNA, 19 nt, Artificial Sequence
  Description of Artificial Sequence: Synthetic oligonucleotide
cugacacauacaucacucc

SEQ ID NO: 666779 - RNA, 19 nt, Artificial Sequence
  Description of Artificial Sequence: Synthetic oligonucleotide
acggucaaaugguauccuc

SEQ ID NO: 666780 - RNA, 19 nt, Artificial Sequence
  Description of Artificial Sequence: Synthetic oligonucleotide
acaauacguuuucuucauc

SEQ ID NO: 666781 - RNA, 19 nt, Artificial Sequence
  Description of Artificial Sequence: Synthetic oligonucleotide
gaguccuagacuugugcac

SEQ ID NO: 666782 - RNA, 19 nt, Artificial Sequence
  Description of Artificial Sequence: Synthetic oligonucleotide
cuaucuugauuuucgccuc

SEQ ID NO: 666783 - RNA, 19 nt, Artificial Sequence
  Description of Artificial Sequence: Synthetic oligonucleotide
uacuuacacuaguacaaaa

SEQ ID NO: 666784 - RNA, 19 nt, Artificial Sequence
  Description of Artificial Sequence: Synthetic oligonucleotide
ugagccucaucaaaccgau

SEQ ID NO: 666785 - RNA, 19 nt, Artificial Sequence
  Description of Artificial Sequence: Synthetic oligonucleotide
aaacucuguuguuacgcua

SEQ ID NO: 666786 - RNA, 19 nt, Artificial Sequence
  Description of Artificial Sequence: Synthetic oligonucleotide
ugaaaccgguauuuaguuc

SEQ ID NO: 666787 - RNA, 19 nt, Artificial Sequence
  Description of Artificial Sequence: Synthetic oligonucleotide
ugauucguuguaugaggac

SEQ ID NO: 666788 - RNA, 19 nt, Artificial Sequence
  Description of Artificial Sequence: Synthetic oligonucleotide
agaucuuuaucacggucaa

SEQ ID NO: 666789 - RNA, 19 nt, Artificial Sequence
  Description of Artificial Sequence: Synthetic oligonucleotide
aguucacauaaaucgggaa

SEQ ID NO: 666790 - RNA, 19 nt, Artificial Sequence
  Description of Artificial Sequence: Synthetic oligonucleotide
uaucacggucaaaugguau

SEQ ID NO: 666791 - RNA, 19 nt, Artificial Sequence
  Description of Artificial Sequence: Synthetic oligonucleotide
aaaggguaggucuguccaa

SEQ ID NO: 666792 - RNA, 19 nt, Artificial Sequence
  Description of Artificial Sequence: Synthetic oligonucleotide
uuaucacggucaaauggua

SEQ ID NO: 666793 - RNA, 19 nt, Artificial Sequence
  Description of Artificial Sequence: Synthetic oligonucleotide
uaaauccaggaggagggcu

SEQ ID NO: 666794 - RNA, 19 nt, Artificial Sequence
  Description of Artificial Sequence: Synthetic oligonucleotide
aacucuguuguuacgcuau

SEQ ID NO: 666795 - RNA, 19 nt, Artificial Sequence
  Description of Artificial Sequence: Synthetic oligonucleotide
ucguccugcuucuuaaauc

SEQ ID NO: 666796 - RNA, 19 nt, Artificial Sequence
  Description of Artificial Sequence: Synthetic oligonucleotide
acaagccucuucaauucac

SEQ ID NO: 666797 - RNA, 19 nt, Artificial Sequence
  Description of Artificial Sequence: Synthetic oligonucleotide
ugugaagcuccaagaugca

SEQ ID NO: 666798 - RNA, 19 nt, Artificial Sequence
  Description of Artificial Sequence: Synthetic oligonucleotide
ucaguugucgcgugcuccu

SEQ ID NO: 666799 - RNA, 19 nt, Artificial Sequence
  Description of Artificial Sequence: Synthetic oligonucleotide
auaaaucgggaaucagaau

SEQ ID NO: 666800 - RNA, 19 nt, Artificial Sequence
  Description of Artificial Sequence: Synthetic oligonucleotide
ucccuagccauucgcugag

SEQ ID NO: 666801 - RNA, 19 nt, Artificial Sequence
  Description of Artificial Sequence: Synthetic oligonucleotide
guacagacuucccauuuuc

SEQ ID NO: 666802 - RNA, 19 nt, Artificial Sequence
  Description of Artificial Sequence: Synthetic oligonucleotide
cauucgcugagacgcacag

SEQ ID NO: 666803 - RNA, 19 nt, Artificial Sequence
  Description of Artificial Sequence: Synthetic oligonucleotide
cuuugccaugugaaaccgg

SEQ ID NO: 666804 - RNA, 19 nt, Artificial Sequence
  Description of Artificial Sequence: Synthetic oligonucleotide
ucuuacugagugacuuccu

SEQ ID NO: 666805 - RNA, 19 nt, Artificial Sequence
  Description of Artificial Sequence: Synthetic oligonucleotide
ggaugagugaguuaauuua

SEQ ID NO: 666806 - RNA, 19 nt, Artificial Sequence
  Description of Artificial Sequence: Synthetic oligonucleotide
caauacguuuucuucaucu

SEQ ID NO: 666807 - RNA, 19 nt, Artificial Sequence
  Description of Artificial Sequence: Synthetic oligonucleotide
ggcauuuagguuuuaucuc

SEQ ID NO: 666808 - RNA, 19 nt, Artificial Sequence
  Description of Artificial Sequence: Synthetic oligonucleotide
ucgcugagacgcacagucg

SEQ ID NO: 666809 - RNA, 19 nt, Artificial Sequence
  Description of Artificial Sequence: Synthetic oligonucleotide
ggaguacagaguuagcaga

SEQ ID NO: 666810 - RNA, 19 nt, Artificial Sequence
  Description of Artificial Sequence: Synthetic oligonucleotide
uauuuaguucuugggacuu

SEQ ID NO: 666811 - RNA, 19 nt, Artificial Sequence
  Description of Artificial Sequence: Synthetic oligonucleotide
ugaagcacacucacuuaua

SEQ ID NO: 666812 - RNA, 19 nt, Artificial Sequence
  Description of Artificial Sequence: Synthetic oligonucleotide
cuugugcacauaauuacua

SEQ ID NO: 666813 - RNA, 19 nt, Artificial Sequence
  Description of Artificial Sequence: Synthetic oligonucleotide
gggacuucuuuauuagggc

SEQ ID NO: 666814 - RNA, 19 nt, Artificial Sequence
  Description of Artificial Sequence: Synthetic oligonucleotide
acuugugcacauaauuacu

SEQ ID NO: 666815 - RNA, 19 nt, Artificial Sequence
  Description of Artificial Sequence: Synthetic oligonucleotide
agagcaggcccugcaaccg

SEQ ID NO: 666816 - RNA, 19 nt, Artificial Sequence
  Description of Artificial Sequence: Synthetic oligonucleotide
acuaucccaugugaagcuc

SEQ ID NO: 666817 - RNA, 19 nt, Artificial Sequence
  Description of Artificial Sequence: Synthetic oligonucleotide
aguccuagacuugugcaca

SEQ ID NO: 666818 - RNA, 19 nt, Artificial Sequence
  Description of Artificial Sequence: Synthetic oligonucleotide
cuggaguacagaguuagca

SEQ ID NO: 666819 - RNA, 19 nt, Artificial Sequence
  Description of Artificial Sequence: Synthetic oligonucleotide
uuaucuucggcagccuuau

SEQ ID NO: 666820 - RNA, 19 nt, Artificial Sequence
  Description of Artificial Sequence: Synthetic oligonucleotide
acucagaauaacccagguu

SEQ ID NO: 666821 - RNA, 19 nt, Artificial Sequence
  Description of Artificial Sequence: Synthetic oligonucleotide
accgaucauaggccuuugg

SEQ ID NO: 666822 - RNA, 19 nt, Artificial Sequence
  Description of Artificial Sequence: Synthetic oligonucleotide
agaaacuaucacucacuuu

SEQ ID NO: 666823 - RNA, 19 nt, Artificial Sequence
  Description of Artificial Sequence: Synthetic oligonucleotide
ggauuaacgcuccaguaaa

SEQ ID NO: 666824 - RNA, 19 nt, Artificial Sequence
  Description of Artificial Sequence: Synthetic oligonucleotide
auacucuuguauaaaguuu

SEQ ID NO: 666825 - RNA, 19 nt, Artificial Sequence
  Description of Artificial Sequence: Synthetic oligonucleotide
ugggcgagaccaugaagac

SEQ ID NO: 666826 - RNA, 19 nt, Artificial Sequence
  Description of Artificial Sequence: Synthetic oligonucleotide
ugaguacagacuucccauu

SEQ ID NO: 666827 - RNA, 19 nt, Artificial Sequence
  Description of Artificial Sequence: Synthetic oligonucleotide
aguguaccucccugaagca

SEQ ID NO: 666828 - RNA, 19 nt, Artificial Sequence
  Description of Artificial Sequence: Synthetic oligonucleotide
caaagcacugacacauaca

SEQ ID NO: 666829 - RNA, 19 nt, Artificial Sequence
  Description of Artificial Sequence: Synthetic oligonucleotide
acuggaguacagaguuagc

SEQ ID NO: 666830 - RNA, 19 nt, Artificial Sequence
  Description of Artificial Sequence: Synthetic oligonucleotide
caaaccgauuaaccuugag

SEQ ID NO: 666831 - RNA, 19 nt, Artificial Sequence
  Description of Artificial Sequence: Synthetic oligonucleotide
acaggaguccuagacuugu

SEQ ID NO: 666832 - RNA, 19 nt, Artificial Sequence
  Description of Artificial Sequence: Synthetic oligonucleotide
gacaauacguuuucuucau

SEQ ID NO: 666833 - RNA, 19 nt, Artificial Sequence
  Description of Artificial Sequence: Synthetic oligonucleotide
agccaaagcuaauacucuu

SEQ ID NO: 666834 - RNA, 19 nt, Artificial Sequence
  Description of Artificial Sequence: Synthetic oligonucleotide
agcggccaagccaaccugc

SEQ ID NO: 666835 - RNA, 19 nt, Artificial Sequence
  Description of Artificial Sequence: Synthetic oligonucleotide
uuugggagcuuguguuuaa

SEQ ID NO: 666836 - RNA, 19 nt, Artificial Sequence
  Description of Artificial Sequence: Synthetic oligonucleotide
ucgcgugcuccuugaagcc

SEQ ID NO: 666837 - RNA, 19 nt, Artificial Sequence
  Description of Artificial Sequence: Synthetic oligonucleotide
ggucaaaugguauccucuc

SEQ ID NO: 666838 - RNA, 19 nt, Artificial Sequence
  Description of Artificial Sequence: Synthetic oligonucleotide
uuucccggucagcuggggu

SEQ ID NO: 666839 - RNA, 19 nt, Artificial Sequence
  Description of Artificial Sequence: Synthetic oligonucleotide
aaccgguauuuaguucuug

SEQ ID NO: 666840 - RNA, 19 nt, Artificial Sequence
  Description of Artificial Sequence: Synthetic oligonucleotide
gacuaucccaugugaagcu

SEQ ID NO: 666841 - RNA, 19 nt, Artificial Sequence
  Description of Artificial Sequence: Synthetic oligonucleotide
ggaguccuagacuugugca

SEQ ID NO: 666842 - RNA, 19 nt, Artificial Sequence
  Description of Artificial Sequence: Synthetic oligonucleotide
cauauauggaucugacuau

SEQ ID NO: 666843 - RNA, 19 nt, Artificial Sequence
  Description of Artificial Sequence: Synthetic oligonucleotide
cagaauaacccagguuuuc

SEQ ID NO: 666844 - RNA, 19 nt, Artificial Sequence
  Description of Artificial Sequence: Synthetic oligonucleotide
aaucgggaaucagaauguu

SEQ ID NO: 666845 - RNA, 19 nt, Artificial Sequence
  Description of Artificial Sequence: Synthetic oligonucleotide
aguccuugaauaagcuacu

SEQ ID NO: 666846 - RNA, 19 nt, Artificial Sequence
  Description of Artificial Sequence: Synthetic oligonucleotide
caggucccuagccauucgc

SEQ ID NO: 666847 - RNA, 19 nt, Artificial Sequence
  Description of Artificial Sequence: Synthetic oligonucleotide
uggcaaugcaggaccgauc

SEQ ID NO: 666848 - RNA, 19 nt, Artificial Sequence
  Description of Artificial Sequence: Synthetic oligonucleotide
agcacgaguguaccucccu

SEQ ID NO: 666849 - RNA, 19 nt, Artificial Sequence
  Description of Artificial Sequence: Synthetic oligonucleotide
gcuauaguuaacugguccu

SEQ ID NO: 666850 - RNA, 19 nt, Artificial Sequence
  Description of Artificial Sequence: Synthetic oligonucleotide
cagacagaucggucuccgg

SEQ ID NO: 666851 - RNA, 19 nt, Artificial Sequence
  Description of Artificial Sequence: Synthetic oligonucleotide
acgaguguaccucccugaa

SEQ ID NO: 666852 - RNA, 19 nt, Artificial Sequence
  Description of Artificial Sequence: Synthetic oligonucleotide
ucuccggauuugucaucag

SEQ ID NO: 666853 - RNA, 19 nt, Artificial Sequence
  Description of Artificial Sequence: Synthetic oligonucleotide
uuguuacgcuauaguuaac

SEQ ID NO: 666854 - RNA, 19 nt, Artificial Sequence
  Description of Artificial Sequence: Synthetic oligonucleotide
aguuugggcgagaccauga

SEQ ID NO: 666855 - RNA, 19 nt, Artificial Sequence
  Description of Artificial Sequence: Synthetic oligonucleotide
cguuguaugaggacacuug

SEQ ID NO: 666856 - RNA, 19 nt, Artificial Sequence
  Description of Artificial Sequence: Synthetic oligonucleotide
ugccuagccaaagcuaaua

SEQ ID NO: 666857 - RNA, 19 nt, Artificial Sequence
  Description of Artificial Sequence: Synthetic oligonucleotide
agugccgguccaaucaggu

SEQ ID NO: 666858 - RNA, 19 nt, Artificial Sequence
  Description of Artificial Sequence: Synthetic oligonucleotide
ucguuguaugaggacacuu

SEQ ID NO: 666859 - RNA, 19 nt, Artificial Sequence
  Description of Artificial Sequence: Synthetic oligonucleotide
cagugccgguccaaucagg

SEQ ID NO: 666860 - RNA, 19 nt, Artificial Sequence
  Description of Artificial Sequence: Synthetic oligonucleotide
uucguuguaugaggacacu

SEQ ID NO: 666861 - RNA, 19 nt, Artificial Sequence
  Description of Artificial Sequence: Synthetic oligonucleotide
caggauuaacgcuccagua

SEQ ID NO: 666862 - RNA, 19 nt, Artificial Sequence
  Description of Artificial Sequence: Synthetic oligonucleotide
caagccaaccugcgcucgc

SEQ ID NO: 666863 - RNA, 19 nt, Artificial Sequence
  Description of Artificial Sequence: Synthetic oligonucleotide
agggaugagugaguuaauu

SEQ ID NO: 666864 - RNA, 19 nt, Artificial Sequence
  Description of Artificial Sequence: Synthetic oligonucleotide
cacgaguguaccucccuga

SEQ ID NO: 666865 - RNA, 19 nt, Artificial Sequence
  Description of Artificial Sequence: Synthetic oligonucleotide
cucuuaucccuuccugaca

SEQ ID NO: 666866 - RNA, 19 nt, Artificial Sequence
  Description of Artificial Sequence: Synthetic oligonucleotide
gcagacaacaagccucuuc

SEQ ID NO: 666867 - RNA, 19 nt, Artificial Sequence
  Description of Artificial Sequence: Synthetic oligonucleotide
gugaaaccgguauuuaguu

SEQ ID NO: 666868 - RNA, 19 nt, Artificial Sequence
  Description of Artificial Sequence: Synthetic oligonucleotide
aaccugcgcucgcagguua

SEQ ID NO: 666869 - RNA, 19 nt, Artificial Sequence
  Description of Artificial Sequence: Synthetic oligonucleotide
agaucggucuccggauuug

SEQ ID NO: 666870 - RNA, 19 nt, Artificial Sequence
  Description of Artificial Sequence: Synthetic oligonucleotide
guugucgcgugcuccuuga

SEQ ID NO: 666871 - RNA, 19 nt, Artificial Sequence
  Description of Artificial Sequence: Synthetic oligonucleotide
gucuccggauuugucauca

SEQ ID NO: 666872 - RNA, 19 nt, Artificial Sequence
  Description of Artificial Sequence: Synthetic oligonucleotide
gccuagccaaagcuaauac

SEQ ID NO: 666873 - RNA, 19 nt, Artificial Sequence
  Description of Artificial Sequence: Synthetic oligonucleotide
cuaugcagacaacaagccu

SEQ ID NO: 666874 - RNA, 19 nt, Artificial Sequence
  Description of Artificial Sequence: Synthetic oligonucleotide
cccauuaaaacucuaugcu

SEQ ID NO: 666875 - RNA, 19 nt, Artificial Sequence
  Description of Artificial Sequence: Synthetic oligonucleotide
cucccgauuugggagcuug

SEQ ID NO: 666876 - RNA, 19 nt, Artificial Sequence
  Description of Artificial Sequence: Synthetic oligonucleotide
gacagaucggucuccggau

SEQ ID NO: 666877 - RNA, 19 nt, Artificial Sequence
  Description of Artificial Sequence: Synthetic oligonucleotide
acgcuauaguuaacugguc

SEQ ID NO: 666878 - RNA, 19 nt, Artificial Sequence
  Description of Artificial Sequence: Synthetic oligonucleotide
aagccaaccugcgcucgca

SEQ ID NO: 666879 - RNA, 19 nt, Artificial Sequence
  Description of Artificial Sequence: Synthetic oligonucleotide
gguuuucucauagcuaaaa

SEQ ID NO: 666880 - RNA, 19 nt, Artificial Sequence
  Description of Artificial Sequence: Synthetic oligonucleotide
uccugacaauacguuuucu

SEQ ID NO: 666881 - RNA, 19 nt, Artificial Sequence
  Description of Artificial Sequence: Synthetic oligonucleotide
ucccgauuugggagcuugu

SEQ ID NO: 666882 - RNA, 19 nt, Artificial Sequence
  Description of Artificial Sequence: Synthetic oligonucleotide
ccaugagggauucugaucu

SEQ ID NO: 666883 - RNA, 19 nt, Artificial Sequence
  Description of Artificial Sequence: Synthetic oligonucleotide
ggacuucuuuauuagggcu

SEQ ID NO: 666884 - RNA, 19 nt, Artificial Sequence
  Description of Artificial Sequence: Synthetic oligonucleotide
ugcaggcauugguccaaca

SEQ ID NO: 666885 - RNA, 19 nt, Artificial Sequence
  Description of Artificial Sequence: Synthetic oligonucleotide
gucaaaugguauccucucu

SEQ ID NO: 666886 - RNA, 19 nt, Artificial Sequence
  Description of Artificial Sequence: Synthetic oligonucleotide
caaacucuguuguuacgcu

SEQ ID NO: 666887 - RNA, 19 nt, Artificial Sequence
  Description of Artificial Sequence: Synthetic oligonucleotide
gcaggaccgaucauaggcc

SEQ ID NO: 666888 - RNA, 19 nt, Artificial Sequence
  Description of Artificial Sequence: Synthetic oligonucleotide
ggaucugacuaucccaugu

SEQ ID NO: 666889 - RNA, 19 nt, Artificial Sequence
  Description of Artificial Sequence: Synthetic oligonucleotide
guuugggcgagaccaugaa

SEQ ID NO: 666890 - RNA, 19 nt, Artificial Sequence
  Description of Artificial Sequence: Synthetic oligonucleotide
gcuaauacucuuguauaaa

SEQ ID NO: 666891 - RNA, 19 nt, Artificial Sequence
  Description of Artificial Sequence: Synthetic oligonucleotide
aucggucuccggauuuguc

SEQ ID NO: 666892 - RNA, 19 nt, Artificial Sequence
  Description of Artificial Sequence: Synthetic oligonucleotide
caggaguccuagacuugug

SEQ ID NO: 666893 - RNA, 19 nt, Artificial Sequence
  Description of Artificial Sequence: Synthetic oligonucleotide
ccgauuaaccuugagaucu

SEQ ID NO: 666894 - RNA, 19 nt, Artificial Sequence
  Description of Artificial Sequence: Synthetic oligonucleotide
cagcacgaguguaccuccc

SEQ ID NO: 666895 - RNA, 19 nt, Artificial Sequence
  Description of Artificial Sequence: Synthetic oligonucleotide
aaccugcaagaaaugcaua

SEQ ID NO: 666896 - RNA, 19 nt, Artificial Sequence
  Description of Artificial Sequence: Synthetic oligonucleotide
aaaccgguauuuaguucuu

SEQ ID NO: 666897 - RNA, 19 nt, Artificial Sequence
  Description of Artificial Sequence: Synthetic oligonucleotide
gcagugccgguccaaucag

SEQ ID NO: 666898 - RNA, 19 nt, Artificial Sequence
  Description of Artificial Sequence: Synthetic oligonucleotide
caguuugggcgagaccaug

SEQ ID NO: 666899 - RNA, 19 nt, Artificial Sequence
  Description of Artificial Sequence: Synthetic oligonucleotide
gcaggcauugguccaacaa

SEQ ID NO: 666900 - RNA, 19 nt, Artificial Sequence
  Description of Artificial Sequence: Synthetic oligonucleotide
aggucccuagccauucgcu

SEQ ID NO: 666901 - RNA, 19 nt, Artificial Sequence
  Description of Artificial Sequence: Synthetic oligonucleotide
acucuuguauaaaguuuua

SEQ ID NO: 666902 - RNA, 19 nt, Artificial Sequence
  Description of Artificial Sequence: Synthetic oligonucleotide
gcacgaguguaccucccug

SEQ ID NO: 666903 - RNA, 19 nt, Artificial Sequence
  Description of Artificial Sequence: Synthetic oligonucleotide
ccggauuugucaucagcuc

SEQ ID NO: 666904 - RNA, 19 nt, Artificial Sequence
  Description of Artificial Sequence: Synthetic oligonucleotide
cgguauuuaguucuuggga

SEQ ID NO: 666905 - RNA, 19 nt, Artificial Sequence
  Description of Artificial Sequence: Synthetic oligonucleotide
ccaauucuaugcagacaac

SEQ ID NO: 666906 - RNA, 19 nt, Artificial Sequence
  Description of Artificial Sequence: Synthetic oligonucleotide
ccgaucauaggccuuugga

SEQ ID NO: 666907 - RNA, 19 nt, Artificial Sequence
  Description of Artificial Sequence: Synthetic oligonucleotide
cagaaacuaucacucacuu

SEQ ID NO: 666908 - RNA, 19 nt, Artificial Sequence
  Description of Artificial Sequence: Synthetic oligonucleotide
caugugaaaccgguauuua

SEQ ID NO: 666909 - RNA, 19 nt, Artificial Sequence
  Description of Artificial Sequence: Synthetic oligonucleotide
uugucgcgugcuccuugaa

SEQ ID NO: 666910 - RNA, 19 nt, Artificial Sequence
  Description of Artificial Sequence: Synthetic oligonucleotide
auucgcugagacgcacagu

SEQ ID NO: 666911 - RNA, 19 nt, Artificial Sequence
  Description of Artificial Sequence: Synthetic oligonucleotide
gggaugagugaguuaauuu

SEQ ID NO: 666912 - RNA, 19 nt, Artificial Sequence
  Description of Artificial Sequence: Synthetic oligonucleotide
gaccgaucauaggccuuug

SEQ ID NO: 666913 - RNA, 19 nt, Artificial Sequence
  Description of Artificial Sequence: Synthetic oligonucleotide
ccagacagaucggucuccg

SEQ ID NO: 666914 - RNA, 19 nt, Artificial Sequence
  Description of Artificial Sequence: Synthetic oligonucleotide
cugcaaccgggcucagguc

SEQ ID NO: 666915 - RNA, 19 nt, Artificial Sequence
  Description of Artificial Sequence: Synthetic oligonucleotide
gugacacuauuaagaaaua

SEQ ID NO: 666916 - RNA, 19 nt, Artificial Sequence
  Description of Artificial Sequence: Synthetic oligonucleotide
gucguccugcuucuuaaau

SEQ ID NO: 666917 - RNA, 19 nt, Artificial Sequence
  Description of Artificial Sequence: Synthetic oligonucleotide
cagcuacaaaguguuaugu

SEQ ID NO: 666918 - RNA, 19 nt, Artificial Sequence
  Description of Artificial Sequence: Synthetic oligonucleotide
gcagaaacuaucacucacu

SEQ ID NO: 666919 - RNA, 19 nt, Artificial Sequence
  Description of Artificial Sequence: Synthetic oligonucleotide
cucuuguauaaaguuuuau

SEQ ID NO: 666920 - RNA, 19 nt, Artificial Sequence
  Description of Artificial Sequence: Synthetic oligonucleotide
caucagcucuucucuuaaa

SEQ ID NO: 666921 - RNA, 19 nt, Artificial Sequence
  Description of Artificial Sequence: Synthetic oligonucleotide
gcaaccgggcucaggucgg

SEQ ID NO: 666922 - RNA, 19 nt, Artificial Sequence
  Description of Artificial Sequence: Synthetic oligonucleotide
caggaccgaucauaggccu

SEQ ID NO: 666923 - RNA, 19 nt, Artificial Sequence
  Description of Artificial Sequence: Synthetic oligonucleotide
ccaaagcuaauacucuugu

SEQ ID NO: 666924 - RNA, 19 nt, Artificial Sequence
  Description of Artificial Sequence: Synthetic oligonucleotide
gcggccaagccaaccugcg

SEQ ID NO: 666925 - RNA, 19 nt, Artificial Sequence
  Description of Artificial Sequence: Synthetic oligonucleotide
gaucggucuccggauuugu

SEQ ID NO: 666926 - RNA, 19 nt, Artificial Sequence
  Description of Artificial Sequence: Synthetic oligonucleotide
gccaagccaaccugcgcuc

SEQ ID NO: 666927 - RNA, 19 nt, Artificial Sequence
  Description of Artificial Sequence: Synthetic oligonucleotide
cucugaguugaagaaugau

SEQ ID NO: 666928 - RNA, 19 nt, Artificial Sequence
  Description of Artificial Sequence: Synthetic oligonucleotide
ccaagccaaccugcgcucg

SEQ ID NO: 666929 - RNA, 19 nt, Artificial Sequence
  Description of Artificial Sequence: Synthetic oligonucleotide
cuccaagaugcagacaguu

SEQ ID NO: 666930 - RNA, 19 nt, Artificial Sequence
  Description of Artificial Sequence: Synthetic oligonucleotide
gcgugcuccuugaagccug

SEQ ID NO: 666931 - RNA, 19 nt, Artificial Sequence
  Description of Artificial Sequence: Synthetic oligonucleotide
gccgguccaaucagguccc

SEQ ID NO: 666932 - RNA, 19 nt, Artificial Sequence
  Description of Artificial Sequence: Synthetic oligonucleotide
cccgauuugggagcuugug

SEQ ID NO: 666933 - RNA, 19 nt, Artificial Sequence
  Description of Artificial Sequence: Synthetic oligonucleotide
agccauucgcugagacgca

SEQ ID NO: 666934 - RNA, 19 nt, Artificial Sequence
  Description of Artificial Sequence: Synthetic oligonucleotide
ucccacuaguggggucaug

SEQ ID NO: 666935 - RNA, 19 nt, Artificial Sequence
  Description of Artificial Sequence: Synthetic oligonucleotide
ccuuuggaggagagucguc

SEQ ID NO: 666936 - RNA, 19 nt, Artificial Sequence
  Description of Artificial Sequence: Synthetic oligonucleotide
acgcuccaguaaaccagcu

SEQ ID NO: 666937 - RNA, 19 nt, Artificial Sequence
  Description of Artificial Sequence: Synthetic oligonucleotide
gggcgagaccaugaagaca

SEQ ID NO: 666938 - RNA, 19 nt, Artificial Sequence
  Description of Artificial Sequence: Synthetic oligonucleotide
aggaccgaucauaggccuu

SEQ ID NO: 666939 - RNA, 19 nt, Artificial Sequence
  Description of Artificial Sequence: Synthetic oligonucleotide
ccaugugaagcuccaagau

SEQ ID NO: 666940 - RNA, 19 nt, Artificial Sequence
  Description of Artificial Sequence: Synthetic oligonucleotide
gguggcaaugcaggaccga

SEQ ID NO: 666941 - RNA, 19 nt, Artificial Sequence
  Description of Artificial Sequence: Synthetic oligonucleotide
gccauucgcugagacgcac

SEQ ID NO: 666942 - RNA, 19 nt, Artificial Sequence
  Description of Artificial Sequence: Synthetic oligonucleotide
ccauucgcugagacgcaca

SEQ ID NO: 666943 - RNA, 19 nt, Artificial Sequence
  Description of Artificial Sequence: Synthetic oligonucleotide
gcgagaccaugaagacagg

SEQ ID NO: 666944 - RNA, 19 nt, Artificial Sequence
  Description of Artificial Sequence: Synthetic oligonucleotide
cacggucaaaugguauccu

SEQ ID NO: 666945 - RNA, 19 nt, Artificial Sequence
  Description of Artificial Sequence: Synthetic oligonucleotide
caugagggauucugaucuu

SEQ ID NO: 666946 - RNA, 19 nt, Artificial Sequence
  Description of Artificial Sequence: Synthetic oligonucleotide
cggucaaaugguauccucu

SEQ ID NO: 666947 - RNA, 19 nt, Artificial Sequence
  Description of Artificial Sequence: Synthetic oligonucleotide
ucucccgauuugggagcuu

SEQ ID NO: 666948 - RNA, 19 nt, Artificial Sequence
  Description of Artificial Sequence: Synthetic oligonucleotide
ccaugauucucuugugauu

SEQ ID NO: 666949 - RNA, 19 nt, Artificial Sequence
  Description of Artificial Sequence: Synthetic oligonucleotide
cagggaugagugaguuaau

SEQ ID NO: 666950 - RNA, 19 nt, Artificial Sequence
  Description of Artificial Sequence: Synthetic oligonucleotide
ggaccgaucauaggccuuu

SEQ ID NO: 666951 - RNA, 19 nt, Artificial Sequence
  Description of Artificial Sequence: Synthetic oligonucleotide
ccaugaagacaggaguccu

SEQ ID NO: 666952 - RNA, 19 nt, Artificial Sequence
  Description of Artificial Sequence: Synthetic oligonucleotide
cccugcaaccgggcucagg

SEQ ID NO: 666953 - RNA, 19 nt, Artificial Sequence
  Description of Artificial Sequence: Synthetic oligonucleotide
cgcuccaguaaaccagcua

SEQ ID NO: 666954 - RNA, 19 nt, Artificial Sequence
  Description of Artificial Sequence: Synthetic oligonucleotide
cgauuaaccuugagaucuu

SEQ ID NO: 666955 - RNA, 19 nt, Artificial Sequence
  Description of Artificial Sequence: Synthetic oligonucleotide
caguugucgcgugcuccuu

SEQ ID NO: 666956 - RNA, 19 nt, Artificial Sequence
  Description of Artificial Sequence: Synthetic oligonucleotide
gcccaaguccaaagucuuu

SEQ ID NO: 666957 - RNA, 19 nt, Artificial Sequence
  Description of Artificial Sequence: Synthetic oligonucleotide
cgguccaaucaggucccua

SEQ ID NO: 666958 - RNA, 19 nt, Artificial Sequence
  Description of Artificial Sequence: Synthetic oligonucleotide
ccgguccaaucaggucccu

SEQ ID NO: 666959 - RNA, 19 nt, Artificial Sequence
  Description of Artificial Sequence: Synthetic oligonucleotide
aauaaugugaugcucacug

SEQ ID NO: 666960 - RNA, 19 nt, Artificial Sequence
  Description of Artificial Sequence: Synthetic oligonucleotide
uuuuauugcacuaucaugu

SEQ ID NO: 666961 - RNA, 19 nt, Artificial Sequence
  Description of Artificial Sequence: Synthetic oligonucleotide
auaacuagugcagagaccc

SEQ ID NO: 666962 - RNA, 19 nt, Artificial Sequence
  Description of Artificial Sequence: Synthetic oligonucleotide
uacuacuuaagucaacugg

SEQ ID NO: 666963 - RNA, 19 nt, Artificial Sequence
  Description of Artificial Sequence: Synthetic oligonucleotide
uguaugaacccaauuaaag

SEQ ID NO: 666964 - RNA, 19 nt, Artificial Sequence
  Description of Artificial Sequence: Synthetic oligonucleotide
uguuguacaagccacaccu

SEQ ID NO: 666965 - RNA, 19 nt, Artificial Sequence
  Description of Artificial Sequence: Synthetic oligonucleotide
caugauucugcacagaugc

SEQ ID NO: 666966 - RNA, 19 nt, Artificial Sequence
  Description of Artificial Sequence: Synthetic oligonucleotide
aaauguaugaacccaauua

SEQ ID NO: 666967 - RNA, 19 nt, Artificial Sequence
  Description of Artificial Sequence: Synthetic oligonucleotide
ugcacauucagcauuacca

SEQ ID NO: 666968 - RNA, 19 nt, Artificial Sequence
  Description of Artificial Sequence: Synthetic oligonucleotide
uucuuucuaacccaacugg

SEQ ID NO: 666969 - RNA, 19 nt, Artificial Sequence
  Description of Artificial Sequence: Synthetic oligonucleotide
uguuuagggaaccaauagg

SEQ ID NO: 666970 - RNA, 19 nt, Artificial Sequence
  Description of Artificial Sequence: Synthetic oligonucleotide
agauaacuagugcagagac

SEQ ID NO: 666971 - RNA, 19 nt, Artificial Sequence
  Description of Artificial Sequence: Synthetic oligonucleotide
aaauaugccaaucucuuau

SEQ ID NO: 666972 - RNA, 19 nt, Artificial Sequence
  Description of Artificial Sequence: Synthetic oligonucleotide
acuaguuuguuucauaaca

SEQ ID NO: 666973 - RNA, 19 nt, Artificial Sequence
  Description of Artificial Sequence: Synthetic oligonucleotide
acaugugagcuucaguucc

SEQ ID NO: 666974 - RNA, 19 nt, Artificial Sequence
  Description of Artificial Sequence: Synthetic oligonucleotide
augacauuaauauuccaag

SEQ ID NO: 666975 - RNA, 19 nt, Artificial Sequence
  Description of Artificial Sequence: Synthetic oligonucleotide
guaugaacccaauuaaagg

SEQ ID NO: 666976 - RNA, 19 nt, Artificial Sequence
  Description of Artificial Sequence: Synthetic oligonucleotide
agugguaucgucccuaggg

SEQ ID NO: 666977 - RNA, 19 nt, Artificial Sequence
  Description of Artificial Sequence: Synthetic oligonucleotide
uguuuucagacaauaacca

SEQ ID NO: 666978 - RNA, 19 nt, Artificial Sequence
  Description of Artificial Sequence: Synthetic oligonucleotide
gacuuuugcaauuauacuc

SEQ ID NO: 666979 - RNA, 19 nt, Artificial Sequence
  Description of Artificial Sequence: Synthetic oligonucleotide
ugauaugugcuucuuaaga

SEQ ID NO: 666980 - RNA, 19 nt, Artificial Sequence
  Description of Artificial Sequence: Synthetic oligonucleotide
uuccguaagcaguagaagg

SEQ ID NO: 666981 - RNA, 19 nt, Artificial Sequence
  Description of Artificial Sequence: Synthetic oligonucleotide
acuuaagauaacuagugca

SEQ ID NO: 666982 - RNA, 19 nt, Artificial Sequence
  Description of Artificial Sequence: Synthetic oligonucleotide
ugaaucuugugucugauau

SEQ ID NO: 666983 - RNA, 19 nt, Artificial Sequence
  Description of Artificial Sequence: Synthetic oligonucleotide
auguguacuacuuaaguca

SEQ ID NO: 666984 - RNA, 19 nt, Artificial Sequence
  Description of Artificial Sequence: Synthetic oligonucleotide
aauggcuguaaauaagcca

SEQ ID NO: 666985 - RNA, 19 nt, Artificial Sequence
  Description of Artificial Sequence: Synthetic oligonucleotide
acuuaguaaccuuuguggg

SEQ ID NO: 666986 - RNA, 19 nt, Artificial Sequence
  Description of Artificial Sequence: Synthetic oligonucleotide
ucuuucuaacccaacuggg

SEQ ID NO: 666987 - RNA, 19 nt, Artificial Sequence
  Description of Artificial Sequence: Synthetic oligonucleotide
uucaaugacauaugaaaga

SEQ ID NO: 666988 - RNA, 19 nt, Artificial Sequence
  Description of Artificial Sequence: Synthetic oligonucleotide
aacuaguuuguuucauaac

SEQ ID NO: 666989 - RNA, 19 nt, Artificial Sequence
  Description of Artificial Sequence: Synthetic oligonucleotide
uuguauucuuuccagaggu

SEQ ID NO: 666990 - RNA, 19 nt, Artificial Sequence
  Description of Artificial Sequence: Synthetic oligonucleotide
ugaaagaucuaaaaucaaa

SEQ ID NO: 666991 - RNA, 19 nt, Artificial Sequence
  Description of Artificial Sequence: Synthetic oligonucleotide
ugcacuaucauguuuuaac

SEQ ID NO: 666992 - RNA, 19 nt, Artificial Sequence
  Description of Artificial Sequence: Synthetic oligonucleotide
ugggauucgacaacuacag

SEQ ID NO: 666993 - RNA, 19 nt, Artificial Sequence
  Description of Artificial Sequence: Synthetic oligonucleotide
aaucuccggacaaagacac

SEQ ID NO: 666994 - RNA, 19 nt, Artificial Sequence
  Description of Artificial Sequence: Synthetic oligonucleotide
uucgguagcaaucuggagu

SEQ ID NO: 666995 - RNA, 19 nt, Artificial Sequence
  Description of Artificial Sequence: Synthetic oligonucleotide
aagauggacacauacgaaa

SEQ ID NO: 666996 - RNA, 19 nt, Artificial Sequence
  Description of Artificial Sequence: Synthetic oligonucleotide
aaauuggcugucucuacag

SEQ ID NO: 666997 - RNA, 19 nt, Artificial Sequence
  Description of Artificial Sequence: Synthetic oligonucleotide
cucuguauaaaguaaguuc

SEQ ID NO: 666998 - RNA, 19 nt, Artificial Sequence
  Description of Artificial Sequence: Synthetic oligonucleotide
uugauuguuaacugcaaga

SEQ ID NO: 666999 - RNA, 19 nt, Artificial Sequence
  Description of Artificial Sequence: Synthetic oligonucleotide
uccaagauggacacauacg

SEQ ID NO: 667000 - RNA, 19 nt, Artificial Sequence
  Description of Artificial Sequence: Synthetic oligonucleotide
aaugacucggucuucugca

SEQ ID NO: 667001 - RNA, 19 nt, Artificial Sequence
  Description of Artificial Sequence: Synthetic oligonucleotide
auggcuguaaauaagccac

SEQ ID NO: 667002 - RNA, 19 nt, Artificial Sequence
  Description of Artificial Sequence: Synthetic oligonucleotide
ucagacaauaaccaguaua

SEQ ID NO: 667003 - RNA, 19 nt, Artificial Sequence
  Description of Artificial Sequence: Synthetic oligonucleotide
acuacuuaagucaacuggg

SEQ ID NO: 667004 - RNA, 19 nt, Artificial Sequence
  Description of Artificial Sequence: Synthetic oligonucleotide
aaucaaauuggcugucucu

SEQ ID NO: 667005 - RNA, 19 nt, Artificial Sequence
  Description of Artificial Sequence: Synthetic oligonucleotide
uucuaaaacugcauucuca

SEQ ID NO: 667006 - RNA, 19 nt, Artificial Sequence
  Description of Artificial Sequence: Synthetic oligonucleotide
aagguauuguguuuaggga

SEQ ID NO: 667007 - RNA, 19 nt, Artificial Sequence
  Description of Artificial Sequence: Synthetic oligonucleotide
ucuaaaacugcauucucaa

SEQ ID NO: 667008 - RNA, 19 nt, Artificial Sequence
  Description of Artificial Sequence: Synthetic oligonucleotide
guauaaaguaaguuccaag

SEQ ID NO: 667009 - RNA, 19 nt, Artificial Sequence
  Description of Artificial Sequence: Synthetic oligonucleotide
cacccaauaaaacccaugg

SEQ ID NO: 667010 - RNA, 19 nt, Artificial Sequence
  Description of Artificial Sequence: Synthetic oligonucleotide
caauaaaacccaugguucc

SEQ ID NO: 667011 - RNA, 19 nt, Artificial Sequence
  Description of Artificial Sequence: Synthetic oligonucleotide
ucugauauaagcagccaaa

SEQ ID NO: 667012 - RNA, 19 nt, Artificial Sequence
  Description of Artificial Sequence: Synthetic oligonucleotide
aaccaguauauauuaauuu

SEQ ID NO: 667013 - RNA, 19 nt, Artificial Sequence
  Description of Artificial Sequence: Synthetic oligonucleotide
uauguguacuacuuaaguc

SEQ ID NO: 667014 - RNA, 19 nt, Artificial Sequence
  Description of Artificial Sequence: Synthetic oligonucleotide
gaugauaugugcuucuuaa

SEQ ID NO: 667015 - RNA, 19 nt, Artificial Sequence
  Description of Artificial Sequence: Synthetic oligonucleotide
uuucuaacccaacuggggu

SEQ ID NO: 667016 - RNA, 19 nt, Artificial Sequence
  Description of Artificial Sequence: Synthetic oligonucleotide
auauguguacuacuuaagu

SEQ ID NO: 667017 - RNA, 19 nt, Artificial Sequence
  Description of Artificial Sequence: Synthetic oligonucleotide
uuaguaaccuuugugggug

SEQ ID NO: 667018 - RNA, 19 nt, Artificial Sequence
  Description of Artificial Sequence: Synthetic oligonucleotide
acaaucagaacuuuguauu

SEQ ID NO: 667019 - RNA, 19 nt, Artificial Sequence
  Description of Artificial Sequence: Synthetic oligonucleotide
ugacauaugaaagaucuaa

SEQ ID NO: 667020 - RNA, 19 nt, Artificial Sequence
  Description of Artificial Sequence: Synthetic oligonucleotide
auaaccaguauauauuaau

SEQ ID NO: 667021 - RNA, 19 nt, Artificial Sequence
  Description of Artificial Sequence: Synthetic oligonucleotide
aacuacaggcuucagacuu

SEQ ID NO: 667022 - RNA, 19 nt, Artificial Sequence
  Description of Artificial Sequence: Synthetic oligonucleotide
uauccaucgucucugacaa

SEQ ID NO: 667023 - RNA, 19 nt, Artificial Sequence
  Description of Artificial Sequence: Synthetic oligonucleotide
uuugugccagcccaaaugu

SEQ ID NO: 667024 - RNA, 19 nt, Artificial Sequence
  Description of Artificial Sequence: Synthetic oligonucleotide
ugacaugugagcuucaguu

SEQ ID NO: 667025 - RNA, 19 nt, Artificial Sequence
  Description of Artificial Sequence: Synthetic oligonucleotide
auuguuaacugcaagacau

SEQ ID NO: 667026 - RNA, 19 nt, Artificial Sequence
  Description of Artificial Sequence: Synthetic oligonucleotide
ucuuagacaucugaacuag

SEQ ID NO: 667027 - RNA, 19 nt, Artificial Sequence
  Description of Artificial Sequence: Synthetic oligonucleotide
ggauucgacaacuacaggc

SEQ ID NO: 667028 - RNA, 19 nt, Artificial Sequence
  Description of Artificial Sequence: Synthetic oligonucleotide
agcacugcaaaaugcuucg

SEQ ID NO: 667029 - RNA, 19 nt, Artificial Sequence
  Description of Artificial Sequence: Synthetic oligonucleotide
uguacuacuuaagucaacu

SEQ ID NO: 667030 - RNA, 19 nt, Artificial Sequence
  Description of Artificial Sequence: Synthetic oligonucleotide
uuacacuuccguaagcagu

SEQ ID NO: 667031 - RNA, 19 nt, Artificial Sequence
  Description of Artificial Sequence: Synthetic oligonucleotide
uuucagacaauaaccagua

SEQ ID NO: 667032 - RNA, 19 nt, Artificial Sequence
  Description of Artificial Sequence: Synthetic oligonucleotide
uugagaguauccaucgucu

SEQ ID NO: 667033 - RNA, 19 nt, Artificial Sequence
  Description of Artificial Sequence: Synthetic oligonucleotide
aacuaauucaugaauggaa

SEQ ID NO: 667034 - RNA, 19 nt, Artificial Sequence
  Description of Artificial Sequence: Synthetic oligonucleotide
acugggauucgacaacuac

SEQ ID NO: 667035 - RNA, 19 nt, Artificial Sequence
  Description of Artificial Sequence: Synthetic oligonucleotide
uuuuacacuuccguaagca

SEQ ID NO: 667036 - RNA, 19 nt, Artificial Sequence
  Description of Artificial Sequence: Synthetic oligonucleotide
ugcuucgguagcaaucugg

SEQ ID NO: 667037 - RNA, 19 nt, Artificial Sequence
  Description of Artificial Sequence: Synthetic oligonucleotide
uguucuaaaacugcauucu

SEQ ID NO: 667038 - RNA, 19 nt, Artificial Sequence
  Description of Artificial Sequence: Synthetic oligonucleotide
cuuaagucaacugggauuc

SEQ ID NO: 667039 - RNA, 19 nt, Artificial Sequence
  Description of Artificial Sequence: Synthetic oligonucleotide
cacagaugcuguuaggacc

SEQ ID NO: 667040 - RNA, 19 nt, Artificial Sequence
  Description of Artificial Sequence: Synthetic oligonucleotide
ugauuguuaacugcaagac

SEQ ID NO: 667041 - RNA, 19 nt, Artificial Sequence
  Description of Artificial Sequence: Synthetic oligonucleotide
uccggacaaagacacacag

SEQ ID NO: 667042 - RNA, 19 nt, Artificial Sequence
  Description of Artificial Sequence: Synthetic oligonucleotide
gaggauuucaccaccauca

SEQ ID NO: 667043 - RNA, 19 nt, Artificial Sequence
  Description of Artificial Sequence: Synthetic oligonucleotide
gugaaaggcagguuugagg

SEQ ID NO: 667044 - RNA, 19 nt, Artificial Sequence
  Description of Artificial Sequence: Synthetic oligonucleotide
gauaugugcuucuuaagaa

SEQ ID NO: 667045 - RNA, 19 nt, Artificial Sequence
  Description of Artificial Sequence: Synthetic oligonucleotide
uuagggaaccaauaggcau

SEQ ID NO: 667046 - RNA, 19 nt, Artificial Sequence
  Description of Artificial Sequence: Synthetic oligonucleotide
acaccuacaucuugacagc

SEQ ID NO: 667047 - RNA, 19 nt, Artificial Sequence
  Description of Artificial Sequence: Synthetic oligonucleotide
ugcaagacaugcauugcug

SEQ ID NO: 667048 - RNA, 19 nt, Artificial Sequence
  Description of Artificial Sequence: Synthetic oligonucleotide
acuaucauguuuuaacauu

SEQ ID NO: 667049 - RNA, 19 nt, Artificial Sequence
  Description of Artificial Sequence: Synthetic oligonucleotide
aauuauacucuucccuaaa

SEQ ID NO: 667050 - RNA, 19 nt, Artificial Sequence
  Description of Artificial Sequence: Synthetic oligonucleotide
uuaagcaauuguucuaaaa

SEQ ID NO: 667051 - RNA, 19 nt, Artificial Sequence
  Description of Artificial Sequence: Synthetic oligonucleotide
uccguaagcaguagaaggu

SEQ ID NO: 667052 - RNA, 19 nt, Artificial Sequence
  Description of Artificial Sequence: Synthetic oligonucleotide
uuuggagccaaaucuugca

SEQ ID NO: 667053 - RNA, 19 nt, Artificial Sequence
  Description of Artificial Sequence: Synthetic oligonucleotide
gacacuguggaccaagcca

SEQ ID NO: 667054 - RNA, 19 nt, Artificial Sequence
  Description of Artificial Sequence: Synthetic oligonucleotide
aucuuuuacacuuccguaa

SEQ ID NO: 667055 - RNA, 19 nt, Artificial Sequence
  Description of Artificial Sequence: Synthetic oligonucleotide
guguuuagggaaccaauag

SEQ ID NO: 667056 - RNA, 19 nt, Artificial Sequence
  Description of Artificial Sequence: Synthetic oligonucleotide
ugucguuucugcugcagag

SEQ ID NO: 667057 - RNA, 19 nt, Artificial Sequence
  Description of Artificial Sequence: Synthetic oligonucleotide
uuagacaucugaacuaguu

SEQ ID NO: 667058 - RNA, 19 nt, Artificial Sequence
  Description of Artificial Sequence: Synthetic oligonucleotide
auggacugagaccucacag

SEQ ID NO: 667059 - RNA, 19 nt, Artificial Sequence
  Description of Artificial Sequence: Synthetic oligonucleotide
acauacgaaagucacccca

SEQ ID NO: 667060 - RNA, 19 nt, Artificial Sequence
  Description of Artificial Sequence: Synthetic oligonucleotide
gucccuagggauuuggaag

SEQ ID NO: 667061 - RNA, 19 nt, Artificial Sequence
  Description of Artificial Sequence: Synthetic oligonucleotide
guucuuucuaacccaacug

SEQ ID NO: 667062 - RNA, 19 nt, Artificial Sequence
  Description of Artificial Sequence: Synthetic oligonucleotide
auggacacauacgaaaguc

SEQ ID NO: 667063 - RNA, 19 nt, Artificial Sequence
  Description of Artificial Sequence: Synthetic oligonucleotide
ugacuuuugcaauuauacu

SEQ ID NO: 667064 - RNA, 19 nt, Artificial Sequence
  Description of Artificial Sequence: Synthetic oligonucleotide
aggaagauauguguacuac

SEQ ID NO: 667065 - RNA, 19 nt, Artificial Sequence
  Description of Artificial Sequence: Synthetic oligonucleotide
cagagcacaaaucuuuuac

SEQ ID NO: 667066 - RNA, 19 nt, Artificial Sequence
  Description of Artificial Sequence: Synthetic oligonucleotide
auacgaaagucaccccagc

SEQ ID NO: 667067 - RNA, 19 nt, Artificial Sequence
  Description of Artificial Sequence: Synthetic oligonucleotide
acuuaagucaacugggauu

SEQ ID NO: 667068 - RNA, 19 nt, Artificial Sequence
  Description of Artificial Sequence: Synthetic oligonucleotide
caagagaccaccacuguuc

SEQ ID NO: 667069 - RNA, 19 nt, Artificial Sequence
  Description of Artificial Sequence: Synthetic oligonucleotide
ucagauucaaaggugcuuc

SEQ ID NO: 667070 - RNA, 19 nt, Artificial Sequence
  Description of Artificial Sequence: Synthetic oligonucleotide
cuugagaguauccaucguc

SEQ ID NO: 667071 - RNA, 19 nt, Artificial Sequence
  Description of Artificial Sequence: Synthetic oligonucleotide
guaaguuccaagauggaca

SEQ ID NO: 667072 - RNA, 19 nt, Artificial Sequence
  Description of Artificial Sequence: Synthetic oligonucleotide
uucucaagagacacuuggc

SEQ ID NO: 667073 - RNA, 19 nt, Artificial Sequence
  Description of Artificial Sequence: Synthetic oligonucleotide
ugcuacuucuucuagguuu

SEQ ID NO: 667074 - RNA, 19 nt, Artificial Sequence
  Description of Artificial Sequence: Synthetic oligonucleotide
agguauuguguuuagggaa

SEQ ID NO: 667075 - RNA, 19 nt, Artificial Sequence
  Description of Artificial Sequence: Synthetic oligonucleotide
caccauaacaaucagaacu

SEQ ID NO: 667076 - RNA, 19 nt, Artificial Sequence
  Description of Artificial Sequence: Synthetic oligonucleotide
agacagucgcuucauuagg

SEQ ID NO: 667077 - RNA, 19 nt, Artificial Sequence
  Description of Artificial Sequence: Synthetic oligonucleotide
gaacuaguuuguuucauaa

SEQ ID NO: 667078 - RNA, 19 nt, Artificial Sequence
  Description of Artificial Sequence: Synthetic oligonucleotide
gauuguuaacugcaagaca

SEQ ID NO: 667079 - RNA, 19 nt, Artificial Sequence
  Description of Artificial Sequence: Synthetic oligonucleotide
uuaugaaucuugugucuga

SEQ ID NO: 667080 - RNA, 19 nt, Artificial Sequence
  Description of Artificial Sequence: Synthetic oligonucleotide
aaaaugacucggucuucug

SEQ ID NO: 667081 - RNA, 19 nt, Artificial Sequence
  Description of Artificial Sequence: Synthetic oligonucleotide
cauacgaaagucaccccag

SEQ ID NO: 667082 - RNA, 19 nt, Artificial Sequence
  Description of Artificial Sequence: Synthetic oligonucleotide
auauaagcagccaaaugug

SEQ ID NO: 667083 - RNA, 19 nt, Artificial Sequence
  Description of Artificial Sequence: Synthetic oligonucleotide
cuucccuaaaaugacucgg

SEQ ID NO: 667084 - RNA, 19 nt, Artificial Sequence
  Description of Artificial Sequence: Synthetic oligonucleotide
auacucuucccuaaaauga

SEQ ID NO: 667085 - RNA, 19 nt, Artificial Sequence
  Description of Artificial Sequence: Synthetic oligonucleotide
aucugguugagugguaucg

SEQ ID NO: 667086 - RNA, 19 nt, Artificial Sequence
  Description of Artificial Sequence: Synthetic oligonucleotide
uucaugucaaggaggauuu

SEQ ID NO: 667087 - RNA, 19 nt, Artificial Sequence
  Description of Artificial Sequence: Synthetic oligonucleotide
aagucaacugggauucgac

SEQ ID NO: 667088 - RNA, 19 nt, Artificial Sequence
  Description of Artificial Sequence: Synthetic oligonucleotide
uggcaagagaccaccacug

SEQ ID NO: 667089 - RNA, 19 nt, Artificial Sequence
  Description of Artificial Sequence: Synthetic oligonucleotide
agagcacaaaucuuuuaca

SEQ ID NO: 667090 - RNA, 19 nt, Artificial Sequence
  Description of Artificial Sequence: Synthetic oligonucleotide
ucuuuugcagcucucugua

SEQ ID NO: 667091 - RNA, 19 nt, Artificial Sequence
  Description of Artificial Sequence: Synthetic oligonucleotide
gguuaagacacuguggacc

SEQ ID NO: 667092 - RNA, 19 nt, Artificial Sequence
  Description of Artificial Sequence: Synthetic oligonucleotide
ugugccagcccaaauguau

SEQ ID NO: 667093 - RNA, 19 nt, Artificial Sequence
  Description of Artificial Sequence: Synthetic oligonucleotide
cugguuaagacacugugga

SEQ ID NO: 667094 - RNA, 19 nt, Artificial Sequence
  Description of Artificial Sequence: Synthetic oligonucleotide
aaaucuccggacaaagaca

SEQ ID NO: 667095 - RNA, 19 nt, Artificial Sequence
  Description of Artificial Sequence: Synthetic oligonucleotide
cagacagucgcuucauuag

SEQ ID NO: 667096 - RNA, 19 nt, Artificial Sequence
  Description of Artificial Sequence: Synthetic oligonucleotide
augauaugugcuucuuaag

SEQ ID NO: 667097 - RNA, 19 nt, Artificial Sequence
  Description of Artificial Sequence: Synthetic oligonucleotide
auaugugcuucuuaagaaa

SEQ ID NO: 667098 - RNA, 19 nt, Artificial Sequence
  Description of Artificial Sequence: Synthetic oligonucleotide
aagauauguguacuacuua

SEQ ID NO: 667099 - RNA, 19 nt, Artificial Sequence
  Description of Artificial Sequence: Synthetic oligonucleotide
uucuuagacaucugaacua

SEQ ID NO: 667100 - RNA, 19 nt, Artificial Sequence
  Description of Artificial Sequence: Synthetic oligonucleotide
aaaaucaaauuggcugucu

SEQ ID NO: 667101 - RNA, 19 nt, Artificial Sequence
  Description of Artificial Sequence: Synthetic oligonucleotide
agcauaucuggccaguuaa

SEQ ID NO: 667102 - RNA, 19 nt, Artificial Sequence
  Description of Artificial Sequence: Synthetic oligonucleotide
augccaaucucuuauguua

SEQ ID NO: 667103 - RNA, 19 nt, Artificial Sequence
  Description of Artificial Sequence: Synthetic oligonucleotide
gccaguuaacaacagaagc

SEQ ID NO: 667104 - RNA, 19 nt, Artificial Sequence
  Description of Artificial Sequence: Synthetic oligonucleotide
ucugucugauuaugaaucu

SEQ ID NO: 667105 - RNA, 19 nt, Artificial Sequence
  Description of Artificial Sequence: Synthetic oligonucleotide
aaacccaugguuccuugau

SEQ ID NO: 667106 - RNA, 19 nt, Artificial Sequence
  Description of Artificial Sequence: Synthetic oligonucleotide
auaugccaaucucuuaugu

SEQ ID NO: 667107 - RNA, 19 nt, Artificial Sequence
  Description of Artificial Sequence: Synthetic oligonucleotide
gaaccaauaggcauugcuc

SEQ ID NO: 667108 - RNA, 19 nt, Artificial Sequence
  Description of Artificial Sequence: Synthetic oligonucleotide
uugcaauuauacucuuccc

SEQ ID NO: 667109 - RNA, 19 nt, Artificial Sequence
  Description of Artificial Sequence: Synthetic oligonucleotide
agguuugcugguuaagaca

SEQ ID NO: 667110 - RNA, 19 nt, Artificial Sequence
  Description of Artificial Sequence: Synthetic oligonucleotide
auucuucuguugguuaugg

SEQ ID NO: 667111 - RNA, 19 nt, Artificial Sequence
  Description of Artificial Sequence: Synthetic oligonucleotide
gaauggcuguaaauaagcc

SEQ ID NO: 667112 - RNA, 19 nt, Artificial Sequence
  Description of Artificial Sequence: Synthetic oligonucleotide
ucccuagggauuuggaaga

SEQ ID NO: 667113 - RNA, 19 nt, Artificial Sequence
  Description of Artificial Sequence: Synthetic oligonucleotide
ucuccggacaaagacacac

SEQ ID NO: 667114 - RNA, 19 nt, Artificial Sequence
  Description of Artificial Sequence: Synthetic oligonucleotide
aggccacuaagcuuggcag

SEQ ID NO: 667115 - RNA, 19 nt, Artificial Sequence
  Description of Artificial Sequence: Synthetic oligonucleotide
ccaauaaaacccaugguuc

SEQ ID NO: 667116 - RNA, 19 nt, Artificial Sequence
  Description of Artificial Sequence: Synthetic oligonucleotide
auggaccugaccaaaagug

SEQ ID NO: 667117 - RNA, 19 nt, Artificial Sequence
  Description of Artificial Sequence: Synthetic oligonucleotide
agacccaagagguauuuau

SEQ ID NO: 667118 - RNA, 19 nt, Artificial Sequence
  Description of Artificial Sequence: Synthetic oligonucleotide
aaaacccaugguuccuuga

SEQ ID NO: 667119 - RNA, 19 nt, Artificial Sequence
  Description of Artificial Sequence: Synthetic oligonucleotide
uucccuaaaaugacucggu

SEQ ID NO: 667120 - RNA, 19 nt, Artificial Sequence
  Description of Artificial Sequence: Synthetic oligonucleotide
caauuguucuaaaacugca

SEQ ID NO: 667121 - RNA, 19 nt, Artificial Sequence
  Description of Artificial Sequence: Synthetic oligonucleotide
gauaacuagugcagagacc

SEQ ID NO: 667122 - RNA, 19 nt, Artificial Sequence
  Description of Artificial Sequence: Synthetic oligonucleotide
uaucauguuuuaacauuaa

SEQ ID NO: 667123 - RNA, 19 nt, Artificial Sequence
  Description of Artificial Sequence: Synthetic oligonucleotide
ucguuucugcugcagagaa

SEQ ID NO: 667124 - RNA, 19 nt, Artificial Sequence
  Description of Artificial Sequence: Synthetic oligonucleotide
ugcaagucccagacuaucu

SEQ ID NO: 667125 - RNA, 19 nt, Artificial Sequence
  Description of Artificial Sequence: Synthetic oligonucleotide
uagaagguauuguguuuag

SEQ ID NO: 667126 - RNA, 19 nt, Artificial Sequence
  Description of Artificial Sequence: Synthetic oligonucleotide
ucaaauuggcugucucuac

SEQ ID NO: 667127 - RNA, 19 nt, Artificial Sequence
  Description of Artificial Sequence: Synthetic oligonucleotide
cuaucauguuuuaacauua

SEQ ID NO: 667128 - RNA, 19 nt, Artificial Sequence
  Description of Artificial Sequence: Synthetic oligonucleotide
aagaucuaccuggucacca

SEQ ID NO: 667129 - RNA, 19 nt, Artificial Sequence
  Description of Artificial Sequence: Synthetic oligonucleotide
gaagcagauggaccugacc

SEQ ID NO: 667130 - RNA, 19 nt, Artificial Sequence
  Description of Artificial Sequence: Synthetic oligonucleotide
ugaacuaguuuguuucaua

SEQ ID NO: 667131 - RNA, 19 nt, Artificial Sequence
  Description of Artificial Sequence: Synthetic oligonucleotide
uucgacaacuacaggcuuc

SEQ ID NO: 667132 - RNA, 19 nt, Artificial Sequence
  Description of Artificial Sequence: Synthetic oligonucleotide
gacaugugagcuucaguuc

SEQ ID NO: 667133 - RNA, 19 nt, Artificial Sequence
  Description of Artificial Sequence: Synthetic oligonucleotide
ucgguagcaaucuggaguu

SEQ ID NO: 667134 - RNA, 19 nt, Artificial Sequence
  Description of Artificial Sequence: Synthetic oligonucleotide
cugccuucccagauuaagc

SEQ ID NO: 667135 - RNA, 19 nt, Artificial Sequence
  Description of Artificial Sequence: Synthetic oligonucleotide
uuauugcacuaucauguuu

SEQ ID NO: 667136 - RNA, 19 nt, Artificial Sequence
  Description of Artificial Sequence: Synthetic oligonucleotide
uaaaacccaugguuccuug

SEQ ID NO: 667137 - RNA, 19 nt, Artificial Sequence
  Description of Artificial Sequence: Synthetic oligonucleotide
ucccagacuaucugguuga

SEQ ID NO: 667138 - RNA, 19 nt, Artificial Sequence
  Description of Artificial Sequence: Synthetic oligonucleotide
cuuuuacacuuccguaagc

SEQ ID NO: 667139 - RNA, 19 nt, Artificial Sequence
  Description of Artificial Sequence: Synthetic oligonucleotide
ucgucucugacaaugucuu

SEQ ID NO: 667140 - RNA, 19 nt, Artificial Sequence
  Description of Artificial Sequence: Synthetic oligonucleotide
agucaacugggauucgaca

SEQ ID NO: 667141 - RNA, 19 nt, Artificial Sequence
  Description of Artificial Sequence: Synthetic oligonucleotide
guacuacuuaagucaacug

SEQ ID NO: 667142 - RNA, 19 nt, Artificial Sequence
  Description of Artificial Sequence: Synthetic oligonucleotide
cagguuugcugguuaagac

SEQ ID NO: 667143 - RNA, 19 nt, Artificial Sequence
  Description of Artificial Sequence: Synthetic oligonucleotide
agcaaucuggaguucugcu

SEQ ID NO: 667144 - RNA, 19 nt, Artificial Sequence
  Description of Artificial Sequence: Synthetic oligonucleotide
uaugccaaucucuuauguu

SEQ ID NO: 667145 - RNA, 19 nt, Artificial Sequence
  Description of Artificial Sequence: Synthetic oligonucleotide
gacacauacgaaagucacc

SEQ ID NO: 667146 - RNA, 19 nt, Artificial Sequence
  Description of Artificial Sequence: Synthetic oligonucleotide
agagacacuuggcaagaga

SEQ ID NO: 667147 - RNA, 19 nt, Artificial Sequence
  Description of Artificial Sequence: Synthetic oligonucleotide
augacucggucuucugcac

SEQ ID NO: 667148 - RNA, 19 nt, Artificial Sequence
  Description of Artificial Sequence: Synthetic oligonucleotide
aggugcaaaaggaugauau

SEQ ID NO: 667149 - RNA, 19 nt, Artificial Sequence
  Description of Artificial Sequence: Synthetic oligonucleotide
cugggauucgacaacuaca

SEQ ID NO: 667150 - RNA, 19 nt, Artificial Sequence
  Description of Artificial Sequence: Synthetic oligonucleotide
acccaagagguauuuauuu

SEQ ID NO: 667151 - RNA, 19 nt, Artificial Sequence
  Description of Artificial Sequence: Synthetic oligonucleotide
gaccugaccaaaagugucc

SEQ ID NO: 667152 - RNA, 19 nt, Artificial Sequence
  Description of Artificial Sequence: Synthetic oligonucleotide
ugcuuuugauuuugugcca

SEQ ID NO: 667153 - RNA, 19 nt, Artificial Sequence
  Description of Artificial Sequence: Synthetic oligonucleotide
ucccuaaaaugacucgguc

SEQ ID NO: 667154 - RNA, 19 nt, Artificial Sequence
  Description of Artificial Sequence: Synthetic oligonucleotide
gcaagcugcagacagucgc

SEQ ID NO: 667155 - RNA, 19 nt, Artificial Sequence
  Description of Artificial Sequence: Synthetic oligonucleotide
aacuagugcagagacccaa

SEQ ID NO: 667156 - RNA, 19 nt, Artificial Sequence
  Description of Artificial Sequence: Synthetic oligonucleotide
gaaaggcagguuugaggug

SEQ ID NO: 667157 - RNA, 19 nt, Artificial Sequence
  Description of Artificial Sequence: Synthetic oligonucleotide
cugcauucucaagagacac

SEQ ID NO: 667158 - RNA, 19 nt, Artificial Sequence
  Description of Artificial Sequence: Synthetic oligonucleotide
accuugagggcacuugacu

SEQ ID NO: 667159 - RNA, 19 nt, Artificial Sequence
  Description of Artificial Sequence: Synthetic oligonucleotide
gugggugucaagccuauuc

SEQ ID NO: 667160 - RNA, 19 nt, Artificial Sequence
  Description of Artificial Sequence: Synthetic oligonucleotide
auagucuguugacaucaga

SEQ ID NO: 667161 - RNA, 19 nt, Artificial Sequence
  Description of Artificial Sequence: Synthetic oligonucleotide
ggcaccauaacaaucagaa

SEQ ID NO: 667162 - RNA, 19 nt, Artificial Sequence
  Description of Artificial Sequence: Synthetic oligonucleotide
uuauggacugagaccucac

SEQ ID NO: 667163 - RNA, 19 nt, Artificial Sequence
  Description of Artificial Sequence: Synthetic oligonucleotide
gauucgacaacuacaggcu

SEQ ID NO: 667164 - RNA, 19 nt, Artificial Sequence
  Description of Artificial Sequence: Synthetic oligonucleotide
aacucugucgauggcaaua

SEQ ID NO: 667165 - RNA, 19 nt, Artificial Sequence
  Description of Artificial Sequence: Synthetic oligonucleotide
cuaccuggucaccaacuag

SEQ ID NO: 667166 - RNA, 19 nt, Artificial Sequence
  Description of Artificial Sequence: Synthetic oligonucleotide
aaccuuugugggugucaag

SEQ ID NO: 667167 - RNA, 19 nt, Artificial Sequence
  Description of Artificial Sequence: Synthetic oligonucleotide
cugcacauucagcauuacc

SEQ ID NO: 667168 - RNA, 19 nt, Artificial Sequence
  Description of Artificial Sequence: Synthetic oligonucleotide
ugagaguauccaucgucuc

SEQ ID NO: 667169 - RNA, 19 nt, Artificial Sequence
  Description of Artificial Sequence: Synthetic oligonucleotide
accauaacaaucagaacuu

SEQ ID NO: 667170 - RNA, 19 nt, Artificial Sequence
  Description of Artificial Sequence: Synthetic oligonucleotide
cuacuuaagucaacuggga

SEQ ID NO: 667171 - RNA, 19 nt, Artificial Sequence
  Description of Artificial Sequence: Synthetic oligonucleotide
uuaagucaacugggauucg

SEQ ID NO: 667172 - RNA, 19 nt, Artificial Sequence
  Description of Artificial Sequence: Synthetic oligonucleotide
aucgucucugacaaugucu

SEQ ID NO: 667173 - RNA, 19 nt, Artificial Sequence
  Description of Artificial Sequence: Synthetic oligonucleotide
uucuaacccaacugggguu

SEQ ID NO: 667174 - RNA, 19 nt, Artificial Sequence
  Description of Artificial Sequence: Synthetic oligonucleotide
gucugauauaagcagccaa

SEQ ID NO: 667175 - RNA, 19 nt, Artificial Sequence
  Description of Artificial Sequence: Synthetic oligonucleotide
uguuucaaagaugggugua

SEQ ID NO: 667176 - RNA, 19 nt, Artificial Sequence
  Description of Artificial Sequence: Synthetic oligonucleotide
gauggaccugaccaaaagu

SEQ ID NO: 667177 - RNA, 19 nt, Artificial Sequence
  Description of Artificial Sequence: Synthetic oligonucleotide
aggcuucagacuuaagaua

SEQ ID NO: 667178 - RNA, 19 nt, Artificial Sequence
  Description of Artificial Sequence: Synthetic oligonucleotide
ccaaggaagauauguguac

SEQ ID NO: 667179 - RNA, 19 nt, Artificial Sequence
  Description of Artificial Sequence: Synthetic oligonucleotide
gaagauauguguacuacuu

SEQ ID NO: 667180 - RNA, 19 nt, Artificial Sequence
  Description of Artificial Sequence: Synthetic oligonucleotide
aagagacacuuggcaagag

SEQ ID NO: 667181 - RNA, 19 nt, Artificial Sequence
  Description of Artificial Sequence: Synthetic oligonucleotide
cacauacgaaagucacccc

SEQ ID NO: 667182 - RNA, 19 nt, Artificial Sequence
  Description of Artificial Sequence: Synthetic oligonucleotide
cuucgguagcaaucuggag

SEQ ID NO: 667183 - RNA, 19 nt, Artificial Sequence
  Description of Artificial Sequence: Synthetic oligonucleotide
uaacuagugcagagaccca

SEQ ID NO: 667184 - RNA, 19 nt, Artificial Sequence
  Description of Artificial Sequence: Synthetic oligonucleotide
agucgcuucauuaggaaua

SEQ ID NO: 667185 - RNA, 19 nt, Artificial Sequence
  Description of Artificial Sequence: Synthetic oligonucleotide
gugcaaaaggaugauaugu

SEQ ID NO: 667186 - RNA, 19 nt, Artificial Sequence
  Description of Artificial Sequence: Synthetic oligonucleotide
acuuccguaagcaguagaa

SEQ ID NO: 667187 - RNA, 19 nt, Artificial Sequence
  Description of Artificial Sequence: Synthetic oligonucleotide
gcacuaucauguuuuaaca

SEQ ID NO: 667188 - RNA, 19 nt, Artificial Sequence
  Description of Artificial Sequence: Synthetic oligonucleotide
ugguaucgucccuagggau

SEQ ID NO: 667189 - RNA, 19 nt, Artificial Sequence
  Description of Artificial Sequence: Synthetic oligonucleotide
uuucaaagauggguguaua

SEQ ID NO: 667190 - RNA, 19 nt, Artificial Sequence
  Description of Artificial Sequence: Synthetic oligonucleotide
gcagugucguuucugcugc

SEQ ID NO: 667191 - RNA, 19 nt, Artificial Sequence
  Description of Artificial Sequence: Synthetic oligonucleotide
cugguugagugguaucguc

SEQ ID NO: 667192 - RNA, 19 nt, Artificial Sequence
  Description of Artificial Sequence: Synthetic oligonucleotide
ucuaacccaacugggguuu

SEQ ID NO: 667193 - RNA, 19 nt, Artificial Sequence
  Description of Artificial Sequence: Synthetic oligonucleotide
ccaguauauauuaauuuaa

SEQ ID NO: 667194 - RNA, 19 nt, Artificial Sequence
  Description of Artificial Sequence: Synthetic oligonucleotide
ucugguugagugguaucgu

SEQ ID NO: 667195 - RNA, 19 nt, Artificial Sequence
  Description of Artificial Sequence: Synthetic oligonucleotide
gagugguaucgucccuagg

SEQ ID NO: 667196 - RNA, 19 nt, Artificial Sequence
  Description of Artificial Sequence: Synthetic oligonucleotide
uucagacaauaaccaguau

SEQ ID NO: 667197 - RNA, 19 nt, Artificial Sequence
  Description of Artificial Sequence: Synthetic oligonucleotide
ugagaccucacagacucuu

SEQ ID NO: 667198 - RNA, 19 nt, Artificial Sequence
  Description of Artificial Sequence: Synthetic oligonucleotide
gcaauaaugugaugcucac

SEQ ID NO: 667199 - RNA, 19 nt, Artificial Sequence
  Description of Artificial Sequence: Synthetic oligonucleotide
agaucuaccuggucaccaa

SEQ ID NO: 667200 - RNA, 19 nt, Artificial Sequence
  Description of Artificial Sequence: Synthetic oligonucleotide
ggacacauacgaaagucac

SEQ ID NO: 667201 - RNA, 19 nt, Artificial Sequence
  Description of Artificial Sequence: Synthetic oligonucleotide
aaguaaguuccaagaugga

SEQ ID NO: 667202 - RNA, 19 nt, Artificial Sequence
  Description of Artificial Sequence: Synthetic oligonucleotide
acugcauucucaagagaca

SEQ ID NO: 667203 - RNA, 19 nt, Artificial Sequence
  Description of Artificial Sequence: Synthetic oligonucleotide
gugguaucgucccuaggga

SEQ ID NO: 667204 - RNA, 19 nt, Artificial Sequence
  Description of Artificial Sequence: Synthetic oligonucleotide
uucccagauuaagcaauug

SEQ ID NO: 667205 - RNA, 19 nt, Artificial Sequence
  Description of Artificial Sequence: Synthetic oligonucleotide
auucgacaacuacaggcuu

SEQ ID NO: 667206 - RNA, 19 nt, Artificial Sequence
  Description of Artificial Sequence: Synthetic oligonucleotide
cacuccaacucugucgaug

SEQ ID NO: 667207 - RNA, 19 nt, Artificial Sequence
  Description of Artificial Sequence: Synthetic oligonucleotide
auugcacuaucauguuuua

SEQ ID NO: 667208 - RNA, 19 nt, Artificial Sequence
  Description of Artificial Sequence: Synthetic oligonucleotide
agccugcuacuucuucuag

SEQ ID NO: 667209 - RNA, 19 nt, Artificial Sequence
  Description of Artificial Sequence: Synthetic oligonucleotide
agccaccacccaauaaaac

SEQ ID NO: 667210 - RNA, 19 nt, Artificial Sequence
  Description of Artificial Sequence: Synthetic oligonucleotide
aucgucccuagggauuugg

SEQ ID NO: 667211 - RNA, 19 nt, Artificial Sequence
  Description of Artificial Sequence: Synthetic oligonucleotide
uugagugguaucgucccua

SEQ ID NO: 667212 - RNA, 19 nt, Artificial Sequence
  Description of Artificial Sequence: Synthetic oligonucleotide
aagucaccccagccacaag

SEQ ID NO: 667213 - RNA, 19 nt, Artificial Sequence
  Description of Artificial Sequence: Synthetic oligonucleotide
ucgucccuagggauuugga

SEQ ID NO: 667214 - RNA, 19 nt, Artificial Sequence
  Description of Artificial Sequence: Synthetic oligonucleotide
caucgucucugacaauguc

SEQ ID NO: 667215 - RNA, 19 nt, Artificial Sequence
  Description of Artificial Sequence: Synthetic oligonucleotide
uacaggcuucagacuuaag

SEQ ID NO: 667216 - RNA, 19 nt, Artificial Sequence
  Description of Artificial Sequence: Synthetic oligonucleotide
cagaagagugccaccuuga

SEQ ID NO: 667217 - RNA, 19 nt, Artificial Sequence
  Description of Artificial Sequence: Synthetic oligonucleotide
caagaucuaccuggucacc

SEQ ID NO: 667218 - RNA, 19 nt, Artificial Sequence
  Description of Artificial Sequence: Synthetic oligonucleotide
gggcacuugacuuuugcaa

SEQ ID NO: 667219 - RNA, 19 nt, Artificial Sequence
  Description of Artificial Sequence: Synthetic oligonucleotide
uaguaaccuuugugggugu

SEQ ID NO: 667220 - RNA, 19 nt, Artificial Sequence
  Description of Artificial Sequence: Synthetic oligonucleotide
gggauucgacaacuacagg

SEQ ID NO: 667221 - RNA, 19 nt, Artificial Sequence
  Description of Artificial Sequence: Synthetic oligonucleotide
ggaagauauguguacuacu

SEQ ID NO: 667222 - RNA, 19 nt, Artificial Sequence
  Description of Artificial Sequence: Synthetic oligonucleotide
aucuaccuggucaccaacu

SEQ ID NO: 667223 - RNA, 19 nt, Artificial Sequence
  Description of Artificial Sequence: Synthetic oligonucleotide
acucugucgauggcaauaa

SEQ ID NO: 667224 - RNA, 19 nt, Artificial Sequence
  Description of Artificial Sequence: Synthetic oligonucleotide
gcagguuugaggugcaaaa

SEQ ID NO: 667225 - RNA, 19 nt, Artificial Sequence
  Description of Artificial Sequence: Synthetic oligonucleotide
aggacaagaucuaccuggu

SEQ ID NO: 667226 - RNA, 19 nt, Artificial Sequence
  Description of Artificial Sequence: Synthetic oligonucleotide
uugcacuaucauguuuuaa

SEQ ID NO: 667227 - RNA, 19 nt, Artificial Sequence
  Description of Artificial Sequence: Synthetic oligonucleotide
caccgaagcaggacacaug

SEQ ID NO: 667228 - RNA, 19 nt, Artificial Sequence
  Description of Artificial Sequence: Synthetic oligonucleotide
cacaugauucugcacagau

SEQ ID NO: 667229 - RNA, 19 nt, Artificial Sequence
  Description of Artificial Sequence: Synthetic oligonucleotide
gugucguuucugcugcaga

SEQ ID NO: 667230 - RNA, 19 nt, Artificial Sequence
  Description of Artificial Sequence: Synthetic oligonucleotide
agagaccaccacuguuccu

SEQ ID NO: 667231 - RNA, 19 nt, Artificial Sequence
  Description of Artificial Sequence: Synthetic oligonucleotide
caaucucuuauguuaguuu

SEQ ID NO: 667232 - RNA, 19 nt, Artificial Sequence
  Description of Artificial Sequence: Synthetic oligonucleotide
cuguuucaaagaugggugu

SEQ ID NO: 667233 - RNA, 19 nt, Artificial Sequence
  Description of Artificial Sequence: Synthetic oligonucleotide
ggaccugaccaaaaguguc

SEQ ID NO: 667234 - RNA, 19 nt, Artificial Sequence
  Description of Artificial Sequence: Synthetic oligonucleotide
aaguuccaagauggacaca

SEQ ID NO: 667235 - RNA, 19 nt, Artificial Sequence
  Description of Artificial Sequence: Synthetic oligonucleotide
gccacuaagcuuggcagug

SEQ ID NO: 667236 - RNA, 19 nt, Artificial Sequence
  Description of Artificial Sequence: Synthetic oligonucleotide
gcuguuguacaagccacac

SEQ ID NO: 667237 - RNA, 19 nt, Artificial Sequence
  Description of Artificial Sequence: Synthetic oligonucleotide
gcuguuugacaugugagcu

SEQ ID NO: 667238 - RNA, 19 nt, Artificial Sequence
  Description of Artificial Sequence: Synthetic oligonucleotide
guuucaaagauggguguau

SEQ ID NO: 667239 - RNA, 19 nt, Artificial Sequence
  Description of Artificial Sequence: Synthetic oligonucleotide
cuccaacucugucgauggc

SEQ ID NO: 667240 - RNA, 19 nt, Artificial Sequence
  Description of Artificial Sequence: Synthetic oligonucleotide
ucgcuucauuaggaauaag

SEQ ID NO: 667241 - RNA, 19 nt, Artificial Sequence
  Description of Artificial Sequence: Synthetic oligonucleotide
gucguuucugcugcagaga

SEQ ID NO: 667242 - RNA, 19 nt, Artificial Sequence
  Description of Artificial Sequence: Synthetic oligonucleotide
cuccggacaaagacacaca

SEQ ID NO: 667243 - RNA, 19 nt, Artificial Sequence
  Description of Artificial Sequence: Synthetic oligonucleotide
gucgcuucauuaggaauaa

SEQ ID NO: 667244 - RNA, 19 nt, Artificial Sequence
  Description of Artificial Sequence: Synthetic oligonucleotide
uuaagacacuguggaccaa

SEQ ID NO: 667245 - RNA, 19 nt, Artificial Sequence
  Description of Artificial Sequence: Synthetic oligonucleotide
acacaugauucugcacaga

SEQ ID NO: 667246 - RNA, 19 nt, Artificial Sequence
  Description of Artificial Sequence: Synthetic oligonucleotide
guguuucuguacagccacc

SEQ ID NO: 667247 - RNA, 19 nt, Artificial Sequence
  Description of Artificial Sequence: Synthetic oligonucleotide
gcagguuugcugguuaaga

SEQ ID NO: 667248 - RNA, 19 nt, Artificial Sequence
  Description of Artificial Sequence: Synthetic oligonucleotide
aggcagguuugcugguuaa

SEQ ID NO: 667249 - RNA, 19 nt, Artificial Sequence
  Description of Artificial Sequence: Synthetic oligonucleotide
guguacuacuuaagucaac

SEQ ID NO: 667250 - RNA, 19 nt, Artificial Sequence
  Description of Artificial Sequence: Synthetic oligonucleotide
aggaugauaugugcuucuu

SEQ ID NO: 667251 - RNA, 19 nt, Artificial Sequence
  Description of Artificial Sequence: Synthetic oligonucleotide
ggaugauaugugcuucuua

SEQ ID NO: 667252 - RNA, 19 nt, Artificial Sequence
  Description of Artificial Sequence: Synthetic oligonucleotide
gcaagacaugcauugcugu

SEQ ID NO: 667253 - RNA, 19 nt, Artificial Sequence
  Description of Artificial Sequence: Synthetic oligonucleotide
cugauauaagcagccaaau

SEQ ID NO: 667254 - RNA, 19 nt, Artificial Sequence
  Description of Artificial Sequence: Synthetic oligonucleotide
cagccaaauguguuucugu

SEQ ID NO: 667255 - RNA, 19 nt, Artificial Sequence
  Description of Artificial Sequence: Synthetic oligonucleotide
gaggugcaaaaggaugaua

SEQ ID NO: 667256 - RNA, 19 nt, Artificial Sequence
  Description of Artificial Sequence: Synthetic oligonucleotide
gacucggucuucugcacuu

SEQ ID NO: 667257 - RNA, 19 nt, Artificial Sequence
  Description of Artificial Sequence: Synthetic oligonucleotide
ccaauaggcauugcuccug

SEQ ID NO: 667258 - RNA, 19 nt, Artificial Sequence
  Description of Artificial Sequence: Synthetic oligonucleotide
acuacaggcuucagacuua

SEQ ID NO: 667259 - RNA, 19 nt, Artificial Sequence
  Description of Artificial Sequence: Synthetic oligonucleotide
caagacaugcauugcuguu

SEQ ID NO: 667260 - RNA, 19 nt, Artificial Sequence
  Description of Artificial Sequence: Synthetic oligonucleotide
uaucgucccuagggauuug

SEQ ID NO: 667261 - RNA, 19 nt, Artificial Sequence
  Description of Artificial Sequence: Synthetic oligonucleotide
cagcauuaccagcuacaaa

SEQ ID NO: 667262 - RNA, 19 nt, Artificial Sequence
  Description of Artificial Sequence: Synthetic oligonucleotide
gcauaucuggccaguuaac

SEQ ID NO: 667263 - RNA, 19 nt, Artificial Sequence
  Description of Artificial Sequence: Synthetic oligonucleotide
cuacaggcuucagacuuaa

SEQ ID NO: 667264 - RNA, 19 nt, Artificial Sequence
  Description of Artificial Sequence: Synthetic oligonucleotide
guaagcaguagaagguauu

SEQ ID NO: 667265 - RNA, 19 nt, Artificial Sequence
  Description of Artificial Sequence: Synthetic oligonucleotide
caacuacaggcuucagacu

SEQ ID NO: 667266 - RNA, 19 nt, Artificial Sequence
  Description of Artificial Sequence: Synthetic oligonucleotide
ucacuccaacucugucgau

SEQ ID NO: 667267 - RNA, 19 nt, Artificial Sequence
  Description of Artificial Sequence: Synthetic oligonucleotide
gacccaagagguauuuauu

SEQ ID NO: 667268 - RNA, 19 nt, Artificial Sequence
  Description of Artificial Sequence: Synthetic oligonucleotide
guugagcauacaggcaggu

SEQ ID NO: 667269 - RNA, 19 nt, Artificial Sequence
  Description of Artificial Sequence: Synthetic oligonucleotide
agaugcuguuaggaccuuu

SEQ ID NO: 667270 - RNA, 19 nt, Artificial Sequence
  Description of Artificial Sequence: Synthetic oligonucleotide
guuguacaagccacaccua

SEQ ID NO: 667271 - RNA, 19 nt, Artificial Sequence
  Description of Artificial Sequence: Synthetic oligonucleotide
guuugacaugugagcuuca

SEQ ID NO: 667272 - RNA, 19 nt, Artificial Sequence
  Description of Artificial Sequence: Synthetic oligonucleotide
cuaucugguugagugguau

SEQ ID NO: 667273 - RNA, 19 nt, Artificial Sequence
  Description of Artificial Sequence: Synthetic oligonucleotide
cagucgcuucauuaggaau

SEQ ID NO: 667274 - RNA, 19 nt, Artificial Sequence
  Description of Artificial Sequence: Synthetic oligonucleotide
caauaaugugaugcucacu

SEQ ID NO: 667275 - RNA, 19 nt, Artificial Sequence
  Description of Artificial Sequence: Synthetic oligonucleotide
cuucccagauuaagcaauu

SEQ ID NO: 667276 - RNA, 19 nt, Artificial Sequence
  Description of Artificial Sequence: Synthetic oligonucleotide
guaucgucccuagggauuu

SEQ ID NO: 667277 - RNA, 19 nt, Artificial Sequence
  Description of Artificial Sequence: Synthetic oligonucleotide
aaagaccagcugaguccuu

SEQ ID NO: 667278 - RNA, 19 nt, Artificial Sequence
  Description of Artificial Sequence: Synthetic oligonucleotide
ugugggugucaagccuauu

SEQ ID NO: 667279 - RNA, 19 nt, Artificial Sequence
  Description of Artificial Sequence: Synthetic oligonucleotide
ggccacuaagcuuggcagu

SEQ ID NO: 667280 - RNA, 19 nt, Artificial Sequence
  Description of Artificial Sequence: Synthetic oligonucleotide
gccuauucucugaauauuu

SEQ ID NO: 667281 - RNA, 19 nt, Artificial Sequence
  Description of Artificial Sequence: Synthetic oligonucleotide
gguaucgucccuagggauu

SEQ ID NO: 667282 - RNA, 19 nt, Artificial Sequence
  Description of Artificial Sequence: Synthetic oligonucleotide
ccaaauguaugaacccaau

SEQ ID NO: 667283 - RNA, 19 nt, Artificial Sequence
  Description of Artificial Sequence: Synthetic oligonucleotide
cgucccuagggauuuggaa

SEQ ID NO: 667284 - RNA, 19 nt, Artificial Sequence
  Description of Artificial Sequence: Synthetic oligonucleotide
cccuagggauuuggaagac

SEQ ID NO: 667285 - RNA, 19 nt, Artificial Sequence
  Description of Artificial Sequence: Synthetic oligonucleotide
gccaccuguaggccacuaa

SEQ ID NO: 667286 - RNA, 19 nt, Artificial Sequence
  Description of Artificial Sequence: Synthetic oligonucleotide
ccguaagcaguagaaggua

SEQ ID NO: 667287 - RNA, 19 nt, Artificial Sequence
  Description of Artificial Sequence: Synthetic oligonucleotide
cguaagcaguagaagguau

SEQ ID NO: 667288 - RNA, 19 nt, Artificial Sequence
  Description of Artificial Sequence: Synthetic oligonucleotide
ccaucgucucugacaaugu

SEQ ID NO: 667289 - RNA, 19 nt, Artificial Sequence
  Description of Artificial Sequence: Synthetic oligonucleotide
cuaacccaacugggguuuu

SEQ ID NO: 667290 - RNA, 19 nt, Artificial Sequence
  Description of Artificial Sequence: Synthetic oligonucleotide
ccagacuaucugguugagu

SEQ ID NO: 667291 - RNA, 19 nt, Artificial Sequence
  Description of Artificial Sequence: Synthetic oligonucleotide
cuucuagguuuggcucuuu

SEQ ID NO: 667292 - RNA, 19 nt, Artificial Sequence
  Description of Artificial Sequence: Synthetic oligonucleotide
uuuuauuauaccauggcgg

SEQ ID NO: 667293 - RNA, 19 nt, Artificial Sequence
  Description of Artificial Sequence: Synthetic oligonucleotide
ugaucuauagauuugaaag

SEQ ID NO: 667294 - RNA, 19 nt, Artificial Sequence
  Description of Artificial Sequence: Synthetic oligonucleotide
uugaauagaacuuagagcu

SEQ ID NO: 667295 - RNA, 19 nt, Artificial Sequence
  Description of Artificial Sequence: Synthetic oligonucleotide
uuuaccuugacaaaguaac

SEQ ID NO: 667296 - RNA, 19 nt, Artificial Sequence
  Description of Artificial Sequence: Synthetic oligonucleotide
uguagauuuaccuugacaa

SEQ ID NO: 667297 - RNA, 19 nt, Artificial Sequence
  Description of Artificial Sequence: Synthetic oligonucleotide
uuuauuauaccauggcggg

SEQ ID NO: 667298 - RNA, 19 nt, Artificial Sequence
  Description of Artificial Sequence: Synthetic oligonucleotide
augcauguaacacaaaagg

SEQ ID NO: 667299 - RNA, 19 nt, Artificial Sequence
  Description of Artificial Sequence: Synthetic oligonucleotide
aaguuuccgauguaaauuc

SEQ ID NO: 667300 - RNA, 19 nt, Artificial Sequence
  Description of Artificial Sequence: Synthetic oligonucleotide
gaucuauagauuugaaagg

SEQ ID NO: 667301 - RNA, 19 nt, Artificial Sequence
  Description of Artificial Sequence: Synthetic oligonucleotide
uccuacaagacacugcugg

SEQ ID NO: 667302 - RNA, 19 nt, Artificial Sequence
  Description of Artificial Sequence: Synthetic oligonucleotide
aaaggcauaaagugcuucg

SEQ ID NO: 667303 - RNA, 19 nt, Artificial Sequence
  Description of Artificial Sequence: Synthetic oligonucleotide
uucaacuuggaaauaaucu

SEQ ID NO: 667304 - RNA, 19 nt, Artificial Sequence
  Description of Artificial Sequence: Synthetic oligonucleotide
aguaacaaggcauuugcuc

SEQ ID NO: 667305 - RNA, 19 nt, Artificial Sequence
  Description of Artificial Sequence: Synthetic oligonucleotide
uugaauugauccaagugag

SEQ ID NO: 667306 - RNA, 19 nt, Artificial Sequence
  Description of Artificial Sequence: Synthetic oligonucleotide
uuauauucaaguuucucac

SEQ ID NO: 667307 - RNA, 19 nt, Artificial Sequence
  Description of Artificial Sequence: Synthetic oligonucleotide
aacuaugggaaaucuuugg

SEQ ID NO: 667308 - RNA, 19 nt, Artificial Sequence
  Description of Artificial Sequence: Synthetic oligonucleotide
aucuauagauuugaaaggc

SEQ ID NO: 667309 - RNA, 19 nt, Artificial Sequence
  Description of Artificial Sequence: Synthetic oligonucleotide
auauucaaguuucucacuc

SEQ ID NO: 667310 - RNA, 19 nt, Artificial Sequence
  Description of Artificial Sequence: Synthetic oligonucleotide
caauacauacaacaggugc

SEQ ID NO: 667311 - RNA, 19 nt, Artificial Sequence
  Description of Artificial Sequence: Synthetic oligonucleotide
uauacguaagcugagagac

SEQ ID NO: 667312 - RNA, 19 nt, Artificial Sequence
  Description of Artificial Sequence: Synthetic oligonucleotide
ugcgauauacguaagcuga

SEQ ID NO: 667313 - RNA, 19 nt, Artificial Sequence
  Description of Artificial Sequence: Synthetic oligonucleotide
gagcaauuaauguucuucg

SEQ ID NO: 667314 - RNA, 19 nt, Artificial Sequence
  Description of Artificial Sequence: Synthetic oligonucleotide
cugguuaauguaaucaggg

SEQ ID NO: 667315 - RNA, 19 nt, Artificial Sequence
  Description of Artificial Sequence: Synthetic oligonucleotide
aagacuuuuguugugagga

SEQ ID NO: 667316 - RNA, 19 nt, Artificial Sequence
  Description of Artificial Sequence: Synthetic oligonucleotide
uuuacaccaagcaucacac

SEQ ID NO: 667317 - RNA, 19 nt, Artificial Sequence
  Description of Artificial Sequence: Synthetic oligonucleotide
uguugugaggauuucugcg

SEQ ID NO: 667318 - RNA, 19 nt, Artificial Sequence
  Description of Artificial Sequence: Synthetic oligonucleotide
gauauacguaagcugagag

SEQ ID NO: 667319 - RNA, 19 nt, Artificial Sequence
  Description of Artificial Sequence: Synthetic oligonucleotide
ugcauguaacacaaaaggc

SEQ ID NO: 667320 - RNA, 19 nt, Artificial Sequence
  Description of Artificial Sequence: Synthetic oligonucleotide
uuuuggugcauuuugaaua

SEQ ID NO: 667321 - RNA, 19 nt, Artificial Sequence
  Description of Artificial Sequence: Synthetic oligonucleotide
agaaacuagagggagguac

SEQ ID NO: 667322 - RNA, 19 nt, Artificial Sequence
  Description of Artificial Sequence: Synthetic oligonucleotide
aucaauaaccuugagguag

SEQ ID NO: 667323 - RNA, 19 nt, Artificial Sequence
  Description of Artificial Sequence: Synthetic oligonucleotide
ucacaauaacuuuacacca

SEQ ID NO: 667324 - RNA, 19 nt, Artificial Sequence
  Description of Artificial Sequence: Synthetic oligonucleotide
caagugaguucuuagcucg

SEQ ID NO: 667325 - RNA, 19 nt, Artificial Sequence
  Description of Artificial Sequence: Synthetic oligonucleotide
uggaauguucucaaguagc

SEQ ID NO: 667326 - RNA, 19 nt, Artificial Sequence
  Description of Artificial Sequence: Synthetic oligonucleotide
uauagauuugaaaggcagc

SEQ ID NO: 667327 - RNA, 19 nt, Artificial Sequence
  Description of Artificial Sequence: Synthetic oligonucleotide
aucaugucuauuauuacac

SEQ ID NO: 667328 - RNA, 19 nt, Artificial Sequence
  Description of Artificial Sequence: Synthetic oligonucleotide
caugucuauuauuacacag

SEQ ID NO: 667329 - RNA, 19 nt, Artificial Sequence
  Description of Artificial Sequence: Synthetic oligonucleotide
uacaacaggugcuuauugg

SEQ ID NO: 667330 - RNA, 19 nt, Artificial Sequence
  Description of Artificial Sequence: Synthetic oligonucleotide
aggguuacucaguaauucc

SEQ ID NO: 667331 - RNA, 19 nt, Artificial Sequence
  Description of Artificial Sequence: Synthetic oligonucleotide
agcaauuaauguucuucgc

SEQ ID NO: 667332 - RNA, 19 nt, Artificial Sequence
  Description of Artificial Sequence: Synthetic oligonucleotide
agaggaaaauaucaugucu

SEQ ID NO: 667333 - RNA, 19 nt, Artificial Sequence
  Description of Artificial Sequence: Synthetic oligonucleotide
caauuaauguucuucgcac

SEQ ID NO: 667334 - RNA, 19 nt, Artificial Sequence
  Description of Artificial Sequence: Synthetic oligonucleotide
auccaagugaguucuuagc

SEQ ID NO: 667335 - RNA, 19 nt, Artificial Sequence
  Description of Artificial Sequence: Synthetic oligonucleotide
ucuaugagcaguauuucau

SEQ ID NO: 667336 - RNA, 19 nt, Artificial Sequence
  Description of Artificial Sequence: Synthetic oligonucleotide
ugauccugcuuauuuacag

SEQ ID NO: 667337 - RNA, 19 nt, Artificial Sequence
  Description of Artificial Sequence: Synthetic oligonucleotide
aaggagcauauguguaggc

SEQ ID NO: 667338 - RNA, 19 nt, Artificial Sequence
  Description of Artificial Sequence: Synthetic oligonucleotide
ucacugacgaugaaugaug

SEQ ID NO: 667339 - RNA, 19 nt, Artificial Sequence
  Description of Artificial Sequence: Synthetic oligonucleotide
uucaugucuggcauuagcu

SEQ ID NO: 667340 - RNA, 19 nt, Artificial Sequence
  Description of Artificial Sequence: Synthetic oligonucleotide
agaacuuagagcuugccuu

SEQ ID NO: 667341 - RNA, 19 nt, Artificial Sequence
  Description of Artificial Sequence: Synthetic oligonucleotide
ugaagcacggcucagccaa

SEQ ID NO: 667342 - RNA, 19 nt, Artificial Sequence
  Description of Artificial Sequence: Synthetic oligonucleotide
ugauggguaauaccugucc

SEQ ID NO: 667343 - RNA, 19 nt, Artificial Sequence
  Description of Artificial Sequence: Synthetic oligonucleotide
uauuauaccauggcgggca

SEQ ID NO: 667344 - RNA, 19 nt, Artificial Sequence
  Description of Artificial Sequence: Synthetic oligonucleotide
uuuccgauguaaauucuga

SEQ ID NO: 667345 - RNA, 19 nt, Artificial Sequence
  Description of Artificial Sequence: Synthetic oligonucleotide
uccgcuuggauucugcuga

SEQ ID NO: 667346 - RNA, 19 nt, Artificial Sequence
  Description of Artificial Sequence: Synthetic oligonucleotide
gacuggauauccuucgaag

SEQ ID NO: 667347 - RNA, 19 nt, Artificial Sequence
  Description of Artificial Sequence: Synthetic oligonucleotide
uucuuaucggguuuuggug

SEQ ID NO: 667348 - RNA, 19 nt, Artificial Sequence
  Description of Artificial Sequence: Synthetic oligonucleotide
aaauucugauaaauuucac

SEQ ID NO: 667349 - RNA, 19 nt, Artificial Sequence
  Description of Artificial Sequence: Synthetic oligonucleotide
uguagcugaagaucugugc

SEQ ID NO: 667350 - RNA, 19 nt, Artificial Sequence
  Description of Artificial Sequence: Synthetic oligonucleotide
uuguagauuuaccuugaca

SEQ ID NO: 667351 - RNA, 19 nt, Artificial Sequence
  Description of Artificial Sequence: Synthetic oligonucleotide
auauguguaggcucgcuug

SEQ ID NO: 667352 - RNA, 19 nt, Artificial Sequence
  Description of Artificial Sequence: Synthetic oligonucleotide
uguguaggcucgcuugugg

SEQ ID NO: 667353 - RNA, 19 nt, Artificial Sequence
  Description of Artificial Sequence: Synthetic oligonucleotide
accuugacaaaguaacaag

SEQ ID NO: 667354 - RNA, 19 nt, Artificial Sequence
  Description of Artificial Sequence: Synthetic oligonucleotide
guaacaaggcauuugcuca

SEQ ID NO: 667355 - RNA, 19 nt, Artificial Sequence
  Description of Artificial Sequence: Synthetic oligonucleotide
ugauaaauuucaccaacua

SEQ ID NO: 667356 - RNA, 19 nt, Artificial Sequence
  Description of Artificial Sequence: Synthetic oligonucleotide
uuucaccaacuaauugugg

SEQ ID NO: 667357 - RNA, 19 nt, Artificial Sequence
  Description of Artificial Sequence: Synthetic oligonucleotide
aaacauuccucgaaguuca

SEQ ID NO: 667358 - RNA, 19 nt, Artificial Sequence
  Description of Artificial Sequence: Synthetic oligonucleotide
gaggauuucugcgauauac

SEQ ID NO: 667359 - RNA, 19 nt, Artificial Sequence
  Description of Artificial Sequence: Synthetic oligonucleotide
caguucuuaguuucaaccc

SEQ ID NO: 667360 - RNA, 19 nt, Artificial Sequence
  Description of Artificial Sequence: Synthetic oligonucleotide
ucuugcagugccuugaaua

SEQ ID NO: 667361 - RNA, 19 nt, Artificial Sequence
  Description of Artificial Sequence: Synthetic oligonucleotide
acuugugaucuauagauuu

SEQ ID NO: 667362 - RNA, 19 nt, Artificial Sequence
  Description of Artificial Sequence: Synthetic oligonucleotide
aaccccuccaacuucuugu

SEQ ID NO: 667363 - RNA, 19 nt, Artificial Sequence
  Description of Artificial Sequence: Synthetic oligonucleotide
uagaacuuagagcuugccu

SEQ ID NO: 667364 - RNA, 19 nt, Artificial Sequence
  Description of Artificial Sequence: Synthetic oligonucleotide
aguaauuccacuacuggcu

SEQ ID NO: 667365 - RNA, 19 nt, Artificial Sequence
  Description of Artificial Sequence: Synthetic oligonucleotide
ucugcgauauacguaagcu

SEQ ID NO: 667366 - RNA, 19 nt, Artificial Sequence
  Description of Artificial Sequence: Synthetic oligonucleotide
uacguaagcugagagacug

SEQ ID NO: 667367 - RNA, 19 nt, Artificial Sequence
  Description of Artificial Sequence: Synthetic oligonucleotide
ucucgaaguuuguuuacag

SEQ ID NO: 667368 - RNA, 19 nt, Artificial Sequence
  Description of Artificial Sequence: Synthetic oligonucleotide
uucgcacccauuuaaacau

SEQ ID NO: 667369 - RNA, 19 nt, Artificial Sequence
  Description of Artificial Sequence: Synthetic oligonucleotide
ucuguuaccucugcacugg

SEQ ID NO: 667370 - RNA, 19 nt, Artificial Sequence
  Description of Artificial Sequence: Synthetic oligonucleotide
gaaggaaucucacuucauc

SEQ ID NO: 667371 - RNA, 19 nt, Artificial Sequence
  Description of Artificial Sequence: Synthetic oligonucleotide
acuaugggaaaucuuuggu

SEQ ID NO: 667372 - RNA, 19 nt, Artificial Sequence
  Description of Artificial Sequence: Synthetic oligonucleotide
gagcuugccuuuuauauuc

SEQ ID NO: 667373 - RNA, 19 nt, Artificial Sequence
  Description of Artificial Sequence: Synthetic oligonucleotide
ugcuuauuuacagaaacua

SEQ ID NO: 667374 - RNA, 19 nt, Artificial Sequence
  Description of Artificial Sequence: Synthetic oligonucleotide
uccgauguaaauucugaaa

SEQ ID NO: 667375 - RNA, 19 nt, Artificial Sequence
  Description of Artificial Sequence: Synthetic oligonucleotide
aucaggguuacucaguaau

SEQ ID NO: 667376 - RNA, 19 nt, Artificial Sequence
  Description of Artificial Sequence: Synthetic oligonucleotide
auauacguaagcugagaga

SEQ ID NO: 667377 - RNA, 19 nt, Artificial Sequence
  Description of Artificial Sequence: Synthetic oligonucleotide
ugccauguguagcugaaga

SEQ ID NO: 667378 - RNA, 19 nt, Artificial Sequence
  Description of Artificial Sequence: Synthetic oligonucleotide
uguaacacaaaaggccuug

SEQ ID NO: 667379 - RNA, 19 nt, Artificial Sequence
  Description of Artificial Sequence: Synthetic oligonucleotide
ugcuuauuggcucuuguuu

SEQ ID NO: 667380 - RNA, 19 nt, Artificial Sequence
  Description of Artificial Sequence: Synthetic oligonucleotide
cucaguaauuccacuacug

SEQ ID NO: 667381 - RNA, 19 nt, Artificial Sequence
  Description of Artificial Sequence: Synthetic oligonucleotide
uucucacaccaccaauccg

SEQ ID NO: 667382 - RNA, 19 nt, Artificial Sequence
  Description of Artificial Sequence: Synthetic oligonucleotide
ucaauaaccuugagguagu

SEQ ID NO: 667383 - RNA, 19 nt, Artificial Sequence
  Description of Artificial Sequence: Synthetic oligonucleotide
gcauguaacacaaaaggcc

SEQ ID NO: 667384 - RNA, 19 nt, Artificial Sequence
  Description of Artificial Sequence: Synthetic oligonucleotide
gagcauauguguaggcucg

SEQ ID NO: 667385 - RNA, 19 nt, Artificial Sequence
  Description of Artificial Sequence: Synthetic oligonucleotide
cauguuugaaggaaucuca

SEQ ID NO: 667386 - RNA, 19 nt, Artificial Sequence
  Description of Artificial Sequence: Synthetic oligonucleotide
aaucucacuucaucacgug

SEQ ID NO: 667387 - RNA, 19 nt, Artificial Sequence
  Description of Artificial Sequence: Synthetic oligonucleotide
uuaccuugacaaaguaaca

SEQ ID NO: 667388 - RNA, 19 nt, Artificial Sequence
  Description of Artificial Sequence: Synthetic oligonucleotide
gaacccgagaacauguuug

SEQ ID NO: 667389 - RNA, 19 nt, Artificial Sequence
  Description of Artificial Sequence: Synthetic oligonucleotide
uaauaccugucccgcagag

SEQ ID NO: 667390 - RNA, 19 nt, Artificial Sequence
  Description of Artificial Sequence: Synthetic oligonucleotide
ucuuaguuucaaccccucc

SEQ ID NO: 667391 - RNA, 19 nt, Artificial Sequence
  Description of Artificial Sequence: Synthetic oligonucleotide
uagcucgggacacaguuca

SEQ ID NO: 667392 - RNA, 19 nt, Artificial Sequence
  Description of Artificial Sequence: Synthetic oligonucleotide
gggagaagaagucucgagg

SEQ ID NO: 667393 - RNA, 19 nt, Artificial Sequence
  Description of Artificial Sequence: Synthetic oligonucleotide
ucugaaacucacugagucu

SEQ ID NO: 667394 - RNA, 19 nt, Artificial Sequence
  Description of Artificial Sequence: Synthetic oligonucleotide
uucugcgauauacguaagc

SEQ ID NO: 667395 - RNA, 19 nt, Artificial Sequence
  Description of Artificial Sequence: Synthetic oligonucleotide
guuaccucugcacugguga

SEQ ID NO: 667396 - RNA, 19 nt, Artificial Sequence
  Description of Artificial Sequence: Synthetic oligonucleotide
ugaaguguaucuggaaugu

SEQ ID NO: 667397 - RNA, 19 nt, Artificial Sequence
  Description of Artificial Sequence: Synthetic oligonucleotide
cuuuacaccaagcaucaca

SEQ ID NO: 667398 - RNA, 19 nt, Artificial Sequence
  Description of Artificial Sequence: Synthetic oligonucleotide
caaaugcuucgaacuaugg

SEQ ID NO: 667399 - RNA, 19 nt, Artificial Sequence
  Description of Artificial Sequence: Synthetic oligonucleotide
cacgugaguuccuucaagc

SEQ ID NO: 667400 - RNA, 19 nt, Artificial Sequence
  Description of Artificial Sequence: Synthetic oligonucleotide
ucaaguagcuucugcugug

SEQ ID NO: 667401 - RNA, 19 nt, Artificial Sequence
  Description of Artificial Sequence: Synthetic oligonucleotide
guuaauguaaucaggguua

SEQ ID NO: 667402 - RNA, 19 nt, Artificial Sequence
  Description of Artificial Sequence: Synthetic oligonucleotide
gaugaaugauggguaauac

SEQ ID NO: 667403 - RNA, 19 nt, Artificial Sequence
  Description of Artificial Sequence: Synthetic oligonucleotide
uucaagacuuuuguuguga

SEQ ID NO: 667404 - RNA, 19 nt, Artificial Sequence
  Description of Artificial Sequence: Synthetic oligonucleotide
cacugacgaugaaugaugg

SEQ ID NO: 667405 - RNA, 19 nt, Artificial Sequence
  Description of Artificial Sequence: Synthetic oligonucleotide
ucaugucuauuauuacaca

SEQ ID NO: 667406 - RNA, 19 nt, Artificial Sequence
  Description of Artificial Sequence: Synthetic oligonucleotide
cuucaagcaugcauguaac

SEQ ID NO: 667407 - RNA, 19 nt, Artificial Sequence
  Description of Artificial Sequence: Synthetic oligonucleotide
guucucacaccaccaaucc

SEQ ID NO: 667408 - RNA, 19 nt, Artificial Sequence
  Description of Artificial Sequence: Synthetic oligonucleotide
auguaaucaggguuacuca

SEQ ID NO: 667409 - RNA, 19 nt, Artificial Sequence
  Description of Artificial Sequence: Synthetic oligonucleotide
aacccgagaacauguuuga

SEQ ID NO: 667410 - RNA, 19 nt, Artificial Sequence
  Description of Artificial Sequence: Synthetic oligonucleotide
acagaaacuagagggaggu

SEQ ID NO: 667411 - RNA, 19 nt, Artificial Sequence
  Description of Artificial Sequence: Synthetic oligonucleotide
ucuucuuaucggguuuugg

SEQ ID NO: 667412 - RNA, 19 nt, Artificial Sequence
  Description of Artificial Sequence: Synthetic oligonucleotide
uauguguaggcucgcuugu

SEQ ID NO: 667413 - RNA, 19 nt, Artificial Sequence
  Description of Artificial Sequence: Synthetic oligonucleotide
acuagagggagguacgaaa

SEQ ID NO: 667414 - RNA, 19 nt, Artificial Sequence
  Description of Artificial Sequence: Synthetic oligonucleotide
ugaguuccuucaagcaugc

SEQ ID NO: 667415 - RNA, 19 nt, Artificial Sequence
  Description of Artificial Sequence: Synthetic oligonucleotide
gauccuaguugauggugcc

SEQ ID NO: 667416 - RNA, 19 nt, Artificial Sequence
  Description of Artificial Sequence: Synthetic oligonucleotide
ucuucgcacccauuuaaac

SEQ ID NO: 667417 - RNA, 19 nt, Artificial Sequence
  Description of Artificial Sequence: Synthetic oligonucleotide
ucuggcauuagcugcuuuc

SEQ ID NO: 667418 - RNA, 19 nt, Artificial Sequence
  Description of Artificial Sequence: Synthetic oligonucleotide
cuaugagcaguauuucauc

SEQ ID NO: 667419 - RNA, 19 nt, Artificial Sequence
  Description of Artificial Sequence: Synthetic oligonucleotide
gaacuaugggaaaucuuug

SEQ ID NO: 667420 - RNA, 19 nt, Artificial Sequence
  Description of Artificial Sequence: Synthetic oligonucleotide
uaccuugacaaaguaacaa

SEQ ID NO: 667421 - RNA, 19 nt, Artificial Sequence
  Description of Artificial Sequence: Synthetic oligonucleotide
auguuugaaggaaucucac

SEQ ID NO: 667422 - RNA, 19 nt, Artificial Sequence
  Description of Artificial Sequence: Synthetic oligonucleotide
uaaucuucuuaucggguuu

SEQ ID NO: 667423 - RNA, 19 nt, Artificial Sequence
  Description of Artificial Sequence: Synthetic oligonucleotide
ugugaucuauagauuugaa

SEQ ID NO: 667424 - RNA, 19 nt, Artificial Sequence
  Description of Artificial Sequence: Synthetic oligonucleotide
caagcaugcauguaacaca

SEQ ID NO: 667425 - RNA, 19 nt, Artificial Sequence
  Description of Artificial Sequence: Synthetic oligonucleotide
uuaauguaaucaggguuac

SEQ ID NO: 667426 - RNA, 19 nt, Artificial Sequence
  Description of Artificial Sequence: Synthetic oligonucleotide
ucuugggacaguccaguuc

SEQ ID NO: 667427 - RNA, 19 nt, Artificial Sequence
  Description of Artificial Sequence: Synthetic oligonucleotide
cuucgcacccauuuaaaca

SEQ ID NO: 667428 - RNA, 19 nt, Artificial Sequence
  Description of Artificial Sequence: Synthetic oligonucleotide
aggauuucugcgauauacg

SEQ ID NO: 667429 - RNA, 19 nt, Artificial Sequence
  Description of Artificial Sequence: Synthetic oligonucleotide
ucgggacacaguucaauga

SEQ ID NO: 667430 - RNA, 19 nt, Artificial Sequence
  Description of Artificial Sequence: Synthetic oligonucleotide
uuauuauaccauggcgggc

SEQ ID NO: 667431 - RNA, 19 nt, Artificial Sequence
  Description of Artificial Sequence: Synthetic oligonucleotide
cugauucuuugacuuuucc

SEQ ID NO: 667432 - RNA, 19 nt, Artificial Sequence
  Description of Artificial Sequence: Synthetic oligonucleotide
cugcgauauacguaagcug

SEQ ID NO: 667433 - RNA, 19 nt, Artificial Sequence
  Description of Artificial Sequence: Synthetic oligonucleotide
uaccauggcgggcauuuug

SEQ ID NO: 667434 - RNA, 19 nt, Artificial Sequence
  Description of Artificial Sequence: Synthetic oligonucleotide
gagaacauguuugaaggaa

SEQ ID NO: 667435 - RNA, 19 nt, Artificial Sequence
  Description of Artificial Sequence: Synthetic oligonucleotide
ccgaucagcaugaagcacg

SEQ ID NO: 667436 - RNA, 19 nt, Artificial Sequence
  Description of Artificial Sequence: Synthetic oligonucleotide
acacucacuaaguuuccga

SEQ ID NO: 667437 - RNA, 19 nt, Artificial Sequence
  Description of Artificial Sequence: Synthetic oligonucleotide
augucuauuauuacacaga

SEQ ID NO: 667438 - RNA, 19 nt, Artificial Sequence
  Description of Artificial Sequence: Synthetic oligonucleotide
guuugaaggaaucucacuu

SEQ ID NO: 667439 - RNA, 19 nt, Artificial Sequence
  Description of Artificial Sequence: Synthetic oligonucleotide
auaaucugacaggucacug

SEQ ID NO: 667440 - RNA, 19 nt, Artificial Sequence
  Description of Artificial Sequence: Synthetic oligonucleotide
gauccugcuuauuuacaga

SEQ ID NO: 667441 - RNA, 19 nt, Artificial Sequence
  Description of Artificial Sequence: Synthetic oligonucleotide
gcaauuaauguucuucgca

SEQ ID NO: 667442 - RNA, 19 nt, Artificial Sequence
  Description of Artificial Sequence: Synthetic oligonucleotide
ucaccauucucuucuguua

SEQ ID NO: 667443 - RNA, 19 nt, Artificial Sequence
  Description of Artificial Sequence: Synthetic oligonucleotide
uucgaacuaugggaaaucu

SEQ ID NO: 667444 - RNA, 19 nt, Artificial Sequence
  Description of Artificial Sequence: Synthetic oligonucleotide
ugccuuuguuuccuacaag

SEQ ID NO: 667445 - RNA, 19 nt, Artificial Sequence
  Description of Artificial Sequence: Synthetic oligonucleotide
gugaucuauagauuugaaa

SEQ ID NO: 667446 - RNA, 19 nt, Artificial Sequence
  Description of Artificial Sequence: Synthetic oligonucleotide
cucgggacacaguucaaug

SEQ ID NO: 667447 - RNA, 19 nt, Artificial Sequence
  Description of Artificial Sequence: Synthetic oligonucleotide
uccccauaaucugacaggu

SEQ ID NO: 667448 - RNA, 19 nt, Artificial Sequence
  Description of Artificial Sequence: Synthetic oligonucleotide
gaacauguuugaaggaauc

SEQ ID NO: 667449 - RNA, 19 nt, Artificial Sequence
  Description of Artificial Sequence: Synthetic oligonucleotide
uuccgauguaaauucugaa

SEQ ID NO: 667450 - RNA, 19 nt, Artificial Sequence
  Description of Artificial Sequence: Synthetic oligonucleotide
uuagagcuugccuuuuaua

SEQ ID NO: 667451 - RNA, 19 nt, Artificial Sequence
  Description of Artificial Sequence: Synthetic oligonucleotide
uguuaccucugcacuggug

SEQ ID NO: 667452 - RNA, 19 nt, Artificial Sequence
  Description of Artificial Sequence: Synthetic oligonucleotide
ugaauagaacuuagagcuu

SEQ ID NO: 667453 - RNA, 19 nt, Artificial Sequence
  Description of Artificial Sequence: Synthetic oligonucleotide
caccauucucuucuguuac

SEQ ID NO: 667454 - RNA, 19 nt, Artificial Sequence
  Description of Artificial Sequence: Synthetic oligonucleotide
uuccuucaagcaugcaugu

SEQ ID NO: 667455 - RNA, 19 nt, Artificial Sequence
  Description of Artificial Sequence: Synthetic oligonucleotide
uuucugcgauauacguaag

SEQ ID NO: 667456 - RNA, 19 nt, Artificial Sequence
  Description of Artificial Sequence: Synthetic oligonucleotide
agugaguucuuagcucggg

SEQ ID NO: 667457 - RNA, 19 nt, Artificial Sequence
  Description of Artificial Sequence: Synthetic oligonucleotide
cucacuaaguuuccgaugu

SEQ ID NO: 667458 - RNA, 19 nt, Artificial Sequence
  Description of Artificial Sequence: Synthetic oligonucleotide
acgugaguuccuucaagca

SEQ ID NO: 667459 - RNA, 19 nt, Artificial Sequence
  Description of Artificial Sequence: Synthetic oligonucleotide
agagcuugccuuuuauauu

SEQ ID NO: 667460 - RNA, 19 nt, Artificial Sequence
  Description of Artificial Sequence: Synthetic oligonucleotide
cuucaagacuuuuguugug

SEQ ID NO: 667461 - RNA, 19 nt, Artificial Sequence
  Description of Artificial Sequence: Synthetic oligonucleotide
caacuaauuguggaauuuc

SEQ ID NO: 667462 - RNA, 19 nt, Artificial Sequence
  Description of Artificial Sequence: Synthetic oligonucleotide
uucuucgcacccauuuaaa

SEQ ID NO: 667463 - RNA, 19 nt, Artificial Sequence
  Description of Artificial Sequence: Synthetic oligonucleotide
ucaggguuacucaguaauu

SEQ ID NO: 667464 - RNA, 19 nt, Artificial Sequence
  Description of Artificial Sequence: Synthetic oligonucleotide
cucuaugagcaguauuuca

SEQ ID NO: 667465 - RNA, 19 nt, Artificial Sequence
  Description of Artificial Sequence: Synthetic oligonucleotide
uccuaguugauggugccaa

SEQ ID NO: 667466 - RNA, 19 nt, Artificial Sequence
  Description of Artificial Sequence: Synthetic oligonucleotide
cuaugggaaaucuuuggua

SEQ ID NO: 667467 - RNA, 19 nt, Artificial Sequence
  Description of Artificial Sequence: Synthetic oligonucleotide
ccggaaagagcaauuaaug

SEQ ID NO: 667468 - RNA, 19 nt, Artificial Sequence
  Description of Artificial Sequence: Synthetic oligonucleotide
agacauuucucugaugguu

SEQ ID NO: 667469 - RNA, 19 nt, Artificial Sequence
  Description of Artificial Sequence: Synthetic oligonucleotide
ggagcauauguguaggcuc

SEQ ID NO: 667470 - RNA, 19 nt, Artificial Sequence
  Description of Artificial Sequence: Synthetic oligonucleotide
aagugaguucuuagcucgg

SEQ ID NO: 667471 - RNA, 19 nt, Artificial Sequence
  Description of Artificial Sequence: Synthetic oligonucleotide
gaauugauccaagugaguu

SEQ ID NO: 667472 - RNA, 19 nt, Artificial Sequence
  Description of Artificial Sequence: Synthetic oligonucleotide
gcuuauuggcucuuguuuc

SEQ ID NO: 667473 - RNA, 19 nt, Artificial Sequence
  Description of Artificial Sequence: Synthetic oligonucleotide
caucacgugaguuccuuca

SEQ ID NO: 667474 - RNA, 19 nt, Artificial Sequence
  Description of Artificial Sequence: Synthetic oligonucleotide
agugcuucgcucugacaca

SEQ ID NO: 667475 - RNA, 19 nt, Artificial Sequence
  Description of Artificial Sequence: Synthetic oligonucleotide
cuugggacaguccaguucu

SEQ ID NO: 667476 - RNA, 19 nt, Artificial Sequence
  Description of Artificial Sequence: Synthetic oligonucleotide
cuccucguaagaaggagca

SEQ ID NO: 667477 - RNA, 19 nt, Artificial Sequence
  Description of Artificial Sequence: Synthetic oligonucleotide
caggguuacucaguaauuc

SEQ ID NO: 667478 - RNA, 19 nt, Artificial Sequence
  Description of Artificial Sequence: Synthetic oligonucleotide
uccugcuuauuuacagaaa

SEQ ID NO: 667479 - RNA, 19 nt, Artificial Sequence
  Description of Artificial Sequence: Synthetic oligonucleotide
uucuuaguuucaaccccuc

SEQ ID NO: 667480 - RNA, 19 nt, Artificial Sequence
  Description of Artificial Sequence: Synthetic oligonucleotide
ucgaacuaugggaaaucuu

SEQ ID NO: 667481 - RNA, 19 nt, Artificial Sequence
  Description of Artificial Sequence: Synthetic oligonucleotide
cuagagggagguacgaaaa

SEQ ID NO: 667482 - RNA, 19 nt, Artificial Sequence
  Description of Artificial Sequence: Synthetic oligonucleotide
accaacuaauuguggaauu

SEQ ID NO: 667483 - RNA, 19 nt, Artificial Sequence
  Description of Artificial Sequence: Synthetic oligonucleotide
agaacauguuugaaggaau

SEQ ID NO: 667484 - RNA, 19 nt, Artificial Sequence
  Description of Artificial Sequence: Synthetic oligonucleotide
acacacucacuaaguuucc

SEQ ID NO: 667485 - RNA, 19 nt, Artificial Sequence
  Description of Artificial Sequence: Synthetic oligonucleotide
aggagcauauguguaggcu

SEQ ID NO: 667486 - RNA, 19 nt, Artificial Sequence
  Description of Artificial Sequence: Synthetic oligonucleotide
ccaauuucccauuuggcca

SEQ ID NO: 667487 - RNA, 19 nt, Artificial Sequence
  Description of Artificial Sequence: Synthetic oligonucleotide
cuuguagauuuaccuugac

SEQ ID NO: 667488 - RNA, 19 nt, Artificial Sequence
  Description of Artificial Sequence: Synthetic oligonucleotide
agcauauguguaggcucgc

SEQ ID NO: 667489 - RNA, 19 nt, Artificial Sequence
  Description of Artificial Sequence: Synthetic oligonucleotide
cauggcgggcauuuugcug

SEQ ID NO: 667490 - RNA, 19 nt, Artificial Sequence
  Description of Artificial Sequence: Synthetic oligonucleotide
gggacaguccaguucuuag

SEQ ID NO: 667491 - RNA, 19 nt, Artificial Sequence
  Description of Artificial Sequence: Synthetic oligonucleotide
cacaauaacuuuacaccaa

SEQ ID NO: 667492 - RNA, 19 nt, Artificial Sequence
  Description of Artificial Sequence: Synthetic oligonucleotide
uuccuacaagacacugcug

SEQ ID NO: 667493 - RNA, 19 nt, Artificial Sequence
  Description of Artificial Sequence: Synthetic oligonucleotide
cccgagaacauguuugaag

SEQ ID NO: 667494 - RNA, 19 nt, Artificial Sequence
  Description of Artificial Sequence: Synthetic oligonucleotide
aagcacggcucagccaagg

SEQ ID NO: 667495 - RNA, 19 nt, Artificial Sequence
  Description of Artificial Sequence: Synthetic oligonucleotide
accaauccguucuugccau

SEQ ID NO: 667496 - RNA, 19 nt, Artificial Sequence
  Description of Artificial Sequence: Synthetic oligonucleotide
ggcuugaucacaaauccca

SEQ ID NO: 667497 - RNA, 19 nt, Artificial Sequence
  Description of Artificial Sequence: Synthetic oligonucleotide
acuaaguuuccgauguaaa

SEQ ID NO: 667498 - RNA, 19 nt, Artificial Sequence
  Description of Artificial Sequence: Synthetic oligonucleotide
augauggguaauaccuguc

SEQ ID NO: 667499 - RNA, 19 nt, Artificial Sequence
  Description of Artificial Sequence: Synthetic oligonucleotide
ucacucagcucucgaaguu

SEQ ID NO: 667500 - RNA, 19 nt, Artificial Sequence
  Description of Artificial Sequence: Synthetic oligonucleotide
aacuagagggagguacgaa

SEQ ID NO: 667501 - RNA, 19 nt, Artificial Sequence
  Description of Artificial Sequence: Synthetic oligonucleotide
guagucaggagaagggcuc

SEQ ID NO: 667502 - RNA, 19 nt, Artificial Sequence
  Description of Artificial Sequence: Synthetic oligonucleotide
cuucgaacuaugggaaauc

SEQ ID NO: 667503 - RNA, 19 nt, Artificial Sequence
  Description of Artificial Sequence: Synthetic oligonucleotide
caauuucccauuuggccaa

SEQ ID NO: 667504 - RNA, 19 nt, Artificial Sequence
  Description of Artificial Sequence: Synthetic oligonucleotide
auaaagugcuucgcucuga

SEQ ID NO: 667505 - RNA, 19 nt, Artificial Sequence
  Description of Artificial Sequence: Synthetic oligonucleotide
gaagucucgaggaaguuuu

SEQ ID NO: 667506 - RNA, 19 nt, Artificial Sequence
  Description of Artificial Sequence: Synthetic oligonucleotide
aaggagcaucugguuaaug

SEQ ID NO: 667507 - RNA, 19 nt, Artificial Sequence
  Description of Artificial Sequence: Synthetic oligonucleotide
guaauaccugucccgcaga

SEQ ID NO: 667508 - RNA, 19 nt, Artificial Sequence
  Description of Artificial Sequence: Synthetic oligonucleotide
ucguaagaaggagcauaug

SEQ ID NO: 667509 - RNA, 19 nt, Artificial Sequence
  Description of Artificial Sequence: Synthetic oligonucleotide
cuugcagugccuugaauau

SEQ ID NO: 667510 - RNA, 19 nt, Artificial Sequence
  Description of Artificial Sequence: Synthetic oligonucleotide
gugaguucuuagcucggga

SEQ ID NO: 667511 - RNA, 19 nt, Artificial Sequence
  Description of Artificial Sequence: Synthetic oligonucleotide
gcucucuguacuccaacug

SEQ ID NO: 667512 - RNA, 19 nt, Artificial Sequence
  Description of Artificial Sequence: Synthetic oligonucleotide
agguccucuguggaaaaga

SEQ ID NO: 667513 - RNA, 19 nt, Artificial Sequence
  Description of Artificial Sequence: Synthetic oligonucleotide
auuauaccauggcgggcau

SEQ ID NO: 667514 - RNA, 19 nt, Artificial Sequence
  Description of Artificial Sequence: Synthetic oligonucleotide
cugauccugcuuauuuaca

SEQ ID NO: 667515 - RNA, 19 nt, Artificial Sequence
  Description of Artificial Sequence: Synthetic oligonucleotide
ggauuucugcgauauacgu

SEQ ID NO: 667516 - RNA, 19 nt, Artificial Sequence
  Description of Artificial Sequence: Synthetic oligonucleotide
gucuauuauuacacagaca

SEQ ID NO: 667517 - RNA, 19 nt, Artificial Sequence
  Description of Artificial Sequence: Synthetic oligonucleotide
ucccacugguaccuucuau

SEQ ID NO: 667518 - RNA, 19 nt, Artificial Sequence
  Description of Artificial Sequence: Synthetic oligonucleotide
ucacuaaguuuccgaugua

SEQ ID NO: 667519 - RNA, 19 nt, Artificial Sequence
  Description of Artificial Sequence: Synthetic oligonucleotide
uucaucacgugaguuccuu

SEQ ID NO: 667520 - RNA, 19 nt, Artificial Sequence
  Description of Artificial Sequence: Synthetic oligonucleotide
guuugugcagucucacacu

SEQ ID NO: 667521 - RNA, 19 nt, Artificial Sequence
  Description of Artificial Sequence: Synthetic oligonucleotide
gugcuucgcucugacacag

SEQ ID NO: 667522 - RNA, 19 nt, Artificial Sequence
  Description of Artificial Sequence: Synthetic oligonucleotide
ccauaaucugacaggucac

SEQ ID NO: 667523 - RNA, 19 nt, Artificial Sequence
  Description of Artificial Sequence: Synthetic oligonucleotide
ccucauacacauccgcuug

SEQ ID NO: 667524 - RNA, 19 nt, Artificial Sequence
  Description of Artificial Sequence: Synthetic oligonucleotide
acuuagagcuugccuuuua

SEQ ID NO: 667525 - RNA, 19 nt, Artificial Sequence
  Description of Artificial Sequence: Synthetic oligonucleotide
ccuucaagcaugcauguaa

SEQ ID NO: 667526 - RNA, 19 nt, Artificial Sequence
  Description of Artificial Sequence: Synthetic oligonucleotide
gagcaguauuucauccuuc

SEQ ID NO: 667527 - RNA, 19 nt, Artificial Sequence
  Description of Artificial Sequence: Synthetic oligonucleotide
caaccccuccaacuucuug

SEQ ID NO: 667528 - RNA, 19 nt, Artificial Sequence
  Description of Artificial Sequence: Synthetic oligonucleotide
cucugauccugcuuauuua

SEQ ID NO: 667529 - RNA, 19 nt, Artificial Sequence
  Description of Artificial Sequence: Synthetic oligonucleotide
ugcccagcuuugaauugau

SEQ ID NO: 667530 - RNA, 19 nt, Artificial Sequence
  Description of Artificial Sequence: Synthetic oligonucleotide
agcacucuucagguguucu

SEQ ID NO: 667531 - RNA, 19 nt, Artificial Sequence
  Description of Artificial Sequence: Synthetic oligonucleotide
uuauuggcucuuguuucuu

SEQ ID NO: 667532 - RNA, 19 nt, Artificial Sequence
  Description of Artificial Sequence: Synthetic oligonucleotide
ggguuacucaguaauucca

SEQ ID NO: 667533 - RNA, 19 nt, Artificial Sequence
  Description of Artificial Sequence: Synthetic oligonucleotide
cucguaagaaggagcauau

SEQ ID NO: 667534 - RNA, 19 nt, Artificial Sequence
  Description of Artificial Sequence: Synthetic oligonucleotide
acguaagcugagagacugg

SEQ ID NO: 667535 - RNA, 19 nt, Artificial Sequence
  Description of Artificial Sequence: Synthetic oligonucleotide
aucggguuuuggugcauuu

SEQ ID NO: 667536 - RNA, 19 nt, Artificial Sequence
  Description of Artificial Sequence: Synthetic oligonucleotide
ccaagcaucacacaacagu

SEQ ID NO: 667537 - RNA, 19 nt, Artificial Sequence
  Description of Artificial Sequence: Synthetic oligonucleotide
aucuccccgaucagcauga

SEQ ID NO: 667538 - RNA, 19 nt, Artificial Sequence
  Description of Artificial Sequence: Synthetic oligonucleotide
auacguaagcugagagacu

SEQ ID NO: 667539 - RNA, 19 nt, Artificial Sequence
  Description of Artificial Sequence: Synthetic oligonucleotide
uaccugucccgcagagccu

SEQ ID NO: 667540 - RNA, 19 nt, Artificial Sequence
  Description of Artificial Sequence: Synthetic oligonucleotide
cugaacaccucaaugccuu

SEQ ID NO: 667541 - RNA, 19 nt, Artificial Sequence
  Description of Artificial Sequence: Synthetic oligonucleotide
guaauuccacuacuggcuu

SEQ ID NO: 667542 - RNA, 19 nt, Artificial Sequence
  Description of Artificial Sequence: Synthetic oligonucleotide
auguguaggcucgcuugug

SEQ ID NO: 667543 - RNA, 19 nt, Artificial Sequence
  Description of Artificial Sequence: Synthetic oligonucleotide
uggugccaauuucccauuu

SEQ ID NO: 667544 - RNA, 19 nt, Artificial Sequence
  Description of Artificial Sequence: Synthetic oligonucleotide
ggucacugacgaugaauga

SEQ ID NO: 667545 - RNA, 19 nt, Artificial Sequence
  Description of Artificial Sequence: Synthetic oligonucleotide
gugaggauuucugcgauau

SEQ ID NO: 667546 - RNA, 19 nt, Artificial Sequence
  Description of Artificial Sequence: Synthetic oligonucleotide
gcaaagcuggcuugaucac

SEQ ID NO: 667547 - RNA, 19 nt, Artificial Sequence
  Description of Artificial Sequence: Synthetic oligonucleotide
gcgauauacguaagcugag

SEQ ID NO: 667548 - RNA, 19 nt, Artificial Sequence
  Description of Artificial Sequence: Synthetic oligonucleotide
auccuaguugauggugcca

SEQ ID NO: 667549 - RNA, 19 nt, Artificial Sequence
  Description of Artificial Sequence: Synthetic oligonucleotide
cguaagaaggagcauaugu

SEQ ID NO: 667550 - RNA, 19 nt, Artificial Sequence
  Description of Artificial Sequence: Synthetic oligonucleotide
ucgcacccauuuaaacauu

SEQ ID NO: 667551 - RNA, 19 nt, Artificial Sequence
  Description of Artificial Sequence: Synthetic oligonucleotide
ucggguuuuggugcauuuu

SEQ ID NO: 667552 - RNA, 19 nt, Artificial Sequence
  Description of Artificial Sequence: Synthetic oligonucleotide
gaagcacggcucagccaag

SEQ ID NO: 667553 - RNA, 19 nt, Artificial Sequence
  Description of Artificial Sequence: Synthetic oligonucleotide
gaucagcaugaagcacggc

SEQ ID NO: 667554 - RNA, 19 nt, Artificial Sequence
  Description of Artificial Sequence: Synthetic oligonucleotide
cacucacuaaguuuccgau

SEQ ID NO: 667555 - RNA, 19 nt, Artificial Sequence
  Description of Artificial Sequence: Synthetic oligonucleotide
cauaaucugacaggucacu

SEQ ID NO: 667556 - RNA, 19 nt, Artificial Sequence
  Description of Artificial Sequence: Synthetic oligonucleotide
cggguuuuggugcauuuug

SEQ ID NO: 667557 - RNA, 19 nt, Artificial Sequence
  Description of Artificial Sequence: Synthetic oligonucleotide
guaggcucgcuuguggugu

SEQ ID NO: 667558 - RNA, 19 nt, Artificial Sequence
  Description of Artificial Sequence: Synthetic oligonucleotide
uugauccaagugaguucuu

SEQ ID NO: 667559 - RNA, 19 nt, Artificial Sequence
  Description of Artificial Sequence: Synthetic oligonucleotide
ugcuucgcucugacacagu

SEQ ID NO: 667560 - RNA, 19 nt, Artificial Sequence
  Description of Artificial Sequence: Synthetic oligonucleotide
ugucccgcagagccucaua

SEQ ID NO: 667561 - RNA, 19 nt, Artificial Sequence
  Description of Artificial Sequence: Synthetic oligonucleotide
cucacacuugcccagcuuu

SEQ ID NO: 667562 - RNA, 19 nt, Artificial Sequence
  Description of Artificial Sequence: Synthetic oligonucleotide
uaucggguuuuggugcauu

SEQ ID NO: 667563 - RNA, 19 nt, Artificial Sequence
  Description of Artificial Sequence: Synthetic oligonucleotide
uccucguaagaaggagcau

SEQ ID NO: 667564 - RNA, 19 nt, Artificial Sequence
  Description of Artificial Sequence: Synthetic oligonucleotide
gcaugaagcacggcucagc

SEQ ID NO: 667565 - RNA, 19 nt, Artificial Sequence
  Description of Artificial Sequence: Synthetic oligonucleotide
cagguucucacaccaccaa

SEQ ID NO: 667566 - RNA, 19 nt, Artificial Sequence
  Description of Artificial Sequence: Synthetic oligonucleotide
guacuccaacugggcaagg

SEQ ID NO: 667567 - RNA, 19 nt, Artificial Sequence
  Description of Artificial Sequence: Synthetic oligonucleotide
acaccaccaauccguucuu

SEQ ID NO: 667568 - RNA, 19 nt, Artificial Sequence
  Description of Artificial Sequence: Synthetic oligonucleotide
aggugcuuauuggcucuug

SEQ ID NO: 667569 - RNA, 19 nt, Artificial Sequence
  Description of Artificial Sequence: Synthetic oligonucleotide
uuaucggguuuuggugcau

SEQ ID NO: 667570 - RNA, 19 nt, Artificial Sequence
  Description of Artificial Sequence: Synthetic oligonucleotide
cuuagucuccugacucugu

SEQ ID NO: 667571 - RNA, 19 nt, Artificial Sequence
  Description of Artificial Sequence: Synthetic oligonucleotide
cugaagaucugugcauucu

SEQ ID NO: 667572 - RNA, 19 nt, Artificial Sequence
  Description of Artificial Sequence: Synthetic oligonucleotide
ggauauccuucgaagggaa

SEQ ID NO: 667573 - RNA, 19 nt, Artificial Sequence
  Description of Artificial Sequence: Synthetic oligonucleotide
ccuacaagacacugcugga

SEQ ID NO: 667574 - RNA, 19 nt, Artificial Sequence
  Description of Artificial Sequence: Synthetic oligonucleotide
cgaacuaugggaaaucuuu

SEQ ID NO: 667575 - RNA, 19 nt, Artificial Sequence
  Description of Artificial Sequence: Synthetic oligonucleotide
ggacacacucacuaaguuu

SEQ ID NO: 667576 - RNA, 19 nt, Artificial Sequence
  Description of Artificial Sequence: Synthetic oligonucleotide
gugcuuauuggcucuuguu

SEQ ID NO: 667577 - RNA, 19 nt, Artificial Sequence
  Description of Artificial Sequence: Synthetic oligonucleotide
ggguaauaccugucccgca

SEQ ID NO: 667578 - RNA, 19 nt, Artificial Sequence
  Description of Artificial Sequence: Synthetic oligonucleotide
caccaacuaauuguggaau

SEQ ID NO: 667579 - RNA, 19 nt, Artificial Sequence
  Description of Artificial Sequence: Synthetic oligonucleotide
acaaggcucugaaguguau

SEQ ID NO: 667580 - RNA, 19 nt, Artificial Sequence
  Description of Artificial Sequence: Synthetic oligonucleotide
ccagaacccgagaacaugu

SEQ ID NO: 667581 - RNA, 19 nt, Artificial Sequence
  Description of Artificial Sequence: Synthetic oligonucleotide
caauccguucuugccaugu

SEQ ID NO: 667582 - RNA, 19 nt, Artificial Sequence
  Description of Artificial Sequence: Synthetic oligonucleotide
gcgggcauuuugcugucca

SEQ ID NO: 667583 - RNA, 19 nt, Artificial Sequence
  Description of Artificial Sequence: Synthetic oligonucleotide
acccgagaacauguuugaa

SEQ ID NO: 667584 - RNA, 19 nt, Artificial Sequence
  Description of Artificial Sequence: Synthetic oligonucleotide
cggaaagagcaauuaaugu

SEQ ID NO: 667585 - RNA, 19 nt, Artificial Sequence
  Description of Artificial Sequence: Synthetic oligonucleotide
uaggcucgcuugugguguu

SEQ ID NO: 667586 - RNA, 19 nt, Artificial Sequence
  Description of Artificial Sequence: Synthetic oligonucleotide
cugacucugugcuucgcuu

SEQ ID NO: 667587 - RNA, 19 nt, Artificial Sequence
  Description of Artificial Sequence: Synthetic oligonucleotide
gaaguguaucuggaauguu

SEQ ID NO: 667588 - RNA, 19 nt, Artificial Sequence
  Description of Artificial Sequence: Synthetic oligonucleotide
aggcucgcuugugguguuc

SEQ ID NO: 667589 - RNA, 19 nt, Artificial Sequence
  Description of Artificial Sequence: Synthetic oligonucleotide
cccggaaagagcaauuaau

SEQ ID NO: 667590 - RNA, 19 nt, Artificial Sequence
  Description of Artificial Sequence: Synthetic oligonucleotide
ccucguaagaaggagcaua

SEQ ID NO: 667591 - RNA, 19 nt, Artificial Sequence
  Description of Artificial Sequence: Synthetic oligonucleotide
gccauguguagcugaagau

SEQ ID NO: 667592 - RNA, 19 nt, Artificial Sequence
  Description of Artificial Sequence: Synthetic oligonucleotide
cuucaucacgugaguuccu

SEQ ID NO: 667593 - RNA, 19 nt, Artificial Sequence
  Description of Artificial Sequence: Synthetic oligonucleotide
gcuucgaacuaugggaaau

SEQ ID NO: 667594 - RNA, 19 nt, Artificial Sequence
  Description of Artificial Sequence: Synthetic oligonucleotide
gccucauacacauccgcuu

SEQ ID NO: 667595 - RNA, 19 nt, Artificial Sequence
  Description of Artificial Sequence: Synthetic oligonucleotide
auaccauggcgggcauuuu

SEQ ID NO: 667596 - RNA, 19 nt, Artificial Sequence
  Description of Artificial Sequence: Synthetic oligonucleotide
cgauauacguaagcugaga

SEQ ID NO: 667597 - RNA, 19 nt, Artificial Sequence
  Description of Artificial Sequence: Synthetic oligonucleotide
ggcucgcuugugguguuca

SEQ ID NO: 667598 - RNA, 19 nt, Artificial Sequence
  Description of Artificial Sequence: Synthetic oligonucleotide
cagaaacuagagggaggua

SEQ ID NO: 667599 - RNA, 19 nt, Artificial Sequence
  Description of Artificial Sequence: Synthetic oligonucleotide
cuguuaccucugcacuggu

SEQ ID NO: 667600 - RNA, 19 nt, Artificial Sequence
  Description of Artificial Sequence: Synthetic oligonucleotide
ccaacuaauuguggaauuu

SEQ ID NO: 667601 - RNA, 19 nt, Artificial Sequence
  Description of Artificial Sequence: Synthetic oligonucleotide
ccauggcgggcauuuugcu

SEQ ID NO: 667602 - RNA, 19 nt, Artificial Sequence
  Description of Artificial Sequence: Synthetic oligonucleotide
ccuaguugauggugccaau

SEQ ID NO: 667603 - RNA, 19 nt, Artificial Sequence
  Description of Artificial Sequence: Synthetic oligonucleotide
gcucgcuugugguguucau

SEQ ID NO: 667604 - RNA, 19 nt, Artificial Sequence
  Description of Artificial Sequence: Synthetic oligonucleotide
uuuguuauagauccuagcc

SEQ ID NO: 667605 - RNA, 19 nt, Artificial Sequence
  Description of Artificial Sequence: Synthetic oligonucleotide
aaagccuauaucuauagcu

SEQ ID NO: 667606 - RNA, 19 nt, Artificial Sequence
  Description of Artificial Sequence: Synthetic oligonucleotide
uauuguuuacacaauagca

SEQ ID NO: 667607 - RNA, 19 nt, Artificial Sequence
  Description of Artificial Sequence: Synthetic oligonucleotide
auuaguauuguuuacacaa

SEQ ID NO: 667608 - RNA, 19 nt, Artificial Sequence
  Description of Artificial Sequence: Synthetic oligonucleotide
aaacacgauauguaacccc

SEQ ID NO: 667609 - RNA, 19 nt, Artificial Sequence
  Description of Artificial Sequence: Synthetic oligonucleotide
uuuaguacagcaaagcaaa

SEQ ID NO: 667610 - RNA, 19 nt, Artificial Sequence
  Description of Artificial Sequence: Synthetic oligonucleotide
acaauugaaacuuuucaag

SEQ ID NO: 667611 - RNA, 19 nt, Artificial Sequence
  Description of Artificial Sequence: Synthetic oligonucleotide
aacucuuauagcaaaguac

SEQ ID NO: 667612 - RNA, 19 nt, Artificial Sequence
  Description of Artificial Sequence: Synthetic oligonucleotide
ucaaacacgauauguaacc

SEQ ID NO: 667613 - RNA, 19 nt, Artificial Sequence
  Description of Artificial Sequence: Synthetic oligonucleotide
auagcuauaugcuauauau

SEQ ID NO: 667614 - RNA, 19 nt, Artificial Sequence
  Description of Artificial Sequence: Synthetic oligonucleotide
aaaagccuauaucuauagc

SEQ ID NO: 667615 - RNA, 19 nt, Artificial Sequence
  Description of Artificial Sequence: Synthetic oligonucleotide
auaaagaugaagcuuagaa

SEQ ID NO: 667616 - RNA, 19 nt, Artificial Sequence
  Description of Artificial Sequence: Synthetic oligonucleotide
acaaauaucaaacacgaua

SEQ ID NO: 667617 - RNA, 19 nt, Artificial Sequence
  Description of Artificial Sequence: Synthetic oligonucleotide
cuuccgaacgcuuagggcg

SEQ ID NO: 667618 - RNA, 19 nt, Artificial Sequence
  Description of Artificial Sequence: Synthetic oligonucleotide
uuacuaaugaauucccuca

SEQ ID NO: 667619 - RNA, 19 nt, Artificial Sequence
  Description of Artificial Sequence: Synthetic oligonucleotide
acacgaauggaacuggaac

SEQ ID NO: 667620 - RNA, 19 nt, Artificial Sequence
  Description of Artificial Sequence: Synthetic oligonucleotide
uuugguauaggcagcuuag

SEQ ID NO: 667621 - RNA, 19 nt, Artificial Sequence
  Description of Artificial Sequence: Synthetic oligonucleotide
aucaaggaccacuagcucg

SEQ ID NO: 667622 - RNA, 19 nt, Artificial Sequence
  Description of Artificial Sequence: Synthetic oligonucleotide
uagauccuagccaugaacc

SEQ ID NO: 667623 - RNA, 19 nt, Artificial Sequence
  Description of Artificial Sequence: Synthetic oligonucleotide
uucgaugugagaucgcggg

SEQ ID NO: 667624 - RNA, 19 nt, Artificial Sequence
  Description of Artificial Sequence: Synthetic oligonucleotide
uagaucacuuuacugauga

SEQ ID NO: 667625 - RNA, 19 nt, Artificial Sequence
  Description of Artificial Sequence: Synthetic oligonucleotide
uucuuuacuaaugaauucc

SEQ ID NO: 667626 - RNA, 19 nt, Artificial Sequence
  Description of Artificial Sequence: Synthetic oligonucleotide
uugacuugcucucuaaucu

SEQ ID NO: 667627 - RNA, 19 nt, Artificial Sequence
  Description of Artificial Sequence: Synthetic oligonucleotide
auuaggaaguuguugccgg

SEQ ID NO: 667628 - RNA, 19 nt, Artificial Sequence
  Description of Artificial Sequence: Synthetic oligonucleotide
auagauccuagccaugaac

SEQ ID NO: 667629 - RNA, 19 nt, Artificial Sequence
  Description of Artificial Sequence: Synthetic oligonucleotide
ugauuuaucacaccuuuau

SEQ ID NO: 667630 - RNA, 19 nt, Artificial Sequence
  Description of Artificial Sequence: Synthetic oligonucleotide
gaaaagccuauaucuauag

SEQ ID NO: 667631 - RNA, 19 nt, Artificial Sequence
  Description of Artificial Sequence: Synthetic oligonucleotide
aaauacacgaauggaacug

SEQ ID NO: 667632 - RNA, 19 nt, Artificial Sequence
  Description of Artificial Sequence: Synthetic oligonucleotide
uuguuauagauccuagcca

SEQ ID NO: 667633 - RNA, 19 nt, Artificial Sequence
  Description of Artificial Sequence: Synthetic oligonucleotide
acaagauggaaagaauccc

SEQ ID NO: 667634 - RNA, 19 nt, Artificial Sequence
  Description of Artificial Sequence: Synthetic oligonucleotide
agcuagaucacuuuacuga

SEQ ID NO: 667635 - RNA, 19 nt, Artificial Sequence
  Description of Artificial Sequence: Synthetic oligonucleotide
uguuauagauccuagccau

SEQ ID NO: 667636 - RNA, 19 nt, Artificial Sequence
  Description of Artificial Sequence: Synthetic oligonucleotide
aauacacgaauggaacugg

SEQ ID NO: 667637 - RNA, 19 nt, Artificial Sequence
  Description of Artificial Sequence: Synthetic oligonucleotide
aguugaauccaucagcaga

SEQ ID NO: 667638 - RNA, 19 nt, Artificial Sequence
  Description of Artificial Sequence: Synthetic oligonucleotide
accgauguaauacagaauu

SEQ ID NO: 667639 - RNA, 19 nt, Artificial Sequence
  Description of Artificial Sequence: Synthetic oligonucleotide
agcuauaugcuauauauua

SEQ ID NO: 667640 - RNA, 19 nt, Artificial Sequence
  Description of Artificial Sequence: Synthetic oligonucleotide
acaauuuagugcuuuguca

SEQ ID NO: 667641 - RNA, 19 nt, Artificial Sequence
  Description of Artificial Sequence: Synthetic oligonucleotide
cauaggaucuuuguuauag

SEQ ID NO: 667642 - RNA, 19 nt, Artificial Sequence
  Description of Artificial Sequence: Synthetic oligonucleotide
ucuuuguuauagauccuag

SEQ ID NO: 667643 - RNA, 19 nt, Artificial Sequence
  Description of Artificial Sequence: Synthetic oligonucleotide
uuagggugcgagcagcacg

SEQ ID NO: 667644 - RNA, 19 nt, Artificial Sequence
  Description of Artificial Sequence: Synthetic oligonucleotide
ucgcaaacugucuauguag

SEQ ID NO: 667645 - RNA, 19 nt, Artificial Sequence
  Description of Artificial Sequence: Synthetic oligonucleotide
cuucuagcccaucauaggg

SEQ ID NO: 667646 - RNA, 19 nt, Artificial Sequence
  Description of Artificial Sequence: Synthetic oligonucleotide
uuauaaagaugaagcuuag

SEQ ID NO: 667647 - RNA, 19 nt, Artificial Sequence
  Description of Artificial Sequence: Synthetic oligonucleotide
accgagagaagucucuucg

SEQ ID NO: 667648 - RNA, 19 nt, Artificial Sequence
  Description of Artificial Sequence: Synthetic oligonucleotide
auuauaaagaugaagcuua

SEQ ID NO: 667649 - RNA, 19 nt, Artificial Sequence
  Description of Artificial Sequence: Synthetic oligonucleotide
uuuaacaucugaagcuaga

SEQ ID NO: 667650 - RNA, 19 nt, Artificial Sequence
  Description of Artificial Sequence: Synthetic oligonucleotide
aauaucagcuucccuggcu

SEQ ID NO: 667651 - RNA, 19 nt, Artificial Sequence
  Description of Artificial Sequence: Synthetic oligonucleotide
gauggaaagaaucccaaaa

SEQ ID NO: 667652 - RNA, 19 nt, Artificial Sequence
  Description of Artificial Sequence: Synthetic oligonucleotide
auauuuguuuaacaucuga

SEQ ID NO: 667653 - RNA, 19 nt, Artificial Sequence
  Description of Artificial Sequence: Synthetic oligonucleotide
ucgucugaggaucucgggg

SEQ ID NO: 667654 - RNA, 19 nt, Artificial Sequence
  Description of Artificial Sequence: Synthetic oligonucleotide
ucuuauagcaaaguacaac

SEQ ID NO: 667655 - RNA, 19 nt, Artificial Sequence
  Description of Artificial Sequence: Synthetic oligonucleotide
uguuuacacaauagcagac

SEQ ID NO: 667656 - RNA, 19 nt, Artificial Sequence
  Description of Artificial Sequence: Synthetic oligonucleotide
ucagauuccuuaaucgggu

SEQ ID NO: 667657 - RNA, 19 nt, Artificial Sequence
  Description of Artificial Sequence: Synthetic oligonucleotide
ucuuucacgcugcaccccg

SEQ ID NO: 667658 - RNA, 19 nt, Artificial Sequence
  Description of Artificial Sequence: Synthetic oligonucleotide
cucggugccguacacaugg

SEQ ID NO: 667659 - RNA, 19 nt, Artificial Sequence
  Description of Artificial Sequence: Synthetic oligonucleotide
aguuaugggccuguagucc

SEQ ID NO: 667660 - RNA, 19 nt, Artificial Sequence
  Description of Artificial Sequence: Synthetic oligonucleotide
agauuccuuaaucggguac

SEQ ID NO: 667661 - RNA, 19 nt, Artificial Sequence
  Description of Artificial Sequence: Synthetic oligonucleotide
aagcuuagaaccugcauua

SEQ ID NO: 667662 - RNA, 19 nt, Artificial Sequence
  Description of Artificial Sequence: Synthetic oligonucleotide
caacaagauggaaagaauc

SEQ ID NO: 667663 - RNA, 19 nt, Artificial Sequence
  Description of Artificial Sequence: Synthetic oligonucleotide
acauuuuacaacacuauca

SEQ ID NO: 667664 - RNA, 19 nt, Artificial Sequence
  Description of Artificial Sequence: Synthetic oligonucleotide
cuuuguuauagauccuagc

SEQ ID NO: 667665 - RNA, 19 nt, Artificial Sequence
  Description of Artificial Sequence: Synthetic oligonucleotide
gaauggggagaauauuuug

SEQ ID NO: 667666 - RNA, 19 nt, Artificial Sequence
  Description of Artificial Sequence: Synthetic oligonucleotide
cauuguauugcucuggcca

SEQ ID NO: 667667 - RNA, 19 nt, Artificial Sequence
  Description of Artificial Sequence: Synthetic oligonucleotide
aacucuaccgagagaaguc

SEQ ID NO: 667668 - RNA, 19 nt, Artificial Sequence
  Description of Artificial Sequence: Synthetic oligonucleotide
uuucgaugugagaucgcgg

SEQ ID NO: 667669 - RNA, 19 nt, Artificial Sequence
  Description of Artificial Sequence: Synthetic oligonucleotide
aguaaaacucauacucuac

SEQ ID NO: 667670 - RNA, 19 nt, Artificial Sequence
  Description of Artificial Sequence: Synthetic oligonucleotide
acucuacagguccacaguc

SEQ ID NO: 667671 - RNA, 19 nt, Artificial Sequence
  Description of Artificial Sequence: Synthetic oligonucleotide
auaucucagggcuuucauc

SEQ ID NO: 667672 - RNA, 19 nt, Artificial Sequence
  Description of Artificial Sequence: Synthetic oligonucleotide
augguaauggaguuggaau

SEQ ID NO: 667673 - RNA, 19 nt, Artificial Sequence
  Description of Artificial Sequence: Synthetic oligonucleotide
acgcuuagggcguacagag

SEQ ID NO: 667674 - RNA, 19 nt, Artificial Sequence
  Description of Artificial Sequence: Synthetic oligonucleotide
auacucuacagguccacag

SEQ ID NO: 667675 - RNA, 19 nt, Artificial Sequence
  Description of Artificial Sequence: Synthetic oligonucleotide
uuggguugccauuucagga

SEQ ID NO: 667676 - RNA, 19 nt, Artificial Sequence
  Description of Artificial Sequence: Synthetic oligonucleotide
aucaaacacgauauguaac

SEQ ID NO: 667677 - RNA, 19 nt, Artificial Sequence
  Description of Artificial Sequence: Synthetic oligonucleotide
cuagccaugaaccucagaa

SEQ ID NO: 667678 - RNA, 19 nt, Artificial Sequence
  Description of Artificial Sequence: Synthetic oligonucleotide
uucuagcccaucauagggc

SEQ ID NO: 667679 - RNA, 19 nt, Artificial Sequence
  Description of Artificial Sequence: Synthetic oligonucleotide
aggcagcuuaguugaaucc

SEQ ID NO: 667680 - RNA, 19 nt, Artificial Sequence
  Description of Artificial Sequence: Synthetic oligonucleotide
auucgggccacauaucuca

SEQ ID NO: 667681 - RNA, 19 nt, Artificial Sequence
  Description of Artificial Sequence: Synthetic oligonucleotide
aggcccauaaugguaaugg

SEQ ID NO: 667682 - RNA, 19 nt, Artificial Sequence
  Description of Artificial Sequence: Synthetic oligonucleotide
uguggcgauauucuuuacu

SEQ ID NO: 667683 - RNA, 19 nt, Artificial Sequence
  Description of Artificial Sequence: Synthetic oligonucleotide
ucuagcccaucauagggca

SEQ ID NO: 667684 - RNA, 19 nt, Artificial Sequence
  Description of Artificial Sequence: Synthetic oligonucleotide
guuucgaugugagaucgcg

SEQ ID NO: 667685 - RNA, 19 nt, Artificial Sequence
  Description of Artificial Sequence: Synthetic oligonucleotide
acgaauggaacuggaacac

SEQ ID NO: 667686 - RNA, 19 nt, Artificial Sequence
  Description of Artificial Sequence: Synthetic oligonucleotide
guagcgcuggcucaaauac

SEQ ID NO: 667687 - RNA, 19 nt, Artificial Sequence
  Description of Artificial Sequence: Synthetic oligonucleotide
agcuuaguugaauccauca

SEQ ID NO: 667688 - RNA, 19 nt, Artificial Sequence
  Description of Artificial Sequence: Synthetic oligonucleotide
acagguucaugccagcuga

SEQ ID NO: 667689 - RNA, 19 nt, Artificial Sequence
  Description of Artificial Sequence: Synthetic oligonucleotide
uauagcuauaugcuauaua

SEQ ID NO: 667690 - RNA, 19 nt, Artificial Sequence
  Description of Artificial Sequence: Synthetic oligonucleotide
cuugacuugcucucuaauc

SEQ ID NO: 667691 - RNA, 19 nt, Artificial Sequence
  Description of Artificial Sequence: Synthetic oligonucleotide
caaauaucaaacacgauau

SEQ ID NO: 667692 - RNA, 19 nt, Artificial Sequence
  Description of Artificial Sequence: Synthetic oligonucleotide
aaucgccagagcaucuccc

SEQ ID NO: 667693 - RNA, 19 nt, Artificial Sequence
  Description of Artificial Sequence: Synthetic oligonucleotide
uuaguauuguuuacacaau

SEQ ID NO: 667694 - RNA, 19 nt, Artificial Sequence
  Description of Artificial Sequence: Synthetic oligonucleotide
uuaggaaguuguugccggg

SEQ ID NO: 667695 - RNA, 19 nt, Artificial Sequence
  Description of Artificial Sequence: Synthetic oligonucleotide
ugaaccucagaauuuucau

SEQ ID NO: 667696 - RNA, 19 nt, Artificial Sequence
  Description of Artificial Sequence: Synthetic oligonucleotide
ccagacaaaaucauacugc

SEQ ID NO: 667697 - RNA, 19 nt, Artificial Sequence
  Description of Artificial Sequence: Synthetic oligonucleotide
ucuaccgagagaagucucu

SEQ ID NO: 667698 - RNA, 19 nt, Artificial Sequence
  Description of Artificial Sequence: Synthetic oligonucleotide
auaccugcagguaaucacg

SEQ ID NO: 667699 - RNA, 19 nt, Artificial Sequence
  Description of Artificial Sequence: Synthetic oligonucleotide
ucuaggaccccagacaaaa

SEQ ID NO: 667700 - RNA, 19 nt, Artificial Sequence
  Description of Artificial Sequence: Synthetic oligonucleotide
auagcagacagaaagggaa

SEQ ID NO: 667701 - RNA, 19 nt, Artificial Sequence
  Description of Artificial Sequence: Synthetic oligonucleotide
cccaguaaaacucauacuc

SEQ ID NO: 667702 - RNA, 19 nt, Artificial Sequence
  Description of Artificial Sequence: Synthetic oligonucleotide
uccauaggaucuuuguuau

SEQ ID NO: 667703 - RNA, 19 nt, Artificial Sequence
  Description of Artificial Sequence: Synthetic oligonucleotide
auuacuggacaauauuauu

SEQ ID NO: 667704 - RNA, 19 nt, Artificial Sequence
  Description of Artificial Sequence: Synthetic oligonucleotide
uguuuaacaucugaagcua

SEQ ID NO: 667705 - RNA, 19 nt, Artificial Sequence
  Description of Artificial Sequence: Synthetic oligonucleotide
ugguaauggaguuggaauu

SEQ ID NO: 667706 - RNA, 19 nt, Artificial Sequence
  Description of Artificial Sequence: Synthetic oligonucleotide
cagagagccuucuuucacg

SEQ ID NO: 667707 - RNA, 19 nt, Artificial Sequence
  Description of Artificial Sequence: Synthetic oligonucleotide
acacgaacucuaccgagag

SEQ ID NO: 667708 - RNA, 19 nt, Artificial Sequence
  Description of Artificial Sequence: Synthetic oligonucleotide
acgaacucuaccgagagaa

SEQ ID NO: 667709 - RNA, 19 nt, Artificial Sequence
  Description of Artificial Sequence: Synthetic oligonucleotide
cuuaaucggguacuuggac

SEQ ID NO: 667710 - RNA, 19 nt, Artificial Sequence
  Description of Artificial Sequence: Synthetic oligonucleotide
aacaagaacuaaauaugaa

SEQ ID NO: 667711 - RNA, 19 nt, Artificial Sequence
  Description of Artificial Sequence: Synthetic oligonucleotide
guucaugccagcugaagca

SEQ ID NO: 667712 - RNA, 19 nt, Artificial Sequence
  Description of Artificial Sequence: Synthetic oligonucleotide
aguucaaaccuaaaaugca

SEQ ID NO: 667713 - RNA, 19 nt, Artificial Sequence
  Description of Artificial Sequence: Synthetic oligonucleotide
caugccagcugaagcaccg

SEQ ID NO: 667714 - RNA, 19 nt, Artificial Sequence
  Description of Artificial Sequence: Synthetic oligonucleotide
uuagaaccugcauuaggaa

SEQ ID NO: 667715 - RNA, 19 nt, Artificial Sequence
  Description of Artificial Sequence: Synthetic oligonucleotide
auugcggaagcgccacggc

SEQ ID NO: 667716 - RNA, 19 nt, Artificial Sequence
  Description of Artificial Sequence: Synthetic oligonucleotide
agaagucucuucggguucc

SEQ ID NO: 667717 - RNA, 19 nt, Artificial Sequence
  Description of Artificial Sequence: Synthetic oligonucleotide
agaaauaacuggaccagcu

SEQ ID NO: 667718 - RNA, 19 nt, Artificial Sequence
  Description of Artificial Sequence: Synthetic oligonucleotide
caguuuguugagcaggaug

SEQ ID NO: 667719 - RNA, 19 nt, Artificial Sequence
  Description of Artificial Sequence: Synthetic oligonucleotide
ugaauccaucagcagaaau

SEQ ID NO: 667720 - RNA, 19 nt, Artificial Sequence
  Description of Artificial Sequence: Synthetic oligonucleotide
ugaagcuuagaaccugcau

SEQ ID NO: 667721 - RNA, 19 nt, Artificial Sequence
  Description of Artificial Sequence: Synthetic oligonucleotide
cucucgaccgauguaauac

SEQ ID NO: 667722 - RNA, 19 nt, Artificial Sequence
  Description of Artificial Sequence: Synthetic oligonucleotide
uacucuacagguccacagu

SEQ ID NO: 667723 - RNA, 19 nt, Artificial Sequence
  Description of Artificial Sequence: Synthetic oligonucleotide
caugguuuagggugcgagc

SEQ ID NO: 667724 - RNA, 19 nt, Artificial Sequence
  Description of Artificial Sequence: Synthetic oligonucleotide
uggggauaucuucuagccc

SEQ ID NO: 667725 - RNA, 19 nt, Artificial Sequence
  Description of Artificial Sequence: Synthetic oligonucleotide
uagggugcgagcagcacga

SEQ ID NO: 667726 - RNA, 19 nt, Artificial Sequence
  Description of Artificial Sequence: Synthetic oligonucleotide
ucacgcugcaccccgaauc

SEQ ID NO: 667727 - RNA, 19 nt, Artificial Sequence
  Description of Artificial Sequence: Synthetic oligonucleotide
ucuauagcuauaugcuaua

SEQ ID NO: 667728 - RNA, 19 nt, Artificial Sequence
  Description of Artificial Sequence: Synthetic oligonucleotide
gauaccaaacaagaacuaa

SEQ ID NO: 667729 - RNA, 19 nt, Artificial Sequence
  Description of Artificial Sequence: Synthetic oligonucleotide
uuagggcguacagagggag

SEQ ID NO: 667730 - RNA, 19 nt, Artificial Sequence
  Description of Artificial Sequence: Synthetic oligonucleotide
agagcaacgugggcggugc

SEQ ID NO: 667731 - RNA, 19 nt, Artificial Sequence
  Description of Artificial Sequence: Synthetic oligonucleotide
agcggcaguggacauugcg

SEQ ID NO: 667732 - RNA, 19 nt, Artificial Sequence
  Description of Artificial Sequence: Synthetic oligonucleotide
ggggauaucuucuagccca

SEQ ID NO: 667733 - RNA, 19 nt, Artificial Sequence
  Description of Artificial Sequence: Synthetic oligonucleotide
gaagcuuagaaccugcauu

SEQ ID NO: 667734 - RNA, 19 nt, Artificial Sequence
  Description of Artificial Sequence: Synthetic oligonucleotide
agagcaucucccaaauauc

SEQ ID NO: 667735 - RNA, 19 nt, Artificial Sequence
  Description of Artificial Sequence: Synthetic oligonucleotide
caagcgggcucuaggaccc

SEQ ID NO: 667736 - RNA, 19 nt, Artificial Sequence
  Description of Artificial Sequence: Synthetic oligonucleotide
agauccuagccaugaaccu

SEQ ID NO: 667737 - RNA, 19 nt, Artificial Sequence
  Description of Artificial Sequence: Synthetic oligonucleotide
gaugugagaucgcgggccc

SEQ ID NO: 667738 - RNA, 19 nt, Artificial Sequence
  Description of Artificial Sequence: Synthetic oligonucleotide
ucgggaacucgcaaacugu

SEQ ID NO: 667739 - RNA, 19 nt, Artificial Sequence
  Description of Artificial Sequence: Synthetic oligonucleotide
aucuauagcuauaugcuau

SEQ ID NO: 667740 - RNA, 19 nt, Artificial Sequence
  Description of Artificial Sequence: Synthetic oligonucleotide
uacacgaauggaacuggaa

SEQ ID NO: 667741 - RNA, 19 nt, Artificial Sequence
  Description of Artificial Sequence: Synthetic oligonucleotide
gaacgcuuagggcguacag

SEQ ID NO: 667742 - RNA, 19 nt, Artificial Sequence
  Description of Artificial Sequence: Synthetic oligonucleotide
ucucgaccgauguaauaca

SEQ ID NO: 667743 - RNA, 19 nt, Artificial Sequence
  Description of Artificial Sequence: Synthetic oligonucleotide
auaggaucuuuguuauaga

SEQ ID NO: 667744 - RNA, 19 nt, Artificial Sequence
  Description of Artificial Sequence: Synthetic oligonucleotide
agacugccgacucccgggc

SEQ ID NO: 667745 - RNA, 19 nt, Artificial Sequence
  Description of Artificial Sequence: Synthetic oligonucleotide
aagccuauaucuauagcua

SEQ ID NO: 667746 - RNA, 19 nt, Artificial Sequence
  Description of Artificial Sequence: Synthetic oligonucleotide
aacgcuuagggcguacaga

SEQ ID NO: 667747 - RNA, 19 nt, Artificial Sequence
  Description of Artificial Sequence: Synthetic oligonucleotide
ggagaauauuuugagagca

SEQ ID NO: 667748 - RNA, 19 nt, Artificial Sequence
  Description of Artificial Sequence: Synthetic oligonucleotide
cagacugccgacucccggg

SEQ ID NO: 667749 - RNA, 19 nt, Artificial Sequence
  Description of Artificial Sequence: Synthetic oligonucleotide
ugguuuagggugcgagcag

SEQ ID NO: 667750 - RNA, 19 nt, Artificial Sequence
  Description of Artificial Sequence: Synthetic oligonucleotide
cucgaccgauguaauacag

SEQ ID NO: 667751 - RNA, 19 nt, Artificial Sequence
  Description of Artificial Sequence: Synthetic oligonucleotide
acaugguuuagggugcgag

SEQ ID NO: 667752 - RNA, 19 nt, Artificial Sequence
  Description of Artificial Sequence: Synthetic oligonucleotide
uugcggaagcgccacggcc

SEQ ID NO: 667753 - RNA, 19 nt, Artificial Sequence
  Description of Artificial Sequence: Synthetic oligonucleotide
aacucgcaaacugucuaug

SEQ ID NO: 667754 - RNA, 19 nt, Artificial Sequence
  Description of Artificial Sequence: Synthetic oligonucleotide
cauaggauccugaggcuuc

SEQ ID NO: 667755 - RNA, 19 nt, Artificial Sequence
  Description of Artificial Sequence: Synthetic oligonucleotide
gagcaucucccaaauauca

SEQ ID NO: 667756 - RNA, 19 nt, Artificial Sequence
  Description of Artificial Sequence: Synthetic oligonucleotide
cucucuaaucuugacucag

SEQ ID NO: 667757 - RNA, 19 nt, Artificial Sequence
  Description of Artificial Sequence: Synthetic oligonucleotide
cacgcugcaccccgaaucg

SEQ ID NO: 667758 - RNA, 19 nt, Artificial Sequence
  Description of Artificial Sequence: Synthetic oligonucleotide
accccgaaucgccagagca

SEQ ID NO: 667759 - RNA, 19 nt, Artificial Sequence
  Description of Artificial Sequence: Synthetic oligonucleotide
gaaaggcccagacugccga

SEQ ID NO: 667760 - RNA, 19 nt, Artificial Sequence
  Description of Artificial Sequence: Synthetic oligonucleotide
acaacacuaucaaaacucu

SEQ ID NO: 667761 - RNA, 19 nt, Artificial Sequence
  Description of Artificial Sequence: Synthetic oligonucleotide
cuagaucacuuuacugaug

SEQ ID NO: 667762 - RNA, 19 nt, Artificial Sequence
  Description of Artificial Sequence: Synthetic oligonucleotide
ucgaugugagaucgcgggc

SEQ ID NO: 667763 - RNA, 19 nt, Artificial Sequence
  Description of Artificial Sequence: Synthetic oligonucleotide
cauuggggauaucuucuag

SEQ ID NO: 667764 - RNA, 19 nt, Artificial Sequence
  Description of Artificial Sequence: Synthetic oligonucleotide
guuaugggccuguagucca

SEQ ID NO: 667765 - RNA, 19 nt, Artificial Sequence
  Description of Artificial Sequence: Synthetic oligonucleotide
agccuauaucuauagcuau

SEQ ID NO: 667766 - RNA, 19 nt, Artificial Sequence
  Description of Artificial Sequence: Synthetic oligonucleotide
cauuaguauuguuuacaca

SEQ ID NO: 667767 - RNA, 19 nt, Artificial Sequence
  Description of Artificial Sequence: Synthetic oligonucleotide
gcaucucccaaauaucagc

SEQ ID NO: 667768 - RNA, 19 nt, Artificial Sequence
  Description of Artificial Sequence: Synthetic oligonucleotide
uggaucacugucgggaacu

SEQ ID NO: 667769 - RNA, 19 nt, Artificial Sequence
  Description of Artificial Sequence: Synthetic oligonucleotide
acgauucaggaggucaggg

SEQ ID NO: 667770 - RNA, 19 nt, Artificial Sequence
  Description of Artificial Sequence: Synthetic oligonucleotide
uuaugggccuguaguccag

SEQ ID NO: 667771 - RNA, 19 nt, Artificial Sequence
  Description of Artificial Sequence: Synthetic oligonucleotide
ugcucgucugaggaucucg

SEQ ID NO: 667772 - RNA, 19 nt, Artificial Sequence
  Description of Artificial Sequence: Synthetic oligonucleotide
gagguuuccaagcgggcuc

SEQ ID NO: 667773 - RNA, 19 nt, Artificial Sequence
  Description of Artificial Sequence: Synthetic oligonucleotide
uguagcgcuggcucaaaua

SEQ ID NO: 667774 - RNA, 19 nt, Artificial Sequence
  Description of Artificial Sequence: Synthetic oligonucleotide
acucgcaaacugucuaugu

SEQ ID NO: 667775 - RNA, 19 nt, Artificial Sequence
  Description of Artificial Sequence: Synthetic oligonucleotide
uagcuauaugcuauauauu

SEQ ID NO: 667776 - RNA, 19 nt, Artificial Sequence
  Description of Artificial Sequence: Synthetic oligonucleotide
augaaccucagaauuuuca

SEQ ID NO: 667777 - RNA, 19 nt, Artificial Sequence
  Description of Artificial Sequence: Synthetic oligonucleotide
aacaauucugcgacguuuu

SEQ ID NO: 667778 - RNA, 19 nt, Artificial Sequence
  Description of Artificial Sequence: Synthetic oligonucleotide
ugggaucaaggaccacuag

SEQ ID NO: 667779 - RNA, 19 nt, Artificial Sequence
  Description of Artificial Sequence: Synthetic oligonucleotide
guaacgcugccacacgaac

SEQ ID NO: 667780 - RNA, 19 nt, Artificial Sequence
  Description of Artificial Sequence: Synthetic oligonucleotide
agauggaaagaaucccaaa

SEQ ID NO: 667781 - RNA, 19 nt, Artificial Sequence
  Description of Artificial Sequence: Synthetic oligonucleotide
caguuaugggccuguaguc

SEQ ID NO: 667782 - RNA, 19 nt, Artificial Sequence
  Description of Artificial Sequence: Synthetic oligonucleotide
gccccaguaaaacucauac

SEQ ID NO: 667783 - RNA, 19 nt, Artificial Sequence
  Description of Artificial Sequence: Synthetic oligonucleotide
gcagaaauaacuggaccag

SEQ ID NO: 667784 - RNA, 19 nt, Artificial Sequence
  Description of Artificial Sequence: Synthetic oligonucleotide
cagcgcuucauuguauugc

SEQ ID NO: 667785 - RNA, 19 nt, Artificial Sequence
  Description of Artificial Sequence: Synthetic oligonucleotide
acugucgggaacucgcaaa

SEQ ID NO: 667786 - RNA, 19 nt, Artificial Sequence
  Description of Artificial Sequence: Synthetic oligonucleotide
gcaucugcgaaguguuugg

SEQ ID NO: 667787 - RNA, 19 nt, Artificial Sequence
  Description of Artificial Sequence: Synthetic oligonucleotide
gauccuagccaugaaccuc

SEQ ID NO: 667788 - RNA, 19 nt, Artificial Sequence
  Description of Artificial Sequence: Synthetic oligonucleotide
uuccgaacgcuuagggcgu

SEQ ID NO: 667789 - RNA, 19 nt, Artificial Sequence
  Description of Artificial Sequence: Synthetic oligonucleotide
uccaagcgggcucuaggac

SEQ ID NO: 667790 - RNA, 19 nt, Artificial Sequence
  Description of Artificial Sequence: Synthetic oligonucleotide
aucuuuguuauagauccua

SEQ ID NO: 667791 - RNA, 19 nt, Artificial Sequence
  Description of Artificial Sequence: Synthetic oligonucleotide
acuagcucggugccguaca

SEQ ID NO: 667792 - RNA, 19 nt, Artificial Sequence
  Description of Artificial Sequence: Synthetic oligonucleotide
aaucuugacucaggccaug

SEQ ID NO: 667793 - RNA, 19 nt, Artificial Sequence
  Description of Artificial Sequence: Synthetic oligonucleotide
caguaaaacucauacucua

SEQ ID NO: 667794 - RNA, 19 nt, Artificial Sequence
  Description of Artificial Sequence: Synthetic oligonucleotide
uucaugccagcugaagcac

SEQ ID NO: 667795 - RNA, 19 nt, Artificial Sequence
  Description of Artificial Sequence: Synthetic oligonucleotide
cgauguaauacagaauucc

SEQ ID NO: 667796 - RNA, 19 nt, Artificial Sequence
  Description of Artificial Sequence: Synthetic oligonucleotide
cucgucugaggaucucggg

SEQ ID NO: 667797 - RNA, 19 nt, Artificial Sequence
  Description of Artificial Sequence: Synthetic oligonucleotide
cugucgggaacucgcaaac

SEQ ID NO: 667798 - RNA, 19 nt, Artificial Sequence
  Description of Artificial Sequence: Synthetic oligonucleotide
ucacugucgggaacucgca

SEQ ID NO: 667799 - RNA, 19 nt, Artificial Sequence
  Description of Artificial Sequence: Synthetic oligonucleotide
cccagacaaaaucauacug

SEQ ID NO: 667800 - RNA, 19 nt, Artificial Sequence
  Description of Artificial Sequence: Synthetic oligonucleotide
ucuugacucaggccaugaa

SEQ ID NO: 667801 - RNA, 19 nt, Artificial Sequence
  Description of Artificial Sequence: Synthetic oligonucleotide
uucgggccacauaucucag

SEQ ID NO: 667802 - RNA, 19 nt, Artificial Sequence
  Description of Artificial Sequence: Synthetic oligonucleotide
ccguacacaugguuuaggg

SEQ ID NO: 667803 - RNA, 19 nt, Artificial Sequence
  Description of Artificial Sequence: Synthetic oligonucleotide
agcaucucccaaauaucag

SEQ ID NO: 667804 - RNA, 19 nt, Artificial Sequence
  Description of Artificial Sequence: Synthetic oligonucleotide
cugcgaaguguuuggcccc

SEQ ID NO: 667805 - RNA, 19 nt, Artificial Sequence
  Description of Artificial Sequence: Synthetic oligonucleotide
ggugcgagcagcacgauuc

SEQ ID NO: 667806 - RNA, 19 nt, Artificial Sequence
  Description of Artificial Sequence: Synthetic oligonucleotide
gauuccuuaaucggguacu

SEQ ID NO: 667807 - RNA, 19 nt, Artificial Sequence
  Description of Artificial Sequence: Synthetic oligonucleotide
aaaugcacuccagguggcu

SEQ ID NO: 667808 - RNA, 19 nt, Artificial Sequence
  Description of Artificial Sequence: Synthetic oligonucleotide
cauuacuggacaauauuau

SEQ ID NO: 667809 - RNA, 19 nt, Artificial Sequence
  Description of Artificial Sequence: Synthetic oligonucleotide
agccagccacaauuuagug

SEQ ID NO: 667810 - RNA, 19 nt, Artificial Sequence
  Description of Artificial Sequence: Synthetic oligonucleotide
uguggauucgggccacaua

SEQ ID NO: 667811 - RNA, 19 nt, Artificial Sequence
  Description of Artificial Sequence: Synthetic oligonucleotide
acucuaccgagagaagucu

SEQ ID NO: 667812 - RNA, 19 nt, Artificial Sequence
  Description of Artificial Sequence: Synthetic oligonucleotide
gacauugcggaagcgccac

SEQ ID NO: 667813 - RNA, 19 nt, Artificial Sequence
  Description of Artificial Sequence: Synthetic oligonucleotide
acuggaucacugucgggaa

SEQ ID NO: 667814 - RNA, 19 nt, Artificial Sequence
  Description of Artificial Sequence: Synthetic oligonucleotide
ucggguucccaaacacaga

SEQ ID NO: 667815 - RNA, 19 nt, Artificial Sequence
  Description of Artificial Sequence: Synthetic oligonucleotide
gcgauauucuuuacuaaug

SEQ ID NO: 667816 - RNA, 19 nt, Artificial Sequence
  Description of Artificial Sequence: Synthetic oligonucleotide
agaaaggcccagacugccg

SEQ ID NO: 667817 - RNA, 19 nt, Artificial Sequence
  Description of Artificial Sequence: Synthetic oligonucleotide
ccuauuggccuccucuucc

SEQ ID NO: 667818 - RNA, 19 nt, Artificial Sequence
  Description of Artificial Sequence: Synthetic oligonucleotide
gaacucuaccgagagaagu

SEQ ID NO: 667819 - RNA, 19 nt, Artificial Sequence
  Description of Artificial Sequence: Synthetic oligonucleotide
ugugagaucgcgggcccca

SEQ ID NO: 667820 - RNA, 19 nt, Artificial Sequence
  Description of Artificial Sequence: Synthetic oligonucleotide
gguaauggaguuggaauuc

SEQ ID NO: 667821 - RNA, 19 nt, Artificial Sequence
  Description of Artificial Sequence: Synthetic oligonucleotide
caugguugcccauuauaaa

SEQ ID NO: 667822 - RNA, 19 nt, Artificial Sequence
  Description of Artificial Sequence: Synthetic oligonucleotide
ucccucauuucagauuccu

SEQ ID NO: 667823 - RNA, 19 nt, Artificial Sequence
  Description of Artificial Sequence: Synthetic oligonucleotide
ccaagcgggcucuaggacc

SEQ ID NO: 667824 - RNA, 19 nt, Artificial Sequence
  Description of Artificial Sequence: Synthetic oligonucleotide
gguugaacaggguguagga

SEQ ID NO: 667825 - RNA, 19 nt, Artificial Sequence
  Description of Artificial Sequence: Synthetic oligonucleotide
aaguggucaaucacauuua

SEQ ID NO: 667826 - RNA, 19 nt, Artificial Sequence
  Description of Artificial Sequence: Synthetic oligonucleotide
cacacgaacucuaccgaga

SEQ ID NO: 667827 - RNA, 19 nt, Artificial Sequence
  Description of Artificial Sequence: Synthetic oligonucleotide
uuuagggugcgagcagcac

SEQ ID NO: 667828 - RNA, 19 nt, Artificial Sequence
  Description of Artificial Sequence: Synthetic oligonucleotide
uuucacgcugcaccccgaa

SEQ ID NO: 667829 - RNA, 19 nt, Artificial Sequence
  Description of Artificial Sequence: Synthetic oligonucleotide
agcuuucaaggaaaagccu

SEQ ID NO: 667830 - RNA, 19 nt, Artificial Sequence
  Description of Artificial Sequence: Synthetic oligonucleotide
agguucaugccagcugaag

SEQ ID NO: 667831 - RNA, 19 nt, Artificial Sequence
  Description of Artificial Sequence: Synthetic oligonucleotide
agaccaagggaggugcacu

SEQ ID NO: 667832 - RNA, 19 nt, Artificial Sequence
  Description of Artificial Sequence: Synthetic oligonucleotide
agagacacaaguggucaau

SEQ ID NO: 667833 - RNA, 19 nt, Artificial Sequence
  Description of Artificial Sequence: Synthetic oligonucleotide
cuucggguucccaaacaca

SEQ ID NO: 667834 - RNA, 19 nt, Artificial Sequence
  Description of Artificial Sequence: Synthetic oligonucleotide
gcuagcggcaucugcgaag

SEQ ID NO: 667835 - RNA, 19 nt, Artificial Sequence
  Description of Artificial Sequence: Synthetic oligonucleotide
uucgguugaacagggugua

SEQ ID NO: 667836 - RNA, 19 nt, Artificial Sequence
  Description of Artificial Sequence: Synthetic oligonucleotide
ugccguacacaugguuuag

SEQ ID NO: 667837 - RNA, 19 nt, Artificial Sequence
  Description of Artificial Sequence: Synthetic oligonucleotide
ugcaccccgaaucgccaga

SEQ ID NO: 667838 - RNA, 19 nt, Artificial Sequence
  Description of Artificial Sequence: Synthetic oligonucleotide
cucuaccgagagaagucuc

SEQ ID NO: 667839 - RNA, 19 nt, Artificial Sequence
  Description of Artificial Sequence: Synthetic oligonucleotide
aaucggguacuuggacuga

SEQ ID NO: 667840 - RNA, 19 nt, Artificial Sequence
  Description of Artificial Sequence: Synthetic oligonucleotide
gauucgggccacauaucuc

SEQ ID NO: 667841 - RNA, 19 nt, Artificial Sequence
  Description of Artificial Sequence: Synthetic oligonucleotide
accacuagcucggugccgu

SEQ ID NO: 667842 - RNA, 19 nt, Artificial Sequence
  Description of Artificial Sequence: Synthetic oligonucleotide
ggugguuucgaugugagau

SEQ ID NO: 667843 - RNA, 19 nt, Artificial Sequence
  Description of Artificial Sequence: Synthetic oligonucleotide
ugcacucucgaccgaugua

SEQ ID NO: 667844 - RNA, 19 nt, Artificial Sequence
  Description of Artificial Sequence: Synthetic oligonucleotide
acacaugguuuagggugcg

SEQ ID NO: 667845 - RNA, 19 nt, Artificial Sequence
  Description of Artificial Sequence: Synthetic oligonucleotide
gccuuccgaacgcuuaggg

SEQ ID NO: 667846 - RNA, 19 nt, Artificial Sequence
  Description of Artificial Sequence: Synthetic oligonucleotide
ccucagaauuuucaucuug

SEQ ID NO: 667847 - RNA, 19 nt, Artificial Sequence
  Description of Artificial Sequence: Synthetic oligonucleotide
gguuuagggugcgagcagc

SEQ ID NO: 667848 - RNA, 19 nt, Artificial Sequence
  Description of Artificial Sequence: Synthetic oligonucleotide
caaauaccugcagguaauc

SEQ ID NO: 667849 - RNA, 19 nt, Artificial Sequence
  Description of Artificial Sequence: Synthetic oligonucleotide
augugagaucgcgggcccc

SEQ ID NO: 667850 - RNA, 19 nt, Artificial Sequence
  Description of Artificial Sequence: Synthetic oligonucleotide
gaucgcgggccccaguaaa

SEQ ID NO: 667851 - RNA, 19 nt, Artificial Sequence
  Description of Artificial Sequence: Synthetic oligonucleotide
gcaguggacauugcggaag

SEQ ID NO: 667852 - RNA, 19 nt, Artificial Sequence
  Description of Artificial Sequence: Synthetic oligonucleotide
ggaucaaggaccacuagcu

SEQ ID NO: 667853 - RNA, 19 nt, Artificial Sequence
  Description of Artificial Sequence: Synthetic oligonucleotide
cuugacucaggccaugaau

SEQ ID NO: 667854 - RNA, 19 nt, Artificial Sequence
  Description of Artificial Sequence: Synthetic oligonucleotide
uccuagccaugaaccucag

SEQ ID NO: 667855 - RNA, 19 nt, Artificial Sequence
  Description of Artificial Sequence: Synthetic oligonucleotide
ccuuccgaacgcuuagggc

SEQ ID NO: 667856 - RNA, 19 nt, Artificial Sequence
  Description of Artificial Sequence: Synthetic oligonucleotide
ucggguacuuggacugauc

SEQ ID NO: 667857 - RNA, 19 nt, Artificial Sequence
  Description of Artificial Sequence: Synthetic oligonucleotide
agaucacuuuacugaugau

SEQ ID NO: 667858 - RNA, 19 nt, Artificial Sequence
  Description of Artificial Sequence: Synthetic oligonucleotide
ucgccagagcaucucccaa

SEQ ID NO: 667859 - RNA, 19 nt, Artificial Sequence
  Description of Artificial Sequence: Synthetic oligonucleotide
cuagcccaucauagggcac

SEQ ID NO: 667860 - RNA, 19 nt, Artificial Sequence
  Description of Artificial Sequence: Synthetic oligonucleotide
ucgguugaacaggguguag

SEQ ID NO: 667861 - RNA, 19 nt, Artificial Sequence
  Description of Artificial Sequence: Synthetic oligonucleotide
ggaacucgcaaacugucua

SEQ ID NO: 667862 - RNA, 19 nt, Artificial Sequence
  Description of Artificial Sequence: Synthetic oligonucleotide
cccauaaugguaauggagu

SEQ ID NO: 667863 - RNA, 19 nt, Artificial Sequence
  Description of Artificial Sequence: Synthetic oligonucleotide
cuuagggcguacagaggga

SEQ ID NO: 667864 - RNA, 19 nt, Artificial Sequence
  Description of Artificial Sequence: Synthetic oligonucleotide
ugcgagcagcacgauucag

SEQ ID NO: 667865 - RNA, 19 nt, Artificial Sequence
  Description of Artificial Sequence: Synthetic oligonucleotide
aucucccaaauaucagcuu

SEQ ID NO: 667866 - RNA, 19 nt, Artificial Sequence
  Description of Artificial Sequence: Synthetic oligonucleotide
auacacgaauggaacugga

SEQ ID NO: 667867 - RNA, 19 nt, Artificial Sequence
  Description of Artificial Sequence: Synthetic oligonucleotide
gagaucgcgggccccagua

SEQ ID NO: 667868 - RNA, 19 nt, Artificial Sequence
  Description of Artificial Sequence: Synthetic oligonucleotide
guggucaaucacauuuaca

SEQ ID NO: 667869 - RNA, 19 nt, Artificial Sequence
  Description of Artificial Sequence: Synthetic oligonucleotide
cucgcaaacugucuaugua

SEQ ID NO: 667870 - RNA, 19 nt, Artificial Sequence
  Description of Artificial Sequence: Synthetic oligonucleotide
gagagcaacgugggcggug

SEQ ID NO: 667871 - RNA, 19 nt, Artificial Sequence
  Description of Artificial Sequence: Synthetic oligonucleotide
ggcagaccaagggaggugc

SEQ ID NO: 667872 - RNA, 19 nt, Artificial Sequence
  Description of Artificial Sequence: Synthetic oligonucleotide
acugccgacucccgggcau

SEQ ID NO: 667873 - RNA, 19 nt, Artificial Sequence
  Description of Artificial Sequence: Synthetic oligonucleotide
ggcgauauucuuuacuaau

SEQ ID NO: 667874 - RNA, 19 nt, Artificial Sequence
  Description of Artificial Sequence: Synthetic oligonucleotide
gaacucgcaaacugucuau

SEQ ID NO: 667875 - RNA, 19 nt, Artificial Sequence
  Description of Artificial Sequence: Synthetic oligonucleotide
uucacgcugcaccccgaau

SEQ ID NO: 667876 - RNA, 19 nt, Artificial Sequence
  Description of Artificial Sequence: Synthetic oligonucleotide
aucuugacucaggccauga

SEQ ID NO: 667877 - RNA, 19 nt, Artificial Sequence
  Description of Artificial Sequence: Synthetic oligonucleotide
augaagcuuagaaccugca

SEQ ID NO: 667878 - RNA, 19 nt, Artificial Sequence
  Description of Artificial Sequence: Synthetic oligonucleotide
auaggauccugaggcuuca

SEQ ID NO: 667879 - RNA, 19 nt, Artificial Sequence
  Description of Artificial Sequence: Synthetic oligonucleotide
acucucgaccgauguaaua

SEQ ID NO: 667880 - RNA, 19 nt, Artificial Sequence
  Description of Artificial Sequence: Synthetic oligonucleotide
gcuuucaaggaaaagccua

SEQ ID NO: 667881 - RNA, 19 nt, Artificial Sequence
  Description of Artificial Sequence: Synthetic oligonucleotide
ggcagcuuaguugaaucca

SEQ ID NO: 667882 - RNA, 19 nt, Artificial Sequence
  Description of Artificial Sequence: Synthetic oligonucleotide
ugagaucgcgggccccagu

SEQ ID NO: 667883 - RNA, 19 nt, Artificial Sequence
  Description of Artificial Sequence: Synthetic oligonucleotide
ggauucgggccacauaucu

SEQ ID NO: 667884 - RNA, 19 nt, Artificial Sequence
  Description of Artificial Sequence: Synthetic oligonucleotide
gcaugguugcccauuauaa

SEQ ID NO: 667885 - RNA, 19 nt, Artificial Sequence
  Description of Artificial Sequence: Synthetic oligonucleotide
ccgauguaauacagaauuc

SEQ ID NO: 667886 - RNA, 19 nt, Artificial Sequence
  Description of Artificial Sequence: Synthetic oligonucleotide
ggcgucagcccuauuggcc

SEQ ID NO: 667887 - RNA, 19 nt, Artificial Sequence
  Description of Artificial Sequence: Synthetic oligonucleotide
gugccguacacaugguuua

SEQ ID NO: 667888 - RNA, 19 nt, Artificial Sequence
  Description of Artificial Sequence: Synthetic oligonucleotide
ugcgaaguguuuggccccu

SEQ ID NO: 667889 - RNA, 19 nt, Artificial Sequence
  Description of Artificial Sequence: Synthetic oligonucleotide
auuccuuaaucggguacuu

SEQ ID NO: 667890 - RNA, 19 nt, Artificial Sequence
  Description of Artificial Sequence: Synthetic oligonucleotide
ccggcgucagcccuauugg

SEQ ID NO: 667891 - RNA, 19 nt, Artificial Sequence
  Description of Artificial Sequence: Synthetic oligonucleotide
cuuccagcgcuucauugua

SEQ ID NO: 667892 - RNA, 19 nt, Artificial Sequence
  Description of Artificial Sequence: Synthetic oligonucleotide
cagaccaagggaggugcac

SEQ ID NO: 667893 - RNA, 19 nt, Artificial Sequence
  Description of Artificial Sequence: Synthetic oligonucleotide
ggaucucggggaacugugg

SEQ ID NO: 667894 - RNA, 19 nt, Artificial Sequence
  Description of Artificial Sequence: Synthetic oligonucleotide
cugcaccccgaaucgccag

SEQ ID NO: 667895 - RNA, 19 nt, Artificial Sequence
  Description of Artificial Sequence: Synthetic oligonucleotide
cauacucuacagguccaca

SEQ ID NO: 667896 - RNA, 19 nt, Artificial Sequence
  Description of Artificial Sequence: Synthetic oligonucleotide
aagcgggcucuaggacccc

SEQ ID NO: 667897 - RNA, 19 nt, Artificial Sequence
  Description of Artificial Sequence: Synthetic oligonucleotide
guaauggaguuggaauucu

SEQ ID NO: 667898 - RNA, 19 nt, Artificial Sequence
  Description of Artificial Sequence: Synthetic oligonucleotide
gagaauauuuugagagcau

SEQ ID NO: 667899 - RNA, 19 nt, Artificial Sequence
  Description of Artificial Sequence: Synthetic oligonucleotide
gcucgucugaggaucucgg

SEQ ID NO: 667900 - RNA, 19 nt, Artificial Sequence
  Description of Artificial Sequence: Synthetic oligonucleotide
acgcugcaccccgaaucgc

SEQ ID NO: 667901 - RNA, 19 nt, Artificial Sequence
  Description of Artificial Sequence: Synthetic oligonucleotide
uauguagcgcuggcucaaa

SEQ ID NO: 667902 - RNA, 19 nt, Artificial Sequence
  Description of Artificial Sequence: Synthetic oligonucleotide
accgcagcucacugcggca

SEQ ID NO: 667903 - RNA, 19 nt, Artificial Sequence
  Description of Artificial Sequence: Synthetic oligonucleotide
ggcaugguugcccauuaua

SEQ ID NO: 667904 - RNA, 19 nt, Artificial Sequence
  Description of Artificial Sequence: Synthetic oligonucleotide
agcuagcggcaucugcgaa

SEQ ID NO: 667905 - RNA, 19 nt, Artificial Sequence
  Description of Artificial Sequence: Synthetic oligonucleotide
agaucgcgggccccaguaa

SEQ ID NO: 667906 - RNA, 19 nt, Artificial Sequence
  Description of Artificial Sequence: Synthetic oligonucleotide
cuguggcgauauucuuuac

SEQ ID NO: 667907 - RNA, 19 nt, Artificial Sequence
  Description of Artificial Sequence: Synthetic oligonucleotide
ugucagcggcaguggacau

SEQ ID NO: 667908 - RNA, 19 nt, Artificial Sequence
  Description of Artificial Sequence: Synthetic oligonucleotide
ccuuaaucggguacuugga

SEQ ID NO: 667909 - RNA, 19 nt, Artificial Sequence
  Description of Artificial Sequence: Synthetic oligonucleotide
cccggcgucagcccuauug

SEQ ID NO: 667910 - RNA, 19 nt, Artificial Sequence
  Description of Artificial Sequence: Synthetic oligonucleotide
cgaccgauguaauacagaa

SEQ ID NO: 667911 - RNA, 19 nt, Artificial Sequence
  Description of Artificial Sequence: Synthetic oligonucleotide
gguguaggagugguuccug

SEQ ID NO: 667912 - RNA, 19 nt, Artificial Sequence
  Description of Artificial Sequence: Synthetic oligonucleotide
cacggcccucugcagcuag

SEQ ID NO: 667913 - RNA, 19 nt, Artificial Sequence
  Description of Artificial Sequence: Synthetic oligonucleotide
ggcccauaaugguaaugga

SEQ ID NO: 667914 - RNA, 19 nt, Artificial Sequence
  Description of Artificial Sequence: Synthetic oligonucleotide
gccguacacaugguuuagg

SEQ ID NO: 667915 - RNA, 19 nt, Artificial Sequence
  Description of Artificial Sequence: Synthetic oligonucleotide
gcacucucgaccgauguaa

SEQ ID NO: 667916 - RNA, 19 nt, Artificial Sequence
  Description of Artificial Sequence: Synthetic oligonucleotide
cacuagcucggugccguac

SEQ ID NO: 667917 - RNA, 19 nt, Artificial Sequence
  Description of Artificial Sequence: Synthetic oligonucleotide
gaucuuuguuauagauccu

SEQ ID NO: 667918 - RNA, 19 nt, Artificial Sequence
  Description of Artificial Sequence: Synthetic oligonucleotide
gcucucuaaucuugacuca

SEQ ID NO: 667919 - RNA, 19 nt, Artificial Sequence
  Description of Artificial Sequence: Synthetic oligonucleotide
gccaugaauggggagaaua

SEQ ID NO: 667920 - RNA, 19 nt, Artificial Sequence
  Description of Artificial Sequence: Synthetic oligonucleotide
cagauuccuuaaucgggua

SEQ ID NO: 667921 - RNA, 19 nt, Artificial Sequence
  Description of Artificial Sequence: Synthetic oligonucleotide
ccagcgcuucauuguauug

SEQ ID NO: 667922 - RNA, 19 nt, Artificial Sequence
  Description of Artificial Sequence: Synthetic oligonucleotide
caagggaggugcacuugaa

SEQ ID NO: 667923 - RNA, 19 nt, Artificial Sequence
  Description of Artificial Sequence: Synthetic oligonucleotide
gugcgagcagcacgauuca

SEQ ID NO: 667924 - RNA, 19 nt, Artificial Sequence
  Description of Artificial Sequence: Synthetic oligonucleotide
caacaauucugcgacguuu

SEQ ID NO: 667925 - RNA, 19 nt, Artificial Sequence
  Description of Artificial Sequence: Synthetic oligonucleotide
gcuauaugcuauauauuau

SEQ ID NO: 667926 - RNA, 19 nt, Artificial Sequence
  Description of Artificial Sequence: Synthetic oligonucleotide
gagcaacgugggcggugcc

SEQ ID NO: 667927 - RNA, 19 nt, Artificial Sequence
  Description of Artificial Sequence: Synthetic oligonucleotide
caccccgaaucgccagagc

SEQ ID NO: 667928 - RNA, 19 nt, Artificial Sequence
  Description of Artificial Sequence: Synthetic oligonucleotide
cacaaauaucaaacacgau

SEQ ID NO: 667929 - RNA, 19 nt, Artificial Sequence
  Description of Artificial Sequence: Synthetic oligonucleotide
cacgaacucuaccgagaga

SEQ ID NO: 667930 - RNA, 19 nt, Artificial Sequence
  Description of Artificial Sequence: Synthetic oligonucleotide
cuagcggcaucugcgaagu

SEQ ID NO: 667931 - RNA, 19 nt, Artificial Sequence
  Description of Artificial Sequence: Synthetic oligonucleotide
cuuucacgcugcaccccga

SEQ ID NO: 667932 - RNA, 19 nt, Artificial Sequence
  Description of Artificial Sequence: Synthetic oligonucleotide
ggcuuggguugccauuuca

SEQ ID NO: 667933 - RNA, 19 nt, Artificial Sequence
  Description of Artificial Sequence: Synthetic oligonucleotide
cgagcagcacgauucagga

SEQ ID NO: 667934 - RNA, 19 nt, Artificial Sequence
  Description of Artificial Sequence: Synthetic oligonucleotide
gacugccgacucccgggca

SEQ ID NO: 667935 - RNA, 19 nt, Artificial Sequence
  Description of Artificial Sequence: Synthetic oligonucleotide
caacacuaucaaaacucuu

SEQ ID NO: 667936 - RNA, 19 nt, Artificial Sequence
  Description of Artificial Sequence: Synthetic oligonucleotide
gguuucgaugugagaucgc

SEQ ID NO: 667937 - RNA, 19 nt, Artificial Sequence
  Description of Artificial Sequence: Synthetic oligonucleotide
cuauagcuauaugcuauau

SEQ ID NO: 667938 - RNA, 19 nt, Artificial Sequence
  Description of Artificial Sequence: Synthetic oligonucleotide
ccaagggaggugcacuuga

SEQ ID NO: 667939 - RNA, 19 nt, Artificial Sequence
  Description of Artificial Sequence: Synthetic oligonucleotide
cacugcggcaggguuguca

SEQ ID NO: 667940 - RNA, 19 nt, Artificial Sequence
  Description of Artificial Sequence: Synthetic oligonucleotide
ggccuuccgaacgcuuagg

SEQ ID NO: 667941 - RNA, 19 nt, Artificial Sequence
  Description of Artificial Sequence: Synthetic oligonucleotide
gugagaucgcgggccccag

SEQ ID NO: 667942 - RNA, 19 nt, Artificial Sequence
  Description of Artificial Sequence: Synthetic oligonucleotide
cgaacucuaccgagagaag

SEQ ID NO: 667943 - RNA, 19 nt, Artificial Sequence
  Description of Artificial Sequence: Synthetic oligonucleotide
ucagcccuauuggccuccu

SEQ ID NO: 667944 - RNA, 19 nt, Artificial Sequence
  Description of Artificial Sequence: Synthetic oligonucleotide
cgaaguguuuggccccucc

SEQ ID NO: 667945 - RNA, 19 nt, Artificial Sequence
  Description of Artificial Sequence: Synthetic oligonucleotide
cccgaaucgccagagcauc

SEQ ID NO: 667946 - RNA, 19 nt, Artificial Sequence
  Description of Artificial Sequence: Synthetic oligonucleotide
gguaacgcugccacacgaa

SEQ ID NO: 667947 - RNA, 19 nt, Artificial Sequence
  Description of Artificial Sequence: Synthetic oligonucleotide
cacugucgggaacucgcaa

SEQ ID NO: 667948 - RNA, 19 nt, Artificial Sequence
  Description of Artificial Sequence: Synthetic oligonucleotide
aucgcgggccccaguaaaa

SEQ ID NO: 667949 - RNA, 19 nt, Artificial Sequence
  Description of Artificial Sequence: Synthetic oligonucleotide
ucggggaacuguggcgaua

SEQ ID NO: 667950 - RNA, 19 nt, Artificial Sequence
  Description of Artificial Sequence: Synthetic oligonucleotide
ggugccguacacaugguuu

SEQ ID NO: 667951 - RNA, 19 nt, Artificial Sequence
  Description of Artificial Sequence: Synthetic oligonucleotide
cucacugcggcaggguugu

SEQ ID NO: 667952 - RNA, 19 nt, Artificial Sequence
  Description of Artificial Sequence: Synthetic oligonucleotide
gccgggccuguuuggacug

SEQ ID NO: 667953 - RNA, 19 nt, Artificial Sequence
  Description of Artificial Sequence: Synthetic oligonucleotide
gccuauaucuauagcuaua

SEQ ID NO: 667954 - RNA, 19 nt, Artificial Sequence
  Description of Artificial Sequence: Synthetic oligonucleotide
cacugucucucaggaccug

SEQ ID NO: 667955 - RNA, 19 nt, Artificial Sequence
  Description of Artificial Sequence: Synthetic oligonucleotide
agucaguuaugggccugua

SEQ ID NO: 667956 - RNA, 19 nt, Artificial Sequence
  Description of Artificial Sequence: Synthetic oligonucleotide
cagguucaugccagcugaa

SEQ ID NO: 667957 - RNA, 19 nt, Artificial Sequence
  Description of Artificial Sequence: Synthetic oligonucleotide
gcaccccgaaucgccagag

SEQ ID NO: 667958 - RNA, 19 nt, Artificial Sequence
  Description of Artificial Sequence: Synthetic oligonucleotide
agcgggcucuaggacccca

SEQ ID NO: 667959 - RNA, 19 nt, Artificial Sequence
  Description of Artificial Sequence: Synthetic oligonucleotide
cagcggcaguggacauugc

SEQ ID NO: 667960 - RNA, 19 nt, Artificial Sequence
  Description of Artificial Sequence: Synthetic oligonucleotide
aggugcacuugaacagguu

SEQ ID NO: 667961 - RNA, 19 nt, Artificial Sequence
  Description of Artificial Sequence: Synthetic oligonucleotide
ugcgcuccucggggucuag

SEQ ID NO: 667962 - RNA, 19 nt, Artificial Sequence
  Description of Artificial Sequence: Synthetic oligonucleotide
ggacuguccacaauuucuu

SEQ ID NO: 667963 - RNA, 19 nt, Artificial Sequence
  Description of Artificial Sequence: Synthetic oligonucleotide
uccgaacgcuuagggcgua

SEQ ID NO: 667964 - RNA, 19 nt, Artificial Sequence
  Description of Artificial Sequence: Synthetic oligonucleotide
gccagagcaucucccaaau

SEQ ID NO: 667965 - RNA, 19 nt, Artificial Sequence
  Description of Artificial Sequence: Synthetic oligonucleotide
gggaacucgcaaacugucu

SEQ ID NO: 667966 - RNA, 19 nt, Artificial Sequence
  Description of Artificial Sequence: Synthetic oligonucleotide
cacucucgaccgauguaau

SEQ ID NO: 667967 - RNA, 19 nt, Artificial Sequence
  Description of Artificial Sequence: Synthetic oligonucleotide
cggcgucagcccuauuggc

SEQ ID NO: 667968 - RNA, 19 nt, Artificial Sequence
  Description of Artificial Sequence: Synthetic oligonucleotide
cugcucgucugaggaucuc

SEQ ID NO: 667969 - RNA, 19 nt, Artificial Sequence
  Description of Artificial Sequence: Synthetic oligonucleotide
cagcacgauucaggagguc

SEQ ID NO: 667970 - RNA, 19 nt, Artificial Sequence
  Description of Artificial Sequence: Synthetic oligonucleotide
ccccagacaaaaucauacu

SEQ ID NO: 667971 - RNA, 19 nt, Artificial Sequence
  Description of Artificial Sequence: Synthetic oligonucleotide
cagcccuauuggccuccuc

SEQ ID NO: 667972 - RNA, 19 nt, Artificial Sequence
  Description of Artificial Sequence: Synthetic oligonucleotide
ccccaguaaaacucauacu

SEQ ID NO: 667973 - RNA, 19 nt, Artificial Sequence
  Description of Artificial Sequence: Synthetic oligonucleotide
caaggcccauaaugguaau

SEQ ID NO: 667974 - RNA, 19 nt, Artificial Sequence
  Description of Artificial Sequence: Synthetic oligonucleotide
ggguguaggagugguuccu

SEQ ID NO: 667975 - RNA, 19 nt, Artificial Sequence
  Description of Artificial Sequence: Synthetic oligonucleotide
ggaagcgccacggcccucu

SEQ ID NO: 667976 - RNA, 19 nt, Artificial Sequence
  Description of Artificial Sequence: Synthetic oligonucleotide
gcucggugccguacacaug

SEQ ID NO: 667977 - RNA, 19 nt, Artificial Sequence
  Description of Artificial Sequence: Synthetic oligonucleotide
ccauaggaucuuuguuaua

SEQ ID NO: 667978 - RNA, 19 nt, Artificial Sequence
  Description of Artificial Sequence: Synthetic oligonucleotide
gcagaccaagggaggugca

SEQ ID NO: 667979 - RNA, 19 nt, Artificial Sequence
  Description of Artificial Sequence: Synthetic oligonucleotide
agggugcgagcagcacgau

SEQ ID NO: 667980 - RNA, 19 nt, Artificial Sequence
  Description of Artificial Sequence: Synthetic oligonucleotide
uuggcccauuggggauauc

SEQ ID NO: 667981 - RNA, 19 nt, Artificial Sequence
  Description of Artificial Sequence: Synthetic oligonucleotide
cgucagcccuauuggccuc

SEQ ID NO: 667982 - RNA, 19 nt, Artificial Sequence
  Description of Artificial Sequence: Synthetic oligonucleotide
ccgaacgcuuagggcguac

SEQ ID NO: 667983 - RNA, 19 nt, Artificial Sequence
  Description of Artificial Sequence: Synthetic oligonucleotide
ccgaaucgccagagcaucu

SEQ ID NO: 667984 - RNA, 19 nt, Artificial Sequence
  Description of Artificial Sequence: Synthetic oligonucleotide
ccccgaaucgccagagcau

SEQ ID NO: 667985 - RNA, 19 nt, Artificial Sequence
  Description of Artificial Sequence: Synthetic oligonucleotide
gggugcgagcagcacgauu

SEQ ID NO: 667986 - RNA, 19 nt, Artificial Sequence
  Description of Artificial Sequence: Synthetic oligonucleotide
cgaacgcuuagggcguaca

SEQ ID NO: 667987 - RNA, 19 nt, Artificial Sequence
  Description of Artificial Sequence: Synthetic oligonucleotide
gggcaugguugcccauuau

SEQ ID NO: 667988 - RNA, 19 nt, Artificial Sequence
  Description of Artificial Sequence: Synthetic oligonucleotide
gcgaaguguuuggccccuc

SEQ ID NO: 667989 - RNA, 19 nt, Artificial Sequence
  Description of Artificial Sequence: Synthetic oligonucleotide
gguuuccaagcgggcucua

SEQ ID NO: 667990 - RNA, 19 nt, Artificial Sequence
  Description of Artificial Sequence: Synthetic oligonucleotide
cgggcaugguugcccauua

SEQ ID NO: 667991 - RNA, 19 nt, Artificial Sequence
  Description of Artificial Sequence: Synthetic oligonucleotide
ccgacucccgggcaugguu

SEQ ID NO: 667992 - RNA, 19 nt, Artificial Sequence
  Description of Artificial Sequence: Synthetic oligonucleotide
ccacuagcucggugccgua

SEQ ID NO: 667993 - RNA, 19 nt, Artificial Sequence
  Description of Artificial Sequence: Synthetic oligonucleotide
gccgacucccgggcauggu

SEQ ID NO: 667994 - RNA, 19 nt, Artificial Sequence
  Description of Artificial Sequence: Synthetic oligonucleotide
ccgggcaugguugcccauu

SEQ ID NO: 667995 - RNA, 19 nt, Artificial Sequence
  Description of Artificial Sequence: Synthetic oligonucleotide
cggugccguacacaugguu

SEQ ID NO: 667996 - RNA, 19 nt, Artificial Sequence
  Description of Artificial Sequence: Synthetic oligonucleotide
ccacggcccucugcagcua

SEQ ID NO: 667997 - RNA, 19 nt, Artificial Sequence
  Description of Artificial Sequence: Synthetic oligonucleotide
cccgggcaugguugcccau

SEQ ID NO: 667998 - RNA, 19 nt, Artificial Sequence
  Description of Artificial Sequence: Synthetic oligonucleotide
ccgggccuguuuggacugu

SEQ ID NO: 667999 - RNA, 19 nt, Artificial Sequence
  Description of Artificial Sequence: Synthetic oligonucleotide
ccccggcgucagcccuauu

SEQ ID NO: 668000 - RNA, 19 nt, Artificial Sequence
  Description of Artificial Sequence: Synthetic oligonucleotide
aaacagagauguuagggcc

SEQ ID NO: 668001 - RNA, 19 nt, Artificial Sequence
  Description of Artificial Sequence: Synthetic oligonucleotide
aaaucauccuggcucaucc

SEQ ID NO: 668002 - RNA, 19 nt, Artificial Sequence
  Description of Artificial Sequence: Synthetic oligonucleotide
uauaguacacucuucgucg

SEQ ID NO: 668003 - RNA, 19 nt, Artificial Sequence
  Description of Artificial Sequence: Synthetic oligonucleotide
aacacucuaaccuaggaug

SEQ ID NO: 668004 - RNA, 19 nt, Artificial Sequence
  Description of Artificial Sequence: Synthetic oligonucleotide
aagaguauuuauugaaaac

SEQ ID NO: 668005 - RNA, 19 nt, Artificial Sequence
  Description of Artificial Sequence: Synthetic oligonucleotide
auauauaguacacucuucg

SEQ ID NO: 668006 - RNA, 19 nt, Artificial Sequence
  Description of Artificial Sequence: Synthetic oligonucleotide
uauaguagagaaaauauau

SEQ ID NO: 668007 - RNA, 19 nt, Artificial Sequence
  Description of Artificial Sequence: Synthetic oligonucleotide
aauaccaccauguuaacau

SEQ ID NO: 668008 - RNA, 19 nt, Artificial Sequence
  Description of Artificial Sequence: Synthetic oligonucleotide
ugaucuuauauaaauauau

SEQ ID NO: 668009 - RNA, 19 nt, Artificial Sequence
  Description of Artificial Sequence: Synthetic oligonucleotide
aguacucauacuuauuagg

SEQ ID NO: 668010 - RNA, 19 nt, Artificial Sequence
  Description of Artificial Sequence: Synthetic oligonucleotide
ugaauggggaccaagagaa

SEQ ID NO: 668011 - RNA, 19 nt, Artificial Sequence
  Description of Artificial Sequence: Synthetic oligonucleotide
auauaguacacucuucguc

SEQ ID NO: 668012 - RNA, 19 nt, Artificial Sequence
  Description of Artificial Sequence: Synthetic oligonucleotide
gauaccucuagaaacagag

SEQ ID NO: 668013 - RNA, 19 nt, Artificial Sequence
  Description of Artificial Sequence: Synthetic oligonucleotide
aaagauagaaauggagggg

SEQ ID NO: 668014 - RNA, 19 nt, Artificial Sequence
  Description of Artificial Sequence: Synthetic oligonucleotide
agcgaugaaauucaguguc

SEQ ID NO: 668015 - RNA, 19 nt, Artificial Sequence
  Description of Artificial Sequence: Synthetic oligonucleotide
auuaggagcgaugaaauuc

SEQ ID NO: 668016 - RNA, 19 nt, Artificial Sequence
  Description of Artificial Sequence: Synthetic oligonucleotide
uugaggaguagucaccacg

SEQ ID NO: 668017 - RNA, 19 nt, Artificial Sequence
  Description of Artificial Sequence: Synthetic oligonucleotide
uaaguauggccuauaguag

SEQ ID NO: 668018 - RNA, 19 nt, Artificial Sequence
  Description of Artificial Sequence: Synthetic oligonucleotide
acuugcauaaccuuauuga

SEQ ID NO: 668019 - RNA, 19 nt, Artificial Sequence
  Description of Artificial Sequence: Synthetic oligonucleotide
gaccuugugauucagugcc

SEQ ID NO: 668020 - RNA, 19 nt, Artificial Sequence
  Description of Artificial Sequence: Synthetic oligonucleotide
gacuucaugacuccuagug

SEQ ID NO: 668021 - RNA, 19 nt, Artificial Sequence
  Description of Artificial Sequence: Synthetic oligonucleotide
ugauucagugccaagcggc

SEQ ID NO: 668022 - RNA, 19 nt, Artificial Sequence
  Description of Artificial Sequence: Synthetic oligonucleotide
uauccugacaccugcacag

SEQ ID NO: 668023 - RNA, 19 nt, Artificial Sequence
  Description of Artificial Sequence: Synthetic oligonucleotide
gagauugcuaccuauccug

SEQ ID NO: 668024 - RNA, 19 nt, Artificial Sequence
  Description of Artificial Sequence: Synthetic oligonucleotide
uuaggagcgaugaaauuca

SEQ ID NO: 668025 - RNA, 19 nt, Artificial Sequence
  Description of Artificial Sequence: Synthetic oligonucleotide
ucauccguagugauagacg

SEQ ID NO: 668026 - RNA, 19 nt, Artificial Sequence
  Description of Artificial Sequence: Synthetic oligonucleotide
ugaacugauccaaagaguu

SEQ ID NO: 668027 - RNA, 19 nt, Artificial Sequence
  Description of Artificial Sequence: Synthetic oligonucleotide
cugagcaaccugaagauag

SEQ ID NO: 668028 - RNA, 19 nt, Artificial Sequence
  Description of Artificial Sequence: Synthetic oligonucleotide
uaacaugcguccaaggaga

SEQ ID NO: 668029 - RNA, 19 nt, Artificial Sequence
  Description of Artificial Sequence: Synthetic oligonucleotide
ucugacgacuugcauaacc

SEQ ID NO: 668030 - RNA, 19 nt, Artificial Sequence
  Description of Artificial Sequence: Synthetic oligonucleotide
cucaauaccaccauguuaa

SEQ ID NO: 668031 - RNA, 19 nt, Artificial Sequence
  Description of Artificial Sequence: Synthetic oligonucleotide
aaauucagugucucaucag

SEQ ID NO: 668032 - RNA, 19 nt, Artificial Sequence
  Description of Artificial Sequence: Synthetic oligonucleotide
agugccaagcggcagugcc

SEQ ID NO: 668033 - RNA, 19 nt, Artificial Sequence
  Description of Artificial Sequence: Synthetic oligonucleotide
ggagcgaugaaauucagug

SEQ ID NO: 668034 - RNA, 19 nt, Artificial Sequence
  Description of Artificial Sequence: Synthetic oligonucleotide
uaccucuagaaacagagau

SEQ ID NO: 668035 - RNA, 19 nt, Artificial Sequence
  Description of Artificial Sequence: Synthetic oligonucleotide
aaguauggccuauaguaga

SEQ ID NO: 668036 - RNA, 19 nt, Artificial Sequence
  Description of Artificial Sequence: Synthetic oligonucleotide
agguaaacugccccgaguc

SEQ ID NO: 668037 - RNA, 19 nt, Artificial Sequence
  Description of Artificial Sequence: Synthetic oligonucleotide
uacucauacuuauuaggag

SEQ ID NO: 668038 - RNA, 19 nt, Artificial Sequence
  Description of Artificial Sequence: Synthetic oligonucleotide
uauaaguauggccuauagu

SEQ ID NO: 668039 - RNA, 19 nt, Artificial Sequence
  Description of Artificial Sequence: Synthetic oligonucleotide
ucggguaguaccaccaugc

SEQ ID NO: 668040 - RNA, 19 nt, Artificial Sequence
  Description of Artificial Sequence: Synthetic oligonucleotide
uaauggaggaccuugugau

SEQ ID NO: 668041 - RNA, 19 nt, Artificial Sequence
  Description of Artificial Sequence: Synthetic oligonucleotide
gaccuauuaagcaaaagca

SEQ ID NO: 668042 - RNA, 19 nt, Artificial Sequence
  Description of Artificial Sequence: Synthetic oligonucleotide
aaacacucuaaccuaggau

SEQ ID NO: 668043 - RNA, 19 nt, Artificial Sequence
  Description of Artificial Sequence: Synthetic oligonucleotide
agaacauuggaugguaguc

SEQ ID NO: 668044 - RNA, 19 nt, Artificial Sequence
  Description of Artificial Sequence: Synthetic oligonucleotide
gaaauucagugucucauca

SEQ ID NO: 668045 - RNA, 19 nt, Artificial Sequence
  Description of Artificial Sequence: Synthetic oligonucleotide
agugucucuucugagcugc

SEQ ID NO: 668046 - RNA, 19 nt, Artificial Sequence
  Description of Artificial Sequence: Synthetic oligonucleotide
uuggauacagaugccaaag

SEQ ID NO: 668047 - RNA, 19 nt, Artificial Sequence
  Description of Artificial Sequence: Synthetic oligonucleotide
gaugagaccgagugcuugg

SEQ ID NO: 668048 - RNA, 19 nt, Artificial Sequence
  Description of Artificial Sequence: Synthetic oligonucleotide
gguaguaccaccaugccag

SEQ ID NO: 668049 - RNA, 19 nt, Artificial Sequence
  Description of Artificial Sequence: Synthetic oligonucleotide
auaauggaggaccuuguga

SEQ ID NO: 668050 - RNA, 19 nt, Artificial Sequence
  Description of Artificial Sequence: Synthetic oligonucleotide
ugaggaguagucaccacga

SEQ ID NO: 668051 - RNA, 19 nt, Artificial Sequence
  Description of Artificial Sequence: Synthetic oligonucleotide
uaaacacucuaaccuagga

SEQ ID NO: 668052 - RNA, 19 nt, Artificial Sequence
  Description of Artificial Sequence: Synthetic oligonucleotide
uguuaacaugcguccaagg

SEQ ID NO: 668053 - RNA, 19 nt, Artificial Sequence
  Description of Artificial Sequence: Synthetic oligonucleotide
ucucugacgacuugcauaa

SEQ ID NO: 668054 - RNA, 19 nt, Artificial Sequence
  Description of Artificial Sequence: Synthetic oligonucleotide
uugaacugauccaaagagu

SEQ ID NO: 668055 - RNA, 19 nt, Artificial Sequence
  Description of Artificial Sequence: Synthetic oligonucleotide
accacuacugagucuguac

SEQ ID NO: 668056 - RNA, 19 nt, Artificial Sequence
  Description of Artificial Sequence: Synthetic oligonucleotide
cuaauggcagaaaccacag

SEQ ID NO: 668057 - RNA, 19 nt, Artificial Sequence
  Description of Artificial Sequence: Synthetic oligonucleotide
caugcguccaaggagagag

SEQ ID NO: 668058 - RNA, 19 nt, Artificial Sequence
  Description of Artificial Sequence: Synthetic oligonucleotide
aagcggcagugccaaaacc

SEQ ID NO: 668059 - RNA, 19 nt, Artificial Sequence
  Description of Artificial Sequence: Synthetic oligonucleotide
aaccguagaaucucugagu

SEQ ID NO: 668060 - RNA, 19 nt, Artificial Sequence
  Description of Artificial Sequence: Synthetic oligonucleotide
aaaagcgcggucaugggug

SEQ ID NO: 668061 - RNA, 19 nt, Artificial Sequence
  Description of Artificial Sequence: Synthetic oligonucleotide
uccguagugauagacgaag

SEQ ID NO: 668062 - RNA, 19 nt, Artificial Sequence
  Description of Artificial Sequence: Synthetic oligonucleotide
uauauaguacacucuucgu

SEQ ID NO: 668063 - RNA, 19 nt, Artificial Sequence
  Description of Artificial Sequence: Synthetic oligonucleotide
accuaaggggcacaaggac

SEQ ID NO: 668064 - RNA, 19 nt, Artificial Sequence
  Description of Artificial Sequence: Synthetic oligonucleotide
ugucucaucagggucauac

SEQ ID NO: 668065 - RNA, 19 nt, Artificial Sequence
  Description of Artificial Sequence: Synthetic oligonucleotide
gaugggaugaucuuauaua

SEQ ID NO: 668066 - RNA, 19 nt, Artificial Sequence
  Description of Artificial Sequence: Synthetic oligonucleotide
guauaaguauggccuauag

SEQ ID NO: 668067 - RNA, 19 nt, Artificial Sequence
  Description of Artificial Sequence: Synthetic oligonucleotide
ccuauuaagcaaaagcaag

SEQ ID NO: 668068 - RNA, 19 nt, Artificial Sequence
  Description of Artificial Sequence: Synthetic oligonucleotide
gacuugcauaaccuuauug

SEQ ID NO: 668069 - RNA, 19 nt, Artificial Sequence
  Description of Artificial Sequence: Synthetic oligonucleotide
accuuauugaaguccucgg

SEQ ID NO: 668070 - RNA, 19 nt, Artificial Sequence
  Description of Artificial Sequence: Synthetic oligonucleotide
aacauuggaugguagucau

SEQ ID NO: 668071 - RNA, 19 nt, Artificial Sequence
  Description of Artificial Sequence: Synthetic oligonucleotide
cauuggaugguagucauug

SEQ ID NO: 668072 - RNA, 19 nt, Artificial Sequence
  Description of Artificial Sequence: Synthetic oligonucleotide
auggcuaauggcagaaacc

SEQ ID NO: 668073 - RNA, 19 nt, Artificial Sequence
  Description of Artificial Sequence: Synthetic oligonucleotide
acugagucuguacaagucu

SEQ ID NO: 668074 - RNA, 19 nt, Artificial Sequence
  Description of Artificial Sequence: Synthetic oligonucleotide
uacaugucuguauaaguau

SEQ ID NO: 668075 - RNA, 19 nt, Artificial Sequence
  Description of Artificial Sequence: Synthetic oligonucleotide
auaguacacucuucgucgg

SEQ ID NO: 668076 - RNA, 19 nt, Artificial Sequence
  Description of Artificial Sequence: Synthetic oligonucleotide
aaugagcccucagagaccu

SEQ ID NO: 668077 - RNA, 19 nt, Artificial Sequence
  Description of Artificial Sequence: Synthetic oligonucleotide
guuaacaugcguccaagga

SEQ ID NO: 668078 - RNA, 19 nt, Artificial Sequence
  Description of Artificial Sequence: Synthetic oligonucleotide
uagugaauggggaccaaga

SEQ ID NO: 668079 - RNA, 19 nt, Artificial Sequence
  Description of Artificial Sequence: Synthetic oligonucleotide
uauggccuauaguagagaa

SEQ ID NO: 668080 - RNA, 19 nt, Artificial Sequence
  Description of Artificial Sequence: Synthetic oligonucleotide
ugugcgugugcuucaagug

SEQ ID NO: 668081 - RNA, 19 nt, Artificial Sequence
  Description of Artificial Sequence: Synthetic oligonucleotide
guuucgagggcagagcccg

SEQ ID NO: 668082 - RNA, 19 nt, Artificial Sequence
  Description of Artificial Sequence: Synthetic oligonucleotide
ucuucgucggguaguacca

SEQ ID NO: 668083 - RNA, 19 nt, Artificial Sequence
  Description of Artificial Sequence: Synthetic oligonucleotide
cucuucgucggguaguacc

SEQ ID NO: 668084 - RNA, 19 nt, Artificial Sequence
  Description of Artificial Sequence: Synthetic oligonucleotide
uugcuaccuauccugacac

SEQ ID NO: 668085 - RNA, 19 nt, Artificial Sequence
  Description of Artificial Sequence: Synthetic oligonucleotide
gcuaggaugagaccgagug

SEQ ID NO: 668086 - RNA, 19 nt, Artificial Sequence
  Description of Artificial Sequence: Synthetic oligonucleotide
ucccguagcuccacaauag

SEQ ID NO: 668087 - RNA, 19 nt, Artificial Sequence
  Description of Artificial Sequence: Synthetic oligonucleotide
gccaaaaccgcucuugccg

SEQ ID NO: 668088 - RNA, 19 nt, Artificial Sequence
  Description of Artificial Sequence: Synthetic oligonucleotide
ucuaaccuaggaugggaug

SEQ ID NO: 668089 - RNA, 19 nt, Artificial Sequence
  Description of Artificial Sequence: Synthetic oligonucleotide
agauagucacuccaagccu

SEQ ID NO: 668090 - RNA, 19 nt, Artificial Sequence
  Description of Artificial Sequence: Synthetic oligonucleotide
ugguuagcucacuagacau

SEQ ID NO: 668091 - RNA, 19 nt, Artificial Sequence
  Description of Artificial Sequence: Synthetic oligonucleotide
gcuaccaguacucaauacc

SEQ ID NO: 668092 - RNA, 19 nt, Artificial Sequence
  Description of Artificial Sequence: Synthetic oligonucleotide
ucacuagacauguccuucc

SEQ ID NO: 668093 - RNA, 19 nt, Artificial Sequence
  Description of Artificial Sequence: Synthetic oligonucleotide
cuaccaguacucaauacca

SEQ ID NO: 668094 - RNA, 19 nt, Artificial Sequence
  Description of Artificial Sequence: Synthetic oligonucleotide
ucaaaagcgcggucauggg

SEQ ID NO: 668095 - RNA, 19 nt, Artificial Sequence
  Description of Artificial Sequence: Synthetic oligonucleotide
gaugguagucauugcgccc

SEQ ID NO: 668096 - RNA, 19 nt, Artificial Sequence
  Description of Artificial Sequence: Synthetic oligonucleotide
cauugcgcccuucauuugg

SEQ ID NO: 668097 - RNA, 19 nt, Artificial Sequence
  Description of Artificial Sequence: Synthetic oligonucleotide
agcuguaacccacaugggu

SEQ ID NO: 668098 - RNA, 19 nt, Artificial Sequence
  Description of Artificial Sequence: Synthetic oligonucleotide
uaccuauccugacaccugc

SEQ ID NO: 668099 - RNA, 19 nt, Artificial Sequence
  Description of Artificial Sequence: Synthetic oligonucleotide
uggagccuaagagagcagg

SEQ ID NO: 668100 - RNA, 19 nt, Artificial Sequence
  Description of Artificial Sequence: Synthetic oligonucleotide
caaccguagaaucucugag

SEQ ID NO: 668101 - RNA, 19 nt, Artificial Sequence
  Description of Artificial Sequence: Synthetic oligonucleotide
aagguaaacugccccgagu

SEQ ID NO: 668102 - RNA, 19 nt, Artificial Sequence
  Description of Artificial Sequence: Synthetic oligonucleotide
uauugaaguccucggcugu

SEQ ID NO: 668103 - RNA, 19 nt, Artificial Sequence
  Description of Artificial Sequence: Synthetic oligonucleotide
cuuauuaggagcgaugaaa

SEQ ID NO: 668104 - RNA, 19 nt, Artificial Sequence
  Description of Artificial Sequence: Synthetic oligonucleotide
caguacucauacuuauuag

SEQ ID NO: 668105 - RNA, 19 nt, Artificial Sequence
  Description of Artificial Sequence: Synthetic oligonucleotide
acuucaugacuccuaguga

SEQ ID NO: 668106 - RNA, 19 nt, Artificial Sequence
  Description of Artificial Sequence: Synthetic oligonucleotide
ugcccugacuucaugacuc

SEQ ID NO: 668107 - RNA, 19 nt, Artificial Sequence
  Description of Artificial Sequence: Synthetic oligonucleotide
uggccuuaauaucugcaac

SEQ ID NO: 668108 - RNA, 19 nt, Artificial Sequence
  Description of Artificial Sequence: Synthetic oligonucleotide
ugguuacaccccuagcuca

SEQ ID NO: 668109 - RNA, 19 nt, Artificial Sequence
  Description of Artificial Sequence: Synthetic oligonucleotide
gucaccacgaccacuacug

SEQ ID NO: 668110 - RNA, 19 nt, Artificial Sequence
  Description of Artificial Sequence: Synthetic oligonucleotide
gugauucagugccaagcgg

SEQ ID NO: 668111 - RNA, 19 nt, Artificial Sequence
  Description of Artificial Sequence: Synthetic oligonucleotide
agcggcagugccaaaaccg

SEQ ID NO: 668112 - RNA, 19 nt, Artificial Sequence
  Description of Artificial Sequence: Synthetic oligonucleotide
uaguacacucuucgucggg

SEQ ID NO: 668113 - RNA, 19 nt, Artificial Sequence
  Description of Artificial Sequence: Synthetic oligonucleotide
gagagguggauaccucuag

SEQ ID NO: 668114 - RNA, 19 nt, Artificial Sequence
  Description of Artificial Sequence: Synthetic oligonucleotide
acacucuaaccuaggaugg

SEQ ID NO: 668115 - RNA, 19 nt, Artificial Sequence
  Description of Artificial Sequence: Synthetic oligonucleotide
guacucauacuuauuagga

SEQ ID NO: 668116 - RNA, 19 nt, Artificial Sequence
  Description of Artificial Sequence: Synthetic oligonucleotide
augggugaagaacauugga

SEQ ID NO: 668117 - RNA, 19 nt, Artificial Sequence
  Description of Artificial Sequence: Synthetic oligonucleotide
ugagaccgagugcuugggg

SEQ ID NO: 668118 - RNA, 19 nt, Artificial Sequence
  Description of Artificial Sequence: Synthetic oligonucleotide
uccacaauagguggggacu

SEQ ID NO: 668119 - RNA, 19 nt, Artificial Sequence
  Description of Artificial Sequence: Synthetic oligonucleotide
cuauaguagagaaaauaua

SEQ ID NO: 668120 - RNA, 19 nt, Artificial Sequence
  Description of Artificial Sequence: Synthetic oligonucleotide
cauccguagugauagacga

SEQ ID NO: 668121 - RNA, 19 nt, Artificial Sequence
  Description of Artificial Sequence: Synthetic oligonucleotide
aaaaccgcucuugccgccg

SEQ ID NO: 668122 - RNA, 19 nt, Artificial Sequence
  Description of Artificial Sequence: Synthetic oligonucleotide
gaagaacauuggaugguag

SEQ ID NO: 668123 - RNA, 19 nt, Artificial Sequence
  Description of Artificial Sequence: Synthetic oligonucleotide
accguagaaucucugagua

SEQ ID NO: 668124 - RNA, 19 nt, Artificial Sequence
  Description of Artificial Sequence: Synthetic oligonucleotide
cuucaugacuccuagugaa

SEQ ID NO: 668125 - RNA, 19 nt, Artificial Sequence
  Description of Artificial Sequence: Synthetic oligonucleotide
ucagauuggcgcaaccgua

SEQ ID NO: 668126 - RNA, 19 nt, Artificial Sequence
  Description of Artificial Sequence: Synthetic oligonucleotide
uuucggaagcugcugcccu

SEQ ID NO: 668127 - RNA, 19 nt, Artificial Sequence
  Description of Artificial Sequence: Synthetic oligonucleotide
aguauggccuauaguagag

SEQ ID NO: 668128 - RNA, 19 nt, Artificial Sequence
  Description of Artificial Sequence: Synthetic oligonucleotide
gugaauggggaccaagaga

SEQ ID NO: 668129 - RNA, 19 nt, Artificial Sequence
  Description of Artificial Sequence: Synthetic oligonucleotide
uuacaccccuagcucauga

SEQ ID NO: 668130 - RNA, 19 nt, Artificial Sequence
  Description of Artificial Sequence: Synthetic oligonucleotide
cuaggaugagaccgagugc

SEQ ID NO: 668131 - RNA, 19 nt, Artificial Sequence
  Description of Artificial Sequence: Synthetic oligonucleotide
agugccaaaaccgcucuug

SEQ ID NO: 668132 - RNA, 19 nt, Artificial Sequence
  Description of Artificial Sequence: Synthetic oligonucleotide
ugagcaaccugaagauagu

SEQ ID NO: 668133 - RNA, 19 nt, Artificial Sequence
  Description of Artificial Sequence: Synthetic oligonucleotide
guaaacugccccgagucug

SEQ ID NO: 668134 - RNA, 19 nt, Artificial Sequence
  Description of Artificial Sequence: Synthetic oligonucleotide
aaaugucaccuccccuuga

SEQ ID NO: 668135 - RNA, 19 nt, Artificial Sequence
  Description of Artificial Sequence: Synthetic oligonucleotide
uagacauguccuuccccag

SEQ ID NO: 668136 - RNA, 19 nt, Artificial Sequence
  Description of Artificial Sequence: Synthetic oligonucleotide
ugaagaacauuggauggua

SEQ ID NO: 668137 - RNA, 19 nt, Artificial Sequence
  Description of Artificial Sequence: Synthetic oligonucleotide
uggauaccucuagaaacag

SEQ ID NO: 668138 - RNA, 19 nt, Artificial Sequence
  Description of Artificial Sequence: Synthetic oligonucleotide
uaccaguacucaauaccac

SEQ ID NO: 668139 - RNA, 19 nt, Artificial Sequence
  Description of Artificial Sequence: Synthetic oligonucleotide
ugccaaaaccgcucuugcc

SEQ ID NO: 668140 - RNA, 19 nt, Artificial Sequence
  Description of Artificial Sequence: Synthetic oligonucleotide
ggaugguagucauugcgcc

SEQ ID NO: 668141 - RNA, 19 nt, Artificial Sequence
  Description of Artificial Sequence: Synthetic oligonucleotide
auacuuauuaggagcgaug

SEQ ID NO: 668142 - RNA, 19 nt, Artificial Sequence
  Description of Artificial Sequence: Synthetic oligonucleotide
ucgucggguaguaccacca

SEQ ID NO: 668143 - RNA, 19 nt, Artificial Sequence
  Description of Artificial Sequence: Synthetic oligonucleotide
cuaaccuaggaugggauga

SEQ ID NO: 668144 - RNA, 19 nt, Artificial Sequence
  Description of Artificial Sequence: Synthetic oligonucleotide
auaguagagaaaauauaua

SEQ ID NO: 668145 - RNA, 19 nt, Artificial Sequence
  Description of Artificial Sequence: Synthetic oligonucleotide
aauggaggaccuugugauu

SEQ ID NO: 668146 - RNA, 19 nt, Artificial Sequence
  Description of Artificial Sequence: Synthetic oligonucleotide
auguuaacaugcguccaag

SEQ ID NO: 668147 - RNA, 19 nt, Artificial Sequence
  Description of Artificial Sequence: Synthetic oligonucleotide
ugagaccggaaugagcccu

SEQ ID NO: 668148 - RNA, 19 nt, Artificial Sequence
  Description of Artificial Sequence: Synthetic oligonucleotide
uucaugacuccuagugaau

SEQ ID NO: 668149 - RNA, 19 nt, Artificial Sequence
  Description of Artificial Sequence: Synthetic oligonucleotide
aaagcgcggucauggguga

SEQ ID NO: 668150 - RNA, 19 nt, Artificial Sequence
  Description of Artificial Sequence: Synthetic oligonucleotide
uacucaauaccaccauguu

SEQ ID NO: 668151 - RNA, 19 nt, Artificial Sequence
  Description of Artificial Sequence: Synthetic oligonucleotide
ucucaccauucccaguccu

SEQ ID NO: 668152 - RNA, 19 nt, Artificial Sequence
  Description of Artificial Sequence: Synthetic oligonucleotide
agguggauaccucuagaaa

SEQ ID NO: 668153 - RNA, 19 nt, Artificial Sequence
  Description of Artificial Sequence: Synthetic oligonucleotide
ggugaucugcucucugacg

SEQ ID NO: 668154 - RNA, 19 nt, Artificial Sequence
  Description of Artificial Sequence: Synthetic oligonucleotide
gacgcagacucaagguggg

SEQ ID NO: 668155 - RNA, 19 nt, Artificial Sequence
  Description of Artificial Sequence: Synthetic oligonucleotide
uucgucggguaguaccacc

SEQ ID NO: 668156 - RNA, 19 nt, Artificial Sequence
  Description of Artificial Sequence: Synthetic oligonucleotide
agucauugcgcccuucauu

SEQ ID NO: 668157 - RNA, 19 nt, Artificial Sequence
  Description of Artificial Sequence: Synthetic oligonucleotide
cuaccuauccugacaccug

SEQ ID NO: 668158 - RNA, 19 nt, Artificial Sequence
  Description of Artificial Sequence: Synthetic oligonucleotide
aaccuaggaugggaugauc

SEQ ID NO: 668159 - RNA, 19 nt, Artificial Sequence
  Description of Artificial Sequence: Synthetic oligonucleotide
uccuagugaauggggacca

SEQ ID NO: 668160 - RNA, 19 nt, Artificial Sequence
  Description of Artificial Sequence: Synthetic oligonucleotide
cuagugaauggggaccaag

SEQ ID NO: 668161 - RNA, 19 nt, Artificial Sequence
  Description of Artificial Sequence: Synthetic oligonucleotide
cguagaaucucugaguagc

SEQ ID NO: 668162 - RNA, 19 nt, Artificial Sequence
  Description of Artificial Sequence: Synthetic oligonucleotide
cucauccguagugauagac

SEQ ID NO: 668163 - RNA, 19 nt, Artificial Sequence
  Description of Artificial Sequence: Synthetic oligonucleotide
guggauaccucuagaaaca

SEQ ID NO: 668164 - RNA, 19 nt, Artificial Sequence
  Description of Artificial Sequence: Synthetic oligonucleotide
guuugaggaguagucacca

SEQ ID NO: 668165 - RNA, 19 nt, Artificial Sequence
  Description of Artificial Sequence: Synthetic oligonucleotide
cuaagagagcaggacucag

SEQ ID NO: 668166 - RNA, 19 nt, Artificial Sequence
  Description of Artificial Sequence: Synthetic oligonucleotide
uggcgcaaccguagaaucu

SEQ ID NO: 668167 - RNA, 19 nt, Artificial Sequence
  Description of Artificial Sequence: Synthetic oligonucleotide
cuagccgcuucuugaaauc

SEQ ID NO: 668168 - RNA, 19 nt, Artificial Sequence
  Description of Artificial Sequence: Synthetic oligonucleotide
cacuagacauguccuuccc

SEQ ID NO: 668169 - RNA, 19 nt, Artificial Sequence
  Description of Artificial Sequence: Synthetic oligonucleotide
uguauaaguauggccuaua

SEQ ID NO: 668170 - RNA, 19 nt, Artificial Sequence
  Description of Artificial Sequence: Synthetic oligonucleotide
uaacccacauggguucucc

SEQ ID NO: 668171 - RNA, 19 nt, Artificial Sequence
  Description of Artificial Sequence: Synthetic oligonucleotide
agcaaccugaagauaguca

SEQ ID NO: 668172 - RNA, 19 nt, Artificial Sequence
  Description of Artificial Sequence: Synthetic oligonucleotide
aacaugcguccaaggagag

SEQ ID NO: 668173 - RNA, 19 nt, Artificial Sequence
  Description of Artificial Sequence: Synthetic oligonucleotide
guuggauacagaugccaaa

SEQ ID NO: 668174 - RNA, 19 nt, Artificial Sequence
  Description of Artificial Sequence: Synthetic oligonucleotide
auuggcgcaaccguagaau

SEQ ID NO: 668175 - RNA, 19 nt, Artificial Sequence
  Description of Artificial Sequence: Synthetic oligonucleotide
ggguuugaggaguagucac

SEQ ID NO: 668176 - RNA, 19 nt, Artificial Sequence
  Description of Artificial Sequence: Synthetic oligonucleotide
ccuuauugaaguccucggc

SEQ ID NO: 668177 - RNA, 19 nt, Artificial Sequence
  Description of Artificial Sequence: Synthetic oligonucleotide
aguacacucuucgucgggu

SEQ ID NO: 668178 - RNA, 19 nt, Artificial Sequence
  Description of Artificial Sequence: Synthetic oligonucleotide
guaguaccaccaugccagg

SEQ ID NO: 668179 - RNA, 19 nt, Artificial Sequence
  Description of Artificial Sequence: Synthetic oligonucleotide
acucuaaccuaggauggga

SEQ ID NO: 668180 - RNA, 19 nt, Artificial Sequence
  Description of Artificial Sequence: Synthetic oligonucleotide
ccuuaauaucugcaacagg

SEQ ID NO: 668181 - RNA, 19 nt, Artificial Sequence
  Description of Artificial Sequence: Synthetic oligonucleotide
gacuccuagugaaugggga

SEQ ID NO: 668182 - RNA, 19 nt, Artificial Sequence
  Description of Artificial Sequence: Synthetic oligonucleotide
uggaggaccuugugauuca

SEQ ID NO: 668183 - RNA, 19 nt, Artificial Sequence
  Description of Artificial Sequence: Synthetic oligonucleotide
gauucagugccaagcggca

SEQ ID NO: 668184 - RNA, 19 nt, Artificial Sequence
  Description of Artificial Sequence: Synthetic oligonucleotide
cucucugacgacuugcaua

SEQ ID NO: 668185 - RNA, 19 nt, Artificial Sequence
  Description of Artificial Sequence: Synthetic oligonucleotide
augcccugacuucaugacu

SEQ ID NO: 668186 - RNA, 19 nt, Artificial Sequence
  Description of Artificial Sequence: Synthetic oligonucleotide
guuagcucacuagacaugu

SEQ ID NO: 668187 - RNA, 19 nt, Artificial Sequence
  Description of Artificial Sequence: Synthetic oligonucleotide
auugcgcccuucauuuggg

SEQ ID NO: 668188 - RNA, 19 nt, Artificial Sequence
  Description of Artificial Sequence: Synthetic oligonucleotide
gucggguaguaccaccaug

SEQ ID NO: 668189 - RNA, 19 nt, Artificial Sequence
  Description of Artificial Sequence: Synthetic oligonucleotide
ggaccuugugauucagugc

SEQ ID NO: 668190 - RNA, 19 nt, Artificial Sequence
  Description of Artificial Sequence: Synthetic oligonucleotide
cuauccugacaccugcaca

SEQ ID NO: 668191 - RNA, 19 nt, Artificial Sequence
  Description of Artificial Sequence: Synthetic oligonucleotide
caagcggcagugccaaaac

SEQ ID NO: 668192 - RNA, 19 nt, Artificial Sequence
  Description of Artificial Sequence: Synthetic oligonucleotide
gccuuaauaucugcaacag

SEQ ID NO: 668193 - RNA, 19 nt, Artificial Sequence
  Description of Artificial Sequence: Synthetic oligonucleotide
cauguuaacaugcguccaa

SEQ ID NO: 668194 - RNA, 19 nt, Artificial Sequence
  Description of Artificial Sequence: Synthetic oligonucleotide
caaaaccgcucuugccgcc

SEQ ID NO: 668195 - RNA, 19 nt, Artificial Sequence
  Description of Artificial Sequence: Synthetic oligonucleotide
agauuggcgcaaccguaga

SEQ ID NO: 668196 - RNA, 19 nt, Artificial Sequence
  Description of Artificial Sequence: Synthetic oligonucleotide
aaacugccccgagucuggg

SEQ ID NO: 668197 - RNA, 19 nt, Artificial Sequence
  Description of Artificial Sequence: Synthetic oligonucleotide
uagucauugcgcccuucau

SEQ ID NO: 668198 - RNA, 19 nt, Artificial Sequence
  Description of Artificial Sequence: Synthetic oligonucleotide
guacucaauaccaccaugu

SEQ ID NO: 668199 - RNA, 19 nt, Artificial Sequence
  Description of Artificial Sequence: Synthetic oligonucleotide
ggguuucgagggcagagcc

SEQ ID NO: 668200 - RNA, 19 nt, Artificial Sequence
  Description of Artificial Sequence: Synthetic oligonucleotide
aaccgcucuugccgccgac

SEQ ID NO: 668201 - RNA, 19 nt, Artificial Sequence
  Description of Artificial Sequence: Synthetic oligonucleotide
cacucuaaccuaggauggg

SEQ ID NO: 668202 - RNA, 19 nt, Artificial Sequence
  Description of Artificial Sequence: Synthetic oligonucleotide
agaccgagugcuuggggaa

SEQ ID NO: 668203 - RNA, 19 nt, Artificial Sequence
  Description of Artificial Sequence: Synthetic oligonucleotide
aacccacauggguucucca

SEQ ID NO: 668204 - RNA, 19 nt, Artificial Sequence
  Description of Artificial Sequence: Synthetic oligonucleotide
uuagcucacuagacauguc

SEQ ID NO: 668205 - RNA, 19 nt, Artificial Sequence
  Description of Artificial Sequence: Synthetic oligonucleotide
uacaccccuagcucaugac

SEQ ID NO: 668206 - RNA, 19 nt, Artificial Sequence
  Description of Artificial Sequence: Synthetic oligonucleotide
augagaccgagugcuuggg

SEQ ID NO: 668207 - RNA, 19 nt, Artificial Sequence
  Description of Artificial Sequence: Synthetic oligonucleotide
agcucacuagacauguccu

SEQ ID NO: 668208 - RNA, 19 nt, Artificial Sequence
  Description of Artificial Sequence: Synthetic oligonucleotide
ccggaaugagcccucagag

SEQ ID NO: 668209 - RNA, 19 nt, Artificial Sequence
  Description of Artificial Sequence: Synthetic oligonucleotide
gauuggcgcaaccguagaa

SEQ ID NO: 668210 - RNA, 19 nt, Artificial Sequence
  Description of Artificial Sequence: Synthetic oligonucleotide
cucugguuacaccccuagc

SEQ ID NO: 668211 - RNA, 19 nt, Artificial Sequence
  Description of Artificial Sequence: Synthetic oligonucleotide
cagcuguaacccacauggg

SEQ ID NO: 668212 - RNA, 19 nt, Artificial Sequence
  Description of Artificial Sequence: Synthetic oligonucleotide
gagcgaugaaauucagugu

SEQ ID NO: 668213 - RNA, 19 nt, Artificial Sequence
  Description of Artificial Sequence: Synthetic oligonucleotide
caaggccuguccuugcuga

SEQ ID NO: 668214 - RNA, 19 nt, Artificial Sequence
  Description of Artificial Sequence: Synthetic oligonucleotide
gguuugaggaguagucacc

SEQ ID NO: 668215 - RNA, 19 nt, Artificial Sequence
  Description of Artificial Sequence: Synthetic oligonucleotide
uguaacccacauggguucu

SEQ ID NO: 668216 - RNA, 19 nt, Artificial Sequence
  Description of Artificial Sequence: Synthetic oligonucleotide
cugacgacuugcauaaccu

SEQ ID NO: 668217 - RNA, 19 nt, Artificial Sequence
  Description of Artificial Sequence: Synthetic oligonucleotide
gaauggggaccaagagaag

SEQ ID NO: 668218 - RNA, 19 nt, Artificial Sequence
  Description of Artificial Sequence: Synthetic oligonucleotide
gggccuguaccuaaggggc

SEQ ID NO: 668219 - RNA, 19 nt, Artificial Sequence
  Description of Artificial Sequence: Synthetic oligonucleotide
agauugcuaccuauccuga

SEQ ID NO: 668220 - RNA, 19 nt, Artificial Sequence
  Description of Artificial Sequence: Synthetic oligonucleotide
cucucaccauucccagucc

SEQ ID NO: 668221 - RNA, 19 nt, Artificial Sequence
  Description of Artificial Sequence: Synthetic oligonucleotide
aaaccgcucuugccgccga

SEQ ID NO: 668222 - RNA, 19 nt, Artificial Sequence
  Description of Artificial Sequence: Synthetic oligonucleotide
gagcaaccugaagauaguc

SEQ ID NO: 668223 - RNA, 19 nt, Artificial Sequence
  Description of Artificial Sequence: Synthetic oligonucleotide
acgacuugcauaaccuuau

SEQ ID NO: 668224 - RNA, 19 nt, Artificial Sequence
  Description of Artificial Sequence: Synthetic oligonucleotide
gugagaccggaaugagccc

SEQ ID NO: 668225 - RNA, 19 nt, Artificial Sequence
  Description of Artificial Sequence: Synthetic oligonucleotide
agcccgggugaucugcucu

SEQ ID NO: 668226 - RNA, 19 nt, Artificial Sequence
  Description of Artificial Sequence: Synthetic oligonucleotide
uaaccuaggaugggaugau

SEQ ID NO: 668227 - RNA, 19 nt, Artificial Sequence
  Description of Artificial Sequence: Synthetic oligonucleotide
caauaccaccauguuaaca

SEQ ID NO: 668228 - RNA, 19 nt, Artificial Sequence
  Description of Artificial Sequence: Synthetic oligonucleotide
ccucucaccauucccaguc

SEQ ID NO: 668229 - RNA, 19 nt, Artificial Sequence
  Description of Artificial Sequence: Synthetic oligonucleotide
acuccaagccucucaccau

SEQ ID NO: 668230 - RNA, 19 nt, Artificial Sequence
  Description of Artificial Sequence: Synthetic oligonucleotide
gcaaccguagaaucucuga

SEQ ID NO: 668231 - RNA, 19 nt, Artificial Sequence
  Description of Artificial Sequence: Synthetic oligonucleotide
agggugagaccggaaugag

SEQ ID NO: 668232 - RNA, 19 nt, Artificial Sequence
  Description of Artificial Sequence: Synthetic oligonucleotide
cacuacugagucuguacaa

SEQ ID NO: 668233 - RNA, 19 nt, Artificial Sequence
  Description of Artificial Sequence: Synthetic oligonucleotide
uggcuaggaugagaccgag

SEQ ID NO: 668234 - RNA, 19 nt, Artificial Sequence
  Description of Artificial Sequence: Synthetic oligonucleotide
gaccgagugcuuggggaag

SEQ ID NO: 668235 - RNA, 19 nt, Artificial Sequence
  Description of Artificial Sequence: Synthetic oligonucleotide
ccuagcucaugaccaagag

SEQ ID NO: 668236 - RNA, 19 nt, Artificial Sequence
  Description of Artificial Sequence: Synthetic oligonucleotide
auagucacuccaagccucu

SEQ ID NO: 668237 - RNA, 19 nt, Artificial Sequence
  Description of Artificial Sequence: Synthetic oligonucleotide
gaccggaaugagcccucag

SEQ ID NO: 668238 - RNA, 19 nt, Artificial Sequence
  Description of Artificial Sequence: Synthetic oligonucleotide
ugccaagcggcagugccaa

SEQ ID NO: 668239 - RNA, 19 nt, Artificial Sequence
  Description of Artificial Sequence: Synthetic oligonucleotide
cuucaaaagcgcggucaug

SEQ ID NO: 668240 - RNA, 19 nt, Artificial Sequence
  Description of Artificial Sequence: Synthetic oligonucleotide
cuggcuaggaugagaccga

SEQ ID NO: 668241 - RNA, 19 nt, Artificial Sequence
  Description of Artificial Sequence: Synthetic oligonucleotide
cucagauuggcgcaaccgu

SEQ ID NO: 668242 - RNA, 19 nt, Artificial Sequence
  Description of Artificial Sequence: Synthetic oligonucleotide
gguuagcucacuagacaug

SEQ ID NO: 668243 - RNA, 19 nt, Artificial Sequence
  Description of Artificial Sequence: Synthetic oligonucleotide
cagggugagaccggaauga

SEQ ID NO: 668244 - RNA, 19 nt, Artificial Sequence
  Description of Artificial Sequence: Synthetic oligonucleotide
cuaggaugggaugaucuua

SEQ ID NO: 668245 - RNA, 19 nt, Artificial Sequence
  Description of Artificial Sequence: Synthetic oligonucleotide
acacucuucgucggguagu

SEQ ID NO: 668246 - RNA, 19 nt, Artificial Sequence
  Description of Artificial Sequence: Synthetic oligonucleotide
ggaugagaccgagugcuug

SEQ ID NO: 668247 - RNA, 19 nt, Artificial Sequence
  Description of Artificial Sequence: Synthetic oligonucleotide
cauuggguuugaggaguag

SEQ ID NO: 668248 - RNA, 19 nt, Artificial Sequence
  Description of Artificial Sequence: Synthetic oligonucleotide
cuucauguggggacagucu

SEQ ID NO: 668249 - RNA, 19 nt, Artificial Sequence
  Description of Artificial Sequence: Synthetic oligonucleotide
ccuuaaacacucuaaccua

SEQ ID NO: 668250 - RNA, 19 nt, Artificial Sequence
  Description of Artificial Sequence: Synthetic oligonucleotide
cuugccgccgacgguuccc

SEQ ID NO: 668251 - RNA, 19 nt, Artificial Sequence
  Description of Artificial Sequence: Synthetic oligonucleotide
agcgcggucaugggugaag

SEQ ID NO: 668252 - RNA, 19 nt, Artificial Sequence
  Description of Artificial Sequence: Synthetic oligonucleotide
accgcucuugccgccgacg

SEQ ID NO: 668253 - RNA, 19 nt, Artificial Sequence
  Description of Artificial Sequence: Synthetic oligonucleotide
ucaccuccccuugaggguu

SEQ ID NO: 668254 - RNA, 19 nt, Artificial Sequence
  Description of Artificial Sequence: Synthetic oligonucleotide
acucuucgucggguaguac

SEQ ID NO: 668255 - RNA, 19 nt, Artificial Sequence
  Description of Artificial Sequence: Synthetic oligonucleotide
uugcgcccuucauuuggga

SEQ ID NO: 668256 - RNA, 19 nt, Artificial Sequence
  Description of Artificial Sequence: Synthetic oligonucleotide
ggcuaccaguacucaauac

SEQ ID NO: 668257 - RNA, 19 nt, Artificial Sequence
  Description of Artificial Sequence: Synthetic oligonucleotide
gcacucaguuuuaucuucc

SEQ ID NO: 668258 - RNA, 19 nt, Artificial Sequence
  Description of Artificial Sequence: Synthetic oligonucleotide
gcaugcccugacuucauga

SEQ ID NO: 668259 - RNA, 19 nt, Artificial Sequence
  Description of Artificial Sequence: Synthetic oligonucleotide
guauggccuauaguagaga

SEQ ID NO: 668260 - RNA, 19 nt, Artificial Sequence
  Description of Artificial Sequence: Synthetic oligonucleotide
cauacuuauuaggagcgau

SEQ ID NO: 668261 - RNA, 19 nt, Artificial Sequence
  Description of Artificial Sequence: Synthetic oligonucleotide
cccguagcuccacaauagg

SEQ ID NO: 668262 - RNA, 19 nt, Artificial Sequence
  Description of Artificial Sequence: Synthetic oligonucleotide
guguuccuggagccuaaga

SEQ ID NO: 668263 - RNA, 19 nt, Artificial Sequence
  Description of Artificial Sequence: Synthetic oligonucleotide
guuacaccccuagcucaug

SEQ ID NO: 668264 - RNA, 19 nt, Artificial Sequence
  Description of Artificial Sequence: Synthetic oligonucleotide
auggccuauaguagagaaa

SEQ ID NO: 668265 - RNA, 19 nt, Artificial Sequence
  Description of Artificial Sequence: Synthetic oligonucleotide
caaaagcgcggucaugggu

SEQ ID NO: 668266 - RNA, 19 nt, Artificial Sequence
  Description of Artificial Sequence: Synthetic oligonucleotide
caggcuaccaguacucaau

SEQ ID NO: 668267 - RNA, 19 nt, Artificial Sequence
  Description of Artificial Sequence: Synthetic oligonucleotide
cucccguagcuccacaaua

SEQ ID NO: 668268 - RNA, 19 nt, Artificial Sequence
  Description of Artificial Sequence: Synthetic oligonucleotide
gcgcugaguccaucaaucc

SEQ ID NO: 668269 - RNA, 19 nt, Artificial Sequence
  Description of Artificial Sequence: Synthetic oligonucleotide
ggcgcaaccguagaaucuc

SEQ ID NO: 668270 - RNA, 19 nt, Artificial Sequence
  Description of Artificial Sequence: Synthetic oligonucleotide
ccguagaaucucugaguag

SEQ ID NO: 668271 - RNA, 19 nt, Artificial Sequence
  Description of Artificial Sequence: Synthetic oligonucleotide
ccuggagccuaagagagca

SEQ ID NO: 668272 - RNA, 19 nt, Artificial Sequence
  Description of Artificial Sequence: Synthetic oligonucleotide
gguuucgagggcagagccc

SEQ ID NO: 668273 - RNA, 19 nt, Artificial Sequence
  Description of Artificial Sequence: Synthetic oligonucleotide
ccacuacugagucuguaca

SEQ ID NO: 668274 - RNA, 19 nt, Artificial Sequence
  Description of Artificial Sequence: Synthetic oligonucleotide
ggcaagagagguggauacc

SEQ ID NO: 668275 - RNA, 19 nt, Artificial Sequence
  Description of Artificial Sequence: Synthetic oligonucleotide
cuucgucggguaguaccac

SEQ ID NO: 668276 - RNA, 19 nt, Artificial Sequence
  Description of Artificial Sequence: Synthetic oligonucleotide
acaugcguccaaggagaga

SEQ ID NO: 668277 - RNA, 19 nt, Artificial Sequence
  Description of Artificial Sequence: Synthetic oligonucleotide
gcaaggccuguccuugcug

SEQ ID NO: 668278 - RNA, 19 nt, Artificial Sequence
  Description of Artificial Sequence: Synthetic oligonucleotide
ggucgcuuuugguuagcuc

SEQ ID NO: 668279 - RNA, 19 nt, Artificial Sequence
  Description of Artificial Sequence: Synthetic oligonucleotide
aggucgcuuuugguuagcu

SEQ ID NO: 668280 - RNA, 19 nt, Artificial Sequence
  Description of Artificial Sequence: Synthetic oligonucleotide
aggcugugcgugugcuuca

SEQ ID NO: 668281 - RNA, 19 nt, Artificial Sequence
  Description of Artificial Sequence: Synthetic oligonucleotide
cucuaaccuaggaugggau

SEQ ID NO: 668282 - RNA, 19 nt, Artificial Sequence
  Description of Artificial Sequence: Synthetic oligonucleotide
gcggcagugccaaaaccgc

SEQ ID NO: 668283 - RNA, 19 nt, Artificial Sequence
  Description of Artificial Sequence: Synthetic oligonucleotide
ggccugacuuuuccugcag

SEQ ID NO: 668284 - RNA, 19 nt, Artificial Sequence
  Description of Artificial Sequence: Synthetic oligonucleotide
accgagugcuuggggaaga

SEQ ID NO: 668285 - RNA, 19 nt, Artificial Sequence
  Description of Artificial Sequence: Synthetic oligonucleotide
gggugagaccggaaugagc

SEQ ID NO: 668286 - RNA, 19 nt, Artificial Sequence
  Description of Artificial Sequence: Synthetic oligonucleotide
gcaagagagguggauaccu

SEQ ID NO: 668287 - RNA, 19 nt, Artificial Sequence
  Description of Artificial Sequence: Synthetic oligonucleotide
cucuugccgccgacgguuc

SEQ ID NO: 668288 - RNA, 19 nt, Artificial Sequence
  Description of Artificial Sequence: Synthetic oligonucleotide
ccaagccucucaccauucc

SEQ ID NO: 668289 - RNA, 19 nt, Artificial Sequence
  Description of Artificial Sequence: Synthetic oligonucleotide
gguaaacugccccgagucu

SEQ ID NO: 668290 - RNA, 19 nt, Artificial Sequence
  Description of Artificial Sequence: Synthetic oligonucleotide
ggauaccucuagaaacaga

SEQ ID NO: 668291 - RNA, 19 nt, Artificial Sequence
  Description of Artificial Sequence: Synthetic oligonucleotide
gccucgggaaucuggaugu

SEQ ID NO: 668292 - RNA, 19 nt, Artificial Sequence
  Description of Artificial Sequence: Synthetic oligonucleotide
cucugggucccauuggguu

SEQ ID NO: 668293 - RNA, 19 nt, Artificial Sequence
  Description of Artificial Sequence: Synthetic oligonucleotide
ccacaauagguggggacug

SEQ ID NO: 668294 - RNA, 19 nt, Artificial Sequence
  Description of Artificial Sequence: Synthetic oligonucleotide
guaacccacauggguucuc

SEQ ID NO: 668295 - RNA, 19 nt, Artificial Sequence
  Description of Artificial Sequence: Synthetic oligonucleotide
auccguagugauagacgaa

SEQ ID NO: 668296 - RNA, 19 nt, Artificial Sequence
  Description of Artificial Sequence: Synthetic oligonucleotide
ggggcaagagggaagcaaa

SEQ ID NO: 668297 - RNA, 19 nt, Artificial Sequence
  Description of Artificial Sequence: Synthetic oligonucleotide
gcccugacuucaugacucc

SEQ ID NO: 668298 - RNA, 19 nt, Artificial Sequence
  Description of Artificial Sequence: Synthetic oligonucleotide
ccgaccccaggcucugugg

SEQ ID NO: 668299 - RNA, 19 nt, Artificial Sequence
  Description of Artificial Sequence: Synthetic oligonucleotide
gaccacuacugagucugua

SEQ ID NO: 668300 - RNA, 19 nt, Artificial Sequence
  Description of Artificial Sequence: Synthetic oligonucleotide
gugccaagcggcagugcca

SEQ ID NO: 668301 - RNA, 19 nt, Artificial Sequence
  Description of Artificial Sequence: Synthetic oligonucleotide
gcccucagagaccuauuaa

SEQ ID NO: 668302 - RNA, 19 nt, Artificial Sequence
  Description of Artificial Sequence: Synthetic oligonucleotide
cacugacaggaagcuccug

SEQ ID NO: 668303 - RNA, 19 nt, Artificial Sequence
  Description of Artificial Sequence: Synthetic oligonucleotide
ugcccucacacagccuguu

SEQ ID NO: 668304 - RNA, 19 nt, Artificial Sequence
  Description of Artificial Sequence: Synthetic oligonucleotide
cuguauaaguauggccuau

SEQ ID NO: 668305 - RNA, 19 nt, Artificial Sequence
  Description of Artificial Sequence: Synthetic oligonucleotide
cuguaccuaaggggcacaa

SEQ ID NO: 668306 - RNA, 19 nt, Artificial Sequence
  Description of Artificial Sequence: Synthetic oligonucleotide
cucugacgacuugcauaac

SEQ ID NO: 668307 - RNA, 19 nt, Artificial Sequence
  Description of Artificial Sequence: Synthetic oligonucleotide
cggguaguaccaccaugcc

SEQ ID NO: 668308 - RNA, 19 nt, Artificial Sequence
  Description of Artificial Sequence: Synthetic oligonucleotide
ccauguuaacaugcgucca

SEQ ID NO: 668309 - RNA, 19 nt, Artificial Sequence
  Description of Artificial Sequence: Synthetic oligonucleotide
acgcagacucaagguggga

SEQ ID NO: 668310 - RNA, 19 nt, Artificial Sequence
  Description of Artificial Sequence: Synthetic oligonucleotide
ggcgccucgggaaucugga

SEQ ID NO: 668311 - RNA, 19 nt, Artificial Sequence
  Description of Artificial Sequence: Synthetic oligonucleotide
cgcaaccguagaaucucug

SEQ ID NO: 668312 - RNA, 19 nt, Artificial Sequence
  Description of Artificial Sequence: Synthetic oligonucleotide
cacucuucgucggguagua

SEQ ID NO: 668313 - RNA, 19 nt, Artificial Sequence
  Description of Artificial Sequence: Synthetic oligonucleotide
aagcgcggucaugggugaa

SEQ ID NO: 668314 - RNA, 19 nt, Artificial Sequence
  Description of Artificial Sequence: Synthetic oligonucleotide
ugguggcgccucgggaauc

SEQ ID NO: 668315 - RNA, 19 nt, Artificial Sequence
  Description of Artificial Sequence: Synthetic oligonucleotide
cgcugaguccaucaaucca

SEQ ID NO: 668316 - RNA, 19 nt, Artificial Sequence
  Description of Artificial Sequence: Synthetic oligonucleotide
cggaaugagcccucagaga

SEQ ID NO: 668317 - RNA, 19 nt, Artificial Sequence
  Description of Artificial Sequence: Synthetic oligonucleotide
gcgaugaaauucagugucu

SEQ ID NO: 668318 - RNA, 19 nt, Artificial Sequence
  Description of Artificial Sequence: Synthetic oligonucleotide
ccguagcuccacaauaggu

SEQ ID NO: 668319 - RNA, 19 nt, Artificial Sequence
  Description of Artificial Sequence: Synthetic oligonucleotide
ccaagcggcagugccaaaa

SEQ ID NO: 668320 - RNA, 19 nt, Artificial Sequence
  Description of Artificial Sequence: Synthetic oligonucleotide
gcugagcaaccugaagaua

SEQ ID NO: 668321 - RNA, 19 nt, Artificial Sequence
  Description of Artificial Sequence: Synthetic oligonucleotide
gugguggcgccucgggaau

SEQ ID NO: 668322 - RNA, 19 nt, Artificial Sequence
  Description of Artificial Sequence: Synthetic oligonucleotide
gguuacaccccuagcucau

SEQ ID NO: 668323 - RNA, 19 nt, Artificial Sequence
  Description of Artificial Sequence: Synthetic oligonucleotide
gcccucacacagccuguuc

SEQ ID NO: 668324 - RNA, 19 nt, Artificial Sequence
  Description of Artificial Sequence: Synthetic oligonucleotide
cgggugaucugcucucuga

SEQ ID NO: 668325 - RNA, 19 nt, Artificial Sequence
  Description of Artificial Sequence: Synthetic oligonucleotide
ccgggugaucugcucucug

SEQ ID NO: 668326 - RNA, 19 nt, Artificial Sequence
  Description of Artificial Sequence: Synthetic oligonucleotide
ugccgccgacgguucccaa

SEQ ID NO: 668327 - RNA, 19 nt, Artificial Sequence
  Description of Artificial Sequence: Synthetic oligonucleotide
ccgagugcuuggggaagag

SEQ ID NO: 668328 - RNA, 19 nt, Artificial Sequence
  Description of Artificial Sequence: Synthetic oligonucleotide
ccucucagauuggcgcaac

SEQ ID NO: 668329 - RNA, 19 nt, Artificial Sequence
  Description of Artificial Sequence: Synthetic oligonucleotide
ccccuugggcagccuuucc

SEQ ID NO: 668330 - RNA, 19 nt, Artificial Sequence
  Description of Artificial Sequence: Synthetic oligonucleotide
gcgcggucaugggugaaga

SEQ ID NO: 668331 - RNA, 19 nt, Artificial Sequence
  Description of Artificial Sequence: Synthetic oligonucleotide
ccguagugauagacgaagu

SEQ ID NO: 668332 - RNA, 19 nt, Artificial Sequence
  Description of Artificial Sequence: Synthetic oligonucleotide
gcucuugccgccgacgguu

SEQ ID NO: 668333 - RNA, 19 nt, Artificial Sequence
  Description of Artificial Sequence: Synthetic oligonucleotide
cagcaugcccugacuucau

SEQ ID NO: 668334 - RNA, 19 nt, Artificial Sequence
  Description of Artificial Sequence: Synthetic oligonucleotide
gguggcgccucgggaaucu

SEQ ID NO: 668335 - RNA, 19 nt, Artificial Sequence
  Description of Artificial Sequence: Synthetic oligonucleotide
gccgacgguucccaauuuu

SEQ ID NO: 668336 - RNA, 19 nt, Artificial Sequence
  Description of Artificial Sequence: Synthetic oligonucleotide
ggcugugcgugugcuucaa

SEQ ID NO: 668337 - RNA, 19 nt, Artificial Sequence
  Description of Artificial Sequence: Synthetic oligonucleotide
ccaccaugccaggcuacca

SEQ ID NO: 668338 - RNA, 19 nt, Artificial Sequence
  Description of Artificial Sequence: Synthetic oligonucleotide
cccuagccgcuucuugaaa

SEQ ID NO: 668339 - RNA, 19 nt, Artificial Sequence
  Description of Artificial Sequence: Synthetic oligonucleotide
caccauaauggaggaccuu

SEQ ID NO: 668340 - RNA, 19 nt, Artificial Sequence
  Description of Artificial Sequence: Synthetic oligonucleotide
ggcuaggaugagaccgagu

SEQ ID NO: 668341 - RNA, 19 nt, Artificial Sequence
  Description of Artificial Sequence: Synthetic oligonucleotide
cagccuguucaggcgcugu

SEQ ID NO: 668342 - RNA, 19 nt, Artificial Sequence
  Description of Artificial Sequence: Synthetic oligonucleotide
gccgccgacgguucccaau

SEQ ID NO: 668343 - RNA, 19 nt, Artificial Sequence
  Description of Artificial Sequence: Synthetic oligonucleotide
cggcugucgcccucaucuc

SEQ ID NO: 668344 - RNA, 19 nt, Artificial Sequence
  Description of Artificial Sequence: Synthetic oligonucleotide
ccuagugaauggggaccaa

SEQ ID NO: 668345 - RNA, 19 nt, Artificial Sequence
  Description of Artificial Sequence: Synthetic oligonucleotide
gcacagggugagaccggaa

SEQ ID NO: 668346 - RNA, 19 nt, Artificial Sequence
  Description of Artificial Sequence: Synthetic oligonucleotide
gcgcaaccguagaaucucu

SEQ ID NO: 668347 - RNA, 19 nt, Artificial Sequence
  Description of Artificial Sequence: Synthetic oligonucleotide
ccgccgacgguucccaauu

SEQ ID NO: 668348 - RNA, 19 nt, Artificial Sequence
  Description of Artificial Sequence: Synthetic oligonucleotide
cgcggucaugggugaagaa

SEQ ID NO: 668349 - RNA, 19 nt, Artificial Sequence
  Description of Artificial Sequence: Synthetic oligonucleotide
gcgccucgggaaucuggau

SEQ ID NO: 668350 - RNA, 19 nt, Artificial Sequence
  Description of Artificial Sequence: Synthetic oligonucleotide
cgacuugcauaaccuuauu

SEQ ID NO: 668351 - RNA, 19 nt, Artificial Sequence
  Description of Artificial Sequence: Synthetic oligonucleotide
cgucggguaguaccaccau

SEQ ID NO: 668352 - RNA, 19 nt, Artificial Sequence
  Description of Artificial Sequence: Synthetic oligonucleotide
caguccccuugggcagccu

SEQ ID NO: 668353 - RNA, 19 nt, Artificial Sequence
  Description of Artificial Sequence: Synthetic oligonucleotide
ccucgggaaucuggauguu

SEQ ID NO: 668354 - RNA, 19 nt, Artificial Sequence
  Description of Artificial Sequence: Synthetic oligonucleotide
cgccgacgguucccaauuu

SEQ ID NO: 668355 - RNA, 19 nt, Artificial Sequence
  Description of Artificial Sequence: Synthetic oligonucleotide
aaugacauguucuaugccg

SEQ ID NO: 668356 - RNA, 19 nt, Artificial Sequence
  Description of Artificial Sequence: Synthetic oligonucleotide
aaacagaacuccucgaccc

SEQ ID NO: 668357 - RNA, 19 nt, Artificial Sequence
  Description of Artificial Sequence: Synthetic oligonucleotide
acaaauaacacacuucuuc

SEQ ID NO: 668358 - RNA, 19 nt, Artificial Sequence
  Description of Artificial Sequence: Synthetic oligonucleotide
aaaacagaacuccucgacc

SEQ ID NO: 668359 - RNA, 19 nt, Artificial Sequence
  Description of Artificial Sequence: Synthetic oligonucleotide
aauaacacacuucuuccuc

SEQ ID NO: 668360 - RNA, 19 nt, Artificial Sequence
  Description of Artificial Sequence: Synthetic oligonucleotide
guagaugaaagccaaaagc

SEQ ID NO: 668361 - RNA, 19 nt, Artificial Sequence
  Description of Artificial Sequence: Synthetic oligonucleotide
agguaaaucggaccaaugc

SEQ ID NO: 668362 - RNA, 19 nt, Artificial Sequence
  Description of Artificial Sequence: Synthetic oligonucleotide
uaguuauuccuucugaggc

SEQ ID NO: 668363 - RNA, 19 nt, Artificial Sequence
  Description of Artificial Sequence: Synthetic oligonucleotide
cagaguagcagcuauaaag

SEQ ID NO: 668364 - RNA, 19 nt, Artificial Sequence
  Description of Artificial Sequence: Synthetic oligonucleotide
aaugaggcagauguugacc

SEQ ID NO: 668365 - RNA, 19 nt, Artificial Sequence
  Description of Artificial Sequence: Synthetic oligonucleotide
uggauauauggcuugaggc

SEQ ID NO: 668366 - RNA, 19 nt, Artificial Sequence
  Description of Artificial Sequence: Synthetic oligonucleotide
uuaagaucacuccaaggcc

SEQ ID NO: 668367 - RNA, 19 nt, Artificial Sequence
  Description of Artificial Sequence: Synthetic oligonucleotide
ucauguuagggcaaagaag

SEQ ID NO: 668368 - RNA, 19 nt, Artificial Sequence
  Description of Artificial Sequence: Synthetic oligonucleotide
aaauccucacaugacacgg

SEQ ID NO: 668369 - RNA, 19 nt, Artificial Sequence
  Description of Artificial Sequence: Synthetic oligonucleotide
gaaacucuuacccugcccc

SEQ ID NO: 668370 - RNA, 19 nt, Artificial Sequence
  Description of Artificial Sequence: Synthetic oligonucleotide
aacaacaccaaaccaguga

SEQ ID NO: 668371 - RNA, 19 nt, Artificial Sequence
  Description of Artificial Sequence: Synthetic oligonucleotide
ucaaccaaggccagcaaag

SEQ ID NO: 668372 - RNA, 19 nt, Artificial Sequence
  Description of Artificial Sequence: Synthetic oligonucleotide
cauguuagggcaaagaaga

SEQ ID NO: 668373 - RNA, 19 nt, Artificial Sequence
  Description of Artificial Sequence: Synthetic oligonucleotide
ugugcggacagaccuaacg

SEQ ID NO: 668374 - RNA, 19 nt, Artificial Sequence
  Description of Artificial Sequence: Synthetic oligonucleotide
ucuaguuauuccuucugag

SEQ ID NO: 668375 - RNA, 19 nt, Artificial Sequence
  Description of Artificial Sequence: Synthetic oligonucleotide
caaagcauggccauuggag

SEQ ID NO: 668376 - RNA, 19 nt, Artificial Sequence
  Description of Artificial Sequence: Synthetic oligonucleotide
aaagcauggccauuggaga

SEQ ID NO: 668377 - RNA, 19 nt, Artificial Sequence
  Description of Artificial Sequence: Synthetic oligonucleotide
cuaguuauuccuucugagg

SEQ ID NO: 668378 - RNA, 19 nt, Artificial Sequence
  Description of Artificial Sequence: Synthetic oligonucleotide
uuuuagagcugucaagaga

SEQ ID NO: 668379 - RNA, 19 nt, Artificial Sequence
  Description of Artificial Sequence: Synthetic oligonucleotide
uuaucagagguagacauug

SEQ ID NO: 668380 - RNA, 19 nt, Artificial Sequence
  Description of Artificial Sequence: Synthetic oligonucleotide
cagaagacuagucaguacc

SEQ ID NO: 668381 - RNA, 19 nt, Artificial Sequence
  Description of Artificial Sequence: Synthetic oligonucleotide
agugcaagacgagauaccc

SEQ ID NO: 668382 - RNA, 19 nt, Artificial Sequence
  Description of Artificial Sequence: Synthetic oligonucleotide
uagugaaaugugcagaccu

SEQ ID NO: 668383 - RNA, 19 nt, Artificial Sequence
  Description of Artificial Sequence: Synthetic oligonucleotide
aaauaacacacuucuuccu

SEQ ID NO: 668384 - RNA, 19 nt, Artificial Sequence
  Description of Artificial Sequence: Synthetic oligonucleotide
gagacuauguucaggaugc

SEQ ID NO: 668385 - RNA, 19 nt, Artificial Sequence
  Description of Artificial Sequence: Synthetic oligonucleotide
gaugaaagccaaaagccag

SEQ ID NO: 668386 - RNA, 19 nt, Artificial Sequence
  Description of Artificial Sequence: Synthetic oligonucleotide
uguuagggcaaagaagacg

SEQ ID NO: 668387 - RNA, 19 nt, Artificial Sequence
  Description of Artificial Sequence: Synthetic oligonucleotide
agaagcaggacagucuugc

SEQ ID NO: 668388 - RNA, 19 nt, Artificial Sequence
  Description of Artificial Sequence: Synthetic oligonucleotide
ucaagaucauuccaaaaua

SEQ ID NO: 668389 - RNA, 19 nt, Artificial Sequence
  Description of Artificial Sequence: Synthetic oligonucleotide
agauccaacaccaagguca

SEQ ID NO: 668390 - RNA, 19 nt, Artificial Sequence
  Description of Artificial Sequence: Synthetic oligonucleotide
uugaccagacuguugauca

SEQ ID NO: 668391 - RNA, 19 nt, Artificial Sequence
  Description of Artificial Sequence: Synthetic oligonucleotide
ucacaugacacggaugugg

SEQ ID NO: 668392 - RNA, 19 nt, Artificial Sequence
  Description of Artificial Sequence: Synthetic oligonucleotide
uguucuaugccgagugggg

SEQ ID NO: 668393 - RNA, 19 nt, Artificial Sequence
  Description of Artificial Sequence: Synthetic oligonucleotide
aguuaucagagguagacau

SEQ ID NO: 668394 - RNA, 19 nt, Artificial Sequence
  Description of Artificial Sequence: Synthetic oligonucleotide
aagauucaagaucauucca

SEQ ID NO: 668395 - RNA, 19 nt, Artificial Sequence
  Description of Artificial Sequence: Synthetic oligonucleotide
guuagggcaaagaagacgc

SEQ ID NO: 668396 - RNA, 19 nt, Artificial Sequence
  Description of Artificial Sequence: Synthetic oligonucleotide
ugcccuaguagcuuuaagc

SEQ ID NO: 668397 - RNA, 19 nt, Artificial Sequence
  Description of Artificial Sequence: Synthetic oligonucleotide
aagaucauuccaaaauaag

SEQ ID NO: 668398 - RNA, 19 nt, Artificial Sequence
  Description of Artificial Sequence: Synthetic oligonucleotide
cagcuauaaagaaagguac

SEQ ID NO: 668399 - RNA, 19 nt, Artificial Sequence
  Description of Artificial Sequence: Synthetic oligonucleotide
aagacuagucaguaccgug

SEQ ID NO: 668400 - RNA, 19 nt, Artificial Sequence
  Description of Artificial Sequence: Synthetic oligonucleotide
uucauagaaacugugcgga

SEQ ID NO: 668401 - RNA, 19 nt, Artificial Sequence
  Description of Artificial Sequence: Synthetic oligonucleotide
ugagucgccaaaauccuca

SEQ ID NO: 668402 - RNA, 19 nt, Artificial Sequence
  Description of Artificial Sequence: Synthetic oligonucleotide
ugcaagacgagauacccgu

SEQ ID NO: 668403 - RNA, 19 nt, Artificial Sequence
  Description of Artificial Sequence: Synthetic oligonucleotide
agaaacucuuacccugccc

SEQ ID NO: 668404 - RNA, 19 nt, Artificial Sequence
  Description of Artificial Sequence: Synthetic oligonucleotide
cuuguuuggaccccuagug

SEQ ID NO: 668405 - RNA, 19 nt, Artificial Sequence
  Description of Artificial Sequence: Synthetic oligonucleotide
aggaaugacauguucuaug

SEQ ID NO: 668406 - RNA, 19 nt, Artificial Sequence
  Description of Artificial Sequence: Synthetic oligonucleotide
acauguucuaugccgagug

SEQ ID NO: 668407 - RNA, 19 nt, Artificial Sequence
  Description of Artificial Sequence: Synthetic oligonucleotide
agauacccguacaacaucc

SEQ ID NO: 668408 - RNA, 19 nt, Artificial Sequence
  Description of Artificial Sequence: Synthetic oligonucleotide
acagaccuaacggagcugc

SEQ ID NO: 668409 - RNA, 19 nt, Artificial Sequence
  Description of Artificial Sequence: Synthetic oligonucleotide
uucuaugccgaguggggcg

SEQ ID NO: 668410 - RNA, 19 nt, Artificial Sequence
  Description of Artificial Sequence: Synthetic oligonucleotide
ugugguguggcacaggguu

SEQ ID NO: 668411 - RNA, 19 nt, Artificial Sequence
  Description of Artificial Sequence: Synthetic oligonucleotide
guugcggugguagacaggg

SEQ ID NO: 668412 - RNA, 19 nt, Artificial Sequence
  Description of Artificial Sequence: Synthetic oligonucleotide
gaugugagcaaggaaagca

SEQ ID NO: 668413 - RNA, 19 nt, Artificial Sequence
  Description of Artificial Sequence: Synthetic oligonucleotide
agaucauuccaaaauaaga

SEQ ID NO: 668414 - RNA, 19 nt, Artificial Sequence
  Description of Artificial Sequence: Synthetic oligonucleotide
gaagacgcagguccaaacc

SEQ ID NO: 668415 - RNA, 19 nt, Artificial Sequence
  Description of Artificial Sequence: Synthetic oligonucleotide
cauugagucucucucggcc

SEQ ID NO: 668416 - RNA, 19 nt, Artificial Sequence
  Description of Artificial Sequence: Synthetic oligonucleotide
uccagguaaaguccgggug

SEQ ID NO: 668417 - RNA, 19 nt, Artificial Sequence
  Description of Artificial Sequence: Synthetic oligonucleotide
acuguugaucacauaggcc

SEQ ID NO: 668418 - RNA, 19 nt, Artificial Sequence
  Description of Artificial Sequence: Synthetic oligonucleotide
ugaaaugugcagaccuccc

SEQ ID NO: 668419 - RNA, 19 nt, Artificial Sequence
  Description of Artificial Sequence: Synthetic oligonucleotide
cagagaaacucuuacccug

SEQ ID NO: 668420 - RNA, 19 nt, Artificial Sequence
  Description of Artificial Sequence: Synthetic oligonucleotide
ugcggugguagacagggug

SEQ ID NO: 668421 - RNA, 19 nt, Artificial Sequence
  Description of Artificial Sequence: Synthetic oligonucleotide
guaggcuucggcuccaaag

SEQ ID NO: 668422 - RNA, 19 nt, Artificial Sequence
  Description of Artificial Sequence: Synthetic oligonucleotide
uguuuggaccccuagugaa

SEQ ID NO: 668423 - RNA, 19 nt, Artificial Sequence
  Description of Artificial Sequence: Synthetic oligonucleotide
accuaacggagcugcaagc

SEQ ID NO: 668424 - RNA, 19 nt, Artificial Sequence
  Description of Artificial Sequence: Synthetic oligonucleotide
acgagauacccguacaaca

SEQ ID NO: 668425 - RNA, 19 nt, Artificial Sequence
  Description of Artificial Sequence: Synthetic oligonucleotide
ggagucuuaaaagacaaug

SEQ ID NO: 668426 - RNA, 19 nt, Artificial Sequence
  Description of Artificial Sequence: Synthetic oligonucleotide
ggaaugagcagaaaucuag

SEQ ID NO: 668427 - RNA, 19 nt, Artificial Sequence
  Description of Artificial Sequence: Synthetic oligonucleotide
agagaaacucuuacccugc

SEQ ID NO: 668428 - RNA, 19 nt, Artificial Sequence
  Description of Artificial Sequence: Synthetic oligonucleotide
aagacgagauacccguaca

SEQ ID NO: 668429 - RNA, 19 nt, Artificial Sequence
  Description of Artificial Sequence: Synthetic oligonucleotide
ugacugagugcucgggcgg

SEQ ID NO: 668430 - RNA, 19 nt, Artificial Sequence
  Description of Artificial Sequence: Synthetic oligonucleotide
gaccuaacggagcugcaag

SEQ ID NO: 668431 - RNA, 19 nt, Artificial Sequence
  Description of Artificial Sequence: Synthetic oligonucleotide
aguuauuccuucugaggcu

SEQ ID NO: 668432 - RNA, 19 nt, Artificial Sequence
  Description of Artificial Sequence: Synthetic oligonucleotide
ucgacccaagugcagaaga

SEQ ID NO: 668433 - RNA, 19 nt, Artificial Sequence
  Description of Artificial Sequence: Synthetic oligonucleotide
caaacccagaggcaaaaug

SEQ ID NO: 668434 - RNA, 19 nt, Artificial Sequence
  Description of Artificial Sequence: Synthetic oligonucleotide
ugagaacacccuccugggg

SEQ ID NO: 668435 - RNA, 19 nt, Artificial Sequence
  Description of Artificial Sequence: Synthetic oligonucleotide
auguucuaugccgaguggg

SEQ ID NO: 668436 - RNA, 19 nt, Artificial Sequence
  Description of Artificial Sequence: Synthetic oligonucleotide
aaggcggugucaagguugc

SEQ ID NO: 668437 - RNA, 19 nt, Artificial Sequence
  Description of Artificial Sequence: Synthetic oligonucleotide
agugagguggaaaagaaua

SEQ ID NO: 668438 - RNA, 19 nt, Artificial Sequence
  Description of Artificial Sequence: Synthetic oligonucleotide
agaaaacagaacuccucga

SEQ ID NO: 668439 - RNA, 19 nt, Artificial Sequence
  Description of Artificial Sequence: Synthetic oligonucleotide
acagcucaaguacuaguug

SEQ ID NO: 668440 - RNA, 19 nt, Artificial Sequence
  Description of Artificial Sequence: Synthetic oligonucleotide
agcagcuauaaagaaaggu

SEQ ID NO: 668441 - RNA, 19 nt, Artificial Sequence
  Description of Artificial Sequence: Synthetic oligonucleotide
ggagacuauguucaggaug

SEQ ID NO: 668442 - RNA, 19 nt, Artificial Sequence
  Description of Artificial Sequence: Synthetic oligonucleotide
uagacauugagggucugca

SEQ ID NO: 668443 - RNA, 19 nt, Artificial Sequence
  Description of Artificial Sequence: Synthetic oligonucleotide
uacgggauucuacucccag

SEQ ID NO: 668444 - RNA, 19 nt, Artificial Sequence
  Description of Artificial Sequence: Synthetic oligonucleotide
aaagguaaaucggaccaau

SEQ ID NO: 668445 - RNA, 19 nt, Artificial Sequence
  Description of Artificial Sequence: Synthetic oligonucleotide
uugaggcuugacagagucg

SEQ ID NO: 668446 - RNA, 19 nt, Artificial Sequence
  Description of Artificial Sequence: Synthetic oligonucleotide
auaaacgccugaccccagg

SEQ ID NO: 668447 - RNA, 19 nt, Artificial Sequence
  Description of Artificial Sequence: Synthetic oligonucleotide
agaaagguacacauggccu

SEQ ID NO: 668448 - RNA, 19 nt, Artificial Sequence
  Description of Artificial Sequence: Synthetic oligonucleotide
acgucagucauccuccaca

SEQ ID NO: 668449 - RNA, 19 nt, Artificial Sequence
  Description of Artificial Sequence: Synthetic oligonucleotide
uucaaccaaggccagcaaa

SEQ ID NO: 668450 - RNA, 19 nt, Artificial Sequence
  Description of Artificial Sequence: Synthetic oligonucleotide
guacacauggccugcaauc

SEQ ID NO: 668451 - RNA, 19 nt, Artificial Sequence
  Description of Artificial Sequence: Synthetic oligonucleotide
uggugcuccuccccgauug

SEQ ID NO: 668452 - RNA, 19 nt, Artificial Sequence
  Description of Artificial Sequence: Synthetic oligonucleotide
aaacucuuacccugcccca

SEQ ID NO: 668453 - RNA, 19 nt, Artificial Sequence
  Description of Artificial Sequence: Synthetic oligonucleotide
caguggagucuuaaaagac

SEQ ID NO: 668454 - RNA, 19 nt, Artificial Sequence
  Description of Artificial Sequence: Synthetic oligonucleotide
cugguccugacaaauaaca

SEQ ID NO: 668455 - RNA, 19 nt, Artificial Sequence
  Description of Artificial Sequence: Synthetic oligonucleotide
aggccuagccccuuguuug

SEQ ID NO: 668456 - RNA, 19 nt, Artificial Sequence
  Description of Artificial Sequence: Synthetic oligonucleotide
gucgccgucauguuagggc

SEQ ID NO: 668457 - RNA, 19 nt, Artificial Sequence
  Description of Artificial Sequence: Synthetic oligonucleotide
cuaacggagcugcaagccc

SEQ ID NO: 668458 - RNA, 19 nt, Artificial Sequence
  Description of Artificial Sequence: Synthetic oligonucleotide
acccagauuggagucuucc

SEQ ID NO: 668459 - RNA, 19 nt, Artificial Sequence
  Description of Artificial Sequence: Synthetic oligonucleotide
auugagucucucucggccu

SEQ ID NO: 668460 - RNA, 19 nt, Artificial Sequence
  Description of Artificial Sequence: Synthetic oligonucleotide
agagucgccgucauguuag

SEQ ID NO: 668461 - RNA, 19 nt, Artificial Sequence
  Description of Artificial Sequence: Synthetic oligonucleotide
aagucggugguaggauggc

SEQ ID NO: 668462 - RNA, 19 nt, Artificial Sequence
  Description of Artificial Sequence: Synthetic oligonucleotide
aucggaccaaugcuucaac

SEQ ID NO: 668463 - RNA, 19 nt, Artificial Sequence
  Description of Artificial Sequence: Synthetic oligonucleotide
agacuguugaucacauagg

SEQ ID NO: 668464 - RNA, 19 nt, Artificial Sequence
  Description of Artificial Sequence: Synthetic oligonucleotide
caagacgagauacccguac

SEQ ID NO: 668465 - RNA, 19 nt, Artificial Sequence
  Description of Artificial Sequence: Synthetic oligonucleotide
caaugccagagagagagac

SEQ ID NO: 668466 - RNA, 19 nt, Artificial Sequence
  Description of Artificial Sequence: Synthetic oligonucleotide
ucuccaagccagaguagca

SEQ ID NO: 668467 - RNA, 19 nt, Artificial Sequence
  Description of Artificial Sequence: Synthetic oligonucleotide
agugaaaugugcagaccuc

SEQ ID NO: 668468 - RNA, 19 nt, Artificial Sequence
  Description of Artificial Sequence: Synthetic oligonucleotide
gugaaaugugcagaccucc

SEQ ID NO: 668469 - RNA, 19 nt, Artificial Sequence
  Description of Artificial Sequence: Synthetic oligonucleotide
aagucugcgccaggccucc

SEQ ID NO: 668470 - RNA, 19 nt, Artificial Sequence
  Description of Artificial Sequence: Synthetic oligonucleotide
ggaguuaucagagguagac

SEQ ID NO: 668471 - RNA, 19 nt, Artificial Sequence
  Description of Artificial Sequence: Synthetic oligonucleotide
cuguucaguaguucccggc

SEQ ID NO: 668472 - RNA, 19 nt, Artificial Sequence
  Description of Artificial Sequence: Synthetic oligonucleotide
cauguucuaugccgagugg

SEQ ID NO: 668473 - RNA, 19 nt, Artificial Sequence
  Description of Artificial Sequence: Synthetic oligonucleotide
uccgggugcaacacaguca

SEQ ID NO: 668474 - RNA, 19 nt, Artificial Sequence
  Description of Artificial Sequence: Synthetic oligonucleotide
ggagaugugagcaaggaaa

SEQ ID NO: 668475 - RNA, 19 nt, Artificial Sequence
  Description of Artificial Sequence: Synthetic oligonucleotide
ggcagaagggcaccuacgg

SEQ ID NO: 668476 - RNA, 19 nt, Artificial Sequence
  Description of Artificial Sequence: Synthetic oligonucleotide
guaaaguccgggugcaaca

SEQ ID NO: 668477 - RNA, 19 nt, Artificial Sequence
  Description of Artificial Sequence: Synthetic oligonucleotide
caugagaggccaagugccc

SEQ ID NO: 668478 - RNA, 19 nt, Artificial Sequence
  Description of Artificial Sequence: Synthetic oligonucleotide
uaaacgccugaccccaggu

SEQ ID NO: 668479 - RNA, 19 nt, Artificial Sequence
  Description of Artificial Sequence: Synthetic oligonucleotide
caacaccaaaccagugagg

SEQ ID NO: 668480 - RNA, 19 nt, Artificial Sequence
  Description of Artificial Sequence: Synthetic oligonucleotide
ucuugcucugguccugaca

SEQ ID NO: 668481 - RNA, 19 nt, Artificial Sequence
  Description of Artificial Sequence: Synthetic oligonucleotide
ucauagaaacugugcggac

SEQ ID NO: 668482 - RNA, 19 nt, Artificial Sequence
  Description of Artificial Sequence: Synthetic oligonucleotide
aagguaaaucggaccaaug

SEQ ID NO: 668483 - RNA, 19 nt, Artificial Sequence
  Description of Artificial Sequence: Synthetic oligonucleotide
cagaaaucuaguuauuccu

SEQ ID NO: 668484 - RNA, 19 nt, Artificial Sequence
  Description of Artificial Sequence: Synthetic oligonucleotide
uggaccccuagugaaaugu

SEQ ID NO: 668485 - RNA, 19 nt, Artificial Sequence
  Description of Artificial Sequence: Synthetic oligonucleotide
cuuacccugccccacccag

SEQ ID NO: 668486 - RNA, 19 nt, Artificial Sequence
  Description of Artificial Sequence: Synthetic oligonucleotide
gauguugaccagacuguug

SEQ ID NO: 668487 - RNA, 19 nt, Artificial Sequence
  Description of Artificial Sequence: Synthetic oligonucleotide
agcuauaaagaaagguaca

SEQ ID NO: 668488 - RNA, 19 nt, Artificial Sequence
  Description of Artificial Sequence: Synthetic oligonucleotide
caugauaggacuguggagu

SEQ ID NO: 668489 - RNA, 19 nt, Artificial Sequence
  Description of Artificial Sequence: Synthetic oligonucleotide
cuuuaagcucuccaagcca

SEQ ID NO: 668490 - RNA, 19 nt, Artificial Sequence
  Description of Artificial Sequence: Synthetic oligonucleotide
aguagcagcuauaaagaaa

SEQ ID NO: 668491 - RNA, 19 nt, Artificial Sequence
  Description of Artificial Sequence: Synthetic oligonucleotide
uuaagcucuccaagccaga

SEQ ID NO: 668492 - RNA, 19 nt, Artificial Sequence
  Description of Artificial Sequence: Synthetic oligonucleotide
gagauacccguacaacauc

SEQ ID NO: 668493 - RNA, 19 nt, Artificial Sequence
  Description of Artificial Sequence: Synthetic oligonucleotide
uuagagcugucaagagaac

SEQ ID NO: 668494 - RNA, 19 nt, Artificial Sequence
  Description of Artificial Sequence: Synthetic oligonucleotide
gggugcaacacagucaaag

SEQ ID NO: 668495 - RNA, 19 nt, Artificial Sequence
  Description of Artificial Sequence: Synthetic oligonucleotide
gucggugguaggauggccg

SEQ ID NO: 668496 - RNA, 19 nt, Artificial Sequence
  Description of Artificial Sequence: Synthetic oligonucleotide
cagugcaagacgagauacc

SEQ ID NO: 668497 - RNA, 19 nt, Artificial Sequence
  Description of Artificial Sequence: Synthetic oligonucleotide
gacgagauacccguacaac

SEQ ID NO: 668498 - RNA, 19 nt, Artificial Sequence
  Description of Artificial Sequence: Synthetic oligonucleotide
ucucgaagucggugguagg

SEQ ID NO: 668499 - RNA, 19 nt, Artificial Sequence
  Description of Artificial Sequence: Synthetic oligonucleotide
aaucggaccaaugcuucaa

SEQ ID NO: 668500 - RNA, 19 nt, Artificial Sequence
  Description of Artificial Sequence: Synthetic oligonucleotide
ccuagugaaaugugcagac

SEQ ID NO: 668501 - RNA, 19 nt, Artificial Sequence
  Description of Artificial Sequence: Synthetic oligonucleotide
ucgccaaaauccucacaug

SEQ ID NO: 668502 - RNA, 19 nt, Artificial Sequence
  Description of Artificial Sequence: Synthetic oligonucleotide
gaccccuagugaaaugugc

SEQ ID NO: 668503 - RNA, 19 nt, Artificial Sequence
  Description of Artificial Sequence: Synthetic oligonucleotide
gaguagcagcuauaaagaa

SEQ ID NO: 668504 - RNA, 19 nt, Artificial Sequence
  Description of Artificial Sequence: Synthetic oligonucleotide
agguuagcugcacuccugu

SEQ ID NO: 668505 - RNA, 19 nt, Artificial Sequence
  Description of Artificial Sequence: Synthetic oligonucleotide
uuuggaccccuagugaaau

SEQ ID NO: 668506 - RNA, 19 nt, Artificial Sequence
  Description of Artificial Sequence: Synthetic oligonucleotide
agacgagauacccguacaa

SEQ ID NO: 668507 - RNA, 19 nt, Artificial Sequence
  Description of Artificial Sequence: Synthetic oligonucleotide
ggccaagugcccuaguagc

SEQ ID NO: 668508 - RNA, 19 nt, Artificial Sequence
  Description of Artificial Sequence: Synthetic oligonucleotide
aggcuuggcgcagcaaagc

SEQ ID NO: 668509 - RNA, 19 nt, Artificial Sequence
  Description of Artificial Sequence: Synthetic oligonucleotide
uucuacucccagacccacc

SEQ ID NO: 668510 - RNA, 19 nt, Artificial Sequence
  Description of Artificial Sequence: Synthetic oligonucleotide
auguuagggcaaagaagac

SEQ ID NO: 668511 - RNA, 19 nt, Artificial Sequence
  Description of Artificial Sequence: Synthetic oligonucleotide
gguaaaucggaccaaugcu

SEQ ID NO: 668512 - RNA, 19 nt, Artificial Sequence
  Description of Artificial Sequence: Synthetic oligonucleotide
agucggugguaggauggcc

SEQ ID NO: 668513 - RNA, 19 nt, Artificial Sequence
  Description of Artificial Sequence: Synthetic oligonucleotide
gaacacagccuccaugaua

SEQ ID NO: 668514 - RNA, 19 nt, Artificial Sequence
  Description of Artificial Sequence: Synthetic oligonucleotide
gucgccaaaauccucacau

SEQ ID NO: 668515 - RNA, 19 nt, Artificial Sequence
  Description of Artificial Sequence: Synthetic oligonucleotide
ggauauauggcuugaggcu

SEQ ID NO: 668516 - RNA, 19 nt, Artificial Sequence
  Description of Artificial Sequence: Synthetic oligonucleotide
augacacggauguggugug

SEQ ID NO: 668517 - RNA, 19 nt, Artificial Sequence
  Description of Artificial Sequence: Synthetic oligonucleotide
gucaguaccguguguggca

SEQ ID NO: 668518 - RNA, 19 nt, Artificial Sequence
  Description of Artificial Sequence: Synthetic oligonucleotide
caaagaagacgcaggucca

SEQ ID NO: 668519 - RNA, 19 nt, Artificial Sequence
  Description of Artificial Sequence: Synthetic oligonucleotide
guucuaugccgaguggggc

SEQ ID NO: 668520 - RNA, 19 nt, Artificial Sequence
  Description of Artificial Sequence: Synthetic oligonucleotide
agaacuccucgacccaagu

SEQ ID NO: 668521 - RNA, 19 nt, Artificial Sequence
  Description of Artificial Sequence: Synthetic oligonucleotide
aggguggcgcaugaggauc

SEQ ID NO: 668522 - RNA, 19 nt, Artificial Sequence
  Description of Artificial Sequence: Synthetic oligonucleotide
gugcaagacgagauacccg

SEQ ID NO: 668523 - RNA, 19 nt, Artificial Sequence
  Description of Artificial Sequence: Synthetic oligonucleotide
augauaggacuguggaguu

SEQ ID NO: 668524 - RNA, 19 nt, Artificial Sequence
  Description of Artificial Sequence: Synthetic oligonucleotide
uauguucaggaugccccug

SEQ ID NO: 668525 - RNA, 19 nt, Artificial Sequence
  Description of Artificial Sequence: Synthetic oligonucleotide
agaccaggaggaaugacau

SEQ ID NO: 668526 - RNA, 19 nt, Artificial Sequence
  Description of Artificial Sequence: Synthetic oligonucleotide
agacuauguucaggaugcc

SEQ ID NO: 668527 - RNA, 19 nt, Artificial Sequence
  Description of Artificial Sequence: Synthetic oligonucleotide
gcagcuauaaagaaaggua

SEQ ID NO: 668528 - RNA, 19 nt, Artificial Sequence
  Description of Artificial Sequence: Synthetic oligonucleotide
uggggcgugagaggaauga

SEQ ID NO: 668529 - RNA, 19 nt, Artificial Sequence
  Description of Artificial Sequence: Synthetic oligonucleotide
agacccaccagggcagagg

SEQ ID NO: 668530 - RNA, 19 nt, Artificial Sequence
  Description of Artificial Sequence: Synthetic oligonucleotide
aguaccguguguggcaggu

SEQ ID NO: 668531 - RNA, 19 nt, Artificial Sequence
  Description of Artificial Sequence: Synthetic oligonucleotide
ucucggugcaggccuggca

SEQ ID NO: 668532 - RNA, 19 nt, Artificial Sequence
  Description of Artificial Sequence: Synthetic oligonucleotide
gagaguaaauggucccaaa

SEQ ID NO: 668533 - RNA, 19 nt, Artificial Sequence
  Description of Artificial Sequence: Synthetic oligonucleotide
acgggauucuacucccaga

SEQ ID NO: 668534 - RNA, 19 nt, Artificial Sequence
  Description of Artificial Sequence: Synthetic oligonucleotide
guaggauggccgggcaugg

SEQ ID NO: 668535 - RNA, 19 nt, Artificial Sequence
  Description of Artificial Sequence: Synthetic oligonucleotide
ucuaugccgaguggggcgu

SEQ ID NO: 668536 - RNA, 19 nt, Artificial Sequence
  Description of Artificial Sequence: Synthetic oligonucleotide
ucuuacccugccccaccca

SEQ ID NO: 668537 - RNA, 19 nt, Artificial Sequence
  Description of Artificial Sequence: Synthetic oligonucleotide
cagguuagcugcacuccug

SEQ ID NO: 668538 - RNA, 19 nt, Artificial Sequence
  Description of Artificial Sequence: Synthetic oligonucleotide
augagucgccaaaauccuc

SEQ ID NO: 668539 - RNA, 19 nt, Artificial Sequence
  Description of Artificial Sequence: Synthetic oligonucleotide
uuggaccccuagugaaaug

SEQ ID NO: 668540 - RNA, 19 nt, Artificial Sequence
  Description of Artificial Sequence: Synthetic oligonucleotide
cagcuguaggcucauccuc

SEQ ID NO: 668541 - RNA, 19 nt, Artificial Sequence
  Description of Artificial Sequence: Synthetic oligonucleotide
gaugccccuguucaguagu

SEQ ID NO: 668542 - RNA, 19 nt, Artificial Sequence
  Description of Artificial Sequence: Synthetic oligonucleotide
guccgggugcaacacaguc

SEQ ID NO: 668543 - RNA, 19 nt, Artificial Sequence
  Description of Artificial Sequence: Synthetic oligonucleotide
uggagacuauguucaggau

SEQ ID NO: 668544 - RNA, 19 nt, Artificial Sequence
  Description of Artificial Sequence: Synthetic oligonucleotide
ccuaguagcuuuaagcucu

SEQ ID NO: 668545 - RNA, 19 nt, Artificial Sequence
  Description of Artificial Sequence: Synthetic oligonucleotide
agcugacugagugcucggg

SEQ ID NO: 668546 - RNA, 19 nt, Artificial Sequence
  Description of Artificial Sequence: Synthetic oligonucleotide
ggcgugagaggaaugagca

SEQ ID NO: 668547 - RNA, 19 nt, Artificial Sequence
  Description of Artificial Sequence: Synthetic oligonucleotide
agucgccaaaauccucaca

SEQ ID NO: 668548 - RNA, 19 nt, Artificial Sequence
  Description of Artificial Sequence: Synthetic oligonucleotide
gguaaaguccgggugcaac

SEQ ID NO: 668549 - RNA, 19 nt, Artificial Sequence
  Description of Artificial Sequence: Synthetic oligonucleotide
agacacgagcaggaaguug

SEQ ID NO: 668550 - RNA, 19 nt, Artificial Sequence
  Description of Artificial Sequence: Synthetic oligonucleotide
aggcaaaauguugaugcuu

SEQ ID NO: 668551 - RNA, 19 nt, Artificial Sequence
  Description of Artificial Sequence: Synthetic oligonucleotide
ccaugauaggacuguggag

SEQ ID NO: 668552 - RNA, 19 nt, Artificial Sequence
  Description of Artificial Sequence: Synthetic oligonucleotide
ggaggcggacagcugaggc

SEQ ID NO: 668553 - RNA, 19 nt, Artificial Sequence
  Description of Artificial Sequence: Synthetic oligonucleotide
gguaggauggccgggcaug

SEQ ID NO: 668554 - RNA, 19 nt, Artificial Sequence
  Description of Artificial Sequence: Synthetic oligonucleotide
ucgaagucggugguaggau

SEQ ID NO: 668555 - RNA, 19 nt, Artificial Sequence
  Description of Artificial Sequence: Synthetic oligonucleotide
cagauguugaccagacugu

SEQ ID NO: 668556 - RNA, 19 nt, Artificial Sequence
  Description of Artificial Sequence: Synthetic oligonucleotide
guaaaucggaccaaugcuu

SEQ ID NO: 668557 - RNA, 19 nt, Artificial Sequence
  Description of Artificial Sequence: Synthetic oligonucleotide
uguaggcuucggcuccaaa

SEQ ID NO: 668558 - RNA, 19 nt, Artificial Sequence
  Description of Artificial Sequence: Synthetic oligonucleotide
gaggccaagugcccuagua

SEQ ID NO: 668559 - RNA, 19 nt, Artificial Sequence
  Description of Artificial Sequence: Synthetic oligonucleotide
uaguucccggcuccucaga

SEQ ID NO: 668560 - RNA, 19 nt, Artificial Sequence
  Description of Artificial Sequence: Synthetic oligonucleotide
agauguugaccagacuguu

SEQ ID NO: 668561 - RNA, 19 nt, Artificial Sequence
  Description of Artificial Sequence: Synthetic oligonucleotide
acccaagugcagaagacua

SEQ ID NO: 668562 - RNA, 19 nt, Artificial Sequence
  Description of Artificial Sequence: Synthetic oligonucleotide
agucgccgucauguuaggg

SEQ ID NO: 668563 - RNA, 19 nt, Artificial Sequence
  Description of Artificial Sequence: Synthetic oligonucleotide
caggaggcggacagcugag

SEQ ID NO: 668564 - RNA, 19 nt, Artificial Sequence
  Description of Artificial Sequence: Synthetic oligonucleotide
gacccagugcaagacgaga

SEQ ID NO: 668565 - RNA, 19 nt, Artificial Sequence
  Description of Artificial Sequence: Synthetic oligonucleotide
ccagugcaagacgagauac

SEQ ID NO: 668566 - RNA, 19 nt, Artificial Sequence
  Description of Artificial Sequence: Synthetic oligonucleotide
ugguaggauggccgggcau

SEQ ID NO: 668567 - RNA, 19 nt, Artificial Sequence
  Description of Artificial Sequence: Synthetic oligonucleotide
ccuaacggagcugcaagcc

SEQ ID NO: 668568 - RNA, 19 nt, Artificial Sequence
  Description of Artificial Sequence: Synthetic oligonucleotide
ugcuucaaccaaggccagc

SEQ ID NO: 668569 - RNA, 19 nt, Artificial Sequence
  Description of Artificial Sequence: Synthetic oligonucleotide
cucgaagucggugguagga

SEQ ID NO: 668570 - RNA, 19 nt, Artificial Sequence
  Description of Artificial Sequence: Synthetic oligonucleotide
gacagaccuaacggagcug

SEQ ID NO: 668571 - RNA, 19 nt, Artificial Sequence
  Description of Artificial Sequence: Synthetic oligonucleotide
agaccuaacggagcugcaa

SEQ ID NO: 668572 - RNA, 19 nt, Artificial Sequence
  Description of Artificial Sequence: Synthetic oligonucleotide
gcccuaguagcuuuaagcu

SEQ ID NO: 668573 - RNA, 19 nt, Artificial Sequence
  Description of Artificial Sequence: Synthetic oligonucleotide
ggcauaggcagaggugccg

SEQ ID NO: 668574 - RNA, 19 nt, Artificial Sequence
  Description of Artificial Sequence: Synthetic oligonucleotide
gcggacagaccuaacggag

SEQ ID NO: 668575 - RNA, 19 nt, Artificial Sequence
  Description of Artificial Sequence: Synthetic oligonucleotide
acugugcggacagaccuaa

SEQ ID NO: 668576 - RNA, 19 nt, Artificial Sequence
  Description of Artificial Sequence: Synthetic oligonucleotide
gauggccgggcauggagcu

SEQ ID NO: 668577 - RNA, 19 nt, Artificial Sequence
  Description of Artificial Sequence: Synthetic oligonucleotide
gcgcaugaggaucucggug

SEQ ID NO: 668578 - RNA, 19 nt, Artificial Sequence
  Description of Artificial Sequence: Synthetic oligonucleotide
cccuaguagcuuuaagcuc

SEQ ID NO: 668579 - RNA, 19 nt, Artificial Sequence
  Description of Artificial Sequence: Synthetic oligonucleotide
agaagggcaccuacgggau

SEQ ID NO: 668580 - RNA, 19 nt, Artificial Sequence
  Description of Artificial Sequence: Synthetic oligonucleotide
gccgaguggggcgugagag

SEQ ID NO: 668581 - RNA, 19 nt, Artificial Sequence
  Description of Artificial Sequence: Synthetic oligonucleotide
ggccuagccccuuguuugg

SEQ ID NO: 668582 - RNA, 19 nt, Artificial Sequence
  Description of Artificial Sequence: Synthetic oligonucleotide
gccucuagccugcuucugc

SEQ ID NO: 668583 - RNA, 19 nt, Artificial Sequence
  Description of Artificial Sequence: Synthetic oligonucleotide
ugccgaguggggcgugaga

SEQ ID NO: 668584 - RNA, 19 nt, Artificial Sequence
  Description of Artificial Sequence: Synthetic oligonucleotide
cugucaagagaacuuuuau

SEQ ID NO: 668585 - RNA, 19 nt, Artificial Sequence
  Description of Artificial Sequence: Synthetic oligonucleotide
gagggaguuaucagaggua

SEQ ID NO: 668586 - RNA, 19 nt, Artificial Sequence
  Description of Artificial Sequence: Synthetic oligonucleotide
gucugcgccaggccuccag

SEQ ID NO: 668587 - RNA, 19 nt, Artificial Sequence
  Description of Artificial Sequence: Synthetic oligonucleotide
gguuagcugcacuccugug

SEQ ID NO: 668588 - RNA, 19 nt, Artificial Sequence
  Description of Artificial Sequence: Synthetic oligonucleotide
cuauguucaggaugccccu

SEQ ID NO: 668589 - RNA, 19 nt, Artificial Sequence
  Description of Artificial Sequence: Synthetic oligonucleotide
uggagucuuccagaauauu

SEQ ID NO: 668590 - RNA, 19 nt, Artificial Sequence
  Description of Artificial Sequence: Synthetic oligonucleotide
guuuggaccccuagugaaa

SEQ ID NO: 668591 - RNA, 19 nt, Artificial Sequence
  Description of Artificial Sequence: Synthetic oligonucleotide
cacgucagucauccuccac

SEQ ID NO: 668592 - RNA, 19 nt, Artificial Sequence
  Description of Artificial Sequence: Synthetic oligonucleotide
cucacaugacacggaugug

SEQ ID NO: 668593 - RNA, 19 nt, Artificial Sequence
  Description of Artificial Sequence: Synthetic oligonucleotide
caguaccguguguggcagg

SEQ ID NO: 668594 - RNA, 19 nt, Artificial Sequence
  Description of Artificial Sequence: Synthetic oligonucleotide
uaugccgaguggggcguga

SEQ ID NO: 668595 - RNA, 19 nt, Artificial Sequence
  Description of Artificial Sequence: Synthetic oligonucleotide
ggcuuggcgcagcaaagca

SEQ ID NO: 668596 - RNA, 19 nt, Artificial Sequence
  Description of Artificial Sequence: Synthetic oligonucleotide
cacaagccaacaacaccaa

SEQ ID NO: 668597 - RNA, 19 nt, Artificial Sequence
  Description of Artificial Sequence: Synthetic oligonucleotide
gauuggagucuuccagaau

SEQ ID NO: 668598 - RNA, 19 nt, Artificial Sequence
  Description of Artificial Sequence: Synthetic oligonucleotide
gcgugagaggaaugagcag

SEQ ID NO: 668599 - RNA, 19 nt, Artificial Sequence
  Description of Artificial Sequence: Synthetic oligonucleotide
ggcaccuacgggauucuac

SEQ ID NO: 668600 - RNA, 19 nt, Artificial Sequence
  Description of Artificial Sequence: Synthetic oligonucleotide
cacugcacugcuggagaug

SEQ ID NO: 668601 - RNA, 19 nt, Artificial Sequence
  Description of Artificial Sequence: Synthetic oligonucleotide
uugcggugguagacagggu

SEQ ID NO: 668602 - RNA, 19 nt, Artificial Sequence
  Description of Artificial Sequence: Synthetic oligonucleotide
ccagggauaaacgccugac

SEQ ID NO: 668603 - RNA, 19 nt, Artificial Sequence
  Description of Artificial Sequence: Synthetic oligonucleotide
ggugucaagguugccaaua

SEQ ID NO: 668604 - RNA, 19 nt, Artificial Sequence
  Description of Artificial Sequence: Synthetic oligonucleotide
gccagguuagcugcacucc

SEQ ID NO: 668605 - RNA, 19 nt, Artificial Sequence
  Description of Artificial Sequence: Synthetic oligonucleotide
ggcggugucaagguugcca

SEQ ID NO: 668606 - RNA, 19 nt, Artificial Sequence
  Description of Artificial Sequence: Synthetic oligonucleotide
gauacccguacaacauccu

SEQ ID NO: 668607 - RNA, 19 nt, Artificial Sequence
  Description of Artificial Sequence: Synthetic oligonucleotide
gcaccuacgggauucuacu

SEQ ID NO: 668608 - RNA, 19 nt, Artificial Sequence
  Description of Artificial Sequence: Synthetic oligonucleotide
gacaaauaacacacuucuu

SEQ ID NO: 668609 - RNA, 19 nt, Artificial Sequence
  Description of Artificial Sequence: Synthetic oligonucleotide
uccaugggucuugcccagc

SEQ ID NO: 668610 - RNA, 19 nt, Artificial Sequence
  Description of Artificial Sequence: Synthetic oligonucleotide
augcuucaaccaaggccag

SEQ ID NO: 668611 - RNA, 19 nt, Artificial Sequence
  Description of Artificial Sequence: Synthetic oligonucleotide
cccgauugggccagcuggc

SEQ ID NO: 668612 - RNA, 19 nt, Artificial Sequence
  Description of Artificial Sequence: Synthetic oligonucleotide
cuacgggauucuacuccca

SEQ ID NO: 668613 - RNA, 19 nt, Artificial Sequence
  Description of Artificial Sequence: Synthetic oligonucleotide
agcugucaagagaacuuuu

SEQ ID NO: 668614 - RNA, 19 nt, Artificial Sequence
  Description of Artificial Sequence: Synthetic oligonucleotide
gcugucaagagaacuuuua

SEQ ID NO: 668615 - RNA, 19 nt, Artificial Sequence
  Description of Artificial Sequence: Synthetic oligonucleotide
gccagaguagcagcuauaa

SEQ ID NO: 668616 - RNA, 19 nt, Artificial Sequence
  Description of Artificial Sequence: Synthetic oligonucleotide
cuucaaccaaggccagcaa

SEQ ID NO: 668617 - RNA, 19 nt, Artificial Sequence
  Description of Artificial Sequence: Synthetic oligonucleotide
caggcccaccccguugacc

SEQ ID NO: 668618 - RNA, 19 nt, Artificial Sequence
  Description of Artificial Sequence: Synthetic oligonucleotide
ggaccccuagugaaaugug

SEQ ID NO: 668619 - RNA, 19 nt, Artificial Sequence
  Description of Artificial Sequence: Synthetic oligonucleotide
gggucuugcccagcuguag

SEQ ID NO: 668620 - RNA, 19 nt, Artificial Sequence
  Description of Artificial Sequence: Synthetic oligonucleotide
cagagucgccgucauguua

SEQ ID NO: 668621 - RNA, 19 nt, Artificial Sequence
  Description of Artificial Sequence: Synthetic oligonucleotide
ccgggugcaacacagucaa

SEQ ID NO: 668622 - RNA, 19 nt, Artificial Sequence
  Description of Artificial Sequence: Synthetic oligonucleotide
acgccugaccccagguucu

SEQ ID NO: 668623 - RNA, 19 nt, Artificial Sequence
  Description of Artificial Sequence: Synthetic oligonucleotide
ccgaguggggcgugagagg

SEQ ID NO: 668624 - RNA, 19 nt, Artificial Sequence
  Description of Artificial Sequence: Synthetic oligonucleotide
cucggugcaggccuggcau

SEQ ID NO: 668625 - RNA, 19 nt, Artificial Sequence
  Description of Artificial Sequence: Synthetic oligonucleotide
ccuagccccuuguuuggac

SEQ ID NO: 668626 - RNA, 19 nt, Artificial Sequence
  Description of Artificial Sequence: Synthetic oligonucleotide
guuaucagagguagacauu

SEQ ID NO: 668627 - RNA, 19 nt, Artificial Sequence
  Description of Artificial Sequence: Synthetic oligonucleotide
cugugcggacagaccuaac

SEQ ID NO: 668628 - RNA, 19 nt, Artificial Sequence
  Description of Artificial Sequence: Synthetic oligonucleotide
cagaccuaacggagcugca

SEQ ID NO: 668629 - RNA, 19 nt, Artificial Sequence
  Description of Artificial Sequence: Synthetic oligonucleotide
ggaugccucggcggcagag

SEQ ID NO: 668630 - RNA, 19 nt, Artificial Sequence
  Description of Artificial Sequence: Synthetic oligonucleotide
augccgaguggggcgugag

SEQ ID NO: 668631 - RNA, 19 nt, Artificial Sequence
  Description of Artificial Sequence: Synthetic oligonucleotide
gguacacauggccugcaau

SEQ ID NO: 668632 - RNA, 19 nt, Artificial Sequence
  Description of Artificial Sequence: Synthetic oligonucleotide
cuccuccccgauugggcca

SEQ ID NO: 668633 - RNA, 19 nt, Artificial Sequence
  Description of Artificial Sequence: Synthetic oligonucleotide
cguacaacauccucucgaa

SEQ ID NO: 668634 - RNA, 19 nt, Artificial Sequence
  Description of Artificial Sequence: Synthetic oligonucleotide
cccguacaacauccucucg

SEQ ID NO: 668635 - RNA, 19 nt, Artificial Sequence
  Description of Artificial Sequence: Synthetic oligonucleotide
caagugcccuaguagcuuu

SEQ ID NO: 668636 - RNA, 19 nt, Artificial Sequence
  Description of Artificial Sequence: Synthetic oligonucleotide
gaacacccuccuggggcca

SEQ ID NO: 668637 - RNA, 19 nt, Artificial Sequence
  Description of Artificial Sequence: Synthetic oligonucleotide
gguagacauugagggucug

SEQ ID NO: 668638 - RNA, 19 nt, Artificial Sequence
  Description of Artificial Sequence: Synthetic oligonucleotide
agguaaaguccgggugcaa

SEQ ID NO: 668639 - RNA, 19 nt, Artificial Sequence
  Description of Artificial Sequence: Synthetic oligonucleotide
gggaguuaucagagguaga

SEQ ID NO: 668640 - RNA, 19 nt, Artificial Sequence
  Description of Artificial Sequence: Synthetic oligonucleotide
cuaugccgaguggggcgug

SEQ ID NO: 668641 - RNA, 19 nt, Artificial Sequence
  Description of Artificial Sequence: Synthetic oligonucleotide
ggcugagcauaaagauuca

SEQ ID NO: 668642 - RNA, 19 nt, Artificial Sequence
  Description of Artificial Sequence: Synthetic oligonucleotide
cgagauacccguacaacau

SEQ ID NO: 668643 - RNA, 19 nt, Artificial Sequence
  Description of Artificial Sequence: Synthetic oligonucleotide
ggguucagagaaacucuua

SEQ ID NO: 668644 - RNA, 19 nt, Artificial Sequence
  Description of Artificial Sequence: Synthetic oligonucleotide
ggcuagcuguaggcuucgg

SEQ ID NO: 668645 - RNA, 19 nt, Artificial Sequence
  Description of Artificial Sequence: Synthetic oligonucleotide
augccccuguucaguaguu

SEQ ID NO: 668646 - RNA, 19 nt, Artificial Sequence
  Description of Artificial Sequence: Synthetic oligonucleotide
gcacgucagucauccucca

SEQ ID NO: 668647 - RNA, 19 nt, Artificial Sequence
  Description of Artificial Sequence: Synthetic oligonucleotide
gccaagugcccuaguagcu

SEQ ID NO: 668648 - RNA, 19 nt, Artificial Sequence
  Description of Artificial Sequence: Synthetic oligonucleotide
cgaguggggcgugagagga

SEQ ID NO: 668649 - RNA, 19 nt, Artificial Sequence
  Description of Artificial Sequence: Synthetic oligonucleotide
gcucgggcggccagccucc

SEQ ID NO: 668650 - RNA, 19 nt, Artificial Sequence
  Description of Artificial Sequence: Synthetic oligonucleotide
cccagggauaaacgccuga

SEQ ID NO: 668651 - RNA, 19 nt, Artificial Sequence
  Description of Artificial Sequence: Synthetic oligonucleotide
ggccucuagccugcuucug

SEQ ID NO: 668652 - RNA, 19 nt, Artificial Sequence
  Description of Artificial Sequence: Synthetic oligonucleotide
cccagugcaagacgagaua

SEQ ID NO: 668653 - RNA, 19 nt, Artificial Sequence
  Description of Artificial Sequence: Synthetic oligonucleotide
ccucgacccaagugcagaa

SEQ ID NO: 668654 - RNA, 19 nt, Artificial Sequence
  Description of Artificial Sequence: Synthetic oligonucleotide
ccccagguucuggucagug

SEQ ID NO: 668655 - RNA, 19 nt, Artificial Sequence
  Description of Artificial Sequence: Synthetic oligonucleotide
ccgucauguuagggcaaag

SEQ ID NO: 668656 - RNA, 19 nt, Artificial Sequence
  Description of Artificial Sequence: Synthetic oligonucleotide
cucuagccugcuucugcuu

SEQ ID NO: 668657 - RNA, 19 nt, Artificial Sequence
  Description of Artificial Sequence: Synthetic oligonucleotide
gcuuggcgcagcaaagcau

SEQ ID NO: 668658 - RNA, 19 nt, Artificial Sequence
  Description of Artificial Sequence: Synthetic oligonucleotide
gcaagccccgaggccuagc

SEQ ID NO: 668659 - RNA, 19 nt, Artificial Sequence
  Description of Artificial Sequence: Synthetic oligonucleotide
gcaagacgagauacccgua

SEQ ID NO: 668660 - RNA, 19 nt, Artificial Sequence
  Description of Artificial Sequence: Synthetic oligonucleotide
cccgaggccuagccccuug

SEQ ID NO: 668661 - RNA, 19 nt, Artificial Sequence
  Description of Artificial Sequence: Synthetic oligonucleotide
gccuagccccuuguuugga

SEQ ID NO: 668662 - RNA, 19 nt, Artificial Sequence
  Description of Artificial Sequence: Synthetic oligonucleotide
cgcagcaaagcauggccau

SEQ ID NO: 668663 - RNA, 19 nt, Artificial Sequence
  Description of Artificial Sequence: Synthetic oligonucleotide
cgauugggccagcuggcua

SEQ ID NO: 668664 - RNA, 19 nt, Artificial Sequence
  Description of Artificial Sequence: Synthetic oligonucleotide
ccaagugcccuaguagcuu

SEQ ID NO: 668665 - RNA, 19 nt, Artificial Sequence
  Description of Artificial Sequence: Synthetic oligonucleotide
cuccccgauugggccagcu

SEQ ID NO: 668666 - RNA, 19 nt, Artificial Sequence
  Description of Artificial Sequence: Synthetic oligonucleotide
ccaccccguugaccaccag

SEQ ID NO: 668667 - RNA, 19 nt, Artificial Sequence
  Description of Artificial Sequence: Synthetic oligonucleotide
cucgggcggccagccucca

SEQ ID NO: 668668 - RNA, 19 nt, Artificial Sequence
  Description of Artificial Sequence: Synthetic oligonucleotide
ggggugccugagaguaaau

SEQ ID NO: 668669 - RNA, 19 nt, Artificial Sequence
  Description of Artificial Sequence: Synthetic oligonucleotide
cggccucuagccugcuucu

SEQ ID NO: 668670 - RNA, 19 nt, Artificial Sequence
  Description of Artificial Sequence: Synthetic oligonucleotide
ccgaggccuagccccuugu

SEQ ID NO: 668671 - RNA, 19 nt, Artificial Sequence
  Description of Artificial Sequence: Synthetic oligonucleotide
ccuccccgauugggccagc

SEQ ID NO: 668672 - RNA, 19 nt, Artificial Sequence
  Description of Artificial Sequence: Synthetic oligonucleotide
cgggugcaacacagucaaa

SEQ ID NO: 668673 - RNA, 19 nt, Artificial Sequence
  Description of Artificial Sequence: Synthetic oligonucleotide
gccgggcauggagcugacu

SEQ ID NO: 668674 - RNA, 19 nt, Artificial Sequence
  Description of Artificial Sequence: Synthetic oligonucleotide
ucugacguggacaugguca

SEQ ID NO: 668675 - RNA, 19 nt, Artificial Sequence
  Description of Artificial Sequence: Synthetic oligonucleotide
cauuacaagcgucaaaagc

SEQ ID NO: 668676 - RNA, 19 nt, Artificial Sequence
  Description of Artificial Sequence: Synthetic oligonucleotide
auuacaagcgucaaaagca

SEQ ID NO: 668677 - RNA, 19 nt, Artificial Sequence
  Description of Artificial Sequence: Synthetic oligonucleotide
ugcuacucugcucaacugg

SEQ ID NO: 668678 - RNA, 19 nt, Artificial Sequence
  Description of Artificial Sequence: Synthetic oligonucleotide
cuuacaaacagggugcccc

SEQ ID NO: 668679 - RNA, 19 nt, Artificial Sequence
  Description of Artificial Sequence: Synthetic oligonucleotide
aaccaugguacucaaggga

SEQ ID NO: 668680 - RNA, 19 nt, Artificial Sequence
  Description of Artificial Sequence: Synthetic oligonucleotide
uguccaucacgacuguacg

SEQ ID NO: 668681 - RNA, 19 nt, Artificial Sequence
  Description of Artificial Sequence: Synthetic oligonucleotide
acgcauaaugcgcugcugc

SEQ ID NO: 668682 - RNA, 19 nt, Artificial Sequence
  Description of Artificial Sequence: Synthetic oligonucleotide
ugauuuggcgacucgagac

SEQ ID NO: 668683 - RNA, 19 nt, Artificial Sequence
  Description of Artificial Sequence: Synthetic oligonucleotide
uucucgucuuuaaugacug

SEQ ID NO: 668684 - RNA, 19 nt, Artificial Sequence
  Description of Artificial Sequence: Synthetic oligonucleotide
ucaacuggcuccucuagcc

SEQ ID NO: 668685 - RNA, 19 nt, Artificial Sequence
  Description of Artificial Sequence: Synthetic oligonucleotide
uugaucuugucgaaugaca

SEQ ID NO: 668686 - RNA, 19 nt, Artificial Sequence
  Description of Artificial Sequence: Synthetic oligonucleotide
cuucuaguccaccaguggg

SEQ ID NO: 668687 - RNA, 19 nt, Artificial Sequence
  Description of Artificial Sequence: Synthetic oligonucleotide
uagcccuacagguucacgg

SEQ ID NO: 668688 - RNA, 19 nt, Artificial Sequence
  Description of Artificial Sequence: Synthetic oligonucleotide
uggcugaggacucuuuagg

SEQ ID NO: 668689 - RNA, 19 nt, Artificial Sequence
  Description of Artificial Sequence: Synthetic oligonucleotide
uucccuucaggccaguagc

SEQ ID NO: 668690 - RNA, 19 nt, Artificial Sequence
  Description of Artificial Sequence: Synthetic oligonucleotide
uugucgaaugacaggaugu

SEQ ID NO: 668691 - RNA, 19 nt, Artificial Sequence
  Description of Artificial Sequence: Synthetic oligonucleotide
agucgcucccuuucuagcc

SEQ ID NO: 668692 - RNA, 19 nt, Artificial Sequence
  Description of Artificial Sequence: Synthetic oligonucleotide
acaagcgucaaaagcaaac

SEQ ID NO: 668693 - RNA, 19 nt, Artificial Sequence
  Description of Artificial Sequence: Synthetic oligonucleotide
uguguucacagcaccgugc

SEQ ID NO: 668694 - RNA, 19 nt, Artificial Sequence
  Description of Artificial Sequence: Synthetic oligonucleotide
gcuuaugacauguuccugg

SEQ ID NO: 668695 - RNA, 19 nt, Artificial Sequence
  Description of Artificial Sequence: Synthetic oligonucleotide
ucgggagucccaaccaugg

SEQ ID NO: 668696 - RNA, 19 nt, Artificial Sequence
  Description of Artificial Sequence: Synthetic oligonucleotide
uucuaguccaccagugggc

SEQ ID NO: 668697 - RNA, 19 nt, Artificial Sequence
  Description of Artificial Sequence: Synthetic oligonucleotide
agguucacgguccaucccg

SEQ ID NO: 668698 - RNA, 19 nt, Artificial Sequence
  Description of Artificial Sequence: Synthetic oligonucleotide
gauuuggcgacucgagacc

SEQ ID NO: 668699 - RNA, 19 nt, Artificial Sequence
  Description of Artificial Sequence: Synthetic oligonucleotide
ucacgcucacgcauaaugc

SEQ ID NO: 668700 - RNA, 19 nt, Artificial Sequence
  Description of Artificial Sequence: Synthetic oligonucleotide
aguucgguucuguugcagg

SEQ ID NO: 668701 - RNA, 19 nt, Artificial Sequence
  Description of Artificial Sequence: Synthetic oligonucleotide
gguagugcugcucaucacg

SEQ ID NO: 668702 - RNA, 19 nt, Artificial Sequence
  Description of Artificial Sequence: Synthetic oligonucleotide
cuucccgagguacagcugg

SEQ ID NO: 668703 - RNA, 19 nt, Artificial Sequence
  Description of Artificial Sequence: Synthetic oligonucleotide
auagcaccgagccccacgg

SEQ ID NO: 668704 - RNA, 19 nt, Artificial Sequence
  Description of Artificial Sequence: Synthetic oligonucleotide
uuacaagcgucaaaagcaa

SEQ ID NO: 668705 - RNA, 19 nt, Artificial Sequence
  Description of Artificial Sequence: Synthetic oligonucleotide
gcggucuugacuuuuagag

SEQ ID NO: 668706 - RNA, 19 nt, Artificial Sequence
  Description of Artificial Sequence: Synthetic oligonucleotide
ucaucuugauccuucuccu

SEQ ID NO: 668707 - RNA, 19 nt, Artificial Sequence
  Description of Artificial Sequence: Synthetic oligonucleotide
uucacgguccaucccgggg

SEQ ID NO: 668708 - RNA, 19 nt, Artificial Sequence
  Description of Artificial Sequence: Synthetic oligonucleotide
gucguguuuguguucacag

SEQ ID NO: 668709 - RNA, 19 nt, Artificial Sequence
  Description of Artificial Sequence: Synthetic oligonucleotide
auagagcucauuuucugau

SEQ ID NO: 668710 - RNA, 19 nt, Artificial Sequence
  Description of Artificial Sequence: Synthetic oligonucleotide
guaacggcgggugaagugg

SEQ ID NO: 668711 - RNA, 19 nt, Artificial Sequence
  Description of Artificial Sequence: Synthetic oligonucleotide
gucuugguuggucacgccg

SEQ ID NO: 668712 - RNA, 19 nt, Artificial Sequence
  Description of Artificial Sequence: Synthetic oligonucleotide
uccuacaaggccccgcuca

SEQ ID NO: 668713 - RNA, 19 nt, Artificial Sequence
  Description of Artificial Sequence: Synthetic oligonucleotide
ugucucgggagucccaacc

SEQ ID NO: 668714 - RNA, 19 nt, Artificial Sequence
  Description of Artificial Sequence: Synthetic oligonucleotide
cuugucgaaugacaggaug

SEQ ID NO: 668715 - RNA, 19 nt, Artificial Sequence
  Description of Artificial Sequence: Synthetic oligonucleotide
caaccaugguacucaaggg

SEQ ID NO: 668716 - RNA, 19 nt, Artificial Sequence
  Description of Artificial Sequence: Synthetic oligonucleotide
cucacgcucacgcauaaug

SEQ ID NO: 668717 - RNA, 19 nt, Artificial Sequence
  Description of Artificial Sequence: Synthetic oligonucleotide
cacgcucacgcauaaugcg

SEQ ID NO: 668718 - RNA, 19 nt, Artificial Sequence
  Description of Artificial Sequence: Synthetic oligonucleotide
guagccucaucugacgugg

SEQ ID NO: 668719 - RNA, 19 nt, Artificial Sequence
  Description of Artificial Sequence: Synthetic oligonucleotide
gucgucuuugcuaucuugg

SEQ ID NO: 668720 - RNA, 19 nt, Artificial Sequence
  Description of Artificial Sequence: Synthetic oligonucleotide
ucacgguccaucccggggc

SEQ ID NO: 668721 - RNA, 19 nt, Artificial Sequence
  Description of Artificial Sequence: Synthetic oligonucleotide
acucgagaccgacuggcgg

SEQ ID NO: 668722 - RNA, 19 nt, Artificial Sequence
  Description of Artificial Sequence: Synthetic oligonucleotide
cuucacgcugaugacaggc

SEQ ID NO: 668723 - RNA, 19 nt, Artificial Sequence
  Description of Artificial Sequence: Synthetic oligonucleotide
aggucauagggucugcgca

SEQ ID NO: 668724 - RNA, 19 nt, Artificial Sequence
  Description of Artificial Sequence: Synthetic oligonucleotide
auuuggcgacucgagaccg

SEQ ID NO: 668725 - RNA, 19 nt, Artificial Sequence
  Description of Artificial Sequence: Synthetic oligonucleotide
aucucuccugcuuaugaca

SEQ ID NO: 668726 - RNA, 19 nt, Artificial Sequence
  Description of Artificial Sequence: Synthetic oligonucleotide
ugggaagucucgauaccug

SEQ ID NO: 668727 - RNA, 19 nt, Artificial Sequence
  Description of Artificial Sequence: Synthetic oligonucleotide
aggacucuuuaggagcugc

SEQ ID NO: 668728 - RNA, 19 nt, Artificial Sequence
  Description of Artificial Sequence: Synthetic oligonucleotide
cauuugguagccucaucug

SEQ ID NO: 668729 - RNA, 19 nt, Artificial Sequence
  Description of Artificial Sequence: Synthetic oligonucleotide
aguaacggcgggugaagug

SEQ ID NO: 668730 - RNA, 19 nt, Artificial Sequence
  Description of Artificial Sequence: Synthetic oligonucleotide
caugguacucaagggagcc

SEQ ID NO: 668731 - RNA, 19 nt, Artificial Sequence
  Description of Artificial Sequence: Synthetic oligonucleotide
caucacgacuguacguucc

SEQ ID NO: 668732 - RNA, 19 nt, Artificial Sequence
  Description of Artificial Sequence: Synthetic oligonucleotide
accgcaugugcucguggcc

SEQ ID NO: 668733 - RNA, 19 nt, Artificial Sequence
  Description of Artificial Sequence: Synthetic oligonucleotide
uaacggcgggugaaguggg

SEQ ID NO: 668734 - RNA, 19 nt, Artificial Sequence
  Description of Artificial Sequence: Synthetic oligonucleotide
ucguguuuguguucacagc

SEQ ID NO: 668735 - RNA, 19 nt, Artificial Sequence
  Description of Artificial Sequence: Synthetic oligonucleotide
agucucgauaccuguccuc

SEQ ID NO: 668736 - RNA, 19 nt, Artificial Sequence
  Description of Artificial Sequence: Synthetic oligonucleotide
uccuucccgagguacagcu

SEQ ID NO: 668737 - RNA, 19 nt, Artificial Sequence
  Description of Artificial Sequence: Synthetic oligonucleotide
uuacaaacagggugcccca

SEQ ID NO: 668738 - RNA, 19 nt, Artificial Sequence
  Description of Artificial Sequence: Synthetic oligonucleotide
gacucuuuaggagcugcag

SEQ ID NO: 668739 - RNA, 19 nt, Artificial Sequence
  Description of Artificial Sequence: Synthetic oligonucleotide
cuugucagaacuguagcca

SEQ ID NO: 668740 - RNA, 19 nt, Artificial Sequence
  Description of Artificial Sequence: Synthetic oligonucleotide
guguucacagcaccgugcc

SEQ ID NO: 668741 - RNA, 19 nt, Artificial Sequence
  Description of Artificial Sequence: Synthetic oligonucleotide
gucgaaguuguggaagcgg

SEQ ID NO: 668742 - RNA, 19 nt, Artificial Sequence
  Description of Artificial Sequence: Synthetic oligonucleotide
gacgucauuacaagcguca

SEQ ID NO: 668743 - RNA, 19 nt, Artificial Sequence
  Description of Artificial Sequence: Synthetic oligonucleotide
acgcucacgcauaaugcgc

SEQ ID NO: 668744 - RNA, 19 nt, Artificial Sequence
  Description of Artificial Sequence: Synthetic oligonucleotide
ucacgcauaaugcgcugcu

SEQ ID NO: 668745 - RNA, 19 nt, Artificial Sequence
  Description of Artificial Sequence: Synthetic oligonucleotide
ucgauaccuguccucuaug

SEQ ID NO: 668746 - RNA, 19 nt, Artificial Sequence
  Description of Artificial Sequence: Synthetic oligonucleotide
uuugcgccuuucacgcucc

SEQ ID NO: 668747 - RNA, 19 nt, Artificial Sequence
  Description of Artificial Sequence: Synthetic oligonucleotide
acaugcacgugcccagguc

SEQ ID NO: 668748 - RNA, 19 nt, Artificial Sequence
  Description of Artificial Sequence: Synthetic oligonucleotide
uucuuacaaacagggugcc

SEQ ID NO: 668749 - RNA, 19 nt, Artificial Sequence
  Description of Artificial Sequence: Synthetic oligonucleotide
ucaguaacggcgggugaag

SEQ ID NO: 668750 - RNA, 19 nt, Artificial Sequence
  Description of Artificial Sequence: Synthetic oligonucleotide
aaccuucccgugcuugcug

SEQ ID NO: 668751 - RNA, 19 nt, Artificial Sequence
  Description of Artificial Sequence: Synthetic oligonucleotide
ugcggucuugacuuuuaga

SEQ ID NO: 668752 - RNA, 19 nt, Artificial Sequence
  Description of Artificial Sequence: Synthetic oligonucleotide
agccacgccagcugucucg

SEQ ID NO: 668753 - RNA, 19 nt, Artificial Sequence
  Description of Artificial Sequence: Synthetic oligonucleotide
ccuuucacgcuccacacgc

SEQ ID NO: 668754 - RNA, 19 nt, Artificial Sequence
  Description of Artificial Sequence: Synthetic oligonucleotide
aagugcaagguggcuuggg

SEQ ID NO: 668755 - RNA, 19 nt, Artificial Sequence
  Description of Artificial Sequence: Synthetic oligonucleotide
uccaucacgacuguacguu

SEQ ID NO: 668756 - RNA, 19 nt, Artificial Sequence
  Description of Artificial Sequence: Synthetic oligonucleotide
ugucugccgacuucuuccc

SEQ ID NO: 668757 - RNA, 19 nt, Artificial Sequence
  Description of Artificial Sequence: Synthetic oligonucleotide
ugugcucguggccugucgu

SEQ ID NO: 668758 - RNA, 19 nt, Artificial Sequence
  Description of Artificial Sequence: Synthetic oligonucleotide
gagcucauuuucugaucag

SEQ ID NO: 668759 - RNA, 19 nt, Artificial Sequence
  Description of Artificial Sequence: Synthetic oligonucleotide
ugguuggucacgccgccac

SEQ ID NO: 668760 - RNA, 19 nt, Artificial Sequence
  Description of Artificial Sequence: Synthetic oligonucleotide
uugcggucuugacuuuuag

SEQ ID NO: 668761 - RNA, 19 nt, Artificial Sequence
  Description of Artificial Sequence: Synthetic oligonucleotide
cuuugcgccuuucacgcuc

SEQ ID NO: 668762 - RNA, 19 nt, Artificial Sequence
  Description of Artificial Sequence: Synthetic oligonucleotide
accucgccaccgcaugugc

SEQ ID NO: 668763 - RNA, 19 nt, Artificial Sequence
  Description of Artificial Sequence: Synthetic oligonucleotide
agguagugcugcucaucac

SEQ ID NO: 668764 - RNA, 19 nt, Artificial Sequence
  Description of Artificial Sequence: Synthetic oligonucleotide
uacagguucacgguccauc

SEQ ID NO: 668765 - RNA, 19 nt, Artificial Sequence
  Description of Artificial Sequence: Synthetic oligonucleotide
uacaagcgucaaaagcaaa

SEQ ID NO: 668766 - RNA, 19 nt, Artificial Sequence
  Description of Artificial Sequence: Synthetic oligonucleotide
cacagggugaggccugucc

SEQ ID NO: 668767 - RNA, 19 nt, Artificial Sequence
  Description of Artificial Sequence: Synthetic oligonucleotide
acggacuucgggcauuggu

SEQ ID NO: 668768 - RNA, 19 nt, Artificial Sequence
  Description of Artificial Sequence: Synthetic oligonucleotide
gaucaucuagguagugcug

SEQ ID NO: 668769 - RNA, 19 nt, Artificial Sequence
  Description of Artificial Sequence: Synthetic oligonucleotide
uuuuagagcuucuguccuu

SEQ ID NO: 668770 - RNA, 19 nt, Artificial Sequence
  Description of Artificial Sequence: Synthetic oligonucleotide
uguacguuccgugccucug

SEQ ID NO: 668771 - RNA, 19 nt, Artificial Sequence
  Description of Artificial Sequence: Synthetic oligonucleotide
ggucauagggucugcgcag

SEQ ID NO: 668772 - RNA, 19 nt, Artificial Sequence
  Description of Artificial Sequence: Synthetic oligonucleotide
accgacuggcgguuccugg

SEQ ID NO: 668773 - RNA, 19 nt, Artificial Sequence
  Description of Artificial Sequence: Synthetic oligonucleotide
ugcuuaugacauguuccug

SEQ ID NO: 668774 - RNA, 19 nt, Artificial Sequence
  Description of Artificial Sequence: Synthetic oligonucleotide
ugucguguuuguguucaca

SEQ ID NO: 668775 - RNA, 19 nt, Artificial Sequence
  Description of Artificial Sequence: Synthetic oligonucleotide
ggcgacucgagaccgacug

SEQ ID NO: 668776 - RNA, 19 nt, Artificial Sequence
  Description of Artificial Sequence: Synthetic oligonucleotide
gcuuccucgagcugggcag

SEQ ID NO: 668777 - RNA, 19 nt, Artificial Sequence
  Description of Artificial Sequence: Synthetic oligonucleotide
ucuugucgaaugacaggau

SEQ ID NO: 668778 - RNA, 19 nt, Artificial Sequence
  Description of Artificial Sequence: Synthetic oligonucleotide
cuugguuggucacgccgcc

SEQ ID NO: 668779 - RNA, 19 nt, Artificial Sequence
  Description of Artificial Sequence: Synthetic oligonucleotide
agcccuacagguucacggu

SEQ ID NO: 668780 - RNA, 19 nt, Artificial Sequence
  Description of Artificial Sequence: Synthetic oligonucleotide
uuaugacauguuccuggua

SEQ ID NO: 668781 - RNA, 19 nt, Artificial Sequence
  Description of Artificial Sequence: Synthetic oligonucleotide
caacuggcuccucuagccc

SEQ ID NO: 668782 - RNA, 19 nt, Artificial Sequence
  Description of Artificial Sequence: Synthetic oligonucleotide
gaugcugugggcgcucuca

SEQ ID NO: 668783 - RNA, 19 nt, Artificial Sequence
  Description of Artificial Sequence: Synthetic oligonucleotide
ugggaauguccaccaugug

SEQ ID NO: 668784 - RNA, 19 nt, Artificial Sequence
  Description of Artificial Sequence: Synthetic oligonucleotide
augugcucguggccugucg

SEQ ID NO: 668785 - RNA, 19 nt, Artificial Sequence
  Description of Artificial Sequence: Synthetic oligonucleotide
uacucaagggagccugcau

SEQ ID NO: 668786 - RNA, 19 nt, Artificial Sequence
  Description of Artificial Sequence: Synthetic oligonucleotide
caccgcaugugcucguggc

SEQ ID NO: 668787 - RNA, 19 nt, Artificial Sequence
  Description of Artificial Sequence: Synthetic oligonucleotide
uacguuccgugccucugcu

SEQ ID NO: 668788 - RNA, 19 nt, Artificial Sequence
  Description of Artificial Sequence: Synthetic oligonucleotide
ucucccgacccuccgacuu

SEQ ID NO: 668789 - RNA, 19 nt, Artificial Sequence
  Description of Artificial Sequence: Synthetic oligonucleotide
gcagggacgucauuacaag

SEQ ID NO: 668790 - RNA, 19 nt, Artificial Sequence
  Description of Artificial Sequence: Synthetic oligonucleotide
guguaagcucaucuugauc

SEQ ID NO: 668791 - RNA, 19 nt, Artificial Sequence
  Description of Artificial Sequence: Synthetic oligonucleotide
ucugaucagcgcccucacu

SEQ ID NO: 668792 - RNA, 19 nt, Artificial Sequence
  Description of Artificial Sequence: Synthetic oligonucleotide
guacguuccgugccucugc

SEQ ID NO: 668793 - RNA, 19 nt, Artificial Sequence
  Description of Artificial Sequence: Synthetic oligonucleotide
cuuugaccggcuggcagcc

SEQ ID NO: 668794 - RNA, 19 nt, Artificial Sequence
  Description of Artificial Sequence: Synthetic oligonucleotide
agguccuacaaggccccgc

SEQ ID NO: 668795 - RNA, 19 nt, Artificial Sequence
  Description of Artificial Sequence: Synthetic oligonucleotide
cuuuuagagcuucuguccu

SEQ ID NO: 668796 - RNA, 19 nt, Artificial Sequence
  Description of Artificial Sequence: Synthetic oligonucleotide
agcaccucgccaccgcaug

SEQ ID NO: 668797 - RNA, 19 nt, Artificial Sequence
  Description of Artificial Sequence: Synthetic oligonucleotide
ucccgguggucgaaguugu

SEQ ID NO: 668798 - RNA, 19 nt, Artificial Sequence
  Description of Artificial Sequence: Synthetic oligonucleotide
cugacccacagguuccuuc

SEQ ID NO: 668799 - RNA, 19 nt, Artificial Sequence
  Description of Artificial Sequence: Synthetic oligonucleotide
cuucucccgacccuccgac

SEQ ID NO: 668800 - RNA, 19 nt, Artificial Sequence
  Description of Artificial Sequence: Synthetic oligonucleotide
cacgugugcuggaggacag

SEQ ID NO: 668801 - RNA, 19 nt, Artificial Sequence
  Description of Artificial Sequence: Synthetic oligonucleotide
gacuucgggcauuggugac

SEQ ID NO: 668802 - RNA, 19 nt, Artificial Sequence
  Description of Artificial Sequence: Synthetic oligonucleotide
cugauuuggcgacucgaga

SEQ ID NO: 668803 - RNA, 19 nt, Artificial Sequence
  Description of Artificial Sequence: Synthetic oligonucleotide
guucacgguccaucccggg

SEQ ID NO: 668804 - RNA, 19 nt, Artificial Sequence
  Description of Artificial Sequence: Synthetic oligonucleotide
cucgccaccgcaugugcuc

SEQ ID NO: 668805 - RNA, 19 nt, Artificial Sequence
  Description of Artificial Sequence: Synthetic oligonucleotide
cucgcgccuucucacgccg

SEQ ID NO: 668806 - RNA, 19 nt, Artificial Sequence
  Description of Artificial Sequence: Synthetic oligonucleotide
cuuaugacauguuccuggu

SEQ ID NO: 668807 - RNA, 19 nt, Artificial Sequence
  Description of Artificial Sequence: Synthetic oligonucleotide
acuguacguuccgugccuc

SEQ ID NO: 668808 - RNA, 19 nt, Artificial Sequence
  Description of Artificial Sequence: Synthetic oligonucleotide
ccuucuaguccaccagugg

SEQ ID NO: 668809 - RNA, 19 nt, Artificial Sequence
  Description of Artificial Sequence: Synthetic oligonucleotide
cauagggucugcgcagcgc

SEQ ID NO: 668810 - RNA, 19 nt, Artificial Sequence
  Description of Artificial Sequence: Synthetic oligonucleotide
gugcuacucugcucaacug

SEQ ID NO: 668811 - RNA, 19 nt, Artificial Sequence
  Description of Artificial Sequence: Synthetic oligonucleotide
agcacgugugcuggaggac

SEQ ID NO: 668812 - RNA, 19 nt, Artificial Sequence
  Description of Artificial Sequence: Synthetic oligonucleotide
ccaagugcaagguggcuug

SEQ ID NO: 668813 - RNA, 19 nt, Artificial Sequence
  Description of Artificial Sequence: Synthetic oligonucleotide
gcuacucugcucaacuggc

SEQ ID NO: 668814 - RNA, 19 nt, Artificial Sequence
  Description of Artificial Sequence: Synthetic oligonucleotide
ccuuugaccggcuggcagc

SEQ ID NO: 668815 - RNA, 19 nt, Artificial Sequence
  Description of Artificial Sequence: Synthetic oligonucleotide
ucgcucccuuucuagccgc

SEQ ID NO: 668816 - RNA, 19 nt, Artificial Sequence
  Description of Artificial Sequence: Synthetic oligonucleotide
cacaaauccauagcaccga

SEQ ID NO: 668817 - RNA, 19 nt, Artificial Sequence
  Description of Artificial Sequence: Synthetic oligonucleotide
aaccgcugccgcuggcacu

SEQ ID NO: 668818 - RNA, 19 nt, Artificial Sequence
  Description of Artificial Sequence: Synthetic oligonucleotide
uccagccgugaguugugcu

SEQ ID NO: 668819 - RNA, 19 nt, Artificial Sequence
  Description of Artificial Sequence: Synthetic oligonucleotide
cgauaccuguccucuaugg

SEQ ID NO: 668820 - RNA, 19 nt, Artificial Sequence
  Description of Artificial Sequence: Synthetic oligonucleotide
gucauagggucugcgcagc

SEQ ID NO: 668821 - RNA, 19 nt, Artificial Sequence
  Description of Artificial Sequence: Synthetic oligonucleotide
gacccuccgacuugcgguc

SEQ ID NO: 668822 - RNA, 19 nt, Artificial Sequence
  Description of Artificial Sequence: Synthetic oligonucleotide
ggacuucgggcauugguga

SEQ ID NO: 668823 - RNA, 19 nt, Artificial Sequence
  Description of Artificial Sequence: Synthetic oligonucleotide
cuuugcuaucuugggguuc

SEQ ID NO: 668824 - RNA, 19 nt, Artificial Sequence
  Description of Artificial Sequence: Synthetic oligonucleotide
ucuuugcgccuuucacgcu

SEQ ID NO: 668825 - RNA, 19 nt, Artificial Sequence
  Description of Artificial Sequence: Synthetic oligonucleotide
uccucacgcucacgcauaa

SEQ ID NO: 668826 - RNA, 19 nt, Artificial Sequence
  Description of Artificial Sequence: Synthetic oligonucleotide
cgagguacagcuggcaugg

SEQ ID NO: 668827 - RNA, 19 nt, Artificial Sequence
  Description of Artificial Sequence: Synthetic oligonucleotide
acagcccgcugacccacag

SEQ ID NO: 668828 - RNA, 19 nt, Artificial Sequence
  Description of Artificial Sequence: Synthetic oligonucleotide
gucugccgacuucuucccg

SEQ ID NO: 668829 - RNA, 19 nt, Artificial Sequence
  Description of Artificial Sequence: Synthetic oligonucleotide
aacggcgggugaagugggg

SEQ ID NO: 668830 - RNA, 19 nt, Artificial Sequence
  Description of Artificial Sequence: Synthetic oligonucleotide
cuaguccaccagugggcac

SEQ ID NO: 668831 - RNA, 19 nt, Artificial Sequence
  Description of Artificial Sequence: Synthetic oligonucleotide
gcucaacuggcuccucuag

SEQ ID NO: 668832 - RNA, 19 nt, Artificial Sequence
  Description of Artificial Sequence: Synthetic oligonucleotide
ccgugggaagucucgauac

SEQ ID NO: 668833 - RNA, 19 nt, Artificial Sequence
  Description of Artificial Sequence: Synthetic oligonucleotide
guucgguucuguugcaggu

SEQ ID NO: 668834 - RNA, 19 nt, Artificial Sequence
  Description of Artificial Sequence: Synthetic oligonucleotide
ccucuagcccuacagguuc

SEQ ID NO: 668835 - RNA, 19 nt, Artificial Sequence
  Description of Artificial Sequence: Synthetic oligonucleotide
uggucacgccgccaccuuc

SEQ ID NO: 668836 - RNA, 19 nt, Artificial Sequence
  Description of Artificial Sequence: Synthetic oligonucleotide
cagcacgugugcuggagga

SEQ ID NO: 668837 - RNA, 19 nt, Artificial Sequence
  Description of Artificial Sequence: Synthetic oligonucleotide
gcagcacgugugcuggagg

SEQ ID NO: 668838 - RNA, 19 nt, Artificial Sequence
  Description of Artificial Sequence: Synthetic oligonucleotide
caagugcaagguggcuugg

SEQ ID NO: 668839 - RNA, 19 nt, Artificial Sequence
  Description of Artificial Sequence: Synthetic oligonucleotide
cacgcaugcgcucccgcuc

SEQ ID NO: 668840 - RNA, 19 nt, Artificial Sequence
  Description of Artificial Sequence: Synthetic oligonucleotide
gacuguacguuccgugccu

SEQ ID NO: 668841 - RNA, 19 nt, Artificial Sequence
  Description of Artificial Sequence: Synthetic oligonucleotide
ggucuggacccaucucucc

SEQ ID NO: 668842 - RNA, 19 nt, Artificial Sequence
  Description of Artificial Sequence: Synthetic oligonucleotide
gugcucguggccugucgug

SEQ ID NO: 668843 - RNA, 19 nt, Artificial Sequence
  Description of Artificial Sequence: Synthetic oligonucleotide
ggcgguuccugguguaagc

SEQ ID NO: 668844 - RNA, 19 nt, Artificial Sequence
  Description of Artificial Sequence: Synthetic oligonucleotide
caagcgucaaaagcaaacu

SEQ ID NO: 668845 - RNA, 19 nt, Artificial Sequence
  Description of Artificial Sequence: Synthetic oligonucleotide
ucuagcccuacagguucac

SEQ ID NO: 668846 - RNA, 19 nt, Artificial Sequence
  Description of Artificial Sequence: Synthetic oligonucleotide
ucucgauaccuguccucua

SEQ ID NO: 668847 - RNA, 19 nt, Artificial Sequence
  Description of Artificial Sequence: Synthetic oligonucleotide
ccagccgugggaagucucg

SEQ ID NO: 668848 - RNA, 19 nt, Artificial Sequence
  Description of Artificial Sequence: Synthetic oligonucleotide
cacgguccaucccggggcc

SEQ ID NO: 668849 - RNA, 19 nt, Artificial Sequence
  Description of Artificial Sequence: Synthetic oligonucleotide
gaucauccuuccaugcagu

SEQ ID NO: 668850 - RNA, 19 nt, Artificial Sequence
  Description of Artificial Sequence: Synthetic oligonucleotide
caaccgcugccgcuggcac

SEQ ID NO: 668851 - RNA, 19 nt, Artificial Sequence
  Description of Artificial Sequence: Synthetic oligonucleotide
gguucacgguccaucccgg

SEQ ID NO: 668852 - RNA, 19 nt, Artificial Sequence
  Description of Artificial Sequence: Synthetic oligonucleotide
cccgcugacccacagguuc

SEQ ID NO: 668853 - RNA, 19 nt, Artificial Sequence
  Description of Artificial Sequence: Synthetic oligonucleotide
cucaguaacggcgggugaa

SEQ ID NO: 668854 - RNA, 19 nt, Artificial Sequence
  Description of Artificial Sequence: Synthetic oligonucleotide
cacgccagcugucucggga

SEQ ID NO: 668855 - RNA, 19 nt, Artificial Sequence
  Description of Artificial Sequence: Synthetic oligonucleotide
acgucauuacaagcgucaa

SEQ ID NO: 668856 - RNA, 19 nt, Artificial Sequence
  Description of Artificial Sequence: Synthetic oligonucleotide
uucucccgacccuccgacu

SEQ ID NO: 668857 - RNA, 19 nt, Artificial Sequence
  Description of Artificial Sequence: Synthetic oligonucleotide
uugguuggucacgccgcca

SEQ ID NO: 668858 - RNA, 19 nt, Artificial Sequence
  Description of Artificial Sequence: Synthetic oligonucleotide
gucucgauaccuguccucu

SEQ ID NO: 668859 - RNA, 19 nt, Artificial Sequence
  Description of Artificial Sequence: Synthetic oligonucleotide
uggcgacucgagaccgacu

SEQ ID NO: 668860 - RNA, 19 nt, Artificial Sequence
  Description of Artificial Sequence: Synthetic oligonucleotide
ccgagguacagcuggcaug

SEQ ID NO: 668861 - RNA, 19 nt, Artificial Sequence
  Description of Artificial Sequence: Synthetic oligonucleotide
gguuuuauauccuguucuu

SEQ ID NO: 668862 - RNA, 19 nt, Artificial Sequence
  Description of Artificial Sequence: Synthetic oligonucleotide
ucccgacccuccgacuugc

SEQ ID NO: 668863 - RNA, 19 nt, Artificial Sequence
  Description of Artificial Sequence: Synthetic oligonucleotide
gugccccaagugcaaggug

SEQ ID NO: 668864 - RNA, 19 nt, Artificial Sequence
  Description of Artificial Sequence: Synthetic oligonucleotide
cgugaguugugcucuuccc

SEQ ID NO: 668865 - RNA, 19 nt, Artificial Sequence
  Description of Artificial Sequence: Synthetic oligonucleotide
cacgcauaaugcgcugcug

SEQ ID NO: 668866 - RNA, 19 nt, Artificial Sequence
  Description of Artificial Sequence: Synthetic oligonucleotide
ucccgagguacagcuggca

SEQ ID NO: 668867 - RNA, 19 nt, Artificial Sequence
  Description of Artificial Sequence: Synthetic oligonucleotide
ccagccgugaguugugcuc

SEQ ID NO: 668868 - RNA, 19 nt, Artificial Sequence
  Description of Artificial Sequence: Synthetic oligonucleotide
ccuacaaggccccgcucag

SEQ ID NO: 668869 - RNA, 19 nt, Artificial Sequence
  Description of Artificial Sequence: Synthetic oligonucleotide
cucgagaccgacuggcggu

SEQ ID NO: 668870 - RNA, 19 nt, Artificial Sequence
  Description of Artificial Sequence: Synthetic oligonucleotide
guagugcugcucaucacgu

SEQ ID NO: 668871 - RNA, 19 nt, Artificial Sequence
  Description of Artificial Sequence: Synthetic oligonucleotide
ccgugaguugugcucuucc

SEQ ID NO: 668872 - RNA, 19 nt, Artificial Sequence
  Description of Artificial Sequence: Synthetic oligonucleotide
agccgugggaagucucgau

SEQ ID NO: 668873 - RNA, 19 nt, Artificial Sequence
  Description of Artificial Sequence: Synthetic oligonucleotide
cccgacaaccuucccgugc

SEQ ID NO: 668874 - RNA, 19 nt, Artificial Sequence
  Description of Artificial Sequence: Synthetic oligonucleotide
gcgucaaaagcaaacuucu

SEQ ID NO: 668875 - RNA, 19 nt, Artificial Sequence
  Description of Artificial Sequence: Synthetic oligonucleotide
guacucaagggagccugca

SEQ ID NO: 668876 - RNA, 19 nt, Artificial Sequence
  Description of Artificial Sequence: Synthetic oligonucleotide
cucuagcccuacagguuca

SEQ ID NO: 668877 - RNA, 19 nt, Artificial Sequence
  Description of Artificial Sequence: Synthetic oligonucleotide
cuauggcugcacgcuuccc

SEQ ID NO: 668878 - RNA, 19 nt, Artificial Sequence
  Description of Artificial Sequence: Synthetic oligonucleotide
cucccgacccuccgacuug

SEQ ID NO: 668879 - RNA, 19 nt, Artificial Sequence
  Description of Artificial Sequence: Synthetic oligonucleotide
ugggcgcucucaccagcuc

SEQ ID NO: 668880 - RNA, 19 nt, Artificial Sequence
  Description of Artificial Sequence: Synthetic oligonucleotide
cugucucgggagucccaac

SEQ ID NO: 668881 - RNA, 19 nt, Artificial Sequence
  Description of Artificial Sequence: Synthetic oligonucleotide
cugcacucgcgccuucuca

SEQ ID NO: 668882 - RNA, 19 nt, Artificial Sequence
  Description of Artificial Sequence: Synthetic oligonucleotide
cagcccgcugacccacagg

SEQ ID NO: 668883 - RNA, 19 nt, Artificial Sequence
  Description of Artificial Sequence: Synthetic oligonucleotide
gguacucaagggagccugc

SEQ ID NO: 668884 - RNA, 19 nt, Artificial Sequence
  Description of Artificial Sequence: Synthetic oligonucleotide
gcgacucgagaccgacugg

SEQ ID NO: 668885 - RNA, 19 nt, Artificial Sequence
  Description of Artificial Sequence: Synthetic oligonucleotide
acguggacauggucacaaa

SEQ ID NO: 668886 - RNA, 19 nt, Artificial Sequence
  Description of Artificial Sequence: Synthetic oligonucleotide
ugcgccuuucacgcuccac

SEQ ID NO: 668887 - RNA, 19 nt, Artificial Sequence
  Description of Artificial Sequence: Synthetic oligonucleotide
acuugcggucuugacuuuu

SEQ ID NO: 668888 - RNA, 19 nt, Artificial Sequence
  Description of Artificial Sequence: Synthetic oligonucleotide
acgugcccagguccuacaa

SEQ ID NO: 668889 - RNA, 19 nt, Artificial Sequence
  Description of Artificial Sequence: Synthetic oligonucleotide
gggaagucucgauaccugu

SEQ ID NO: 668890 - RNA, 19 nt, Artificial Sequence
  Description of Artificial Sequence: Synthetic oligonucleotide
uccacagggugaggccugu

SEQ ID NO: 668891 - RNA, 19 nt, Artificial Sequence
  Description of Artificial Sequence: Synthetic oligonucleotide
cucgauaccuguccucuau

SEQ ID NO: 668892 - RNA, 19 nt, Artificial Sequence
  Description of Artificial Sequence: Synthetic oligonucleotide
gggacgucauuacaagcgu

SEQ ID NO: 668893 - RNA, 19 nt, Artificial Sequence
  Description of Artificial Sequence: Synthetic oligonucleotide
ggucuugguuggucacgcc

SEQ ID NO: 668894 - RNA, 19 nt, Artificial Sequence
  Description of Artificial Sequence: Synthetic oligonucleotide
gcauaaugcgcugcugcuc

SEQ ID NO: 668895 - RNA, 19 nt, Artificial Sequence
  Description of Artificial Sequence: Synthetic oligonucleotide
gguguaagcucaucuugau

SEQ ID NO: 668896 - RNA, 19 nt, Artificial Sequence
  Description of Artificial Sequence: Synthetic oligonucleotide
augcacgugcccagguccu

SEQ ID NO: 668897 - RNA, 19 nt, Artificial Sequence
  Description of Artificial Sequence: Synthetic oligonucleotide
ccuugaucuugucgaauga

SEQ ID NO: 668898 - RNA, 19 nt, Artificial Sequence
  Description of Artificial Sequence: Synthetic oligonucleotide
acgucgucuuugcuaucuu

SEQ ID NO: 668899 - RNA, 19 nt, Artificial Sequence
  Description of Artificial Sequence: Synthetic oligonucleotide
caccucgccaccgcaugug

SEQ ID NO: 668900 - RNA, 19 nt, Artificial Sequence
  Description of Artificial Sequence: Synthetic oligonucleotide
ccaucacgacuguacguuc

SEQ ID NO: 668901 - RNA, 19 nt, Artificial Sequence
  Description of Artificial Sequence: Synthetic oligonucleotide
cugccgacuucuucccgga

SEQ ID NO: 668902 - RNA, 19 nt, Artificial Sequence
  Description of Artificial Sequence: Synthetic oligonucleotide
ucgagaccgacuggcgguu

SEQ ID NO: 668903 - RNA, 19 nt, Artificial Sequence
  Description of Artificial Sequence: Synthetic oligonucleotide
uugcgccuuucacgcucca

SEQ ID NO: 668904 - RNA, 19 nt, Artificial Sequence
  Description of Artificial Sequence: Synthetic oligonucleotide
ggacgucauuacaagcguc

SEQ ID NO: 668905 - RNA, 19 nt, Artificial Sequence
  Description of Artificial Sequence: Synthetic oligonucleotide
cgucgucuuugcuaucuug

SEQ ID NO: 668906 - RNA, 19 nt, Artificial Sequence
  Description of Artificial Sequence: Synthetic oligonucleotide
uuugaccggcuggcagccu

SEQ ID NO: 668907 - RNA, 19 nt, Artificial Sequence
  Description of Artificial Sequence: Synthetic oligonucleotide
gguccuacaaggccccgcu

SEQ ID NO: 668908 - RNA, 19 nt, Artificial Sequence
  Description of Artificial Sequence: Synthetic oligonucleotide
cacgucgucuuugcuaucu

SEQ ID NO: 668909 - RNA, 19 nt, Artificial Sequence
  Description of Artificial Sequence: Synthetic oligonucleotide
ccgacccuccgacuugcgg

SEQ ID NO: 668910 - RNA, 19 nt, Artificial Sequence
  Description of Artificial Sequence: Synthetic oligonucleotide
ucgcgccuucucacgccgu

SEQ ID NO: 668911 - RNA, 19 nt, Artificial Sequence
  Description of Artificial Sequence: Synthetic oligonucleotide
ccuucacgcugaugacagg

SEQ ID NO: 668912 - RNA, 19 nt, Artificial Sequence
  Description of Artificial Sequence: Synthetic oligonucleotide
cccgucgccgcucugucuc

SEQ ID NO: 668913 - RNA, 19 nt, Artificial Sequence
  Description of Artificial Sequence: Synthetic oligonucleotide
guccuacaaggccccgcuc

SEQ ID NO: 668914 - RNA, 19 nt, Artificial Sequence
  Description of Artificial Sequence: Synthetic oligonucleotide
uggccccgacaaccuuccc

SEQ ID NO: 668915 - RNA, 19 nt, Artificial Sequence
  Description of Artificial Sequence: Synthetic oligonucleotide
ccgagccccacggacuucg

SEQ ID NO: 668916 - RNA, 19 nt, Artificial Sequence
  Description of Artificial Sequence: Synthetic oligonucleotide
cagguccuacaaggccccg

SEQ ID NO: 668917 - RNA, 19 nt, Artificial Sequence
  Description of Artificial Sequence: Synthetic oligonucleotide
cacgugcccagguccuaca

SEQ ID NO: 668918 - RNA, 19 nt, Artificial Sequence
  Description of Artificial Sequence: Synthetic oligonucleotide
ggacucuuuaggagcugca

SEQ ID NO: 668919 - RNA, 19 nt, Artificial Sequence
  Description of Artificial Sequence: Synthetic oligonucleotide
gccccgacaaccuucccgu

SEQ ID NO: 668920 - RNA, 19 nt, Artificial Sequence
  Description of Artificial Sequence: Synthetic oligonucleotide
cuuccuuaauagagcucau

SEQ ID NO: 668921 - RNA, 19 nt, Artificial Sequence
  Description of Artificial Sequence: Synthetic oligonucleotide
ccaccgcaugugcucgugg

SEQ ID NO: 668922 - RNA, 19 nt, Artificial Sequence
  Description of Artificial Sequence: Synthetic oligonucleotide
gccgugggaagucucgaua

SEQ ID NO: 668923 - RNA, 19 nt, Artificial Sequence
  Description of Artificial Sequence: Synthetic oligonucleotide
gccccaagugcaagguggc

SEQ ID NO: 668924 - RNA, 19 nt, Artificial Sequence
  Description of Artificial Sequence: Synthetic oligonucleotide
uucgggcauuggugaccac

SEQ ID NO: 668925 - RNA, 19 nt, Artificial Sequence
  Description of Artificial Sequence: Synthetic oligonucleotide
caucugacguggacauggu

SEQ ID NO: 668926 - RNA, 19 nt, Artificial Sequence
  Description of Artificial Sequence: Synthetic oligonucleotide
cgguggucgaaguugugga

SEQ ID NO: 668927 - RNA, 19 nt, Artificial Sequence
  Description of Artificial Sequence: Synthetic oligonucleotide
gccucuggcgcucccgcuc

SEQ ID NO: 668928 - RNA, 19 nt, Artificial Sequence
  Description of Artificial Sequence: Synthetic oligonucleotide
ccuucccgagguacagcug

SEQ ID NO: 668929 - RNA, 19 nt, Artificial Sequence
  Description of Artificial Sequence: Synthetic oligonucleotide
guccuuugaccggcuggca

SEQ ID NO: 668930 - RNA, 19 nt, Artificial Sequence
  Description of Artificial Sequence: Synthetic oligonucleotide
ccaugccaccucugccugc

SEQ ID NO: 668931 - RNA, 19 nt, Artificial Sequence
  Description of Artificial Sequence: Synthetic oligonucleotide
ccaucccggggccuccgcc

SEQ ID NO: 668932 - RNA, 19 nt, Artificial Sequence
  Description of Artificial Sequence: Synthetic oligonucleotide
ccgacuugcggucuugacu

SEQ ID NO: 668933 - RNA, 19 nt, Artificial Sequence
  Description of Artificial Sequence: Synthetic oligonucleotide
gaccggcuggcagccuuca

SEQ ID NO: 668934 - RNA, 19 nt, Artificial Sequence
  Description of Artificial Sequence: Synthetic oligonucleotide
gccugucguguuuguguuc

SEQ ID NO: 668935 - RNA, 19 nt, Artificial Sequence
  Description of Artificial Sequence: Synthetic oligonucleotide
ggccuguccggcccuggca

SEQ ID NO: 668936 - RNA, 19 nt, Artificial Sequence
  Description of Artificial Sequence: Synthetic oligonucleotide
ccggagggccuucuuccac

SEQ ID NO: 668937 - RNA, 19 nt, Artificial Sequence
  Description of Artificial Sequence: Synthetic oligonucleotide
cuccgacuugcggucuuga

SEQ ID NO: 668938 - RNA, 19 nt, Artificial Sequence
  Description of Artificial Sequence: Synthetic oligonucleotide
cagccgugggaagucucga

SEQ ID NO: 668939 - RNA, 19 nt, Artificial Sequence
  Description of Artificial Sequence: Synthetic oligonucleotide
ggugccccaagugcaaggu

SEQ ID NO: 668940 - RNA, 19 nt, Artificial Sequence
  Description of Artificial Sequence: Synthetic oligonucleotide
acccuccgacuugcggucu

SEQ ID NO: 668941 - RNA, 19 nt, Artificial Sequence
  Description of Artificial Sequence: Synthetic oligonucleotide
caugcucccgguggucgaa

SEQ ID NO: 668942 - RNA, 19 nt, Artificial Sequence
  Description of Artificial Sequence: Synthetic oligonucleotide
cuggcgguuccugguguaa

SEQ ID NO: 668943 - RNA, 19 nt, Artificial Sequence
  Description of Artificial Sequence: Synthetic oligonucleotide
gcacgugcccagguccuac

SEQ ID NO: 668944 - RNA, 19 nt, Artificial Sequence
  Description of Artificial Sequence: Synthetic oligonucleotide
caguaacggcgggugaagu

SEQ ID NO: 668945 - RNA, 19 nt, Artificial Sequence
  Description of Artificial Sequence: Synthetic oligonucleotide
ccgacaaccuucccgugcu

SEQ ID NO: 668946 - RNA, 19 nt, Artificial Sequence
  Description of Artificial Sequence: Synthetic oligonucleotide
ggccugucguguuuguguu

SEQ ID NO: 668947 - RNA, 19 nt, Artificial Sequence
  Description of Artificial Sequence: Synthetic oligonucleotide
cgcaugugcucguggccug

SEQ ID NO: 668948 - RNA, 19 nt, Artificial Sequence
  Description of Artificial Sequence: Synthetic oligonucleotide
gcgguuccugguguaagcu

SEQ ID NO: 668949 - RNA, 19 nt, Artificial Sequence
  Description of Artificial Sequence: Synthetic oligonucleotide
cccgacccuccgacuugcg

SEQ ID NO: 668950 - RNA, 19 nt, Artificial Sequence
  Description of Artificial Sequence: Synthetic oligonucleotide
cgcauaaugcgcugcugcu

SEQ ID NO: 668951 - RNA, 19 nt, Artificial Sequence
  Description of Artificial Sequence: Synthetic oligonucleotide
ccacgccagcugucucggg

SEQ ID NO: 668952 - RNA, 19 nt, Artificial Sequence
  Description of Artificial Sequence: Synthetic oligonucleotide
cgcucacgcauaaugcgcu

SEQ ID NO: 668953 - RNA, 19 nt, Artificial Sequence
  Description of Artificial Sequence: Synthetic oligonucleotide
gccgugaguugugcucuuc

SEQ ID NO: 668954 - RNA, 19 nt, Artificial Sequence
  Description of Artificial Sequence: Synthetic oligonucleotide
cucguggccugucguguuu

SEQ ID NO: 668955 - RNA, 19 nt, Artificial Sequence
  Description of Artificial Sequence: Synthetic oligonucleotide
ccccgacaaccuucccgug

SEQ ID NO: 668956 - RNA, 19 nt, Artificial Sequence
  Description of Artificial Sequence: Synthetic oligonucleotide
cacucgagcugcagccguu

SEQ ID NO: 668957 - RNA, 19 nt, Artificial Sequence
  Description of Artificial Sequence: Synthetic oligonucleotide
cuguccggcccuggcaccu

SEQ ID NO: 668958 - RNA, 19 nt, Artificial Sequence
  Description of Artificial Sequence: Synthetic oligonucleotide
gcaccucgccaccgcaugu

SEQ ID NO: 668959 - RNA, 19 nt, Artificial Sequence
  Description of Artificial Sequence: Synthetic oligonucleotide
cccaagugcaagguggcuu

SEQ ID NO: 668960 - RNA, 19 nt, Artificial Sequence
  Description of Artificial Sequence: Synthetic oligonucleotide
cuacagguucacgguccau

SEQ ID NO: 668961 - RNA, 19 nt, Artificial Sequence
  Description of Artificial Sequence: Synthetic oligonucleotide
ccgcaugugcucguggccu

SEQ ID NO: 668962 - RNA, 19 nt, Artificial Sequence
  Description of Artificial Sequence: Synthetic oligonucleotide
cccgagguacagcuggcau

SEQ ID NO: 668963 - RNA, 19 nt, Artificial Sequence
  Description of Artificial Sequence: Synthetic oligonucleotide
ccucgccaccgcaugugcu

SEQ ID NO: 668964 - RNA, 19 nt, Artificial Sequence
  Description of Artificial Sequence: Synthetic oligonucleotide
cgagaccgacuggcgguuc

SEQ ID NO: 668965 - RNA, 19 nt, Artificial Sequence
  Description of Artificial Sequence: Synthetic oligonucleotide
cgggagucccaaccauggu

SEQ ID NO: 668966 - RNA, 19 nt, Artificial Sequence
  Description of Artificial Sequence: Synthetic oligonucleotide
ccccacggacuucgggcau

SEQ ID NO: 668967 - RNA, 19 nt, Artificial Sequence
  Description of Artificial Sequence: Synthetic oligonucleotide
cccacggacuucgggcauu

SEQ ID NO: 668968 - RNA, 19 nt, Artificial Sequence
  Description of Artificial Sequence: Synthetic oligonucleotide
ccucacgcucacgcauaau

SEQ ID NO: 668969 - RNA, 19 nt, Artificial Sequence
  Description of Artificial Sequence: Synthetic oligonucleotide
cgcgccuucucacgccguu

SEQ ID NO: 668970 - RNA, 19 nt, Artificial Sequence
  Description of Artificial Sequence: Synthetic oligonucleotide
cgccaccgcaugugcucgu

SEQ ID NO: 668971 - RNA, 19 nt, Artificial Sequence
  Description of Artificial Sequence: Synthetic oligonucleotide
agauauggagaucagaucg

SEQ ID NO: 668972 - RNA, 19 nt, Artificial Sequence
  Description of Artificial Sequence: Synthetic oligonucleotide
gaugauugagugcaaaucg

SEQ ID NO: 668973 - RNA, 19 nt, Artificial Sequence
  Description of Artificial Sequence: Synthetic oligonucleotide
uauuuauagggucaaggcg

SEQ ID NO: 668974 - RNA, 19 nt, Artificial Sequence
  Description of Artificial Sequence: Synthetic oligonucleotide
aaaguagaacacuuuaaag

SEQ ID NO: 668975 - RNA, 19 nt, Artificial Sequence
  Description of Artificial Sequence: Synthetic oligonucleotide
uuuagaagugguuugaucu

SEQ ID NO: 668976 - RNA, 19 nt, Artificial Sequence
  Description of Artificial Sequence: Synthetic oligonucleotide
aagccauccagauaucugc

SEQ ID NO: 668977 - RNA, 19 nt, Artificial Sequence
  Description of Artificial Sequence: Synthetic oligonucleotide
aauauuguccaaguggaac

SEQ ID NO: 668978 - RNA, 19 nt, Artificial Sequence
  Description of Artificial Sequence: Synthetic oligonucleotide
ugauaugucaggauuacug

SEQ ID NO: 668979 - RNA, 19 nt, Artificial Sequence
  Description of Artificial Sequence: Synthetic oligonucleotide
gauaugucaggauuacugg

SEQ ID NO: 668980 - RNA, 19 nt, Artificial Sequence
  Description of Artificial Sequence: Synthetic oligonucleotide
ucagaucggaucaagaugu

SEQ ID NO: 668981 - RNA, 19 nt, Artificial Sequence
  Description of Artificial Sequence: Synthetic oligonucleotide
ucuaaaaucacagaacuau

SEQ ID NO: 668982 - RNA, 19 nt, Artificial Sequence
  Description of Artificial Sequence: Synthetic oligonucleotide
aaguuuucaaccuguuguc

SEQ ID NO: 668983 - RNA, 19 nt, Artificial Sequence
  Description of Artificial Sequence: Synthetic oligonucleotide
aagauauggagaucagauc

SEQ ID NO: 668984 - RNA, 19 nt, Artificial Sequence
  Description of Artificial Sequence: Synthetic oligonucleotide
caaucaaugggccacacag

SEQ ID NO: 668985 - RNA, 19 nt, Artificial Sequence
  Description of Artificial Sequence: Synthetic oligonucleotide
uaaaguagaacacuuuaaa

SEQ ID NO: 668986 - RNA, 19 nt, Artificial Sequence
  Description of Artificial Sequence: Synthetic oligonucleotide
ugugaguugaacauccuga

SEQ ID NO: 668987 - RNA, 19 nt, Artificial Sequence
  Description of Artificial Sequence: Synthetic oligonucleotide
uugguaagccuucuuauag

SEQ ID NO: 668988 - RNA, 19 nt, Artificial Sequence
  Description of Artificial Sequence: Synthetic oligonucleotide
uacaguaauggcaugggug

SEQ ID NO: 668989 - RNA, 19 nt, Artificial Sequence
  Description of Artificial Sequence: Synthetic oligonucleotide
aagaccuucuaccagcucu

SEQ ID NO: 668990 - RNA, 19 nt, Artificial Sequence
  Description of Artificial Sequence: Synthetic oligonucleotide
gaacuaugcacacacagac

SEQ ID NO: 668991 - RNA, 19 nt, Artificial Sequence
  Description of Artificial Sequence: Synthetic oligonucleotide
aggauuacuggucuguuuc

SEQ ID NO: 668992 - RNA, 19 nt, Artificial Sequence
  Description of Artificial Sequence: Synthetic oligonucleotide
uggucgucaagccugagag

SEQ ID NO: 668993 - RNA, 19 nt, Artificial Sequence
  Description of Artificial Sequence: Synthetic oligonucleotide
uauaggaacccaagaagag

SEQ ID NO: 668994 - RNA, 19 nt, Artificial Sequence
  Description of Artificial Sequence: Synthetic oligonucleotide
uaaguguguaagaacagga

SEQ ID NO: 668995 - RNA, 19 nt, Artificial Sequence
  Description of Artificial Sequence: Synthetic oligonucleotide
ucgugugccauucuuauca

SEQ ID NO: 668996 - RNA, 19 nt, Artificial Sequence
  Description of Artificial Sequence: Synthetic oligonucleotide
accaaaauccaauugugug

SEQ ID NO: 668997 - RNA, 19 nt, Artificial Sequence
  Description of Artificial Sequence: Synthetic oligonucleotide
gguacugauacccuguugg

SEQ ID NO: 668998 - RNA, 19 nt, Artificial Sequence
  Description of Artificial Sequence: Synthetic oligonucleotide
aacguguugaaacaggauu

SEQ ID NO: 668999 - RNA, 19 nt, Artificial Sequence
  Description of Artificial Sequence: Synthetic oligonucleotide
uuaaguguguaagaacagg

SEQ ID NO: 669000 - RNA, 19 nt, Artificial Sequence
  Description of Artificial Sequence: Synthetic oligonucleotide
agaagcaagggguauauga

SEQ ID NO: 669001 - RNA, 19 nt, Artificial Sequence
  Description of Artificial Sequence: Synthetic oligonucleotide
uuaugguugagcccaaugu

SEQ ID NO: 669002 - RNA, 19 nt, Artificial Sequence
  Description of Artificial Sequence: Synthetic oligonucleotide
aguagaacacuuuaaaguu

SEQ ID NO: 669003 - RNA, 19 nt, Artificial Sequence
  Description of Artificial Sequence: Synthetic oligonucleotide
caggauuuaugguugagcc

SEQ ID NO: 669004 - RNA, 19 nt, Artificial Sequence
  Description of Artificial Sequence: Synthetic oligonucleotide
aauguuacaguaauggcau

SEQ ID NO: 669005 - RNA, 19 nt, Artificial Sequence
  Description of Artificial Sequence: Synthetic oligonucleotide
aauccacuuagacagggga

SEQ ID NO: 669006 - RNA, 19 nt, Artificial Sequence
  Description of Artificial Sequence: Synthetic oligonucleotide
gagaaugguaaauccaggc

SEQ ID NO: 669007 - RNA, 19 nt, Artificial Sequence
  Description of Artificial Sequence: Synthetic oligonucleotide
agauacauauuugagggag

SEQ ID NO: 669008 - RNA, 19 nt, Artificial Sequence
  Description of Artificial Sequence: Synthetic oligonucleotide
ugguauguagcccauuccc

SEQ ID NO: 669009 - RNA, 19 nt, Artificial Sequence
  Description of Artificial Sequence: Synthetic oligonucleotide
uguagaagcgcuacaagaa

SEQ ID NO: 669010 - RNA, 19 nt, Artificial Sequence
  Description of Artificial Sequence: Synthetic oligonucleotide
caaggcgagaauuacauuc

SEQ ID NO: 669011 - RNA, 19 nt, Artificial Sequence
  Description of Artificial Sequence: Synthetic oligonucleotide
aguuaggaaucaaagaguc

SEQ ID NO: 669012 - RNA, 19 nt, Artificial Sequence
  Description of Artificial Sequence: Synthetic oligonucleotide
auuuagaagugguuugauc

SEQ ID NO: 669013 - RNA, 19 nt, Artificial Sequence
  Description of Artificial Sequence: Synthetic oligonucleotide
aaccacaugaucccggcug

SEQ ID NO: 669014 - RNA, 19 nt, Artificial Sequence
  Description of Artificial Sequence: Synthetic oligonucleotide
agugacaccuuccuuaucu

SEQ ID NO: 669015 - RNA, 19 nt, Artificial Sequence
  Description of Artificial Sequence: Synthetic oligonucleotide
uaacaggugaccauucuac

SEQ ID NO: 669016 - RNA, 19 nt, Artificial Sequence
  Description of Artificial Sequence: Synthetic oligonucleotide
uauacagcuuuauuuaauc

SEQ ID NO: 669017 - RNA, 19 nt, Artificial Sequence
  Description of Artificial Sequence: Synthetic oligonucleotide
uagaagcgcuacaagaaag

SEQ ID NO: 669018 - RNA, 19 nt, Artificial Sequence
  Description of Artificial Sequence: Synthetic oligonucleotide
aggauuuaugguugagccc

SEQ ID NO: 669019 - RNA, 19 nt, Artificial Sequence
  Description of Artificial Sequence: Synthetic oligonucleotide
uggagagaaugguaaaucc

SEQ ID NO: 669020 - RNA, 19 nt, Artificial Sequence
  Description of Artificial Sequence: Synthetic oligonucleotide
auuuauagggucaaggcga

SEQ ID NO: 669021 - RNA, 19 nt, Artificial Sequence
  Description of Artificial Sequence: Synthetic oligonucleotide
cuuauagugacguggacca

SEQ ID NO: 669022 - RNA, 19 nt, Artificial Sequence
  Description of Artificial Sequence: Synthetic oligonucleotide
ucaauguuaaugagcacaa

SEQ ID NO: 669023 - RNA, 19 nt, Artificial Sequence
  Description of Artificial Sequence: Synthetic oligonucleotide
acuuaaguguguaagaaca

SEQ ID NO: 669024 - RNA, 19 nt, Artificial Sequence
  Description of Artificial Sequence: Synthetic oligonucleotide
aguaaaguagaacacuuua

SEQ ID NO: 669025 - RNA, 19 nt, Artificial Sequence
  Description of Artificial Sequence: Synthetic oligonucleotide
acauauacagcuuuauuua

SEQ ID NO: 669026 - RNA, 19 nt, Artificial Sequence
  Description of Artificial Sequence: Synthetic oligonucleotide
agagaagauauggagauca

SEQ ID NO: 669027 - RNA, 19 nt, Artificial Sequence
  Description of Artificial Sequence: Synthetic oligonucleotide
aacuacuuggggcaguccu

SEQ ID NO: 669028 - RNA, 19 nt, Artificial Sequence
  Description of Artificial Sequence: Synthetic oligonucleotide
agggagaauagggaaaggc

SEQ ID NO: 669029 - RNA, 19 nt, Artificial Sequence
  Description of Artificial Sequence: Synthetic oligonucleotide
uuugagggagaauagggaa

SEQ ID NO: 669030 - RNA, 19 nt, Artificial Sequence
  Description of Artificial Sequence: Synthetic oligonucleotide
gcgagaauuacauucaacc

SEQ ID NO: 669031 - RNA, 19 nt, Artificial Sequence
  Description of Artificial Sequence: Synthetic oligonucleotide
aucagaucggaucaagaug

SEQ ID NO: 669032 - RNA, 19 nt, Artificial Sequence
  Description of Artificial Sequence: Synthetic oligonucleotide
uuuauagggucaaggcgag

SEQ ID NO: 669033 - RNA, 19 nt, Artificial Sequence
  Description of Artificial Sequence: Synthetic oligonucleotide
ucugcguccauuauaggaa

SEQ ID NO: 669034 - RNA, 19 nt, Artificial Sequence
  Description of Artificial Sequence: Synthetic oligonucleotide
uaugggucuuucaaucucc

SEQ ID NO: 669035 - RNA, 19 nt, Artificial Sequence
  Description of Artificial Sequence: Synthetic oligonucleotide
cagaacuaugcacacacag

SEQ ID NO: 669036 - RNA, 19 nt, Artificial Sequence
  Description of Artificial Sequence: Synthetic oligonucleotide
agaaugguaaauccaggcu

SEQ ID NO: 669037 - RNA, 19 nt, Artificial Sequence
  Description of Artificial Sequence: Synthetic oligonucleotide
ucuauuauggaguggucau

SEQ ID NO: 669038 - RNA, 19 nt, Artificial Sequence
  Description of Artificial Sequence: Synthetic oligonucleotide
auauuugagggagaauagg

SEQ ID NO: 669039 - RNA, 19 nt, Artificial Sequence
  Description of Artificial Sequence: Synthetic oligonucleotide
aauccaauuguguggccca

SEQ ID NO: 669040 - RNA, 19 nt, Artificial Sequence
  Description of Artificial Sequence: Synthetic oligonucleotide
cuuaaguguguaagaacag

SEQ ID NO: 669041 - RNA, 19 nt, Artificial Sequence
  Description of Artificial Sequence: Synthetic oligonucleotide
gauauggagaucagaucgg

SEQ ID NO: 669042 - RNA, 19 nt, Artificial Sequence
  Description of Artificial Sequence: Synthetic oligonucleotide
ccuaccaccaguaaaguag

SEQ ID NO: 669043 - RNA, 19 nt, Artificial Sequence
  Description of Artificial Sequence: Synthetic oligonucleotide
uugccuaucuguguaacag

SEQ ID NO: 669044 - RNA, 19 nt, Artificial Sequence
  Description of Artificial Sequence: Synthetic oligonucleotide
aaagucacacucuggcaga

SEQ ID NO: 669045 - RNA, 19 nt, Artificial Sequence
  Description of Artificial Sequence: Synthetic oligonucleotide
aagaacguguugaaacagg

SEQ ID NO: 669046 - RNA, 19 nt, Artificial Sequence
  Description of Artificial Sequence: Synthetic oligonucleotide
ggucauuucaaggaggagg

SEQ ID NO: 669047 - RNA, 19 nt, Artificial Sequence
  Description of Artificial Sequence: Synthetic oligonucleotide
ugaucacagccaaucaaug

SEQ ID NO: 669048 - RNA, 19 nt, Artificial Sequence
  Description of Artificial Sequence: Synthetic oligonucleotide
uucuauuauggagugguca

SEQ ID NO: 669049 - RNA, 19 nt, Artificial Sequence
  Description of Artificial Sequence: Synthetic oligonucleotide
gugaccauucuacugauca

SEQ ID NO: 669050 - RNA, 19 nt, Artificial Sequence
  Description of Artificial Sequence: Synthetic oligonucleotide
uaucauuuagaagugguuu

SEQ ID NO: 669051 - RNA, 19 nt, Artificial Sequence
  Description of Artificial Sequence: Synthetic oligonucleotide
aucuguguaacaggugacc

SEQ ID NO: 669052 - RNA, 19 nt, Artificial Sequence
  Description of Artificial Sequence: Synthetic oligonucleotide
gucaauguuaaugagcaca

SEQ ID NO: 669053 - RNA, 19 nt, Artificial Sequence
  Description of Artificial Sequence: Synthetic oligonucleotide
ucagauucggaaccacaug

SEQ ID NO: 669054 - RNA, 19 nt, Artificial Sequence
  Description of Artificial Sequence: Synthetic oligonucleotide
aagggacuuucuccagagc

SEQ ID NO: 669055 - RNA, 19 nt, Artificial Sequence
  Description of Artificial Sequence: Synthetic oligonucleotide
uuaucauuuagaagugguu

SEQ ID NO: 669056 - RNA, 19 nt, Artificial Sequence
  Description of Artificial Sequence: Synthetic oligonucleotide
aucggcugaggauguaggc

SEQ ID NO: 669057 - RNA, 19 nt, Artificial Sequence
  Description of Artificial Sequence: Synthetic oligonucleotide
gaagaacguguugaaacag

SEQ ID NO: 669058 - RNA, 19 nt, Artificial Sequence
  Description of Artificial Sequence: Synthetic oligonucleotide
aaaacgccacugagaaugc

SEQ ID NO: 669059 - RNA, 19 nt, Artificial Sequence
  Description of Artificial Sequence: Synthetic oligonucleotide
guuaaugagcacaagaccu

SEQ ID NO: 669060 - RNA, 19 nt, Artificial Sequence
  Description of Artificial Sequence: Synthetic oligonucleotide
uaggaaucaaagagucuca

SEQ ID NO: 669061 - RNA, 19 nt, Artificial Sequence
  Description of Artificial Sequence: Synthetic oligonucleotide
uuagaagugguuugaucuc

SEQ ID NO: 669062 - RNA, 19 nt, Artificial Sequence
  Description of Artificial Sequence: Synthetic oligonucleotide
ugccuaucuguguaacagg

SEQ ID NO: 669063 - RNA, 19 nt, Artificial Sequence
  Description of Artificial Sequence: Synthetic oligonucleotide
uuaaugagcacaagaccuu

SEQ ID NO: 669064 - RNA, 19 nt, Artificial Sequence
  Description of Artificial Sequence: Synthetic oligonucleotide
aagcaagggguauaugaaa

SEQ ID NO: 669065 - RNA, 19 nt, Artificial Sequence
  Description of Artificial Sequence: Synthetic oligonucleotide
acuacaguccccacauccc

SEQ ID NO: 669066 - RNA, 19 nt, Artificial Sequence
  Description of Artificial Sequence: Synthetic oligonucleotide
uucgugaucgggcgagccg

SEQ ID NO: 669067 - RNA, 19 nt, Artificial Sequence
  Description of Artificial Sequence: Synthetic oligonucleotide
agcuagcucauccauggug

SEQ ID NO: 669068 - RNA, 19 nt, Artificial Sequence
  Description of Artificial Sequence: Synthetic oligonucleotide
auggguucgugaucgggcg

SEQ ID NO: 669069 - RNA, 19 nt, Artificial Sequence
  Description of Artificial Sequence: Synthetic oligonucleotide
auuauggaguggucauuuc

SEQ ID NO: 669070 - RNA, 19 nt, Artificial Sequence
  Description of Artificial Sequence: Synthetic oligonucleotide
agucuguagguuugaauga

SEQ ID NO: 669071 - RNA, 19 nt, Artificial Sequence
  Description of Artificial Sequence: Synthetic oligonucleotide
guauguagcccauucccug

SEQ ID NO: 669072 - RNA, 19 nt, Artificial Sequence
  Description of Artificial Sequence: Synthetic oligonucleotide
aaucggcugaggauguagg

SEQ ID NO: 669073 - RNA, 19 nt, Artificial Sequence
  Description of Artificial Sequence: Synthetic oligonucleotide
aguaugggucuuucaaucu

SEQ ID NO: 669074 - RNA, 19 nt, Artificial Sequence
  Description of Artificial Sequence: Synthetic oligonucleotide
uagguuugaaugaggucca

SEQ ID NO: 669075 - RNA, 19 nt, Artificial Sequence
  Description of Artificial Sequence: Synthetic oligonucleotide
uugagggagaauagggaaa

SEQ ID NO: 669076 - RNA, 19 nt, Artificial Sequence
  Description of Artificial Sequence: Synthetic oligonucleotide
uuacaguaauggcaugggu

SEQ ID NO: 669077 - RNA, 19 nt, Artificial Sequence
  Description of Artificial Sequence: Synthetic oligonucleotide
gaagauauggagaucagau

SEQ ID NO: 669078 - RNA, 19 nt, Artificial Sequence
  Description of Artificial Sequence: Synthetic oligonucleotide
guacugauacccuguuggg

SEQ ID NO: 669079 - RNA, 19 nt, Artificial Sequence
  Description of Artificial Sequence: Synthetic oligonucleotide
gauucggaaccacaugauc

SEQ ID NO: 669080 - RNA, 19 nt, Artificial Sequence
  Description of Artificial Sequence: Synthetic oligonucleotide
aucaaugggccacacagua

SEQ ID NO: 669081 - RNA, 19 nt, Artificial Sequence
  Description of Artificial Sequence: Synthetic oligonucleotide
uuugguaagccuucuuaua

SEQ ID NO: 669082 - RNA, 19 nt, Artificial Sequence
  Description of Artificial Sequence: Synthetic oligonucleotide
uuucgugugccauucuuau

SEQ ID NO: 669083 - RNA, 19 nt, Artificial Sequence
  Description of Artificial Sequence: Synthetic oligonucleotide
ugucauuuuggcccaguau

SEQ ID NO: 669084 - RNA, 19 nt, Artificial Sequence
  Description of Artificial Sequence: Synthetic oligonucleotide
cacgugacagacagcaaag

SEQ ID NO: 669085 - RNA, 19 nt, Artificial Sequence
  Description of Artificial Sequence: Synthetic oligonucleotide
agagaaugguaaauccagg

SEQ ID NO: 669086 - RNA, 19 nt, Artificial Sequence
  Description of Artificial Sequence: Synthetic oligonucleotide
acacgggucaauguuaaug

SEQ ID NO: 669087 - RNA, 19 nt, Artificial Sequence
  Description of Artificial Sequence: Synthetic oligonucleotide
uauuauggaguggucauuu

SEQ ID NO: 669088 - RNA, 19 nt, Artificial Sequence
  Description of Artificial Sequence: Synthetic oligonucleotide
ucgagguggaauggguucg

SEQ ID NO: 669089 - RNA, 19 nt, Artificial Sequence
  Description of Artificial Sequence: Synthetic oligonucleotide
aaggcgagaauuacauuca

SEQ ID NO: 669090 - RNA, 19 nt, Artificial Sequence
  Description of Artificial Sequence: Synthetic oligonucleotide
ggauuuaugguugagccca

SEQ ID NO: 669091 - RNA, 19 nt, Artificial Sequence
  Description of Artificial Sequence: Synthetic oligonucleotide
ucgugaucgggcgagccgg

SEQ ID NO: 669092 - RNA, 19 nt, Artificial Sequence
  Description of Artificial Sequence: Synthetic oligonucleotide
uuagcacacgggucaaugu

SEQ ID NO: 669093 - RNA, 19 nt, Artificial Sequence
  Description of Artificial Sequence: Synthetic oligonucleotide
uggaccacaccauggggug

SEQ ID NO: 669094 - RNA, 19 nt, Artificial Sequence
  Description of Artificial Sequence: Synthetic oligonucleotide
caccaguaaaguagaacac

SEQ ID NO: 669095 - RNA, 19 nt, Artificial Sequence
  Description of Artificial Sequence: Synthetic oligonucleotide
aaauuggccugcaacuccu

SEQ ID NO: 669096 - RNA, 19 nt, Artificial Sequence
  Description of Artificial Sequence: Synthetic oligonucleotide
ugauacccuguugggaagg

SEQ ID NO: 669097 - RNA, 19 nt, Artificial Sequence
  Description of Artificial Sequence: Synthetic oligonucleotide
caauuguguggcccaagcc

SEQ ID NO: 669098 - RNA, 19 nt, Artificial Sequence
  Description of Artificial Sequence: Synthetic oligonucleotide
ugguaagccuucuuauagu

SEQ ID NO: 669099 - RNA, 19 nt, Artificial Sequence
  Description of Artificial Sequence: Synthetic oligonucleotide
uggaugauugagugcaaau

SEQ ID NO: 669100 - RNA, 19 nt, Artificial Sequence
  Description of Artificial Sequence: Synthetic oligonucleotide
uuggucgucaagccugaga

SEQ ID NO: 669101 - RNA, 19 nt, Artificial Sequence
  Description of Artificial Sequence: Synthetic oligonucleotide
gaauuacauucaaccacag

SEQ ID NO: 669102 - RNA, 19 nt, Artificial Sequence
  Description of Artificial Sequence: Synthetic oligonucleotide
caugauaugucaggauuac

SEQ ID NO: 669103 - RNA, 19 nt, Artificial Sequence
  Description of Artificial Sequence: Synthetic oligonucleotide
cucuggaugauugagugca

SEQ ID NO: 669104 - RNA, 19 nt, Artificial Sequence
  Description of Artificial Sequence: Synthetic oligonucleotide
cucugcguccauuauagga

SEQ ID NO: 669105 - RNA, 19 nt, Artificial Sequence
  Description of Artificial Sequence: Synthetic oligonucleotide
gacguggaccacaccaugg

SEQ ID NO: 669106 - RNA, 19 nt, Artificial Sequence
  Description of Artificial Sequence: Synthetic oligonucleotide
uguguaacaggugaccauu

SEQ ID NO: 669107 - RNA, 19 nt, Artificial Sequence
  Description of Artificial Sequence: Synthetic oligonucleotide
gcuagcucauccauggugg

SEQ ID NO: 669108 - RNA, 19 nt, Artificial Sequence
  Description of Artificial Sequence: Synthetic oligonucleotide
cacgggucaauguuaauga

SEQ ID NO: 669109 - RNA, 19 nt, Artificial Sequence
  Description of Artificial Sequence: Synthetic oligonucleotide
auagugacguggaccacac

SEQ ID NO: 669110 - RNA, 19 nt, Artificial Sequence
  Description of Artificial Sequence: Synthetic oligonucleotide
gaccauucuacugaucaca

SEQ ID NO: 669111 - RNA, 19 nt, Artificial Sequence
  Description of Artificial Sequence: Synthetic oligonucleotide
gaaguuucgugugccauuc

SEQ ID NO: 669112 - RNA, 19 nt, Artificial Sequence
  Description of Artificial Sequence: Synthetic oligonucleotide
auuugagggagaauaggga

SEQ ID NO: 669113 - RNA, 19 nt, Artificial Sequence
  Description of Artificial Sequence: Synthetic oligonucleotide
aucugcuuagcaagacacc

SEQ ID NO: 669114 - RNA, 19 nt, Artificial Sequence
  Description of Artificial Sequence: Synthetic oligonucleotide
ugucaugauaugucaggau

SEQ ID NO: 669115 - RNA, 19 nt, Artificial Sequence
  Description of Artificial Sequence: Synthetic oligonucleotide
gugacugccaucuugccua

SEQ ID NO: 669116 - RNA, 19 nt, Artificial Sequence
  Description of Artificial Sequence: Synthetic oligonucleotide
cauuuuggcccaguauggg

SEQ ID NO: 669117 - RNA, 19 nt, Artificial Sequence
  Description of Artificial Sequence: Synthetic oligonucleotide
uuuucaaccuguugucauu

SEQ ID NO: 669118 - RNA, 19 nt, Artificial Sequence
  Description of Artificial Sequence: Synthetic oligonucleotide
uacucgagguggaaugggu

SEQ ID NO: 669119 - RNA, 19 nt, Artificial Sequence
  Description of Artificial Sequence: Synthetic oligonucleotide
auuucaaggaggagggacu

SEQ ID NO: 669120 - RNA, 19 nt, Artificial Sequence
  Description of Artificial Sequence: Synthetic oligonucleotide
uggggcguccacgugacag

SEQ ID NO: 669121 - RNA, 19 nt, Artificial Sequence
  Description of Artificial Sequence: Synthetic oligonucleotide
aaugagacauauacagcuu

SEQ ID NO: 669122 - RNA, 19 nt, Artificial Sequence
  Description of Artificial Sequence: Synthetic oligonucleotide
guugagcccaaugucauga

SEQ ID NO: 669123 - RNA, 19 nt, Artificial Sequence
  Description of Artificial Sequence: Synthetic oligonucleotide
ugaccauucuacugaucac

SEQ ID NO: 669124 - RNA, 19 nt, Artificial Sequence
  Description of Artificial Sequence: Synthetic oligonucleotide
ugcguccauuauaggaacc

SEQ ID NO: 669125 - RNA, 19 nt, Artificial Sequence
  Description of Artificial Sequence: Synthetic oligonucleotide
guaugggucuuucaaucuc

SEQ ID NO: 669126 - RNA, 19 nt, Artificial Sequence
  Description of Artificial Sequence: Synthetic oligonucleotide
uacugauacccuguuggga

SEQ ID NO: 669127 - RNA, 19 nt, Artificial Sequence
  Description of Artificial Sequence: Synthetic oligonucleotide
uuacuggucuguuuccuuu

SEQ ID NO: 669128 - RNA, 19 nt, Artificial Sequence
  Description of Artificial Sequence: Synthetic oligonucleotide
acucacaucuggauauguc

SEQ ID NO: 669129 - RNA, 19 nt, Artificial Sequence
  Description of Artificial Sequence: Synthetic oligonucleotide
uaccaaugaugcucuucag

SEQ ID NO: 669130 - RNA, 19 nt, Artificial Sequence
  Description of Artificial Sequence: Synthetic oligonucleotide
cagacuuaaguguguaaga

SEQ ID NO: 669131 - RNA, 19 nt, Artificial Sequence
  Description of Artificial Sequence: Synthetic oligonucleotide
accugcuaaagggacuuuc

SEQ ID NO: 669132 - RNA, 19 nt, Artificial Sequence
  Description of Artificial Sequence: Synthetic oligonucleotide
accauucuacugaucacag

SEQ ID NO: 669133 - RNA, 19 nt, Artificial Sequence
  Description of Artificial Sequence: Synthetic oligonucleotide
uguuggucgucaagccuga

SEQ ID NO: 669134 - RNA, 19 nt, Artificial Sequence
  Description of Artificial Sequence: Synthetic oligonucleotide
agugaugagccagaauuau

SEQ ID NO: 669135 - RNA, 19 nt, Artificial Sequence
  Description of Artificial Sequence: Synthetic oligonucleotide
ucacacucuggcagaguga

SEQ ID NO: 669136 - RNA, 19 nt, Artificial Sequence
  Description of Artificial Sequence: Synthetic oligonucleotide
gaagcgcuacaagaaagca

SEQ ID NO: 669137 - RNA, 19 nt, Artificial Sequence
  Description of Artificial Sequence: Synthetic oligonucleotide
uagcacacgggucaauguu

SEQ ID NO: 669138 - RNA, 19 nt, Artificial Sequence
  Description of Artificial Sequence: Synthetic oligonucleotide
aggagggugccccuucuug

SEQ ID NO: 669139 - RNA, 19 nt, Artificial Sequence
  Description of Artificial Sequence: Synthetic oligonucleotide
guagaagcgcuacaagaaa

SEQ ID NO: 669140 - RNA, 19 nt, Artificial Sequence
  Description of Artificial Sequence: Synthetic oligonucleotide
aaguggaaccaaaauccaa

SEQ ID NO: 669141 - RNA, 19 nt, Artificial Sequence
  Description of Artificial Sequence: Synthetic oligonucleotide
auauacagcuuuauuuaau

SEQ ID NO: 669142 - RNA, 19 nt, Artificial Sequence
  Description of Artificial Sequence: Synthetic oligonucleotide
agguggaauggguucguga

SEQ ID NO: 669143 - RNA, 19 nt, Artificial Sequence
  Description of Artificial Sequence: Synthetic oligonucleotide
ucggaaccacaugaucccg

SEQ ID NO: 669144 - RNA, 19 nt, Artificial Sequence
  Description of Artificial Sequence: Synthetic oligonucleotide
gagaaagguucuguggcca

SEQ ID NO: 669145 - RNA, 19 nt, Artificial Sequence
  Description of Artificial Sequence: Synthetic oligonucleotide
cugauacccuguugggaag

SEQ ID NO: 669146 - RNA, 19 nt, Artificial Sequence
  Description of Artificial Sequence: Synthetic oligonucleotide
guuugaucucugugaguug

SEQ ID NO: 669147 - RNA, 19 nt, Artificial Sequence
  Description of Artificial Sequence: Synthetic oligonucleotide
aagugaugagccagaauua

SEQ ID NO: 669148 - RNA, 19 nt, Artificial Sequence
  Description of Artificial Sequence: Synthetic oligonucleotide
agaucggaucaagauguug

SEQ ID NO: 669149 - RNA, 19 nt, Artificial Sequence
  Description of Artificial Sequence: Synthetic oligonucleotide
gaguuaggaaucaaagagu

SEQ ID NO: 669150 - RNA, 19 nt, Artificial Sequence
  Description of Artificial Sequence: Synthetic oligonucleotide
acuacuuggggcaguccuc

SEQ ID NO: 669151 - RNA, 19 nt, Artificial Sequence
  Description of Artificial Sequence: Synthetic oligonucleotide
auccacuuagacaggggag

SEQ ID NO: 669152 - RNA, 19 nt, Artificial Sequence
  Description of Artificial Sequence: Synthetic oligonucleotide
ucgauccagccuuuagcac

SEQ ID NO: 669153 - RNA, 19 nt, Artificial Sequence
  Description of Artificial Sequence: Synthetic oligonucleotide
caggcuauuagagaaaggu

SEQ ID NO: 669154 - RNA, 19 nt, Artificial Sequence
  Description of Artificial Sequence: Synthetic oligonucleotide
cugcguccauuauaggaac

SEQ ID NO: 669155 - RNA, 19 nt, Artificial Sequence
  Description of Artificial Sequence: Synthetic oligonucleotide
aagcgcuacaagaaagcau

SEQ ID NO: 669156 - RNA, 19 nt, Artificial Sequence
  Description of Artificial Sequence: Synthetic oligonucleotide
gugaguugaacauccugaa

SEQ ID NO: 669157 - RNA, 19 nt, Artificial Sequence
  Description of Artificial Sequence: Synthetic oligonucleotide
aaugcuacucgagguggaa

SEQ ID NO: 669158 - RNA, 19 nt, Artificial Sequence
  Description of Artificial Sequence: Synthetic oligonucleotide
ggaugauugagugcaaauc

SEQ ID NO: 669159 - RNA, 19 nt, Artificial Sequence
  Description of Artificial Sequence: Synthetic oligonucleotide
augacaccucucuguuuuc

SEQ ID NO: 669160 - RNA, 19 nt, Artificial Sequence
  Description of Artificial Sequence: Synthetic oligonucleotide
uuagacaggggaggugacu

SEQ ID NO: 669161 - RNA, 19 nt, Artificial Sequence
  Description of Artificial Sequence: Synthetic oligonucleotide
gugggguacugauacccug

SEQ ID NO: 669162 - RNA, 19 nt, Artificial Sequence
  Description of Artificial Sequence: Synthetic oligonucleotide
gaucgggcgagccggguca

SEQ ID NO: 669163 - RNA, 19 nt, Artificial Sequence
  Description of Artificial Sequence: Synthetic oligonucleotide
gauugagugcaaaucggcu

SEQ ID NO: 669164 - RNA, 19 nt, Artificial Sequence
  Description of Artificial Sequence: Synthetic oligonucleotide
ugcccaaagugaugagcca

SEQ ID NO: 669165 - RNA, 19 nt, Artificial Sequence
  Description of Artificial Sequence: Synthetic oligonucleotide
cagccaaucaaugggccac

SEQ ID NO: 669166 - RNA, 19 nt, Artificial Sequence
  Description of Artificial Sequence: Synthetic oligonucleotide
gcaagagaagauauggaga

SEQ ID NO: 669167 - RNA, 19 nt, Artificial Sequence
  Description of Artificial Sequence: Synthetic oligonucleotide
ggaaccacaugaucccggc

SEQ ID NO: 669168 - RNA, 19 nt, Artificial Sequence
  Description of Artificial Sequence: Synthetic oligonucleotide
aaguuucgugugccauucu

SEQ ID NO: 669169 - RNA, 19 nt, Artificial Sequence
  Description of Artificial Sequence: Synthetic oligonucleotide
agaucagaucggaucaaga

SEQ ID NO: 669170 - RNA, 19 nt, Artificial Sequence
  Description of Artificial Sequence: Synthetic oligonucleotide
uggaaguuucgugugccau

SEQ ID NO: 669171 - RNA, 19 nt, Artificial Sequence
  Description of Artificial Sequence: Synthetic oligonucleotide
caauguuaaugagcacaag

SEQ ID NO: 669172 - RNA, 19 nt, Artificial Sequence
  Description of Artificial Sequence: Synthetic oligonucleotide
ggcuaagugaagguaaguc

SEQ ID NO: 669173 - RNA, 19 nt, Artificial Sequence
  Description of Artificial Sequence: Synthetic oligonucleotide
agaaagguucuguggccau

SEQ ID NO: 669174 - RNA, 19 nt, Artificial Sequence
  Description of Artificial Sequence: Synthetic oligonucleotide
uggucauuucaaggaggag

SEQ ID NO: 669175 - RNA, 19 nt, Artificial Sequence
  Description of Artificial Sequence: Synthetic oligonucleotide
gaugcucuucagacuuaag

SEQ ID NO: 669176 - RNA, 19 nt, Artificial Sequence
  Description of Artificial Sequence: Synthetic oligonucleotide
uuucaaggaggagggacuu

SEQ ID NO: 669177 - RNA, 19 nt, Artificial Sequence
  Description of Artificial Sequence: Synthetic oligonucleotide
ccaauuguguggcccaagc

SEQ ID NO: 669178 - RNA, 19 nt, Artificial Sequence
  Description of Artificial Sequence: Synthetic oligonucleotide
ccaaugcuacucgaggugg

SEQ ID NO: 669179 - RNA, 19 nt, Artificial Sequence
  Description of Artificial Sequence: Synthetic oligonucleotide
ucaaggcgagaauuacauu

SEQ ID NO: 669180 - RNA, 19 nt, Artificial Sequence
  Description of Artificial Sequence: Synthetic oligonucleotide
cuuugguaagccuucuuau

SEQ ID NO: 669181 - RNA, 19 nt, Artificial Sequence
  Description of Artificial Sequence: Synthetic oligonucleotide
uucgugugccauucuuauc

SEQ ID NO: 669182 - RNA, 19 nt, Artificial Sequence
  Description of Artificial Sequence: Synthetic oligonucleotide
agguucuguggccaugcau

SEQ ID NO: 669183 - RNA, 19 nt, Artificial Sequence
  Description of Artificial Sequence: Synthetic oligonucleotide
gagcccaaugucaugauau

SEQ ID NO: 669184 - RNA, 19 nt, Artificial Sequence
  Description of Artificial Sequence: Synthetic oligonucleotide
uacauauuugagggagaau

SEQ ID NO: 669185 - RNA, 19 nt, Artificial Sequence
  Description of Artificial Sequence: Synthetic oligonucleotide
ugaucgggcgagccggguc

SEQ ID NO: 669186 - RNA, 19 nt, Artificial Sequence
  Description of Artificial Sequence: Synthetic oligonucleotide
augauaugucaggauuacu

SEQ ID NO: 669187 - RNA, 19 nt, Artificial Sequence
  Description of Artificial Sequence: Synthetic oligonucleotide
agacacgcgugcucgcaca

SEQ ID NO: 669188 - RNA, 19 nt, Artificial Sequence
  Description of Artificial Sequence: Synthetic oligonucleotide
ccuuccuuaucuuaacaga

SEQ ID NO: 669189 - RNA, 19 nt, Artificial Sequence
  Description of Artificial Sequence: Synthetic oligonucleotide
agcgggcaggaugaaaugu

SEQ ID NO: 669190 - RNA, 19 nt, Artificial Sequence
  Description of Artificial Sequence: Synthetic oligonucleotide
uggguucgugaucgggcga

SEQ ID NO: 669191 - RNA, 19 nt, Artificial Sequence
  Description of Artificial Sequence: Synthetic oligonucleotide
gaccuucuaccagcucugg

SEQ ID NO: 669192 - RNA, 19 nt, Artificial Sequence
  Description of Artificial Sequence: Synthetic oligonucleotide
gucaaggcgagaauuacau

SEQ ID NO: 669193 - RNA, 19 nt, Artificial Sequence
  Description of Artificial Sequence: Synthetic oligonucleotide
uggcuaagugaagguaagu

SEQ ID NO: 669194 - RNA, 19 nt, Artificial Sequence
  Description of Artificial Sequence: Synthetic oligonucleotide
auccaugaggauggcuaag

SEQ ID NO: 669195 - RNA, 19 nt, Artificial Sequence
  Description of Artificial Sequence: Synthetic oligonucleotide
ggauaugucuaagaggagu

SEQ ID NO: 669196 - RNA, 19 nt, Artificial Sequence
  Description of Artificial Sequence: Synthetic oligonucleotide
aggugaccauucuacugau

SEQ ID NO: 669197 - RNA, 19 nt, Artificial Sequence
  Description of Artificial Sequence: Synthetic oligonucleotide
gagggacuugcauggucca

SEQ ID NO: 669198 - RNA, 19 nt, Artificial Sequence
  Description of Artificial Sequence: Synthetic oligonucleotide
gaagaagcaagggguauau

SEQ ID NO: 669199 - RNA, 19 nt, Artificial Sequence
  Description of Artificial Sequence: Synthetic oligonucleotide
gauuacuggucuguuuccu

SEQ ID NO: 669200 - RNA, 19 nt, Artificial Sequence
  Description of Artificial Sequence: Synthetic oligonucleotide
uaccaccaguaaaguagaa

SEQ ID NO: 669201 - RNA, 19 nt, Artificial Sequence
  Description of Artificial Sequence: Synthetic oligonucleotide
cugcuccaacuccaauacc

SEQ ID NO: 669202 - RNA, 19 nt, Artificial Sequence
  Description of Artificial Sequence: Synthetic oligonucleotide
ccucggugagcuuuccagg

SEQ ID NO: 669203 - RNA, 19 nt, Artificial Sequence
  Description of Artificial Sequence: Synthetic oligonucleotide
auacccuguugggaaggag

SEQ ID NO: 669204 - RNA, 19 nt, Artificial Sequence
  Description of Artificial Sequence: Synthetic oligonucleotide
aggcuauuagagaaagguu

SEQ ID NO: 669205 - RNA, 19 nt, Artificial Sequence
  Description of Artificial Sequence: Synthetic oligonucleotide
gcguccauuauaggaaccc

SEQ ID NO: 669206 - RNA, 19 nt, Artificial Sequence
  Description of Artificial Sequence: Synthetic oligonucleotide
gaacuacuuggggcagucc

SEQ ID NO: 669207 - RNA, 19 nt, Artificial Sequence
  Description of Artificial Sequence: Synthetic oligonucleotide
uccacgugacagacagcaa

SEQ ID NO: 669208 - RNA, 19 nt, Artificial Sequence
  Description of Artificial Sequence: Synthetic oligonucleotide
cgagaauuacauucaacca

SEQ ID NO: 669209 - RNA, 19 nt, Artificial Sequence
  Description of Artificial Sequence: Synthetic oligonucleotide
guucgugaucgggcgagcc

SEQ ID NO: 669210 - RNA, 19 nt, Artificial Sequence
  Description of Artificial Sequence: Synthetic oligonucleotide
guccauuauaggaacccaa

SEQ ID NO: 669211 - RNA, 19 nt, Artificial Sequence
  Description of Artificial Sequence: Synthetic oligonucleotide
uccucagauucggaaccac

SEQ ID NO: 669212 - RNA, 19 nt, Artificial Sequence
  Description of Artificial Sequence: Synthetic oligonucleotide
uagugacguggaccacacc

SEQ ID NO: 669213 - RNA, 19 nt, Artificial Sequence
  Description of Artificial Sequence: Synthetic oligonucleotide
ucgucaagccugagaguuu

SEQ ID NO: 669214 - RNA, 19 nt, Artificial Sequence
  Description of Artificial Sequence: Synthetic oligonucleotide
gauacccuguugggaagga

SEQ ID NO: 669215 - RNA, 19 nt, Artificial Sequence
  Description of Artificial Sequence: Synthetic oligonucleotide
uuauagggucaaggcgaga

SEQ ID NO: 669216 - RNA, 19 nt, Artificial Sequence
  Description of Artificial Sequence: Synthetic oligonucleotide
ccuaucuguguaacaggug

SEQ ID NO: 669217 - RNA, 19 nt, Artificial Sequence
  Description of Artificial Sequence: Synthetic oligonucleotide
ccuuaucuuaacagaagaa

SEQ ID NO: 669218 - RNA, 19 nt, Artificial Sequence
  Description of Artificial Sequence: Synthetic oligonucleotide
guuucgugugccauucuua

SEQ ID NO: 669219 - RNA, 19 nt, Artificial Sequence
  Description of Artificial Sequence: Synthetic oligonucleotide
caaugcuacucgaggugga

SEQ ID NO: 669220 - RNA, 19 nt, Artificial Sequence
  Description of Artificial Sequence: Synthetic oligonucleotide
cagcgggcaggaugaaaug

SEQ ID NO: 669221 - RNA, 19 nt, Artificial Sequence
  Description of Artificial Sequence: Synthetic oligonucleotide
guucuauuauggagugguc

SEQ ID NO: 669222 - RNA, 19 nt, Artificial Sequence
  Description of Artificial Sequence: Synthetic oligonucleotide
gggacucacaggauucuug

SEQ ID NO: 669223 - RNA, 19 nt, Artificial Sequence
  Description of Artificial Sequence: Synthetic oligonucleotide
caaugaugcucuucagacu

SEQ ID NO: 669224 - RNA, 19 nt, Artificial Sequence
  Description of Artificial Sequence: Synthetic oligonucleotide
ccauucuacugaucacagc

SEQ ID NO: 669225 - RNA, 19 nt, Artificial Sequence
  Description of Artificial Sequence: Synthetic oligonucleotide
uggaagcugcccagucgau

SEQ ID NO: 669226 - RNA, 19 nt, Artificial Sequence
  Description of Artificial Sequence: Synthetic oligonucleotide
agcacacgggucaauguua

SEQ ID NO: 669227 - RNA, 19 nt, Artificial Sequence
  Description of Artificial Sequence: Synthetic oligonucleotide
ggcgagaauuacauucaac

SEQ ID NO: 669228 - RNA, 19 nt, Artificial Sequence
  Description of Artificial Sequence: Synthetic oligonucleotide
gagguggaauggguucgug

SEQ ID NO: 669229 - RNA, 19 nt, Artificial Sequence
  Description of Artificial Sequence: Synthetic oligonucleotide
ggguacugauacccuguug

SEQ ID NO: 669230 - RNA, 19 nt, Artificial Sequence
  Description of Artificial Sequence: Synthetic oligonucleotide
augucuaagaggaguccuu

SEQ ID NO: 669231 - RNA, 19 nt, Artificial Sequence
  Description of Artificial Sequence: Synthetic oligonucleotide
ggucaaggcgagaauuaca

SEQ ID NO: 669232 - RNA, 19 nt, Artificial Sequence
  Description of Artificial Sequence: Synthetic oligonucleotide
cuacaguccccacaucccu

SEQ ID NO: 669233 - RNA, 19 nt, Artificial Sequence
  Description of Artificial Sequence: Synthetic oligonucleotide
ugacugccaucuugccuau

SEQ ID NO: 669234 - RNA, 19 nt, Artificial Sequence
  Description of Artificial Sequence: Synthetic oligonucleotide
cgauccagccuuuagcaca

SEQ ID NO: 669235 - RNA, 19 nt, Artificial Sequence
  Description of Artificial Sequence: Synthetic oligonucleotide
gggucaaggcgagaauuac

SEQ ID NO: 669236 - RNA, 19 nt, Artificial Sequence
  Description of Artificial Sequence: Synthetic oligonucleotide
acucgagguggaauggguu

SEQ ID NO: 669237 - RNA, 19 nt, Artificial Sequence
  Description of Artificial Sequence: Synthetic oligonucleotide
gaacguguugaaacaggau

SEQ ID NO: 669238 - RNA, 19 nt, Artificial Sequence
  Description of Artificial Sequence: Synthetic oligonucleotide
gacucacaucuggauaugu

SEQ ID NO: 669239 - RNA, 19 nt, Artificial Sequence
  Description of Artificial Sequence: Synthetic oligonucleotide
gggguguuucaaugucaug

SEQ ID NO: 669240 - RNA, 19 nt, Artificial Sequence
  Description of Artificial Sequence: Synthetic oligonucleotide
gaaccacaugaucccggcu

SEQ ID NO: 669241 - RNA, 19 nt, Artificial Sequence
  Description of Artificial Sequence: Synthetic oligonucleotide
ccacgugacagacagcaaa

SEQ ID NO: 669242 - RNA, 19 nt, Artificial Sequence
  Description of Artificial Sequence: Synthetic oligonucleotide
ggucucugcguccauuaua

SEQ ID NO: 669243 - RNA, 19 nt, Artificial Sequence
  Description of Artificial Sequence: Synthetic oligonucleotide
cccuuuguagaagcgcuac

SEQ ID NO: 669244 - RNA, 19 nt, Artificial Sequence
  Description of Artificial Sequence: Synthetic oligonucleotide
gguauguagcccauucccu

SEQ ID NO: 669245 - RNA, 19 nt, Artificial Sequence
  Description of Artificial Sequence: Synthetic oligonucleotide
agucacacucuggcagagu

SEQ ID NO: 669246 - RNA, 19 nt, Artificial Sequence
  Description of Artificial Sequence: Synthetic oligonucleotide
gccaugcauggggugaaag

SEQ ID NO: 669247 - RNA, 19 nt, Artificial Sequence
  Description of Artificial Sequence: Synthetic oligonucleotide
guaauggcauggguguggu

SEQ ID NO: 669248 - RNA, 19 nt, Artificial Sequence
  Description of Artificial Sequence: Synthetic oligonucleotide
ucgcacacacauggaguua

SEQ ID NO: 669249 - RNA, 19 nt, Artificial Sequence
  Description of Artificial Sequence: Synthetic oligonucleotide
cuguguaacaggugaccau

SEQ ID NO: 669250 - RNA, 19 nt, Artificial Sequence
  Description of Artificial Sequence: Synthetic oligonucleotide
gcgagccgggucaugcugg

SEQ ID NO: 669251 - RNA, 19 nt, Artificial Sequence
  Description of Artificial Sequence: Synthetic oligonucleotide
agguccaaauuggccugca

SEQ ID NO: 669252 - RNA, 19 nt, Artificial Sequence
  Description of Artificial Sequence: Synthetic oligonucleotide
ggauggcuaagugaaggua

SEQ ID NO: 669253 - RNA, 19 nt, Artificial Sequence
  Description of Artificial Sequence: Synthetic oligonucleotide
cagaccugcuaaagggacu

SEQ ID NO: 669254 - RNA, 19 nt, Artificial Sequence
  Description of Artificial Sequence: Synthetic oligonucleotide
gauaucugcucugcauauu

SEQ ID NO: 669255 - RNA, 19 nt, Artificial Sequence
  Description of Artificial Sequence: Synthetic oligonucleotide
guuggucgucaagccugag

SEQ ID NO: 669256 - RNA, 19 nt, Artificial Sequence
  Description of Artificial Sequence: Synthetic oligonucleotide
ggacucacaucuggauaug

SEQ ID NO: 669257 - RNA, 19 nt, Artificial Sequence
  Description of Artificial Sequence: Synthetic oligonucleotide
gccuaucuguguaacaggu

SEQ ID NO: 669258 - RNA, 19 nt, Artificial Sequence
  Description of Artificial Sequence: Synthetic oligonucleotide
ggggcguccacgugacaga

SEQ ID NO: 669259 - RNA, 19 nt, Artificial Sequence
  Description of Artificial Sequence: Synthetic oligonucleotide
caggauuacuggucuguuu

SEQ ID NO: 669260 - RNA, 19 nt, Artificial Sequence
  Description of Artificial Sequence: Synthetic oligonucleotide
ggcuggacucacaucugga

SEQ ID NO: 669261 - RNA, 19 nt, Artificial Sequence
  Description of Artificial Sequence: Synthetic oligonucleotide
cuauuauggaguggucauu

SEQ ID NO: 669262 - RNA, 19 nt, Artificial Sequence
  Description of Artificial Sequence: Synthetic oligonucleotide
gugacguggaccacaccau

SEQ ID NO: 669263 - RNA, 19 nt, Artificial Sequence
  Description of Artificial Sequence: Synthetic oligonucleotide
gcacacgggucaauguuaa

SEQ ID NO: 669264 - RNA, 19 nt, Artificial Sequence
  Description of Artificial Sequence: Synthetic oligonucleotide
gguucgugaucgggcgagc

SEQ ID NO: 669265 - RNA, 19 nt, Artificial Sequence
  Description of Artificial Sequence: Synthetic oligonucleotide
ccaugcauggggugaaagu

SEQ ID NO: 669266 - RNA, 19 nt, Artificial Sequence
  Description of Artificial Sequence: Synthetic oligonucleotide
gcucgcacacacauggagu

SEQ ID NO: 669267 - RNA, 19 nt, Artificial Sequence
  Description of Artificial Sequence: Synthetic oligonucleotide
gggcguccacgugacagac

SEQ ID NO: 669268 - RNA, 19 nt, Artificial Sequence
  Description of Artificial Sequence: Synthetic oligonucleotide
cagaugguauguagcccau

SEQ ID NO: 669269 - RNA, 19 nt, Artificial Sequence
  Description of Artificial Sequence: Synthetic oligonucleotide
uggcccaguaugggucuuu

SEQ ID NO: 669270 - RNA, 19 nt, Artificial Sequence
  Description of Artificial Sequence: Synthetic oligonucleotide
gcuuagcaagacaccucca

SEQ ID NO: 669271 - RNA, 19 nt, Artificial Sequence
  Description of Artificial Sequence: Synthetic oligonucleotide
gccaaucaaugggccacac

SEQ ID NO: 669272 - RNA, 19 nt, Artificial Sequence
  Description of Artificial Sequence: Synthetic oligonucleotide
cgugaucgggcgagccggg

SEQ ID NO: 669273 - RNA, 19 nt, Artificial Sequence
  Description of Artificial Sequence: Synthetic oligonucleotide
ggucgucaagccugagagu

SEQ ID NO: 669274 - RNA, 19 nt, Artificial Sequence
  Description of Artificial Sequence: Synthetic oligonucleotide
ucgggcgagccgggucaug

SEQ ID NO: 669275 - RNA, 19 nt, Artificial Sequence
  Description of Artificial Sequence: Synthetic oligonucleotide
cccuaccaccaguaaagua

SEQ ID NO: 669276 - RNA, 19 nt, Artificial Sequence
  Description of Artificial Sequence: Synthetic oligonucleotide
acgcgugcucgcacacaca

SEQ ID NO: 669277 - RNA, 19 nt, Artificial Sequence
  Description of Artificial Sequence: Synthetic oligonucleotide
cguccauuauaggaaccca

SEQ ID NO: 669278 - RNA, 19 nt, Artificial Sequence
  Description of Artificial Sequence: Synthetic oligonucleotide
cagaucggaucaagauguu

SEQ ID NO: 669279 - RNA, 19 nt, Artificial Sequence
  Description of Artificial Sequence: Synthetic oligonucleotide
aucgggcgagccgggucau

SEQ ID NO: 669280 - RNA, 19 nt, Artificial Sequence
  Description of Artificial Sequence: Synthetic oligonucleotide
cuuuagcacacgggucaau

SEQ ID NO: 669281 - RNA, 19 nt, Artificial Sequence
  Description of Artificial Sequence: Synthetic oligonucleotide
ccucgaaguugaagaacgu

SEQ ID NO: 669282 - RNA, 19 nt, Artificial Sequence
  Description of Artificial Sequence: Synthetic oligonucleotide
gggguacugauacccuguu

SEQ ID NO: 669283 - RNA, 19 nt, Artificial Sequence
  Description of Artificial Sequence: Synthetic oligonucleotide
cacacgggucaauguuaau

SEQ ID NO: 669284 - RNA, 19 nt, Artificial Sequence
  Description of Artificial Sequence: Synthetic oligonucleotide
cuggggcguccacgugaca

SEQ ID NO: 669285 - RNA, 19 nt, Artificial Sequence
  Description of Artificial Sequence: Synthetic oligonucleotide
gaccugcuaaagggacuuu

SEQ ID NO: 669286 - RNA, 19 nt, Artificial Sequence
  Description of Artificial Sequence: Synthetic oligonucleotide
gugaucgggcgagccgggu

SEQ ID NO: 669287 - RNA, 19 nt, Artificial Sequence
  Description of Artificial Sequence: Synthetic oligonucleotide
ggccaugcauggggugaaa

SEQ ID NO: 669288 - RNA, 19 nt, Artificial Sequence
  Description of Artificial Sequence: Synthetic oligonucleotide
ccagagggucucccuggcu

SEQ ID NO: 669289 - RNA, 19 nt, Artificial Sequence
  Description of Artificial Sequence: Synthetic oligonucleotide
ccagucgauccagccuuua

SEQ ID NO: 669290 - RNA, 19 nt, Artificial Sequence
  Description of Artificial Sequence: Synthetic oligonucleotide
ccccuaccaccaguaaagu

SEQ ID NO: 669291 - RNA, 19 nt, Artificial Sequence
  Description of Artificial Sequence: Synthetic oligonucleotide
cgagguggaauggguucgu

SEQ ID NO: 669292 - RNA, 19 nt, Artificial Sequence
  Description of Artificial Sequence: Synthetic oligonucleotide
aacuagaugagcuagacag

SEQ ID NO: 669293 - RNA, 19 nt, Artificial Sequence
  Description of Artificial Sequence: Synthetic oligonucleotide
aaaccuauagaucucauuc

SEQ ID NO: 669294 - RNA, 19 nt, Artificial Sequence
  Description of Artificial Sequence: Synthetic oligonucleotide
aacaauuuugcucugccac

SEQ ID NO: 669295 - RNA, 19 nt, Artificial Sequence
  Description of Artificial Sequence: Synthetic oligonucleotide
agaaagguuaaccaagucc

SEQ ID NO: 669296 - RNA, 19 nt, Artificial Sequence
  Description of Artificial Sequence: Synthetic oligonucleotide
aauaacaagaaacuggauu

SEQ ID NO: 669297 - RNA, 19 nt, Artificial Sequence
  Description of Artificial Sequence: Synthetic oligonucleotide
aaccuauagaucucauucc

SEQ ID NO: 669298 - RNA, 19 nt, Artificial Sequence
  Description of Artificial Sequence: Synthetic oligonucleotide
uauaguggggaaauuaagc

SEQ ID NO: 669299 - RNA, 19 nt, Artificial Sequence
  Description of Artificial Sequence: Synthetic oligonucleotide
uagugaguaggucaggacg

SEQ ID NO: 669300 - RNA, 19 nt, Artificial Sequence
  Description of Artificial Sequence: Synthetic oligonucleotide
aauacuguagguaugggca

SEQ ID NO: 669301 - RNA, 19 nt, Artificial Sequence
  Description of Artificial Sequence: Synthetic oligonucleotide
ucaacagucuguauuuagg

SEQ ID NO: 669302 - RNA, 19 nt, Artificial Sequence
  Description of Artificial Sequence: Synthetic oligonucleotide
uuaacuucuuucuugcuug

SEQ ID NO: 669303 - RNA, 19 nt, Artificial Sequence
  Description of Artificial Sequence: Synthetic oligonucleotide
agcuaaaccaggcacugcc

SEQ ID NO: 669304 - RNA, 19 nt, Artificial Sequence
  Description of Artificial Sequence: Synthetic oligonucleotide
ucaguguaaggaaaaugcg

SEQ ID NO: 669305 - RNA, 19 nt, Artificial Sequence
  Description of Artificial Sequence: Synthetic oligonucleotide
accuauagaucucauuccc

SEQ ID NO: 669306 - RNA, 19 nt, Artificial Sequence
  Description of Artificial Sequence: Synthetic oligonucleotide
aauaaaggaguagaaguug

SEQ ID NO: 669307 - RNA, 19 nt, Artificial Sequence
  Description of Artificial Sequence: Synthetic oligonucleotide
uuaguaaguggguacgggg

SEQ ID NO: 669308 - RNA, 19 nt, Artificial Sequence
  Description of Artificial Sequence: Synthetic oligonucleotide
aaccacuaugauuaacuuc

SEQ ID NO: 669309 - RNA, 19 nt, Artificial Sequence
  Description of Artificial Sequence: Synthetic oligonucleotide
ugaacacgcacacacacgc

SEQ ID NO: 669310 - RNA, 19 nt, Artificial Sequence
  Description of Artificial Sequence: Synthetic oligonucleotide
uaggacuucagccuaagga

SEQ ID NO: 669311 - RNA, 19 nt, Artificial Sequence
  Description of Artificial Sequence: Synthetic oligonucleotide
aggaauaacaagaaacugg

SEQ ID NO: 669312 - RNA, 19 nt, Artificial Sequence
  Description of Artificial Sequence: Synthetic oligonucleotide
aaagagggccuauuggcuc

SEQ ID NO: 669313 - RNA, 19 nt, Artificial Sequence
  Description of Artificial Sequence: Synthetic oligonucleotide
aaauagcuuccacuucccc

SEQ ID NO: 669314 - RNA, 19 nt, Artificial Sequence
  Description of Artificial Sequence: Synthetic oligonucleotide
auguaaauuuaauguuugc

SEQ ID NO: 669315 - RNA, 19 nt, Artificial Sequence
  Description of Artificial Sequence: Synthetic oligonucleotide
ucuucaaggguaauguugu

SEQ ID NO: 669316 - RNA, 19 nt, Artificial Sequence
  Description of Artificial Sequence: Synthetic oligonucleotide
gaagcuccuaccuucaagc

SEQ ID NO: 669317 - RNA, 19 nt, Artificial Sequence
  Description of Artificial Sequence: Synthetic oligonucleotide
aagguuaccuacaauacug

SEQ ID NO: 669318 - RNA, 19 nt, Artificial Sequence
  Description of Artificial Sequence: Synthetic oligonucleotide
augauuaacuucuuucuug

SEQ ID NO: 669319 - RNA, 19 nt, Artificial Sequence
  Description of Artificial Sequence: Synthetic oligonucleotide
aauuuugcucugccacucc

SEQ ID NO: 669320 - RNA, 19 nt, Artificial Sequence
  Description of Artificial Sequence: Synthetic oligonucleotide
gaccaaguuaguaaguggg

SEQ ID NO: 669321 - RNA, 19 nt, Artificial Sequence
  Description of Artificial Sequence: Synthetic oligonucleotide
caguguaaggaaaaugcgg

SEQ ID NO: 669322 - RNA, 19 nt, Artificial Sequence
  Description of Artificial Sequence: Synthetic oligonucleotide
aaugcgggaagaguggagg

SEQ ID NO: 669323 - RNA, 19 nt, Artificial Sequence
  Description of Artificial Sequence: Synthetic oligonucleotide
uuaaccaagucccuuccug

SEQ ID NO: 669324 - RNA, 19 nt, Artificial Sequence
  Description of Artificial Sequence: Synthetic oligonucleotide
ugagcuugcauguaaauuu

SEQ ID NO: 669325 - RNA, 19 nt, Artificial Sequence
  Description of Artificial Sequence: Synthetic oligonucleotide
uaaccuuagcuccucagug

SEQ ID NO: 669326 - RNA, 19 nt, Artificial Sequence
  Description of Artificial Sequence: Synthetic oligonucleotide
uguagguaugggcagguug

SEQ ID NO: 669327 - RNA, 19 nt, Artificial Sequence
  Description of Artificial Sequence: Synthetic oligonucleotide
ugguaauaggugcaaagga

SEQ ID NO: 669328 - RNA, 19 nt, Artificial Sequence
  Description of Artificial Sequence: Synthetic oligonucleotide
aaguuaguaaguggguacg

SEQ ID NO: 669329 - RNA, 19 nt, Artificial Sequence
  Description of Artificial Sequence: Synthetic oligonucleotide
guagucaaccaccauagug

SEQ ID NO: 669330 - RNA, 19 nt, Artificial Sequence
  Description of Artificial Sequence: Synthetic oligonucleotide
accacuaugauuaacuucu

SEQ ID NO: 669331 - RNA, 19 nt, Artificial Sequence
  Description of Artificial Sequence: Synthetic oligonucleotide
uucagccuaaggaauaaca

SEQ ID NO: 669332 - RNA, 19 nt, Artificial Sequence
  Description of Artificial Sequence: Synthetic oligonucleotide
agaaacuggauucuagcca

SEQ ID NO: 669333 - RNA, 19 nt, Artificial Sequence
  Description of Artificial Sequence: Synthetic oligonucleotide
aaguuggggacaucaaaug

SEQ ID NO: 669334 - RNA, 19 nt, Artificial Sequence
  Description of Artificial Sequence: Synthetic oligonucleotide
agcauagucucuccagagc

SEQ ID NO: 669335 - RNA, 19 nt, Artificial Sequence
  Description of Artificial Sequence: Synthetic oligonucleotide
uugggguauucuaaacugg

SEQ ID NO: 669336 - RNA, 19 nt, Artificial Sequence
  Description of Artificial Sequence: Synthetic oligonucleotide
acaagggcauaaaagaggg

SEQ ID NO: 669337 - RNA, 19 nt, Artificial Sequence
  Description of Artificial Sequence: Synthetic oligonucleotide
uaauaggugcaaaggaaac

SEQ ID NO: 669338 - RNA, 19 nt, Artificial Sequence
  Description of Artificial Sequence: Synthetic oligonucleotide
uuuaggaauaaaggaguag

SEQ ID NO: 669339 - RNA, 19 nt, Artificial Sequence
  Description of Artificial Sequence: Synthetic oligonucleotide
ucugagaucuucagcacac

SEQ ID NO: 669340 - RNA, 19 nt, Artificial Sequence
  Description of Artificial Sequence: Synthetic oligonucleotide
accuuuaaggcaaaacugg

SEQ ID NO: 669341 - RNA, 19 nt, Artificial Sequence
  Description of Artificial Sequence: Synthetic oligonucleotide
gaaaaugcgggaagagugg

SEQ ID NO: 669342 - RNA, 19 nt, Artificial Sequence
  Description of Artificial Sequence: Synthetic oligonucleotide
guuaccuacaauacuguag

SEQ ID NO: 669343 - RNA, 19 nt, Artificial Sequence
  Description of Artificial Sequence: Synthetic oligonucleotide
uaguaaguggguacggggc

SEQ ID NO: 669344 - RNA, 19 nt, Artificial Sequence
  Description of Artificial Sequence: Synthetic oligonucleotide
uacaaacccugaauucugg

SEQ ID NO: 669345 - RNA, 19 nt, Artificial Sequence
  Description of Artificial Sequence: Synthetic oligonucleotide
uaguggggaaauuaagccc

SEQ ID NO: 669346 - RNA, 19 nt, Artificial Sequence
  Description of Artificial Sequence: Synthetic oligonucleotide
uuaaaaccuauagaucuca

SEQ ID NO: 669347 - RNA, 19 nt, Artificial Sequence
  Description of Artificial Sequence: Synthetic oligonucleotide
ugaacuggggugguaauag

SEQ ID NO: 669348 - RNA, 19 nt, Artificial Sequence
  Description of Artificial Sequence: Synthetic oligonucleotide
ucagccuaaggaauaacaa

SEQ ID NO: 669349 - RNA, 19 nt, Artificial Sequence
  Description of Artificial Sequence: Synthetic oligonucleotide
auagugaguaggucaggac

SEQ ID NO: 669350 - RNA, 19 nt, Artificial Sequence
  Description of Artificial Sequence: Synthetic oligonucleotide
aaugugcccauuucuauuu

SEQ ID NO: 669351 - RNA, 19 nt, Artificial Sequence
  Description of Artificial Sequence: Synthetic oligonucleotide
uggacuauguaacaauuuu

SEQ ID NO: 669352 - RNA, 19 nt, Artificial Sequence
  Description of Artificial Sequence: Synthetic oligonucleotide
ugcauguaaauuuaauguu

SEQ ID NO: 669353 - RNA, 19 nt, Artificial Sequence
  Description of Artificial Sequence: Synthetic oligonucleotide
gguauucuaaacuggagac

SEQ ID NO: 669354 - RNA, 19 nt, Artificial Sequence
  Description of Artificial Sequence: Synthetic oligonucleotide
aggguaauguuguugguca

SEQ ID NO: 669355 - RNA, 19 nt, Artificial Sequence
  Description of Artificial Sequence: Synthetic oligonucleotide
gauaaugucuuuguacuuc

SEQ ID NO: 669356 - RNA, 19 nt, Artificial Sequence
  Description of Artificial Sequence: Synthetic oligonucleotide
cuauaguggggaaauuaag

SEQ ID NO: 669357 - RNA, 19 nt, Artificial Sequence
  Description of Artificial Sequence: Synthetic oligonucleotide
caguauauucaacagucug

SEQ ID NO: 669358 - RNA, 19 nt, Artificial Sequence
  Description of Artificial Sequence: Synthetic oligonucleotide
auacggguuagcuuggugu

SEQ ID NO: 669359 - RNA, 19 nt, Artificial Sequence
  Description of Artificial Sequence: Synthetic oligonucleotide
acuauguaacaauuuugcu

SEQ ID NO: 669360 - RNA, 19 nt, Artificial Sequence
  Description of Artificial Sequence: Synthetic oligonucleotide
agguuaaccaagucccuuc

SEQ ID NO: 669361 - RNA, 19 nt, Artificial Sequence
  Description of Artificial Sequence: Synthetic oligonucleotide
auaucucaaagaugugcuc

SEQ ID NO: 669362 - RNA, 19 nt, Artificial Sequence
  Description of Artificial Sequence: Synthetic oligonucleotide
aaaaccuauagaucucauu

SEQ ID NO: 669363 - RNA, 19 nt, Artificial Sequence
  Description of Artificial Sequence: Synthetic oligonucleotide
agaucuacaaacccugaau

SEQ ID NO: 669364 - RNA, 19 nt, Artificial Sequence
  Description of Artificial Sequence: Synthetic oligonucleotide
aggaguagaaguugggccu

SEQ ID NO: 669365 - RNA, 19 nt, Artificial Sequence
  Description of Artificial Sequence: Synthetic oligonucleotide
acacccuagaagcuccuac

SEQ ID NO: 669366 - RNA, 19 nt, Artificial Sequence
  Description of Artificial Sequence: Synthetic oligonucleotide
ugaguagccucuuaccuuc

SEQ ID NO: 669367 - RNA, 19 nt, Artificial Sequence
  Description of Artificial Sequence: Synthetic oligonucleotide
uccuggauugaacuggggu

SEQ ID NO: 669368 - RNA, 19 nt, Artificial Sequence
  Description of Artificial Sequence: Synthetic oligonucleotide
agugaguaggucaggacgg

SEQ ID NO: 669369 - RNA, 19 nt, Artificial Sequence
  Description of Artificial Sequence: Synthetic oligonucleotide
cagccuaaggaauaacaag

SEQ ID NO: 669370 - RNA, 19 nt, Artificial Sequence
  Description of Artificial Sequence: Synthetic oligonucleotide
gucugaugaagauccaacc

SEQ ID NO: 669371 - RNA, 19 nt, Artificial Sequence
  Description of Artificial Sequence: Synthetic oligonucleotide
gcagguugagguuaaaacc

SEQ ID NO: 669372 - RNA, 19 nt, Artificial Sequence
  Description of Artificial Sequence: Synthetic oligonucleotide
gaggaacuagaugagcuag

SEQ ID NO: 669373 - RNA, 19 nt, Artificial Sequence
  Description of Artificial Sequence: Synthetic oligonucleotide
aguugggccugucuccacc

SEQ ID NO: 669374 - RNA, 19 nt, Artificial Sequence
  Description of Artificial Sequence: Synthetic oligonucleotide
uaauguuugcugugguuga

SEQ ID NO: 669375 - RNA, 19 nt, Artificial Sequence
  Description of Artificial Sequence: Synthetic oligonucleotide
acaguuagcacggucaaga

SEQ ID NO: 669376 - RNA, 19 nt, Artificial Sequence
  Description of Artificial Sequence: Synthetic oligonucleotide
aggagagucccguacucgg

SEQ ID NO: 669377 - RNA, 19 nt, Artificial Sequence
  Description of Artificial Sequence: Synthetic oligonucleotide
aaggaaaaugcgggaagag

SEQ ID NO: 669378 - RNA, 19 nt, Artificial Sequence
  Description of Artificial Sequence: Synthetic oligonucleotide
uucaaggguaauguuguug

SEQ ID NO: 669379 - RNA, 19 nt, Artificial Sequence
  Description of Artificial Sequence: Synthetic oligonucleotide
acggguucuguagucaacc

SEQ ID NO: 669380 - RNA, 19 nt, Artificial Sequence
  Description of Artificial Sequence: Synthetic oligonucleotide
ggggauacggguuagcuug

SEQ ID NO: 669381 - RNA, 19 nt, Artificial Sequence
  Description of Artificial Sequence: Synthetic oligonucleotide
ggcucuuaggacuucagcc

SEQ ID NO: 669382 - RNA, 19 nt, Artificial Sequence
  Description of Artificial Sequence: Synthetic oligonucleotide
uugcaggcugacuugagcu

SEQ ID NO: 669383 - RNA, 19 nt, Artificial Sequence
  Description of Artificial Sequence: Synthetic oligonucleotide
agggcugccggauaauguc

SEQ ID NO: 669384 - RNA, 19 nt, Artificial Sequence
  Description of Artificial Sequence: Synthetic oligonucleotide
uuaggacuucagccuaagg

SEQ ID NO: 669385 - RNA, 19 nt, Artificial Sequence
  Description of Artificial Sequence: Synthetic oligonucleotide
agccucuuaccuuccuucc

SEQ ID NO: 669386 - RNA, 19 nt, Artificial Sequence
  Description of Artificial Sequence: Synthetic oligonucleotide
aaaagagggccuauuggcu

SEQ ID NO: 669387 - RNA, 19 nt, Artificial Sequence
  Description of Artificial Sequence: Synthetic oligonucleotide
ggaaaaugcgggaagagug

SEQ ID NO: 669388 - RNA, 19 nt, Artificial Sequence
  Description of Artificial Sequence: Synthetic oligonucleotide
aaccaccauagugaguagg

SEQ ID NO: 669389 - RNA, 19 nt, Artificial Sequence
  Description of Artificial Sequence: Synthetic oligonucleotide
gggguuaggaccaaguuag

SEQ ID NO: 669390 - RNA, 19 nt, Artificial Sequence
  Description of Artificial Sequence: Synthetic oligonucleotide
agccuaaggaauaacaaga

SEQ ID NO: 669391 - RNA, 19 nt, Artificial Sequence
  Description of Artificial Sequence: Synthetic oligonucleotide
cuggauugaacuggggugg

SEQ ID NO: 669392 - RNA, 19 nt, Artificial Sequence
  Description of Artificial Sequence: Synthetic oligonucleotide
auacuguagguaugggcag

SEQ ID NO: 669393 - RNA, 19 nt, Artificial Sequence
  Description of Artificial Sequence: Synthetic oligonucleotide
guuaguaaguggguacggg

SEQ ID NO: 669394 - RNA, 19 nt, Artificial Sequence
  Description of Artificial Sequence: Synthetic oligonucleotide
uguaacaauuuugcucugc

SEQ ID NO: 669395 - RNA, 19 nt, Artificial Sequence
  Description of Artificial Sequence: Synthetic oligonucleotide
aaagucucugagcuugcau

SEQ ID NO: 669396 - RNA, 19 nt, Artificial Sequence
  Description of Artificial Sequence: Synthetic oligonucleotide
cuacaaacccugaauucug

SEQ ID NO: 669397 - RNA, 19 nt, Artificial Sequence
  Description of Artificial Sequence: Synthetic oligonucleotide
aguacauggucccagcaua

SEQ ID NO: 669398 - RNA, 19 nt, Artificial Sequence
  Description of Artificial Sequence: Synthetic oligonucleotide
ugcucccacacccuagaag

SEQ ID NO: 669399 - RNA, 19 nt, Artificial Sequence
  Description of Artificial Sequence: Synthetic oligonucleotide
uuggcuuggaggcauccac

SEQ ID NO: 669400 - RNA, 19 nt, Artificial Sequence
  Description of Artificial Sequence: Synthetic oligonucleotide
aggaccuuuaaggcaaaac

SEQ ID NO: 669401 - RNA, 19 nt, Artificial Sequence
  Description of Artificial Sequence: Synthetic oligonucleotide
uagaucuacaaacccugaa

SEQ ID NO: 669402 - RNA, 19 nt, Artificial Sequence
  Description of Artificial Sequence: Synthetic oligonucleotide
uggcucauacccaucccag

SEQ ID NO: 669403 - RNA, 19 nt, Artificial Sequence
  Description of Artificial Sequence: Synthetic oligonucleotide
cuuggcacuggggauacgg

SEQ ID NO: 669404 - RNA, 19 nt, Artificial Sequence
  Description of Artificial Sequence: Synthetic oligonucleotide
ggauaucucaaagaugugc

SEQ ID NO: 669405 - RNA, 19 nt, Artificial Sequence
  Description of Artificial Sequence: Synthetic oligonucleotide
cuuccuggauugaacuggg

SEQ ID NO: 669406 - RNA, 19 nt, Artificial Sequence
  Description of Artificial Sequence: Synthetic oligonucleotide
ggaauaacaagaaacugga

SEQ ID NO: 669407 - RNA, 19 nt, Artificial Sequence
  Description of Artificial Sequence: Synthetic oligonucleotide
uuagcuccucaguguaagg

SEQ ID NO: 669408 - RNA, 19 nt, Artificial Sequence
  Description of Artificial Sequence: Synthetic oligonucleotide
aagagggccuauuggcucu

SEQ ID NO: 669409 - RNA, 19 nt, Artificial Sequence
  Description of Artificial Sequence: Synthetic oligonucleotide
aaaaugcgggaagagugga

SEQ ID NO: 669410 - RNA, 19 nt, Artificial Sequence
  Description of Artificial Sequence: Synthetic oligonucleotide
acaagaaacuggauucuag

SEQ ID NO: 669411 - RNA, 19 nt, Artificial Sequence
  Description of Artificial Sequence: Synthetic oligonucleotide
aagcuaaaccaggcacugc

SEQ ID NO: 669412 - RNA, 19 nt, Artificial Sequence
  Description of Artificial Sequence: Synthetic oligonucleotide
aguuaguaaguggguacgg

SEQ ID NO: 669413 - RNA, 19 nt, Artificial Sequence
  Description of Artificial Sequence: Synthetic oligonucleotide
uucuaaacuggagacuggu

SEQ ID NO: 669414 - RNA, 19 nt, Artificial Sequence
  Description of Artificial Sequence: Synthetic oligonucleotide
ugcucaagccuucuuuggu

SEQ ID NO: 669415 - RNA, 19 nt, Artificial Sequence
  Description of Artificial Sequence: Synthetic oligonucleotide
ugcggguuuaauauacaua

SEQ ID NO: 669416 - RNA, 19 nt, Artificial Sequence
  Description of Artificial Sequence: Synthetic oligonucleotide
cuuagcuccucaguguaag

SEQ ID NO: 669417 - RNA, 19 nt, Artificial Sequence
  Description of Artificial Sequence: Synthetic oligonucleotide
gguucuguagucaaccacc

SEQ ID NO: 669418 - RNA, 19 nt, Artificial Sequence
  Description of Artificial Sequence: Synthetic oligonucleotide
uaacaagaaacuggauucu

SEQ ID NO: 669419 - RNA, 19 nt, Artificial Sequence
  Description of Artificial Sequence: Synthetic oligonucleotide
cagugcggguuuaauauac

SEQ ID NO: 669420 - RNA, 19 nt, Artificial Sequence
  Description of Artificial Sequence: Synthetic oligonucleotide
uggaggcauccacaaaccc

SEQ ID NO: 669421 - RNA, 19 nt, Artificial Sequence
  Description of Artificial Sequence: Synthetic oligonucleotide
ggcagguugagguuaaaac

SEQ ID NO: 669422 - RNA, 19 nt, Artificial Sequence
  Description of Artificial Sequence: Synthetic oligonucleotide
uaguacauggucccagcau

SEQ ID NO: 669423 - RNA, 19 nt, Artificial Sequence
  Description of Artificial Sequence: Synthetic oligonucleotide
acggucaagauggggaagg

SEQ ID NO: 669424 - RNA, 19 nt, Artificial Sequence
  Description of Artificial Sequence: Synthetic oligonucleotide
gagagucccguacucggcc

SEQ ID NO: 669425 - RNA, 19 nt, Artificial Sequence
  Description of Artificial Sequence: Synthetic oligonucleotide
cacccuagaagcuccuacc

SEQ ID NO: 669426 - RNA, 19 nt, Artificial Sequence
  Description of Artificial Sequence: Synthetic oligonucleotide
acacgcgcauaguaagggg

SEQ ID NO: 669427 - RNA, 19 nt, Artificial Sequence
  Description of Artificial Sequence: Synthetic oligonucleotide
caccauagugaguagguca

SEQ ID NO: 669428 - RNA, 19 nt, Artificial Sequence
  Description of Artificial Sequence: Synthetic oligonucleotide
uaaaaccuauagaucucau

SEQ ID NO: 669429 - RNA, 19 nt, Artificial Sequence
  Description of Artificial Sequence: Synthetic oligonucleotide
cuaaacuggagacuggugu

SEQ ID NO: 669430 - RNA, 19 nt, Artificial Sequence
  Description of Artificial Sequence: Synthetic oligonucleotide
gauacggguuagcuuggug

SEQ ID NO: 669431 - RNA, 19 nt, Artificial Sequence
  Description of Artificial Sequence: Synthetic oligonucleotide
aagcuccuaccuucaagcu

SEQ ID NO: 669432 - RNA, 19 nt, Artificial Sequence
  Description of Artificial Sequence: Synthetic oligonucleotide
ucccuuccuggauugaacu

SEQ ID NO: 669433 - RNA, 19 nt, Artificial Sequence
  Description of Artificial Sequence: Synthetic oligonucleotide
uacuguagguaugggcagg

SEQ ID NO: 669434 - RNA, 19 nt, Artificial Sequence
  Description of Artificial Sequence: Synthetic oligonucleotide
aggacggcgggauaucuca

SEQ ID NO: 669435 - RNA, 19 nt, Artificial Sequence
  Description of Artificial Sequence: Synthetic oligonucleotide
cucauacccaucccaggcc

SEQ ID NO: 669436 - RNA, 19 nt, Artificial Sequence
  Description of Artificial Sequence: Synthetic oligonucleotide
cuccaguccccucacgagg

SEQ ID NO: 669437 - RNA, 19 nt, Artificial Sequence
  Description of Artificial Sequence: Synthetic oligonucleotide
acggcgggauaucucaaag

SEQ ID NO: 669438 - RNA, 19 nt, Artificial Sequence
  Description of Artificial Sequence: Synthetic oligonucleotide
ggguauucuaaacuggaga

SEQ ID NO: 669439 - RNA, 19 nt, Artificial Sequence
  Description of Artificial Sequence: Synthetic oligonucleotide
gcuguuuggacuauguaac

SEQ ID NO: 669440 - RNA, 19 nt, Artificial Sequence
  Description of Artificial Sequence: Synthetic oligonucleotide
guuaaaaccuauagaucuc

SEQ ID NO: 669441 - RNA, 19 nt, Artificial Sequence
  Description of Artificial Sequence: Synthetic oligonucleotide
aagggaguggucugaugaa

SEQ ID NO: 669442 - RNA, 19 nt, Artificial Sequence
  Description of Artificial Sequence: Synthetic oligonucleotide
uacggguuagcuugguguc

SEQ ID NO: 669443 - RNA, 19 nt, Artificial Sequence
  Description of Artificial Sequence: Synthetic oligonucleotide
gaacuagaugagcuagaca

SEQ ID NO: 669444 - RNA, 19 nt, Artificial Sequence
  Description of Artificial Sequence: Synthetic oligonucleotide
cacacgcgcauaguaaggg

SEQ ID NO: 669445 - RNA, 19 nt, Artificial Sequence
  Description of Artificial Sequence: Synthetic oligonucleotide
ggguuuaauauacauauau

SEQ ID NO: 669446 - RNA, 19 nt, Artificial Sequence
  Description of Artificial Sequence: Synthetic oligonucleotide
aaaugcgggaagaguggag

SEQ ID NO: 669447 - RNA, 19 nt, Artificial Sequence
  Description of Artificial Sequence: Synthetic oligonucleotide
gaaggagagucccguacuc

SEQ ID NO: 669448 - RNA, 19 nt, Artificial Sequence
  Description of Artificial Sequence: Synthetic oligonucleotide
uuccuaagcagcguccgga

SEQ ID NO: 669449 - RNA, 19 nt, Artificial Sequence
  Description of Artificial Sequence: Synthetic oligonucleotide
ugccggauaaugucuuugu

SEQ ID NO: 669450 - RNA, 19 nt, Artificial Sequence
  Description of Artificial Sequence: Synthetic oligonucleotide
ugcgggaagaguggagggg

SEQ ID NO: 669451 - RNA, 19 nt, Artificial Sequence
  Description of Artificial Sequence: Synthetic oligonucleotide
guagguaugggcagguuga

SEQ ID NO: 669452 - RNA, 19 nt, Artificial Sequence
  Description of Artificial Sequence: Synthetic oligonucleotide
agcguccggagccugcuuc

SEQ ID NO: 669453 - RNA, 19 nt, Artificial Sequence
  Description of Artificial Sequence: Synthetic oligonucleotide
caguccagcauagaucuac

SEQ ID NO: 669454 - RNA, 19 nt, Artificial Sequence
  Description of Artificial Sequence: Synthetic oligonucleotide
gauugaacuggggugguaa

SEQ ID NO: 669455 - RNA, 19 nt, Artificial Sequence
  Description of Artificial Sequence: Synthetic oligonucleotide
ucugagcuugcauguaaau

SEQ ID NO: 669456 - RNA, 19 nt, Artificial Sequence
  Description of Artificial Sequence: Synthetic oligonucleotide
uaggugcaaaggaaaccac

SEQ ID NO: 669457 - RNA, 19 nt, Artificial Sequence
  Description of Artificial Sequence: Synthetic oligonucleotide
guaggagagguugucuuug

SEQ ID NO: 669458 - RNA, 19 nt, Artificial Sequence
  Description of Artificial Sequence: Synthetic oligonucleotide
uguagucaaccaccauagu

SEQ ID NO: 669459 - RNA, 19 nt, Artificial Sequence
  Description of Artificial Sequence: Synthetic oligonucleotide
cagguugagguuaaaaccu

SEQ ID NO: 669460 - RNA, 19 nt, Artificial Sequence
  Description of Artificial Sequence: Synthetic oligonucleotide
ggacuauguaacaauuuug

SEQ ID NO: 669461 - RNA, 19 nt, Artificial Sequence
  Description of Artificial Sequence: Synthetic oligonucleotide
uguaggagagguugucuuu

SEQ ID NO: 669462 - RNA, 19 nt, Artificial Sequence
  Description of Artificial Sequence: Synthetic oligonucleotide
ucuuaggacuucagccuaa

SEQ ID NO: 669463 - RNA, 19 nt, Artificial Sequence
  Description of Artificial Sequence: Synthetic oligonucleotide
cagcacacggguucuguag

SEQ ID NO: 669464 - RNA, 19 nt, Artificial Sequence
  Description of Artificial Sequence: Synthetic oligonucleotide
aaaagucucugagcuugca

SEQ ID NO: 669465 - RNA, 19 nt, Artificial Sequence
  Description of Artificial Sequence: Synthetic oligonucleotide
ucaggcucaguaguacaug

SEQ ID NO: 669466 - RNA, 19 nt, Artificial Sequence
  Description of Artificial Sequence: Synthetic oligonucleotide
ccggauaaugucuuuguac

SEQ ID NO: 669467 - RNA, 19 nt, Artificial Sequence
  Description of Artificial Sequence: Synthetic oligonucleotide
ccguacucggccaugacgc

SEQ ID NO: 669468 - RNA, 19 nt, Artificial Sequence
  Description of Artificial Sequence: Synthetic oligonucleotide
ggaccuuuaaggcaaaacu

SEQ ID NO: 669469 - RNA, 19 nt, Artificial Sequence
  Description of Artificial Sequence: Synthetic oligonucleotide
gaauaaaggaguagaaguu

SEQ ID NO: 669470 - RNA, 19 nt, Artificial Sequence
  Description of Artificial Sequence: Synthetic oligonucleotide
cacucacuguacucuagug

SEQ ID NO: 669471 - RNA, 19 nt, Artificial Sequence
  Description of Artificial Sequence: Synthetic oligonucleotide
gcucauacccaucccaggc

SEQ ID NO: 669472 - RNA, 19 nt, Artificial Sequence
  Description of Artificial Sequence: Synthetic oligonucleotide
aagguuaaccaagucccuu

SEQ ID NO: 669473 - RNA, 19 nt, Artificial Sequence
  Description of Artificial Sequence: Synthetic oligonucleotide
agcacacggguucuguagu

SEQ ID NO: 669474 - RNA, 19 nt, Artificial Sequence
  Description of Artificial Sequence: Synthetic oligonucleotide
guuagcuugguguccagcu

SEQ ID NO: 669475 - RNA, 19 nt, Artificial Sequence
  Description of Artificial Sequence: Synthetic oligonucleotide
uuggagguguguguguuaa

SEQ ID NO: 669476 - RNA, 19 nt, Artificial Sequence
  Description of Artificial Sequence: Synthetic oligonucleotide
acggguuagcuuggugucc

SEQ ID NO: 669477 - RNA, 19 nt, Artificial Sequence
  Description of Artificial Sequence: Synthetic oligonucleotide
uacgcuagccagucuggcu

SEQ ID NO: 669478 - RNA, 19 nt, Artificial Sequence
  Description of Artificial Sequence: Synthetic oligonucleotide
ggccuauuggcucuuagga

SEQ ID NO: 669479 - RNA, 19 nt, Artificial Sequence
  Description of Artificial Sequence: Synthetic oligonucleotide
aaggcucuaguggucuucu

SEQ ID NO: 669480 - RNA, 19 nt, Artificial Sequence
  Description of Artificial Sequence: Synthetic oligonucleotide
ccuauagaucucauucccc

SEQ ID NO: 669481 - RNA, 19 nt, Artificial Sequence
  Description of Artificial Sequence: Synthetic oligonucleotide
caauuuugcucugccacuc

SEQ ID NO: 669482 - RNA, 19 nt, Artificial Sequence
  Description of Artificial Sequence: Synthetic oligonucleotide
uaugggcagguugagguua

SEQ ID NO: 669483 - RNA, 19 nt, Artificial Sequence
  Description of Artificial Sequence: Synthetic oligonucleotide
ugcaucccuaucucaggcu

SEQ ID NO: 669484 - RNA, 19 nt, Artificial Sequence
  Description of Artificial Sequence: Synthetic oligonucleotide
gaacacgcacacacacgcg

SEQ ID NO: 669485 - RNA, 19 nt, Artificial Sequence
  Description of Artificial Sequence: Synthetic oligonucleotide
gcggguuuaauauacauau

SEQ ID NO: 669486 - RNA, 19 nt, Artificial Sequence
  Description of Artificial Sequence: Synthetic oligonucleotide
auuaagauuucuggcucau

SEQ ID NO: 669487 - RNA, 19 nt, Artificial Sequence
  Description of Artificial Sequence: Synthetic oligonucleotide
uccugaaggagagucccgu

SEQ ID NO: 669488 - RNA, 19 nt, Artificial Sequence
  Description of Artificial Sequence: Synthetic oligonucleotide
auugaacuggggugguaau

SEQ ID NO: 669489 - RNA, 19 nt, Artificial Sequence
  Description of Artificial Sequence: Synthetic oligonucleotide
accuacaauacuguaggua

SEQ ID NO: 669490 - RNA, 19 nt, Artificial Sequence
  Description of Artificial Sequence: Synthetic oligonucleotide
auuuaggaauaaaggagua

SEQ ID NO: 669491 - RNA, 19 nt, Artificial Sequence
  Description of Artificial Sequence: Synthetic oligonucleotide
uaauguuguuggucagguc

SEQ ID NO: 669492 - RNA, 19 nt, Artificial Sequence
  Description of Artificial Sequence: Synthetic oligonucleotide
accaccauagugaguaggu

SEQ ID NO: 669493 - RNA, 19 nt, Artificial Sequence
  Description of Artificial Sequence: Synthetic oligonucleotide
agacuggugugaagguuac

SEQ ID NO: 669494 - RNA, 19 nt, Artificial Sequence
  Description of Artificial Sequence: Synthetic oligonucleotide
cucgcuggggauguccucc

SEQ ID NO: 669495 - RNA, 19 nt, Artificial Sequence
  Description of Artificial Sequence: Synthetic oligonucleotide
uaccuacaauacuguaggu

SEQ ID NO: 669496 - RNA, 19 nt, Artificial Sequence
  Description of Artificial Sequence: Synthetic oligonucleotide
acgcuagccagucuggcuu

SEQ ID NO: 669497 - RNA, 19 nt, Artificial Sequence
  Description of Artificial Sequence: Synthetic oligonucleotide
cuagaagcuccuaccuuca

SEQ ID NO: 669498 - RNA, 19 nt, Artificial Sequence
  Description of Artificial Sequence: Synthetic oligonucleotide
ggguacgcuagccagucug

SEQ ID NO: 669499 - RNA, 19 nt, Artificial Sequence
  Description of Artificial Sequence: Synthetic oligonucleotide
gagcgugugaacacgcaca

SEQ ID NO: 669500 - RNA, 19 nt, Artificial Sequence
  Description of Artificial Sequence: Synthetic oligonucleotide
acacacgcgcauaguaagg

SEQ ID NO: 669501 - RNA, 19 nt, Artificial Sequence
  Description of Artificial Sequence: Synthetic oligonucleotide
cucuggccuagacaauaag

SEQ ID NO: 669502 - RNA, 19 nt, Artificial Sequence
  Description of Artificial Sequence: Synthetic oligonucleotide
gguuccuaagcagcguccg

SEQ ID NO: 669503 - RNA, 19 nt, Artificial Sequence
  Description of Artificial Sequence: Synthetic oligonucleotide
cuucaagcuuccucuaaaa

SEQ ID NO: 669504 - RNA, 19 nt, Artificial Sequence
  Description of Artificial Sequence: Synthetic oligonucleotide
agcuccuaccuucaagcuu

SEQ ID NO: 669505 - RNA, 19 nt, Artificial Sequence
  Description of Artificial Sequence: Synthetic oligonucleotide
ggaacuagaugagcuagac

SEQ ID NO: 669506 - RNA, 19 nt, Artificial Sequence
  Description of Artificial Sequence: Synthetic oligonucleotide
cuucuuucuugcuuggggu

SEQ ID NO: 669507 - RNA, 19 nt, Artificial Sequence
  Description of Artificial Sequence: Synthetic oligonucleotide
agggccuauuggcucuuag

SEQ ID NO: 669508 - RNA, 19 nt, Artificial Sequence
  Description of Artificial Sequence: Synthetic oligonucleotide
uggucugaugaagauccaa

SEQ ID NO: 669509 - RNA, 19 nt, Artificial Sequence
  Description of Artificial Sequence: Synthetic oligonucleotide
ucuagugacuuggcuugga

SEQ ID NO: 669510 - RNA, 19 nt, Artificial Sequence
  Description of Artificial Sequence: Synthetic oligonucleotide
cuguuuggacuauguaaca

SEQ ID NO: 669511 - RNA, 19 nt, Artificial Sequence
  Description of Artificial Sequence: Synthetic oligonucleotide
agguaugggcagguugagg

SEQ ID NO: 669512 - RNA, 19 nt, Artificial Sequence
  Description of Artificial Sequence: Synthetic oligonucleotide
uggcagugcggguuuaaua

SEQ ID NO: 669513 - RNA, 19 nt, Artificial Sequence
  Description of Artificial Sequence: Synthetic oligonucleotide
agggugcgggcacuccugg

SEQ ID NO: 669514 - RNA, 19 nt, Artificial Sequence
  Description of Artificial Sequence: Synthetic oligonucleotide
uucagcacacggguucugu

SEQ ID NO: 669515 - RNA, 19 nt, Artificial Sequence
  Description of Artificial Sequence: Synthetic oligonucleotide
cauggucccagcauagucu

SEQ ID NO: 669516 - RNA, 19 nt, Artificial Sequence
  Description of Artificial Sequence: Synthetic oligonucleotide
aguagccucuuaccuuccu

SEQ ID NO: 669517 - RNA, 19 nt, Artificial Sequence
  Description of Artificial Sequence: Synthetic oligonucleotide
guaauguuguuggucaggu

SEQ ID NO: 669518 - RNA, 19 nt, Artificial Sequence
  Description of Artificial Sequence: Synthetic oligonucleotide
ccuaccuucaagcuuccuc

SEQ ID NO: 669519 - RNA, 19 nt, Artificial Sequence
  Description of Artificial Sequence: Synthetic oligonucleotide
auagaucuacaaacccuga

SEQ ID NO: 669520 - RNA, 19 nt, Artificial Sequence
  Description of Artificial Sequence: Synthetic oligonucleotide
auuggcucuuaggacuuca

SEQ ID NO: 669521 - RNA, 19 nt, Artificial Sequence
  Description of Artificial Sequence: Synthetic oligonucleotide
uugaacuggggugguaaua

SEQ ID NO: 669522 - RNA, 19 nt, Artificial Sequence
  Description of Artificial Sequence: Synthetic oligonucleotide
ccacaaacccaaaugagaa

SEQ ID NO: 669523 - RNA, 19 nt, Artificial Sequence
  Description of Artificial Sequence: Synthetic oligonucleotide
guccccgguuccuaagcag

SEQ ID NO: 669524 - RNA, 19 nt, Artificial Sequence
  Description of Artificial Sequence: Synthetic oligonucleotide
agagucccguacucggcca

SEQ ID NO: 669525 - RNA, 19 nt, Artificial Sequence
  Description of Artificial Sequence: Synthetic oligonucleotide
gcuccuaccuucaagcuuc

SEQ ID NO: 669526 - RNA, 19 nt, Artificial Sequence
  Description of Artificial Sequence: Synthetic oligonucleotide
uguuguuggucagguccug

SEQ ID NO: 669527 - RNA, 19 nt, Artificial Sequence
  Description of Artificial Sequence: Synthetic oligonucleotide
cacgaggaggaggaacuag

SEQ ID NO: 669528 - RNA, 19 nt, Artificial Sequence
  Description of Artificial Sequence: Synthetic oligonucleotide
gaagggcaucuugggacag

SEQ ID NO: 669529 - RNA, 19 nt, Artificial Sequence
  Description of Artificial Sequence: Synthetic oligonucleotide
acuucagccuaaggaauaa

SEQ ID NO: 669530 - RNA, 19 nt, Artificial Sequence
  Description of Artificial Sequence: Synthetic oligonucleotide
cuggccuagacaauaaguu

SEQ ID NO: 669531 - RNA, 19 nt, Artificial Sequence
  Description of Artificial Sequence: Synthetic oligonucleotide
ucagcacacggguucugua

SEQ ID NO: 669532 - RNA, 19 nt, Artificial Sequence
  Description of Artificial Sequence: Synthetic oligonucleotide
uggggauguccuccuugca

SEQ ID NO: 669533 - RNA, 19 nt, Artificial Sequence
  Description of Artificial Sequence: Synthetic oligonucleotide
guucuguagucaaccacca

SEQ ID NO: 669534 - RNA, 19 nt, Artificial Sequence
  Description of Artificial Sequence: Synthetic oligonucleotide
ggcucuaguggucuucuca

SEQ ID NO: 669535 - RNA, 19 nt, Artificial Sequence
  Description of Artificial Sequence: Synthetic oligonucleotide
ucaggacggcgggauaucu

SEQ ID NO: 669536 - RNA, 19 nt, Artificial Sequence
  Description of Artificial Sequence: Synthetic oligonucleotide
ggguucuguagucaaccac

SEQ ID NO: 669537 - RNA, 19 nt, Artificial Sequence
  Description of Artificial Sequence: Synthetic oligonucleotide
ccuacaauacuguagguau

SEQ ID NO: 669538 - RNA, 19 nt, Artificial Sequence
  Description of Artificial Sequence: Synthetic oligonucleotide
cgggauaucucaaagaugu

SEQ ID NO: 669539 - RNA, 19 nt, Artificial Sequence
  Description of Artificial Sequence: Synthetic oligonucleotide
gccuauuggcucuuaggac

SEQ ID NO: 669540 - RNA, 19 nt, Artificial Sequence
  Description of Artificial Sequence: Synthetic oligonucleotide
gguacgcuagccagucugg

SEQ ID NO: 669541 - RNA, 19 nt, Artificial Sequence
  Description of Artificial Sequence: Synthetic oligonucleotide
caggaagcuaaaccaggca

SEQ ID NO: 669542 - RNA, 19 nt, Artificial Sequence
  Description of Artificial Sequence: Synthetic oligonucleotide
cauaccucaucuuaaccuu

SEQ ID NO: 669543 - RNA, 19 nt, Artificial Sequence
  Description of Artificial Sequence: Synthetic oligonucleotide
uaagcagcguccggagccu

SEQ ID NO: 669544 - RNA, 19 nt, Artificial Sequence
  Description of Artificial Sequence: Synthetic oligonucleotide
cugccggauaaugucuuug

SEQ ID NO: 669545 - RNA, 19 nt, Artificial Sequence
  Description of Artificial Sequence: Synthetic oligonucleotide
gggguauucuaaacuggag

SEQ ID NO: 669546 - RNA, 19 nt, Artificial Sequence
  Description of Artificial Sequence: Synthetic oligonucleotide
gacuucagccuaaggaaua

SEQ ID NO: 669547 - RNA, 19 nt, Artificial Sequence
  Description of Artificial Sequence: Synthetic oligonucleotide
cucuagugacuuggcuugg

SEQ ID NO: 669548 - RNA, 19 nt, Artificial Sequence
  Description of Artificial Sequence: Synthetic oligonucleotide
ggcagugcggguuuaauau

SEQ ID NO: 669549 - RNA, 19 nt, Artificial Sequence
  Description of Artificial Sequence: Synthetic oligonucleotide
cuucagccuaaggaauaac

SEQ ID NO: 669550 - RNA, 19 nt, Artificial Sequence
  Description of Artificial Sequence: Synthetic oligonucleotide
cccauaccucaucuuaacc

SEQ ID NO: 669551 - RNA, 19 nt, Artificial Sequence
  Description of Artificial Sequence: Synthetic oligonucleotide
gccaugacgccuccggagc

SEQ ID NO: 669552 - RNA, 19 nt, Artificial Sequence
  Description of Artificial Sequence: Synthetic oligonucleotide
caggcccaugacaagggca

SEQ ID NO: 669553 - RNA, 19 nt, Artificial Sequence
  Description of Artificial Sequence: Synthetic oligonucleotide
cccguacucggccaugacg

SEQ ID NO: 669554 - RNA, 19 nt, Artificial Sequence
  Description of Artificial Sequence: Synthetic oligonucleotide
caagauggggaagggcauc

SEQ ID NO: 669555 - RNA, 19 nt, Artificial Sequence
  Description of Artificial Sequence: Synthetic oligonucleotide
gcaucccuaucucaggcuc

SEQ ID NO: 669556 - RNA, 19 nt, Artificial Sequence
  Description of Artificial Sequence: Synthetic oligonucleotide
aggcucuaguggucuucuc

SEQ ID NO: 669557 - RNA, 19 nt, Artificial Sequence
  Description of Artificial Sequence: Synthetic oligonucleotide
ggugcaaaggaaaccacua

SEQ ID NO: 669558 - RNA, 19 nt, Artificial Sequence
  Description of Artificial Sequence: Synthetic oligonucleotide
cucuuaggacuucagccua

SEQ ID NO: 669559 - RNA, 19 nt, Artificial Sequence
  Description of Artificial Sequence: Synthetic oligonucleotide
gcugaguagccucuuaccu

SEQ ID NO: 669560 - RNA, 19 nt, Artificial Sequence
  Description of Artificial Sequence: Synthetic oligonucleotide
ggcgggauaucucaaagau

SEQ ID NO: 669561 - RNA, 19 nt, Artificial Sequence
  Description of Artificial Sequence: Synthetic oligonucleotide
aggcccaugacaagggcau

SEQ ID NO: 669562 - RNA, 19 nt, Artificial Sequence
  Description of Artificial Sequence: Synthetic oligonucleotide
gugaguaggucaggacggc

SEQ ID NO: 669563 - RNA, 19 nt, Artificial Sequence
  Description of Artificial Sequence: Synthetic oligonucleotide
guacgcuagccagucuggc

SEQ ID NO: 669564 - RNA, 19 nt, Artificial Sequence
  Description of Artificial Sequence: Synthetic oligonucleotide
agugcggguuuaauauaca

SEQ ID NO: 669565 - RNA, 19 nt, Artificial Sequence
  Description of Artificial Sequence: Synthetic oligonucleotide
gacggcgggauaucucaaa

SEQ ID NO: 669566 - RNA, 19 nt, Artificial Sequence
  Description of Artificial Sequence: Synthetic oligonucleotide
ggauucuagccaguccagc

SEQ ID NO: 669567 - RNA, 19 nt, Artificial Sequence
  Description of Artificial Sequence: Synthetic oligonucleotide
gccuguagugaucuccuca

SEQ ID NO: 669568 - RNA, 19 nt, Artificial Sequence
  Description of Artificial Sequence: Synthetic oligonucleotide
gcucuuaggacuucagccu

SEQ ID NO: 669569 - RNA, 19 nt, Artificial Sequence
  Description of Artificial Sequence: Synthetic oligonucleotide
agucuguauuuaggaauaa

SEQ ID NO: 669570 - RNA, 19 nt, Artificial Sequence
  Description of Artificial Sequence: Synthetic oligonucleotide
ggucaagauggggaagggc

SEQ ID NO: 669571 - RNA, 19 nt, Artificial Sequence
  Description of Artificial Sequence: Synthetic oligonucleotide
gccagagcgugugaacacg

SEQ ID NO: 669572 - RNA, 19 nt, Artificial Sequence
  Description of Artificial Sequence: Synthetic oligonucleotide
aaggaccuuuaaggcaaaa

SEQ ID NO: 669573 - RNA, 19 nt, Artificial Sequence
  Description of Artificial Sequence: Synthetic oligonucleotide
ccauaccucaucuuaaccu

SEQ ID NO: 669574 - RNA, 19 nt, Artificial Sequence
  Description of Artificial Sequence: Synthetic oligonucleotide
caucuuaaccuuagcuccu

SEQ ID NO: 669575 - RNA, 19 nt, Artificial Sequence
  Description of Artificial Sequence: Synthetic oligonucleotide
ggaguagaaguugggccug

SEQ ID NO: 669576 - RNA, 19 nt, Artificial Sequence
  Description of Artificial Sequence: Synthetic oligonucleotide
cagggugcgggcacuccug

SEQ ID NO: 669577 - RNA, 19 nt, Artificial Sequence
  Description of Artificial Sequence: Synthetic oligonucleotide
ccagagcgugugaacacgc

SEQ ID NO: 669578 - RNA, 19 nt, Artificial Sequence
  Description of Artificial Sequence: Synthetic oligonucleotide
cuuccccauugguuuuaac

SEQ ID NO: 669579 - RNA, 19 nt, Artificial Sequence
  Description of Artificial Sequence: Synthetic oligonucleotide
cccaaaccuccuuaggcuc

SEQ ID NO: 669580 - RNA, 19 nt, Artificial Sequence
  Description of Artificial Sequence: Synthetic oligonucleotide
caaugcuguuuggacuaug

SEQ ID NO: 669581 - RNA, 19 nt, Artificial Sequence
  Description of Artificial Sequence: Synthetic oligonucleotide
ucaaugcuguuuggacuau

SEQ ID NO: 669582 - RNA, 19 nt, Artificial Sequence
  Description of Artificial Sequence: Synthetic oligonucleotide
ggaggaacuagaugagcua

SEQ ID NO: 669583 - RNA, 19 nt, Artificial Sequence
  Description of Artificial Sequence: Synthetic oligonucleotide
cuccuaccuucaagcuucc

SEQ ID NO: 669584 - RNA, 19 nt, Artificial Sequence
  Description of Artificial Sequence: Synthetic oligonucleotide
cccauugguuuuaacucuc

SEQ ID NO: 669585 - RNA, 19 nt, Artificial Sequence
  Description of Artificial Sequence: Synthetic oligonucleotide
gguuaccuacaauacugua

SEQ ID NO: 669586 - RNA, 19 nt, Artificial Sequence
  Description of Artificial Sequence: Synthetic oligonucleotide
caggacggcgggauaucuc

SEQ ID NO: 669587 - RNA, 19 nt, Artificial Sequence
  Description of Artificial Sequence: Synthetic oligonucleotide
gcauagaucuacaaacccu

SEQ ID NO: 669588 - RNA, 19 nt, Artificial Sequence
  Description of Artificial Sequence: Synthetic oligonucleotide
guuaaccaagucccuuccu

SEQ ID NO: 669589 - RNA, 19 nt, Artificial Sequence
  Description of Artificial Sequence: Synthetic oligonucleotide
gaauaacaagaaacuggau

SEQ ID NO: 669590 - RNA, 19 nt, Artificial Sequence
  Description of Artificial Sequence: Synthetic oligonucleotide
ccuaaggaauaacaagaaa

SEQ ID NO: 669591 - RNA, 19 nt, Artificial Sequence
  Description of Artificial Sequence: Synthetic oligonucleotide
gacuggugugaagguuacc

SEQ ID NO: 669592 - RNA, 19 nt, Artificial Sequence
  Description of Artificial Sequence: Synthetic oligonucleotide
cuggugugaagguuaccua

SEQ ID NO: 669593 - RNA, 19 nt, Artificial Sequence
  Description of Artificial Sequence: Synthetic oligonucleotide
ucccguacucggccaugac

SEQ ID NO: 669594 - RNA, 19 nt, Artificial Sequence
  Description of Artificial Sequence: Synthetic oligonucleotide
guccagcauagaucuacaa

SEQ ID NO: 669595 - RNA, 19 nt, Artificial Sequence
  Description of Artificial Sequence: Synthetic oligonucleotide
ugccuguagugaucuccuc

SEQ ID NO: 669596 - RNA, 19 nt, Artificial Sequence
  Description of Artificial Sequence: Synthetic oligonucleotide
cuccccuuugcucaagccu

SEQ ID NO: 669597 - RNA, 19 nt, Artificial Sequence
  Description of Artificial Sequence: Synthetic oligonucleotide
auaccucaucuuaaccuua

SEQ ID NO: 669598 - RNA, 19 nt, Artificial Sequence
  Description of Artificial Sequence: Synthetic oligonucleotide
agguugagguuaaaaccua

SEQ ID NO: 669599 - RNA, 19 nt, Artificial Sequence
  Description of Artificial Sequence: Synthetic oligonucleotide
caugacgccuccggagcug

SEQ ID NO: 669600 - RNA, 19 nt, Artificial Sequence
  Description of Artificial Sequence: Synthetic oligonucleotide
gugcggguuuaauauacau

SEQ ID NO: 669601 - RNA, 19 nt, Artificial Sequence
  Description of Artificial Sequence: Synthetic oligonucleotide
gaaggaggaaugugcccau

SEQ ID NO: 669602 - RNA, 19 nt, Artificial Sequence
  Description of Artificial Sequence: Synthetic oligonucleotide
aagucccuuccuggauuga

SEQ ID NO: 669603 - RNA, 19 nt, Artificial Sequence
  Description of Artificial Sequence: Synthetic oligonucleotide
ggaagcuaaaccaggcacu

SEQ ID NO: 669604 - RNA, 19 nt, Artificial Sequence
  Description of Artificial Sequence: Synthetic oligonucleotide
aggcucagggucaguauau

SEQ ID NO: 669605 - RNA, 19 nt, Artificial Sequence
  Description of Artificial Sequence: Synthetic oligonucleotide
cagagcgugugaacacgca

SEQ ID NO: 669606 - RNA, 19 nt, Artificial Sequence
  Description of Artificial Sequence: Synthetic oligonucleotide
gcgggauaucucaaagaug

SEQ ID NO: 669607 - RNA, 19 nt, Artificial Sequence
  Description of Artificial Sequence: Synthetic oligonucleotide
ucuuggcacuggggauacg

SEQ ID NO: 669608 - RNA, 19 nt, Artificial Sequence
  Description of Artificial Sequence: Synthetic oligonucleotide
gguuaggaccaaguuagua

SEQ ID NO: 669609 - RNA, 19 nt, Artificial Sequence
  Description of Artificial Sequence: Synthetic oligonucleotide
ccuagccccucccauugag

SEQ ID NO: 669610 - RNA, 19 nt, Artificial Sequence
  Description of Artificial Sequence: Synthetic oligonucleotide
ugacgccuccggagcugag

SEQ ID NO: 669611 - RNA, 19 nt, Artificial Sequence
  Description of Artificial Sequence: Synthetic oligonucleotide
cugaguagccucuuaccuu

SEQ ID NO: 669612 - RNA, 19 nt, Artificial Sequence
  Description of Artificial Sequence: Synthetic oligonucleotide
ggcuuggaggcauccacaa

SEQ ID NO: 669613 - RNA, 19 nt, Artificial Sequence
  Description of Artificial Sequence: Synthetic oligonucleotide
gccuaaggaauaacaagaa

SEQ ID NO: 669614 - RNA, 19 nt, Artificial Sequence
  Description of Artificial Sequence: Synthetic oligonucleotide
ucacgaggaggaggaacua

SEQ ID NO: 669615 - RNA, 19 nt, Artificial Sequence
  Description of Artificial Sequence: Synthetic oligonucleotide
cacacggguucuguaguca

SEQ ID NO: 669616 - RNA, 19 nt, Artificial Sequence
  Description of Artificial Sequence: Synthetic oligonucleotide
ggagagucccguacucggc

SEQ ID NO: 669617 - RNA, 19 nt, Artificial Sequence
  Description of Artificial Sequence: Synthetic oligonucleotide
ccccgguuccuaagcagcg

SEQ ID NO: 669618 - RNA, 19 nt, Artificial Sequence
  Description of Artificial Sequence: Synthetic oligonucleotide
augacgccuccggagcuga

SEQ ID NO: 669619 - RNA, 19 nt, Artificial Sequence
  Description of Artificial Sequence: Synthetic oligonucleotide
gggauaucucaaagaugug

SEQ ID NO: 669620 - RNA, 19 nt, Artificial Sequence
  Description of Artificial Sequence: Synthetic oligonucleotide
cccaaaugagaaagguuaa

SEQ ID NO: 669621 - RNA, 19 nt, Artificial Sequence
  Description of Artificial Sequence: Synthetic oligonucleotide
augggcagacugggcuggg

SEQ ID NO: 669622 - RNA, 19 nt, Artificial Sequence
  Description of Artificial Sequence: Synthetic oligonucleotide
ggaaaggcucuaguggucu

SEQ ID NO: 669623 - RNA, 19 nt, Artificial Sequence
  Description of Artificial Sequence: Synthetic oligonucleotide
agucccguacucggccaug

SEQ ID NO: 669624 - RNA, 19 nt, Artificial Sequence
  Description of Artificial Sequence: Synthetic oligonucleotide
cuucagcacacggguucug

SEQ ID NO: 669625 - RNA, 19 nt, Artificial Sequence
  Description of Artificial Sequence: Synthetic oligonucleotide
ccucacgaggaggaggaac

SEQ ID NO: 669626 - RNA, 19 nt, Artificial Sequence
  Description of Artificial Sequence: Synthetic oligonucleotide
gaaggaccuuuaaggcaaa

SEQ ID NO: 669627 - RNA, 19 nt, Artificial Sequence
  Description of Artificial Sequence: Synthetic oligonucleotide
ccauagugaguaggucagg

SEQ ID NO: 669628 - RNA, 19 nt, Artificial Sequence
  Description of Artificial Sequence: Synthetic oligonucleotide
gcucuaguggucuucucau

SEQ ID NO: 669629 - RNA, 19 nt, Artificial Sequence
  Description of Artificial Sequence: Synthetic oligonucleotide
ccaaguuaguaagugggua

SEQ ID NO: 669630 - RNA, 19 nt, Artificial Sequence
  Description of Artificial Sequence: Synthetic oligonucleotide
ggcagacauggcagugcgg

SEQ ID NO: 669631 - RNA, 19 nt, Artificial Sequence
  Description of Artificial Sequence: Synthetic oligonucleotide
uccuaccuucaagcuuccu

SEQ ID NO: 669632 - RNA, 19 nt, Artificial Sequence
  Description of Artificial Sequence: Synthetic oligonucleotide
ccgguuccuaagcagcguc

SEQ ID NO: 669633 - RNA, 19 nt, Artificial Sequence
  Description of Artificial Sequence: Synthetic oligonucleotide
guaggucaggacggcggga

SEQ ID NO: 669634 - RNA, 19 nt, Artificial Sequence
  Description of Artificial Sequence: Synthetic oligonucleotide
ggguuagcuugguguccag

SEQ ID NO: 669635 - RNA, 19 nt, Artificial Sequence
  Description of Artificial Sequence: Synthetic oligonucleotide
cccuaucucaggcucagua

SEQ ID NO: 669636 - RNA, 19 nt, Artificial Sequence
  Description of Artificial Sequence: Synthetic oligonucleotide
gucccguacucggccauga

SEQ ID NO: 669637 - RNA, 19 nt, Artificial Sequence
  Description of Artificial Sequence: Synthetic oligonucleotide
acccugaauucuggguuuu

SEQ ID NO: 669638 - RNA, 19 nt, Artificial Sequence
  Description of Artificial Sequence: Synthetic oligonucleotide
gcagugcggguuuaauaua

SEQ ID NO: 669639 - RNA, 19 nt, Artificial Sequence
  Description of Artificial Sequence: Synthetic oligonucleotide
gacagguaggaggcugggu

SEQ ID NO: 669640 - RNA, 19 nt, Artificial Sequence
  Description of Artificial Sequence: Synthetic oligonucleotide
agaggcugaguagccucuu

SEQ ID NO: 669641 - RNA, 19 nt, Artificial Sequence
  Description of Artificial Sequence: Synthetic oligonucleotide
gccggauaaugucuuugua

SEQ ID NO: 669642 - RNA, 19 nt, Artificial Sequence
  Description of Artificial Sequence: Synthetic oligonucleotide
cacugccuguagugaucuc

SEQ ID NO: 669643 - RNA, 19 nt, Artificial Sequence
  Description of Artificial Sequence: Synthetic oligonucleotide
guacucggccaugacgccu

SEQ ID NO: 669644 - RNA, 19 nt, Artificial Sequence
  Description of Artificial Sequence: Synthetic oligonucleotide
gaguagaaguugggccugu

SEQ ID NO: 669645 - RNA, 19 nt, Artificial Sequence
  Description of Artificial Sequence: Synthetic oligonucleotide
cguacucggccaugacgcc

SEQ ID NO: 669646 - RNA, 19 nt, Artificial Sequence
  Description of Artificial Sequence: Synthetic oligonucleotide
ggacuucagccuaaggaau

SEQ ID NO: 669647 - RNA, 19 nt, Artificial Sequence
  Description of Artificial Sequence: Synthetic oligonucleotide
cccguggagcuuugcuccc

SEQ ID NO: 669648 - RNA, 19 nt, Artificial Sequence
  Description of Artificial Sequence: Synthetic oligonucleotide
ccccauugguuuuaacucu

SEQ ID NO: 669649 - RNA, 19 nt, Artificial Sequence
  Description of Artificial Sequence: Synthetic oligonucleotide
caucucucccauaccucau

SEQ ID NO: 669650 - RNA, 19 nt, Artificial Sequence
  Description of Artificial Sequence: Synthetic oligonucleotide
ccccucccgacuccagucc

SEQ ID NO: 669651 - RNA, 19 nt, Artificial Sequence
  Description of Artificial Sequence: Synthetic oligonucleotide
gguugagguuaaaaccuau

SEQ ID NO: 669652 - RNA, 19 nt, Artificial Sequence
  Description of Artificial Sequence: Synthetic oligonucleotide
gggcagguugagguuaaaa

SEQ ID NO: 669653 - RNA, 19 nt, Artificial Sequence
  Description of Artificial Sequence: Synthetic oligonucleotide
gcccaugacaagggcauaa

SEQ ID NO: 669654 - RNA, 19 nt, Artificial Sequence
  Description of Artificial Sequence: Synthetic oligonucleotide
ugggcagguugagguuaaa

SEQ ID NO: 669655 - RNA, 19 nt, Artificial Sequence
  Description of Artificial Sequence: Synthetic oligonucleotide
gagucccguacucggccau

SEQ ID NO: 669656 - RNA, 19 nt, Artificial Sequence
  Description of Artificial Sequence: Synthetic oligonucleotide
cauggcagugcggguuuaa

SEQ ID NO: 669657 - RNA, 19 nt, Artificial Sequence
  Description of Artificial Sequence: Synthetic oligonucleotide
ugccgaccgccgccucuuc

SEQ ID NO: 669658 - RNA, 19 nt, Artificial Sequence
  Description of Artificial Sequence: Synthetic oligonucleotide
gucaaccaccauagugagu

SEQ ID NO: 669659 - RNA, 19 nt, Artificial Sequence
  Description of Artificial Sequence: Synthetic oligonucleotide
agagggccuauuggcucuu

SEQ ID NO: 669660 - RNA, 19 nt, Artificial Sequence
  Description of Artificial Sequence: Synthetic oligonucleotide
cggucaagauggggaaggg

SEQ ID NO: 669661 - RNA, 19 nt, Artificial Sequence
  Description of Artificial Sequence: Synthetic oligonucleotide
gcucuggccuagacaauaa

SEQ ID NO: 669662 - RNA, 19 nt, Artificial Sequence
  Description of Artificial Sequence: Synthetic oligonucleotide
ggguugcccuagccccucc

SEQ ID NO: 669663 - RNA, 19 nt, Artificial Sequence
  Description of Artificial Sequence: Synthetic oligonucleotide
ccgccgcuccugccgaccg

SEQ ID NO: 669664 - RNA, 19 nt, Artificial Sequence
  Description of Artificial Sequence: Synthetic oligonucleotide
ggcuggguucacucacugu

SEQ ID NO: 669665 - RNA, 19 nt, Artificial Sequence
  Description of Artificial Sequence: Synthetic oligonucleotide
ggauugaacugggguggua

SEQ ID NO: 669666 - RNA, 19 nt, Artificial Sequence
  Description of Artificial Sequence: Synthetic oligonucleotide
cgcuagccagucuggcuuc

SEQ ID NO: 669667 - RNA, 19 nt, Artificial Sequence
  Description of Artificial Sequence: Synthetic oligonucleotide
gggcugccggauaaugucu

SEQ ID NO: 669668 - RNA, 19 nt, Artificial Sequence
  Description of Artificial Sequence: Synthetic oligonucleotide
cggguuuaauauacauaua

SEQ ID NO: 669669 - RNA, 19 nt, Artificial Sequence
  Description of Artificial Sequence: Synthetic oligonucleotide
cccugaauucuggguuuuc

SEQ ID NO: 669670 - RNA, 19 nt, Artificial Sequence
  Description of Artificial Sequence: Synthetic oligonucleotide
cccaugacaagggcauaaa

SEQ ID NO: 669671 - RNA, 19 nt, Artificial Sequence
  Description of Artificial Sequence: Synthetic oligonucleotide
gggguugcccuagccccuc

SEQ ID NO: 669672 - RNA, 19 nt, Artificial Sequence
  Description of Artificial Sequence: Synthetic oligonucleotide
gagggccuauuggcucuua

SEQ ID NO: 669673 - RNA, 19 nt, Artificial Sequence
  Description of Artificial Sequence: Synthetic oligonucleotide
cggguuagcuuggugucca

SEQ ID NO: 669674 - RNA, 19 nt, Artificial Sequence
  Description of Artificial Sequence: Synthetic oligonucleotide
cugcucuggccuagacaau

SEQ ID NO: 669675 - RNA, 19 nt, Artificial Sequence
  Description of Artificial Sequence: Synthetic oligonucleotide
gcguccggagccugcuucu

SEQ ID NO: 669676 - RNA, 19 nt, Artificial Sequence
  Description of Artificial Sequence: Synthetic oligonucleotide
ggauacggguuagcuuggu

SEQ ID NO: 669677 - RNA, 19 nt, Artificial Sequence
  Description of Artificial Sequence: Synthetic oligonucleotide
gcugccggauaaugucuuu

SEQ ID NO: 669678 - RNA, 19 nt, Artificial Sequence
  Description of Artificial Sequence: Synthetic oligonucleotide
ccaugacgccuccggagcu

SEQ ID NO: 669679 - RNA, 19 nt, Artificial Sequence
  Description of Artificial Sequence: Synthetic oligonucleotide
ggcugccggauaaugucuu

SEQ ID NO: 669680 - RNA, 19 nt, Artificial Sequence
  Description of Artificial Sequence: Synthetic oligonucleotide
gcucaauguaggagagguu

SEQ ID NO: 669681 - RNA, 19 nt, Artificial Sequence
  Description of Artificial Sequence: Synthetic oligonucleotide
gggguacgcuagccagucu

SEQ ID NO: 669682 - RNA, 19 nt, Artificial Sequence
  Description of Artificial Sequence: Synthetic oligonucleotide
ggcucagggucaguauauu

SEQ ID NO: 669683 - RNA, 19 nt, Artificial Sequence
  Description of Artificial Sequence: Synthetic oligonucleotide
ggcccaugacaagggcaua

SEQ ID NO: 669684 - RNA, 19 nt, Artificial Sequence
  Description of Artificial Sequence: Synthetic oligonucleotide
cccuagccccucccauuga

SEQ ID NO: 669685 - RNA, 19 nt, Artificial Sequence
  Description of Artificial Sequence: Synthetic oligonucleotide
cuagccagucuggcuucuu

SEQ ID NO: 669686 - RNA, 19 nt, Artificial Sequence
  Description of Artificial Sequence: Synthetic oligonucleotide
cggccaugacgccuccgga

SEQ ID NO: 669687 - RNA, 19 nt, Artificial Sequence
  Description of Artificial Sequence: Synthetic oligonucleotide
cgccgcuccugccgaccgc

SEQ ID NO: 669688 - RNA, 19 nt, Artificial Sequence
  Description of Artificial Sequence: Synthetic oligonucleotide
cccgguuccuaagcagcgu

SEQ ID NO: 669689 - RNA, 19 nt, Artificial Sequence
  Description of Artificial Sequence: Synthetic oligonucleotide
cagcguccggagccugcuu

SEQ ID NO: 669690 - RNA, 19 nt, Artificial Sequence
  Description of Artificial Sequence: Synthetic oligonucleotide
cguccggagccugcuucuu

SEQ ID NO: 669691 - RNA, 19 nt, Artificial Sequence
  Description of Artificial Sequence: Synthetic oligonucleotide
aauggauugcuguagaugc

SEQ ID NO: 669692 - RNA, 19 nt, Artificial Sequence
  Description of Artificial Sequence: Synthetic oligonucleotide
uguaacacugaugagaugg

SEQ ID NO: 669693 - RNA, 19 nt, Artificial Sequence
  Description of Artificial Sequence: Synthetic oligonucleotide
cuaaggaaaauucagacug

SEQ ID NO: 669694 - RNA, 19 nt, Artificial Sequence
  Description of Artificial Sequence: Synthetic oligonucleotide
gacguuaguaccuugacag

SEQ ID NO: 669695 - RNA, 19 nt, Artificial Sequence
  Description of Artificial Sequence: Synthetic oligonucleotide
uacuacguaacguagaaag

SEQ ID NO: 669696 - RNA, 19 nt, Artificial Sequence
  Description of Artificial Sequence: Synthetic oligonucleotide
agugcaauaucguauugcc

SEQ ID NO: 669697 - RNA, 19 nt, Artificial Sequence
  Description of Artificial Sequence: Synthetic oligonucleotide
ugaugaucaagucuuuucg

SEQ ID NO: 669698 - RNA, 19 nt, Artificial Sequence
  Description of Artificial Sequence: Synthetic oligonucleotide
aguauuucagucuaugcag

SEQ ID NO: 669699 - RNA, 19 nt, Artificial Sequence
  Description of Artificial Sequence: Synthetic oligonucleotide
ugcaauaucguauugccug

SEQ ID NO: 669700 - RNA, 19 nt, Artificial Sequence
  Description of Artificial Sequence: Synthetic oligonucleotide
aaauucagacuguugacug

SEQ ID NO: 669701 - RNA, 19 nt, Artificial Sequence
  Description of Artificial Sequence: Synthetic oligonucleotide
agaguuauaaagugauuac

SEQ ID NO: 669702 - RNA, 19 nt, Artificial Sequence
  Description of Artificial Sequence: Synthetic oligonucleotide
gacauauagugcaauaucg

SEQ ID NO: 669703 - RNA, 19 nt, Artificial Sequence
  Description of Artificial Sequence: Synthetic oligonucleotide
ucuuagucuucgaugaggg

SEQ ID NO: 669704 - RNA, 19 nt, Artificial Sequence
  Description of Artificial Sequence: Synthetic oligonucleotide
uuuaacugaccacagaguc

SEQ ID NO: 669705 - RNA, 19 nt, Artificial Sequence
  Description of Artificial Sequence: Synthetic oligonucleotide
ucagcuauuuuauuggagc

SEQ ID NO: 669706 - RNA, 19 nt, Artificial Sequence
  Description of Artificial Sequence: Synthetic oligonucleotide
uguuaugugagccacaauu

SEQ ID NO: 669707 - RNA, 19 nt, Artificial Sequence
  Description of Artificial Sequence: Synthetic oligonucleotide
aguuaauuuaacugaccac

SEQ ID NO: 669708 - RNA, 19 nt, Artificial Sequence
  Description of Artificial Sequence: Synthetic oligonucleotide
ugucuggaagaaaagauga

SEQ ID NO: 669709 - RNA, 19 nt, Artificial Sequence
  Description of Artificial Sequence: Synthetic oligonucleotide
uguggaguuguucagaaaa

SEQ ID NO: 669710 - RNA, 19 nt, Artificial Sequence
  Description of Artificial Sequence: Synthetic oligonucleotide
uugacuagccacuugauaa

SEQ ID NO: 669711 - RNA, 19 nt, Artificial Sequence
  Description of Artificial Sequence: Synthetic oligonucleotide
ggaaauguuggacauauag

SEQ ID NO: 669712 - RNA, 19 nt, Artificial Sequence
  Description of Artificial Sequence: Synthetic oligonucleotide
uguuuaagacacauuugag

SEQ ID NO: 669713 - RNA, 19 nt, Artificial Sequence
  Description of Artificial Sequence: Synthetic oligonucleotide
uacguaacguagaaagagg

SEQ ID NO: 669714 - RNA, 19 nt, Artificial Sequence
  Description of Artificial Sequence: Synthetic oligonucleotide
aacaagugcacuuugucuu

SEQ ID NO: 669715 - RNA, 19 nt, Artificial Sequence
  Description of Artificial Sequence: Synthetic oligonucleotide
uuugaguaugcuaggauaa

SEQ ID NO: 669716 - RNA, 19 nt, Artificial Sequence
  Description of Artificial Sequence: Synthetic oligonucleotide
ugaugagaugguuuagccg

SEQ ID NO: 669717 - RNA, 19 nt, Artificial Sequence
  Description of Artificial Sequence: Synthetic oligonucleotide
aagucuaauauagaaugug

SEQ ID NO: 669718 - RNA, 19 nt, Artificial Sequence
  Description of Artificial Sequence: Synthetic oligonucleotide
uagaaagaggacucguccg

SEQ ID NO: 669719 - RNA, 19 nt, Artificial Sequence
  Description of Artificial Sequence: Synthetic oligonucleotide
uguauaccccaacuugugg

SEQ ID NO: 669720 - RNA, 19 nt, Artificial Sequence
  Description of Artificial Sequence: Synthetic oligonucleotide
uguucagaaaauagagggc

SEQ ID NO: 669721 - RNA, 19 nt, Artificial Sequence
  Description of Artificial Sequence: Synthetic oligonucleotide
ucuguacuacguaacguag

SEQ ID NO: 669722 - RNA, 19 nt, Artificial Sequence
  Description of Artificial Sequence: Synthetic oligonucleotide
aaauaucuacugaagaaga

SEQ ID NO: 669723 - RNA, 19 nt, Artificial Sequence
  Description of Artificial Sequence: Synthetic oligonucleotide
uaagaaguauuucagucua

SEQ ID NO: 669724 - RNA, 19 nt, Artificial Sequence
  Description of Artificial Sequence: Synthetic oligonucleotide
ugcacuuugucuuggagcu

SEQ ID NO: 669725 - RNA, 19 nt, Artificial Sequence
  Description of Artificial Sequence: Synthetic oligonucleotide
guauucuugguacucagug

SEQ ID NO: 669726 - RNA, 19 nt, Artificial Sequence
  Description of Artificial Sequence: Synthetic oligonucleotide
uuaucugacugacacuuga

SEQ ID NO: 669727 - RNA, 19 nt, Artificial Sequence
  Description of Artificial Sequence: Synthetic oligonucleotide
agagucauaucauaggcaa

SEQ ID NO: 669728 - RNA, 19 nt, Artificial Sequence
  Description of Artificial Sequence: Synthetic oligonucleotide
agaaagaggacucguccgg

SEQ ID NO: 669729 - RNA, 19 nt, Artificial Sequence
  Description of Artificial Sequence: Synthetic oligonucleotide
uggggugagacaaagucca

SEQ ID NO: 669730 - RNA, 19 nt, Artificial Sequence
  Description of Artificial Sequence: Synthetic oligonucleotide
ucaauaguguuugucacca

SEQ ID NO: 669731 - RNA, 19 nt, Artificial Sequence
  Description of Artificial Sequence: Synthetic oligonucleotide
cuugcagcgcagaaggugg

SEQ ID NO: 669732 - RNA, 19 nt, Artificial Sequence
  Description of Artificial Sequence: Synthetic oligonucleotide
uguacuacguaacguagaa

SEQ ID NO: 669733 - RNA, 19 nt, Artificial Sequence
  Description of Artificial Sequence: Synthetic oligonucleotide
uaucagguauuaaugucug

SEQ ID NO: 669734 - RNA, 19 nt, Artificial Sequence
  Description of Artificial Sequence: Synthetic oligonucleotide
uucgaucaaucacugaacu

SEQ ID NO: 669735 - RNA, 19 nt, Artificial Sequence
  Description of Artificial Sequence: Synthetic oligonucleotide
aaugucuggaagaaaagau

SEQ ID NO: 669736 - RNA, 19 nt, Artificial Sequence
  Description of Artificial Sequence: Synthetic oligonucleotide
cuacguaacguagaaagag

SEQ ID NO: 669737 - RNA, 19 nt, Artificial Sequence
  Description of Artificial Sequence: Synthetic oligonucleotide
agucuaugcaggcaagguc

SEQ ID NO: 669738 - RNA, 19 nt, Artificial Sequence
  Description of Artificial Sequence: Synthetic oligonucleotide
uguacuggaggucguaaga

SEQ ID NO: 669739 - RNA, 19 nt, Artificial Sequence
  Description of Artificial Sequence: Synthetic oligonucleotide
cauucuuagucuucgauga

SEQ ID NO: 669740 - RNA, 19 nt, Artificial Sequence
  Description of Artificial Sequence: Synthetic oligonucleotide
uuucgaucaaucacugaac

SEQ ID NO: 669741 - RNA, 19 nt, Artificial Sequence
  Description of Artificial Sequence: Synthetic oligonucleotide
uauagugcaauaucguauu

SEQ ID NO: 669742 - RNA, 19 nt, Artificial Sequence
  Description of Artificial Sequence: Synthetic oligonucleotide
uuaugugagccacaauuuc

SEQ ID NO: 669743 - RNA, 19 nt, Artificial Sequence
  Description of Artificial Sequence: Synthetic oligonucleotide
uaucguauugccuguuuca

SEQ ID NO: 669744 - RNA, 19 nt, Artificial Sequence
  Description of Artificial Sequence: Synthetic oligonucleotide
cuuguaucugggcaggccc

SEQ ID NO: 669745 - RNA, 19 nt, Artificial Sequence
  Description of Artificial Sequence: Synthetic oligonucleotide
acuguugacugcaucacac

SEQ ID NO: 669746 - RNA, 19 nt, Artificial Sequence
  Description of Artificial Sequence: Synthetic oligonucleotide
auuugaguaugcuaggaua

SEQ ID NO: 669747 - RNA, 19 nt, Artificial Sequence
  Description of Artificial Sequence: Synthetic oligonucleotide
uacuacuuucucaauccug

SEQ ID NO: 669748 - RNA, 19 nt, Artificial Sequence
  Description of Artificial Sequence: Synthetic oligonucleotide
accuugacagauguaacac

SEQ ID NO: 669749 - RNA, 19 nt, Artificial Sequence
  Description of Artificial Sequence: Synthetic oligonucleotide
guaacuggacaacaggaac

SEQ ID NO: 669750 - RNA, 19 nt, Artificial Sequence
  Description of Artificial Sequence: Synthetic oligonucleotide
ugucacaugacagaacggu

SEQ ID NO: 669751 - RNA, 19 nt, Artificial Sequence
  Description of Artificial Sequence: Synthetic oligonucleotide
auaguguuugucaccauuc

SEQ ID NO: 669752 - RNA, 19 nt, Artificial Sequence
  Description of Artificial Sequence: Synthetic oligonucleotide
aaagucuaauauagaaugu

SEQ ID NO: 669753 - RNA, 19 nt, Artificial Sequence
  Description of Artificial Sequence: Synthetic oligonucleotide
uuguauaccccaacuugug

SEQ ID NO: 669754 - RNA, 19 nt, Artificial Sequence
  Description of Artificial Sequence: Synthetic oligonucleotide
cacugaacuccguaggugc

SEQ ID NO: 669755 - RNA, 19 nt, Artificial Sequence
  Description of Artificial Sequence: Synthetic oligonucleotide
uggguucuaauuucugacc

SEQ ID NO: 669756 - RNA, 19 nt, Artificial Sequence
  Description of Artificial Sequence: Synthetic oligonucleotide
uaccuugacagauguaaca

SEQ ID NO: 669757 - RNA, 19 nt, Artificial Sequence
  Description of Artificial Sequence: Synthetic oligonucleotide
agcaggauuuucuggaugu

SEQ ID NO: 669758 - RNA, 19 nt, Artificial Sequence
  Description of Artificial Sequence: Synthetic oligonucleotide
agaagaguuauaaagugau

SEQ ID NO: 669759 - RNA, 19 nt, Artificial Sequence
  Description of Artificial Sequence: Synthetic oligonucleotide
caccuuguauguuuaagac

SEQ ID NO: 669760 - RNA, 19 nt, Artificial Sequence
  Description of Artificial Sequence: Synthetic oligonucleotide
gaugaucaagucuuuucga

SEQ ID NO: 669761 - RNA, 19 nt, Artificial Sequence
  Description of Artificial Sequence: Synthetic oligonucleotide
agucugaguaccaucuugg

SEQ ID NO: 669762 - RNA, 19 nt, Artificial Sequence
  Description of Artificial Sequence: Synthetic oligonucleotide
ugaucaagucuuuucgauc

SEQ ID NO: 669763 - RNA, 19 nt, Artificial Sequence
  Description of Artificial Sequence: Synthetic oligonucleotide
uucaacaagugcacuuugu

SEQ ID NO: 669764 - RNA, 19 nt, Artificial Sequence
  Description of Artificial Sequence: Synthetic oligonucleotide
agaaguauuucagucuaug

SEQ ID NO: 669765 - RNA, 19 nt, Artificial Sequence
  Description of Artificial Sequence: Synthetic oligonucleotide
ucaaucacugaacuccgua

SEQ ID NO: 669766 - RNA, 19 nt, Artificial Sequence
  Description of Artificial Sequence: Synthetic oligonucleotide
cacauuugaguaugcuagg

SEQ ID NO: 669767 - RNA, 19 nt, Artificial Sequence
  Description of Artificial Sequence: Synthetic oligonucleotide
auaaagugauuacagccua

SEQ ID NO: 669768 - RNA, 19 nt, Artificial Sequence
  Description of Artificial Sequence: Synthetic oligonucleotide
uagugcaauaucguauugc

SEQ ID NO: 669769 - RNA, 19 nt, Artificial Sequence
  Description of Artificial Sequence: Synthetic oligonucleotide
ucguaagaaguauuucagu

SEQ ID NO: 669770 - RNA, 19 nt, Artificial Sequence
  Description of Artificial Sequence: Synthetic oligonucleotide
caugacagaacgguguuug

SEQ ID NO: 669771 - RNA, 19 nt, Artificial Sequence
  Description of Artificial Sequence: Synthetic oligonucleotide
aauaucguauugccuguuu

SEQ ID NO: 669772 - RNA, 19 nt, Artificial Sequence
  Description of Artificial Sequence: Synthetic oligonucleotide
cucagcuauuuuauuggag

SEQ ID NO: 669773 - RNA, 19 nt, Artificial Sequence
  Description of Artificial Sequence: Synthetic oligonucleotide
augaucaagucuuuucgau

SEQ ID NO: 669774 - RNA, 19 nt, Artificial Sequence
  Description of Artificial Sequence: Synthetic oligonucleotide
uaaagugauuacagccuac

SEQ ID NO: 669775 - RNA, 19 nt, Artificial Sequence
  Description of Artificial Sequence: Synthetic oligonucleotide
uauacaccuuguauguuua

SEQ ID NO: 669776 - RNA, 19 nt, Artificial Sequence
  Description of Artificial Sequence: Synthetic oligonucleotide
uuagccgagggucuuucac

SEQ ID NO: 669777 - RNA, 19 nt, Artificial Sequence
  Description of Artificial Sequence: Synthetic oligonucleotide
cuucuaaguagcuggcgac

SEQ ID NO: 669778 - RNA, 19 nt, Artificial Sequence
  Description of Artificial Sequence: Synthetic oligonucleotide
auauagugcaauaucguau

SEQ ID NO: 669779 - RNA, 19 nt, Artificial Sequence
  Description of Artificial Sequence: Synthetic oligonucleotide
ucagucuaugcaggcaagg

SEQ ID NO: 669780 - RNA, 19 nt, Artificial Sequence
  Description of Artificial Sequence: Synthetic oligonucleotide
ucgcuggcagcuuucauga

SEQ ID NO: 669781 - RNA, 19 nt, Artificial Sequence
  Description of Artificial Sequence: Synthetic oligonucleotide
cacaauuucucuggguggg

SEQ ID NO: 669782 - RNA, 19 nt, Artificial Sequence
  Description of Artificial Sequence: Synthetic oligonucleotide
gacguagguaagcaguuuc

SEQ ID NO: 669783 - RNA, 19 nt, Artificial Sequence
  Description of Artificial Sequence: Synthetic oligonucleotide
ucaaguccgcagcauagaa

SEQ ID NO: 669784 - RNA, 19 nt, Artificial Sequence
  Description of Artificial Sequence: Synthetic oligonucleotide
uguauguuuaagacacauu

SEQ ID NO: 669785 - RNA, 19 nt, Artificial Sequence
  Description of Artificial Sequence: Synthetic oligonucleotide
ugcucgaccagcucauccc

SEQ ID NO: 669786 - RNA, 19 nt, Artificial Sequence
  Description of Artificial Sequence: Synthetic oligonucleotide
uaguguuugucaccauucu

SEQ ID NO: 669787 - RNA, 19 nt, Artificial Sequence
  Description of Artificial Sequence: Synthetic oligonucleotide
uucgaugagggauggguuc

SEQ ID NO: 669788 - RNA, 19 nt, Artificial Sequence
  Description of Artificial Sequence: Synthetic oligonucleotide
uuacaagucuggcugccuc

SEQ ID NO: 669789 - RNA, 19 nt, Artificial Sequence
  Description of Artificial Sequence: Synthetic oligonucleotide
acguagguaagcaguuucc

SEQ ID NO: 669790 - RNA, 19 nt, Artificial Sequence
  Description of Artificial Sequence: Synthetic oligonucleotide
ggguucuaauuucugaccc

SEQ ID NO: 669791 - RNA, 19 nt, Artificial Sequence
  Description of Artificial Sequence: Synthetic oligonucleotide
auguacuggaggucguaag

SEQ ID NO: 669792 - RNA, 19 nt, Artificial Sequence
  Description of Artificial Sequence: Synthetic oligonucleotide
uccguaggugcucucucag

SEQ ID NO: 669793 - RNA, 19 nt, Artificial Sequence
  Description of Artificial Sequence: Synthetic oligonucleotide
cuuggggcuguguuaauuc

SEQ ID NO: 669794 - RNA, 19 nt, Artificial Sequence
  Description of Artificial Sequence: Synthetic oligonucleotide
aaacaggacguuaguaccu

SEQ ID NO: 669795 - RNA, 19 nt, Artificial Sequence
  Description of Artificial Sequence: Synthetic oligonucleotide
cacuugauaacaucucuga

SEQ ID NO: 669796 - RNA, 19 nt, Artificial Sequence
  Description of Artificial Sequence: Synthetic oligonucleotide
acucagugcuuacaagucu

SEQ ID NO: 669797 - RNA, 19 nt, Artificial Sequence
  Description of Artificial Sequence: Synthetic oligonucleotide
guauugccuguuucaaaag

SEQ ID NO: 669798 - RNA, 19 nt, Artificial Sequence
  Description of Artificial Sequence: Synthetic oligonucleotide
uggacauauagugcaauau

SEQ ID NO: 669799 - RNA, 19 nt, Artificial Sequence
  Description of Artificial Sequence: Synthetic oligonucleotide
uucagucacugcuuugacu

SEQ ID NO: 669800 - RNA, 19 nt, Artificial Sequence
  Description of Artificial Sequence: Synthetic oligonucleotide
uuucaugacuccuguuccu

SEQ ID NO: 669801 - RNA, 19 nt, Artificial Sequence
  Description of Artificial Sequence: Synthetic oligonucleotide
cuagccacuugauaacauc

SEQ ID NO: 669802 - RNA, 19 nt, Artificial Sequence
  Description of Artificial Sequence: Synthetic oligonucleotide
auucuuagucuucgaugag

SEQ ID NO: 669803 - RNA, 19 nt, Artificial Sequence
  Description of Artificial Sequence: Synthetic oligonucleotide
caauggauugcuguagaug

SEQ ID NO: 669804 - RNA, 19 nt, Artificial Sequence
  Description of Artificial Sequence: Synthetic oligonucleotide
auagugcaauaucguauug

SEQ ID NO: 669805 - RNA, 19 nt, Artificial Sequence
  Description of Artificial Sequence: Synthetic oligonucleotide
caaguccgcagcauagaag

SEQ ID NO: 669806 - RNA, 19 nt, Artificial Sequence
  Description of Artificial Sequence: Synthetic oligonucleotide
cauauagugcaauaucgua

SEQ ID NO: 669807 - RNA, 19 nt, Artificial Sequence
  Description of Artificial Sequence: Synthetic oligonucleotide
caggguucaaguccgcagc

SEQ ID NO: 669808 - RNA, 19 nt, Artificial Sequence
  Description of Artificial Sequence: Synthetic oligonucleotide
caauccggagguauucuug

SEQ ID NO: 669809 - RNA, 19 nt, Artificial Sequence
  Description of Artificial Sequence: Synthetic oligonucleotide
acauauagugcaauaucgu

SEQ ID NO: 669810 - RNA, 19 nt, Artificial Sequence
  Description of Artificial Sequence: Synthetic oligonucleotide
cugacacacaaccagcuga

SEQ ID NO: 669811 - RNA, 19 nt, Artificial Sequence
  Description of Artificial Sequence: Synthetic oligonucleotide
cgaucaaucacugaacucc

SEQ ID NO: 669812 - RNA, 19 nt, Artificial Sequence
  Description of Artificial Sequence: Synthetic oligonucleotide
guaacguagaaagaggacu

SEQ ID NO: 669813 - RNA, 19 nt, Artificial Sequence
  Description of Artificial Sequence: Synthetic oligonucleotide
gauguuaugugagccacaa

SEQ ID NO: 669814 - RNA, 19 nt, Artificial Sequence
  Description of Artificial Sequence: Synthetic oligonucleotide
uguuggacauauagugcaa

SEQ ID NO: 669815 - RNA, 19 nt, Artificial Sequence
  Description of Artificial Sequence: Synthetic oligonucleotide
auuuaacugaccacagagu

SEQ ID NO: 669816 - RNA, 19 nt, Artificial Sequence
  Description of Artificial Sequence: Synthetic oligonucleotide
gauguaacacugaugagau

SEQ ID NO: 669817 - RNA, 19 nt, Artificial Sequence
  Description of Artificial Sequence: Synthetic oligonucleotide
ucgaucaaucacugaacuc

SEQ ID NO: 669818 - RNA, 19 nt, Artificial Sequence
  Description of Artificial Sequence: Synthetic oligonucleotide
uauaccccaacuuguggua

SEQ ID NO: 669819 - RNA, 19 nt, Artificial Sequence
  Description of Artificial Sequence: Synthetic oligonucleotide
cuguugacugcaucacacc

SEQ ID NO: 669820 - RNA, 19 nt, Artificial Sequence
  Description of Artificial Sequence: Synthetic oligonucleotide
uacaagucuggcugccuca

SEQ ID NO: 669821 - RNA, 19 nt, Artificial Sequence
  Description of Artificial Sequence: Synthetic oligonucleotide
auauagaaugugcucuauu

SEQ ID NO: 669822 - RNA, 19 nt, Artificial Sequence
  Description of Artificial Sequence: Synthetic oligonucleotide
uucuaaguagcuggcgaca

SEQ ID NO: 669823 - RNA, 19 nt, Artificial Sequence
  Description of Artificial Sequence: Synthetic oligonucleotide
ugugagccacaauuucucu

SEQ ID NO: 669824 - RNA, 19 nt, Artificial Sequence
  Description of Artificial Sequence: Synthetic oligonucleotide
accagcugauugguguucc

SEQ ID NO: 669825 - RNA, 19 nt, Artificial Sequence
  Description of Artificial Sequence: Synthetic oligonucleotide
guuaguaccuugacagaug

SEQ ID NO: 669826 - RNA, 19 nt, Artificial Sequence
  Description of Artificial Sequence: Synthetic oligonucleotide
cuguguuaauucauuuuca

SEQ ID NO: 669827 - RNA, 19 nt, Artificial Sequence
  Description of Artificial Sequence: Synthetic oligonucleotide
cagucucagagccacugag

SEQ ID NO: 669828 - RNA, 19 nt, Artificial Sequence
  Description of Artificial Sequence: Synthetic oligonucleotide
uccagucccauuccacugu

SEQ ID NO: 669829 - RNA, 19 nt, Artificial Sequence
  Description of Artificial Sequence: Synthetic oligonucleotide
gcuguuugucacaugacag

SEQ ID NO: 669830 - RNA, 19 nt, Artificial Sequence
  Description of Artificial Sequence: Synthetic oligonucleotide
uggcuuuuaucugacugac

SEQ ID NO: 669831 - RNA, 19 nt, Artificial Sequence
  Description of Artificial Sequence: Synthetic oligonucleotide
guuugcaauggauugcugu

SEQ ID NO: 669832 - RNA, 19 nt, Artificial Sequence
  Description of Artificial Sequence: Synthetic oligonucleotide
aggucguaagaaguauuuc

SEQ ID NO: 669833 - RNA, 19 nt, Artificial Sequence
  Description of Artificial Sequence: Synthetic oligonucleotide
aacgguguuugcaauggau

SEQ ID NO: 669834 - RNA, 19 nt, Artificial Sequence
  Description of Artificial Sequence: Synthetic oligonucleotide
uagccgagggucuuucaca

SEQ ID NO: 669835 - RNA, 19 nt, Artificial Sequence
  Description of Artificial Sequence: Synthetic oligonucleotide
ucagagcuucuaaguagcu

SEQ ID NO: 669836 - RNA, 19 nt, Artificial Sequence
  Description of Artificial Sequence: Synthetic oligonucleotide
agcuucaacaagugcacuu

SEQ ID NO: 669837 - RNA, 19 nt, Artificial Sequence
  Description of Artificial Sequence: Synthetic oligonucleotide
acguaacguagaaagagga

SEQ ID NO: 669838 - RNA, 19 nt, Artificial Sequence
  Description of Artificial Sequence: Synthetic oligonucleotide
gagccacaauuucucuggg

SEQ ID NO: 669839 - RNA, 19 nt, Artificial Sequence
  Description of Artificial Sequence: Synthetic oligonucleotide
acauuugaguaugcuagga

SEQ ID NO: 669840 - RNA, 19 nt, Artificial Sequence
  Description of Artificial Sequence: Synthetic oligonucleotide
agggucuguacuacguaac

SEQ ID NO: 669841 - RNA, 19 nt, Artificial Sequence
  Description of Artificial Sequence: Synthetic oligonucleotide
uggcuaagcuguccguggc

SEQ ID NO: 669842 - RNA, 19 nt, Artificial Sequence
  Description of Artificial Sequence: Synthetic oligonucleotide
gucuguacuacguaacgua

SEQ ID NO: 669843 - RNA, 19 nt, Artificial Sequence
  Description of Artificial Sequence: Synthetic oligonucleotide
gcuggcgacaauccggagg

SEQ ID NO: 669844 - RNA, 19 nt, Artificial Sequence
  Description of Artificial Sequence: Synthetic oligonucleotide
agguaggaguccugucaac

SEQ ID NO: 669845 - RNA, 19 nt, Artificial Sequence
  Description of Artificial Sequence: Synthetic oligonucleotide
gggucuguacuacguaacg

SEQ ID NO: 669846 - RNA, 19 nt, Artificial Sequence
  Description of Artificial Sequence: Synthetic oligonucleotide
uggaguuguucagaaaaua

SEQ ID NO: 669847 - RNA, 19 nt, Artificial Sequence
  Description of Artificial Sequence: Synthetic oligonucleotide
ucucaauccugguucucuc

SEQ ID NO: 669848 - RNA, 19 nt, Artificial Sequence
  Description of Artificial Sequence: Synthetic oligonucleotide
cucagcacaugcugguaac

SEQ ID NO: 669849 - RNA, 19 nt, Artificial Sequence
  Description of Artificial Sequence: Synthetic oligonucleotide
gcuuugacuagccacuuga

SEQ ID NO: 669850 - RNA, 19 nt, Artificial Sequence
  Description of Artificial Sequence: Synthetic oligonucleotide
ucucccgugugucuuuauc

SEQ ID NO: 669851 - RNA, 19 nt, Artificial Sequence
  Description of Artificial Sequence: Synthetic oligonucleotide
cuguugaauuuucaugaga

SEQ ID NO: 669852 - RNA, 19 nt, Artificial Sequence
  Description of Artificial Sequence: Synthetic oligonucleotide
uggggagacagguggucgc

SEQ ID NO: 669853 - RNA, 19 nt, Artificial Sequence
  Description of Artificial Sequence: Synthetic oligonucleotide
ucguauugccuguuucaaa

SEQ ID NO: 669854 - RNA, 19 nt, Artificial Sequence
  Description of Artificial Sequence: Synthetic oligonucleotide
auguuggggugagacaaag

SEQ ID NO: 669855 - RNA, 19 nt, Artificial Sequence
  Description of Artificial Sequence: Synthetic oligonucleotide
guauaccccaacuuguggu

SEQ ID NO: 669856 - RNA, 19 nt, Artificial Sequence
  Description of Artificial Sequence: Synthetic oligonucleotide
uggguaauguuggggugag

SEQ ID NO: 669857 - RNA, 19 nt, Artificial Sequence
  Description of Artificial Sequence: Synthetic oligonucleotide
uucaaguccgcagcauaga

SEQ ID NO: 669858 - RNA, 19 nt, Artificial Sequence
  Description of Artificial Sequence: Synthetic oligonucleotide
acuacguaacguagaaaga

SEQ ID NO: 669859 - RNA, 19 nt, Artificial Sequence
  Description of Artificial Sequence: Synthetic oligonucleotide
ugaacuccguaggugcucu

SEQ ID NO: 669860 - RNA, 19 nt, Artificial Sequence
  Description of Artificial Sequence: Synthetic oligonucleotide
ugacccuugcucucccgug

SEQ ID NO: 669861 - RNA, 19 nt, Artificial Sequence
  Description of Artificial Sequence: Synthetic oligonucleotide
ccacaauuucucugggugg

SEQ ID NO: 669862 - RNA, 19 nt, Artificial Sequence
  Description of Artificial Sequence: Synthetic oligonucleotide
agucuucgaugagggaugg

SEQ ID NO: 669863 - RNA, 19 nt, Artificial Sequence
  Description of Artificial Sequence: Synthetic oligonucleotide
ucgaugagggauggguucu

SEQ ID NO: 669864 - RNA, 19 nt, Artificial Sequence
  Description of Artificial Sequence: Synthetic oligonucleotide
uuuagccgagggucuuuca

SEQ ID NO: 669865 - RNA, 19 nt, Artificial Sequence
  Description of Artificial Sequence: Synthetic oligonucleotide
uggggcuguguuaauucau

SEQ ID NO: 669866 - RNA, 19 nt, Artificial Sequence
  Description of Artificial Sequence: Synthetic oligonucleotide
guuguauaccccaacuugu

SEQ ID NO: 669867 - RNA, 19 nt, Artificial Sequence
  Description of Artificial Sequence: Synthetic oligonucleotide
cagguauuaaugucuggaa

SEQ ID NO: 669868 - RNA, 19 nt, Artificial Sequence
  Description of Artificial Sequence: Synthetic oligonucleotide
cuguacuacguaacguaga

SEQ ID NO: 669869 - RNA, 19 nt, Artificial Sequence
  Description of Artificial Sequence: Synthetic oligonucleotide
gagguauucuugguacuca

SEQ ID NO: 669870 - RNA, 19 nt, Artificial Sequence
  Description of Artificial Sequence: Synthetic oligonucleotide
agacacauuugaguaugcu

SEQ ID NO: 669871 - RNA, 19 nt, Artificial Sequence
  Description of Artificial Sequence: Synthetic oligonucleotide
gacuagccacuugauaaca

SEQ ID NO: 669872 - RNA, 19 nt, Artificial Sequence
  Description of Artificial Sequence: Synthetic oligonucleotide
gucuguuguauaccccaac

SEQ ID NO: 669873 - RNA, 19 nt, Artificial Sequence
  Description of Artificial Sequence: Synthetic oligonucleotide
aacaggacguuaguaccuu

SEQ ID NO: 669874 - RNA, 19 nt, Artificial Sequence
  Description of Artificial Sequence: Synthetic oligonucleotide
auguaacacugaugagaug

SEQ ID NO: 669875 - RNA, 19 nt, Artificial Sequence
  Description of Artificial Sequence: Synthetic oligonucleotide
acaaggggagacggguggg

SEQ ID NO: 669876 - RNA, 19 nt, Artificial Sequence
  Description of Artificial Sequence: Synthetic oligonucleotide
acaggacguuaguaccuug

SEQ ID NO: 669877 - RNA, 19 nt, Artificial Sequence
  Description of Artificial Sequence: Synthetic oligonucleotide
aucguauugccuguuucaa

SEQ ID NO: 669878 - RNA, 19 nt, Artificial Sequence
  Description of Artificial Sequence: Synthetic oligonucleotide
guaggugcucucucagcac

SEQ ID NO: 669879 - RNA, 19 nt, Artificial Sequence
  Description of Artificial Sequence: Synthetic oligonucleotide
guaccuugacagauguaac

SEQ ID NO: 669880 - RNA, 19 nt, Artificial Sequence
  Description of Artificial Sequence: Synthetic oligonucleotide
agccgagggucuuucacau

SEQ ID NO: 669881 - RNA, 19 nt, Artificial Sequence
  Description of Artificial Sequence: Synthetic oligonucleotide
gguaagcaguuuccagucc

SEQ ID NO: 669882 - RNA, 19 nt, Artificial Sequence
  Description of Artificial Sequence: Synthetic oligonucleotide
gggugucucacaacugugg

SEQ ID NO: 669883 - RNA, 19 nt, Artificial Sequence
  Description of Artificial Sequence: Synthetic oligonucleotide
acguagaaagaggacucgu

SEQ ID NO: 669884 - RNA, 19 nt, Artificial Sequence
  Description of Artificial Sequence: Synthetic oligonucleotide
caggacguuaguaccuuga

SEQ ID NO: 669885 - RNA, 19 nt, Artificial Sequence
  Description of Artificial Sequence: Synthetic oligonucleotide
ccggagguauucuugguac

SEQ ID NO: 669886 - RNA, 19 nt, Artificial Sequence
  Description of Artificial Sequence: Synthetic oligonucleotide
cuuuucgaucaaucacuga

SEQ ID NO: 669887 - RNA, 19 nt, Artificial Sequence
  Description of Artificial Sequence: Synthetic oligonucleotide
cagugcuuacaagucuggc

SEQ ID NO: 669888 - RNA, 19 nt, Artificial Sequence
  Description of Artificial Sequence: Synthetic oligonucleotide
acgggugggugucucacaa

SEQ ID NO: 669889 - RNA, 19 nt, Artificial Sequence
  Description of Artificial Sequence: Synthetic oligonucleotide
cacaaccagcugauuggug

SEQ ID NO: 669890 - RNA, 19 nt, Artificial Sequence
  Description of Artificial Sequence: Synthetic oligonucleotide
ugcuaggauaaggauuaua

SEQ ID NO: 669891 - RNA, 19 nt, Artificial Sequence
  Description of Artificial Sequence: Synthetic oligonucleotide
gggcuugauucuuuugaug

SEQ ID NO: 669892 - RNA, 19 nt, Artificial Sequence
  Description of Artificial Sequence: Synthetic oligonucleotide
cuccucaagaucugcugga

SEQ ID NO: 669893 - RNA, 19 nt, Artificial Sequence
  Description of Artificial Sequence: Synthetic oligonucleotide
aggggagacgggugggugu

SEQ ID NO: 669894 - RNA, 19 nt, Artificial Sequence
  Description of Artificial Sequence: Synthetic oligonucleotide
cagguuagguuggggagac

SEQ ID NO: 669895 - RNA, 19 nt, Artificial Sequence
  Description of Artificial Sequence: Synthetic oligonucleotide
ggaggaauaugaucucuaa

SEQ ID NO: 669896 - RNA, 19 nt, Artificial Sequence
  Description of Artificial Sequence: Synthetic oligonucleotide
gacucguccgggcagaguu

SEQ ID NO: 669897 - RNA, 19 nt, Artificial Sequence
  Description of Artificial Sequence: Synthetic oligonucleotide
ggacguuaguaccuugaca

SEQ ID NO: 669898 - RNA, 19 nt, Artificial Sequence
  Description of Artificial Sequence: Synthetic oligonucleotide
augguuuagccgagggucu

SEQ ID NO: 669899 - RNA, 19 nt, Artificial Sequence
  Description of Artificial Sequence: Synthetic oligonucleotide
uccucaagaucugcuggaa

SEQ ID NO: 669900 - RNA, 19 nt, Artificial Sequence
  Description of Artificial Sequence: Synthetic oligonucleotide
ugccccguaguggaguuaa

SEQ ID NO: 669901 - RNA, 19 nt, Artificial Sequence
  Description of Artificial Sequence: Synthetic oligonucleotide
guaugcuaggauaaggauu

SEQ ID NO: 669902 - RNA, 19 nt, Artificial Sequence
  Description of Artificial Sequence: Synthetic oligonucleotide
guggguaauguugggguga

SEQ ID NO: 669903 - RNA, 19 nt, Artificial Sequence
  Description of Artificial Sequence: Synthetic oligonucleotide
cuggcgacaauccggaggu

SEQ ID NO: 669904 - RNA, 19 nt, Artificial Sequence
  Description of Artificial Sequence: Synthetic oligonucleotide
auacaccuuguauguuuaa

SEQ ID NO: 669905 - RNA, 19 nt, Artificial Sequence
  Description of Artificial Sequence: Synthetic oligonucleotide
gcuaagcuguccguggcag

SEQ ID NO: 669906 - RNA, 19 nt, Artificial Sequence
  Description of Artificial Sequence: Synthetic oligonucleotide
guaggaguccugucaaccu

SEQ ID NO: 669907 - RNA, 19 nt, Artificial Sequence
  Description of Artificial Sequence: Synthetic oligonucleotide
agcgcagaagguggcuuuc

SEQ ID NO: 669908 - RNA, 19 nt, Artificial Sequence
  Description of Artificial Sequence: Synthetic oligonucleotide
cagggucuguacuacguaa

SEQ ID NO: 669909 - RNA, 19 nt, Artificial Sequence
  Description of Artificial Sequence: Synthetic oligonucleotide
gaacgguguuugcaaugga

SEQ ID NO: 669910 - RNA, 19 nt, Artificial Sequence
  Description of Artificial Sequence: Synthetic oligonucleotide
acgguguuugcaauggauu

SEQ ID NO: 669911 - RNA, 19 nt, Artificial Sequence
  Description of Artificial Sequence: Synthetic oligonucleotide
uggaaauguuggacauaua

SEQ ID NO: 669912 - RNA, 19 nt, Artificial Sequence
  Description of Artificial Sequence: Synthetic oligonucleotide
auccggagguauucuuggu

SEQ ID NO: 669913 - RNA, 19 nt, Artificial Sequence
  Description of Artificial Sequence: Synthetic oligonucleotide
gcaaggucuguuguauacc

SEQ ID NO: 669914 - RNA, 19 nt, Artificial Sequence
  Description of Artificial Sequence: Synthetic oligonucleotide
gugucuuuaucagguauua

SEQ ID NO: 669915 - RNA, 19 nt, Artificial Sequence
  Description of Artificial Sequence: Synthetic oligonucleotide
cguaacguagaaagaggac

SEQ ID NO: 669916 - RNA, 19 nt, Artificial Sequence
  Description of Artificial Sequence: Synthetic oligonucleotide
gucucacaacuguggagga

SEQ ID NO: 669917 - RNA, 19 nt, Artificial Sequence
  Description of Artificial Sequence: Synthetic oligonucleotide
cguauugccuguuucaaaa

SEQ ID NO: 669918 - RNA, 19 nt, Artificial Sequence
  Description of Artificial Sequence: Synthetic oligonucleotide
cgguguuugcaauggauug

SEQ ID NO: 669919 - RNA, 19 nt, Artificial Sequence
  Description of Artificial Sequence: Synthetic oligonucleotide
cuacugaagaagaguuaua

SEQ ID NO: 669920 - RNA, 19 nt, Artificial Sequence
  Description of Artificial Sequence: Synthetic oligonucleotide
cugccucagugcugugagg

SEQ ID NO: 669921 - RNA, 19 nt, Artificial Sequence
  Description of Artificial Sequence: Synthetic oligonucleotide
acuagccacuugauaacau

SEQ ID NO: 669922 - RNA, 19 nt, Artificial Sequence
  Description of Artificial Sequence: Synthetic oligonucleotide
auguuaugugagccacaau

SEQ ID NO: 669923 - RNA, 19 nt, Artificial Sequence
  Description of Artificial Sequence: Synthetic oligonucleotide
aucuacugaagaagaguua

SEQ ID NO: 669924 - RNA, 19 nt, Artificial Sequence
  Description of Artificial Sequence: Synthetic oligonucleotide
uaugugggucaggcggcug

SEQ ID NO: 669925 - RNA, 19 nt, Artificial Sequence
  Description of Artificial Sequence: Synthetic oligonucleotide
auggauugcuguagaugcu

SEQ ID NO: 669926 - RNA, 19 nt, Artificial Sequence
  Description of Artificial Sequence: Synthetic oligonucleotide
guuuagccgagggucuuuc

SEQ ID NO: 669927 - RNA, 19 nt, Artificial Sequence
  Description of Artificial Sequence: Synthetic oligonucleotide
gaggucguaagaaguauuu

SEQ ID NO: 669928 - RNA, 19 nt, Artificial Sequence
  Description of Artificial Sequence: Synthetic oligonucleotide
gagaagcauguaggccucc

SEQ ID NO: 669929 - RNA, 19 nt, Artificial Sequence
  Description of Artificial Sequence: Synthetic oligonucleotide
ugacguagguaagcaguuu

SEQ ID NO: 669930 - RNA, 19 nt, Artificial Sequence
  Description of Artificial Sequence: Synthetic oligonucleotide
auaccccaacuugugguau

SEQ ID NO: 669931 - RNA, 19 nt, Artificial Sequence
  Description of Artificial Sequence: Synthetic oligonucleotide
agaugcucgaccagcucau

SEQ ID NO: 669932 - RNA, 19 nt, Artificial Sequence
  Description of Artificial Sequence: Synthetic oligonucleotide
cugaacuccguaggugcuc

SEQ ID NO: 669933 - RNA, 19 nt, Artificial Sequence
  Description of Artificial Sequence: Synthetic oligonucleotide
cucuaacaccuugcagcgc

SEQ ID NO: 669934 - RNA, 19 nt, Artificial Sequence
  Description of Artificial Sequence: Synthetic oligonucleotide
cauaggcaauaugaaaagu

SEQ ID NO: 669935 - RNA, 19 nt, Artificial Sequence
  Description of Artificial Sequence: Synthetic oligonucleotide
uaccccaacuugugguauu

SEQ ID NO: 669936 - RNA, 19 nt, Artificial Sequence
  Description of Artificial Sequence: Synthetic oligonucleotide
cguaguggaguuaauuuaa

SEQ ID NO: 669937 - RNA, 19 nt, Artificial Sequence
  Description of Artificial Sequence: Synthetic oligonucleotide
cuaagcuguccguggcaga

SEQ ID NO: 669938 - RNA, 19 nt, Artificial Sequence
  Description of Artificial Sequence: Synthetic oligonucleotide
cauuggcuggaugcagcug

SEQ ID NO: 669939 - RNA, 19 nt, Artificial Sequence
  Description of Artificial Sequence: Synthetic oligonucleotide
cuccguaggugcucucuca

SEQ ID NO: 669940 - RNA, 19 nt, Artificial Sequence
  Description of Artificial Sequence: Synthetic oligonucleotide
gacaauccggagguauucu

SEQ ID NO: 669941 - RNA, 19 nt, Artificial Sequence
  Description of Artificial Sequence: Synthetic oligonucleotide
gagacgggugggugucuca

SEQ ID NO: 669942 - RNA, 19 nt, Artificial Sequence
  Description of Artificial Sequence: Synthetic oligonucleotide
caggauuuucuggauguua

SEQ ID NO: 669943 - RNA, 19 nt, Artificial Sequence
  Description of Artificial Sequence: Synthetic oligonucleotide
gcaagcuguggcaaugauc

SEQ ID NO: 669944 - RNA, 19 nt, Artificial Sequence
  Description of Artificial Sequence: Synthetic oligonucleotide
guagaugcugccgcugucu

SEQ ID NO: 669945 - RNA, 19 nt, Artificial Sequence
  Description of Artificial Sequence: Synthetic oligonucleotide
gccacuugauaacaucucu

SEQ ID NO: 669946 - RNA, 19 nt, Artificial Sequence
  Description of Artificial Sequence: Synthetic oligonucleotide
uggucgcuggcagcuuuca

SEQ ID NO: 669947 - RNA, 19 nt, Artificial Sequence
  Description of Artificial Sequence: Synthetic oligonucleotide
acaugacagaacgguguuu

SEQ ID NO: 669948 - RNA, 19 nt, Artificial Sequence
  Description of Artificial Sequence: Synthetic oligonucleotide
gacccuugcucucccgugu

SEQ ID NO: 669949 - RNA, 19 nt, Artificial Sequence
  Description of Artificial Sequence: Synthetic oligonucleotide
guacuacguaacguagaaa

SEQ ID NO: 669950 - RNA, 19 nt, Artificial Sequence
  Description of Artificial Sequence: Synthetic oligonucleotide
guaacacugaugagauggu

SEQ ID NO: 669951 - RNA, 19 nt, Artificial Sequence
  Description of Artificial Sequence: Synthetic oligonucleotide
ugacauuguggggcuguuu

SEQ ID NO: 669952 - RNA, 19 nt, Artificial Sequence
  Description of Artificial Sequence: Synthetic oligonucleotide
gcaauaucguauugccugu

SEQ ID NO: 669953 - RNA, 19 nt, Artificial Sequence
  Description of Artificial Sequence: Synthetic oligonucleotide
gucaggguucaaguccgca

SEQ ID NO: 669954 - RNA, 19 nt, Artificial Sequence
  Description of Artificial Sequence: Synthetic oligonucleotide
ugguuuagccgagggucuu

SEQ ID NO: 669955 - RNA, 19 nt, Artificial Sequence
  Description of Artificial Sequence: Synthetic oligonucleotide
gaccacagagucauaucau

SEQ ID NO: 669956 - RNA, 19 nt, Artificial Sequence
  Description of Artificial Sequence: Synthetic oligonucleotide
gaggacucguccgggcaga

SEQ ID NO: 669957 - RNA, 19 nt, Artificial Sequence
  Description of Artificial Sequence: Synthetic oligonucleotide
ucguccgggcagaguuugu

SEQ ID NO: 669958 - RNA, 19 nt, Artificial Sequence
  Description of Artificial Sequence: Synthetic oligonucleotide
cguaggugcucucucagca

SEQ ID NO: 669959 - RNA, 19 nt, Artificial Sequence
  Description of Artificial Sequence: Synthetic oligonucleotide
caccauucuuagucuucga

SEQ ID NO: 669960 - RNA, 19 nt, Artificial Sequence
  Description of Artificial Sequence: Synthetic oligonucleotide
cuucgaugagggauggguu

SEQ ID NO: 669961 - RNA, 19 nt, Artificial Sequence
  Description of Artificial Sequence: Synthetic oligonucleotide
ccguaguggaguuaauuua

SEQ ID NO: 669962 - RNA, 19 nt, Artificial Sequence
  Description of Artificial Sequence: Synthetic oligonucleotide
gaugcucgaccagcucauc

SEQ ID NO: 669963 - RNA, 19 nt, Artificial Sequence
  Description of Artificial Sequence: Synthetic oligonucleotide
ugcucucccgugugucuuu

SEQ ID NO: 669964 - RNA, 19 nt, Artificial Sequence
  Description of Artificial Sequence: Synthetic oligonucleotide
gaacuccguaggugcucuc

SEQ ID NO: 669965 - RNA, 19 nt, Artificial Sequence
  Description of Artificial Sequence: Synthetic oligonucleotide
gugcaauaucguauugccu

SEQ ID NO: 669966 - RNA, 19 nt, Artificial Sequence
  Description of Artificial Sequence: Synthetic oligonucleotide
accccaacuugugguauuu

SEQ ID NO: 669967 - RNA, 19 nt, Artificial Sequence
  Description of Artificial Sequence: Synthetic oligonucleotide
ccguaggugcucucucagc

SEQ ID NO: 669968 - RNA, 19 nt, Artificial Sequence
  Description of Artificial Sequence: Synthetic oligonucleotide
uuccuccaugacguaggua

SEQ ID NO: 669969 - RNA, 19 nt, Artificial Sequence
  Description of Artificial Sequence: Synthetic oligonucleotide
guggaguuguucagaaaau

SEQ ID NO: 669970 - RNA, 19 nt, Artificial Sequence
  Description of Artificial Sequence: Synthetic oligonucleotide
gagucauaucauaggcaau

SEQ ID NO: 669971 - RNA, 19 nt, Artificial Sequence
  Description of Artificial Sequence: Synthetic oligonucleotide
cagucuaugcaggcaaggu

SEQ ID NO: 669972 - RNA, 19 nt, Artificial Sequence
  Description of Artificial Sequence: Synthetic oligonucleotide
ggucuguacuacguaacgu

SEQ ID NO: 669973 - RNA, 19 nt, Artificial Sequence
  Description of Artificial Sequence: Synthetic oligonucleotide
cacaugacagaacgguguu

SEQ ID NO: 669974 - RNA, 19 nt, Artificial Sequence
  Description of Artificial Sequence: Synthetic oligonucleotide
cagcgauggacaacauccu

SEQ ID NO: 669975 - RNA, 19 nt, Artificial Sequence
  Description of Artificial Sequence: Synthetic oligonucleotide
cuuacaagucuggcugccu

SEQ ID NO: 669976 - RNA, 19 nt, Artificial Sequence
  Description of Artificial Sequence: Synthetic oligonucleotide
guucucccaguaugugggu

SEQ ID NO: 669977 - RNA, 19 nt, Artificial Sequence
  Description of Artificial Sequence: Synthetic oligonucleotide
aggugcucucucagcacau

SEQ ID NO: 669978 - RNA, 19 nt, Artificial Sequence
  Description of Artificial Sequence: Synthetic oligonucleotide
caggcaaggucuguuguau

SEQ ID NO: 669979 - RNA, 19 nt, Artificial Sequence
  Description of Artificial Sequence: Synthetic oligonucleotide
ggcuuuuaucugacugaca

SEQ ID NO: 669980 - RNA, 19 nt, Artificial Sequence
  Description of Artificial Sequence: Synthetic oligonucleotide
gcauuggcuggaugcagcu

SEQ ID NO: 669981 - RNA, 19 nt, Artificial Sequence
  Description of Artificial Sequence: Synthetic oligonucleotide
gcaauggauugcuguagau

SEQ ID NO: 669982 - RNA, 19 nt, Artificial Sequence
  Description of Artificial Sequence: Synthetic oligonucleotide
caaccagcugauugguguu

SEQ ID NO: 669983 - RNA, 19 nt, Artificial Sequence
  Description of Artificial Sequence: Synthetic oligonucleotide
guggucgcuggcagcuuuc

SEQ ID NO: 669984 - RNA, 19 nt, Artificial Sequence
  Description of Artificial Sequence: Synthetic oligonucleotide
cccguaguggaguuaauuu

SEQ ID NO: 669985 - RNA, 19 nt, Artificial Sequence
  Description of Artificial Sequence: Synthetic oligonucleotide
ccgcagcauagaagaguag

SEQ ID NO: 669986 - RNA, 19 nt, Artificial Sequence
  Description of Artificial Sequence: Synthetic oligonucleotide
guaugugggucaggcggcu

SEQ ID NO: 669987 - RNA, 19 nt, Artificial Sequence
  Description of Artificial Sequence: Synthetic oligonucleotide
gcgcagaagguggcuuucc

SEQ ID NO: 669988 - RNA, 19 nt, Artificial Sequence
  Description of Artificial Sequence: Synthetic oligonucleotide
ggagacgggugggugucuc

SEQ ID NO: 669989 - RNA, 19 nt, Artificial Sequence
  Description of Artificial Sequence: Synthetic oligonucleotide
ggcgacaauccggagguau

SEQ ID NO: 669990 - RNA, 19 nt, Artificial Sequence
  Description of Artificial Sequence: Synthetic oligonucleotide
ggaggucguaagaaguauu

SEQ ID NO: 669991 - RNA, 19 nt, Artificial Sequence
  Description of Artificial Sequence: Synthetic oligonucleotide
cagucccauuccacugucu

SEQ ID NO: 669992 - RNA, 19 nt, Artificial Sequence
  Description of Artificial Sequence: Synthetic oligonucleotide
ccccaaaggaaaguuuucu

SEQ ID NO: 669993 - RNA, 19 nt, Artificial Sequence
  Description of Artificial Sequence: Synthetic oligonucleotide
cucgaccagcucaucccau

SEQ ID NO: 669994 - RNA, 19 nt, Artificial Sequence
  Description of Artificial Sequence: Synthetic oligonucleotide
caauaucguauugccuguu

SEQ ID NO: 669995 - RNA, 19 nt, Artificial Sequence
  Description of Artificial Sequence: Synthetic oligonucleotide
cguuaguaccuugacagau

SEQ ID NO: 669996 - RNA, 19 nt, Artificial Sequence
  Description of Artificial Sequence: Synthetic oligonucleotide
ggcaagcuguggcaaugau

SEQ ID NO: 669997 - RNA, 19 nt, Artificial Sequence
  Description of Artificial Sequence: Synthetic oligonucleotide
cagcgcagaagguggcuuu

SEQ ID NO: 669998 - RNA, 19 nt, Artificial Sequence
  Description of Artificial Sequence: Synthetic oligonucleotide
uggcgacaauccggaggua

SEQ ID NO: 669999 - RNA, 19 nt, Artificial Sequence
  Description of Artificial Sequence: Synthetic oligonucleotide
gggugagacaaaguccauu

SEQ ID NO: 670000 - RNA, 19 nt, Artificial Sequence
  Description of Artificial Sequence: Synthetic oligonucleotide
ggguaauguuggggugaga

SEQ ID NO: 670001 - RNA, 19 nt, Artificial Sequence
  Description of Artificial Sequence: Synthetic oligonucleotide
cugacauuguggggcuguu

SEQ ID NO: 670002 - RNA, 19 nt, Artificial Sequence
  Description of Artificial Sequence: Synthetic oligonucleotide
gcgacaauccggagguauu

SEQ ID NO: 670003 - RNA, 19 nt, Artificial Sequence
  Description of Artificial Sequence: Synthetic oligonucleotide
gguuuagccgagggucuuu

SEQ ID NO: 670004 - RNA, 19 nt, Artificial Sequence
  Description of Artificial Sequence: Synthetic oligonucleotide
gcagcgcagaagguggcuu

SEQ ID NO: 670005 - RNA, 19 nt, Artificial Sequence
  Description of Artificial Sequence: Synthetic oligonucleotide
cggagguauucuugguacu

SEQ ID NO: 670006 - RNA, 19 nt, Artificial Sequence
  Description of Artificial Sequence: Synthetic oligonucleotide
cugccccguaguggaguua

SEQ ID NO: 670007 - RNA, 19 nt, Artificial Sequence
  Description of Artificial Sequence: Synthetic oligonucleotide
ggggugagacaaaguccau

SEQ ID NO: 670008 - RNA, 19 nt, Artificial Sequence
  Description of Artificial Sequence: Synthetic oligonucleotide
ggacucguccgggcagagu

SEQ ID NO: 670009 - RNA, 19 nt, Artificial Sequence
  Description of Artificial Sequence: Synthetic oligonucleotide
ccccguaguggaguuaauu

SEQ ID NO: 670010 - RNA, 19 nt, Artificial Sequence
  Description of Artificial Sequence: Synthetic oligonucleotide
gggagacgggugggugucu

SEQ ID NO: 670011 - RNA, 19 nt, Artificial Sequence
  Description of Artificial Sequence: Synthetic oligonucleotide
gccccguaguggaguuaau

SEQ ID NO: 670012 - RNA, 19 nt, Artificial Sequence
  Description of Artificial Sequence: Synthetic oligonucleotide
aacauuaaaaucuuggagg

SEQ ID NO: 670013 - RNA, 19 nt, Artificial Sequence
  Description of Artificial Sequence: Synthetic oligonucleotide
uuuaugaucauuuuggcca

SEQ ID NO: 670014 - RNA, 19 nt, Artificial Sequence
  Description of Artificial Sequence: Synthetic oligonucleotide
uuuugauucauauacagcu

SEQ ID NO: 670015 - RNA, 19 nt, Artificial Sequence
  Description of Artificial Sequence: Synthetic oligonucleotide
aaucuuggagguuaaaguc

SEQ ID NO: 670016 - RNA, 19 nt, Artificial Sequence
  Description of Artificial Sequence: Synthetic oligonucleotide
uaacuaauuauucaguaac

SEQ ID NO: 670017 - RNA, 19 nt, Artificial Sequence
  Description of Artificial Sequence: Synthetic oligonucleotide
gaagagaucaggcugagug

SEQ ID NO: 670018 - RNA, 19 nt, Artificial Sequence
  Description of Artificial Sequence: Synthetic oligonucleotide
ugauugaucucauaaauga

SEQ ID NO: 670019 - RNA, 19 nt, Artificial Sequence
  Description of Artificial Sequence: Synthetic oligonucleotide
aaucccguugguuuuauuc

SEQ ID NO: 670020 - RNA, 19 nt, Artificial Sequence
  Description of Artificial Sequence: Synthetic oligonucleotide
uggacaucaaacauggaag

SEQ ID NO: 670021 - RNA, 19 nt, Artificial Sequence
  Description of Artificial Sequence: Synthetic oligonucleotide
aauuugaucaauggccagc

SEQ ID NO: 670022 - RNA, 19 nt, Artificial Sequence
  Description of Artificial Sequence: Synthetic oligonucleotide
caucaaacauggaagaugg

SEQ ID NO: 670023 - RNA, 19 nt, Artificial Sequence
  Description of Artificial Sequence: Synthetic oligonucleotide
aaaaucuuggagguuaaag

SEQ ID NO: 670024 - RNA, 19 nt, Artificial Sequence
  Description of Artificial Sequence: Synthetic oligonucleotide
gucaugauaaaacagcaug

SEQ ID NO: 670025 - RNA, 19 nt, Artificial Sequence
  Description of Artificial Sequence: Synthetic oligonucleotide
uugaguaccauuguguucc

SEQ ID NO: 670026 - RNA, 19 nt, Artificial Sequence
  Description of Artificial Sequence: Synthetic oligonucleotide
aacgccucggaguaauccc

SEQ ID NO: 670027 - RNA, 19 nt, Artificial Sequence
  Description of Artificial Sequence: Synthetic oligonucleotide
ucuggaaaggcaucgaaca

SEQ ID NO: 670028 - RNA, 19 nt, Artificial Sequence
  Description of Artificial Sequence: Synthetic oligonucleotide
agcuuuaugaucauuuugg

SEQ ID NO: 670029 - RNA, 19 nt, Artificial Sequence
  Description of Artificial Sequence: Synthetic oligonucleotide
gaaacgucggaugacaucc

SEQ ID NO: 670030 - RNA, 19 nt, Artificial Sequence
  Description of Artificial Sequence: Synthetic oligonucleotide
uucggauuuagagacaucc

SEQ ID NO: 670031 - RNA, 19 nt, Artificial Sequence
  Description of Artificial Sequence: Synthetic oligonucleotide
ucuaauacagccauauguu

SEQ ID NO: 670032 - RNA, 19 nt, Artificial Sequence
  Description of Artificial Sequence: Synthetic oligonucleotide
uugauucauauacagcuga

SEQ ID NO: 670033 - RNA, 19 nt, Artificial Sequence
  Description of Artificial Sequence: Synthetic oligonucleotide
uucagcaagagauacucug

SEQ ID NO: 670034 - RNA, 19 nt, Artificial Sequence
  Description of Artificial Sequence: Synthetic oligonucleotide
agacgcauaguguucaccg

SEQ ID NO: 670035 - RNA, 19 nt, Artificial Sequence
  Description of Artificial Sequence: Synthetic oligonucleotide
  modified_base (8)..(8): a, c, u, g, unknown or other
ucugggancaccgugucgg

SEQ ID NO: 670036 - RNA, 19 nt, Artificial Sequence
  Description of Artificial Sequence: Synthetic oligonucleotide
uuugauucauauacagcug

SEQ ID NO: 670037 - RNA, 19 nt, Artificial Sequence
  Description of Artificial Sequence: Synthetic oligonucleotide
auaaaugaucuccaagugu

SEQ ID NO: 670038 - RNA, 19 nt, Artificial Sequence
  Description of Artificial Sequence: Synthetic oligonucleotide
uuaauuguccggucacugg

SEQ ID NO: 670039 - RNA, 19 nt, Artificial Sequence
  Description of Artificial Sequence: Synthetic oligonucleotide
cacgauucuguccaaaugc

SEQ ID NO: 670040 - RNA, 19 nt, Artificial Sequence
  Description of Artificial Sequence: Synthetic oligonucleotide
ugucgguugguauagguca

SEQ ID NO: 670041 - RNA, 19 nt, Artificial Sequence
  Description of Artificial Sequence: Synthetic oligonucleotide
agucguuuggugcucgagc

SEQ ID NO: 670042 - RNA, 19 nt, Artificial Sequence
  Description of Artificial Sequence: Synthetic oligonucleotide
cacgaauaacuucuuaggg

SEQ ID NO: 670043 - RNA, 19 nt, Artificial Sequence
  Description of Artificial Sequence: Synthetic oligonucleotide
uuggccaugugauauccgg

SEQ ID NO: 670044 - RNA, 19 nt, Artificial Sequence
  Description of Artificial Sequence: Synthetic oligonucleotide
aaagcuauggagcuuuguu

SEQ ID NO: 670045 - RNA, 19 nt, Artificial Sequence
  Description of Artificial Sequence: Synthetic oligonucleotide
acgaauaacuucuuagggu

SEQ ID NO: 670046 - RNA, 19 nt, Artificial Sequence
  Description of Artificial Sequence: Synthetic oligonucleotide
uaauuguccggucacugga

SEQ ID NO: 670047 - RNA, 19 nt, Artificial Sequence
  Description of Artificial Sequence: Synthetic oligonucleotide
uuggcguauuccuuaauug

SEQ ID NO: 670048 - RNA, 19 nt, Artificial Sequence
  Description of Artificial Sequence: Synthetic oligonucleotide
uggauccaaacuuggaggc

SEQ ID NO: 670049 - RNA, 19 nt, Artificial Sequence
  Description of Artificial Sequence: Synthetic oligonucleotide
ugggugucgacccacuuug

SEQ ID NO: 670050 - RNA, 19 nt, Artificial Sequence
  Description of Artificial Sequence: Synthetic oligonucleotide
cauauacccaggcacgggg

SEQ ID NO: 670051 - RNA, 19 nt, Artificial Sequence
  Description of Artificial Sequence: Synthetic oligonucleotide
uggagguuaaagucguuug

SEQ ID NO: 670052 - RNA, 19 nt, Artificial Sequence
  Description of Artificial Sequence: Synthetic oligonucleotide
uucguaguccgcaaagacu

SEQ ID NO: 670053 - RNA, 19 nt, Artificial Sequence
  Description of Artificial Sequence: Synthetic oligonucleotide
acaccuaacuaauuauuca

SEQ ID NO: 670054 - RNA, 19 nt, Artificial Sequence
  Description of Artificial Sequence: Synthetic oligonucleotide
ucguaguccgcaaagacuu

SEQ ID NO: 670055 - RNA, 19 nt, Artificial Sequence
  Description of Artificial Sequence: Synthetic oligonucleotide
ugucgacccacuuuguccc

SEQ ID NO: 670056 - RNA, 19 nt, Artificial Sequence
  Description of Artificial Sequence: Synthetic oligonucleotide
cucggaguaaucccguugg

SEQ ID NO: 670057 - RNA, 19 nt, Artificial Sequence
  Description of Artificial Sequence: Synthetic oligonucleotide
caagugucgaggcaguagc

SEQ ID NO: 670058 - RNA, 19 nt, Artificial Sequence
  Description of Artificial Sequence: Synthetic oligonucleotide
uuuugaguaccauuguguu

SEQ ID NO: 670059 - RNA, 19 nt, Artificial Sequence
  Description of Artificial Sequence: Synthetic oligonucleotide
guucauauacccaggcacg

SEQ ID NO: 670060 - RNA, 19 nt, Artificial Sequence
  Description of Artificial Sequence: Synthetic oligonucleotide
agagaucaggcugaguggg

SEQ ID NO: 670061 - RNA, 19 nt, Artificial Sequence
  Description of Artificial Sequence: Synthetic oligonucleotide
cauuguucaccacuucugc

SEQ ID NO: 670062 - RNA, 19 nt, Artificial Sequence
  Description of Artificial Sequence: Synthetic oligonucleotide
aagcuauggagcuuuguua

SEQ ID NO: 670063 - RNA, 19 nt, Artificial Sequence
  Description of Artificial Sequence: Synthetic oligonucleotide
uggauagggaaaucuucag

SEQ ID NO: 670064 - RNA, 19 nt, Artificial Sequence
  Description of Artificial Sequence: Synthetic oligonucleotide
auuuagagacauccuccuc

SEQ ID NO: 670065 - RNA, 19 nt, Artificial Sequence
  Description of Artificial Sequence: Synthetic oligonucleotide
uuccuuaauuguccgguca

SEQ ID NO: 670066 - RNA, 19 nt, Artificial Sequence
  Description of Artificial Sequence: Synthetic oligonucleotide
ucgugaauccgcuuuacau

SEQ ID NO: 670067 - RNA, 19 nt, Artificial Sequence
  Description of Artificial Sequence: Synthetic oligonucleotide
guuuguacucgugaauccg

SEQ ID NO: 670068 - RNA, 19 nt, Artificial Sequence
  Description of Artificial Sequence: Synthetic oligonucleotide
guaccauuguguuccaggc

SEQ ID NO: 670069 - RNA, 19 nt, Artificial Sequence
  Description of Artificial Sequence: Synthetic oligonucleotide
ugcuccgauagaucugugg

SEQ ID NO: 670070 - RNA, 19 nt, Artificial Sequence
  Description of Artificial Sequence: Synthetic oligonucleotide
ugauucauauacagcugac

SEQ ID NO: 670071 - RNA, 19 nt, Artificial Sequence
  Description of Artificial Sequence: Synthetic oligonucleotide
uggcguauuccuuaauugu

SEQ ID NO: 670072 - RNA, 19 nt, Artificial Sequence
  Description of Artificial Sequence: Synthetic oligonucleotide
gcacgaauaacuucuuagg

SEQ ID NO: 670073 - RNA, 19 nt, Artificial Sequence
  Description of Artificial Sequence: Synthetic oligonucleotide
uuaaaaucuuggagguuaa

SEQ ID NO: 670074 - RNA, 19 nt, Artificial Sequence
  Description of Artificial Sequence: Synthetic oligonucleotide
auaggucaucagcucaggg

SEQ ID NO: 670075 - RNA, 19 nt, Artificial Sequence
  Description of Artificial Sequence: Synthetic oligonucleotide
acuaauuauucaguaacaa

SEQ ID NO: 670076 - RNA, 19 nt, Artificial Sequence
  Description of Artificial Sequence: Synthetic oligonucleotide
agacucuuuggauagggaa

SEQ ID NO: 670077 - RNA, 19 nt, Artificial Sequence
  Description of Artificial Sequence: Synthetic oligonucleotide
uccuuaauuguccggucac

SEQ ID NO: 670078 - RNA, 19 nt, Artificial Sequence
  Description of Artificial Sequence: Synthetic oligonucleotide
uccgauagaucuguggcug

SEQ ID NO: 670079 - RNA, 19 nt, Artificial Sequence
  Description of Artificial Sequence: Synthetic oligonucleotide
cuagacucuuuggauaggg

SEQ ID NO: 670080 - RNA, 19 nt, Artificial Sequence
  Description of Artificial Sequence: Synthetic oligonucleotide
uucccggaggaagaggucg

SEQ ID NO: 670081 - RNA, 19 nt, Artificial Sequence
  Description of Artificial Sequence: Synthetic oligonucleotide
uaccugaucuggaaaggca

SEQ ID NO: 670082 - RNA, 19 nt, Artificial Sequence
  Description of Artificial Sequence: Synthetic oligonucleotide
ccauccauagucccgaugg

SEQ ID NO: 670083 - RNA, 19 nt, Artificial Sequence
  Description of Artificial Sequence: Synthetic oligonucleotide
gacaccuaacuaauuauuc

SEQ ID NO: 670084 - RNA, 19 nt, Artificial Sequence
  Description of Artificial Sequence: Synthetic oligonucleotide
uuugaguaccauuguguuc

SEQ ID NO: 670085 - RNA, 19 nt, Artificial Sequence
  Description of Artificial Sequence: Synthetic oligonucleotide
guauuccuuaauuguccgg

SEQ ID NO: 670086 - RNA, 19 nt, Artificial Sequence
  Description of Artificial Sequence: Synthetic oligonucleotide
uggccaugugauauccggg

SEQ ID NO: 670087 - RNA, 19 nt, Artificial Sequence
  Description of Artificial Sequence: Synthetic oligonucleotide
ggauugcagaguaagagcc

SEQ ID NO: 670088 - RNA, 19 nt, Artificial Sequence
  Description of Artificial Sequence: Synthetic oligonucleotide
agagauacucuguaauuuu

SEQ ID NO: 670089 - RNA, 19 nt, Artificial Sequence
  Description of Artificial Sequence: Synthetic oligonucleotide
gugucgacccacuuugucc

SEQ ID NO: 670090 - RNA, 19 nt, Artificial Sequence
  Description of Artificial Sequence: Synthetic oligonucleotide
ucucagagacaccuaacua

SEQ ID NO: 670091 - RNA, 19 nt, Artificial Sequence
  Description of Artificial Sequence: Synthetic oligonucleotide
cuaacuaauuauucaguaa

SEQ ID NO: 670092 - RNA, 19 nt, Artificial Sequence
  Description of Artificial Sequence: Synthetic oligonucleotide
cuucguaguccgcaaagac

SEQ ID NO: 670093 - RNA, 19 nt, Artificial Sequence
  Description of Artificial Sequence: Synthetic oligonucleotide
aagaggucgucgcucacaa

SEQ ID NO: 670094 - RNA, 19 nt, Artificial Sequence
  Description of Artificial Sequence: Synthetic oligonucleotide
accguguuguucauauacc

SEQ ID NO: 670095 - RNA, 19 nt, Artificial Sequence
  Description of Artificial Sequence: Synthetic oligonucleotide
gaauccgcuuuacauggac

SEQ ID NO: 670096 - RNA, 19 nt, Artificial Sequence
  Description of Artificial Sequence: Synthetic oligonucleotide
cuuggcacgaauaacuucu

SEQ ID NO: 670097 - RNA, 19 nt, Artificial Sequence
  Description of Artificial Sequence: Synthetic oligonucleotide
auagucccgauggucaggg

SEQ ID NO: 670098 - RNA, 19 nt, Artificial Sequence
  Description of Artificial Sequence: Synthetic oligonucleotide
uggaggccuugaaacgucg

SEQ ID NO: 670099 - RNA, 19 nt, Artificial Sequence
  Description of Artificial Sequence: Synthetic oligonucleotide
aacgucggaugacauccug

SEQ ID NO: 670100 - RNA, 19 nt, Artificial Sequence
  Description of Artificial Sequence: Synthetic oligonucleotide
ucauauacccaggcacggg

SEQ ID NO: 670101 - RNA, 19 nt, Artificial Sequence
  Description of Artificial Sequence: Synthetic oligonucleotide
uuaugaucauuuuggccau

SEQ ID NO: 670102 - RNA, 19 nt, Artificial Sequence
  Description of Artificial Sequence: Synthetic oligonucleotide
uaaagucguuuggugcucg

SEQ ID NO: 670103 - RNA, 19 nt, Artificial Sequence
  Description of Artificial Sequence: Synthetic oligonucleotide
caauuugaucaauggccag

SEQ ID NO: 670104 - RNA, 19 nt, Artificial Sequence
  Description of Artificial Sequence: Synthetic oligonucleotide
acccucaugccaaagauga

SEQ ID NO: 670105 - RNA, 19 nt, Artificial Sequence
  Description of Artificial Sequence: Synthetic oligonucleotide
auacucuguaauuuuccaa

SEQ ID NO: 670106 - RNA, 19 nt, Artificial Sequence
  Description of Artificial Sequence: Synthetic oligonucleotide
uauuucccggaggaagagg

SEQ ID NO: 670107 - RNA, 19 nt, Artificial Sequence
  Description of Artificial Sequence: Synthetic oligonucleotide
uccucaugcggucaauguc

SEQ ID NO: 670108 - RNA, 19 nt, Artificial Sequence
  Description of Artificial Sequence: Synthetic oligonucleotide
acgcauaguguucaccgug

SEQ ID NO: 670109 - RNA, 19 nt, Artificial Sequence
  Description of Artificial Sequence: Synthetic oligonucleotide
guaagagccaacgccucgg

SEQ ID NO: 670110 - RNA, 19 nt, Artificial Sequence
  Description of Artificial Sequence: Synthetic oligonucleotide
uuguacucgugaauccgcu

SEQ ID NO: 670111 - RNA, 19 nt, Artificial Sequence
  Description of Artificial Sequence: Synthetic oligonucleotide
ucugcuccgauagaucugu

SEQ ID NO: 670112 - RNA, 19 nt, Artificial Sequence
  Description of Artificial Sequence: Synthetic oligonucleotide
aauuguccggucacuggag

SEQ ID NO: 670113 - RNA, 19 nt, Artificial Sequence
  Description of Artificial Sequence: Synthetic oligonucleotide
ugaaacgucggaugacauc

SEQ ID NO: 670114 - RNA, 19 nt, Artificial Sequence
  Description of Artificial Sequence: Synthetic oligonucleotide
aucauugggguagagcacu

SEQ ID NO: 670115 - RNA, 19 nt, Artificial Sequence
  Description of Artificial Sequence: Synthetic oligonucleotide
auccgcuuuacauggacau

SEQ ID NO: 670116 - RNA, 19 nt, Artificial Sequence
  Description of Artificial Sequence: Synthetic oligonucleotide
uuugucccagucugggugu

SEQ ID NO: 670117 - RNA, 19 nt, Artificial Sequence
  Description of Artificial Sequence: Synthetic oligonucleotide
uagacucuuuggauaggga

SEQ ID NO: 670118 - RNA, 19 nt, Artificial Sequence
  Description of Artificial Sequence: Synthetic oligonucleotide
gcuccgauagaucuguggc

SEQ ID NO: 670119 - RNA, 19 nt, Artificial Sequence
  Description of Artificial Sequence: Synthetic oligonucleotide
uagagcacucuggagauau

SEQ ID NO: 670120 - RNA, 19 nt, Artificial Sequence
  Description of Artificial Sequence: Synthetic oligonucleotide
auagaucuguggcuggaau

SEQ ID NO: 670121 - RNA, 19 nt, Artificial Sequence
  Description of Artificial Sequence: Synthetic oligonucleotide
cgaauaacuucuuaggguc

SEQ ID NO: 670122 - RNA, 19 nt, Artificial Sequence
  Description of Artificial Sequence: Synthetic oligonucleotide
gagauacucuguaauuuuc

SEQ ID NO: 670123 - RNA, 19 nt, Artificial Sequence
  Description of Artificial Sequence: Synthetic oligonucleotide
auuucccggaggaagaggu

SEQ ID NO: 670124 - RNA, 19 nt, Artificial Sequence
  Description of Artificial Sequence: Synthetic oligonucleotide
agagacgcauaguguucac

SEQ ID NO: 670125 - RNA, 19 nt, Artificial Sequence
  Description of Artificial Sequence: Synthetic oligonucleotide
ugguauaggucaucagcuc

SEQ ID NO: 670126 - RNA, 19 nt, Artificial Sequence
  Description of Artificial Sequence: Synthetic oligonucleotide
gguauaggucaucagcuca

SEQ ID NO: 670127 - RNA, 19 nt, Artificial Sequence
  Description of Artificial Sequence: Synthetic oligonucleotide
cugaguggaucuuggcuac

SEQ ID NO: 670128 - RNA, 19 nt, Artificial Sequence
  Description of Artificial Sequence: Synthetic oligonucleotide
cuaccugaucuggaaaggc

SEQ ID NO: 670129 - RNA, 19 nt, Artificial Sequence
  Description of Artificial Sequence: Synthetic oligonucleotide
uugaaacgucggaugacau

SEQ ID NO: 670130 - RNA, 19 nt, Artificial Sequence
  Description of Artificial Sequence: Synthetic oligonucleotide
aagucguuuggugcucgag

SEQ ID NO: 670131 - RNA, 19 nt, Artificial Sequence
  Description of Artificial Sequence: Synthetic oligonucleotide
aaagucguuuggugcucga

SEQ ID NO: 670132 - RNA, 19 nt, Artificial Sequence
  Description of Artificial Sequence: Synthetic oligonucleotide
cagacaguucaggagcugc

SEQ ID NO: 670133 - RNA, 19 nt, Artificial Sequence
  Description of Artificial Sequence: Synthetic oligonucleotide
cacgaugcagaggugggcc

SEQ ID NO: 670134 - RNA, 19 nt, Artificial Sequence
  Description of Artificial Sequence: Synthetic oligonucleotide
uccaaagcggccacaucau

SEQ ID NO: 670135 - RNA, 19 nt, Artificial Sequence
  Description of Artificial Sequence: Synthetic oligonucleotide
acgucggaugacauccugc

SEQ ID NO: 670136 - RNA, 19 nt, Artificial Sequence
  Description of Artificial Sequence: Synthetic oligonucleotide
guugaugccccugcuagac

SEQ ID NO: 670137 - RNA, 19 nt, Artificial Sequence
  Description of Artificial Sequence: Synthetic oligonucleotide
ugaauacuugggucuucac

SEQ ID NO: 670138 - RNA, 19 nt, Artificial Sequence
  Description of Artificial Sequence: Synthetic oligonucleotide
accuaacuaauuauucagu

SEQ ID NO: 670139 - RNA, 19 nt, Artificial Sequence
  Description of Artificial Sequence: Synthetic oligonucleotide
  modified_base (5)..(5): a, c, u, g, unknown or other
gggancaccgugucgguug

SEQ ID NO: 670140 - RNA, 19 nt, Artificial Sequence
  Description of Artificial Sequence: Synthetic oligonucleotide
uaagagccaacgccucgga

SEQ ID NO: 670141 - RNA, 19 nt, Artificial Sequence
  Description of Artificial Sequence: Synthetic oligonucleotide
agcggccacaucaucuacc

SEQ ID NO: 670142 - RNA, 19 nt, Artificial Sequence
  Description of Artificial Sequence: Synthetic oligonucleotide
uggugcucgagcugaccag

SEQ ID NO: 670143 - RNA, 19 nt, Artificial Sequence
  Description of Artificial Sequence: Synthetic oligonucleotide
gaagggccucauaauauuc

SEQ ID NO: 670144 - RNA, 19 nt, Artificial Sequence
  Description of Artificial Sequence: Synthetic oligonucleotide
uaguccgcaaagacuuuaa

SEQ ID NO: 670145 - RNA, 19 nt, Artificial Sequence
  Description of Artificial Sequence: Synthetic oligonucleotide
ucguuuggugcucgagcug

SEQ ID NO: 670146 - RNA, 19 nt, Artificial Sequence
  Description of Artificial Sequence: Synthetic oligonucleotide
ccuuguacuccuuuuccag

SEQ ID NO: 670147 - RNA, 19 nt, Artificial Sequence
  Description of Artificial Sequence: Synthetic oligonucleotide
caucgaacacgguucccac

SEQ ID NO: 670148 - RNA, 19 nt, Artificial Sequence
  Description of Artificial Sequence: Synthetic oligonucleotide
uuggaggccuugaaacguc

SEQ ID NO: 670149 - RNA, 19 nt, Artificial Sequence
  Description of Artificial Sequence: Synthetic oligonucleotide
uccuuggcacgaauaacuu

SEQ ID NO: 670150 - RNA, 19 nt, Artificial Sequence
  Description of Artificial Sequence: Synthetic oligonucleotide
ugccguuuguacucgugaa

SEQ ID NO: 670151 - RNA, 19 nt, Artificial Sequence
  Description of Artificial Sequence: Synthetic oligonucleotide
uuaaagucguuuggugcuc

SEQ ID NO: 670152 - RNA, 19 nt, Artificial Sequence
  Description of Artificial Sequence: Synthetic oligonucleotide
ccguguuguucauauaccc

SEQ ID NO: 670153 - RNA, 19 nt, Artificial Sequence
  Description of Artificial Sequence: Synthetic oligonucleotide
gagacaccuaacuaauuau

SEQ ID NO: 670154 - RNA, 19 nt, Artificial Sequence
  Description of Artificial Sequence: Synthetic oligonucleotide
aguucaaugagaagucauu

SEQ ID NO: 670155 - RNA, 19 nt, Artificial Sequence
  Description of Artificial Sequence: Synthetic oligonucleotide
gcucgagcugaccagagac

SEQ ID NO: 670156 - RNA, 19 nt, Artificial Sequence
  Description of Artificial Sequence: Synthetic oligonucleotide
gaggccuugaaacgucgga

SEQ ID NO: 670157 - RNA, 19 nt, Artificial Sequence
  Description of Artificial Sequence: Synthetic oligonucleotide
gagacgcauaguguucacc

SEQ ID NO: 670158 - RNA, 19 nt, Artificial Sequence
  Description of Artificial Sequence: Synthetic oligonucleotide
caacgccucggaguaaucc

SEQ ID NO: 670159 - RNA, 19 nt, Artificial Sequence
  Description of Artificial Sequence: Synthetic oligonucleotide
aagcgcaggguguguguca

SEQ ID NO: 670160 - RNA, 19 nt, Artificial Sequence
  Description of Artificial Sequence: Synthetic oligonucleotide
ggauagggaaaucuucaga

SEQ ID NO: 670161 - RNA, 19 nt, Artificial Sequence
  Description of Artificial Sequence: Synthetic oligonucleotide
gaacacgguucccacgcca

SEQ ID NO: 670162 - RNA, 19 nt, Artificial Sequence
  Description of Artificial Sequence: Synthetic oligonucleotide
ucaaugucuuuaggaacaa

SEQ ID NO: 670163 - RNA, 19 nt, Artificial Sequence
  Description of Artificial Sequence: Synthetic oligonucleotide
cuauuucccggaggaagag

SEQ ID NO: 670164 - RNA, 19 nt, Artificial Sequence
  Description of Artificial Sequence: Synthetic oligonucleotide
uuguuagcuggcccagguc

SEQ ID NO: 670165 - RNA, 19 nt, Artificial Sequence
  Description of Artificial Sequence: Synthetic oligonucleotide
  modified_base (9)..(9): a, c, u, g, unknown or other
cucugggancaccgugucg

SEQ ID NO: 670166 - RNA, 19 nt, Artificial Sequence
  Description of Artificial Sequence: Synthetic oligonucleotide
cuuuggcuauuucccggag

SEQ ID NO: 670167 - RNA, 19 nt, Artificial Sequence
  Description of Artificial Sequence: Synthetic oligonucleotide
auguugcccgucccagagg

SEQ ID NO: 670168 - RNA, 19 nt, Artificial Sequence
  Description of Artificial Sequence: Synthetic oligonucleotide
acgauucuguccaaaugcu

SEQ ID NO: 670169 - RNA, 19 nt, Artificial Sequence
  Description of Artificial Sequence: Synthetic oligonucleotide
  modified_base (4)..(4): a, c, u, g, unknown or other
ggancaccgugucgguugg

SEQ ID NO: 670170 - RNA, 19 nt, Artificial Sequence
  Description of Artificial Sequence: Synthetic oligonucleotide
gauccaaacuuggaggccu

SEQ ID NO: 670171 - RNA, 19 nt, Artificial Sequence
  Description of Artificial Sequence: Synthetic oligonucleotide
cacgguucccacgccaucc

SEQ ID NO: 670172 - RNA, 19 nt, Artificial Sequence
  Description of Artificial Sequence: Synthetic oligonucleotide
uugcagaguaagagccaac

SEQ ID NO: 670173 - RNA, 19 nt, Artificial Sequence
  Description of Artificial Sequence: Synthetic oligonucleotide
cguauuccuuaauuguccg

SEQ ID NO: 670174 - RNA, 19 nt, Artificial Sequence
  Description of Artificial Sequence: Synthetic oligonucleotide
ggcuacaccguucacugca

SEQ ID NO: 670175 - RNA, 19 nt, Artificial Sequence
  Description of Artificial Sequence: Synthetic oligonucleotide
gagguuaaagucguuuggu

SEQ ID NO: 670176 - RNA, 19 nt, Artificial Sequence
  Description of Artificial Sequence: Synthetic oligonucleotide
ggcuucguaguccgcaaag

SEQ ID NO: 670177 - RNA, 19 nt, Artificial Sequence
  Description of Artificial Sequence: Synthetic oligonucleotide
uuguccggucacuggagaa

SEQ ID NO: 670178 - RNA, 19 nt, Artificial Sequence
  Description of Artificial Sequence: Synthetic oligonucleotide
  modified_base (2)..(2): a, c, u, g, unknown or other
ancaccgugucgguuggua

SEQ ID NO: 670179 - RNA, 19 nt, Artificial Sequence
  Description of Artificial Sequence: Synthetic oligonucleotide
ucggaguaaucccguuggu

SEQ ID NO: 670180 - RNA, 19 nt, Artificial Sequence
  Description of Artificial Sequence: Synthetic oligonucleotide
ucauugggguagagcacuc

SEQ ID NO: 670181 - RNA, 19 nt, Artificial Sequence
  Description of Artificial Sequence: Synthetic oligonucleotide
caaagcggccacaucaucu

SEQ ID NO: 670182 - RNA, 19 nt, Artificial Sequence
  Description of Artificial Sequence: Synthetic oligonucleotide
agacaccuaacuaauuauu

SEQ ID NO: 670183 - RNA, 19 nt, Artificial Sequence
  Description of Artificial Sequence: Synthetic oligonucleotide
gcugaccagagacgcauag

SEQ ID NO: 670184 - RNA, 19 nt, Artificial Sequence
  Description of Artificial Sequence: Synthetic oligonucleotide
acguagucuucuccaauuu

SEQ ID NO: 670185 - RNA, 19 nt, Artificial Sequence
  Description of Artificial Sequence: Synthetic oligonucleotide
agggccucauaauauucuu

SEQ ID NO: 670186 - RNA, 19 nt, Artificial Sequence
  Description of Artificial Sequence: Synthetic oligonucleotide
acacgguucccacgccauc

SEQ ID NO: 670187 - RNA, 19 nt, Artificial Sequence
  Description of Artificial Sequence: Synthetic oligonucleotide
ggugugcucuacucuuccg

SEQ ID NO: 670188 - RNA, 19 nt, Artificial Sequence
  Description of Artificial Sequence: Synthetic oligonucleotide
uguacucgugaauccgcuu

SEQ ID NO: 670189 - RNA, 19 nt, Artificial Sequence
  Description of Artificial Sequence: Synthetic oligonucleotide
gcuaccugaucuggaaagg

SEQ ID NO: 670190 - RNA, 19 nt, Artificial Sequence
  Description of Artificial Sequence: Synthetic oligonucleotide
ccuaacuaauuauucagua

SEQ ID NO: 670191 - RNA, 19 nt, Artificial Sequence
  Description of Artificial Sequence: Synthetic oligonucleotide
uuucccggaggaagagguc

SEQ ID NO: 670192 - RNA, 19 nt, Artificial Sequence
  Description of Artificial Sequence: Synthetic oligonucleotide
gucguuuggugcucgagcu

SEQ ID NO: 670193 - RNA, 19 nt, Artificial Sequence
  Description of Artificial Sequence: Synthetic oligonucleotide
uuugaucaauggccagcuu

SEQ ID NO: 670194 - RNA, 19 nt, Artificial Sequence
  Description of Artificial Sequence: Synthetic oligonucleotide
gauggcuaccugaucugga

SEQ ID NO: 670195 - RNA, 19 nt, Artificial Sequence
  Description of Artificial Sequence: Synthetic oligonucleotide
acgccucggaguaaucccg

SEQ ID NO: 670196 - RNA, 19 nt, Artificial Sequence
  Description of Artificial Sequence: Synthetic oligonucleotide
gagagacauuuuccuguca

SEQ ID NO: 670197 - RNA, 19 nt, Artificial Sequence
  Description of Artificial Sequence: Synthetic oligonucleotide
guccgcaaagacuuuaaau

SEQ ID NO: 670198 - RNA, 19 nt, Artificial Sequence
  Description of Artificial Sequence: Synthetic oligonucleotide
aucaagucagccagcccug

SEQ ID NO: 670199 - RNA, 19 nt, Artificial Sequence
  Description of Artificial Sequence: Synthetic oligonucleotide
ccguugaugccccugcuag

SEQ ID NO: 670200 - RNA, 19 nt, Artificial Sequence
  Description of Artificial Sequence: Synthetic oligonucleotide
accugaucuggaaaggcau

SEQ ID NO: 670201 - RNA, 19 nt, Artificial Sequence
  Description of Artificial Sequence: Synthetic oligonucleotide
auggcaagcgcagggugug

SEQ ID NO: 670202 - RNA, 19 nt, Artificial Sequence
  Description of Artificial Sequence: Synthetic oligonucleotide
cauaggcuucguaguccgc

SEQ ID NO: 670203 - RNA, 19 nt, Artificial Sequence
  Description of Artificial Sequence: Synthetic oligonucleotide
aacacgguucccacgccau

SEQ ID NO: 670204 - RNA, 19 nt, Artificial Sequence
  Description of Artificial Sequence: Synthetic oligonucleotide
cugcuagacucuuuggaua

SEQ ID NO: 670205 - RNA, 19 nt, Artificial Sequence
  Description of Artificial Sequence: Synthetic oligonucleotide
ucgcagccaccacaaagua

SEQ ID NO: 670206 - RNA, 19 nt, Artificial Sequence
  Description of Artificial Sequence: Synthetic oligonucleotide
ggagcuuuguuagcuggcc

SEQ ID NO: 670207 - RNA, 19 nt, Artificial Sequence
  Description of Artificial Sequence: Synthetic oligonucleotide
gaguaagagccaacgccuc

SEQ ID NO: 670208 - RNA, 19 nt, Artificial Sequence
  Description of Artificial Sequence: Synthetic oligonucleotide
ggauggcuaccugaucugg

SEQ ID NO: 670209 - RNA, 19 nt, Artificial Sequence
  Description of Artificial Sequence: Synthetic oligonucleotide
acgaugcagaggugggcca

SEQ ID NO: 670210 - RNA, 19 nt, Artificial Sequence
  Description of Artificial Sequence: Synthetic oligonucleotide
gcuauggagcuuuguuagc

SEQ ID NO: 670211 - RNA, 19 nt, Artificial Sequence
  Description of Artificial Sequence: Synthetic oligonucleotide
gagaucugcuccgauagau

SEQ ID NO: 670212 - RNA, 19 nt, Artificial Sequence
  Description of Artificial Sequence: Synthetic oligonucleotide
cgcaaagacuuuaaaucug

SEQ ID NO: 670213 - RNA, 19 nt, Artificial Sequence
  Description of Artificial Sequence: Synthetic oligonucleotide
aggccuugaaacgucggau

SEQ ID NO: 670214 - RNA, 19 nt, Artificial Sequence
  Description of Artificial Sequence: Synthetic oligonucleotide
ucgacccacuuugucccag

SEQ ID NO: 670215 - RNA, 19 nt, Artificial Sequence
  Description of Artificial Sequence: Synthetic oligonucleotide
cuucggauuuagagacauc

SEQ ID NO: 670216 - RNA, 19 nt, Artificial Sequence
  Description of Artificial Sequence: Synthetic oligonucleotide
cugccguuuguacucguga

SEQ ID NO: 670217 - RNA, 19 nt, Artificial Sequence
  Description of Artificial Sequence: Synthetic oligonucleotide
aaacgucggaugacauccu

SEQ ID NO: 670218 - RNA, 19 nt, Artificial Sequence
  Description of Artificial Sequence: Synthetic oligonucleotide
cuauggagcuuuguuagcu

SEQ ID NO: 670219 - RNA, 19 nt, Artificial Sequence
  Description of Artificial Sequence: Synthetic oligonucleotide
agugucgaggcaguagcuu

SEQ ID NO: 670220 - RNA, 19 nt, Artificial Sequence
  Description of Artificial Sequence: Synthetic oligonucleotide
cuacaccguucacugcaug

SEQ ID NO: 670221 - RNA, 19 nt, Artificial Sequence
  Description of Artificial Sequence: Synthetic oligonucleotide
cagagacgcauaguguuca

SEQ ID NO: 670222 - RNA, 19 nt, Artificial Sequence
  Description of Artificial Sequence: Synthetic oligonucleotide
uccgcuuuacauggacauc

SEQ ID NO: 670223 - RNA, 19 nt, Artificial Sequence
  Description of Artificial Sequence: Synthetic oligonucleotide
gaguaccauuguguuccag

SEQ ID NO: 670224 - RNA, 19 nt, Artificial Sequence
  Description of Artificial Sequence: Synthetic oligonucleotide
cgcucacaaagcuauggag

SEQ ID NO: 670225 - RNA, 19 nt, Artificial Sequence
  Description of Artificial Sequence: Synthetic oligonucleotide
cuuggcguauuccuuaauu

SEQ ID NO: 670226 - RNA, 19 nt, Artificial Sequence
  Description of Artificial Sequence: Synthetic oligonucleotide
ccguuuguacucgugaauc

SEQ ID NO: 670227 - RNA, 19 nt, Artificial Sequence
  Description of Artificial Sequence: Synthetic oligonucleotide
ggugucgacccacuuuguc

SEQ ID NO: 670228 - RNA, 19 nt, Artificial Sequence
  Description of Artificial Sequence: Synthetic oligonucleotide
ccacgauucuguccaaaug

SEQ ID NO: 670229 - RNA, 19 nt, Artificial Sequence
  Description of Artificial Sequence: Synthetic oligonucleotide
ggauccaaacuuggaggcc

SEQ ID NO: 670230 - RNA, 19 nt, Artificial Sequence
  Description of Artificial Sequence: Synthetic oligonucleotide
gacgcauaguguucaccgu

SEQ ID NO: 670231 - RNA, 19 nt, Artificial Sequence
  Description of Artificial Sequence: Synthetic oligonucleotide
aucugcuccgauagaucug

SEQ ID NO: 670232 - RNA, 19 nt, Artificial Sequence
  Description of Artificial Sequence: Synthetic oligonucleotide
acgguucccacgccauccu

SEQ ID NO: 670233 - RNA, 19 nt, Artificial Sequence
  Description of Artificial Sequence: Synthetic oligonucleotide
caagcgcaggguguguguc

SEQ ID NO: 670234 - RNA, 19 nt, Artificial Sequence
  Description of Artificial Sequence: Synthetic oligonucleotide
gccccugcuagacucuuug

SEQ ID NO: 670235 - RNA, 19 nt, Artificial Sequence
  Description of Artificial Sequence: Synthetic oligonucleotide
caccguucacugcauggca

SEQ ID NO: 670236 - RNA, 19 nt, Artificial Sequence
  Description of Artificial Sequence: Synthetic oligonucleotide
ccagagacgcauaguguuc

SEQ ID NO: 670237 - RNA, 19 nt, Artificial Sequence
  Description of Artificial Sequence: Synthetic oligonucleotide
ccuuggcacgaauaacuuc

SEQ ID NO: 670238 - RNA, 19 nt, Artificial Sequence
  Description of Artificial Sequence: Synthetic oligonucleotide
ccaagugucgaggcaguag

SEQ ID NO: 670239 - RNA, 19 nt, Artificial Sequence
  Description of Artificial Sequence: Synthetic oligonucleotide
ccgauagaucuguggcugg

SEQ ID NO: 670240 - RNA, 19 nt, Artificial Sequence
  Description of Artificial Sequence: Synthetic oligonucleotide
ugucugguucuagcucacu

SEQ ID NO: 670241 - RNA, 19 nt, Artificial Sequence
  Description of Artificial Sequence: Synthetic oligonucleotide
ggccucauaauauucuuuu

SEQ ID NO: 670242 - RNA, 19 nt, Artificial Sequence
  Description of Artificial Sequence: Synthetic oligonucleotide
ucgguugguauaggucauc

SEQ ID NO: 670243 - RNA, 19 nt, Artificial Sequence
  Description of Artificial Sequence: Synthetic oligonucleotide
cagggucgcagccaccaca

SEQ ID NO: 670244 - RNA, 19 nt, Artificial Sequence
  Description of Artificial Sequence: Synthetic oligonucleotide
uucccacgccauccuugga

SEQ ID NO: 670245 - RNA, 19 nt, Artificial Sequence
  Description of Artificial Sequence: Synthetic oligonucleotide
guaguccgcaaagacuuua

SEQ ID NO: 670246 - RNA, 19 nt, Artificial Sequence
  Description of Artificial Sequence: Synthetic oligonucleotide
ucacgaugucugaguggau

SEQ ID NO: 670247 - RNA, 19 nt, Artificial Sequence
  Description of Artificial Sequence: Synthetic oligonucleotide
ggaggccuugaaacgucgg

SEQ ID NO: 670248 - RNA, 19 nt, Artificial Sequence
  Description of Artificial Sequence: Synthetic oligonucleotide
uuagcuggcccaggucuuu

SEQ ID NO: 670249 - RNA, 19 nt, Artificial Sequence
  Description of Artificial Sequence: Synthetic oligonucleotide
cgcgguggagaucugcucc

SEQ ID NO: 670250 - RNA, 19 nt, Artificial Sequence
  Description of Artificial Sequence: Synthetic oligonucleotide
ccgcuuuacauggacauca

SEQ ID NO: 670251 - RNA, 19 nt, Artificial Sequence
  Description of Artificial Sequence: Synthetic oligonucleotide
ccgcaaagacuuuaaaucu

SEQ ID NO: 670252 - RNA, 19 nt, Artificial Sequence
  Description of Artificial Sequence: Synthetic oligonucleotide
ucagauccgagggcuccau

SEQ ID NO: 670253 - RNA, 19 nt, Artificial Sequence
  Description of Artificial Sequence: Synthetic oligonucleotide
uaaucccguugguuuuauu

SEQ ID NO: 670254 - RNA, 19 nt, Artificial Sequence
  Description of Artificial Sequence: Synthetic oligonucleotide
ccucggaguaaucccguug

SEQ ID NO: 670255 - RNA, 19 nt, Artificial Sequence
  Description of Artificial Sequence: Synthetic oligonucleotide
ccucaugcggucaaugucu

SEQ ID NO: 670256 - RNA, 19 nt, Artificial Sequence
  Description of Artificial Sequence: Synthetic oligonucleotide
uccaccggccagcgcucca

SEQ ID NO: 670257 - RNA, 19 nt, Artificial Sequence
  Description of Artificial Sequence: Synthetic oligonucleotide
cagauccgagggcuccaug

SEQ ID NO: 670258 - RNA, 19 nt, Artificial Sequence
  Description of Artificial Sequence: Synthetic oligonucleotide
uggcuauuucccggaggaa

SEQ ID NO: 670259 - RNA, 19 nt, Artificial Sequence
  Description of Artificial Sequence: Synthetic oligonucleotide
  modified_base (6)..(6): a, c, u, g, unknown or other
ugggancaccgugucgguu

SEQ ID NO: 670260 - RNA, 19 nt, Artificial Sequence
  Description of Artificial Sequence: Synthetic oligonucleotide
ccuugaaacgucggaugac

SEQ ID NO: 670261 - RNA, 19 nt, Artificial Sequence
  Description of Artificial Sequence: Synthetic oligonucleotide
guuuggugcucgagcugac

SEQ ID NO: 670262 - RNA, 19 nt, Artificial Sequence
  Description of Artificial Sequence: Synthetic oligonucleotide
ggugcucgagcugaccaga

SEQ ID NO: 670263 - RNA, 19 nt, Artificial Sequence
  Description of Artificial Sequence: Synthetic oligonucleotide
gcuucguaguccgcaaaga

SEQ ID NO: 670264 - RNA, 19 nt, Artificial Sequence
  Description of Artificial Sequence: Synthetic oligonucleotide
ggucgucgcucacaaagcu

SEQ ID NO: 670265 - RNA, 19 nt, Artificial Sequence
  Description of Artificial Sequence: Synthetic oligonucleotide
ggucagggccccguugagc

SEQ ID NO: 670266 - RNA, 19 nt, Artificial Sequence
  Description of Artificial Sequence: Synthetic oligonucleotide
ggaagggccucauaauauu

SEQ ID NO: 670267 - RNA, 19 nt, Artificial Sequence
  Description of Artificial Sequence: Synthetic oligonucleotide
gucgacccacuuuguccca

SEQ ID NO: 670268 - RNA, 19 nt, Artificial Sequence
  Description of Artificial Sequence: Synthetic oligonucleotide
cacgccauccuuggaucca

SEQ ID NO: 670269 - RNA, 19 nt, Artificial Sequence
  Description of Artificial Sequence: Synthetic oligonucleotide
ugccccugcuagacucuuu

SEQ ID NO: 670270 - RNA, 19 nt, Artificial Sequence
  Description of Artificial Sequence: Synthetic oligonucleotide
acgccauccuuggauccaa

SEQ ID NO: 670271 - RNA, 19 nt, Artificial Sequence
  Description of Artificial Sequence: Synthetic oligonucleotide
gcugccguuuguacucgug

SEQ ID NO: 670272 - RNA, 19 nt, Artificial Sequence
  Description of Artificial Sequence: Synthetic oligonucleotide
uggcaagcgcagggugugu

SEQ ID NO: 670273 - RNA, 19 nt, Artificial Sequence
  Description of Artificial Sequence: Synthetic oligonucleotide
gaugccccugcuagacucu

SEQ ID NO: 670274 - RNA, 19 nt, Artificial Sequence
  Description of Artificial Sequence: Synthetic oligonucleotide
caaagcuauggagcuuugu

SEQ ID NO: 670275 - RNA, 19 nt, Artificial Sequence
  Description of Artificial Sequence: Synthetic oligonucleotide
ggcaucgaacacgguuccc

SEQ ID NO: 670276 - RNA, 19 nt, Artificial Sequence
  Description of Artificial Sequence: Synthetic oligonucleotide
  modified_base (7)..(7): a, c, u, g, unknown or other
cugggancaccgugucggu

SEQ ID NO: 670277 - RNA, 19 nt, Artificial Sequence
  Description of Artificial Sequence: Synthetic oligonucleotide
gccacgauucuguccaaau

SEQ ID NO: 670278 - RNA, 19 nt, Artificial Sequence
  Description of Artificial Sequence: Synthetic oligonucleotide
cugggugucgacccacuuu

SEQ ID NO: 670279 - RNA, 19 nt, Artificial Sequence
  Description of Artificial Sequence: Synthetic oligonucleotide
cugaccagagacgcauagu

SEQ ID NO: 670280 - RNA, 19 nt, Artificial Sequence
  Description of Artificial Sequence: Synthetic oligonucleotide
gccgaccauggggucauug

SEQ ID NO: 670281 - RNA, 19 nt, Artificial Sequence
  Description of Artificial Sequence: Synthetic oligonucleotide
cucaugcggucaaugucuu

SEQ ID NO: 670282 - RNA, 19 nt, Artificial Sequence
  Description of Artificial Sequence: Synthetic oligonucleotide
gaaaggcaucgaacacggu

SEQ ID NO: 670283 - RNA, 19 nt, Artificial Sequence
  Description of Artificial Sequence: Synthetic oligonucleotide
aggccacgauucuguccaa

SEQ ID NO: 670284 - RNA, 19 nt, Artificial Sequence
  Description of Artificial Sequence: Synthetic oligonucleotide
gccguuuguacucgugaau

SEQ ID NO: 670285 - RNA, 19 nt, Artificial Sequence
  Description of Artificial Sequence: Synthetic oligonucleotide
cauugggguagagcacucu

SEQ ID NO: 670286 - RNA, 19 nt, Artificial Sequence
  Description of Artificial Sequence: Synthetic oligonucleotide
guaaucccguugguuuuau

SEQ ID NO: 670287 - RNA, 19 nt, Artificial Sequence
  Description of Artificial Sequence: Synthetic oligonucleotide
gucgguugguauaggucau

SEQ ID NO: 670288 - RNA, 19 nt, Artificial Sequence
  Description of Artificial Sequence: Synthetic oligonucleotide
  modified_base (11)..(11): a, c, u, g, unknown or other
gccucugggancaccgugu

SEQ ID NO: 670289 - RNA, 19 nt, Artificial Sequence
  Description of Artificial Sequence: Synthetic oligonucleotide
cgaacacgguucccacgcc

SEQ ID NO: 670290 - RNA, 19 nt, Artificial Sequence
  Description of Artificial Sequence: Synthetic oligonucleotide
augccccugcuagacucuu

SEQ ID NO: 670291 - RNA, 19 nt, Artificial Sequence
  Description of Artificial Sequence: Synthetic oligonucleotide
gcaagcgcagggugugugu

SEQ ID NO: 670292 - RNA, 19 nt, Artificial Sequence
  Description of Artificial Sequence: Synthetic oligonucleotide
gucgaggcaguagcuucgu

SEQ ID NO: 670293 - RNA, 19 nt, Artificial Sequence
  Description of Artificial Sequence: Synthetic oligonucleotide
cgguugguauaggucauca

SEQ ID NO: 670294 - RNA, 19 nt, Artificial Sequence
  Description of Artificial Sequence: Synthetic oligonucleotide
cguugaugccccugcuaga

SEQ ID NO: 670295 - RNA, 19 nt, Artificial Sequence
  Description of Artificial Sequence: Synthetic oligonucleotide
cgucgcucacaaagcuaug

SEQ ID NO: 670296 - RNA, 19 nt, Artificial Sequence
  Description of Artificial Sequence: Synthetic oligonucleotide
ccuuaauuguccggucacu

SEQ ID NO: 670297 - RNA, 19 nt, Artificial Sequence
  Description of Artificial Sequence: Synthetic oligonucleotide
gcauaguguucaccguguu

SEQ ID NO: 670298 - RNA, 19 nt, Artificial Sequence
  Description of Artificial Sequence: Synthetic oligonucleotide
  modified_base (3)..(3): a, c, u, g, unknown or other
gancaccgugucgguuggu

SEQ ID NO: 670299 - RNA, 19 nt, Artificial Sequence
  Description of Artificial Sequence: Synthetic oligonucleotide
ccgugucgguugguauagg

SEQ ID NO: 670300 - RNA, 19 nt, Artificial Sequence
  Description of Artificial Sequence: Synthetic oligonucleotide
ggccacgauucuguccaaa

SEQ ID NO: 670301 - RNA, 19 nt, Artificial Sequence
  Description of Artificial Sequence: Synthetic oligonucleotide
gggccucauaauauucuuu

SEQ ID NO: 670302 - RNA, 19 nt, Artificial Sequence
  Description of Artificial Sequence: Synthetic oligonucleotide
gccaacgccucggaguaau

SEQ ID NO: 670303 - RNA, 19 nt, Artificial Sequence
  Description of Artificial Sequence: Synthetic oligonucleotide
cccguugaugccccugcua

SEQ ID NO: 670304 - RNA, 19 nt, Artificial Sequence
  Description of Artificial Sequence: Synthetic oligonucleotide
gcuacaccguucacugcau

SEQ ID NO: 670305 - RNA, 19 nt, Artificial Sequence
  Description of Artificial Sequence: Synthetic oligonucleotide
gggucgcagccaccacaaa

SEQ ID NO: 670306 - RNA, 19 nt, Artificial Sequence
  Description of Artificial Sequence: Synthetic oligonucleotide
caccggccagcgcuccagu

SEQ ID NO: 670307 - RNA, 19 nt, Artificial Sequence
  Description of Artificial Sequence: Synthetic oligonucleotide
gggugucgacccacuuugu

SEQ ID NO: 670308 - RNA, 19 nt, Artificial Sequence
  Description of Artificial Sequence: Synthetic oligonucleotide
ugccgaccauggggucauu

SEQ ID NO: 670309 - RNA, 19 nt, Artificial Sequence
  Description of Artificial Sequence: Synthetic oligonucleotide
cggaguaaucccguugguu

SEQ ID NO: 670310 - RNA, 19 nt, Artificial Sequence
  Description of Artificial Sequence: Synthetic oligonucleotide
cgccucggaguaaucccgu

SEQ ID NO: 670311 - RNA, 19 nt, Artificial Sequence
  Description of Artificial Sequence: Synthetic oligonucleotide
cguaguccgcaaagacuuu

SEQ ID NO: 670312 - RNA, 19 nt, Artificial Sequence
  Description of Artificial Sequence: Synthetic oligonucleotide
cgacccacuuugucccagu

SEQ ID NO: 670313 - RNA, 19 nt, Artificial Sequence
  Description of Artificial Sequence: Synthetic oligonucleotide
ccccguugaugccccugcu

SEQ ID NO: 670314 - RNA, 19 nt, Artificial Sequence
  Description of Artificial Sequence: Synthetic oligonucleotide
  modified_base (1)..(1): a, c, u, g, unknown or other
ncaccgugucgguugguau

SEQ ID NO: 670315 - RNA, 19 nt, Artificial Sequence
  Description of Artificial Sequence: Synthetic oligonucleotide
aagaguaucuauuacaagg

SEQ ID NO: 670316 - RNA, 19 nt, Artificial Sequence
  Description of Artificial Sequence: Synthetic oligonucleotide
uucaauaucucucagagcc

SEQ ID NO: 670317 - RNA, 19 nt, Artificial Sequence
  Description of Artificial Sequence: Synthetic oligonucleotide
gaaaguguuaaauacacgg

SEQ ID NO: 670318 - RNA, 19 nt, Artificial Sequence
  Description of Artificial Sequence: Synthetic oligonucleotide
uuuuauagccaucuaaggg

SEQ ID NO: 670319 - RNA, 19 nt, Artificial Sequence
  Description of Artificial Sequence: Synthetic oligonucleotide
uuuuaagccuauuuaagcg

SEQ ID NO: 670320 - RNA, 19 nt, Artificial Sequence
  Description of Artificial Sequence: Synthetic oligonucleotide
aguaaauaagacauguucc

SEQ ID NO: 670321 - RNA, 19 nt, Artificial Sequence
  Description of Artificial Sequence: Synthetic oligonucleotide
aauaaugccgugcccauuc

SEQ ID NO: 670322 - RNA, 19 nt, Artificial Sequence
  Description of Artificial Sequence: Synthetic oligonucleotide
uuuauagccaucuaaggga

SEQ ID NO: 670323 - RNA, 19 nt, Artificial Sequence
  Description of Artificial Sequence: Synthetic oligonucleotide
uuuuguugcaacuaucuug

SEQ ID NO: 670324 - RNA, 19 nt, Artificial Sequence
  Description of Artificial Sequence: Synthetic oligonucleotide
ucaauuacuuccuuuagcu

SEQ ID NO: 670325 - RNA, 19 nt, Artificial Sequence
  Description of Artificial Sequence: Synthetic oligonucleotide
aacaucuagcaaauaaacc

SEQ ID NO: 670326 - RNA, 19 nt, Artificial Sequence
  Description of Artificial Sequence: Synthetic oligonucleotide
aauacaacccaccaguaau

SEQ ID NO: 670327 - RNA, 19 nt, Artificial Sequence
  Description of Artificial Sequence: Synthetic oligonucleotide
aauuaagcaccaaucauuc

SEQ ID NO: 670328 - RNA, 19 nt, Artificial Sequence
  Description of Artificial Sequence: Synthetic oligonucleotide
ugaaaguucggcaauacaa

SEQ ID NO: 670329 - RNA, 19 nt, Artificial Sequence
  Description of Artificial Sequence: Synthetic oligonucleotide
uauuuaagcguuuaucugu

SEQ ID NO: 670330 - RNA, 19 nt, Artificial Sequence
  Description of Artificial Sequence: Synthetic oligonucleotide
uguuagagcugacagacug

SEQ ID NO: 670331 - RNA, 19 nt, Artificial Sequence
  Description of Artificial Sequence: Synthetic oligonucleotide
uuaucuaaaggauuggaaa

SEQ ID NO: 670332 - RNA, 19 nt, Artificial Sequence
  Description of Artificial Sequence: Synthetic oligonucleotide
cuacucuggauuuaaaagc

SEQ ID NO: 670333 - RNA, 19 nt, Artificial Sequence
  Description of Artificial Sequence: Synthetic oligonucleotide
acaagcaauaaauaagcug

SEQ ID NO: 670334 - RNA, 19 nt, Artificial Sequence
  Description of Artificial Sequence: Synthetic oligonucleotide
aaaucaaccugacuuccag

SEQ ID NO: 670335 - RNA, 19 nt, Artificial Sequence
  Description of Artificial Sequence: Synthetic oligonucleotide
cugucagucgcaaacaucc

SEQ ID NO: 670336 - RNA, 19 nt, Artificial Sequence
  Description of Artificial Sequence: Synthetic oligonucleotide
gauaaugaaggccacggac

SEQ ID NO: 670337 - RNA, 19 nt, Artificial Sequence
  Description of Artificial Sequence: Synthetic oligonucleotide
aaucaaccugacuuccagc

SEQ ID NO: 670338 - RNA, 19 nt, Artificial Sequence
  Description of Artificial Sequence: Synthetic oligonucleotide
ugauuuauaaaugcagcag

SEQ ID NO: 670339 - RNA, 19 nt, Artificial Sequence
  Description of Artificial Sequence: Synthetic oligonucleotide
uggaaaguguuaaauacac

SEQ ID NO: 670340 - RNA, 19 nt, Artificial Sequence
  Description of Artificial Sequence: Synthetic oligonucleotide
aguuuagucaucuauggaa

SEQ ID NO: 670341 - RNA, 19 nt, Artificial Sequence
  Description of Artificial Sequence: Synthetic oligonucleotide
aacccaucuccauaguaac

SEQ ID NO: 670342 - RNA, 19 nt, Artificial Sequence
  Description of Artificial Sequence: Synthetic oligonucleotide
auauaauguacugaaaaug

SEQ ID NO: 670343 - RNA, 19 nt, Artificial Sequence
  Description of Artificial Sequence: Synthetic oligonucleotide
uuccuuguggaauacauga

SEQ ID NO: 670344 - RNA, 19 nt, Artificial Sequence
  Description of Artificial Sequence: Synthetic oligonucleotide
auuacaaggcaauauuuca

SEQ ID NO: 670345 - RNA, 19 nt, Artificial Sequence
  Description of Artificial Sequence: Synthetic oligonucleotide
uacaguuuagucaucuaug

SEQ ID NO: 670346 - RNA, 19 nt, Artificial Sequence
  Description of Artificial Sequence: Synthetic oligonucleotide
uucaauuacuuccuuuagc

SEQ ID NO: 670347 - RNA, 19 nt, Artificial Sequence
  Description of Artificial Sequence: Synthetic oligonucleotide
agaguaucuauuacaaggc

SEQ ID NO: 670348 - RNA, 19 nt, Artificial Sequence
  Description of Artificial Sequence: Synthetic oligonucleotide
uauuaugccuacagguccg

SEQ ID NO: 670349 - RNA, 19 nt, Artificial Sequence
  Description of Artificial Sequence: Synthetic oligonucleotide
uuuaucuaaaggauuggaa

SEQ ID NO: 670350 - RNA, 19 nt, Artificial Sequence
  Description of Artificial Sequence: Synthetic oligonucleotide
aauaaacccaaagccagag

SEQ ID NO: 670351 - RNA, 19 nt, Artificial Sequence
  Description of Artificial Sequence: Synthetic oligonucleotide
uucguuuccacucuuuugu

SEQ ID NO: 670352 - RNA, 19 nt, Artificial Sequence
  Description of Artificial Sequence: Synthetic oligonucleotide
  modified_base (3)..(3): a, c, u, g, unknown or other
uanacuuucuacaguauua

SEQ ID NO: 670353 - RNA, 19 nt, Artificial Sequence
  Description of Artificial Sequence: Synthetic oligonucleotide
cuuugugcaguucugaaac

SEQ ID NO: 670354 - RNA, 19 nt, Artificial Sequence
  Description of Artificial Sequence: Synthetic oligonucleotide
caauaaauaagcugcuuug

SEQ ID NO: 670355 - RNA, 19 nt, Artificial Sequence
  Description of Artificial Sequence: Synthetic oligonucleotide
uuaagcaccaaucauucuu

SEQ ID NO: 670356 - RNA, 19 nt, Artificial Sequence
  Description of Artificial Sequence: Synthetic oligonucleotide
ugcuauugauaacaggagc

SEQ ID NO: 670357 - RNA, 19 nt, Artificial Sequence
  Description of Artificial Sequence: Synthetic oligonucleotide
gguucaauaucucucagag

SEQ ID NO: 670358 - RNA, 19 nt, Artificial Sequence
  Description of Artificial Sequence: Synthetic oligonucleotide
aaguucggcaauacaaccc

SEQ ID NO: 670359 - RNA, 19 nt, Artificial Sequence
  Description of Artificial Sequence: Synthetic oligonucleotide
uuuaagccuauuuaagcgu

SEQ ID NO: 670360 - RNA, 19 nt, Artificial Sequence
  Description of Artificial Sequence: Synthetic oligonucleotide
cucacaggcaccccgaucg

SEQ ID NO: 670361 - RNA, 19 nt, Artificial Sequence
  Description of Artificial Sequence: Synthetic oligonucleotide
auauuugcuauugauaaca

SEQ ID NO: 670362 - RNA, 19 nt, Artificial Sequence
  Description of Artificial Sequence: Synthetic oligonucleotide
aaccaacacaacuccaaag

SEQ ID NO: 670363 - RNA, 19 nt, Artificial Sequence
  Description of Artificial Sequence: Synthetic oligonucleotide
uaaaggauuggaaaguguu

SEQ ID NO: 670364 - RNA, 19 nt, Artificial Sequence
  Description of Artificial Sequence: Synthetic oligonucleotide
aaguguuucauggguuucc

SEQ ID NO: 670365 - RNA, 19 nt, Artificial Sequence
  Description of Artificial Sequence: Synthetic oligonucleotide
guauuaugccuacaggucc

SEQ ID NO: 670366 - RNA, 19 nt, Artificial Sequence
  Description of Artificial Sequence: Synthetic oligonucleotide
uggauuuaaaagcaccagu

SEQ ID NO: 670367 - RNA, 19 nt, Artificial Sequence
  Description of Artificial Sequence: Synthetic oligonucleotide
ugcucuuacagguaaguga

SEQ ID NO: 670368 - RNA, 19 nt, Artificial Sequence
  Description of Artificial Sequence: Synthetic oligonucleotide
  modified_base (8)..(8): a, c, u, g, unknown or other
ugcuguanacuuucuacag

SEQ ID NO: 670369 - RNA, 19 nt, Artificial Sequence
  Description of Artificial Sequence: Synthetic oligonucleotide
acaguauuaugccuacagg

SEQ ID NO: 670370 - RNA, 19 nt, Artificial Sequence
  Description of Artificial Sequence: Synthetic oligonucleotide
uccgcaaguaaauaagaca

SEQ ID NO: 670371 - RNA, 19 nt, Artificial Sequence
  Description of Artificial Sequence: Synthetic oligonucleotide
ucgggugugacaauggaac

SEQ ID NO: 670372 - RNA, 19 nt, Artificial Sequence
  Description of Artificial Sequence: Synthetic oligonucleotide
ucaguuuuggggaucccag

SEQ ID NO: 670373 - RNA, 19 nt, Artificial Sequence
  Description of Artificial Sequence: Synthetic oligonucleotide
uauuugcuauugauaacag

SEQ ID NO: 670374 - RNA, 19 nt, Artificial Sequence
  Description of Artificial Sequence: Synthetic oligonucleotide
aacauccgcaaguaaauaa

SEQ ID NO: 670375 - RNA, 19 nt, Artificial Sequence
  Description of Artificial Sequence: Synthetic oligonucleotide
aacgaugcuugcuguugcc

SEQ ID NO: 670376 - RNA, 19 nt, Artificial Sequence
  Description of Artificial Sequence: Synthetic oligonucleotide
ugagaaaauaaugccgugc

SEQ ID NO: 670377 - RNA, 19 nt, Artificial Sequence
  Description of Artificial Sequence: Synthetic oligonucleotide
uccaugucuaaguagcaug

SEQ ID NO: 670378 - RNA, 19 nt, Artificial Sequence
  Description of Artificial Sequence: Synthetic oligonucleotide
uucaucuuucuuaaagcgu

SEQ ID NO: 670379 - RNA, 19 nt, Artificial Sequence
  Description of Artificial Sequence: Synthetic oligonucleotide
accaacacaacuccaaaga

SEQ ID NO: 670380 - RNA, 19 nt, Artificial Sequence
  Description of Artificial Sequence: Synthetic oligonucleotide
aguauuaugccuacagguc

SEQ ID NO: 670381 - RNA, 19 nt, Artificial Sequence
  Description of Artificial Sequence: Synthetic oligonucleotide
uauugauaacaggagcagg

SEQ ID NO: 670382 - RNA, 19 nt, Artificial Sequence
  Description of Artificial Sequence: Synthetic oligonucleotide
uuaagcguuuaucuguuuc

SEQ ID NO: 670383 - RNA, 19 nt, Artificial Sequence
  Description of Artificial Sequence: Synthetic oligonucleotide
uacacggucuuuaauuuac

SEQ ID NO: 670384 - RNA, 19 nt, Artificial Sequence
  Description of Artificial Sequence: Synthetic oligonucleotide
uuauagccaucuaagggac

SEQ ID NO: 670385 - RNA, 19 nt, Artificial Sequence
  Description of Artificial Sequence: Synthetic oligonucleotide
aagcaccaaucauucuugc

SEQ ID NO: 670386 - RNA, 19 nt, Artificial Sequence
  Description of Artificial Sequence: Synthetic oligonucleotide
ucggaauugcacauaagaa

SEQ ID NO: 670387 - RNA, 19 nt, Artificial Sequence
  Description of Artificial Sequence: Synthetic oligonucleotide
aaucagacuuaggagucgg

SEQ ID NO: 670388 - RNA, 19 nt, Artificial Sequence
  Description of Artificial Sequence: Synthetic oligonucleotide
ugauaacaggagcaggcgc

SEQ ID NO: 670389 - RNA, 19 nt, Artificial Sequence
  Description of Artificial Sequence: Synthetic oligonucleotide
uuacaaggcaauauuucaa

SEQ ID NO: 670390 - RNA, 19 nt, Artificial Sequence
  Description of Artificial Sequence: Synthetic oligonucleotide
caucuaagggacuugguuc

SEQ ID NO: 670391 - RNA, 19 nt, Artificial Sequence
  Description of Artificial Sequence: Synthetic oligonucleotide
uaugauaaugaaggccacg

SEQ ID NO: 670392 - RNA, 19 nt, Artificial Sequence
  Description of Artificial Sequence: Synthetic oligonucleotide
uuuuaucuaaaggauugga

SEQ ID NO: 670393 - RNA, 19 nt, Artificial Sequence
  Description of Artificial Sequence: Synthetic oligonucleotide
uguaacauucgcagaacuc

SEQ ID NO: 670394 - RNA, 19 nt, Artificial Sequence
  Description of Artificial Sequence: Synthetic oligonucleotide
ugguggaaccacauuagug

SEQ ID NO: 670395 - RNA, 19 nt, Artificial Sequence
  Description of Artificial Sequence: Synthetic oligonucleotide
cucuaugauaaugaaggcc

SEQ ID NO: 670396 - RNA, 19 nt, Artificial Sequence
  Description of Artificial Sequence: Synthetic oligonucleotide
ugcuaaguguuucaugggu

SEQ ID NO: 670397 - RNA, 19 nt, Artificial Sequence
  Description of Artificial Sequence: Synthetic oligonucleotide
cauuagugucugaaggucc

SEQ ID NO: 670398 - RNA, 19 nt, Artificial Sequence
  Description of Artificial Sequence: Synthetic oligonucleotide
uggugauucgagcggaugc

SEQ ID NO: 670399 - RNA, 19 nt, Artificial Sequence
  Description of Artificial Sequence: Synthetic oligonucleotide
auaaauaagcugcuuugaa

SEQ ID NO: 670400 - RNA, 19 nt, Artificial Sequence
  Description of Artificial Sequence: Synthetic oligonucleotide
uaagggacuugguucaagc

SEQ ID NO: 670401 - RNA, 19 nt, Artificial Sequence
  Description of Artificial Sequence: Synthetic oligonucleotide
uaagcguuuaucuguuucu

SEQ ID NO: 670402 - RNA, 19 nt, Artificial Sequence
  Description of Artificial Sequence: Synthetic oligonucleotide
gaaaguucggcaauacaac

SEQ ID NO: 670403 - RNA, 19 nt, Artificial Sequence
  Description of Artificial Sequence: Synthetic oligonucleotide
  modified_base (2)..(2): a, c, u, g, unknown or other
anacuuucuacaguauuau

SEQ ID NO: 670404 - RNA, 19 nt, Artificial Sequence
  Description of Artificial Sequence: Synthetic oligonucleotide
uuuagucaucuauggaaga

SEQ ID NO: 670405 - RNA, 19 nt, Artificial Sequence
  Description of Artificial Sequence: Synthetic oligonucleotide
acggucuuuaauuuacaug

SEQ ID NO: 670406 - RNA, 19 nt, Artificial Sequence
  Description of Artificial Sequence: Synthetic oligonucleotide
uuucguuuccacucuuuug

SEQ ID NO: 670407 - RNA, 19 nt, Artificial Sequence
  Description of Artificial Sequence: Synthetic oligonucleotide
acagguaagugacaacaug

SEQ ID NO: 670408 - RNA, 19 nt, Artificial Sequence
  Description of Artificial Sequence: Synthetic oligonucleotide
acggacaggacaccugggc

SEQ ID NO: 670409 - RNA, 19 nt, Artificial Sequence
  Description of Artificial Sequence: Synthetic oligonucleotide
acagugugaaaccaacaca

SEQ ID NO: 670410 - RNA, 19 nt, Artificial Sequence
  Description of Artificial Sequence: Synthetic oligonucleotide
agucaucuauggaagaggg

SEQ ID NO: 670411 - RNA, 19 nt, Artificial Sequence
  Description of Artificial Sequence: Synthetic oligonucleotide
aagucguuuucuccauguc

SEQ ID NO: 670412 - RNA, 19 nt, Artificial Sequence
  Description of Artificial Sequence: Synthetic oligonucleotide
agacuuaggagucgggaug

SEQ ID NO: 670413 - RNA, 19 nt, Artificial Sequence
  Description of Artificial Sequence: Synthetic oligonucleotide
aguucggcaauacaaccca

SEQ ID NO: 670414 - RNA, 19 nt, Artificial Sequence
  Description of Artificial Sequence: Synthetic oligonucleotide
aucuaagggacuugguuca

SEQ ID NO: 670415 - RNA, 19 nt, Artificial Sequence
  Description of Artificial Sequence: Synthetic oligonucleotide
cacaacuccaaagaggaac

SEQ ID NO: 670416 - RNA, 19 nt, Artificial Sequence
  Description of Artificial Sequence: Synthetic oligonucleotide
ucucuaugauaaugaaggc

SEQ ID NO: 670417 - RNA, 19 nt, Artificial Sequence
  Description of Artificial Sequence: Synthetic oligonucleotide
ugcacaaaucagacuuagg

SEQ ID NO: 670418 - RNA, 19 nt, Artificial Sequence
  Description of Artificial Sequence: Synthetic oligonucleotide
aaagcaccaguuccccguc

SEQ ID NO: 670419 - RNA, 19 nt, Artificial Sequence
  Description of Artificial Sequence: Synthetic oligonucleotide
  modified_base (9)..(9): a, c, u, g, unknown or other
augcuguanacuuucuaca

SEQ ID NO: 670420 - RNA, 19 nt, Artificial Sequence
  Description of Artificial Sequence: Synthetic oligonucleotide
ucuacaguauuaugccuac

SEQ ID NO: 670421 - RNA, 19 nt, Artificial Sequence
  Description of Artificial Sequence: Synthetic oligonucleotide
cauaagaaggcuauuuaaa

SEQ ID NO: 670422 - RNA, 19 nt, Artificial Sequence
  Description of Artificial Sequence: Synthetic oligonucleotide
ucgaccaguugacacaaac

SEQ ID NO: 670423 - RNA, 19 nt, Artificial Sequence
  Description of Artificial Sequence: Synthetic oligonucleotide
uucggcaauacaacccacc

SEQ ID NO: 670424 - RNA, 19 nt, Artificial Sequence
  Description of Artificial Sequence: Synthetic oligonucleotide
uguuucauggguuucccuu

SEQ ID NO: 670425 - RNA, 19 nt, Artificial Sequence
  Description of Artificial Sequence: Synthetic oligonucleotide
accacauuagugucugaag

SEQ ID NO: 670426 - RNA, 19 nt, Artificial Sequence
  Description of Artificial Sequence: Synthetic oligonucleotide
aagcguuuaucuguuucuc

SEQ ID NO: 670427 - RNA, 19 nt, Artificial Sequence
  Description of Artificial Sequence: Synthetic oligonucleotide
cucggaauugcacauaaga

SEQ ID NO: 670428 - RNA, 19 nt, Artificial Sequence
  Description of Artificial Sequence: Synthetic oligonucleotide
uucagaccuguccuugucc

SEQ ID NO: 670429 - RNA, 19 nt, Artificial Sequence
  Description of Artificial Sequence: Synthetic oligonucleotide
uuaagccuauuuaagcguu

SEQ ID NO: 670430 - RNA, 19 nt, Artificial Sequence
  Description of Artificial Sequence: Synthetic oligonucleotide
uucgcagaacucauuauuu

SEQ ID NO: 670431 - RNA, 19 nt, Artificial Sequence
  Description of Artificial Sequence: Synthetic oligonucleotide
uaaagcguucaauuacuuc

SEQ ID NO: 670432 - RNA, 19 nt, Artificial Sequence
  Description of Artificial Sequence: Synthetic oligonucleotide
cagacuaacuacaguuuag

SEQ ID NO: 670433 - RNA, 19 nt, Artificial Sequence
  Description of Artificial Sequence: Synthetic oligonucleotide
  modified_base (5)..(5): a, c, u, g, unknown or other
uguanacuuucuacaguau

SEQ ID NO: 670434 - RNA, 19 nt, Artificial Sequence
  Description of Artificial Sequence: Synthetic oligonucleotide
uugcacauaagaaggcuau

SEQ ID NO: 670435 - RNA, 19 nt, Artificial Sequence
  Description of Artificial Sequence: Synthetic oligonucleotide
cgaagugucaguuuugggg

SEQ ID NO: 670436 - RNA, 19 nt, Artificial Sequence
  Description of Artificial Sequence: Synthetic oligonucleotide
auaaugaaggccacggaca

SEQ ID NO: 670437 - RNA, 19 nt, Artificial Sequence
  Description of Artificial Sequence: Synthetic oligonucleotide
ugauaaugaaggccacgga

SEQ ID NO: 670438 - RNA, 19 nt, Artificial Sequence
  Description of Artificial Sequence: Synthetic oligonucleotide
guagcucacaggcaccccg

SEQ ID NO: 670439 - RNA, 19 nt, Artificial Sequence
  Description of Artificial Sequence: Synthetic oligonucleotide
aaagccagaggucguugcu

SEQ ID NO: 670440 - RNA, 19 nt, Artificial Sequence
  Description of Artificial Sequence: Synthetic oligonucleotide
aagggacuugguucaagcu

SEQ ID NO: 670441 - RNA, 19 nt, Artificial Sequence
  Description of Artificial Sequence: Synthetic oligonucleotide
ucagacaaacgaugcuugc

SEQ ID NO: 670442 - RNA, 19 nt, Artificial Sequence
  Description of Artificial Sequence: Synthetic oligonucleotide
gauaacaggagcaggcgca

SEQ ID NO: 670443 - RNA, 19 nt, Artificial Sequence
  Description of Artificial Sequence: Synthetic oligonucleotide
caugggucacucuugggac

SEQ ID NO: 670444 - RNA, 19 nt, Artificial Sequence
  Description of Artificial Sequence: Synthetic oligonucleotide
acauccgcaaguaaauaag

SEQ ID NO: 670445 - RNA, 19 nt, Artificial Sequence
  Description of Artificial Sequence: Synthetic oligonucleotide
ugucagucgcaaacauccg

SEQ ID NO: 670446 - RNA, 19 nt, Artificial Sequence
  Description of Artificial Sequence: Synthetic oligonucleotide
auucgcagaacucauuauu

SEQ ID NO: 670447 - RNA, 19 nt, Artificial Sequence
  Description of Artificial Sequence: Synthetic oligonucleotide
gaguccauauuugcuauug

SEQ ID NO: 670448 - RNA, 19 nt, Artificial Sequence
  Description of Artificial Sequence: Synthetic oligonucleotide
auccgcaaguaaauaagac

SEQ ID NO: 670449 - RNA, 19 nt, Artificial Sequence
  Description of Artificial Sequence: Synthetic oligonucleotide
guuguguaggugcagggca

SEQ ID NO: 670450 - RNA, 19 nt, Artificial Sequence
  Description of Artificial Sequence: Synthetic oligonucleotide
uguugugaagcugucgggu

SEQ ID NO: 670451 - RNA, 19 nt, Artificial Sequence
  Description of Artificial Sequence: Synthetic oligonucleotide
ucagacuuaggagucggga

SEQ ID NO: 670452 - RNA, 19 nt, Artificial Sequence
  Description of Artificial Sequence: Synthetic oligonucleotide
gaguaucuauuacaaggca

SEQ ID NO: 670453 - RNA, 19 nt, Artificial Sequence
  Description of Artificial Sequence: Synthetic oligonucleotide
uaugccuacagguccgccu

SEQ ID NO: 670454 - RNA, 19 nt, Artificial Sequence
  Description of Artificial Sequence: Synthetic oligonucleotide
acauucgcagaacucauua

SEQ ID NO: 670455 - RNA, 19 nt, Artificial Sequence
  Description of Artificial Sequence: Synthetic oligonucleotide
ucagaccuguccuuguccu

SEQ ID NO: 670456 - RNA, 19 nt, Artificial Sequence
  Description of Artificial Sequence: Synthetic oligonucleotide
aaguagcauguucuccuca

SEQ ID NO: 670457 - RNA, 19 nt, Artificial Sequence
  Description of Artificial Sequence: Synthetic oligonucleotide
ccugguacauauaauguac

SEQ ID NO: 670458 - RNA, 19 nt, Artificial Sequence
  Description of Artificial Sequence: Synthetic oligonucleotide
  modified_base (6)..(6): a, c, u, g, unknown or other
cuguanacuuucuacagua

SEQ ID NO: 670459 - RNA, 19 nt, Artificial Sequence
  Description of Artificial Sequence: Synthetic oligonucleotide
uaacauucgcagaacucau

SEQ ID NO: 670460 - RNA, 19 nt, Artificial Sequence
  Description of Artificial Sequence: Synthetic oligonucleotide
aagaacaauuuuaucuaaa

SEQ ID NO: 670461 - RNA, 19 nt, Artificial Sequence
  Description of Artificial Sequence: Synthetic oligonucleotide
uacagguccgccugcgaag

SEQ ID NO: 670462 - RNA, 19 nt, Artificial Sequence
  Description of Artificial Sequence: Synthetic oligonucleotide
uuaaagcguucaauuacuu

SEQ ID NO: 670463 - RNA, 19 nt, Artificial Sequence
  Description of Artificial Sequence: Synthetic oligonucleotide
aguaucuauuacaaggcaa

SEQ ID NO: 670464 - RNA, 19 nt, Artificial Sequence
  Description of Artificial Sequence: Synthetic oligonucleotide
acaguuaggucugcaauca

SEQ ID NO: 670465 - RNA, 19 nt, Artificial Sequence
  Description of Artificial Sequence: Synthetic oligonucleotide
cuggauuuaaaagcaccag

SEQ ID NO: 670466 - RNA, 19 nt, Artificial Sequence
  Description of Artificial Sequence: Synthetic oligonucleotide
acuaucuuggcuccauuuu

SEQ ID NO: 670467 - RNA, 19 nt, Artificial Sequence
  Description of Artificial Sequence: Synthetic oligonucleotide
gacuuaggagucgggaugc

SEQ ID NO: 670468 - RNA, 19 nt, Artificial Sequence
  Description of Artificial Sequence: Synthetic oligonucleotide
guugugaagcugucgggug

SEQ ID NO: 670469 - RNA, 19 nt, Artificial Sequence
  Description of Artificial Sequence: Synthetic oligonucleotide
aaacugucuuuuguuguga

SEQ ID NO: 670470 - RNA, 19 nt, Artificial Sequence
  Description of Artificial Sequence: Synthetic oligonucleotide
uccuuguggaauacaugac

SEQ ID NO: 670471 - RNA, 19 nt, Artificial Sequence
  Description of Artificial Sequence: Synthetic oligonucleotide
acaggcaccccgaucgugc

SEQ ID NO: 670472 - RNA, 19 nt, Artificial Sequence
  Description of Artificial Sequence: Synthetic oligonucleotide
agucgcaaacauccgcaag

SEQ ID NO: 670473 - RNA, 19 nt, Artificial Sequence
  Description of Artificial Sequence: Synthetic oligonucleotide
agguucaauaucucucaga

SEQ ID NO: 670474 - RNA, 19 nt, Artificial Sequence
  Description of Artificial Sequence: Synthetic oligonucleotide
cuaugauaaugaaggccac

SEQ ID NO: 670475 - RNA, 19 nt, Artificial Sequence
  Description of Artificial Sequence: Synthetic oligonucleotide
uccagacuaacuacaguuu

SEQ ID NO: 670476 - RNA, 19 nt, Artificial Sequence
  Description of Artificial Sequence: Synthetic oligonucleotide
caguauuaugccuacaggu

SEQ ID NO: 670477 - RNA, 19 nt, Artificial Sequence
  Description of Artificial Sequence: Synthetic oligonucleotide
agacuaacuacaguuuagu

SEQ ID NO: 670478 - RNA, 19 nt, Artificial Sequence
  Description of Artificial Sequence: Synthetic oligonucleotide
uggcgcuugcucuuacagg

SEQ ID NO: 670479 - RNA, 19 nt, Artificial Sequence
  Description of Artificial Sequence: Synthetic oligonucleotide
uccgcuccagacuaacuac

SEQ ID NO: 670480 - RNA, 19 nt, Artificial Sequence
  Description of Artificial Sequence: Synthetic oligonucleotide
aguagcauguucuccucaa

SEQ ID NO: 670481 - RNA, 19 nt, Artificial Sequence
  Description of Artificial Sequence: Synthetic oligonucleotide
cggaauugcacauaagaag

SEQ ID NO: 670482 - RNA, 19 nt, Artificial Sequence
  Description of Artificial Sequence: Synthetic oligonucleotide
auuaagcaccaaucauucu

SEQ ID NO: 670483 - RNA, 19 nt, Artificial Sequence
  Description of Artificial Sequence: Synthetic oligonucleotide
caaagccagaggucguugc

SEQ ID NO: 670484 - RNA, 19 nt, Artificial Sequence
  Description of Artificial Sequence: Synthetic oligonucleotide
cuaaguagcauguucuccu

SEQ ID NO: 670485 - RNA, 19 nt, Artificial Sequence
  Description of Artificial Sequence: Synthetic oligonucleotide
aguuaggucugcaaucaug

SEQ ID NO: 670486 - RNA, 19 nt, Artificial Sequence
  Description of Artificial Sequence: Synthetic oligonucleotide
gacgcuuccuccauaugug

SEQ ID NO: 670487 - RNA, 19 nt, Artificial Sequence
  Description of Artificial Sequence: Synthetic oligonucleotide
ugucgggugugacaaugga

SEQ ID NO: 670488 - RNA, 19 nt, Artificial Sequence
  Description of Artificial Sequence: Synthetic oligonucleotide
cauccugcacaccaccagc

SEQ ID NO: 670489 - RNA, 19 nt, Artificial Sequence
  Description of Artificial Sequence: Synthetic oligonucleotide
guaccuggugacccgacgc

SEQ ID NO: 670490 - RNA, 19 nt, Artificial Sequence
  Description of Artificial Sequence: Synthetic oligonucleotide
cacaaguguaacauucgca

SEQ ID NO: 670491 - RNA, 19 nt, Artificial Sequence
  Description of Artificial Sequence: Synthetic oligonucleotide
cuuaaagcguucaauuacu

SEQ ID NO: 670492 - RNA, 19 nt, Artificial Sequence
  Description of Artificial Sequence: Synthetic oligonucleotide
accaguaauucuauuuugu

SEQ ID NO: 670493 - RNA, 19 nt, Artificial Sequence
  Description of Artificial Sequence: Synthetic oligonucleotide
gaagcugucgggugugaca

SEQ ID NO: 670494 - RNA, 19 nt, Artificial Sequence
  Description of Artificial Sequence: Synthetic oligonucleotide
agggacuugguucaagcuu

SEQ ID NO: 670495 - RNA, 19 nt, Artificial Sequence
  Description of Artificial Sequence: Synthetic oligonucleotide
gguggaaccacauuagugu

SEQ ID NO: 670496 - RNA, 19 nt, Artificial Sequence
  Description of Artificial Sequence: Synthetic oligonucleotide
caaacgaugcuugcuguug

SEQ ID NO: 670497 - RNA, 19 nt, Artificial Sequence
  Description of Artificial Sequence: Synthetic oligonucleotide
gaccaguugacacaaacuu

SEQ ID NO: 670498 - RNA, 19 nt, Artificial Sequence
  Description of Artificial Sequence: Synthetic oligonucleotide
aagcugucgggugugacaa

SEQ ID NO: 670499 - RNA, 19 nt, Artificial Sequence
  Description of Artificial Sequence: Synthetic oligonucleotide
uguaggugcagggcaaacu

SEQ ID NO: 670500 - RNA, 19 nt, Artificial Sequence
  Description of Artificial Sequence: Synthetic oligonucleotide
gcuauugauaacaggagca

SEQ ID NO: 670501 - RNA, 19 nt, Artificial Sequence
  Description of Artificial Sequence: Synthetic oligonucleotide
agccaucuaagggacuugg

SEQ ID NO: 670502 - RNA, 19 nt, Artificial Sequence
  Description of Artificial Sequence: Synthetic oligonucleotide
ugagcauugcauugucuuu

SEQ ID NO: 670503 - RNA, 19 nt, Artificial Sequence
  Description of Artificial Sequence: Synthetic oligonucleotide
cuggcgcuugcucuuacag

SEQ ID NO: 670504 - RNA, 19 nt, Artificial Sequence
  Description of Artificial Sequence: Synthetic oligonucleotide
aguuccccgucuuucacaa

SEQ ID NO: 670505 - RNA, 19 nt, Artificial Sequence
  Description of Artificial Sequence: Synthetic oligonucleotide
uuguguaggugcagggcaa

SEQ ID NO: 670506 - RNA, 19 nt, Artificial Sequence
  Description of Artificial Sequence: Synthetic oligonucleotide
gaagucguuuucuccaugu

SEQ ID NO: 670507 - RNA, 19 nt, Artificial Sequence
  Description of Artificial Sequence: Synthetic oligonucleotide
uugcucuuacagguaagug

SEQ ID NO: 670508 - RNA, 19 nt, Artificial Sequence
  Description of Artificial Sequence: Synthetic oligonucleotide
gcguuuaucuguuucucug

SEQ ID NO: 670509 - RNA, 19 nt, Artificial Sequence
  Description of Artificial Sequence: Synthetic oligonucleotide
ucguugcuggugauucgag

SEQ ID NO: 670510 - RNA, 19 nt, Artificial Sequence
  Description of Artificial Sequence: Synthetic oligonucleotide
ugcgagugagcauugcauu

SEQ ID NO: 670511 - RNA, 19 nt, Artificial Sequence
  Description of Artificial Sequence: Synthetic oligonucleotide
uauagccaucuaagggacu

SEQ ID NO: 670512 - RNA, 19 nt, Artificial Sequence
  Description of Artificial Sequence: Synthetic oligonucleotide
gagcggaugcuggaaaccc

SEQ ID NO: 670513 - RNA, 19 nt, Artificial Sequence
  Description of Artificial Sequence: Synthetic oligonucleotide
cugucgggugugacaaugg

SEQ ID NO: 670514 - RNA, 19 nt, Artificial Sequence
  Description of Artificial Sequence: Synthetic oligonucleotide
cauccgcaaguaaauaaga

SEQ ID NO: 670515 - RNA, 19 nt, Artificial Sequence
  Description of Artificial Sequence: Synthetic oligonucleotide
cauggguuucccuugccga

SEQ ID NO: 670516 - RNA, 19 nt, Artificial Sequence
  Description of Artificial Sequence: Synthetic oligonucleotide
ugugaagcugucgggugug

SEQ ID NO: 670517 - RNA, 19 nt, Artificial Sequence
  Description of Artificial Sequence: Synthetic oligonucleotide
auaaaugcagcaggaccga

SEQ ID NO: 670518 - RNA, 19 nt, Artificial Sequence
  Description of Artificial Sequence: Synthetic oligonucleotide
  modified_base (14)..(14): a, c, u, g, unknown or other
ucgggaugcuguanacuuu

SEQ ID NO: 670519 - RNA, 19 nt, Artificial Sequence
  Description of Artificial Sequence: Synthetic oligonucleotide
uaaaugcagcaggaccgag

SEQ ID NO: 670520 - RNA, 19 nt, Artificial Sequence
  Description of Artificial Sequence: Synthetic oligonucleotide
aaacauccgcaaguaaaua

SEQ ID NO: 670521 - RNA, 19 nt, Artificial Sequence
  Description of Artificial Sequence: Synthetic oligonucleotide
  modified_base (4)..(4): a, c, u, g, unknown or other
guanacuuucuacaguauu

SEQ ID NO: 670522 - RNA, 19 nt, Artificial Sequence
  Description of Artificial Sequence: Synthetic oligonucleotide
uuucccggggaagccaugc

SEQ ID NO: 670523 - RNA, 19 nt, Artificial Sequence
  Description of Artificial Sequence: Synthetic oligonucleotide
ucgcagaacucauuauuuu

SEQ ID NO: 670524 - RNA, 19 nt, Artificial Sequence
  Description of Artificial Sequence: Synthetic oligonucleotide
ugagcgccggguuguguag

SEQ ID NO: 670525 - RNA, 19 nt, Artificial Sequence
  Description of Artificial Sequence: Synthetic oligonucleotide
ugggacacuccugggacgc

SEQ ID NO: 670526 - RNA, 19 nt, Artificial Sequence
  Description of Artificial Sequence: Synthetic oligonucleotide
gaucgugccacugggcuca

SEQ ID NO: 670527 - RNA, 19 nt, Artificial Sequence
  Description of Artificial Sequence: Synthetic oligonucleotide
auagccaucuaagggacuu

SEQ ID NO: 670528 - RNA, 19 nt, Artificial Sequence
  Description of Artificial Sequence: Synthetic oligonucleotide
ccuauuuaagcguuuaucu

SEQ ID NO: 670529 - RNA, 19 nt, Artificial Sequence
  Description of Artificial Sequence: Synthetic oligonucleotide
  modified_base (16)..(16): a, c, u, g, unknown or other
agucgggaugcuguanacu

SEQ ID NO: 670530 - RNA, 19 nt, Artificial Sequence
  Description of Artificial Sequence: Synthetic oligonucleotide
accccgaucgugccacugg

SEQ ID NO: 670531 - RNA, 19 nt, Artificial Sequence
  Description of Artificial Sequence: Synthetic oligonucleotide
uccgccugcgaagugucag

SEQ ID NO: 670532 - RNA, 19 nt, Artificial Sequence
  Description of Artificial Sequence: Synthetic oligonucleotide
cugaagguccuguguggag

SEQ ID NO: 670533 - RNA, 19 nt, Artificial Sequence
  Description of Artificial Sequence: Synthetic oligonucleotide
gucgcaaacauccgcaagu

SEQ ID NO: 670534 - RNA, 19 nt, Artificial Sequence
  Description of Artificial Sequence: Synthetic oligonucleotide
ucucgaccaguugacacaa

SEQ ID NO: 670535 - RNA, 19 nt, Artificial Sequence
  Description of Artificial Sequence: Synthetic oligonucleotide
gucucgaccaguugacaca

SEQ ID NO: 670536 - RNA, 19 nt, Artificial Sequence
  Description of Artificial Sequence: Synthetic oligonucleotide
uucacacaugcugugucuc

SEQ ID NO: 670537 - RNA, 19 nt, Artificial Sequence
  Description of Artificial Sequence: Synthetic oligonucleotide
uugccgaaauuucuuucuu

SEQ ID NO: 670538 - RNA, 19 nt, Artificial Sequence
  Description of Artificial Sequence: Synthetic oligonucleotide
uaagccuauuuaagcguuu

SEQ ID NO: 670539 - RNA, 19 nt, Artificial Sequence
  Description of Artificial Sequence: Synthetic oligonucleotide
agccugguacauauaaugu

SEQ ID NO: 670540 - RNA, 19 nt, Artificial Sequence
  Description of Artificial Sequence: Synthetic oligonucleotide
auugcacauaagaaggcua

SEQ ID NO: 670541 - RNA, 19 nt, Artificial Sequence
  Description of Artificial Sequence: Synthetic oligonucleotide
  modified_base (17)..(17): a, c, u, g, unknown or other
gagucgggaugcuguanac

SEQ ID NO: 670542 - RNA, 19 nt, Artificial Sequence
  Description of Artificial Sequence: Synthetic oligonucleotide
auuuaagcguuuaucuguu

SEQ ID NO: 670543 - RNA, 19 nt, Artificial Sequence
  Description of Artificial Sequence: Synthetic oligonucleotide
uuaggucugcaaucaugau

SEQ ID NO: 670544 - RNA, 19 nt, Artificial Sequence
  Description of Artificial Sequence: Synthetic oligonucleotide
uccuccauaugugcagucu

SEQ ID NO: 670545 - RNA, 19 nt, Artificial Sequence
  Description of Artificial Sequence: Synthetic oligonucleotide
aagccuauuuaagcguuua

SEQ ID NO: 670546 - RNA, 19 nt, Artificial Sequence
  Description of Artificial Sequence: Synthetic oligonucleotide
acaaacgaugcuugcuguu

SEQ ID NO: 670547 - RNA, 19 nt, Artificial Sequence
  Description of Artificial Sequence: Synthetic oligonucleotide
cuugccgaaauuucuuucu

SEQ ID NO: 670548 - RNA, 19 nt, Artificial Sequence
  Description of Artificial Sequence: Synthetic oligonucleotide
uagcucacaggcaccccga

SEQ ID NO: 670549 - RNA, 19 nt, Artificial Sequence
  Description of Artificial Sequence: Synthetic oligonucleotide
caaacauccgcaaguaaau

SEQ ID NO: 670550 - RNA, 19 nt, Artificial Sequence
  Description of Artificial Sequence: Synthetic oligonucleotide
ugggacgcuuccuccauau

SEQ ID NO: 670551 - RNA, 19 nt, Artificial Sequence
  Description of Artificial Sequence: Synthetic oligonucleotide
uuuaagcguuuaucuguuu

SEQ ID NO: 670552 - RNA, 19 nt, Artificial Sequence
  Description of Artificial Sequence: Synthetic oligonucleotide
auggguuucccuugccgaa

SEQ ID NO: 670553 - RNA, 19 nt, Artificial Sequence
  Description of Artificial Sequence: Synthetic oligonucleotide
gugucaguuuuggggaucc

SEQ ID NO: 670554 - RNA, 19 nt, Artificial Sequence
  Description of Artificial Sequence: Synthetic oligonucleotide
uguugccacgcuguucaca

SEQ ID NO: 670555 - RNA, 19 nt, Artificial Sequence
  Description of Artificial Sequence: Synthetic oligonucleotide
auaaugccgugcccauuca

SEQ ID NO: 670556 - RNA, 19 nt, Artificial Sequence
  Description of Artificial Sequence: Synthetic oligonucleotide
cuaagggacuugguucaag

SEQ ID NO: 670557 - RNA, 19 nt, Artificial Sequence
  Description of Artificial Sequence: Synthetic oligonucleotide
caauacaacccaccaguaa

SEQ ID NO: 670558 - RNA, 19 nt, Artificial Sequence
  Description of Artificial Sequence: Synthetic oligonucleotide
aggaccgagccagaguuga

SEQ ID NO: 670559 - RNA, 19 nt, Artificial Sequence
  Description of Artificial Sequence: Synthetic oligonucleotide
ggguuguguaggugcaggg

SEQ ID NO: 670560 - RNA, 19 nt, Artificial Sequence
  Description of Artificial Sequence: Synthetic oligonucleotide
aaauaaugccgugcccauu

SEQ ID NO: 670561 - RNA, 19 nt, Artificial Sequence
  Description of Artificial Sequence: Synthetic oligonucleotide
cuuaggagucgggaugcug

SEQ ID NO: 670562 - RNA, 19 nt, Artificial Sequence
  Description of Artificial Sequence: Synthetic oligonucleotide
agccuauuuaagcguuuau

SEQ ID NO: 670563 - RNA, 19 nt, Artificial Sequence
  Description of Artificial Sequence: Synthetic oligonucleotide
guggaauacaugacacuga

SEQ ID NO: 670564 - RNA, 19 nt, Artificial Sequence
  Description of Artificial Sequence: Synthetic oligonucleotide
cugcaucaguguuagagcu

SEQ ID NO: 670565 - RNA, 19 nt, Artificial Sequence
  Description of Artificial Sequence: Synthetic oligonucleotide
uuaugccuacagguccgcc

SEQ ID NO: 670566 - RNA, 19 nt, Artificial Sequence
  Description of Artificial Sequence: Synthetic oligonucleotide
aguccuacucuggauuuaa

SEQ ID NO: 670567 - RNA, 19 nt, Artificial Sequence
  Description of Artificial Sequence: Synthetic oligonucleotide
uguagcucacaggcacccc

SEQ ID NO: 670568 - RNA, 19 nt, Artificial Sequence
  Description of Artificial Sequence: Synthetic oligonucleotide
aacauucgcagaacucauu

SEQ ID NO: 670569 - RNA, 19 nt, Artificial Sequence
  Description of Artificial Sequence: Synthetic oligonucleotide
gucauuucguuuccacucu

SEQ ID NO: 670570 - RNA, 19 nt, Artificial Sequence
  Description of Artificial Sequence: Synthetic oligonucleotide
cacucggaauugcacauaa

SEQ ID NO: 670571 - RNA, 19 nt, Artificial Sequence
  Description of Artificial Sequence: Synthetic oligonucleotide
ggcgcuugcucuuacaggu

SEQ ID NO: 670572 - RNA, 19 nt, Artificial Sequence
  Description of Artificial Sequence: Synthetic oligonucleotide
cugguacauauaauguacu

SEQ ID NO: 670573 - RNA, 19 nt, Artificial Sequence
  Description of Artificial Sequence: Synthetic oligonucleotide
auacaacccaccaguaauu

SEQ ID NO: 670574 - RNA, 19 nt, Artificial Sequence
  Description of Artificial Sequence: Synthetic oligonucleotide
ucguuuccacucuuuuguu

SEQ ID NO: 670575 - RNA, 19 nt, Artificial Sequence
  Description of Artificial Sequence: Synthetic oligonucleotide
guacugaaaaugagcuguc

SEQ ID NO: 670576 - RNA, 19 nt, Artificial Sequence
  Description of Artificial Sequence: Synthetic oligonucleotide
gugauucgagcggaugcug

SEQ ID NO: 670577 - RNA, 19 nt, Artificial Sequence
  Description of Artificial Sequence: Synthetic oligonucleotide
gcgaagugucaguuuuggg

SEQ ID NO: 670578 - RNA, 19 nt, Artificial Sequence
  Description of Artificial Sequence: Synthetic oligonucleotide
cuaaguguuucauggguuu

SEQ ID NO: 670579 - RNA, 19 nt, Artificial Sequence
  Description of Artificial Sequence: Synthetic oligonucleotide
  modified_base (7)..(7): a, c, u, g, unknown or other
gcuguanacuuucuacagu

SEQ ID NO: 670580 - RNA, 19 nt, Artificial Sequence
  Description of Artificial Sequence: Synthetic oligonucleotide
  modified_base (15)..(15): a, c, u, g, unknown or other
gucgggaugcuguanacuu

SEQ ID NO: 670581 - RNA, 19 nt, Artificial Sequence
  Description of Artificial Sequence: Synthetic oligonucleotide
ugccuacagguccgccugc

SEQ ID NO: 670582 - RNA, 19 nt, Artificial Sequence
  Description of Artificial Sequence: Synthetic oligonucleotide
uagccaucuaagggacuug

SEQ ID NO: 670583 - RNA, 19 nt, Artificial Sequence
  Description of Artificial Sequence: Synthetic oligonucleotide
acaccugggccgguaaaca

SEQ ID NO: 670584 - RNA, 19 nt, Artificial Sequence
  Description of Artificial Sequence: Synthetic oligonucleotide
ggacgcuuccuccauaugu

SEQ ID NO: 670585 - RNA, 19 nt, Artificial Sequence
  Description of Artificial Sequence: Synthetic oligonucleotide
ccgcaaguaaauaagacau

SEQ ID NO: 670586 - RNA, 19 nt, Artificial Sequence
  Description of Artificial Sequence: Synthetic oligonucleotide
gucguugcuggugauucga

SEQ ID NO: 670587 - RNA, 19 nt, Artificial Sequence
  Description of Artificial Sequence: Synthetic oligonucleotide
uucccggggaagccaugcu

SEQ ID NO: 670588 - RNA, 19 nt, Artificial Sequence
  Description of Artificial Sequence: Synthetic oligonucleotide
acagguccgccugcgaagu

SEQ ID NO: 670589 - RNA, 19 nt, Artificial Sequence
  Description of Artificial Sequence: Synthetic oligonucleotide
cuacagguccgccugcgaa

SEQ ID NO: 670590 - RNA, 19 nt, Artificial Sequence
  Description of Artificial Sequence: Synthetic oligonucleotide
ugcacauaagaaggcuauu

SEQ ID NO: 670591 - RNA, 19 nt, Artificial Sequence
  Description of Artificial Sequence: Synthetic oligonucleotide
caguuuuggggaucccaga

SEQ ID NO: 670592 - RNA, 19 nt, Artificial Sequence
  Description of Artificial Sequence: Synthetic oligonucleotide
cuccgcuccagacuaacua

SEQ ID NO: 670593 - RNA, 19 nt, Artificial Sequence
  Description of Artificial Sequence: Synthetic oligonucleotide
uggguuucccuugccgaaa

SEQ ID NO: 670594 - RNA, 19 nt, Artificial Sequence
  Description of Artificial Sequence: Synthetic oligonucleotide
  modified_base (18)..(18): a, c, u, g, unknown or other
ggagucgggaugcuguana

SEQ ID NO: 670595 - RNA, 19 nt, Artificial Sequence
  Description of Artificial Sequence: Synthetic oligonucleotide
acucggaauugcacauaag

SEQ ID NO: 670596 - RNA, 19 nt, Artificial Sequence
  Description of Artificial Sequence: Synthetic oligonucleotide
gcugucgggugugacaaug

SEQ ID NO: 670597 - RNA, 19 nt, Artificial Sequence
  Description of Artificial Sequence: Synthetic oligonucleotide
ggcaugggucacucuuggg

SEQ ID NO: 670598 - RNA, 19 nt, Artificial Sequence
  Description of Artificial Sequence: Synthetic oligonucleotide
ccuugccgaaauuucuuuc

SEQ ID NO: 670599 - RNA, 19 nt, Artificial Sequence
  Description of Artificial Sequence: Synthetic oligonucleotide
gccugguacauauaaugua

SEQ ID NO: 670600 - RNA, 19 nt, Artificial Sequence
  Description of Artificial Sequence: Synthetic oligonucleotide
caccaguuccccgucuuuc

SEQ ID NO: 670601 - RNA, 19 nt, Artificial Sequence
  Description of Artificial Sequence: Synthetic oligonucleotide
agguccgccugcgaagugu

SEQ ID NO: 670602 - RNA, 19 nt, Artificial Sequence
  Description of Artificial Sequence: Synthetic oligonucleotide
caucaguguuagagcugac

SEQ ID NO: 670603 - RNA, 19 nt, Artificial Sequence
  Description of Artificial Sequence: Synthetic oligonucleotide
ggauuggaaaguguuaaau

SEQ ID NO: 670604 - RNA, 19 nt, Artificial Sequence
  Description of Artificial Sequence: Synthetic oligonucleotide
caucagacaaacgaugcuu

SEQ ID NO: 670605 - RNA, 19 nt, Artificial Sequence
  Description of Artificial Sequence: Synthetic oligonucleotide
cgugccacugggcucaccc

SEQ ID NO: 670606 - RNA, 19 nt, Artificial Sequence
  Description of Artificial Sequence: Synthetic oligonucleotide
acacggucuuuaauuuaca

SEQ ID NO: 670607 - RNA, 19 nt, Artificial Sequence
  Description of Artificial Sequence: Synthetic oligonucleotide
ccuccauaugugcagucuc

SEQ ID NO: 670608 - RNA, 19 nt, Artificial Sequence
  Description of Artificial Sequence: Synthetic oligonucleotide
cuccaguaucagcugugca

SEQ ID NO: 670609 - RNA, 19 nt, Artificial Sequence
  Description of Artificial Sequence: Synthetic oligonucleotide
cuuucccggggaagccaug

SEQ ID NO: 670610 - RNA, 19 nt, Artificial Sequence
  Description of Artificial Sequence: Synthetic oligonucleotide
ccgucuuucacaaguguaa

SEQ ID NO: 670611 - RNA, 19 nt, Artificial Sequence
  Description of Artificial Sequence: Synthetic oligonucleotide
cugcgagugagcauugcau

SEQ ID NO: 670612 - RNA, 19 nt, Artificial Sequence
  Description of Artificial Sequence: Synthetic oligonucleotide
gucgggugugacaauggaa

SEQ ID NO: 670613 - RNA, 19 nt, Artificial Sequence
  Description of Artificial Sequence: Synthetic oligonucleotide
agggcuggcgcuugcucuu

SEQ ID NO: 670614 - RNA, 19 nt, Artificial Sequence
  Description of Artificial Sequence: Synthetic oligonucleotide
guuccccgucuuucacaag

SEQ ID NO: 670615 - RNA, 19 nt, Artificial Sequence
  Description of Artificial Sequence: Synthetic oligonucleotide
cacggucuuuaauuuacau

SEQ ID NO: 670616 - RNA, 19 nt, Artificial Sequence
  Description of Artificial Sequence: Synthetic oligonucleotide
ccagacuaacuacaguuua

SEQ ID NO: 670617 - RNA, 19 nt, Artificial Sequence
  Description of Artificial Sequence: Synthetic oligonucleotide
cauucgcagaacucauuau

SEQ ID NO: 670618 - RNA, 19 nt, Artificial Sequence
  Description of Artificial Sequence: Synthetic oligonucleotide
cagucgcaaacauccgcaa

SEQ ID NO: 670619 - RNA, 19 nt, Artificial Sequence
  Description of Artificial Sequence: Synthetic oligonucleotide
gccgugcccauucaccuga

SEQ ID NO: 670620 - RNA, 19 nt, Artificial Sequence
  Description of Artificial Sequence: Synthetic oligonucleotide
gcagcccaucuuucccggg

SEQ ID NO: 670621 - RNA, 19 nt, Artificial Sequence
  Description of Artificial Sequence: Synthetic oligonucleotide
cguaccuggugacccgacg

SEQ ID NO: 670622 - RNA, 19 nt, Artificial Sequence
  Description of Artificial Sequence: Synthetic oligonucleotide
cauuucguuuccacucuuu

SEQ ID NO: 670623 - RNA, 19 nt, Artificial Sequence
  Description of Artificial Sequence: Synthetic oligonucleotide
cgucuuucacaaguguaac

SEQ ID NO: 670624 - RNA, 19 nt, Artificial Sequence
  Description of Artificial Sequence: Synthetic oligonucleotide
ggugauucgagcggaugcu

SEQ ID NO: 670625 - RNA, 19 nt, Artificial Sequence
  Description of Artificial Sequence: Synthetic oligonucleotide
gccuacagguccgccugcg

SEQ ID NO: 670626 - RNA, 19 nt, Artificial Sequence
  Description of Artificial Sequence: Synthetic oligonucleotide
ggccgguaaacagugugaa

SEQ ID NO: 670627 - RNA, 19 nt, Artificial Sequence
  Description of Artificial Sequence: Synthetic oligonucleotide
accuggugacccgacgcuu

SEQ ID NO: 670628 - RNA, 19 nt, Artificial Sequence
  Description of Artificial Sequence: Synthetic oligonucleotide
gggacgcuuccuccauaug

SEQ ID NO: 670629 - RNA, 19 nt, Artificial Sequence
  Description of Artificial Sequence: Synthetic oligonucleotide
cccgucuuucacaagugua

SEQ ID NO: 670630 - RNA, 19 nt, Artificial Sequence
  Description of Artificial Sequence: Synthetic oligonucleotide
agcugucgggugugacaau

SEQ ID NO: 670631 - RNA, 19 nt, Artificial Sequence
  Description of Artificial Sequence: Synthetic oligonucleotide
gcucacaggcaccccgauc

SEQ ID NO: 670632 - RNA, 19 nt, Artificial Sequence
  Description of Artificial Sequence: Synthetic oligonucleotide
ccgagccagaguugagcac

SEQ ID NO: 670633 - RNA, 19 nt, Artificial Sequence
  Description of Artificial Sequence: Synthetic oligonucleotide
cgagcggaugcuggaaacc

SEQ ID NO: 670634 - RNA, 19 nt, Artificial Sequence
  Description of Artificial Sequence: Synthetic oligonucleotide
ccaucuaagggacuugguu

SEQ ID NO: 670635 - RNA, 19 nt, Artificial Sequence
  Description of Artificial Sequence: Synthetic oligonucleotide
caccccgaucgugccacug

SEQ ID NO: 670636 - RNA, 19 nt, Artificial Sequence
  Description of Artificial Sequence: Synthetic oligonucleotide
gcuaaguguuucauggguu

SEQ ID NO: 670637 - RNA, 19 nt, Artificial Sequence
  Description of Artificial Sequence: Synthetic oligonucleotide
cagguccgccugcgaagug

SEQ ID NO: 670638 - RNA, 19 nt, Artificial Sequence
  Description of Artificial Sequence: Synthetic oligonucleotide
ccgcuccagacuaacuaca

SEQ ID NO: 670639 - RNA, 19 nt, Artificial Sequence
  Description of Artificial Sequence: Synthetic oligonucleotide
ccugcgaagugucaguuuu

SEQ ID NO: 670640 - RNA, 19 nt, Artificial Sequence
  Description of Artificial Sequence: Synthetic oligonucleotide
ggaccgagccagaguugag

SEQ ID NO: 670641 - RNA, 19 nt, Artificial Sequence
  Description of Artificial Sequence: Synthetic oligonucleotide
guccuacucuggauuuaaa

SEQ ID NO: 670642 - RNA, 19 nt, Artificial Sequence
  Description of Artificial Sequence: Synthetic oligonucleotide
gcaguccuacucuggauuu

SEQ ID NO: 670643 - RNA, 19 nt, Artificial Sequence
  Description of Artificial Sequence: Synthetic oligonucleotide
ggacuugguucaagcuuga

SEQ ID NO: 670644 - RNA, 19 nt, Artificial Sequence
  Description of Artificial Sequence: Synthetic oligonucleotide
gguccgccugcgaaguguc

SEQ ID NO: 670645 - RNA, 19 nt, Artificial Sequence
  Description of Artificial Sequence: Synthetic oligonucleotide
cgaucgugccacugggcuc

SEQ ID NO: 670646 - RNA, 19 nt, Artificial Sequence
  Description of Artificial Sequence: Synthetic oligonucleotide
ccauucaccugaagucaaa

SEQ ID NO: 670647 - RNA, 19 nt, Artificial Sequence
  Description of Artificial Sequence: Synthetic oligonucleotide
uggugacccgacgcuucuu

SEQ ID NO: 670648 - RNA, 19 nt, Artificial Sequence
  Description of Artificial Sequence: Synthetic oligonucleotide
cucgaccaguugacacaaa

SEQ ID NO: 670649 - RNA, 19 nt, Artificial Sequence
  Description of Artificial Sequence: Synthetic oligonucleotide
cgggugugacaauggaaca

SEQ ID NO: 670650 - RNA, 19 nt, Artificial Sequence
  Description of Artificial Sequence: Synthetic oligonucleotide
caguccuacucuggauuua

SEQ ID NO: 670651 - RNA, 19 nt, Artificial Sequence
  Description of Artificial Sequence: Synthetic oligonucleotide
gaggucguugcuggugauu

SEQ ID NO: 670652 - RNA, 19 nt, Artificial Sequence
  Description of Artificial Sequence: Synthetic oligonucleotide
ccgaaauuucuuucuugau

SEQ ID NO: 670653 - RNA, 19 nt, Artificial Sequence
  Description of Artificial Sequence: Synthetic oligonucleotide
gugacccgacgcuucuuuu

SEQ ID NO: 670654 - RNA, 19 nt, Artificial Sequence
  Description of Artificial Sequence: Synthetic oligonucleotide
caguuaggucugcaaucau

SEQ ID NO: 670655 - RNA, 19 nt, Artificial Sequence
  Description of Artificial Sequence: Synthetic oligonucleotide
cugggacgcuuccuccaua

SEQ ID NO: 670656 - RNA, 19 nt, Artificial Sequence
  Description of Artificial Sequence: Synthetic oligonucleotide
caacuccaaagaggaacau

SEQ ID NO: 670657 - RNA, 19 nt, Artificial Sequence
  Description of Artificial Sequence: Synthetic oligonucleotide
ccggguuguguaggugcag

SEQ ID NO: 670658 - RNA, 19 nt, Artificial Sequence
  Description of Artificial Sequence: Synthetic oligonucleotide
caccagccugguacauaua

SEQ ID NO: 670659 - RNA, 19 nt, Artificial Sequence
  Description of Artificial Sequence: Synthetic oligonucleotide
ccccugcgagugagcauug

SEQ ID NO: 670660 - RNA, 19 nt, Artificial Sequence
  Description of Artificial Sequence: Synthetic oligonucleotide
cgcaaacauccgcaaguaa

SEQ ID NO: 670661 - RNA, 19 nt, Artificial Sequence
  Description of Artificial Sequence: Synthetic oligonucleotide
cccugcgagugagcauugc

SEQ ID NO: 670662 - RNA, 19 nt, Artificial Sequence
  Description of Artificial Sequence: Synthetic oligonucleotide
gcggaugcuggaaacccuu

SEQ ID NO: 670663 - RNA, 19 nt, Artificial Sequence
  Description of Artificial Sequence: Synthetic oligonucleotide
gcuccgcuccagacuaacu

SEQ ID NO: 670664 - RNA, 19 nt, Artificial Sequence
  Description of Artificial Sequence: Synthetic oligonucleotide
gcgcuugcucuuacaggua

SEQ ID NO: 670665 - RNA, 19 nt, Artificial Sequence
  Description of Artificial Sequence: Synthetic oligonucleotide
ccgccugcgaagugucagu

SEQ ID NO: 670666 - RNA, 19 nt, Artificial Sequence
  Description of Artificial Sequence: Synthetic oligonucleotide
ccgugcccauucaccugaa

SEQ ID NO: 670667 - RNA, 19 nt, Artificial Sequence
  Description of Artificial Sequence: Synthetic oligonucleotide
gcaccccgaucgugccacu

SEQ ID NO: 670668 - RNA, 19 nt, Artificial Sequence
  Description of Artificial Sequence: Synthetic oligonucleotide
aagugaucaccauagaugc

SEQ ID NO: 670669 - RNA, 19 nt, Artificial Sequence
  Description of Artificial Sequence: Synthetic oligonucleotide
uuuaguaccucuaauaucu

SEQ ID NO: 670670 - RNA, 19 nt, Artificial Sequence
  Description of Artificial Sequence: Synthetic oligonucleotide
aacaucacugaauaauggc

SEQ ID NO: 670671 - RNA, 19 nt, Artificial Sequence
  Description of Artificial Sequence: Synthetic oligonucleotide
ucuucuaacaaucugccag

SEQ ID NO: 670672 - RNA, 19 nt, Artificial Sequence
  Description of Artificial Sequence: Synthetic oligonucleotide
acaaguauuugucugggcc

SEQ ID NO: 670673 - RNA, 19 nt, Artificial Sequence
  Description of Artificial Sequence: Synthetic oligonucleotide
agucauuucauauaguaag

SEQ ID NO: 670674 - RNA, 19 nt, Artificial Sequence
  Description of Artificial Sequence: Synthetic oligonucleotide
uuuccaaucaguuucuuag

SEQ ID NO: 670675 - RNA, 19 nt, Artificial Sequence
  Description of Artificial Sequence: Synthetic oligonucleotide
ucagaagugaucaccauag

SEQ ID NO: 670676 - RNA, 19 nt, Artificial Sequence
  Description of Artificial Sequence: Synthetic oligonucleotide
aguguuaccauccaucauc

SEQ ID NO: 670677 - RNA, 19 nt, Artificial Sequence
  Description of Artificial Sequence: Synthetic oligonucleotide
aaaucgaagucacuguauc

SEQ ID NO: 670678 - RNA, 19 nt, Artificial Sequence
  Description of Artificial Sequence: Synthetic oligonucleotide
ugccuuguagaucagaucc

SEQ ID NO: 670679 - RNA, 19 nt, Artificial Sequence
  Description of Artificial Sequence: Synthetic oligonucleotide
aagugcaacuuauuuaaag

SEQ ID NO: 670680 - RNA, 19 nt, Artificial Sequence
  Description of Artificial Sequence: Synthetic oligonucleotide
aauccuuuaaagugcaacu

SEQ ID NO: 670681 - RNA, 19 nt, Artificial Sequence
  Description of Artificial Sequence: Synthetic oligonucleotide
cauuucauauaguaagugg

SEQ ID NO: 670682 - RNA, 19 nt, Artificial Sequence
  Description of Artificial Sequence: Synthetic oligonucleotide
uuuuagaggcuucacaaga

SEQ ID NO: 670683 - RNA, 19 nt, Artificial Sequence
  Description of Artificial Sequence: Synthetic oligonucleotide
aaguaaaucgaagucacug

SEQ ID NO: 670684 - RNA, 19 nt, Artificial Sequence
  Description of Artificial Sequence: Synthetic oligonucleotide
gcuguuguuaaguaaaucg

SEQ ID NO: 670685 - RNA, 19 nt, Artificial Sequence
  Description of Artificial Sequence: Synthetic oligonucleotide
uuucuuucgagcuaggauc

SEQ ID NO: 670686 - RNA, 19 nt, Artificial Sequence
  Description of Artificial Sequence: Synthetic oligonucleotide
aauuggacaacacaugauu

SEQ ID NO: 670687 - RNA, 19 nt, Artificial Sequence
  Description of Artificial Sequence: Synthetic oligonucleotide
uguuaaguaaaucgaaguc

SEQ ID NO: 670688 - RNA, 19 nt, Artificial Sequence
  Description of Artificial Sequence: Synthetic oligonucleotide
auaucugccguccauaugu

SEQ ID NO: 670689 - RNA, 19 nt, Artificial Sequence
  Description of Artificial Sequence: Synthetic oligonucleotide
uguaucuucuaacaaucug

SEQ ID NO: 670690 - RNA, 19 nt, Artificial Sequence
  Description of Artificial Sequence: Synthetic oligonucleotide
ucguccauaagucauuuca

SEQ ID NO: 670691 - RNA, 19 nt, Artificial Sequence
  Description of Artificial Sequence: Synthetic oligonucleotide
uucuaaucagcaaugcuga

SEQ ID NO: 670692 - RNA, 19 nt, Artificial Sequence
  Description of Artificial Sequence: Synthetic oligonucleotide
gaugauauauuccgugugc

SEQ ID NO: 670693 - RNA, 19 nt, Artificial Sequence
  Description of Artificial Sequence: Synthetic oligonucleotide
aauacagcugaguauguau

SEQ ID NO: 670694 - RNA, 19 nt, Artificial Sequence
  Description of Artificial Sequence: Synthetic oligonucleotide
uaucuucuaacaaucugcc

SEQ ID NO: 670695 - RNA, 19 nt, Artificial Sequence
  Description of Artificial Sequence: Synthetic oligonucleotide
ucuuguuagucuucgaugu

SEQ ID NO: 670696 - RNA, 19 nt, Artificial Sequence
  Description of Artificial Sequence: Synthetic oligonucleotide
uaaugcagaagacagcccu

SEQ ID NO: 670697 - RNA, 19 nt, Artificial Sequence
  Description of Artificial Sequence: Synthetic oligonucleotide
uguuguaaggcgaucucag

SEQ ID NO: 670698 - RNA, 19 nt, Artificial Sequence
  Description of Artificial Sequence: Synthetic oligonucleotide
auaagggaaucccuugucg

SEQ ID NO: 670699 - RNA, 19 nt, Artificial Sequence
  Description of Artificial Sequence: Synthetic oligonucleotide
uuaccauccaucaucacau

SEQ ID NO: 670700 - RNA, 19 nt, Artificial Sequence
  Description of Artificial Sequence: Synthetic oligonucleotide
uacacuuuccaauguauug

SEQ ID NO: 670701 - RNA, 19 nt, Artificial Sequence
  Description of Artificial Sequence: Synthetic oligonucleotide
gagguaaugcagaagacag

SEQ ID NO: 670702 - RNA, 19 nt, Artificial Sequence
  Description of Artificial Sequence: Synthetic oligonucleotide
uguaagagccgggagacgg

SEQ ID NO: 670703 - RNA, 19 nt, Artificial Sequence
  Description of Artificial Sequence: Synthetic oligonucleotide
uuaaagugcaacuuauuua

SEQ ID NO: 670704 - RNA, 19 nt, Artificial Sequence
  Description of Artificial Sequence: Synthetic oligonucleotide
uagucuucgauguugguga

SEQ ID NO: 670705 - RNA, 19 nt, Artificial Sequence
  Description of Artificial Sequence: Synthetic oligonucleotide
aacuuuaguaccucuaaua

SEQ ID NO: 670706 - RNA, 19 nt, Artificial Sequence
  Description of Artificial Sequence: Synthetic oligonucleotide
aacccgauauauguaaggg

SEQ ID NO: 670707 - RNA, 19 nt, Artificial Sequence
  Description of Artificial Sequence: Synthetic oligonucleotide
uuaaacuguggcuuuucag

SEQ ID NO: 670708 - RNA, 19 nt, Artificial Sequence
  Description of Artificial Sequence: Synthetic oligonucleotide
uuguaaggcgaucucagug

SEQ ID NO: 670709 - RNA, 19 nt, Artificial Sequence
  Description of Artificial Sequence: Synthetic oligonucleotide
acaauuggacaacacauga

SEQ ID NO: 670710 - RNA, 19 nt, Artificial Sequence
  Description of Artificial Sequence: Synthetic oligonucleotide
ugaugauauauuccgugug

SEQ ID NO: 670711 - RNA, 19 nt, Artificial Sequence
  Description of Artificial Sequence: Synthetic oligonucleotide
uguuguuaaguaaaucgaa

SEQ ID NO: 670712 - RNA, 19 nt, Artificial Sequence
  Description of Artificial Sequence: Synthetic oligonucleotide
uuugcagaauaguuguuug

SEQ ID NO: 670713 - RNA, 19 nt, Artificial Sequence
  Description of Artificial Sequence: Synthetic oligonucleotide
cacaagacagcguagacuc

SEQ ID NO: 670714 - RNA, 19 nt, Artificial Sequence
  Description of Artificial Sequence: Synthetic oligonucleotide
guucuaaucagcaaugcug

SEQ ID NO: 670715 - RNA, 19 nt, Artificial Sequence
  Description of Artificial Sequence: Synthetic oligonucleotide
auagaugccagauucacuu

SEQ ID NO: 670716 - RNA, 19 nt, Artificial Sequence
  Description of Artificial Sequence: Synthetic oligonucleotide
ugaguuauuggaguugugc

SEQ ID NO: 670717 - RNA, 19 nt, Artificial Sequence
  Description of Artificial Sequence: Synthetic oligonucleotide
auuagccgcaugaagaugg

SEQ ID NO: 670718 - RNA, 19 nt, Artificial Sequence
  Description of Artificial Sequence: Synthetic oligonucleotide
agaauaguuguuugggucu

SEQ ID NO: 670719 - RNA, 19 nt, Artificial Sequence
  Description of Artificial Sequence: Synthetic oligonucleotide
cuugauugcacacugaaaa

SEQ ID NO: 670720 - RNA, 19 nt, Artificial Sequence
  Description of Artificial Sequence: Synthetic oligonucleotide
uauccuccaaccuaugucu

SEQ ID NO: 670721 - RNA, 19 nt, Artificial Sequence
  Description of Artificial Sequence: Synthetic oligonucleotide
uaacccgauauauguaagg

SEQ ID NO: 670722 - RNA, 19 nt, Artificial Sequence
  Description of Artificial Sequence: Synthetic oligonucleotide
acuuuaguaccucuaauau

SEQ ID NO: 670723 - RNA, 19 nt, Artificial Sequence
  Description of Artificial Sequence: Synthetic oligonucleotide
aagaggcaaacucagcccu

SEQ ID NO: 670724 - RNA, 19 nt, Artificial Sequence
  Description of Artificial Sequence: Synthetic oligonucleotide
gaagcuugauugcacacug

SEQ ID NO: 670725 - RNA, 19 nt, Artificial Sequence
  Description of Artificial Sequence: Synthetic oligonucleotide
ucuucaacgagucucuuuu

SEQ ID NO: 670726 - RNA, 19 nt, Artificial Sequence
  Description of Artificial Sequence: Synthetic oligonucleotide
ugaggauucacuagccgug

SEQ ID NO: 670727 - RNA, 19 nt, Artificial Sequence
  Description of Artificial Sequence: Synthetic oligonucleotide
ucgauguuggugaaucugc

SEQ ID NO: 670728 - RNA, 19 nt, Artificial Sequence
  Description of Artificial Sequence: Synthetic oligonucleotide
cuaccaagaaacgucagcc

SEQ ID NO: 670729 - RNA, 19 nt, Artificial Sequence
  Description of Artificial Sequence: Synthetic oligonucleotide
agcccugcaaucugcaagc

SEQ ID NO: 670730 - RNA, 19 nt, Artificial Sequence
  Description of Artificial Sequence: Synthetic oligonucleotide
uuauccuccaaccuauguc

SEQ ID NO: 670731 - RNA, 19 nt, Artificial Sequence
  Description of Artificial Sequence: Synthetic oligonucleotide
ucacauuagccgcaugaag

SEQ ID NO: 670732 - RNA, 19 nt, Artificial Sequence
  Description of Artificial Sequence: Synthetic oligonucleotide
aguaaaucgaagucacugu

SEQ ID NO: 670733 - RNA, 19 nt, Artificial Sequence
  Description of Artificial Sequence: Synthetic oligonucleotide
aaucgaagucacuguaucu

SEQ ID NO: 670734 - RNA, 19 nt, Artificial Sequence
  Description of Artificial Sequence: Synthetic oligonucleotide
ucuuuaucugacaaguauu

SEQ ID NO: 670735 - RNA, 19 nt, Artificial Sequence
  Description of Artificial Sequence: Synthetic oligonucleotide
uguaaggcgaucucagugu

SEQ ID NO: 670736 - RNA, 19 nt, Artificial Sequence
  Description of Artificial Sequence: Synthetic oligonucleotide
guuguuaaguaaaucgaag

SEQ ID NO: 670737 - RNA, 19 nt, Artificial Sequence
  Description of Artificial Sequence: Synthetic oligonucleotide
uuuagaggcuucacaagac

SEQ ID NO: 670738 - RNA, 19 nt, Artificial Sequence
  Description of Artificial Sequence: Synthetic oligonucleotide
agaucuagcagccggcaag

SEQ ID NO: 670739 - RNA, 19 nt, Artificial Sequence
  Description of Artificial Sequence: Synthetic oligonucleotide
acgagucucuuuucuauac

SEQ ID NO: 670740 - RNA, 19 nt, Artificial Sequence
  Description of Artificial Sequence: Synthetic oligonucleotide
uuugggucuaggaacuucu

SEQ ID NO: 670741 - RNA, 19 nt, Artificial Sequence
  Description of Artificial Sequence: Synthetic oligonucleotide
cuucuaacaaucugccagc

SEQ ID NO: 670742 - RNA, 19 nt, Artificial Sequence
  Description of Artificial Sequence: Synthetic oligonucleotide
gacgauggggaugugagag

SEQ ID NO: 670743 - RNA, 19 nt, Artificial Sequence
  Description of Artificial Sequence: Synthetic oligonucleotide
uuuucuuaggguugcagua

SEQ ID NO: 670744 - RNA, 19 nt, Artificial Sequence
  Description of Artificial Sequence: Synthetic oligonucleotide
aacgucagccaaucuuagg

SEQ ID NO: 670745 - RNA, 19 nt, Artificial Sequence
  Description of Artificial Sequence: Synthetic oligonucleotide
aaccuaugucuuucagugg

SEQ ID NO: 670746 - RNA, 19 nt, Artificial Sequence
  Description of Artificial Sequence: Synthetic oligonucleotide
cuaaucagcaaugcugagg

SEQ ID NO: 670747 - RNA, 19 nt, Artificial Sequence
  Description of Artificial Sequence: Synthetic oligonucleotide
agaagugaucaccauagau

SEQ ID NO: 670748 - RNA, 19 nt, Artificial Sequence
  Description of Artificial Sequence: Synthetic oligonucleotide
uauauguaagggugcacac

SEQ ID NO: 670749 - RNA, 19 nt, Artificial Sequence
  Description of Artificial Sequence: Synthetic oligonucleotide
acgucagccaaucuuagga

SEQ ID NO: 670750 - RNA, 19 nt, Artificial Sequence
  Description of Artificial Sequence: Synthetic oligonucleotide
uacccugaugauauauucc

SEQ ID NO: 670751 - RNA, 19 nt, Artificial Sequence
  Description of Artificial Sequence: Synthetic oligonucleotide
aagggaaucccuugucgug

SEQ ID NO: 670752 - RNA, 19 nt, Artificial Sequence
  Description of Artificial Sequence: Synthetic oligonucleotide
aauaucugccguccauaug

SEQ ID NO: 670753 - RNA, 19 nt, Artificial Sequence
  Description of Artificial Sequence: Synthetic oligonucleotide
aauucacgguccauguuuc

SEQ ID NO: 670754 - RNA, 19 nt, Artificial Sequence
  Description of Artificial Sequence: Synthetic oligonucleotide
ucguccaugaaagccaucc

SEQ ID NO: 670755 - RNA, 19 nt, Artificial Sequence
  Description of Artificial Sequence: Synthetic oligonucleotide
cagaauaguuguuuggguc

SEQ ID NO: 670756 - RNA, 19 nt, Artificial Sequence
  Description of Artificial Sequence: Synthetic oligonucleotide
aucacugaauaauggcauc

SEQ ID NO: 670757 - RNA, 19 nt, Artificial Sequence
  Description of Artificial Sequence: Synthetic oligonucleotide
agaaacgucagccaaucuu

SEQ ID NO: 670758 - RNA, 19 nt, Artificial Sequence
  Description of Artificial Sequence: Synthetic oligonucleotide
acagauuacaauacuauau

SEQ ID NO: 670759 - RNA, 19 nt, Artificial Sequence
  Description of Artificial Sequence: Synthetic oligonucleotide
guaccucuaauaucugccg

SEQ ID NO: 670760 - RNA, 19 nt, Artificial Sequence
  Description of Artificial Sequence: Synthetic oligonucleotide
accucuaauaucugccguc

SEQ ID NO: 670761 - RNA, 19 nt, Artificial Sequence
  Description of Artificial Sequence: Synthetic oligonucleotide
ucuaauaucugccguccau

SEQ ID NO: 670762 - RNA, 19 nt, Artificial Sequence
  Description of Artificial Sequence: Synthetic oligonucleotide
auaguaaccaacacugaug

SEQ ID NO: 670763 - RNA, 19 nt, Artificial Sequence
  Description of Artificial Sequence: Synthetic oligonucleotide
aucgguagaaggaaggaag

SEQ ID NO: 670764 - RNA, 19 nt, Artificial Sequence
  Description of Artificial Sequence: Synthetic oligonucleotide
uucuuucgagcuaggaucu

SEQ ID NO: 670765 - RNA, 19 nt, Artificial Sequence
  Description of Artificial Sequence: Synthetic oligonucleotide
caccauagaugccagauuc

SEQ ID NO: 670766 - RNA, 19 nt, Artificial Sequence
  Description of Artificial Sequence: Synthetic oligonucleotide
cacauuagccgcaugaaga

SEQ ID NO: 670767 - RNA, 19 nt, Artificial Sequence
  Description of Artificial Sequence: Synthetic oligonucleotide
ucguggagaaacuuuagua

SEQ ID NO: 670768 - RNA, 19 nt, Artificial Sequence
  Description of Artificial Sequence: Synthetic oligonucleotide
cucuuguuagucuucgaug

SEQ ID NO: 670769 - RNA, 19 nt, Artificial Sequence
  Description of Artificial Sequence: Synthetic oligonucleotide
uaagggaaucccuugucgu

SEQ ID NO: 670770 - RNA, 19 nt, Artificial Sequence
  Description of Artificial Sequence: Synthetic oligonucleotide
ugaucggaagaacauggaa

SEQ ID NO: 670771 - RNA, 19 nt, Artificial Sequence
  Description of Artificial Sequence: Synthetic oligonucleotide
uaaaucgaagucacuguau

SEQ ID NO: 670772 - RNA, 19 nt, Artificial Sequence
  Description of Artificial Sequence: Synthetic oligonucleotide
uuguuugggucuaggaacu

SEQ ID NO: 670773 - RNA, 19 nt, Artificial Sequence
  Description of Artificial Sequence: Synthetic oligonucleotide
uuuaaagguuuaagcaaau

SEQ ID NO: 670774 - RNA, 19 nt, Artificial Sequence
  Description of Artificial Sequence: Synthetic oligonucleotide
aaucccuugucguggagaa

SEQ ID NO: 670775 - RNA, 19 nt, Artificial Sequence
  Description of Artificial Sequence: Synthetic oligonucleotide
aaggaagacccaauaagga

SEQ ID NO: 670776 - RNA, 19 nt, Artificial Sequence
  Description of Artificial Sequence: Synthetic oligonucleotide
agugaacaucuacacuuuc

SEQ ID NO: 670777 - RNA, 19 nt, Artificial Sequence
  Description of Artificial Sequence: Synthetic oligonucleotide
aucuguaagagccgggaga

SEQ ID NO: 670778 - RNA, 19 nt, Artificial Sequence
  Description of Artificial Sequence: Synthetic oligonucleotide
ucuguaagagccgggagac

SEQ ID NO: 670779 - RNA, 19 nt, Artificial Sequence
  Description of Artificial Sequence: Synthetic oligonucleotide
acaccagucguuccuuugg

SEQ ID NO: 670780 - RNA, 19 nt, Artificial Sequence
  Description of Artificial Sequence: Synthetic oligonucleotide
agcguagacuccaacacgg

SEQ ID NO: 670781 - RNA, 19 nt, Artificial Sequence
  Description of Artificial Sequence: Synthetic oligonucleotide
caugaaagccaucccgggg

SEQ ID NO: 670782 - RNA, 19 nt, Artificial Sequence
  Description of Artificial Sequence: Synthetic oligonucleotide
cacaauuggacaacacaug

SEQ ID NO: 670783 - RNA, 19 nt, Artificial Sequence
  Description of Artificial Sequence: Synthetic oligonucleotide
ugauugcacacugaaaauc

SEQ ID NO: 670784 - RNA, 19 nt, Artificial Sequence
  Description of Artificial Sequence: Synthetic oligonucleotide
ugacucucccucuaccaag

SEQ ID NO: 670785 - RNA, 19 nt, Artificial Sequence
  Description of Artificial Sequence: Synthetic oligonucleotide
agucaacaggcacggaguc

SEQ ID NO: 670786 - RNA, 19 nt, Artificial Sequence
  Description of Artificial Sequence: Synthetic oligonucleotide
ucuagcagccggcaagugu

SEQ ID NO: 670787 - RNA, 19 nt, Artificial Sequence
  Description of Artificial Sequence: Synthetic oligonucleotide
caugauuugccaugauaac

SEQ ID NO: 670788 - RNA, 19 nt, Artificial Sequence
  Description of Artificial Sequence: Synthetic oligonucleotide
aacaccagucguuccuuug

SEQ ID NO: 670789 - RNA, 19 nt, Artificial Sequence
  Description of Artificial Sequence: Synthetic oligonucleotide
cuguuguuaaguaaaucga

SEQ ID NO: 670790 - RNA, 19 nt, Artificial Sequence
  Description of Artificial Sequence: Synthetic oligonucleotide
uaggaucgguagaaggaag

SEQ ID NO: 670791 - RNA, 19 nt, Artificial Sequence
  Description of Artificial Sequence: Synthetic oligonucleotide
auauauuccgugugcgacu

SEQ ID NO: 670792 - RNA, 19 nt, Artificial Sequence
  Description of Artificial Sequence: Synthetic oligonucleotide
acuacagccauggauggug

SEQ ID NO: 670793 - RNA, 19 nt, Artificial Sequence
  Description of Artificial Sequence: Synthetic oligonucleotide
ucuaacaaucugccagcug

SEQ ID NO: 670794 - RNA, 19 nt, Artificial Sequence
  Description of Artificial Sequence: Synthetic oligonucleotide
uucgauguuggugaaucug

SEQ ID NO: 670795 - RNA, 19 nt, Artificial Sequence
  Description of Artificial Sequence: Synthetic oligonucleotide
gauaacauucagguaguuc

SEQ ID NO: 670796 - RNA, 19 nt, Artificial Sequence
  Description of Artificial Sequence: Synthetic oligonucleotide
auaucugaguaacaucaaa

SEQ ID NO: 670797 - RNA, 19 nt, Artificial Sequence
  Description of Artificial Sequence: Synthetic oligonucleotide
gacccaauaaggaauuuuc

SEQ ID NO: 670798 - RNA, 19 nt, Artificial Sequence
  Description of Artificial Sequence: Synthetic oligonucleotide
uguauugauuuuccugaau

SEQ ID NO: 670799 - RNA, 19 nt, Artificial Sequence
  Description of Artificial Sequence: Synthetic oligonucleotide
gacagcguagacuccaaca

SEQ ID NO: 670800 - RNA, 19 nt, Artificial Sequence
  Description of Artificial Sequence: Synthetic oligonucleotide
ucugccguccauauguuuu

SEQ ID NO: 670801 - RNA, 19 nt, Artificial Sequence
  Description of Artificial Sequence: Synthetic oligonucleotide
uggaggucguccauaaguc

SEQ ID NO: 670802 - RNA, 19 nt, Artificial Sequence
  Description of Artificial Sequence: Synthetic oligonucleotide
cuaacaaucugccagcugu

SEQ ID NO: 670803 - RNA, 19 nt, Artificial Sequence
  Description of Artificial Sequence: Synthetic oligonucleotide
ugucguggagaaacuuuag

SEQ ID NO: 670804 - RNA, 19 nt, Artificial Sequence
  Description of Artificial Sequence: Synthetic oligonucleotide
uauauuccgugugcgacug

SEQ ID NO: 670805 - RNA, 19 nt, Artificial Sequence
  Description of Artificial Sequence: Synthetic oligonucleotide
ucuaaucagcaaugcugag

SEQ ID NO: 670806 - RNA, 19 nt, Artificial Sequence
  Description of Artificial Sequence: Synthetic oligonucleotide
auacagcugaguauguauc

SEQ ID NO: 670807 - RNA, 19 nt, Artificial Sequence
  Description of Artificial Sequence: Synthetic oligonucleotide
uucagugguucuaccaccu

SEQ ID NO: 670808 - RNA, 19 nt, Artificial Sequence
  Description of Artificial Sequence: Synthetic oligonucleotide
gaucggaagaacauggaaa

SEQ ID NO: 670809 - RNA, 19 nt, Artificial Sequence
  Description of Artificial Sequence: Synthetic oligonucleotide
cagaaugaaagauuucuaa

SEQ ID NO: 670810 - RNA, 19 nt, Artificial Sequence
  Description of Artificial Sequence: Synthetic oligonucleotide
agaucagauccuucaacgu

SEQ ID NO: 670811 - RNA, 19 nt, Artificial Sequence
  Description of Artificial Sequence: Synthetic oligonucleotide
cuagccguggcaaagguaa

SEQ ID NO: 670812 - RNA, 19 nt, Artificial Sequence
  Description of Artificial Sequence: Synthetic oligonucleotide
uaaguaaaucgaagucacu

SEQ ID NO: 670813 - RNA, 19 nt, Artificial Sequence
  Description of Artificial Sequence: Synthetic oligonucleotide
guaaccaacacugaugugu

SEQ ID NO: 670814 - RNA, 19 nt, Artificial Sequence
  Description of Artificial Sequence: Synthetic oligonucleotide
uugucguggagaaacuuua

SEQ ID NO: 670815 - RNA, 19 nt, Artificial Sequence
  Description of Artificial Sequence: Synthetic oligonucleotide
uggauuuucuuaggguugc

SEQ ID NO: 670816 - RNA, 19 nt, Artificial Sequence
  Description of Artificial Sequence: Synthetic oligonucleotide
cucacaauuggacaacaca

SEQ ID NO: 670817 - RNA, 19 nt, Artificial Sequence
  Description of Artificial Sequence: Synthetic oligonucleotide
agaugccagauucacuugu

SEQ ID NO: 670818 - RNA, 19 nt, Artificial Sequence
  Description of Artificial Sequence: Synthetic oligonucleotide
uaauaucugccguccauau

SEQ ID NO: 670819 - RNA, 19 nt, Artificial Sequence
  Description of Artificial Sequence: Synthetic oligonucleotide
gucagccaaucuuaggagc

SEQ ID NO: 670820 - RNA, 19 nt, Artificial Sequence
  Description of Artificial Sequence: Synthetic oligonucleotide
ucccuugucguggagaaac

SEQ ID NO: 670821 - RNA, 19 nt, Artificial Sequence
  Description of Artificial Sequence: Synthetic oligonucleotide
cccgauauauguaagggug

SEQ ID NO: 670822 - RNA, 19 nt, Artificial Sequence
  Description of Artificial Sequence: Synthetic oligonucleotide
uuaguaccucuaauaucug

SEQ ID NO: 670823 - RNA, 19 nt, Artificial Sequence
  Description of Artificial Sequence: Synthetic oligonucleotide
guacccugaugauauauuc

SEQ ID NO: 670824 - RNA, 19 nt, Artificial Sequence
  Description of Artificial Sequence: Synthetic oligonucleotide
uuucgagcuaggaucuuuc

SEQ ID NO: 670825 - RNA, 19 nt, Artificial Sequence
  Description of Artificial Sequence: Synthetic oligonucleotide
acauuagccgcaugaagau

SEQ ID NO: 670826 - RNA, 19 nt, Artificial Sequence
  Description of Artificial Sequence: Synthetic oligonucleotide
aguguaguuugcagaauag

SEQ ID NO: 670827 - RNA, 19 nt, Artificial Sequence
  Description of Artificial Sequence: Synthetic oligonucleotide
acuuguuguaaggcgaucu

SEQ ID NO: 670828 - RNA, 19 nt, Artificial Sequence
  Description of Artificial Sequence: Synthetic oligonucleotide
cagugguucuaccaccucc

SEQ ID NO: 670829 - RNA, 19 nt, Artificial Sequence
  Description of Artificial Sequence: Synthetic oligonucleotide
uucugaucggaagaacaug

SEQ ID NO: 670830 - RNA, 19 nt, Artificial Sequence
  Description of Artificial Sequence: Synthetic oligonucleotide
uaccucuaauaucugccgu

SEQ ID NO: 670831 - RNA, 19 nt, Artificial Sequence
  Description of Artificial Sequence: Synthetic oligonucleotide
gaucagcccagcucaacac

SEQ ID NO: 670832 - RNA, 19 nt, Artificial Sequence
  Description of Artificial Sequence: Synthetic oligonucleotide
ucguuuggauuucuuucga

SEQ ID NO: 670833 - RNA, 19 nt, Artificial Sequence
  Description of Artificial Sequence: Synthetic oligonucleotide
agcucaacaccagucguuc

SEQ ID NO: 670834 - RNA, 19 nt, Artificial Sequence
  Description of Artificial Sequence: Synthetic oligonucleotide
gacaaguauuugucugggc

SEQ ID NO: 670835 - RNA, 19 nt, Artificial Sequence
  Description of Artificial Sequence: Synthetic oligonucleotide
acauucuuucugcauagua

SEQ ID NO: 670836 - RNA, 19 nt, Artificial Sequence
  Description of Artificial Sequence: Synthetic oligonucleotide
agggaaucccuugucgugg

SEQ ID NO: 670837 - RNA, 19 nt, Artificial Sequence
  Description of Artificial Sequence: Synthetic oligonucleotide
auauccuggggcaguagcg

SEQ ID NO: 670838 - RNA, 19 nt, Artificial Sequence
  Description of Artificial Sequence: Synthetic oligonucleotide
aauaguuguuugggucuag

SEQ ID NO: 670839 - RNA, 19 nt, Artificial Sequence
  Description of Artificial Sequence: Synthetic oligonucleotide
uaaggcgaucucaguguag

SEQ ID NO: 670840 - RNA, 19 nt, Artificial Sequence
  Description of Artificial Sequence: Synthetic oligonucleotide
gaaacgucagccaaucuua

SEQ ID NO: 670841 - RNA, 19 nt, Artificial Sequence
  Description of Artificial Sequence: Synthetic oligonucleotide
ugcgacugcaggcucuggc

SEQ ID NO: 670842 - RNA, 19 nt, Artificial Sequence
  Description of Artificial Sequence: Synthetic oligonucleotide
aacuuguuguaaggcgauc

SEQ ID NO: 670843 - RNA, 19 nt, Artificial Sequence
  Description of Artificial Sequence: Synthetic oligonucleotide
agaucguuuggauuucuuu

SEQ ID NO: 670844 - RNA, 19 nt, Artificial Sequence
  Description of Artificial Sequence: Synthetic oligonucleotide
aguauguaucacagauuac

SEQ ID NO: 670845 - RNA, 19 nt, Artificial Sequence
  Description of Artificial Sequence: Synthetic oligonucleotide
ucgaagucacuguaucuuc

SEQ ID NO: 670846 - RNA, 19 nt, Artificial Sequence
  Description of Artificial Sequence: Synthetic oligonucleotide
acccgauauauguaagggu

SEQ ID NO: 670847 - RNA, 19 nt, Artificial Sequence
  Description of Artificial Sequence: Synthetic oligonucleotide
uauuccgugugcgacugca

SEQ ID NO: 670848 - RNA, 19 nt, Artificial Sequence
  Description of Artificial Sequence: Synthetic oligonucleotide
uugagugaaguaggaucgg

SEQ ID NO: 670849 - RNA, 19 nt, Artificial Sequence
  Description of Artificial Sequence: Synthetic oligonucleotide
aggaucgguagaaggaagg

SEQ ID NO: 670850 - RNA, 19 nt, Artificial Sequence
  Description of Artificial Sequence: Synthetic oligonucleotide
aacgagucucuuuucuaua

SEQ ID NO: 670851 - RNA, 19 nt, Artificial Sequence
  Description of Artificial Sequence: Synthetic oligonucleotide
gaggauucacuagccgugg

SEQ ID NO: 670852 - RNA, 19 nt, Artificial Sequence
  Description of Artificial Sequence: Synthetic oligonucleotide
aagaaacgucagccaaucu

SEQ ID NO: 670853 - RNA, 19 nt, Artificial Sequence
  Description of Artificial Sequence: Synthetic oligonucleotide
cuuuguacccugaugauau

SEQ ID NO: 670854 - RNA, 19 nt, Artificial Sequence
  Description of Artificial Sequence: Synthetic oligonucleotide
guaaaucgaagucacugua

SEQ ID NO: 670855 - RNA, 19 nt, Artificial Sequence
  Description of Artificial Sequence: Synthetic oligonucleotide
aaacgucagccaaucuuag

SEQ ID NO: 670856 - RNA, 19 nt, Artificial Sequence
  Description of Artificial Sequence: Synthetic oligonucleotide
ugccagauucacuuguaau

SEQ ID NO: 670857 - RNA, 19 nt, Artificial Sequence
  Description of Artificial Sequence: Synthetic oligonucleotide
cauaagggaaucccuuguc

SEQ ID NO: 670858 - RNA, 19 nt, Artificial Sequence
  Description of Artificial Sequence: Synthetic oligonucleotide
cagcguagacuccaacacg

SEQ ID NO: 670859 - RNA, 19 nt, Artificial Sequence
  Description of Artificial Sequence: Synthetic oligonucleotide
gaauucacgguccauguuu

SEQ ID NO: 670860 - RNA, 19 nt, Artificial Sequence
  Description of Artificial Sequence: Synthetic oligonucleotide
agugaucaccauagaugcc

SEQ ID NO: 670861 - RNA, 19 nt, Artificial Sequence
  Description of Artificial Sequence: Synthetic oligonucleotide
cucaguguaguuugcagaa

SEQ ID NO: 670862 - RNA, 19 nt, Artificial Sequence
  Description of Artificial Sequence: Synthetic oligonucleotide
aagaucuagcagccggcaa

SEQ ID NO: 670863 - RNA, 19 nt, Artificial Sequence
  Description of Artificial Sequence: Synthetic oligonucleotide
auauacaaugacauucuuu

SEQ ID NO: 670864 - RNA, 19 nt, Artificial Sequence
  Description of Artificial Sequence: Synthetic oligonucleotide
ucuuuguacccugaugaua

SEQ ID NO: 670865 - RNA, 19 nt, Artificial Sequence
  Description of Artificial Sequence: Synthetic oligonucleotide
agacagcguagacuccaac

SEQ ID NO: 670866 - RNA, 19 nt, Artificial Sequence
  Description of Artificial Sequence: Synthetic oligonucleotide
uuagccgcaugaagauggc

SEQ ID NO: 670867 - RNA, 19 nt, Artificial Sequence
  Description of Artificial Sequence: Synthetic oligonucleotide
uagaugccagauucacuug

SEQ ID NO: 670868 - RNA, 19 nt, Artificial Sequence
  Description of Artificial Sequence: Synthetic oligonucleotide
aaauacagcugaguaugua

SEQ ID NO: 670869 - RNA, 19 nt, Artificial Sequence
  Description of Artificial Sequence: Synthetic oligonucleotide
caagaaacgucagccaauc

SEQ ID NO: 670870 - RNA, 19 nt, Artificial Sequence
  Description of Artificial Sequence: Synthetic oligonucleotide
gguaacccgauauauguaa

SEQ ID NO: 670871 - RNA, 19 nt, Artificial Sequence
  Description of Artificial Sequence: Synthetic oligonucleotide
ggucuaggaacuucuuaag

SEQ ID NO: 670872 - RNA, 19 nt, Artificial Sequence
  Description of Artificial Sequence: Synthetic oligonucleotide
uggccauaagggaaucccu

SEQ ID NO: 670873 - RNA, 19 nt, Artificial Sequence
  Description of Artificial Sequence: Synthetic oligonucleotide
guaacccgauauauguaag

SEQ ID NO: 670874 - RNA, 19 nt, Artificial Sequence
  Description of Artificial Sequence: Synthetic oligonucleotide
cguggagaaacuuuaguac

SEQ ID NO: 670875 - RNA, 19 nt, Artificial Sequence
  Description of Artificial Sequence: Synthetic oligonucleotide
caucuguaagagccgggag

SEQ ID NO: 670876 - RNA, 19 nt, Artificial Sequence
  Description of Artificial Sequence: Synthetic oligonucleotide
gauucacuagccguggcaa

SEQ ID NO: 670877 - RNA, 19 nt, Artificial Sequence
  Description of Artificial Sequence: Synthetic oligonucleotide
aucgaagucacuguaucuu

SEQ ID NO: 670878 - RNA, 19 nt, Artificial Sequence
  Description of Artificial Sequence: Synthetic oligonucleotide
uagcgggacaggcaucucu

SEQ ID NO: 670879 - RNA, 19 nt, Artificial Sequence
  Description of Artificial Sequence: Synthetic oligonucleotide
aguagcgggacaggcaucu

SEQ ID NO: 670880 - RNA, 19 nt, Artificial Sequence
  Description of Artificial Sequence: Synthetic oligonucleotide
auguauugauuuuccugaa

SEQ ID NO: 670881 - RNA, 19 nt, Artificial Sequence
  Description of Artificial Sequence: Synthetic oligonucleotide
cuuaaacuguggcuuuuca

SEQ ID NO: 670882 - RNA, 19 nt, Artificial Sequence
  Description of Artificial Sequence: Synthetic oligonucleotide
uugguucugaucggaagaa

SEQ ID NO: 670883 - RNA, 19 nt, Artificial Sequence
  Description of Artificial Sequence: Synthetic oligonucleotide
auuuuguggggaucuuaaa

SEQ ID NO: 670884 - RNA, 19 nt, Artificial Sequence
  Description of Artificial Sequence: Synthetic oligonucleotide
ugaauucacgguccauguu

SEQ ID NO: 670885 - RNA, 19 nt, Artificial Sequence
  Description of Artificial Sequence: Synthetic oligonucleotide
uucgagcuaggaucuuucu

SEQ ID NO: 670886 - RNA, 19 nt, Artificial Sequence
  Description of Artificial Sequence: Synthetic oligonucleotide
acaaucugccagcuguuuu

SEQ ID NO: 670887 - RNA, 19 nt, Artificial Sequence
  Description of Artificial Sequence: Synthetic oligonucleotide
uugccuuguagaucagauc

SEQ ID NO: 670888 - RNA, 19 nt, Artificial Sequence
  Description of Artificial Sequence: Synthetic oligonucleotide
auauuccgugugcgacugc

SEQ ID NO: 670889 - RNA, 19 nt, Artificial Sequence
  Description of Artificial Sequence: Synthetic oligonucleotide
gcugaggauucacuagccg

SEQ ID NO: 670890 - RNA, 19 nt, Artificial Sequence
  Description of Artificial Sequence: Synthetic oligonucleotide
uuucaacagcagaucguuu

SEQ ID NO: 670891 - RNA, 19 nt, Artificial Sequence
  Description of Artificial Sequence: Synthetic oligonucleotide
ucccucuaccaagaaacgu

SEQ ID NO: 670892 - RNA, 19 nt, Artificial Sequence
  Description of Artificial Sequence: Synthetic oligonucleotide
ugugcuuuacuggcuguuc

SEQ ID NO: 670893 - RNA, 19 nt, Artificial Sequence
  Description of Artificial Sequence: Synthetic oligonucleotide
agaaacuuuaguaccucua

SEQ ID NO: 670894 - RNA, 19 nt, Artificial Sequence
  Description of Artificial Sequence: Synthetic oligonucleotide
aggguugcaguacuucuuu

SEQ ID NO: 670895 - RNA, 19 nt, Artificial Sequence
  Description of Artificial Sequence: Synthetic oligonucleotide
cauaguaaccaacacugau

SEQ ID NO: 670896 - RNA, 19 nt, Artificial Sequence
  Description of Artificial Sequence: Synthetic oligonucleotide
ccgauauauguaagggugc

SEQ ID NO: 670897 - RNA, 19 nt, Artificial Sequence
  Description of Artificial Sequence: Synthetic oligonucleotide
ggcuucguccaugaaagcc

SEQ ID NO: 670898 - RNA, 19 nt, Artificial Sequence
  Description of Artificial Sequence: Synthetic oligonucleotide
ucaucacauuagccgcaug

SEQ ID NO: 670899 - RNA, 19 nt, Artificial Sequence
  Description of Artificial Sequence: Synthetic oligonucleotide
aaucagcaaugcugaggau

SEQ ID NO: 670900 - RNA, 19 nt, Artificial Sequence
  Description of Artificial Sequence: Synthetic oligonucleotide
auaagucauuucauauagu

SEQ ID NO: 670901 - RNA, 19 nt, Artificial Sequence
  Description of Artificial Sequence: Synthetic oligonucleotide
ugucagcggcaccgugucg

SEQ ID NO: 670902 - RNA, 19 nt, Artificial Sequence
  Description of Artificial Sequence: Synthetic oligonucleotide
acagaaugaaagauuucua

SEQ ID NO: 670903 - RNA, 19 nt, Artificial Sequence
  Description of Artificial Sequence: Synthetic oligonucleotide
gaucgguagaaggaaggaa

SEQ ID NO: 670904 - RNA, 19 nt, Artificial Sequence
  Description of Artificial Sequence: Synthetic oligonucleotide
aucacauuagccgcaugaa

SEQ ID NO: 670905 - RNA, 19 nt, Artificial Sequence
  Description of Artificial Sequence: Synthetic oligonucleotide
agcagaucguuuggauuuc

SEQ ID NO: 670906 - RNA, 19 nt, Artificial Sequence
  Description of Artificial Sequence: Synthetic oligonucleotide
aggcacggagucuggaggu

SEQ ID NO: 670907 - RNA, 19 nt, Artificial Sequence
  Description of Artificial Sequence: Synthetic oligonucleotide
caucacugaauaauggcau

SEQ ID NO: 670908 - RNA, 19 nt, Artificial Sequence
  Description of Artificial Sequence: Synthetic oligonucleotide
guaggaucgguagaaggaa

SEQ ID NO: 670909 - RNA, 19 nt, Artificial Sequence
  Description of Artificial Sequence: Synthetic oligonucleotide
cuucaacgagucucuuuuc

SEQ ID NO: 670910 - RNA, 19 nt, Artificial Sequence
  Description of Artificial Sequence: Synthetic oligonucleotide
ucuuaggguugcaguacuu

SEQ ID NO: 670911 - RNA, 19 nt, Artificial Sequence
  Description of Artificial Sequence: Synthetic oligonucleotide
caucaucacauuagccgca

SEQ ID NO: 670912 - RNA, 19 nt, Artificial Sequence
  Description of Artificial Sequence: Synthetic oligonucleotide
gccauaagggaaucccuug

SEQ ID NO: 670913 - RNA, 19 nt, Artificial Sequence
  Description of Artificial Sequence: Synthetic oligonucleotide
uguuaccauccaucaucac

SEQ ID NO: 670914 - RNA, 19 nt, Artificial Sequence
  Description of Artificial Sequence: Synthetic oligonucleotide
caguguaguuugcagaaua

SEQ ID NO: 670915 - RNA, 19 nt, Artificial Sequence
  Description of Artificial Sequence: Synthetic oligonucleotide
agacgauggggaugugaga

SEQ ID NO: 670916 - RNA, 19 nt, Artificial Sequence
  Description of Artificial Sequence: Synthetic oligonucleotide
agacccaauaaggaauuuu

SEQ ID NO: 670917 - RNA, 19 nt, Artificial Sequence
  Description of Artificial Sequence: Synthetic oligonucleotide
cagcugaguauguaucaca

SEQ ID NO: 670918 - RNA, 19 nt, Artificial Sequence
  Description of Artificial Sequence: Synthetic oligonucleotide
cauuagccgcaugaagaug

SEQ ID NO: 670919 - RNA, 19 nt, Artificial Sequence
  Description of Artificial Sequence: Synthetic oligonucleotide
agguaguucugcaggccuc

SEQ ID NO: 670920 - RNA, 19 nt, Artificial Sequence
  Description of Artificial Sequence: Synthetic oligonucleotide
ugugcgacugcaggcucug

SEQ ID NO: 670921 - RNA, 19 nt, Artificial Sequence
  Description of Artificial Sequence: Synthetic oligonucleotide
cugaguuauuggaguugug

SEQ ID NO: 670922 - RNA, 19 nt, Artificial Sequence
  Description of Artificial Sequence: Synthetic oligonucleotide
cugaucggaagaacaugga

SEQ ID NO: 670923 - RNA, 19 nt, Artificial Sequence
  Description of Artificial Sequence: Synthetic oligonucleotide
guuauuggaguugugcuuu

SEQ ID NO: 670924 - RNA, 19 nt, Artificial Sequence
  Description of Artificial Sequence: Synthetic oligonucleotide
ugguucugaucggaagaac

SEQ ID NO: 670925 - RNA, 19 nt, Artificial Sequence
  Description of Artificial Sequence: Synthetic oligonucleotide
guuugggucuaggaacuuc

SEQ ID NO: 670926 - RNA, 19 nt, Artificial Sequence
  Description of Artificial Sequence: Synthetic oligonucleotide
ggauucacuagccguggca

SEQ ID NO: 670927 - RNA, 19 nt, Artificial Sequence
  Description of Artificial Sequence: Synthetic oligonucleotide
uaucugccguccauauguu

SEQ ID NO: 670928 - RNA, 19 nt, Artificial Sequence
  Description of Artificial Sequence: Synthetic oligonucleotide
caacaggcacggagucugg

SEQ ID NO: 670929 - RNA, 19 nt, Artificial Sequence
  Description of Artificial Sequence: Synthetic oligonucleotide
agacccguggugugacuga

SEQ ID NO: 670930 - RNA, 19 nt, Artificial Sequence
  Description of Artificial Sequence: Synthetic oligonucleotide
gacucucccucuaccaaga

SEQ ID NO: 670931 - RNA, 19 nt, Artificial Sequence
  Description of Artificial Sequence: Synthetic oligonucleotide
agcgggacaggcaucucug

SEQ ID NO: 670932 - RNA, 19 nt, Artificial Sequence
  Description of Artificial Sequence: Synthetic oligonucleotide
aagcuugauugcacacuga

SEQ ID NO: 670933 - RNA, 19 nt, Artificial Sequence
  Description of Artificial Sequence: Synthetic oligonucleotide
guaaggcgaucucagugua

SEQ ID NO: 670934 - RNA, 19 nt, Artificial Sequence
  Description of Artificial Sequence: Synthetic oligonucleotide
gucguggagaaacuuuagu

SEQ ID NO: 670935 - RNA, 19 nt, Artificial Sequence
  Description of Artificial Sequence: Synthetic oligonucleotide
gacccguggugugacugag

SEQ ID NO: 670936 - RNA, 19 nt, Artificial Sequence
  Description of Artificial Sequence: Synthetic oligonucleotide
cuagcagccggcaaguguu

SEQ ID NO: 670937 - RNA, 19 nt, Artificial Sequence
  Description of Artificial Sequence: Synthetic oligonucleotide
agcucuuguuagucuucga

SEQ ID NO: 670938 - RNA, 19 nt, Artificial Sequence
  Description of Artificial Sequence: Synthetic oligonucleotide
gggaucuuaaacuguggcu

SEQ ID NO: 670939 - RNA, 19 nt, Artificial Sequence
  Description of Artificial Sequence: Synthetic oligonucleotide
cagcagaucguuuggauuu

SEQ ID NO: 670940 - RNA, 19 nt, Artificial Sequence
  Description of Artificial Sequence: Synthetic oligonucleotide
aagacccaauaaggaauuu

SEQ ID NO: 670941 - RNA, 19 nt, Artificial Sequence
  Description of Artificial Sequence: Synthetic oligonucleotide
ggagacgguaggcaugcca

SEQ ID NO: 670942 - RNA, 19 nt, Artificial Sequence
  Description of Artificial Sequence: Synthetic oligonucleotide
aucaucacauuagccgcau

SEQ ID NO: 670943 - RNA, 19 nt, Artificial Sequence
  Description of Artificial Sequence: Synthetic oligonucleotide
guuguaaggcgaucucagu

SEQ ID NO: 670944 - RNA, 19 nt, Artificial Sequence
  Description of Artificial Sequence: Synthetic oligonucleotide
cuguaagagccgggagacg

SEQ ID NO: 670945 - RNA, 19 nt, Artificial Sequence
  Description of Artificial Sequence: Synthetic oligonucleotide
gagcuaggaucuuucuccu

SEQ ID NO: 670946 - RNA, 19 nt, Artificial Sequence
  Description of Artificial Sequence: Synthetic oligonucleotide
agucuucgauguuggugaa

SEQ ID NO: 670947 - RNA, 19 nt, Artificial Sequence
  Description of Artificial Sequence: Synthetic oligonucleotide
gaagacccaauaaggaauu

SEQ ID NO: 670948 - RNA, 19 nt, Artificial Sequence
  Description of Artificial Sequence: Synthetic oligonucleotide
ggaagacccaauaaggaau

SEQ ID NO: 670949 - RNA, 19 nt, Artificial Sequence
  Description of Artificial Sequence: Synthetic oligonucleotide
ggaggucguccauaaguca

SEQ ID NO: 670950 - RNA, 19 nt, Artificial Sequence
  Description of Artificial Sequence: Synthetic oligonucleotide
gagacgguaggcaugccau

SEQ ID NO: 670951 - RNA, 19 nt, Artificial Sequence
  Description of Artificial Sequence: Synthetic oligonucleotide
gaggucguccauaagucau

SEQ ID NO: 670952 - RNA, 19 nt, Artificial Sequence
  Description of Artificial Sequence: Synthetic oligonucleotide
agaggcaaacucagcccug

SEQ ID NO: 670953 - RNA, 19 nt, Artificial Sequence
  Description of Artificial Sequence: Synthetic oligonucleotide
caagaucuagcagccggca

SEQ ID NO: 670954 - RNA, 19 nt, Artificial Sequence
  Description of Artificial Sequence: Synthetic oligonucleotide
gaagggguccuuugguuuu

SEQ ID NO: 670955 - RNA, 19 nt, Artificial Sequence
  Description of Artificial Sequence: Synthetic oligonucleotide
gaucuagcagccggcaagu

SEQ ID NO: 670956 - RNA, 19 nt, Artificial Sequence
  Description of Artificial Sequence: Synthetic oligonucleotide
acacaugauuugccaugau

SEQ ID NO: 670957 - RNA, 19 nt, Artificial Sequence
  Description of Artificial Sequence: Synthetic oligonucleotide
cagccggcaaguguuacca

SEQ ID NO: 670958 - RNA, 19 nt, Artificial Sequence
  Description of Artificial Sequence: Synthetic oligonucleotide
auuccgugugcgacugcag

SEQ ID NO: 670959 - RNA, 19 nt, Artificial Sequence
  Description of Artificial Sequence: Synthetic oligonucleotide
guaagggugcacacaggaa

SEQ ID NO: 670960 - RNA, 19 nt, Artificial Sequence
  Description of Artificial Sequence: Synthetic oligonucleotide
cgucagccaaucuuaggag

SEQ ID NO: 670961 - RNA, 19 nt, Artificial Sequence
  Description of Artificial Sequence: Synthetic oligonucleotide
uucguccaugaaagccauc

SEQ ID NO: 670962 - RNA, 19 nt, Artificial Sequence
  Description of Artificial Sequence: Synthetic oligonucleotide
gcaaacucagcccugcaau

SEQ ID NO: 670963 - RNA, 19 nt, Artificial Sequence
  Description of Artificial Sequence: Synthetic oligonucleotide
aucugccguccauauguuu

SEQ ID NO: 670964 - RNA, 19 nt, Artificial Sequence
  Description of Artificial Sequence: Synthetic oligonucleotide
guucugaucggaagaacau

SEQ ID NO: 670965 - RNA, 19 nt, Artificial Sequence
  Description of Artificial Sequence: Synthetic oligonucleotide
cgugucguccagcagcacc

SEQ ID NO: 670966 - RNA, 19 nt, Artificial Sequence
  Description of Artificial Sequence: Synthetic oligonucleotide
gucguccauaagucauuuc

SEQ ID NO: 670967 - RNA, 19 nt, Artificial Sequence
  Description of Artificial Sequence: Synthetic oligonucleotide
cacuuuccaauguauugau

SEQ ID NO: 670968 - RNA, 19 nt, Artificial Sequence
  Description of Artificial Sequence: Synthetic oligonucleotide
agacgguaggcaugccauu

SEQ ID NO: 670969 - RNA, 19 nt, Artificial Sequence
  Description of Artificial Sequence: Synthetic oligonucleotide
ggccccacgguucacgcca

SEQ ID NO: 670970 - RNA, 19 nt, Artificial Sequence
  Description of Artificial Sequence: Synthetic oligonucleotide
cacuuugguucugaucgga

SEQ ID NO: 670971 - RNA, 19 nt, Artificial Sequence
  Description of Artificial Sequence: Synthetic oligonucleotide
ggaucgguagaaggaagga

SEQ ID NO: 670972 - RNA, 19 nt, Artificial Sequence
  Description of Artificial Sequence: Synthetic oligonucleotide
agcuaggaucuuucuccuu

SEQ ID NO: 670973 - RNA, 19 nt, Artificial Sequence
  Description of Artificial Sequence: Synthetic oligonucleotide
ccguggcaaagguaacccg

SEQ ID NO: 670974 - RNA, 19 nt, Artificial Sequence
  Description of Artificial Sequence: Synthetic oligonucleotide
guuuugccuuguagaucag

SEQ ID NO: 670975 - RNA, 19 nt, Artificial Sequence
  Description of Artificial Sequence: Synthetic oligonucleotide
agguaacccgauauaugua

SEQ ID NO: 670976 - RNA, 19 nt, Artificial Sequence
  Description of Artificial Sequence: Synthetic oligonucleotide
cagguaguucugcaggccu

SEQ ID NO: 670977 - RNA, 19 nt, Artificial Sequence
  Description of Artificial Sequence: Synthetic oligonucleotide
caucuacacuuuccaaugu

SEQ ID NO: 670978 - RNA, 19 nt, Artificial Sequence
  Description of Artificial Sequence: Synthetic oligonucleotide
guuagucuucgauguuggu

SEQ ID NO: 670979 - RNA, 19 nt, Artificial Sequence
  Description of Artificial Sequence: Synthetic oligonucleotide
gcuaggaucuuucuccuuu

SEQ ID NO: 670980 - RNA, 19 nt, Artificial Sequence
  Description of Artificial Sequence: Synthetic oligonucleotide
ggguccuuugguuuugccu

SEQ ID NO: 670981 - RNA, 19 nt, Artificial Sequence
  Description of Artificial Sequence: Synthetic oligonucleotide
uguuugggucuaggaacuu

SEQ ID NO: 670982 - RNA, 19 nt, Artificial Sequence
  Description of Artificial Sequence: Synthetic oligonucleotide
ggugagcuggccccagauc

SEQ ID NO: 670983 - RNA, 19 nt, Artificial Sequence
  Description of Artificial Sequence: Synthetic oligonucleotide
cucgccucgacggccgcug

SEQ ID NO: 670984 - RNA, 19 nt, Artificial Sequence
  Description of Artificial Sequence: Synthetic oligonucleotide
ggagacgauggggauguga

SEQ ID NO: 670985 - RNA, 19 nt, Artificial Sequence
  Description of Artificial Sequence: Synthetic oligonucleotide
gagaggugagcuggcccca

SEQ ID NO: 670986 - RNA, 19 nt, Artificial Sequence
  Description of Artificial Sequence: Synthetic oligonucleotide
gucagcggcaccgugucgu

SEQ ID NO: 670987 - RNA, 19 nt, Artificial Sequence
  Description of Artificial Sequence: Synthetic oligonucleotide
caagaucagcccagcucaa

SEQ ID NO: 670988 - RNA, 19 nt, Artificial Sequence
  Description of Artificial Sequence: Synthetic oligonucleotide
cuucgauguuggugaaucu

SEQ ID NO: 670989 - RNA, 19 nt, Artificial Sequence
  Description of Artificial Sequence: Synthetic oligonucleotide
acuagccguggcaaaggua

SEQ ID NO: 670990 - RNA, 19 nt, Artificial Sequence
  Description of Artificial Sequence: Synthetic oligonucleotide
gcaguagcgggacaggcau

SEQ ID NO: 670991 - RNA, 19 nt, Artificial Sequence
  Description of Artificial Sequence: Synthetic oligonucleotide
cucuuuguacccugaugau

SEQ ID NO: 670992 - RNA, 19 nt, Artificial Sequence
  Description of Artificial Sequence: Synthetic oligonucleotide
gacgguaggcaugccauuu

SEQ ID NO: 670993 - RNA, 19 nt, Artificial Sequence
  Description of Artificial Sequence: Synthetic oligonucleotide
acgguucacgccauucaua

SEQ ID NO: 670994 - RNA, 19 nt, Artificial Sequence
  Description of Artificial Sequence: Synthetic oligonucleotide
ucuuucgagcuaggaucuu

SEQ ID NO: 670995 - RNA, 19 nt, Artificial Sequence
  Description of Artificial Sequence: Synthetic oligonucleotide
cuugccggccggggcuucg

SEQ ID NO: 670996 - RNA, 19 nt, Artificial Sequence
  Description of Artificial Sequence: Synthetic oligonucleotide
gguucacgccauucauauc

SEQ ID NO: 670997 - RNA, 19 nt, Artificial Sequence
  Description of Artificial Sequence: Synthetic oligonucleotide
ggccacuacagccauggau

SEQ ID NO: 670998 - RNA, 19 nt, Artificial Sequence
  Description of Artificial Sequence: Synthetic oligonucleotide
gcucacaauuggacaacac

SEQ ID NO: 670999 - RNA, 19 nt, Artificial Sequence
  Description of Artificial Sequence: Synthetic oligonucleotide
aggucguccauaagucauu

SEQ ID NO: 671000 - RNA, 19 nt, Artificial Sequence
  Description of Artificial Sequence: Synthetic oligonucleotide
gggaaucccuugucgugga

SEQ ID NO: 671001 - RNA, 19 nt, Artificial Sequence
  Description of Artificial Sequence: Synthetic oligonucleotide
ccaaccuaugucuuucagu

SEQ ID NO: 671002 - RNA, 19 nt, Artificial Sequence
  Description of Artificial Sequence: Synthetic oligonucleotide
gggcuucguccaugaaagc

SEQ ID NO: 671003 - RNA, 19 nt, Artificial Sequence
  Description of Artificial Sequence: Synthetic oligonucleotide
cacgguucacgccauucau

SEQ ID NO: 671004 - RNA, 19 nt, Artificial Sequence
  Description of Artificial Sequence: Synthetic oligonucleotide
ccgggagacgguaggcaug

SEQ ID NO: 671005 - RNA, 19 nt, Artificial Sequence
  Description of Artificial Sequence: Synthetic oligonucleotide
gccaucccggggcaccgcc

SEQ ID NO: 671006 - RNA, 19 nt, Artificial Sequence
  Description of Artificial Sequence: Synthetic oligonucleotide
gcguagacuccaacacggc

SEQ ID NO: 671007 - RNA, 19 nt, Artificial Sequence
  Description of Artificial Sequence: Synthetic oligonucleotide
cuuucgagcuaggaucuuu

SEQ ID NO: 671008 - RNA, 19 nt, Artificial Sequence
  Description of Artificial Sequence: Synthetic oligonucleotide
cacuagccguggcaaaggu

SEQ ID NO: 671009 - RNA, 19 nt, Artificial Sequence
  Description of Artificial Sequence: Synthetic oligonucleotide
ggauuuucuuaggguugca

SEQ ID NO: 671010 - RNA, 19 nt, Artificial Sequence
  Description of Artificial Sequence: Synthetic oligonucleotide
cgggagacgguaggcaugc

SEQ ID NO: 671011 - RNA, 19 nt, Artificial Sequence
  Description of Artificial Sequence: Synthetic oligonucleotide
guaagagccgggagacggu

SEQ ID NO: 671012 - RNA, 19 nt, Artificial Sequence
  Description of Artificial Sequence: Synthetic oligonucleotide
ccacgguucacgccauuca

SEQ ID NO: 671013 - RNA, 19 nt, Artificial Sequence
  Description of Artificial Sequence: Synthetic oligonucleotide
gugcgacugcaggcucugg

SEQ ID NO: 671014 - RNA, 19 nt, Artificial Sequence
  Description of Artificial Sequence: Synthetic oligonucleotide
ggcgaucucaguguaguuu

SEQ ID NO: 671015 - RNA, 19 nt, Artificial Sequence
  Description of Artificial Sequence: Synthetic oligonucleotide
aggagucaacaggcacgga

SEQ ID NO: 671016 - RNA, 19 nt, Artificial Sequence
  Description of Artificial Sequence: Synthetic oligonucleotide
cuaugaauucacgguccau

SEQ ID NO: 671017 - RNA, 19 nt, Artificial Sequence
  Description of Artificial Sequence: Synthetic oligonucleotide
uggagacgauggggaugug

SEQ ID NO: 671018 - RNA, 19 nt, Artificial Sequence
  Description of Artificial Sequence: Synthetic oligonucleotide
ggguugcaguacuucuuua

SEQ ID NO: 671019 - RNA, 19 nt, Artificial Sequence
  Description of Artificial Sequence: Synthetic oligonucleotide
aucccuugucguggagaaa

SEQ ID NO: 671020 - RNA, 19 nt, Artificial Sequence
  Description of Artificial Sequence: Synthetic oligonucleotide
cagaucguuuggauuucuu

SEQ ID NO: 671021 - RNA, 19 nt, Artificial Sequence
  Description of Artificial Sequence: Synthetic oligonucleotide
accucccacuuugguucug

SEQ ID NO: 671022 - RNA, 19 nt, Artificial Sequence
  Description of Artificial Sequence: Synthetic oligonucleotide
cccguggugugacugagcu

SEQ ID NO: 671023 - RNA, 19 nt, Artificial Sequence
  Description of Artificial Sequence: Synthetic oligonucleotide
cccacgguucacgccauuc

SEQ ID NO: 671024 - RNA, 19 nt, Artificial Sequence
  Description of Artificial Sequence: Synthetic oligonucleotide
gccucgacggccgcuguca

SEQ ID NO: 671025 - RNA, 19 nt, Artificial Sequence
  Description of Artificial Sequence: Synthetic oligonucleotide
guagcgggacaggcaucuc

SEQ ID NO: 671026 - RNA, 19 nt, Artificial Sequence
  Description of Artificial Sequence: Synthetic oligonucleotide
gugugcgacugcaggcucu

SEQ ID NO: 671027 - RNA, 19 nt, Artificial Sequence
  Description of Artificial Sequence: Synthetic oligonucleotide
ggccauaagggaaucccuu

SEQ ID NO: 671028 - RNA, 19 nt, Artificial Sequence
  Description of Artificial Sequence: Synthetic oligonucleotide
ccucgacggccgcugucag

SEQ ID NO: 671029 - RNA, 19 nt, Artificial Sequence
  Description of Artificial Sequence: Synthetic oligonucleotide
caacaccagucguuccuuu

SEQ ID NO: 671030 - RNA, 19 nt, Artificial Sequence
  Description of Artificial Sequence: Synthetic oligonucleotide
ccguggugugacugagcuc

SEQ ID NO: 671031 - RNA, 19 nt, Artificial Sequence
  Description of Artificial Sequence: Synthetic oligonucleotide
gccgggagacgguaggcau

SEQ ID NO: 671032 - RNA, 19 nt, Artificial Sequence
  Description of Artificial Sequence: Synthetic oligonucleotide
cgugugcgacugcaggcuc

SEQ ID NO: 671033 - RNA, 19 nt, Artificial Sequence
  Description of Artificial Sequence: Synthetic oligonucleotide
ggucguccauaagucauuu

SEQ ID NO: 671034 - RNA, 19 nt, Artificial Sequence
  Description of Artificial Sequence: Synthetic oligonucleotide
gcggcaccgugucguccag

SEQ ID NO: 671035 - RNA, 19 nt, Artificial Sequence
  Description of Artificial Sequence: Synthetic oligonucleotide
ggccgcugucagcggcacc

SEQ ID NO: 671036 - RNA, 19 nt, Artificial Sequence
  Description of Artificial Sequence: Synthetic oligonucleotide
gcagaucguuuggauuucu

SEQ ID NO: 671037 - RNA, 19 nt, Artificial Sequence
  Description of Artificial Sequence: Synthetic oligonucleotide
ggcucgccucgacggccgc

SEQ ID NO: 671038 - RNA, 19 nt, Artificial Sequence
  Description of Artificial Sequence: Synthetic oligonucleotide
gggagacgguaggcaugcc

SEQ ID NO: 671039 - RNA, 19 nt, Artificial Sequence
  Description of Artificial Sequence: Synthetic oligonucleotide
gcgggacaggcaucucugu

SEQ ID NO: 671040 - RNA, 19 nt, Artificial Sequence
  Description of Artificial Sequence: Synthetic oligonucleotide
cgacggccgcugucagcgg

SEQ ID NO: 671041 - RNA, 19 nt, Artificial Sequence
  Description of Artificial Sequence: Synthetic oligonucleotide
ccggggcuucguccaugaa

SEQ ID NO: 671042 - RNA, 19 nt, Artificial Sequence
  Description of Artificial Sequence: Synthetic oligonucleotide
cggccacuacagccaugga

SEQ ID NO: 671043 - RNA, 19 nt, Artificial Sequence
  Description of Artificial Sequence: Synthetic oligonucleotide
ccccacgguucacgccauu

SEQ ID NO: 671044 - RNA, 19 nt, Artificial Sequence
  Description of Artificial Sequence: Synthetic oligonucleotide
aauucacacacuguaaugc

SEQ ID NO: 671045 - RNA, 19 nt, Artificial Sequence
  Description of Artificial Sequence: Synthetic oligonucleotide
aaagcgagggccuugggac

SEQ ID NO: 671046 - RNA, 19 nt, Artificial Sequence
  Description of Artificial Sequence: Synthetic oligonucleotide
agaccuacucauuacaaac

SEQ ID NO: 671047 - RNA, 19 nt, Artificial Sequence
  Description of Artificial Sequence: Synthetic oligonucleotide
ugccgaacauaccagaugg

SEQ ID NO: 671048 - RNA, 19 nt, Artificial Sequence
  Description of Artificial Sequence: Synthetic oligonucleotide
aaagggguaggcaucagcc

SEQ ID NO: 671049 - RNA, 19 nt, Artificial Sequence
  Description of Artificial Sequence: Synthetic oligonucleotide
cuacucauuacaaacgagg

SEQ ID NO: 671050 - RNA, 19 nt, Artificial Sequence
  Description of Artificial Sequence: Synthetic oligonucleotide
uuuuacagcggccaggccc

SEQ ID NO: 671051 - RNA, 19 nt, Artificial Sequence
  Description of Artificial Sequence: Synthetic oligonucleotide
aaucucggcacucauagga

SEQ ID NO: 671052 - RNA, 19 nt, Artificial Sequence
  Description of Artificial Sequence: Synthetic oligonucleotide
uguaaugccugccaguccc

SEQ ID NO: 671053 - RNA, 19 nt, Artificial Sequence
  Description of Artificial Sequence: Synthetic oligonucleotide
gauuaucuacccuugauga

SEQ ID NO: 671054 - RNA, 19 nt, Artificial Sequence
  Description of Artificial Sequence: Synthetic oligonucleotide
gagaugaauaaauaaguca

SEQ ID NO: 671055 - RNA, 19 nt, Artificial Sequence
  Description of Artificial Sequence: Synthetic oligonucleotide
acaaucucggcacucauag

SEQ ID NO: 671056 - RNA, 19 nt, Artificial Sequence
  Description of Artificial Sequence: Synthetic oligonucleotide
cuaggcaaggcucucaugg

SEQ ID NO: 671057 - RNA, 19 nt, Artificial Sequence
  Description of Artificial Sequence: Synthetic oligonucleotide
uauaucuccguuaccguag

SEQ ID NO: 671058 - RNA, 19 nt, Artificial Sequence
  Description of Artificial Sequence: Synthetic oligonucleotide
uuugcagauacaagggaag

SEQ ID NO: 671059 - RNA, 19 nt, Artificial Sequence
  Description of Artificial Sequence: Synthetic oligonucleotide
caaagcaugccgaacauac

SEQ ID NO: 671060 - RNA, 19 nt, Artificial Sequence
  Description of Artificial Sequence: Synthetic oligonucleotide
acgucuaggcacuuggagc

SEQ ID NO: 671061 - RNA, 19 nt, Artificial Sequence
  Description of Artificial Sequence: Synthetic oligonucleotide
uuaucuacccuugaugaag

SEQ ID NO: 671062 - RNA, 19 nt, Artificial Sequence
  Description of Artificial Sequence: Synthetic oligonucleotide
aagcaugccgaacauacca

SEQ ID NO: 671063 - RNA, 19 nt, Artificial Sequence
  Description of Artificial Sequence: Synthetic oligonucleotide
ugugaaaccaccaggcuuc

SEQ ID NO: 671064 - RNA, 19 nt, Artificial Sequence
  Description of Artificial Sequence: Synthetic oligonucleotide
ugaacacgugacaagaacu

SEQ ID NO: 671065 - RNA, 19 nt, Artificial Sequence
  Description of Artificial Sequence: Synthetic oligonucleotide
ucagugaguuauuaggggc

SEQ ID NO: 671066 - RNA, 19 nt, Artificial Sequence
  Description of Artificial Sequence: Synthetic oligonucleotide
uaagucaauggcuggggcg

SEQ ID NO: 671067 - RNA, 19 nt, Artificial Sequence
  Description of Artificial Sequence: Synthetic oligonucleotide
ucucauagugagcaggggc

SEQ ID NO: 671068 - RNA, 19 nt, Artificial Sequence
  Description of Artificial Sequence: Synthetic oligonucleotide
uguugcaggaccaccaucu

SEQ ID NO: 671069 - RNA, 19 nt, Artificial Sequence
  Description of Artificial Sequence: Synthetic oligonucleotide
acucauuacaaacgaggac

SEQ ID NO: 671070 - RNA, 19 nt, Artificial Sequence
  Description of Artificial Sequence: Synthetic oligonucleotide
ucugacaaccaguacccgg

SEQ ID NO: 671071 - RNA, 19 nt, Artificial Sequence
  Description of Artificial Sequence: Synthetic oligonucleotide
aauuccaggagagaaauua

SEQ ID NO: 671072 - RNA, 19 nt, Artificial Sequence
  Description of Artificial Sequence: Synthetic oligonucleotide
uacucauuacaaacgagga

SEQ ID NO: 671073 - RNA, 19 nt, Artificial Sequence
  Description of Artificial Sequence: Synthetic oligonucleotide
auaagucaauggcuggggc

SEQ ID NO: 671074 - RNA, 19 nt, Artificial Sequence
  Description of Artificial Sequence: Synthetic oligonucleotide
aacacuaagucgccuuuag

SEQ ID NO: 671075 - RNA, 19 nt, Artificial Sequence
  Description of Artificial Sequence: Synthetic oligonucleotide
aagggguaggcaucagccc

SEQ ID NO: 671076 - RNA, 19 nt, Artificial Sequence
  Description of Artificial Sequence: Synthetic oligonucleotide
acuaagucgccuuuagcag

SEQ ID NO: 671077 - RNA, 19 nt, Artificial Sequence
  Description of Artificial Sequence: Synthetic oligonucleotide
gaauuggaauacuggaggc

SEQ ID NO: 671078 - RNA, 19 nt, Artificial Sequence
  Description of Artificial Sequence: Synthetic oligonucleotide
uccacgucuaggcacuugg

SEQ ID NO: 671079 - RNA, 19 nt, Artificial Sequence
  Description of Artificial Sequence: Synthetic oligonucleotide
aaaagugccagaggggcag

SEQ ID NO: 671080 - RNA, 19 nt, Artificial Sequence
  Description of Artificial Sequence: Synthetic oligonucleotide
uucaaugguguuuacccca

SEQ ID NO: 671081 - RNA, 19 nt, Artificial Sequence
  Description of Artificial Sequence: Synthetic oligonucleotide
uacacggucacuucgcucu

SEQ ID NO: 671082 - RNA, 19 nt, Artificial Sequence
  Description of Artificial Sequence: Synthetic oligonucleotide
ucgaagucugacuugcugc

SEQ ID NO: 671083 - RNA, 19 nt, Artificial Sequence
  Description of Artificial Sequence: Synthetic oligonucleotide
ucuagaccgaccuuuauuu

SEQ ID NO: 671084 - RNA, 19 nt, Artificial Sequence
  Description of Artificial Sequence: Synthetic oligonucleotide
uuacaaacgaggacgaauu

SEQ ID NO: 671085 - RNA, 19 nt, Artificial Sequence
  Description of Artificial Sequence: Synthetic oligonucleotide
agaaauuauaucuccguua

SEQ ID NO: 671086 - RNA, 19 nt, Artificial Sequence
  Description of Artificial Sequence: Synthetic oligonucleotide
gagagaaauuauaucuccg

SEQ ID NO: 671087 - RNA, 19 nt, Artificial Sequence
  Description of Artificial Sequence: Synthetic oligonucleotide
ugucuuuguauuuggacaa

SEQ ID NO: 671088 - RNA, 19 nt, Artificial Sequence
  Description of Artificial Sequence: Synthetic oligonucleotide
aacgaggacgaauuggaau

SEQ ID NO: 671089 - RNA, 19 nt, Artificial Sequence
  Description of Artificial Sequence: Synthetic oligonucleotide
uagaccgaccuuuauuucc

SEQ ID NO: 671090 - RNA, 19 nt, Artificial Sequence
  Description of Artificial Sequence: Synthetic oligonucleotide
cucagugaguuauuagggg

SEQ ID NO: 671091 - RNA, 19 nt, Artificial Sequence
  Description of Artificial Sequence: Synthetic oligonucleotide
ucauuacaaacgaggacga

SEQ ID NO: 671092 - RNA, 19 nt, Artificial Sequence
  Description of Artificial Sequence: Synthetic oligonucleotide
uuaccccagucucaaagag

SEQ ID NO: 671093 - RNA, 19 nt, Artificial Sequence
  Description of Artificial Sequence: Synthetic oligonucleotide
acaaacgaggacgaauugg

SEQ ID NO: 671094 - RNA, 19 nt, Artificial Sequence
  Description of Artificial Sequence: Synthetic oligonucleotide
acugcagacagugggauuc

SEQ ID NO: 671095 - RNA, 19 nt, Artificial Sequence
  Description of Artificial Sequence: Synthetic oligonucleotide
gucaucuccgcgaagaugc

SEQ ID NO: 671096 - RNA, 19 nt, Artificial Sequence
  Description of Artificial Sequence: Synthetic oligonucleotide
ugccugugaaaccaccagg

SEQ ID NO: 671097 - RNA, 19 nt, Artificial Sequence
  Description of Artificial Sequence: Synthetic oligonucleotide
aacacgugacaagaacugg

SEQ ID NO: 671098 - RNA, 19 nt, Artificial Sequence
  Description of Artificial Sequence: Synthetic oligonucleotide
ugcaaccucccuaaggaga

SEQ ID NO: 671099 - RNA, 19 nt, Artificial Sequence
  Description of Artificial Sequence: Synthetic oligonucleotide
cuaagucgccuuuagcagc

SEQ ID NO: 671100 - RNA, 19 nt, Artificial Sequence
  Description of Artificial Sequence: Synthetic oligonucleotide
gaggucuggagcuucgugc

SEQ ID NO: 671101 - RNA, 19 nt, Artificial Sequence
  Description of Artificial Sequence: Synthetic oligonucleotide
cacuaagucgccuuuagca

SEQ ID NO: 671102 - RNA, 19 nt, Artificial Sequence
  Description of Artificial Sequence: Synthetic oligonucleotide
ggagaaaccaggcuguaag

SEQ ID NO: 671103 - RNA, 19 nt, Artificial Sequence
  Description of Artificial Sequence: Synthetic oligonucleotide
augaugacgccaaagaaca

SEQ ID NO: 671104 - RNA, 19 nt, Artificial Sequence
  Description of Artificial Sequence: Synthetic oligonucleotide
aaagcaugccgaacauacc

SEQ ID NO: 671105 - RNA, 19 nt, Artificial Sequence
  Description of Artificial Sequence: Synthetic oligonucleotide
gaccuacucauuacaaacg

SEQ ID NO: 671106 - RNA, 19 nt, Artificial Sequence
  Description of Artificial Sequence: Synthetic oligonucleotide
acacuaagucgccuuuagc

SEQ ID NO: 671107 - RNA, 19 nt, Artificial Sequence
  Description of Artificial Sequence: Synthetic oligonucleotide
agcccaugguuuuaggguc

SEQ ID NO: 671108 - RNA, 19 nt, Artificial Sequence
  Description of Artificial Sequence: Synthetic oligonucleotide
aaccucccuaaggagaaac

SEQ ID NO: 671109 - RNA, 19 nt, Artificial Sequence
  Description of Artificial Sequence: Synthetic oligonucleotide
agagaugggaccaggcccc

SEQ ID NO: 671110 - RNA, 19 nt, Artificial Sequence
  Description of Artificial Sequence: Synthetic oligonucleotide
uuauuaggggccagaauua

SEQ ID NO: 671111 - RNA, 19 nt, Artificial Sequence
  Description of Artificial Sequence: Synthetic oligonucleotide
gaaauccccuaaguggugg

SEQ ID NO: 671112 - RNA, 19 nt, Artificial Sequence
  Description of Artificial Sequence: Synthetic oligonucleotide
acacgugacaagaacuggc

SEQ ID NO: 671113 - RNA, 19 nt, Artificial Sequence
  Description of Artificial Sequence: Synthetic oligonucleotide
aguagccaaggccacacug

SEQ ID NO: 671114 - RNA, 19 nt, Artificial Sequence
  Description of Artificial Sequence: Synthetic oligonucleotide
guuauuaggggccagaauu

SEQ ID NO: 671115 - RNA, 19 nt, Artificial Sequence
  Description of Artificial Sequence: Synthetic oligonucleotide
cagugaguuauuaggggcc

SEQ ID NO: 671116 - RNA, 19 nt, Artificial Sequence
  Description of Artificial Sequence: Synthetic oligonucleotide
uaaguaggaaagcgagggc

SEQ ID NO: 671117 - RNA, 19 nt, Artificial Sequence
  Description of Artificial Sequence: Synthetic oligonucleotide
aaccaguacccggucaugg

SEQ ID NO: 671118 - RNA, 19 nt, Artificial Sequence
  Description of Artificial Sequence: Synthetic oligonucleotide
ugucucgcacucauccacg

SEQ ID NO: 671119 - RNA, 19 nt, Artificial Sequence
  Description of Artificial Sequence: Synthetic oligonucleotide
ugucccacacucaucgaug

SEQ ID NO: 671120 - RNA, 19 nt, Artificial Sequence
  Description of Artificial Sequence: Synthetic oligonucleotide
uaagucgccuuuagcagca

SEQ ID NO: 671121 - RNA, 19 nt, Artificial Sequence
  Description of Artificial Sequence: Synthetic oligonucleotide
uucacacacuguaaugccu

SEQ ID NO: 671122 - RNA, 19 nt, Artificial Sequence
  Description of Artificial Sequence: Synthetic oligonucleotide
gaacacgugacaagaacug

SEQ ID NO: 671123 - RNA, 19 nt, Artificial Sequence
  Description of Artificial Sequence: Synthetic oligonucleotide
uuuagggucucagugaguu

SEQ ID NO: 671124 - RNA, 19 nt, Artificial Sequence
  Description of Artificial Sequence: Synthetic oligonucleotide
uuauaucuccguuaccgua

SEQ ID NO: 671125 - RNA, 19 nt, Artificial Sequence
  Description of Artificial Sequence: Synthetic oligonucleotide
ggauuaucuacccuugaug

SEQ ID NO: 671126 - RNA, 19 nt, Artificial Sequence
  Description of Artificial Sequence: Synthetic oligonucleotide
ucgccuuuagcagcaagcg

SEQ ID NO: 671127 - RNA, 19 nt, Artificial Sequence
  Description of Artificial Sequence: Synthetic oligonucleotide
auuacaaacgaggacgaau

SEQ ID NO: 671128 - RNA, 19 nt, Artificial Sequence
  Description of Artificial Sequence: Synthetic oligonucleotide
aaagccccagaccuacuca

SEQ ID NO: 671129 - RNA, 19 nt, Artificial Sequence
  Description of Artificial Sequence: Synthetic oligonucleotide
caaacgaggacgaauugga

SEQ ID NO: 671130 - RNA, 19 nt, Artificial Sequence
  Description of Artificial Sequence: Synthetic oligonucleotide
ucccuaaggagaaacuguc

SEQ ID NO: 671131 - RNA, 19 nt, Artificial Sequence
  Description of Artificial Sequence: Synthetic oligonucleotide
gcagugaacacuaagucgc

SEQ ID NO: 671132 - RNA, 19 nt, Artificial Sequence
  Description of Artificial Sequence: Synthetic oligonucleotide
uacaaacgaggacgaauug

SEQ ID NO: 671133 - RNA, 19 nt, Artificial Sequence
  Description of Artificial Sequence: Synthetic oligonucleotide
ucaaaguagccaaggccac

SEQ ID NO: 671134 - RNA, 19 nt, Artificial Sequence
  Description of Artificial Sequence: Synthetic oligonucleotide
cuucacacugcccguagcc

SEQ ID NO: 671135 - RNA, 19 nt, Artificial Sequence
  Description of Artificial Sequence: Synthetic oligonucleotide
uauuaggggccagaauuag

SEQ ID NO: 671136 - RNA, 19 nt, Artificial Sequence
  Description of Artificial Sequence: Synthetic oligonucleotide
agcuucagggagucggaac

SEQ ID NO: 671137 - RNA, 19 nt, Artificial Sequence
  Description of Artificial Sequence: Synthetic oligonucleotide
uugagaugaugcagggccc

SEQ ID NO: 671138 - RNA, 19 nt, Artificial Sequence
  Description of Artificial Sequence: Synthetic oligonucleotide
aucuccguuaccguagggg

SEQ ID NO: 671139 - RNA, 19 nt, Artificial Sequence
  Description of Artificial Sequence: Synthetic oligonucleotide
acgaggacgaauuggaaua

SEQ ID NO: 671140 - RNA, 19 nt, Artificial Sequence
  Description of Artificial Sequence: Synthetic oligonucleotide
ugcaauuccaggagagaaa

SEQ ID NO: 671141 - RNA, 19 nt, Artificial Sequence
  Description of Artificial Sequence: Synthetic oligonucleotide
gagccuaaucugcaauucc

SEQ ID NO: 671142 - RNA, 19 nt, Artificial Sequence
  Description of Artificial Sequence: Synthetic oligonucleotide
auaucuccguuaccguagg

SEQ ID NO: 671143 - RNA, 19 nt, Artificial Sequence
  Description of Artificial Sequence: Synthetic oligonucleotide
cucggcagguaugacaugg

SEQ ID NO: 671144 - RNA, 19 nt, Artificial Sequence
  Description of Artificial Sequence: Synthetic oligonucleotide
uguggggccaucuuuucuc

SEQ ID NO: 671145 - RNA, 19 nt, Artificial Sequence
  Description of Artificial Sequence: Synthetic oligonucleotide
uccgccucaaaguagccaa

SEQ ID NO: 671146 - RNA, 19 nt, Artificial Sequence
  Description of Artificial Sequence: Synthetic oligonucleotide
gugaacacgugacaagaac

SEQ ID NO: 671147 - RNA, 19 nt, Artificial Sequence
  Description of Artificial Sequence: Synthetic oligonucleotide
uucuagaccgaccuuuauu

SEQ ID NO: 671148 - RNA, 19 nt, Artificial Sequence
  Description of Artificial Sequence: Synthetic oligonucleotide
gaugacgccaaagaacauc

SEQ ID NO: 671149 - RNA, 19 nt, Artificial Sequence
  Description of Artificial Sequence: Synthetic oligonucleotide
ucggaacagagccacugga

SEQ ID NO: 671150 - RNA, 19 nt, Artificial Sequence
  Description of Artificial Sequence: Synthetic oligonucleotide
aucuacccuugaugaagcc

SEQ ID NO: 671151 - RNA, 19 nt, Artificial Sequence
  Description of Artificial Sequence: Synthetic oligonucleotide
guagccaaggccacacugg

SEQ ID NO: 671152 - RNA, 19 nt, Artificial Sequence
  Description of Artificial Sequence: Synthetic oligonucleotide
caggcgauggcacucgaag

SEQ ID NO: 671153 - RNA, 19 nt, Artificial Sequence
  Description of Artificial Sequence: Synthetic oligonucleotide
agggcccaaccuuucuugc

SEQ ID NO: 671154 - RNA, 19 nt, Artificial Sequence
  Description of Artificial Sequence: Synthetic oligonucleotide
gaaagcgagggccuuggga

SEQ ID NO: 671155 - RNA, 19 nt, Artificial Sequence
  Description of Artificial Sequence: Synthetic oligonucleotide
uguucacacagaacugguc

SEQ ID NO: 671156 - RNA, 19 nt, Artificial Sequence
  Description of Artificial Sequence: Synthetic oligonucleotide
auuaucuacccuugaugaa

SEQ ID NO: 671157 - RNA, 19 nt, Artificial Sequence
  Description of Artificial Sequence: Synthetic oligonucleotide
uuccaggagagaaauuaua

SEQ ID NO: 671158 - RNA, 19 nt, Artificial Sequence
  Description of Artificial Sequence: Synthetic oligonucleotide
caugguuuuagggucucag

SEQ ID NO: 671159 - RNA, 19 nt, Artificial Sequence
  Description of Artificial Sequence: Synthetic oligonucleotide
ugccacggcuccaaugaag

SEQ ID NO: 671160 - RNA, 19 nt, Artificial Sequence
  Description of Artificial Sequence: Synthetic oligonucleotide
agcaagcguggccagagca

SEQ ID NO: 671161 - RNA, 19 nt, Artificial Sequence
  Description of Artificial Sequence: Synthetic oligonucleotide
cacgucuaggcacuuggag

SEQ ID NO: 671162 - RNA, 19 nt, Artificial Sequence
  Description of Artificial Sequence: Synthetic oligonucleotide
ugggugggaggaaaucccc

SEQ ID NO: 671163 - RNA, 19 nt, Artificial Sequence
  Description of Artificial Sequence: Synthetic oligonucleotide
augccgaacauaccagaug

SEQ ID NO: 671164 - RNA, 19 nt, Artificial Sequence
  Description of Artificial Sequence: Synthetic oligonucleotide
acgugacaagaacuggcag

SEQ ID NO: 671165 - RNA, 19 nt, Artificial Sequence
  Description of Artificial Sequence: Synthetic oligonucleotide
caggagggcccaaaagugc

SEQ ID NO: 671166 - RNA, 19 nt, Artificial Sequence
  Description of Artificial Sequence: Synthetic oligonucleotide
cucgaagucugacuugcug

SEQ ID NO: 671167 - RNA, 19 nt, Artificial Sequence
  Description of Artificial Sequence: Synthetic oligonucleotide
ugaguuauuaggggccaga

SEQ ID NO: 671168 - RNA, 19 nt, Artificial Sequence
  Description of Artificial Sequence: Synthetic oligonucleotide
ggucacuucgcucugacaa

SEQ ID NO: 671169 - RNA, 19 nt, Artificial Sequence
  Description of Artificial Sequence: Synthetic oligonucleotide
acacacuguaaugccugcc

SEQ ID NO: 671170 - RNA, 19 nt, Artificial Sequence
  Description of Artificial Sequence: Synthetic oligonucleotide
ggacgaauuggaauacugg

SEQ ID NO: 671171 - RNA, 19 nt, Artificial Sequence
  Description of Artificial Sequence: Synthetic oligonucleotide
uaccccagucucaaagaga

SEQ ID NO: 671172 - RNA, 19 nt, Artificial Sequence
  Description of Artificial Sequence: Synthetic oligonucleotide
augacgccaaagaacaucu

SEQ ID NO: 671173 - RNA, 19 nt, Artificial Sequence
  Description of Artificial Sequence: Synthetic oligonucleotide
ggcagcaugcaccuggcag

SEQ ID NO: 671174 - RNA, 19 nt, Artificial Sequence
  Description of Artificial Sequence: Synthetic oligonucleotide
uccccuaagugguggcagg

SEQ ID NO: 671175 - RNA, 19 nt, Artificial Sequence
  Description of Artificial Sequence: Synthetic oligonucleotide
aguuauuaggggccagaau

SEQ ID NO: 671176 - RNA, 19 nt, Artificial Sequence
  Description of Artificial Sequence: Synthetic oligonucleotide
gugacaagaacuggcagca

SEQ ID NO: 671177 - RNA, 19 nt, Artificial Sequence
  Description of Artificial Sequence: Synthetic oligonucleotide
agacagugggauuccucag

SEQ ID NO: 671178 - RNA, 19 nt, Artificial Sequence
  Description of Artificial Sequence: Synthetic oligonucleotide
ccuaaucugcaauuccagg

SEQ ID NO: 671179 - RNA, 19 nt, Artificial Sequence
  Description of Artificial Sequence: Synthetic oligonucleotide
uccgcgaagaugcccgcug

SEQ ID NO: 671180 - RNA, 19 nt, Artificial Sequence
  Description of Artificial Sequence: Synthetic oligonucleotide
aggugaacacgugacaaga

SEQ ID NO: 671181 - RNA, 19 nt, Artificial Sequence
  Description of Artificial Sequence: Synthetic oligonucleotide
gaagaggucuggagcuucg

SEQ ID NO: 671182 - RNA, 19 nt, Artificial Sequence
  Description of Artificial Sequence: Synthetic oligonucleotide
aagccccagaccuacucau

SEQ ID NO: 671183 - RNA, 19 nt, Artificial Sequence
  Description of Artificial Sequence: Synthetic oligonucleotide
gacacccuccuccugucug

SEQ ID NO: 671184 - RNA, 19 nt, Artificial Sequence
  Description of Artificial Sequence: Synthetic oligonucleotide
uaucuccguuaccguaggg

SEQ ID NO: 671185 - RNA, 19 nt, Artificial Sequence
  Description of Artificial Sequence: Synthetic oligonucleotide
aagaugcccgcugacucug

SEQ ID NO: 671186 - RNA, 19 nt, Artificial Sequence
  Description of Artificial Sequence: Synthetic oligonucleotide
acggucacuucgcucugac

SEQ ID NO: 671187 - RNA, 19 nt, Artificial Sequence
  Description of Artificial Sequence: Synthetic oligonucleotide
aggacgaauuggaauacug

SEQ ID NO: 671188 - RNA, 19 nt, Artificial Sequence
  Description of Artificial Sequence: Synthetic oligonucleotide
ucccgguugguucucucca

SEQ ID NO: 671189 - RNA, 19 nt, Artificial Sequence
  Description of Artificial Sequence: Synthetic oligonucleotide
ggggccaccucucauagug

SEQ ID NO: 671190 - RNA, 19 nt, Artificial Sequence
  Description of Artificial Sequence: Synthetic oligonucleotide
guggcagggauuaucuacc

SEQ ID NO: 671191 - RNA, 19 nt, Artificial Sequence
  Description of Artificial Sequence: Synthetic oligonucleotide
cagggauuaucuacccuug

SEQ ID NO: 671192 - RNA, 19 nt, Artificial Sequence
  Description of Artificial Sequence: Synthetic oligonucleotide
gccuuuagcagcaagcgug

SEQ ID NO: 671193 - RNA, 19 nt, Artificial Sequence
  Description of Artificial Sequence: Synthetic oligonucleotide
cagcucggggagaagaaug

SEQ ID NO: 671194 - RNA, 19 nt, Artificial Sequence
  Description of Artificial Sequence: Synthetic oligonucleotide
agucggaacagagccacug

SEQ ID NO: 671195 - RNA, 19 nt, Artificial Sequence
  Description of Artificial Sequence: Synthetic oligonucleotide
ugcgcuccgccucaaagua

SEQ ID NO: 671196 - RNA, 19 nt, Artificial Sequence
  Description of Artificial Sequence: Synthetic oligonucleotide
ccaaaagugccagaggggc

SEQ ID NO: 671197 - RNA, 19 nt, Artificial Sequence
  Description of Artificial Sequence: Synthetic oligonucleotide
agcacagaugaugacgcca

SEQ ID NO: 671198 - RNA, 19 nt, Artificial Sequence
  Description of Artificial Sequence: Synthetic oligonucleotide
cacggcuccaaugaagaug

SEQ ID NO: 671199 - RNA, 19 nt, Artificial Sequence
  Description of Artificial Sequence: Synthetic oligonucleotide
guagcuacccuccguguuc

SEQ ID NO: 671200 - RNA, 19 nt, Artificial Sequence
  Description of Artificial Sequence: Synthetic oligonucleotide
ugagaugaugcagggccca

SEQ ID NO: 671201 - RNA, 19 nt, Artificial Sequence
  Description of Artificial Sequence: Synthetic oligonucleotide
cagugaacacuaagucgcc

SEQ ID NO: 671202 - RNA, 19 nt, Artificial Sequence
  Description of Artificial Sequence: Synthetic oligonucleotide
cugccugugaaaccaccag

SEQ ID NO: 671203 - RNA, 19 nt, Artificial Sequence
  Description of Artificial Sequence: Synthetic oligonucleotide
ugccaguccccuaggcaag

SEQ ID NO: 671204 - RNA, 19 nt, Artificial Sequence
  Description of Artificial Sequence: Synthetic oligonucleotide
cauggaugggguucagcuc

SEQ ID NO: 671205 - RNA, 19 nt, Artificial Sequence
  Description of Artificial Sequence: Synthetic oligonucleotide
uuucuagaccgaccuuuau

SEQ ID NO: 671206 - RNA, 19 nt, Artificial Sequence
  Description of Artificial Sequence: Synthetic oligonucleotide
agaaaccacacugccccag

SEQ ID NO: 671207 - RNA, 19 nt, Artificial Sequence
  Description of Artificial Sequence: Synthetic oligonucleotide
cuagaccgaccuuuauuuc

SEQ ID NO: 671208 - RNA, 19 nt, Artificial Sequence
  Description of Artificial Sequence: Synthetic oligonucleotide
agccuaaucugcaauucca

SEQ ID NO: 671209 - RNA, 19 nt, Artificial Sequence
  Description of Artificial Sequence: Synthetic oligonucleotide
ugcugguagccacggcugc

SEQ ID NO: 671210 - RNA, 19 nt, Artificial Sequence
  Description of Artificial Sequence: Synthetic oligonucleotide
aagcgagggccuugggacu

SEQ ID NO: 671211 - RNA, 19 nt, Artificial Sequence
  Description of Artificial Sequence: Synthetic oligonucleotide
agugaguuauuaggggcca

SEQ ID NO: 671212 - RNA, 19 nt, Artificial Sequence
  Description of Artificial Sequence: Synthetic oligonucleotide
cacacuguaaugccugcca

SEQ ID NO: 671213 - RNA, 19 nt, Artificial Sequence
  Description of Artificial Sequence: Synthetic oligonucleotide
agaaaccaggcuguaagua

SEQ ID NO: 671214 - RNA, 19 nt, Artificial Sequence
  Description of Artificial Sequence: Synthetic oligonucleotide
caggccuuugcacaaucuc

SEQ ID NO: 671215 - RNA, 19 nt, Artificial Sequence
  Description of Artificial Sequence: Synthetic oligonucleotide
aauccccuaagugguggca

SEQ ID NO: 671216 - RNA, 19 nt, Artificial Sequence
  Description of Artificial Sequence: Synthetic oligonucleotide
ccuuuagcagcaagcgugg

SEQ ID NO: 671217 - RNA, 19 nt, Artificial Sequence
  Description of Artificial Sequence: Synthetic oligonucleotide
uagccgacuuggcagucac

SEQ ID NO: 671218 - RNA, 19 nt, Artificial Sequence
  Description of Artificial Sequence: Synthetic oligonucleotide
cuguaaugccugccagucc

SEQ ID NO: 671219 - RNA, 19 nt, Artificial Sequence
  Description of Artificial Sequence: Synthetic oligonucleotide
accaaagcaugccgaacau

SEQ ID NO: 671220 - RNA, 19 nt, Artificial Sequence
  Description of Artificial Sequence: Synthetic oligonucleotide
ucaucuccgcgaagaugcc

SEQ ID NO: 671221 - RNA, 19 nt, Artificial Sequence
  Description of Artificial Sequence: Synthetic oligonucleotide
agggauuaucuacccuuga

SEQ ID NO: 671222 - RNA, 19 nt, Artificial Sequence
  Description of Artificial Sequence: Synthetic oligonucleotide
cugcaaccucccuaaggag

SEQ ID NO: 671223 - RNA, 19 nt, Artificial Sequence
  Description of Artificial Sequence: Synthetic oligonucleotide
cagggcccaaccuuucuug

SEQ ID NO: 671224 - RNA, 19 nt, Artificial Sequence
  Description of Artificial Sequence: Synthetic oligonucleotide
gacaaccaguacccgguca

SEQ ID NO: 671225 - RNA, 19 nt, Artificial Sequence
  Description of Artificial Sequence: Synthetic oligonucleotide
accagugcucggcagguau

SEQ ID NO: 671226 - RNA, 19 nt, Artificial Sequence
  Description of Artificial Sequence: Synthetic oligonucleotide
gucacuucgcucugacaac

SEQ ID NO: 671227 - RNA, 19 nt, Artificial Sequence
  Description of Artificial Sequence: Synthetic oligonucleotide
ugacgccaaagaacaucug

SEQ ID NO: 671228 - RNA, 19 nt, Artificial Sequence
  Description of Artificial Sequence: Synthetic oligonucleotide
cagucucaaagagaaacca

SEQ ID NO: 671229 - RNA, 19 nt, Artificial Sequence
  Description of Artificial Sequence: Synthetic oligonucleotide
agcaugccgaacauaccag

SEQ ID NO: 671230 - RNA, 19 nt, Artificial Sequence
  Description of Artificial Sequence: Synthetic oligonucleotide
augacauggaugggguuca

SEQ ID NO: 671231 - RNA, 19 nt, Artificial Sequence
  Description of Artificial Sequence: Synthetic oligonucleotide
aggcgauggcacucgaagu

SEQ ID NO: 671232 - RNA, 19 nt, Artificial Sequence
  Description of Artificial Sequence: Synthetic oligonucleotide
ccuacucauuacaaacgag

SEQ ID NO: 671233 - RNA, 19 nt, Artificial Sequence
  Description of Artificial Sequence: Synthetic oligonucleotide
accgaccuuuauuuccuga

SEQ ID NO: 671234 - RNA, 19 nt, Artificial Sequence
  Description of Artificial Sequence: Synthetic oligonucleotide
aucucggcacucauaggag

SEQ ID NO: 671235 - RNA, 19 nt, Artificial Sequence
  Description of Artificial Sequence: Synthetic oligonucleotide
ucuaggcacuuggagccca

SEQ ID NO: 671236 - RNA, 19 nt, Artificial Sequence
  Description of Artificial Sequence: Synthetic oligonucleotide
auccccuaagugguggcag

SEQ ID NO: 671237 - RNA, 19 nt, Artificial Sequence
  Description of Artificial Sequence: Synthetic oligonucleotide
caguuuucuagaccgaccu

SEQ ID NO: 671238 - RNA, 19 nt, Artificial Sequence
  Description of Artificial Sequence: Synthetic oligonucleotide
gcggguuucacugucuuug

SEQ ID NO: 671239 - RNA, 19 nt, Artificial Sequence
  Description of Artificial Sequence: Synthetic oligonucleotide
aaacgaggacgaauuggaa

SEQ ID NO: 671240 - RNA, 19 nt, Artificial Sequence
  Description of Artificial Sequence: Synthetic oligonucleotide
agaccgaccuuuauuuccu

SEQ ID NO: 671241 - RNA, 19 nt, Artificial Sequence
  Description of Artificial Sequence: Synthetic oligonucleotide
gcugccacggcuccaauga

SEQ ID NO: 671242 - RNA, 19 nt, Artificial Sequence
  Description of Artificial Sequence: Synthetic oligonucleotide
caaaagugccagaggggca

SEQ ID NO: 671243 - RNA, 19 nt, Artificial Sequence
  Description of Artificial Sequence: Synthetic oligonucleotide
ccgaccuuuauuuccugag

SEQ ID NO: 671244 - RNA, 19 nt, Artificial Sequence
  Description of Artificial Sequence: Synthetic oligonucleotide
guaggcaucagcccauggu

SEQ ID NO: 671245 - RNA, 19 nt, Artificial Sequence
  Description of Artificial Sequence: Synthetic oligonucleotide
ugacaaccaguacccgguc

SEQ ID NO: 671246 - RNA, 19 nt, Artificial Sequence
  Description of Artificial Sequence: Synthetic oligonucleotide
ugaugacgccaaagaacau

SEQ ID NO: 671247 - RNA, 19 nt, Artificial Sequence
  Description of Artificial Sequence: Synthetic oligonucleotide
ggcgauggcacucgaaguc

SEQ ID NO: 671248 - RNA, 19 nt, Artificial Sequence
  Description of Artificial Sequence: Synthetic oligonucleotide
gccugcaaccucccuaagg

SEQ ID NO: 671249 - RNA, 19 nt, Artificial Sequence
  Description of Artificial Sequence: Synthetic oligonucleotide
gccgacuuggcagucacag

SEQ ID NO: 671250 - RNA, 19 nt, Artificial Sequence
  Description of Artificial Sequence: Synthetic oligonucleotide
aguuuucuagaccgaccuu

SEQ ID NO: 671251 - RNA, 19 nt, Artificial Sequence
  Description of Artificial Sequence: Synthetic oligonucleotide
gaugggaccaggccccuua

SEQ ID NO: 671252 - RNA, 19 nt, Artificial Sequence
  Description of Artificial Sequence: Synthetic oligonucleotide
gaguuauuaggggccagaa

SEQ ID NO: 671253 - RNA, 19 nt, Artificial Sequence
  Description of Artificial Sequence: Synthetic oligonucleotide
aagcccuccaguacacggu

SEQ ID NO: 671254 - RNA, 19 nt, Artificial Sequence
  Description of Artificial Sequence: Synthetic oligonucleotide
gaagaugcccgcugacucu

SEQ ID NO: 671255 - RNA, 19 nt, Artificial Sequence
  Description of Artificial Sequence: Synthetic oligonucleotide
cagaccuacucauuacaaa

SEQ ID NO: 671256 - RNA, 19 nt, Artificial Sequence
  Description of Artificial Sequence: Synthetic oligonucleotide
ccugcaaccucccuaagga

SEQ ID NO: 671257 - RNA, 19 nt, Artificial Sequence
  Description of Artificial Sequence: Synthetic oligonucleotide
cugcccguagccaccgcag

SEQ ID NO: 671258 - RNA, 19 nt, Artificial Sequence
  Description of Artificial Sequence: Synthetic oligonucleotide
ggagucggaacagagccac

SEQ ID NO: 671259 - RNA, 19 nt, Artificial Sequence
  Description of Artificial Sequence: Synthetic oligonucleotide
agccagacaggucccggga

SEQ ID NO: 671260 - RNA, 19 nt, Artificial Sequence
  Description of Artificial Sequence: Synthetic oligonucleotide
gucccgguugguucucucc

SEQ ID NO: 671261 - RNA, 19 nt, Artificial Sequence
  Description of Artificial Sequence: Synthetic oligonucleotide
cagcaugcaccuggcaggg

SEQ ID NO: 671262 - RNA, 19 nt, Artificial Sequence
  Description of Artificial Sequence: Synthetic oligonucleotide
ggggauuugcagauacaag

SEQ ID NO: 671263 - RNA, 19 nt, Artificial Sequence
  Description of Artificial Sequence: Synthetic oligonucleotide
gugcucggcagguaugaca

SEQ ID NO: 671264 - RNA, 19 nt, Artificial Sequence
  Description of Artificial Sequence: Synthetic oligonucleotide
cuacugggguccugggcug

SEQ ID NO: 671265 - RNA, 19 nt, Artificial Sequence
  Description of Artificial Sequence: Synthetic oligonucleotide
agcgguagcuacccuccgu

SEQ ID NO: 671266 - RNA, 19 nt, Artificial Sequence
  Description of Artificial Sequence: Synthetic oligonucleotide
cacucauaggagccuucug

SEQ ID NO: 671267 - RNA, 19 nt, Artificial Sequence
  Description of Artificial Sequence: Synthetic oligonucleotide
cucccuaaggagaaacugu

SEQ ID NO: 671268 - RNA, 19 nt, Artificial Sequence
  Description of Artificial Sequence: Synthetic oligonucleotide
acagacacagcgguagcua

SEQ ID NO: 671269 - RNA, 19 nt, Artificial Sequence
  Description of Artificial Sequence: Synthetic oligonucleotide
uuagggucucagugaguua

SEQ ID NO: 671270 - RNA, 19 nt, Artificial Sequence
  Description of Artificial Sequence: Synthetic oligonucleotide
gccuaaucugcaauuccag

SEQ ID NO: 671271 - RNA, 19 nt, Artificial Sequence
  Description of Artificial Sequence: Synthetic oligonucleotide
gguaggcaucagcccaugg

SEQ ID NO: 671272 - RNA, 19 nt, Artificial Sequence
  Description of Artificial Sequence: Synthetic oligonucleotide
gaccgaccuuuauuuccug

SEQ ID NO: 671273 - RNA, 19 nt, Artificial Sequence
  Description of Artificial Sequence: Synthetic oligonucleotide
ggggaagggagccuaaucu

SEQ ID NO: 671274 - RNA, 19 nt, Artificial Sequence
  Description of Artificial Sequence: Synthetic oligonucleotide
guacacggucacuucgcuc

SEQ ID NO: 671275 - RNA, 19 nt, Artificial Sequence
  Description of Artificial Sequence: Synthetic oligonucleotide
uguuuaccccagucucaaa

SEQ ID NO: 671276 - RNA, 19 nt, Artificial Sequence
  Description of Artificial Sequence: Synthetic oligonucleotide
cucugacaaccaguacccg

SEQ ID NO: 671277 - RNA, 19 nt, Artificial Sequence
  Description of Artificial Sequence: Synthetic oligonucleotide
cuaaggagaaacugucuuu

SEQ ID NO: 671278 - RNA, 19 nt, Artificial Sequence
  Description of Artificial Sequence: Synthetic oligonucleotide
agcuucgugcugccuguga

SEQ ID NO: 671279 - RNA, 19 nt, Artificial Sequence
  Description of Artificial Sequence: Synthetic oligonucleotide
aagcguggccagagcacag

SEQ ID NO: 671280 - RNA, 19 nt, Artificial Sequence
  Description of Artificial Sequence: Synthetic oligonucleotide
cagcccaugguuuuagggu

SEQ ID NO: 671281 - RNA, 19 nt, Artificial Sequence
  Description of Artificial Sequence: Synthetic oligonucleotide
ggaggugaacacgugacaa

SEQ ID NO: 671282 - RNA, 19 nt, Artificial Sequence
  Description of Artificial Sequence: Synthetic oligonucleotide
cagucacagugcccgcugc

SEQ ID NO: 671283 - RNA, 19 nt, Artificial Sequence
  Description of Artificial Sequence: Synthetic oligonucleotide
gcgguagcuacccuccgug

SEQ ID NO: 671284 - RNA, 19 nt, Artificial Sequence
  Description of Artificial Sequence: Synthetic oligonucleotide
gugaguuauuaggggccag

SEQ ID NO: 671285 - RNA, 19 nt, Artificial Sequence
  Description of Artificial Sequence: Synthetic oligonucleotide
gcuacugggguccugggcu

SEQ ID NO: 671286 - RNA, 19 nt, Artificial Sequence
  Description of Artificial Sequence: Synthetic oligonucleotide
cucgagucccuuccccuuc

SEQ ID NO: 671287 - RNA, 19 nt, Artificial Sequence
  Description of Artificial Sequence: Synthetic oligonucleotide
auaccagauggcugcuguu

SEQ ID NO: 671288 - RNA, 19 nt, Artificial Sequence
  Description of Artificial Sequence: Synthetic oligonucleotide
ucccacacucaucgauguc

SEQ ID NO: 671289 - RNA, 19 nt, Artificial Sequence
  Description of Artificial Sequence: Synthetic oligonucleotide
uacccuugaugaagcccuc

SEQ ID NO: 671290 - RNA, 19 nt, Artificial Sequence
  Description of Artificial Sequence: Synthetic oligonucleotide
guguuuaccccagucucaa

SEQ ID NO: 671291 - RNA, 19 nt, Artificial Sequence
  Description of Artificial Sequence: Synthetic oligonucleotide
ggagccuaaucugcaauuc

SEQ ID NO: 671292 - RNA, 19 nt, Artificial Sequence
  Description of Artificial Sequence: Synthetic oligonucleotide
guaaugccugccagucccc

SEQ ID NO: 671293 - RNA, 19 nt, Artificial Sequence
  Description of Artificial Sequence: Synthetic oligonucleotide
caccucucauagugagcag

SEQ ID NO: 671294 - RNA, 19 nt, Artificial Sequence
  Description of Artificial Sequence: Synthetic oligonucleotide
caagcguggccagagcaca

SEQ ID NO: 671295 - RNA, 19 nt, Artificial Sequence
  Description of Artificial Sequence: Synthetic oligonucleotide
ggggcuacugggguccugg

SEQ ID NO: 671296 - RNA, 19 nt, Artificial Sequence
  Description of Artificial Sequence: Synthetic oligonucleotide
gacacaccacugucucgca

SEQ ID NO: 671297 - RNA, 19 nt, Artificial Sequence
  Description of Artificial Sequence: Synthetic oligonucleotide
augcccgcugacucuggga

SEQ ID NO: 671298 - RNA, 19 nt, Artificial Sequence
  Description of Artificial Sequence: Synthetic oligonucleotide
auagccgacuuggcaguca

SEQ ID NO: 671299 - RNA, 19 nt, Artificial Sequence
  Description of Artificial Sequence: Synthetic oligonucleotide
guagccaccgcagggccuc

SEQ ID NO: 671300 - RNA, 19 nt, Artificial Sequence
  Description of Artificial Sequence: Synthetic oligonucleotide
cugugaaaccaccaggcuu

SEQ ID NO: 671301 - RNA, 19 nt, Artificial Sequence
  Description of Artificial Sequence: Synthetic oligonucleotide
gaacacuaagucgccuuua

SEQ ID NO: 671302 - RNA, 19 nt, Artificial Sequence
  Description of Artificial Sequence: Synthetic oligonucleotide
cugcagacagugggauucc

SEQ ID NO: 671303 - RNA, 19 nt, Artificial Sequence
  Description of Artificial Sequence: Synthetic oligonucleotide
gguguuuaccccagucuca

SEQ ID NO: 671304 - RNA, 19 nt, Artificial Sequence
  Description of Artificial Sequence: Synthetic oligonucleotide
ggcgcuggaaggggaaggg

SEQ ID NO: 671305 - RNA, 19 nt, Artificial Sequence
  Description of Artificial Sequence: Synthetic oligonucleotide
gguaugacauggauggggu

SEQ ID NO: 671306 - RNA, 19 nt, Artificial Sequence
  Description of Artificial Sequence: Synthetic oligonucleotide
gcaugccgaacauaccaga

SEQ ID NO: 671307 - RNA, 19 nt, Artificial Sequence
  Description of Artificial Sequence: Synthetic oligonucleotide
ucgguaaggcagguucaau

SEQ ID NO: 671308 - RNA, 19 nt, Artificial Sequence
  Description of Artificial Sequence: Synthetic oligonucleotide
cgaagaugcccgcugacuc

SEQ ID NO: 671309 - RNA, 19 nt, Artificial Sequence
  Description of Artificial Sequence: Synthetic oligonucleotide
cagcaggcgauggcacucg

SEQ ID NO: 671310 - RNA, 19 nt, Artificial Sequence
  Description of Artificial Sequence: Synthetic oligonucleotide
caccugcugguagccacgg

SEQ ID NO: 671311 - RNA, 19 nt, Artificial Sequence
  Description of Artificial Sequence: Synthetic oligonucleotide
gcagucacagugcccgcug

SEQ ID NO: 671312 - RNA, 19 nt, Artificial Sequence
  Description of Artificial Sequence: Synthetic oligonucleotide
cugcucauucucuccugga

SEQ ID NO: 671313 - RNA, 19 nt, Artificial Sequence
  Description of Artificial Sequence: Synthetic oligonucleotide
gcccguagccaccgcaggg

SEQ ID NO: 671314 - RNA, 19 nt, Artificial Sequence
  Description of Artificial Sequence: Synthetic oligonucleotide
accucccuaaggagaaacu

SEQ ID NO: 671315 - RNA, 19 nt, Artificial Sequence
  Description of Artificial Sequence: Synthetic oligonucleotide
ggaaauccccuaaguggug

SEQ ID NO: 671316 - RNA, 19 nt, Artificial Sequence
  Description of Artificial Sequence: Synthetic oligonucleotide
ugucccgguugguucucuc

SEQ ID NO: 671317 - RNA, 19 nt, Artificial Sequence
  Description of Artificial Sequence: Synthetic oligonucleotide
gugaaaccaccaggcuucc

SEQ ID NO: 671318 - RNA, 19 nt, Artificial Sequence
  Description of Artificial Sequence: Synthetic oligonucleotide
caaccaguacccggucaug

SEQ ID NO: 671319 - RNA, 19 nt, Artificial Sequence
  Description of Artificial Sequence: Synthetic oligonucleotide
ccccuuaggggcugugggg

SEQ ID NO: 671320 - RNA, 19 nt, Artificial Sequence
  Description of Artificial Sequence: Synthetic oligonucleotide
ccaggcuguaaguaggaaa

SEQ ID NO: 671321 - RNA, 19 nt, Artificial Sequence
  Description of Artificial Sequence: Synthetic oligonucleotide
gucuaggcacuuggagccc

SEQ ID NO: 671322 - RNA, 19 nt, Artificial Sequence
  Description of Artificial Sequence: Synthetic oligonucleotide
ggcugcucgguaaggcagg

SEQ ID NO: 671323 - RNA, 19 nt, Artificial Sequence
  Description of Artificial Sequence: Synthetic oligonucleotide
aggcggguuucacugucuu

SEQ ID NO: 671324 - RNA, 19 nt, Artificial Sequence
  Description of Artificial Sequence: Synthetic oligonucleotide
cgcuccgccucaaaguagc

SEQ ID NO: 671325 - RNA, 19 nt, Artificial Sequence
  Description of Artificial Sequence: Synthetic oligonucleotide
cagcaagcguggccagagc

SEQ ID NO: 671326 - RNA, 19 nt, Artificial Sequence
  Description of Artificial Sequence: Synthetic oligonucleotide
ccgguugguucucuccagg

SEQ ID NO: 671327 - RNA, 19 nt, Artificial Sequence
  Description of Artificial Sequence: Synthetic oligonucleotide
gggaccaaagcaugccgaa

SEQ ID NO: 671328 - RNA, 19 nt, Artificial Sequence
  Description of Artificial Sequence: Synthetic oligonucleotide
gggauuaucuacccuugau

SEQ ID NO: 671329 - RNA, 19 nt, Artificial Sequence
  Description of Artificial Sequence: Synthetic oligonucleotide
agggcgcuggaaggggaag

SEQ ID NO: 671330 - RNA, 19 nt, Artificial Sequence
  Description of Artificial Sequence: Synthetic oligonucleotide
gcaaccucccuaaggagaa

SEQ ID NO: 671331 - RNA, 19 nt, Artificial Sequence
  Description of Artificial Sequence: Synthetic oligonucleotide
cauagccgacuuggcaguc

SEQ ID NO: 671332 - RNA, 19 nt, Artificial Sequence
  Description of Artificial Sequence: Synthetic oligonucleotide
agcaggcgauggcacucga

SEQ ID NO: 671333 - RNA, 19 nt, Artificial Sequence
  Description of Artificial Sequence: Synthetic oligonucleotide
ggaccaaagcaugccgaac

SEQ ID NO: 671334 - RNA, 19 nt, Artificial Sequence
  Description of Artificial Sequence: Synthetic oligonucleotide
auccacgucuaggcacuug

SEQ ID NO: 671335 - RNA, 19 nt, Artificial Sequence
  Description of Artificial Sequence: Synthetic oligonucleotide
cagugcucggcagguauga

SEQ ID NO: 671336 - RNA, 19 nt, Artificial Sequence
  Description of Artificial Sequence: Synthetic oligonucleotide
ccagaccuacucauuacaa

SEQ ID NO: 671337 - RNA, 19 nt, Artificial Sequence
  Description of Artificial Sequence: Synthetic oligonucleotide
gcuucgugcugccugugaa

SEQ ID NO: 671338 - RNA, 19 nt, Artificial Sequence
  Description of Artificial Sequence: Synthetic oligonucleotide
ccuuaggggcuguggggcc

SEQ ID NO: 671339 - RNA, 19 nt, Artificial Sequence
  Description of Artificial Sequence: Synthetic oligonucleotide
gaggacgaauuggaauacu

SEQ ID NO: 671340 - RNA, 19 nt, Artificial Sequence
  Description of Artificial Sequence: Synthetic oligonucleotide
cauuacaaacgaggacgaa

SEQ ID NO: 671341 - RNA, 19 nt, Artificial Sequence
  Description of Artificial Sequence: Synthetic oligonucleotide
ggucauggcugccacggcu

SEQ ID NO: 671342 - RNA, 19 nt, Artificial Sequence
  Description of Artificial Sequence: Synthetic oligonucleotide
gggcgcuggaaggggaagg

SEQ ID NO: 671343 - RNA, 19 nt, Artificial Sequence
  Description of Artificial Sequence: Synthetic oligonucleotide
cuuaggggcuguggggcca

SEQ ID NO: 671344 - RNA, 19 nt, Artificial Sequence
  Description of Artificial Sequence: Synthetic oligonucleotide
gcaagcguggccagagcac

SEQ ID NO: 671345 - RNA, 19 nt, Artificial Sequence
  Description of Artificial Sequence: Synthetic oligonucleotide
cacacagaacuggucaggu

SEQ ID NO: 671346 - RNA, 19 nt, Artificial Sequence
  Description of Artificial Sequence: Synthetic oligonucleotide
cccagaccuacucauuaca

SEQ ID NO: 671347 - RNA, 19 nt, Artificial Sequence
  Description of Artificial Sequence: Synthetic oligonucleotide
ccgggaggcucagaaacag

SEQ ID NO: 671348 - RNA, 19 nt, Artificial Sequence
  Description of Artificial Sequence: Synthetic oligonucleotide
cgguugguucucuccaggc

SEQ ID NO: 671349 - RNA, 19 nt, Artificial Sequence
  Description of Artificial Sequence: Synthetic oligonucleotide
cuccgccucaaaguagcca

SEQ ID NO: 671350 - RNA, 19 nt, Artificial Sequence
  Description of Artificial Sequence: Synthetic oligonucleotide
gcccuuguugaagcugucc

SEQ ID NO: 671351 - RNA, 19 nt, Artificial Sequence
  Description of Artificial Sequence: Synthetic oligonucleotide
gcugccugugaaaccacca

SEQ ID NO: 671352 - RNA, 19 nt, Artificial Sequence
  Description of Artificial Sequence: Synthetic oligonucleotide
cucgguaaggcagguucaa

SEQ ID NO: 671353 - RNA, 19 nt, Artificial Sequence
  Description of Artificial Sequence: Synthetic oligonucleotide
agacaggucccgggaggcu

SEQ ID NO: 671354 - RNA, 19 nt, Artificial Sequence
  Description of Artificial Sequence: Synthetic oligonucleotide
uugucccgguugguucucu

SEQ ID NO: 671355 - RNA, 19 nt, Artificial Sequence
  Description of Artificial Sequence: Synthetic oligonucleotide
ccuaaggagaaacugucuu

SEQ ID NO: 671356 - RNA, 19 nt, Artificial Sequence
  Description of Artificial Sequence: Synthetic oligonucleotide
acauucugggugggaggaa

SEQ ID NO: 671357 - RNA, 19 nt, Artificial Sequence
  Description of Artificial Sequence: Synthetic oligonucleotide
ccagugcucggcagguaug

SEQ ID NO: 671358 - RNA, 19 nt, Artificial Sequence
  Description of Artificial Sequence: Synthetic oligonucleotide
gcuguugcgcuccgccuca

SEQ ID NO: 671359 - RNA, 19 nt, Artificial Sequence
  Description of Artificial Sequence: Synthetic oligonucleotide
gagcuucgugcugccugug

SEQ ID NO: 671360 - RNA, 19 nt, Artificial Sequence
  Description of Artificial Sequence: Synthetic oligonucleotide
gucucgcacucauccacgu

SEQ ID NO: 671361 - RNA, 19 nt, Artificial Sequence
  Description of Artificial Sequence: Synthetic oligonucleotide
cccguagccaccgcagggc

SEQ ID NO: 671362 - RNA, 19 nt, Artificial Sequence
  Description of Artificial Sequence: Synthetic oligonucleotide
agcgagggccuugggacua

SEQ ID NO: 671363 - RNA, 19 nt, Artificial Sequence
  Description of Artificial Sequence: Synthetic oligonucleotide
gccgaacauaccagauggc

SEQ ID NO: 671364 - RNA, 19 nt, Artificial Sequence
  Description of Artificial Sequence: Synthetic oligonucleotide
ccccuaagugguggcaggg

SEQ ID NO: 671365 - RNA, 19 nt, Artificial Sequence
  Description of Artificial Sequence: Synthetic oligonucleotide
cgccucaaaguagccaagg

SEQ ID NO: 671366 - RNA, 19 nt, Artificial Sequence
  Description of Artificial Sequence: Synthetic oligonucleotide
ggagcuucgugcugccugu

SEQ ID NO: 671367 - RNA, 19 nt, Artificial Sequence
  Description of Artificial Sequence: Synthetic oligonucleotide
ccguagccaccgcagggcc

SEQ ID NO: 671368 - RNA, 19 nt, Artificial Sequence
  Description of Artificial Sequence: Synthetic oligonucleotide
gccaguccccuaggcaagg

SEQ ID NO: 671369 - RNA, 19 nt, Artificial Sequence
  Description of Artificial Sequence: Synthetic oligonucleotide
ccaggcggguuucacuguc

SEQ ID NO: 671370 - RNA, 19 nt, Artificial Sequence
  Description of Artificial Sequence: Synthetic oligonucleotide
gagggccuugggacuaaaa

SEQ ID NO: 671371 - RNA, 19 nt, Artificial Sequence
  Description of Artificial Sequence: Synthetic oligonucleotide
cuguggggccaucuuuucu

SEQ ID NO: 671372 - RNA, 19 nt, Artificial Sequence
  Description of Artificial Sequence: Synthetic oligonucleotide
gguagcuacccuccguguu

SEQ ID NO: 671373 - RNA, 19 nt, Artificial Sequence
  Description of Artificial Sequence: Synthetic oligonucleotide
gcucgguaaggcagguuca

SEQ ID NO: 671374 - RNA, 19 nt, Artificial Sequence
  Description of Artificial Sequence: Synthetic oligonucleotide
ccgccucaaaguagccaag

SEQ ID NO: 671375 - RNA, 19 nt, Artificial Sequence
  Description of Artificial Sequence: Synthetic oligonucleotide
gcaguguuuccaccaccaa

SEQ ID NO: 671376 - RNA, 19 nt, Artificial Sequence
  Description of Artificial Sequence: Synthetic oligonucleotide
cgaggacgaauuggaauac

SEQ ID NO: 671377 - RNA, 19 nt, Artificial Sequence
  Description of Artificial Sequence: Synthetic oligonucleotide
caauggcuggggcguggga

SEQ ID NO: 671378 - RNA, 19 nt, Artificial Sequence
  Description of Artificial Sequence: Synthetic oligonucleotide
gcaaagggguaggcaucag

SEQ ID NO: 671379 - RNA, 19 nt, Artificial Sequence
  Description of Artificial Sequence: Synthetic oligonucleotide
ccgaacauaccagauggcu

SEQ ID NO: 671380 - RNA, 19 nt, Artificial Sequence
  Description of Artificial Sequence: Synthetic oligonucleotide
gggucucagugaguuauua

SEQ ID NO: 671381 - RNA, 19 nt, Artificial Sequence
  Description of Artificial Sequence: Synthetic oligonucleotide
ggaggcucagaaacaggcu

SEQ ID NO: 671382 - RNA, 19 nt, Artificial Sequence
  Description of Artificial Sequence: Synthetic oligonucleotide
cccggucauggcugccacg

SEQ ID NO: 671383 - RNA, 19 nt, Artificial Sequence
  Description of Artificial Sequence: Synthetic oligonucleotide
cugccacggcuccaaugaa

SEQ ID NO: 671384 - RNA, 19 nt, Artificial Sequence
  Description of Artificial Sequence: Synthetic oligonucleotide
ggcagguucaaugguguuu

SEQ ID NO: 671385 - RNA, 19 nt, Artificial Sequence
  Description of Artificial Sequence: Synthetic oligonucleotide
gcgcuccgccucaaaguag

SEQ ID NO: 671386 - RNA, 19 nt, Artificial Sequence
  Description of Artificial Sequence: Synthetic oligonucleotide
agccgacuuggcagucaca

SEQ ID NO: 671387 - RNA, 19 nt, Artificial Sequence
  Description of Artificial Sequence: Synthetic oligonucleotide
aggcaggccuuugcacaau

SEQ ID NO: 671388 - RNA, 19 nt, Artificial Sequence
  Description of Artificial Sequence: Synthetic oligonucleotide
ggcaaggcucucauggcau

SEQ ID NO: 671389 - RNA, 19 nt, Artificial Sequence
  Description of Artificial Sequence: Synthetic oligonucleotide
gcgauggcacucgaagucu

SEQ ID NO: 671390 - RNA, 19 nt, Artificial Sequence
  Description of Artificial Sequence: Synthetic oligonucleotide
cccuaaggagaaacugucu

SEQ ID NO: 671391 - RNA, 19 nt, Artificial Sequence
  Description of Artificial Sequence: Synthetic oligonucleotide
cacggucacuucgcucuga

SEQ ID NO: 671392 - RNA, 19 nt, Artificial Sequence
  Description of Artificial Sequence: Synthetic oligonucleotide
gcuccgccucaaaguagcc

SEQ ID NO: 671393 - RNA, 19 nt, Artificial Sequence
  Description of Artificial Sequence: Synthetic oligonucleotide
ccacgucuaggcacuugga

SEQ ID NO: 671394 - RNA, 19 nt, Artificial Sequence
  Description of Artificial Sequence: Synthetic oligonucleotide
gcgaagaugcccgcugacu

SEQ ID NO: 671395 - RNA, 19 nt, Artificial Sequence
  Description of Artificial Sequence: Synthetic oligonucleotide
caggggccaaagccugcaa

SEQ ID NO: 671396 - RNA, 19 nt, Artificial Sequence
  Description of Artificial Sequence: Synthetic oligonucleotide
gcgugggaggugaacacgu

SEQ ID NO: 671397 - RNA, 19 nt, Artificial Sequence
  Description of Artificial Sequence: Synthetic oligonucleotide
gagucggaacagagccacu

SEQ ID NO: 671398 - RNA, 19 nt, Artificial Sequence
  Description of Artificial Sequence: Synthetic oligonucleotide
ggggacauucuggguggga

SEQ ID NO: 671399 - RNA, 19 nt, Artificial Sequence
  Description of Artificial Sequence: Synthetic oligonucleotide
gcccaaccuuucuugcacu

SEQ ID NO: 671400 - RNA, 19 nt, Artificial Sequence
  Description of Artificial Sequence: Synthetic oligonucleotide
cugguagccacggcugcau

SEQ ID NO: 671401 - RNA, 19 nt, Artificial Sequence
  Description of Artificial Sequence: Synthetic oligonucleotide
caaccucccuaaggagaaa

SEQ ID NO: 671402 - RNA, 19 nt, Artificial Sequence
  Description of Artificial Sequence: Synthetic oligonucleotide
caccaaaguugucccgguu

SEQ ID NO: 671403 - RNA, 19 nt, Artificial Sequence
  Description of Artificial Sequence: Synthetic oligonucleotide
ccaaagcaugccgaacaua

SEQ ID NO: 671404 - RNA, 19 nt, Artificial Sequence
  Description of Artificial Sequence: Synthetic oligonucleotide
gcgcuggaaggggaaggga

SEQ ID NO: 671405 - RNA, 19 nt, Artificial Sequence
  Description of Artificial Sequence: Synthetic oligonucleotide
ccgcgaagaugcccgcuga

SEQ ID NO: 671406 - RNA, 19 nt, Artificial Sequence
  Description of Artificial Sequence: Synthetic oligonucleotide
ccaccaaaguugucccggu

SEQ ID NO: 671407 - RNA, 19 nt, Artificial Sequence
  Description of Artificial Sequence: Synthetic oligonucleotide
gcaggcgauggcacucgaa

SEQ ID NO: 671408 - RNA, 19 nt, Artificial Sequence
  Description of Artificial Sequence: Synthetic oligonucleotide
ggcccuuguugaagcuguc

SEQ ID NO: 671409 - RNA, 19 nt, Artificial Sequence
  Description of Artificial Sequence: Synthetic oligonucleotide
ggccgggaucucuggcaaa

SEQ ID NO: 671410 - RNA, 19 nt, Artificial Sequence
  Description of Artificial Sequence: Synthetic oligonucleotide
cggucauggcugccacggc

SEQ ID NO: 671411 - RNA, 19 nt, Artificial Sequence
  Description of Artificial Sequence: Synthetic oligonucleotide
gcccaugguuuuagggucu

SEQ ID NO: 671412 - RNA, 19 nt, Artificial Sequence
  Description of Artificial Sequence: Synthetic oligonucleotide
ggcggguuucacugucuuu

SEQ ID NO: 671413 - RNA, 19 nt, Artificial Sequence
  Description of Artificial Sequence: Synthetic oligonucleotide
cacccuccuccugucugua

SEQ ID NO: 671414 - RNA, 19 nt, Artificial Sequence
  Description of Artificial Sequence: Synthetic oligonucleotide
cccuaggcaaggcucucau

SEQ ID NO: 671415 - RNA, 19 nt, Artificial Sequence
  Description of Artificial Sequence: Synthetic oligonucleotide
cuggagcuucgugcugccu

SEQ ID NO: 671416 - RNA, 19 nt, Artificial Sequence
  Description of Artificial Sequence: Synthetic oligonucleotide
caccagugcucggcaggua

SEQ ID NO: 671417 - RNA, 19 nt, Artificial Sequence
  Description of Artificial Sequence: Synthetic oligonucleotide
cggucacuucgcucugaca

SEQ ID NO: 671418 - RNA, 19 nt, Artificial Sequence
  Description of Artificial Sequence: Synthetic oligonucleotide
cuguugcgcuccgccucaa

SEQ ID NO: 671419 - RNA, 19 nt, Artificial Sequence
  Description of Artificial Sequence: Synthetic oligonucleotide
cggcuccaaugaagauggc

SEQ ID NO: 671420 - RNA, 19 nt, Artificial Sequence
  Description of Artificial Sequence: Synthetic oligonucleotide
cgccuuuagcagcaagcgu

SEQ ID NO: 671421 - RNA, 19 nt, Artificial Sequence
  Description of Artificial Sequence: Synthetic oligonucleotide
cggguuucacugucuuugu

SEQ ID NO: 671422 - RNA, 19 nt, Artificial Sequence
  Description of Artificial Sequence: Synthetic oligonucleotide
cgguagcuacccuccgugu

SEQ ID NO: 671423 - RNA, 19 nt, Artificial Sequence
  Description of Artificial Sequence: Synthetic oligonucleotide
cagcgggcacagggaccaa

SEQ ID NO: 671424 - RNA, 19 nt, Artificial Sequence
  Description of Artificial Sequence: Synthetic oligonucleotide
agaguuauucaauaaagcc

SEQ ID NO: 671425 - RNA, 19 nt, Artificial Sequence
  Description of Artificial Sequence: Synthetic oligonucleotide
uguaccaauaaccugagag

SEQ ID NO: 671426 - RNA, 19 nt, Artificial Sequence
  Description of Artificial Sequence: Synthetic oligonucleotide
uuuguauucaguuuaaacu

SEQ ID NO: 671427 - RNA, 19 nt, Artificial Sequence
  Description of Artificial Sequence: Synthetic oligonucleotide
uuuuguaccaauaaccuga

SEQ ID NO: 671428 - RNA, 19 nt, Artificial Sequence
  Description of Artificial Sequence: Synthetic oligonucleotide
uuaauaguuuuguagacag

SEQ ID NO: 671429 - RNA, 19 nt, Artificial Sequence
  Description of Artificial Sequence: Synthetic oligonucleotide
guaaaguugaaucucacag

SEQ ID NO: 671430 - RNA, 19 nt, Artificial Sequence
  Description of Artificial Sequence: Synthetic oligonucleotide
aacuuuguacucaauaccc

SEQ ID NO: 671431 - RNA, 19 nt, Artificial Sequence
  Description of Artificial Sequence: Synthetic oligonucleotide
ugggaguuaaauaaaauga

SEQ ID NO: 671432 - RNA, 19 nt, Artificial Sequence
  Description of Artificial Sequence: Synthetic oligonucleotide
uuuagauaucuccauauca

SEQ ID NO: 671433 - RNA, 19 nt, Artificial Sequence
  Description of Artificial Sequence: Synthetic oligonucleotide
agauaaaauccaugaaugc

SEQ ID NO: 671434 - RNA, 19 nt, Artificial Sequence
  Description of Artificial Sequence: Synthetic oligonucleotide
auaacuucggcuuuaccac

SEQ ID NO: 671435 - RNA, 19 nt, Artificial Sequence
  Description of Artificial Sequence: Synthetic oligonucleotide
uccauugacaugaacaacc

SEQ ID NO: 671436 - RNA, 19 nt, Artificial Sequence
  Description of Artificial Sequence: Synthetic oligonucleotide
ucaaacauguuccaccuag

SEQ ID NO: 671437 - RNA, 19 nt, Artificial Sequence
  Description of Artificial Sequence: Synthetic oligonucleotide
auaacaaccaacuucucug

SEQ ID NO: 671438 - RNA, 19 nt, Artificial Sequence
  Description of Artificial Sequence: Synthetic oligonucleotide
aaggggugaccucugaacc

SEQ ID NO: 671439 - RNA, 19 nt, Artificial Sequence
  Description of Artificial Sequence: Synthetic oligonucleotide
agaaucuucauucuaccuc

SEQ ID NO: 671440 - RNA, 19 nt, Artificial Sequence
  Description of Artificial Sequence: Synthetic oligonucleotide
aauuauagucaaugugcac

SEQ ID NO: 671441 - RNA, 19 nt, Artificial Sequence
  Description of Artificial Sequence: Synthetic oligonucleotide
accgauaacaaccaacuuc

SEQ ID NO: 671442 - RNA, 19 nt, Artificial Sequence
  Description of Artificial Sequence: Synthetic oligonucleotide
aaaggggugaccucugaac

SEQ ID NO: 671443 - RNA, 19 nt, Artificial Sequence
  Description of Artificial Sequence: Synthetic oligonucleotide
aauaagugggcaauucccc

SEQ ID NO: 671444 - RNA, 19 nt, Artificial Sequence
  Description of Artificial Sequence: Synthetic oligonucleotide
ugcauaaguucuuaaaggc

SEQ ID NO: 671445 - RNA, 19 nt, Artificial Sequence
  Description of Artificial Sequence: Synthetic oligonucleotide
caaauucugaguaaagggc

SEQ ID NO: 671446 - RNA, 19 nt, Artificial Sequence
  Description of Artificial Sequence: Synthetic oligonucleotide
uuuguagacagaaucuuca

SEQ ID NO: 671447 - RNA, 19 nt, Artificial Sequence
  Description of Artificial Sequence: Synthetic oligonucleotide
aaacuuaaagccuugcuuu

SEQ ID NO: 671448 - RNA, 19 nt, Artificial Sequence
  Description of Artificial Sequence: Synthetic oligonucleotide
ugccaauucaguaaaguug

SEQ ID NO: 671449 - RNA, 19 nt, Artificial Sequence
  Description of Artificial Sequence: Synthetic oligonucleotide
ugggaauuuaccaacuuug

SEQ ID NO: 671450 - RNA, 19 nt, Artificial Sequence
  Description of Artificial Sequence: Synthetic oligonucleotide
ugcuguuugcagcaaaugg

SEQ ID NO: 671451 - RNA, 19 nt, Artificial Sequence
  Description of Artificial Sequence: Synthetic oligonucleotide
uacuaaauaccuuccacag

SEQ ID NO: 671452 - RNA, 19 nt, Artificial Sequence
  Description of Artificial Sequence: Synthetic oligonucleotide
aacaaccuuauucuguuug

SEQ ID NO: 671453 - RNA, 19 nt, Artificial Sequence
  Description of Artificial Sequence: Synthetic oligonucleotide
aauugguugaucugcauaa

SEQ ID NO: 671454 - RNA, 19 nt, Artificial Sequence
  Description of Artificial Sequence: Synthetic oligonucleotide
auucaagcgaacuucugac

SEQ ID NO: 671455 - RNA, 19 nt, Artificial Sequence
  Description of Artificial Sequence: Synthetic oligonucleotide
aauaguuuuguagacagaa

SEQ ID NO: 671456 - RNA, 19 nt, Artificial Sequence
  Description of Artificial Sequence: Synthetic oligonucleotide
aaaguugauugguuugccg

SEQ ID NO: 671457 - RNA, 19 nt, Artificial Sequence
  Description of Artificial Sequence: Synthetic oligonucleotide
auaguaucuucaucaaucg

SEQ ID NO: 671458 - RNA, 19 nt, Artificial Sequence
  Description of Artificial Sequence: Synthetic oligonucleotide
gagauaaaauccaugaaug

SEQ ID NO: 671459 - RNA, 19 nt, Artificial Sequence
  Description of Artificial Sequence: Synthetic oligonucleotide
auagcaugaaaacaaauau

SEQ ID NO: 671460 - RNA, 19 nt, Artificial Sequence
  Description of Artificial Sequence: Synthetic oligonucleotide
agcuccguacuccagagcc

SEQ ID NO: 671461 - RNA, 19 nt, Artificial Sequence
  Description of Artificial Sequence: Synthetic oligonucleotide
ucaagcgaacuucugacag

SEQ ID NO: 671462 - RNA, 19 nt, Artificial Sequence
  Description of Artificial Sequence: Synthetic oligonucleotide
uggaauuuuaguuuggaau

SEQ ID NO: 671463 - RNA, 19 nt, Artificial Sequence
  Description of Artificial Sequence: Synthetic oligonucleotide
agauauccgauugaaaugg

SEQ ID NO: 671464 - RNA, 19 nt, Artificial Sequence
  Description of Artificial Sequence: Synthetic oligonucleotide
uauucaauaaagccuuuga

SEQ ID NO: 671465 - RNA, 19 nt, Artificial Sequence
  Description of Artificial Sequence: Synthetic oligonucleotide
ugaacccguagcuauaagg

SEQ ID NO: 671466 - RNA, 19 nt, Artificial Sequence
  Description of Artificial Sequence: Synthetic oligonucleotide
ugauggcacacaauuauag

SEQ ID NO: 671467 - RNA, 19 nt, Artificial Sequence
  Description of Artificial Sequence: Synthetic oligonucleotide
uccccaauagcauagauau

SEQ ID NO: 671468 - RNA, 19 nt, Artificial Sequence
  Description of Artificial Sequence: Synthetic oligonucleotide
caacauauccuccagggcc

SEQ ID NO: 671469 - RNA, 19 nt, Artificial Sequence
  Description of Artificial Sequence: Synthetic oligonucleotide
guagacagaaucuucauuc

SEQ ID NO: 671470 - RNA, 19 nt, Artificial Sequence
  Description of Artificial Sequence: Synthetic oligonucleotide
uucuacaccaauuacuccu

SEQ ID NO: 671471 - RNA, 19 nt, Artificial Sequence
  Description of Artificial Sequence: Synthetic oligonucleotide
ugaauaagugggcaauucc

SEQ ID NO: 671472 - RNA, 19 nt, Artificial Sequence
  Description of Artificial Sequence: Synthetic oligonucleotide
uugguuugccgaaagacgc

SEQ ID NO: 671473 - RNA, 19 nt, Artificial Sequence
  Description of Artificial Sequence: Synthetic oligonucleotide
aauagcauagauauuugga

SEQ ID NO: 671474 - RNA, 19 nt, Artificial Sequence
  Description of Artificial Sequence: Synthetic oligonucleotide
uugaaucucacagauagca

SEQ ID NO: 671475 - RNA, 19 nt, Artificial Sequence
  Description of Artificial Sequence: Synthetic oligonucleotide
aauucuaccucugggaucu

SEQ ID NO: 671476 - RNA, 19 nt, Artificial Sequence
  Description of Artificial Sequence: Synthetic oligonucleotide
ucuaccucuaaacuaccag

SEQ ID NO: 671477 - RNA, 19 nt, Artificial Sequence
  Description of Artificial Sequence: Synthetic oligonucleotide
ucacaagugauaacuucgg

SEQ ID NO: 671478 - RNA, 19 nt, Artificial Sequence
  Description of Artificial Sequence: Synthetic oligonucleotide
uguaaaucacugauggcac

SEQ ID NO: 671479 - RNA, 19 nt, Artificial Sequence
  Description of Artificial Sequence: Synthetic oligonucleotide
auaaucaugagucuccaau

SEQ ID NO: 671480 - RNA, 19 nt, Artificial Sequence
  Description of Artificial Sequence: Synthetic oligonucleotide
auccuguuuugacaaaagc

SEQ ID NO: 671481 - RNA, 19 nt, Artificial Sequence
  Description of Artificial Sequence: Synthetic oligonucleotide
aagagcacaucacaaguga

SEQ ID NO: 671482 - RNA, 19 nt, Artificial Sequence
  Description of Artificial Sequence: Synthetic oligonucleotide
ucaguaaaguugaaucuca

SEQ ID NO: 671483 - RNA, 19 nt, Artificial Sequence
  Description of Artificial Sequence: Synthetic oligonucleotide
uguucuaaucacugacucg

SEQ ID NO: 671484 - RNA, 19 nt, Artificial Sequence
  Description of Artificial Sequence: Synthetic oligonucleotide
uauccgauugaaauggccu

SEQ ID NO: 671485 - RNA, 19 nt, Artificial Sequence
  Description of Artificial Sequence: Synthetic oligonucleotide
uucauucuaccucuaaacu

SEQ ID NO: 671486 - RNA, 19 nt, Artificial Sequence
  Description of Artificial Sequence: Synthetic oligonucleotide
aaacauguuccaccuagug

SEQ ID NO: 671487 - RNA, 19 nt, Artificial Sequence
  Description of Artificial Sequence: Synthetic oligonucleotide
ugugagccaacauuggacc

SEQ ID NO: 671488 - RNA, 19 nt, Artificial Sequence
  Description of Artificial Sequence: Synthetic oligonucleotide
aguaaagggccgucgaccg

SEQ ID NO: 671489 - RNA, 19 nt, Artificial Sequence
  Description of Artificial Sequence: Synthetic oligonucleotide
acaagugauaacuucggcu

SEQ ID NO: 671490 - RNA, 19 nt, Artificial Sequence
  Description of Artificial Sequence: Synthetic oligonucleotide
aauuccacccacgugaccu

SEQ ID NO: 671491 - RNA, 19 nt, Artificial Sequence
  Description of Artificial Sequence: Synthetic oligonucleotide
gauauuuggaauuuuaguu

SEQ ID NO: 671492 - RNA, 19 nt, Artificial Sequence
  Description of Artificial Sequence: Synthetic oligonucleotide
uagaugauacuauaguauc

SEQ ID NO: 671493 - RNA, 19 nt, Artificial Sequence
  Description of Artificial Sequence: Synthetic oligonucleotide
auagcauagauauuuggaa

SEQ ID NO: 671494 - RNA, 19 nt, Artificial Sequence
  Description of Artificial Sequence: Synthetic oligonucleotide
aguaucuucaucaaucgug

SEQ ID NO: 671495 - RNA, 19 nt, Artificial Sequence
  Description of Artificial Sequence: Synthetic oligonucleotide
gagauauccgauugaaaug

SEQ ID NO: 671496 - RNA, 19 nt, Artificial Sequence
  Description of Artificial Sequence: Synthetic oligonucleotide
gaauaagugggcaauuccc

SEQ ID NO: 671497 - RNA, 19 nt, Artificial Sequence
  Description of Artificial Sequence: Synthetic oligonucleotide
aaggccucugacaaggucg

SEQ ID NO: 671498 - RNA, 19 nt, Artificial Sequence
  Description of Artificial Sequence: Synthetic oligonucleotide
uguguguaaaucacugaug

SEQ ID NO: 671499 - RNA, 19 nt, Artificial Sequence
  Description of Artificial Sequence: Synthetic oligonucleotide
ugacucguuuccaauauga

SEQ ID NO: 671500 - RNA, 19 nt, Artificial Sequence
  Description of Artificial Sequence: Synthetic oligonucleotide
ccugguauaaucaugaguc

SEQ ID NO: 671501 - RNA, 19 nt, Artificial Sequence
  Description of Artificial Sequence: Synthetic oligonucleotide
uuugccgaaagacgcagcc

SEQ ID NO: 671502 - RNA, 19 nt, Artificial Sequence
  Description of Artificial Sequence: Synthetic oligonucleotide
uacauaaguuguuuguaca

SEQ ID NO: 671503 - RNA, 19 nt, Artificial Sequence
  Description of Artificial Sequence: Synthetic oligonucleotide
acuaaauaccuuccacagg

SEQ ID NO: 671504 - RNA, 19 nt, Artificial Sequence
  Description of Artificial Sequence: Synthetic oligonucleotide
aguucaauuccccuagaug

SEQ ID NO: 671505 - RNA, 19 nt, Artificial Sequence
  Description of Artificial Sequence: Synthetic oligonucleotide
caauagcauagauauuugg

SEQ ID NO: 671506 - RNA, 19 nt, Artificial Sequence
  Description of Artificial Sequence: Synthetic oligonucleotide
agguuugcuucucuaaagg

SEQ ID NO: 671507 - RNA, 19 nt, Artificial Sequence
  Description of Artificial Sequence: Synthetic oligonucleotide
guaccaauaaccugagagc

SEQ ID NO: 671508 - RNA, 19 nt, Artificial Sequence
  Description of Artificial Sequence: Synthetic oligonucleotide
caacauuggaccagcaacc

SEQ ID NO: 671509 - RNA, 19 nt, Artificial Sequence
  Description of Artificial Sequence: Synthetic oligonucleotide
gauuauccuguuuugacaa

SEQ ID NO: 671510 - RNA, 19 nt, Artificial Sequence
  Description of Artificial Sequence: Synthetic oligonucleotide
ugccgaaagacgcagccag

SEQ ID NO: 671511 - RNA, 19 nt, Artificial Sequence
  Description of Artificial Sequence: Synthetic oligonucleotide
auacuauaguaucuucauc

SEQ ID NO: 671512 - RNA, 19 nt, Artificial Sequence
  Description of Artificial Sequence: Synthetic oligonucleotide
uuuaccaacuuuguacuca

SEQ ID NO: 671513 - RNA, 19 nt, Artificial Sequence
  Description of Artificial Sequence: Synthetic oligonucleotide
uguaguaugcgcugaaaau

SEQ ID NO: 671514 - RNA, 19 nt, Artificial Sequence
  Description of Artificial Sequence: Synthetic oligonucleotide
uccccuagaugcaaaaucu

SEQ ID NO: 671515 - RNA, 19 nt, Artificial Sequence
  Description of Artificial Sequence: Synthetic oligonucleotide
uuuguaccaauaaccugag

SEQ ID NO: 671516 - RNA, 19 nt, Artificial Sequence
  Description of Artificial Sequence: Synthetic oligonucleotide
gacaaucacuuuuauuuac

SEQ ID NO: 671517 - RNA, 19 nt, Artificial Sequence
  Description of Artificial Sequence: Synthetic oligonucleotide
auugguuugccgaaagacg

SEQ ID NO: 671518 - RNA, 19 nt, Artificial Sequence
  Description of Artificial Sequence: Synthetic oligonucleotide
uugugagccaacauuggac

SEQ ID NO: 671519 - RNA, 19 nt, Artificial Sequence
  Description of Artificial Sequence: Synthetic oligonucleotide
cuguuaacgcuuuuacugc

SEQ ID NO: 671520 - RNA, 19 nt, Artificial Sequence
  Description of Artificial Sequence: Synthetic oligonucleotide
gauugguuugccgaaagac

SEQ ID NO: 671521 - RNA, 19 nt, Artificial Sequence
  Description of Artificial Sequence: Synthetic oligonucleotide
ucaaucgugauuccaggaa

SEQ ID NO: 671522 - RNA, 19 nt, Artificial Sequence
  Description of Artificial Sequence: Synthetic oligonucleotide
uacaagguuauuccauucu

SEQ ID NO: 671523 - RNA, 19 nt, Artificial Sequence
  Description of Artificial Sequence: Synthetic oligonucleotide
ucuagccccaaauucugag

SEQ ID NO: 671524 - RNA, 19 nt, Artificial Sequence
  Description of Artificial Sequence: Synthetic oligonucleotide
uauccuguuuugacaaaag

SEQ ID NO: 671525 - RNA, 19 nt, Artificial Sequence
  Description of Artificial Sequence: Synthetic oligonucleotide
gaucuaguucaauuccaag

SEQ ID NO: 671526 - RNA, 19 nt, Artificial Sequence
  Description of Artificial Sequence: Synthetic oligonucleotide
cuagaugcaaaaucuuuuc

SEQ ID NO: 671527 - RNA, 19 nt, Artificial Sequence
  Description of Artificial Sequence: Synthetic oligonucleotide
aguaaaguugaaucucaca

SEQ ID NO: 671528 - RNA, 19 nt, Artificial Sequence
  Description of Artificial Sequence: Synthetic oligonucleotide
uucaacagacacaucaauu

SEQ ID NO: 671529 - RNA, 19 nt, Artificial Sequence
  Description of Artificial Sequence: Synthetic oligonucleotide
ucauucccugguauaauca

SEQ ID NO: 671530 - RNA, 19 nt, Artificial Sequence
  Description of Artificial Sequence: Synthetic oligonucleotide
ucuacaccaauuacuccug

SEQ ID NO: 671531 - RNA, 19 nt, Artificial Sequence
  Description of Artificial Sequence: Synthetic oligonucleotide
agucaaugugcacggcacc

SEQ ID NO: 671532 - RNA, 19 nt, Artificial Sequence
  Description of Artificial Sequence: Synthetic oligonucleotide
uguauucaguuuaaacuua

SEQ ID NO: 671533 - RNA, 19 nt, Artificial Sequence
  Description of Artificial Sequence: Synthetic oligonucleotide
gauagcaugaaaacaaaua

SEQ ID NO: 671534 - RNA, 19 nt, Artificial Sequence
  Description of Artificial Sequence: Synthetic oligonucleotide
aauacccucuucuuucaau

SEQ ID NO: 671535 - RNA, 19 nt, Artificial Sequence
  Description of Artificial Sequence: Synthetic oligonucleotide
cuaaauaccuuccacaggu

SEQ ID NO: 671536 - RNA, 19 nt, Artificial Sequence
  Description of Artificial Sequence: Synthetic oligonucleotide
gaugguaauaaugagaguu

SEQ ID NO: 671537 - RNA, 19 nt, Artificial Sequence
  Description of Artificial Sequence: Synthetic oligonucleotide
uucaguaaaguugaaucuc

SEQ ID NO: 671538 - RNA, 19 nt, Artificial Sequence
  Description of Artificial Sequence: Synthetic oligonucleotide
aguuauucaauaaagccuu

SEQ ID NO: 671539 - RNA, 19 nt, Artificial Sequence
  Description of Artificial Sequence: Synthetic oligonucleotide
auuuuaguuuggaaucugg

SEQ ID NO: 671540 - RNA, 19 nt, Artificial Sequence
  Description of Artificial Sequence: Synthetic oligonucleotide
auauccgauugaaauggcc

SEQ ID NO: 671541 - RNA, 19 nt, Artificial Sequence
  Description of Artificial Sequence: Synthetic oligonucleotide
auccgauugaaauggccuc

SEQ ID NO: 671542 - RNA, 19 nt, Artificial Sequence
  Description of Artificial Sequence: Synthetic oligonucleotide
uauuccauucuguuuuaac

SEQ ID NO: 671543 - RNA, 19 nt, Artificial Sequence
  Description of Artificial Sequence: Synthetic oligonucleotide
auagucaaugugcacggca

SEQ ID NO: 671544 - RNA, 19 nt, Artificial Sequence
  Description of Artificial Sequence: Synthetic oligonucleotide
uuauucaauaaagccuuug

SEQ ID NO: 671545 - RNA, 19 nt, Artificial Sequence
  Description of Artificial Sequence: Synthetic oligonucleotide
uccagauuugaggaaaaca

SEQ ID NO: 671546 - RNA, 19 nt, Artificial Sequence
  Description of Artificial Sequence: Synthetic oligonucleotide
caucaaucgugauuccagg

SEQ ID NO: 671547 - RNA, 19 nt, Artificial Sequence
  Description of Artificial Sequence: Synthetic oligonucleotide
aauauagguacaagguuau

SEQ ID NO: 671548 - RNA, 19 nt, Artificial Sequence
  Description of Artificial Sequence: Synthetic oligonucleotide
ugaacaaccuuauucuguu

SEQ ID NO: 671549 - RNA, 19 nt, Artificial Sequence
  Description of Artificial Sequence: Synthetic oligonucleotide
uucggcuuuaccaccagaa

SEQ ID NO: 671550 - RNA, 19 nt, Artificial Sequence
  Description of Artificial Sequence: Synthetic oligonucleotide
ucgaccgaugcaaaccaag

SEQ ID NO: 671551 - RNA, 19 nt, Artificial Sequence
  Description of Artificial Sequence: Synthetic oligonucleotide
agcauagauauuuggaauu

SEQ ID NO: 671552 - RNA, 19 nt, Artificial Sequence
  Description of Artificial Sequence: Synthetic oligonucleotide
uagucaaugugcacggcac

SEQ ID NO: 671553 - RNA, 19 nt, Artificial Sequence
  Description of Artificial Sequence: Synthetic oligonucleotide
uagcauagauauuuggaau

SEQ ID NO: 671554 - RNA, 19 nt, Artificial Sequence
  Description of Artificial Sequence: Synthetic oligonucleotide
aaccuuauucuguuugaau

SEQ ID NO: 671555 - RNA, 19 nt, Artificial Sequence
  Description of Artificial Sequence: Synthetic oligonucleotide
uguguaaaucacugauggc

SEQ ID NO: 671556 - RNA, 19 nt, Artificial Sequence
  Description of Artificial Sequence: Synthetic oligonucleotide
acgcuuuuacugcagaacu

SEQ ID NO: 671557 - RNA, 19 nt, Artificial Sequence
  Description of Artificial Sequence: Synthetic oligonucleotide
cuuugugagccaacauugg

SEQ ID NO: 671558 - RNA, 19 nt, Artificial Sequence
  Description of Artificial Sequence: Synthetic oligonucleotide
aaucacugauggcacacaa

SEQ ID NO: 671559 - RNA, 19 nt, Artificial Sequence
  Description of Artificial Sequence: Synthetic oligonucleotide
aggggugaccucugaaccc

SEQ ID NO: 671560 - RNA, 19 nt, Artificial Sequence
  Description of Artificial Sequence: Synthetic oligonucleotide
uuaacgcuuuuacugcaga

SEQ ID NO: 671561 - RNA, 19 nt, Artificial Sequence
  Description of Artificial Sequence: Synthetic oligonucleotide
ucugaguaaagggccgucg

SEQ ID NO: 671562 - RNA, 19 nt, Artificial Sequence
  Description of Artificial Sequence: Synthetic oligonucleotide
aauuagagauaaaauccau

SEQ ID NO: 671563 - RNA, 19 nt, Artificial Sequence
  Description of Artificial Sequence: Synthetic oligonucleotide
uguuaacgcuuuuacugca

SEQ ID NO: 671564 - RNA, 19 nt, Artificial Sequence
  Description of Artificial Sequence: Synthetic oligonucleotide
uucacaggaagcuccguac

SEQ ID NO: 671565 - RNA, 19 nt, Artificial Sequence
  Description of Artificial Sequence: Synthetic oligonucleotide
auuacuccugcaccgauaa

SEQ ID NO: 671566 - RNA, 19 nt, Artificial Sequence
  Description of Artificial Sequence: Synthetic oligonucleotide
uguaggccaggagauaucc

SEQ ID NO: 671567 - RNA, 19 nt, Artificial Sequence
  Description of Artificial Sequence: Synthetic oligonucleotide
cuguucacaugaauucucc

SEQ ID NO: 671568 - RNA, 19 nt, Artificial Sequence
  Description of Artificial Sequence: Synthetic oligonucleotide
gauaacaaccaacuucucu

SEQ ID NO: 671569 - RNA, 19 nt, Artificial Sequence
  Description of Artificial Sequence: Synthetic oligonucleotide
gaguuauucaauaaagccu

SEQ ID NO: 671570 - RNA, 19 nt, Artificial Sequence
  Description of Artificial Sequence: Synthetic oligonucleotide
gaagcuccguacuccagag

SEQ ID NO: 671571 - RNA, 19 nt, Artificial Sequence
  Description of Artificial Sequence: Synthetic oligonucleotide
uaguaugcgcugaaaauuu

SEQ ID NO: 671572 - RNA, 19 nt, Artificial Sequence
  Description of Artificial Sequence: Synthetic oligonucleotide
caugaacaaccuuauucug

SEQ ID NO: 671573 - RNA, 19 nt, Artificial Sequence
  Description of Artificial Sequence: Synthetic oligonucleotide
acucguuuccaauaugaaa

SEQ ID NO: 671574 - RNA, 19 nt, Artificial Sequence
  Description of Artificial Sequence: Synthetic oligonucleotide
cucuucuagccccaaauuc

SEQ ID NO: 671575 - RNA, 19 nt, Artificial Sequence
  Description of Artificial Sequence: Synthetic oligonucleotide
uucauucccugguauaauc

SEQ ID NO: 671576 - RNA, 19 nt, Artificial Sequence
  Description of Artificial Sequence: Synthetic oligonucleotide
uaauaguuuuguagacaga

SEQ ID NO: 671577 - RNA, 19 nt, Artificial Sequence
  Description of Artificial Sequence: Synthetic oligonucleotide
uuuaaggauaaagcuccug

SEQ ID NO: 671578 - RNA, 19 nt, Artificial Sequence
  Description of Artificial Sequence: Synthetic oligonucleotide
gguauaaucaugagucucc

SEQ ID NO: 671579 - RNA, 19 nt, Artificial Sequence
  Description of Artificial Sequence: Synthetic oligonucleotide
gggaguuaaauaaaaugag

SEQ ID NO: 671580 - RNA, 19 nt, Artificial Sequence
  Description of Artificial Sequence: Synthetic oligonucleotide
caccaauuacuccugcacc

SEQ ID NO: 671581 - RNA, 19 nt, Artificial Sequence
  Description of Artificial Sequence: Synthetic oligonucleotide
aaagacgcagccagguuug

SEQ ID NO: 671582 - RNA, 19 nt, Artificial Sequence
  Description of Artificial Sequence: Synthetic oligonucleotide
aauuccccuagaugcaaaa

SEQ ID NO: 671583 - RNA, 19 nt, Artificial Sequence
  Description of Artificial Sequence: Synthetic oligonucleotide
gaacccguagcuauaagga

SEQ ID NO: 671584 - RNA, 19 nt, Artificial Sequence
  Description of Artificial Sequence: Synthetic oligonucleotide
gaguaaagggccgucgacc

SEQ ID NO: 671585 - RNA, 19 nt, Artificial Sequence
  Description of Artificial Sequence: Synthetic oligonucleotide
uucaagcgaacuucugaca

SEQ ID NO: 671586 - RNA, 19 nt, Artificial Sequence
  Description of Artificial Sequence: Synthetic oligonucleotide
uguucacaugaauucucca

SEQ ID NO: 671587 - RNA, 19 nt, Artificial Sequence
  Description of Artificial Sequence: Synthetic oligonucleotide
acaaccuuauucuguuuga

SEQ ID NO: 671588 - RNA, 19 nt, Artificial Sequence
  Description of Artificial Sequence: Synthetic oligonucleotide
ucaauacccucuucuuuca

SEQ ID NO: 671589 - RNA, 19 nt, Artificial Sequence
  Description of Artificial Sequence: Synthetic oligonucleotide
ucguuuccaauaugaaaac

SEQ ID NO: 671590 - RNA, 19 nt, Artificial Sequence
  Description of Artificial Sequence: Synthetic oligonucleotide
uuuuaaggauaaagcuccu

SEQ ID NO: 671591 - RNA, 19 nt, Artificial Sequence
  Description of Artificial Sequence: Synthetic oligonucleotide
ugauugguuugccgaaaga

SEQ ID NO: 671592 - RNA, 19 nt, Artificial Sequence
  Description of Artificial Sequence: Synthetic oligonucleotide
ucgggguguguguaaauca

SEQ ID NO: 671593 - RNA, 19 nt, Artificial Sequence
  Description of Artificial Sequence: Synthetic oligonucleotide
uucuaccucuaaacuacca

SEQ ID NO: 671594 - RNA, 19 nt, Artificial Sequence
  Description of Artificial Sequence: Synthetic oligonucleotide
aagggccgucgaccgaugc

SEQ ID NO: 671595 - RNA, 19 nt, Artificial Sequence
  Description of Artificial Sequence: Synthetic oligonucleotide
ucuaccucugggaucuagu

SEQ ID NO: 671596 - RNA, 19 nt, Artificial Sequence
  Description of Artificial Sequence: Synthetic oligonucleotide
aguacacgcgacuccagcu

SEQ ID NO: 671597 - RNA, 19 nt, Artificial Sequence
  Description of Artificial Sequence: Synthetic oligonucleotide
ugguaucuucauucccugg

SEQ ID NO: 671598 - RNA, 19 nt, Artificial Sequence
  Description of Artificial Sequence: Synthetic oligonucleotide
gaaucugguauugacugga

SEQ ID NO: 671599 - RNA, 19 nt, Artificial Sequence
  Description of Artificial Sequence: Synthetic oligonucleotide
uaacuucggcuuuaccacc

SEQ ID NO: 671600 - RNA, 19 nt, Artificial Sequence
  Description of Artificial Sequence: Synthetic oligonucleotide
cuucuagccccaaauucug

SEQ ID NO: 671601 - RNA, 19 nt, Artificial Sequence
  Description of Artificial Sequence: Synthetic oligonucleotide
uuauccuguuuugacaaaa

SEQ ID NO: 671602 - RNA, 19 nt, Artificial Sequence
  Description of Artificial Sequence: Synthetic oligonucleotide
cugguauugacuggaauuc

SEQ ID NO: 671603 - RNA, 19 nt, Artificial Sequence
  Description of Artificial Sequence: Synthetic oligonucleotide
gaauucuaccucugggauc

SEQ ID NO: 671604 - RNA, 19 nt, Artificial Sequence
  Description of Artificial Sequence: Synthetic oligonucleotide
ucaagcuguucacaugaau

SEQ ID NO: 671605 - RNA, 19 nt, Artificial Sequence
  Description of Artificial Sequence: Synthetic oligonucleotide
aacccguagcuauaaggau

SEQ ID NO: 671606 - RNA, 19 nt, Artificial Sequence
  Description of Artificial Sequence: Synthetic oligonucleotide
agccagaugguaauaauga

SEQ ID NO: 671607 - RNA, 19 nt, Artificial Sequence
  Description of Artificial Sequence: Synthetic oligonucleotide
ccaacauuggaccagcaac

SEQ ID NO: 671608 - RNA, 19 nt, Artificial Sequence
  Description of Artificial Sequence: Synthetic oligonucleotide
aucaaucgugauuccagga

SEQ ID NO: 671609 - RNA, 19 nt, Artificial Sequence
  Description of Artificial Sequence: Synthetic oligonucleotide
ucucacagauagcaugaaa

SEQ ID NO: 671610 - RNA, 19 nt, Artificial Sequence
  Description of Artificial Sequence: Synthetic oligonucleotide
uugaauaagugggcaauuc

SEQ ID NO: 671611 - RNA, 19 nt, Artificial Sequence
  Description of Artificial Sequence: Synthetic oligonucleotide
aacauuggaccagcaacca

SEQ ID NO: 671612 - RNA, 19 nt, Artificial Sequence
  Description of Artificial Sequence: Synthetic oligonucleotide
uguuccaccuaguguguca

SEQ ID NO: 671613 - RNA, 19 nt, Artificial Sequence
  Description of Artificial Sequence: Synthetic oligonucleotide
auccauugacaugaacaac

SEQ ID NO: 671614 - RNA, 19 nt, Artificial Sequence
  Description of Artificial Sequence: Synthetic oligonucleotide
uagccccaaauucugagua

SEQ ID NO: 671615 - RNA, 19 nt, Artificial Sequence
  Description of Artificial Sequence: Synthetic oligonucleotide
aaauucaagcgaacuucug

SEQ ID NO: 671616 - RNA, 19 nt, Artificial Sequence
  Description of Artificial Sequence: Synthetic oligonucleotide
acugacucguuuccaauau

SEQ ID NO: 671617 - RNA, 19 nt, Artificial Sequence
  Description of Artificial Sequence: Synthetic oligonucleotide
uugugaacagauucaccuc

SEQ ID NO: 671618 - RNA, 19 nt, Artificial Sequence
  Description of Artificial Sequence: Synthetic oligonucleotide
aguugauugguuugccgaa

SEQ ID NO: 671619 - RNA, 19 nt, Artificial Sequence
  Description of Artificial Sequence: Synthetic oligonucleotide
cacaagugauaacuucggc

SEQ ID NO: 671620 - RNA, 19 nt, Artificial Sequence
  Description of Artificial Sequence: Synthetic oligonucleotide
agaugauacuauaguaucu

SEQ ID NO: 671621 - RNA, 19 nt, Artificial Sequence
  Description of Artificial Sequence: Synthetic oligonucleotide
uacucuaucuguugauuuu

SEQ ID NO: 671622 - RNA, 19 nt, Artificial Sequence
  Description of Artificial Sequence: Synthetic oligonucleotide
ugguaauaaugagaguuau

SEQ ID NO: 671623 - RNA, 19 nt, Artificial Sequence
  Description of Artificial Sequence: Synthetic oligonucleotide
acaaggucggaugugcaug

SEQ ID NO: 671624 - RNA, 19 nt, Artificial Sequence
  Description of Artificial Sequence: Synthetic oligonucleotide
caugaaugccaauucagua

SEQ ID NO: 671625 - RNA, 19 nt, Artificial Sequence
  Description of Artificial Sequence: Synthetic oligonucleotide
uuccaucggcuuuuguagc

SEQ ID NO: 671626 - RNA, 19 nt, Artificial Sequence
  Description of Artificial Sequence: Synthetic oligonucleotide
agggauuugggaguuaaau

SEQ ID NO: 671627 - RNA, 19 nt, Artificial Sequence
  Description of Artificial Sequence: Synthetic oligonucleotide
gcuuugugagccaacauug

SEQ ID NO: 671628 - RNA, 19 nt, Artificial Sequence
  Description of Artificial Sequence: Synthetic oligonucleotide
accuacuaaauaccuucca

SEQ ID NO: 671629 - RNA, 19 nt, Artificial Sequence
  Description of Artificial Sequence: Synthetic oligonucleotide
aagugauaacuucggcuuu

SEQ ID NO: 671630 - RNA, 19 nt, Artificial Sequence
  Description of Artificial Sequence: Synthetic oligonucleotide
guucuaaucacugacucgu

SEQ ID NO: 671631 - RNA, 19 nt, Artificial Sequence
  Description of Artificial Sequence: Synthetic oligonucleotide
uccuguagaugauacuaua

SEQ ID NO: 671632 - RNA, 19 nt, Artificial Sequence
  Description of Artificial Sequence: Synthetic oligonucleotide
ccuguagaugauacuauag

SEQ ID NO: 671633 - RNA, 19 nt, Artificial Sequence
  Description of Artificial Sequence: Synthetic oligonucleotide
ggaguuaaauaaaaugaga

SEQ ID NO: 671634 - RNA, 19 nt, Artificial Sequence
  Description of Artificial Sequence: Synthetic oligonucleotide
uauaaucaugagucuccaa

SEQ ID NO: 671635 - RNA, 19 nt, Artificial Sequence
  Description of Artificial Sequence: Synthetic oligonucleotide
uacacgcgacuccagcucu

SEQ ID NO: 671636 - RNA, 19 nt, Artificial Sequence
  Description of Artificial Sequence: Synthetic oligonucleotide
ucuaaacuaccagggauuu

SEQ ID NO: 671637 - RNA, 19 nt, Artificial Sequence
  Description of Artificial Sequence: Synthetic oligonucleotide
uccaccuagugugucauuc

SEQ ID NO: 671638 - RNA, 19 nt, Artificial Sequence
  Description of Artificial Sequence: Synthetic oligonucleotide
agacucuagcuaugucuuc

SEQ ID NO: 671639 - RNA, 19 nt, Artificial Sequence
  Description of Artificial Sequence: Synthetic oligonucleotide
ugugcacggcaccaccagc

SEQ ID NO: 671640 - RNA, 19 nt, Artificial Sequence
  Description of Artificial Sequence: Synthetic oligonucleotide
aguuaucuuuccaaaucca

SEQ ID NO: 671641 - RNA, 19 nt, Artificial Sequence
  Description of Artificial Sequence: Synthetic oligonucleotide
ugagccagaugguaauaau

SEQ ID NO: 671642 - RNA, 19 nt, Artificial Sequence
  Description of Artificial Sequence: Synthetic oligonucleotide
aucacugacucguuuccaa

SEQ ID NO: 671643 - RNA, 19 nt, Artificial Sequence
  Description of Artificial Sequence: Synthetic oligonucleotide
uucuagccccaaauucuga

SEQ ID NO: 671644 - RNA, 19 nt, Artificial Sequence
  Description of Artificial Sequence: Synthetic oligonucleotide
gauauccgauugaaauggc

SEQ ID NO: 671645 - RNA, 19 nt, Artificial Sequence
  Description of Artificial Sequence: Synthetic oligonucleotide
ccuacuaaauaccuuccac

SEQ ID NO: 671646 - RNA, 19 nt, Artificial Sequence
  Description of Artificial Sequence: Synthetic oligonucleotide
guuaacgcuuuuacugcag

SEQ ID NO: 671647 - RNA, 19 nt, Artificial Sequence
  Description of Artificial Sequence: Synthetic oligonucleotide
ucuccauaucaauuccaau

SEQ ID NO: 671648 - RNA, 19 nt, Artificial Sequence
  Description of Artificial Sequence: Synthetic oligonucleotide
uuugaauaagugggcaauu

SEQ ID NO: 671649 - RNA, 19 nt, Artificial Sequence
  Description of Artificial Sequence: Synthetic oligonucleotide
accucuaaacuaccaggga

SEQ ID NO: 671650 - RNA, 19 nt, Artificial Sequence
  Description of Artificial Sequence: Synthetic oligonucleotide
guagaugauacuauaguau

SEQ ID NO: 671651 - RNA, 19 nt, Artificial Sequence
  Description of Artificial Sequence: Synthetic oligonucleotide
gauggcacacaauuauagu

SEQ ID NO: 671652 - RNA, 19 nt, Artificial Sequence
  Description of Artificial Sequence: Synthetic oligonucleotide
guagcuauaaggauguuuu

SEQ ID NO: 671653 - RNA, 19 nt, Artificial Sequence
  Description of Artificial Sequence: Synthetic oligonucleotide
acccguagcuauaaggaug

SEQ ID NO: 671654 - RNA, 19 nt, Artificial Sequence
  Description of Artificial Sequence: Synthetic oligonucleotide
uccgauugaaauggccucu

SEQ ID NO: 671655 - RNA, 19 nt, Artificial Sequence
  Description of Artificial Sequence: Synthetic oligonucleotide
gagcaguacacgcgacucc

SEQ ID NO: 671656 - RNA, 19 nt, Artificial Sequence
  Description of Artificial Sequence: Synthetic oligonucleotide
gccaauucaguaaaguuga

SEQ ID NO: 671657 - RNA, 19 nt, Artificial Sequence
  Description of Artificial Sequence: Synthetic oligonucleotide
cuccauaucaauuccaauu

SEQ ID NO: 671658 - RNA, 19 nt, Artificial Sequence
  Description of Artificial Sequence: Synthetic oligonucleotide
ccaaggagcaguacacgcg

SEQ ID NO: 671659 - RNA, 19 nt, Artificial Sequence
  Description of Artificial Sequence: Synthetic oligonucleotide
caagugauaacuucggcuu

SEQ ID NO: 671660 - RNA, 19 nt, Artificial Sequence
  Description of Artificial Sequence: Synthetic oligonucleotide
ucaauuccccuagaugcaa

SEQ ID NO: 671661 - RNA, 19 nt, Artificial Sequence
  Description of Artificial Sequence: Synthetic oligonucleotide
ucccugguauaaucaugag

SEQ ID NO: 671662 - RNA, 19 nt, Artificial Sequence
  Description of Artificial Sequence: Synthetic oligonucleotide
caguacacgcgacuccagc

SEQ ID NO: 671663 - RNA, 19 nt, Artificial Sequence
  Description of Artificial Sequence: Synthetic oligonucleotide
gaaucuuguucuaaucacu

SEQ ID NO: 671664 - RNA, 19 nt, Artificial Sequence
  Description of Artificial Sequence: Synthetic oligonucleotide
uauagucaaugugcacggc

SEQ ID NO: 671665 - RNA, 19 nt, Artificial Sequence
  Description of Artificial Sequence: Synthetic oligonucleotide
ugaucucuugguggcacca

SEQ ID NO: 671666 - RNA, 19 nt, Artificial Sequence
  Description of Artificial Sequence: Synthetic oligonucleotide
cuguagaugauacuauagu

SEQ ID NO: 671667 - RNA, 19 nt, Artificial Sequence
  Description of Artificial Sequence: Synthetic oligonucleotide
ucggcuuuuguagcuguga

SEQ ID NO: 671668 - RNA, 19 nt, Artificial Sequence
  Description of Artificial Sequence: Synthetic oligonucleotide
aggagcaguacacgcgacu

SEQ ID NO: 671669 - RNA, 19 nt, Artificial Sequence
  Description of Artificial Sequence: Synthetic oligonucleotide
agcaguacacgcgacucca

SEQ ID NO: 671670 - RNA, 19 nt, Artificial Sequence
  Description of Artificial Sequence: Synthetic oligonucleotide
uaaauaccuuccacagguu

SEQ ID NO: 671671 - RNA, 19 nt, Artificial Sequence
  Description of Artificial Sequence: Synthetic oligonucleotide
aucaauugguugaucugca

SEQ ID NO: 671672 - RNA, 19 nt, Artificial Sequence
  Description of Artificial Sequence: Synthetic oligonucleotide
cuuguucuaaucacugacu

SEQ ID NO: 671673 - RNA, 19 nt, Artificial Sequence
  Description of Artificial Sequence: Synthetic oligonucleotide
ggucccagaauaugugccc

SEQ ID NO: 671674 - RNA, 19 nt, Artificial Sequence
  Description of Artificial Sequence: Synthetic oligonucleotide
caaucgugauuccaggaaa

SEQ ID NO: 671675 - RNA, 19 nt, Artificial Sequence
  Description of Artificial Sequence: Synthetic oligonucleotide
ucggaugugcauggcagac

SEQ ID NO: 671676 - RNA, 19 nt, Artificial Sequence
  Description of Artificial Sequence: Synthetic oligonucleotide
aguacucuaucuguugauu

SEQ ID NO: 671677 - RNA, 19 nt, Artificial Sequence
  Description of Artificial Sequence: Synthetic oligonucleotide
augguaauaaugagaguua

SEQ ID NO: 671678 - RNA, 19 nt, Artificial Sequence
  Description of Artificial Sequence: Synthetic oligonucleotide
aauuacuccugcaccgaua

SEQ ID NO: 671679 - RNA, 19 nt, Artificial Sequence
  Description of Artificial Sequence: Synthetic oligonucleotide
gaaaaccaaauuucacuuu

SEQ ID NO: 671680 - RNA, 19 nt, Artificial Sequence
  Description of Artificial Sequence: Synthetic oligonucleotide
uuguaccaauaaccugaga

SEQ ID NO: 671681 - RNA, 19 nt, Artificial Sequence
  Description of Artificial Sequence: Synthetic oligonucleotide
cugaucucuugguggcacc

SEQ ID NO: 671682 - RNA, 19 nt, Artificial Sequence
  Description of Artificial Sequence: Synthetic oligonucleotide
ccgaugcaaaccaagagca

SEQ ID NO: 671683 - RNA, 19 nt, Artificial Sequence
  Description of Artificial Sequence: Synthetic oligonucleotide
ggucggaugugcauggcag

SEQ ID NO: 671684 - RNA, 19 nt, Artificial Sequence
  Description of Artificial Sequence: Synthetic oligonucleotide
caauugguugaucugcaua

SEQ ID NO: 671685 - RNA, 19 nt, Artificial Sequence
  Description of Artificial Sequence: Synthetic oligonucleotide
cuccguacuccagagccag

SEQ ID NO: 671686 - RNA, 19 nt, Artificial Sequence
  Description of Artificial Sequence: Synthetic oligonucleotide
aggucggaugugcauggca

SEQ ID NO: 671687 - RNA, 19 nt, Artificial Sequence
  Description of Artificial Sequence: Synthetic oligonucleotide
uuguaggccaggagauauc

SEQ ID NO: 671688 - RNA, 19 nt, Artificial Sequence
  Description of Artificial Sequence: Synthetic oligonucleotide
ugcacggcaccaccagcca

SEQ ID NO: 671689 - RNA, 19 nt, Artificial Sequence
  Description of Artificial Sequence: Synthetic oligonucleotide
guacacgcgacuccagcuc

SEQ ID NO: 671690 - RNA, 19 nt, Artificial Sequence
  Description of Artificial Sequence: Synthetic oligonucleotide
ggguguguguaaaucacug

SEQ ID NO: 671691 - RNA, 19 nt, Artificial Sequence
  Description of Artificial Sequence: Synthetic oligonucleotide
acuucggcuuuaccaccag

SEQ ID NO: 671692 - RNA, 19 nt, Artificial Sequence
  Description of Artificial Sequence: Synthetic oligonucleotide
cugacucguuuccaauaug

SEQ ID NO: 671693 - RNA, 19 nt, Artificial Sequence
  Description of Artificial Sequence: Synthetic oligonucleotide
agguacaagguuauuccau

SEQ ID NO: 671694 - RNA, 19 nt, Artificial Sequence
  Description of Artificial Sequence: Synthetic oligonucleotide
cugaguaaagggccgucga

SEQ ID NO: 671695 - RNA, 19 nt, Artificial Sequence
  Description of Artificial Sequence: Synthetic oligonucleotide
guaggccaggagauauccg

SEQ ID NO: 671696 - RNA, 19 nt, Artificial Sequence
  Description of Artificial Sequence: Synthetic oligonucleotide
gugcacggcaccaccagcc

SEQ ID NO: 671697 - RNA, 19 nt, Artificial Sequence
  Description of Artificial Sequence: Synthetic oligonucleotide
augagccagaugguaauaa

SEQ ID NO: 671698 - RNA, 19 nt, Artificial Sequence
  Description of Artificial Sequence: Synthetic oligonucleotide
ccgauaacaaccaacuucu

SEQ ID NO: 671699 - RNA, 19 nt, Artificial Sequence
  Description of Artificial Sequence: Synthetic oligonucleotide
cuaaacuaccagggauuug

SEQ ID NO: 671700 - RNA, 19 nt, Artificial Sequence
  Description of Artificial Sequence: Synthetic oligonucleotide
gugagccaacauuggacca

SEQ ID NO: 671701 - RNA, 19 nt, Artificial Sequence
  Description of Artificial Sequence: Synthetic oligonucleotide
cucgggguguguguaaauc

SEQ ID NO: 671702 - RNA, 19 nt, Artificial Sequence
  Description of Artificial Sequence: Synthetic oligonucleotide
gacucguuuccaauaugaa

SEQ ID NO: 671703 - RNA, 19 nt, Artificial Sequence
  Description of Artificial Sequence: Synthetic oligonucleotide
uucugaguaaagggccguc

SEQ ID NO: 671704 - RNA, 19 nt, Artificial Sequence
  Description of Artificial Sequence: Synthetic oligonucleotide
agcaaccucggggugugug

SEQ ID NO: 671705 - RNA, 19 nt, Artificial Sequence
  Description of Artificial Sequence: Synthetic oligonucleotide
guacucuaucuguugauuu

SEQ ID NO: 671706 - RNA, 19 nt, Artificial Sequence
  Description of Artificial Sequence: Synthetic oligonucleotide
cugauggcacacaauuaua

SEQ ID NO: 671707 - RNA, 19 nt, Artificial Sequence
  Description of Artificial Sequence: Synthetic oligonucleotide
cagaaucuucauucuaccu

SEQ ID NO: 671708 - RNA, 19 nt, Artificial Sequence
  Description of Artificial Sequence: Synthetic oligonucleotide
ggaauucuaccucugggau

SEQ ID NO: 671709 - RNA, 19 nt, Artificial Sequence
  Description of Artificial Sequence: Synthetic oligonucleotide
guuugccgaaagacgcagc

SEQ ID NO: 671710 - RNA, 19 nt, Artificial Sequence
  Description of Artificial Sequence: Synthetic oligonucleotide
gacaaggucggaugugcau

SEQ ID NO: 671711 - RNA, 19 nt, Artificial Sequence
  Description of Artificial Sequence: Synthetic oligonucleotide
agggccgucgaccgaugca

SEQ ID NO: 671712 - RNA, 19 nt, Artificial Sequence
  Description of Artificial Sequence: Synthetic oligonucleotide
ggcacacaauuauagucaa

SEQ ID NO: 671713 - RNA, 19 nt, Artificial Sequence
  Description of Artificial Sequence: Synthetic oligonucleotide
cugacaguucaauuccccu

SEQ ID NO: 671714 - RNA, 19 nt, Artificial Sequence
  Description of Artificial Sequence: Synthetic oligonucleotide
ggagcaguacacgcgacuc

SEQ ID NO: 671715 - RNA, 19 nt, Artificial Sequence
  Description of Artificial Sequence: Synthetic oligonucleotide
gacgcagccagguuugcuu

SEQ ID NO: 671716 - RNA, 19 nt, Artificial Sequence
  Description of Artificial Sequence: Synthetic oligonucleotide
cacugacucguuuccaaua

SEQ ID NO: 671717 - RNA, 19 nt, Artificial Sequence
  Description of Artificial Sequence: Synthetic oligonucleotide
gcuuuuacugcagaacucu

SEQ ID NO: 671718 - RNA, 19 nt, Artificial Sequence
  Description of Artificial Sequence: Synthetic oligonucleotide
cuuguaggccaggagauau

SEQ ID NO: 671719 - RNA, 19 nt, Artificial Sequence
  Description of Artificial Sequence: Synthetic oligonucleotide
aggagauauccgauugaaa

SEQ ID NO: 671720 - RNA, 19 nt, Artificial Sequence
  Description of Artificial Sequence: Synthetic oligonucleotide
gcuguucacaugaauucuc

SEQ ID NO: 671721 - RNA, 19 nt, Artificial Sequence
  Description of Artificial Sequence: Synthetic oligonucleotide
ccccuguuaacgcuuuuac

SEQ ID NO: 671722 - RNA, 19 nt, Artificial Sequence
  Description of Artificial Sequence: Synthetic oligonucleotide
aguaugcgcugaaaauuuu

SEQ ID NO: 671723 - RNA, 19 nt, Artificial Sequence
  Description of Artificial Sequence: Synthetic oligonucleotide
caauuccccuagaugcaaa

SEQ ID NO: 671724 - RNA, 19 nt, Artificial Sequence
  Description of Artificial Sequence: Synthetic oligonucleotide
caugagucuccaauuuaau

SEQ ID NO: 671725 - RNA, 19 nt, Artificial Sequence
  Description of Artificial Sequence: Synthetic oligonucleotide
aaagggccgucgaccgaug

SEQ ID NO: 671726 - RNA, 19 nt, Artificial Sequence
  Description of Artificial Sequence: Synthetic oligonucleotide
gccuaauugggcagcuuug

SEQ ID NO: 671727 - RNA, 19 nt, Artificial Sequence
  Description of Artificial Sequence: Synthetic oligonucleotide
ccugcaccgauaacaacca

SEQ ID NO: 671728 - RNA, 19 nt, Artificial Sequence
  Description of Artificial Sequence: Synthetic oligonucleotide
aucggcuuuuguagcugug

SEQ ID NO: 671729 - RNA, 19 nt, Artificial Sequence
  Description of Artificial Sequence: Synthetic oligonucleotide
caagcgaacuucugacagu

SEQ ID NO: 671730 - RNA, 19 nt, Artificial Sequence
  Description of Artificial Sequence: Synthetic oligonucleotide
ccgucgaccgaugcaaacc

SEQ ID NO: 671731 - RNA, 19 nt, Artificial Sequence
  Description of Artificial Sequence: Synthetic oligonucleotide
cuaauugggcagcuuugau

SEQ ID NO: 671732 - RNA, 19 nt, Artificial Sequence
  Description of Artificial Sequence: Synthetic oligonucleotide
cucugacaaggucggaugu

SEQ ID NO: 671733 - RNA, 19 nt, Artificial Sequence
  Description of Artificial Sequence: Synthetic oligonucleotide
agacgcagccagguuugcu

SEQ ID NO: 671734 - RNA, 19 nt, Artificial Sequence
  Description of Artificial Sequence: Synthetic oligonucleotide
aagccuaauugggcagcuu

SEQ ID NO: 671735 - RNA, 19 nt, Artificial Sequence
  Description of Artificial Sequence: Synthetic oligonucleotide
gccaacauuggaccagcaa

SEQ ID NO: 671736 - RNA, 19 nt, Artificial Sequence
  Description of Artificial Sequence: Synthetic oligonucleotide
gaacaaccuuauucuguuu

SEQ ID NO: 671737 - RNA, 19 nt, Artificial Sequence
  Description of Artificial Sequence: Synthetic oligonucleotide
gccgaaagacgcagccagg

SEQ ID NO: 671738 - RNA, 19 nt, Artificial Sequence
  Description of Artificial Sequence: Synthetic oligonucleotide
ccucuaaacuaccagggau

SEQ ID NO: 671739 - RNA, 19 nt, Artificial Sequence
  Description of Artificial Sequence: Synthetic oligonucleotide
uuccaccuagugugucauu

SEQ ID NO: 671740 - RNA, 19 nt, Artificial Sequence
  Description of Artificial Sequence: Synthetic oligonucleotide
caguacucuaucuguugau

SEQ ID NO: 671741 - RNA, 19 nt, Artificial Sequence
  Description of Artificial Sequence: Synthetic oligonucleotide
cccguagcuauaaggaugu

SEQ ID NO: 671742 - RNA, 19 nt, Artificial Sequence
  Description of Artificial Sequence: Synthetic oligonucleotide
gccgucgaccgaugcaaac

SEQ ID NO: 671743 - RNA, 19 nt, Artificial Sequence
  Description of Artificial Sequence: Synthetic oligonucleotide
caauuacuccugcaccgau

SEQ ID NO: 671744 - RNA, 19 nt, Artificial Sequence
  Description of Artificial Sequence: Synthetic oligonucleotide
ccaggagauauccgauuga

SEQ ID NO: 671745 - RNA, 19 nt, Artificial Sequence
  Description of Artificial Sequence: Synthetic oligonucleotide
cgaccgaugcaaaccaaga

SEQ ID NO: 671746 - RNA, 19 nt, Artificial Sequence
  Description of Artificial Sequence: Synthetic oligonucleotide
gcaguacacgcgacuccag

SEQ ID NO: 671747 - RNA, 19 nt, Artificial Sequence
  Description of Artificial Sequence: Synthetic oligonucleotide
cccugguauaaucaugagu

SEQ ID NO: 671748 - RNA, 19 nt, Artificial Sequence
  Description of Artificial Sequence: Synthetic oligonucleotide
agccaacauuggaccagca

SEQ ID NO: 671749 - RNA, 19 nt, Artificial Sequence
  Description of Artificial Sequence: Synthetic oligonucleotide
gggccgucgaccgaugcaa

SEQ ID NO: 671750 - RNA, 19 nt, Artificial Sequence
  Description of Artificial Sequence: Synthetic oligonucleotide
cgucgaccgaugcaaacca

SEQ ID NO: 671751 - RNA, 19 nt, Artificial Sequence
  Description of Artificial Sequence: Synthetic oligonucleotide
ccgauugaaauggccucuc

SEQ ID NO: 671752 - RNA, 19 nt, Artificial Sequence
  Description of Artificial Sequence: Synthetic oligonucleotide
gucgaccgaugcaaaccaa

SEQ ID NO: 671753 - RNA, 19 nt, Artificial Sequence
  Description of Artificial Sequence: Synthetic oligonucleotide
gcaaccucggggugugugu

SEQ ID NO: 671754 - RNA, 19 nt, Artificial Sequence
  Description of Artificial Sequence: Synthetic oligonucleotide
cccuagaugcaaaaucuuu

SEQ ID NO: 671755 - RNA, 19 nt, Artificial Sequence
  Description of Artificial Sequence: Synthetic oligonucleotide
cacggcaccaccagccauu

SEQ ID NO: 671756 - RNA, 19 nt, Artificial Sequence
  Description of Artificial Sequence: Synthetic oligonucleotide
cgauaacaaccaacuucuc

SEQ ID NO: 671757 - RNA, 19 nt, Artificial Sequence
  Description of Artificial Sequence: Synthetic oligonucleotide
cugcaccgauaacaaccaa

SEQ ID NO: 671758 - RNA, 19 nt, Artificial Sequence
  Description of Artificial Sequence: Synthetic oligonucleotide
ccaauucaguaaaguugaa

SEQ ID NO: 671759 - RNA, 19 nt, Artificial Sequence
  Description of Artificial Sequence: Synthetic oligonucleotide
caccgauaacaaccaacuu

SEQ ID NO: 671760 - RNA, 19 nt, Artificial Sequence
  Description of Artificial Sequence: Synthetic oligonucleotide
ccacccacgugaccuaaaa

SEQ ID NO: 671761 - RNA, 19 nt, Artificial Sequence
  Description of Artificial Sequence: Synthetic oligonucleotide
ccaccuagugugucauucu

SEQ ID NO: 671762 - RNA, 19 nt, Artificial Sequence
  Description of Artificial Sequence: Synthetic oligonucleotide
ccaugccaucugugucagc

SEQ ID NO: 671763 - RNA, 19 nt, Artificial Sequence
  Description of Artificial Sequence: Synthetic oligonucleotide
ccgaaagacgcagccaggu

SEQ ID NO: 671764 - RNA, 19 nt, Artificial Sequence
  Description of Artificial Sequence: Synthetic oligonucleotide
ccccuagaugcaaaaucuu

SEQ ID NO: 671765 - RNA, 19 nt, Artificial Sequence
  Description of Artificial Sequence: Synthetic oligonucleotide
gcacggcaccaccagccau

SEQ ID NO: 671766 - RNA, 19 nt, Artificial Sequence
  Description of Artificial Sequence: Synthetic oligonucleotide
ggccgucgaccgaugcaaa

SEQ ID NO: 671767 - RNA, 19 nt, Artificial Sequence
  Description of Artificial Sequence: Synthetic oligonucleotide
ggccucugacaaggucgga

SEQ ID NO: 671768 - RNA, 19 nt, Artificial Sequence
  Description of Artificial Sequence: Synthetic oligonucleotide
ccccaauagcauagauauu

SEQ ID NO: 671769 - RNA, 19 nt, Artificial Sequence
  Description of Artificial Sequence: Synthetic oligonucleotide
ccguagcuauaaggauguu

SEQ ID NO: 671770 - RNA, 19 nt, Artificial Sequence
  Description of Artificial Sequence: Synthetic oligonucleotide
uguuauauaacauugugga

SEQ ID NO: 671771 - RNA, 19 nt, Artificial Sequence
  Description of Artificial Sequence: Synthetic oligonucleotide
uuuacuuuuacacaaacau

SEQ ID NO: 671772 - RNA, 19 nt, Artificial Sequence
  Description of Artificial Sequence: Synthetic oligonucleotide
acuacuuaaacaucaaaac

SEQ ID NO: 671773 - RNA, 19 nt, Artificial Sequence
  Description of Artificial Sequence: Synthetic oligonucleotide
aguuagaagaagcuguugc

SEQ ID NO: 671774 - RNA, 19 nt, Artificial Sequence
  Description of Artificial Sequence: Synthetic oligonucleotide
ugaguaaggaaauaugucc

SEQ ID NO: 671775 - RNA, 19 nt, Artificial Sequence
  Description of Artificial Sequence: Synthetic oligonucleotide
uuguuauauaacauugugg

SEQ ID NO: 671776 - RNA, 19 nt, Artificial Sequence
  Description of Artificial Sequence: Synthetic oligonucleotide
uuuagucacaucuucauug

SEQ ID NO: 671777 - RNA, 19 nt, Artificial Sequence
  Description of Artificial Sequence: Synthetic oligonucleotide
aaaauggguaguuuguuug

SEQ ID NO: 671778 - RNA, 19 nt, Artificial Sequence
  Description of Artificial Sequence: Synthetic oligonucleotide
gauaacuugacuaacuuug

SEQ ID NO: 671779 - RNA, 19 nt, Artificial Sequence
  Description of Artificial Sequence: Synthetic oligonucleotide
ucacauauucuuuacaccc

SEQ ID NO: 671780 - RNA, 19 nt, Artificial Sequence
  Description of Artificial Sequence: Synthetic oligonucleotide
uuaaacaucaaaaccuaug

SEQ ID NO: 671781 - RNA, 19 nt, Artificial Sequence
  Description of Artificial Sequence: Synthetic oligonucleotide
uuagaaguaacauucauuu

SEQ ID NO: 671782 - RNA, 19 nt, Artificial Sequence
  Description of Artificial Sequence: Synthetic oligonucleotide
aaccuaguuaguuaucuag

SEQ ID NO: 671783 - RNA, 19 nt, Artificial Sequence
  Description of Artificial Sequence: Synthetic oligonucleotide
uggauuguuaucuaucucc

SEQ ID NO: 671784 - RNA, 19 nt, Artificial Sequence
  Description of Artificial Sequence: Synthetic oligonucleotide
uugauuguuuaguugaugc

SEQ ID NO: 671785 - RNA, 19 nt, Artificial Sequence
  Description of Artificial Sequence: Synthetic oligonucleotide
agauccuccauuuaagguc

SEQ ID NO: 671786 - RNA, 19 nt, Artificial Sequence
  Description of Artificial Sequence: Synthetic oligonucleotide
ucuuaaacuuguuauauaa

SEQ ID NO: 671787 - RNA, 19 nt, Artificial Sequence
  Description of Artificial Sequence: Synthetic oligonucleotide
ucugaguaaggaaauaugu

SEQ ID NO: 671788 - RNA, 19 nt, Artificial Sequence
  Description of Artificial Sequence: Synthetic oligonucleotide
aaggaaauauguccuuugg

SEQ ID NO: 671789 - RNA, 19 nt, Artificial Sequence
  Description of Artificial Sequence: Synthetic oligonucleotide
aacuucaucuacucgagcu

SEQ ID NO: 671790 - RNA, 19 nt, Artificial Sequence
  Description of Artificial Sequence: Synthetic oligonucleotide
ugguuuaccauacuucucc

SEQ ID NO: 671791 - RNA, 19 nt, Artificial Sequence
  Description of Artificial Sequence: Synthetic oligonucleotide
cagaugaugcauuugauug

SEQ ID NO: 671792 - RNA, 19 nt, Artificial Sequence
  Description of Artificial Sequence: Synthetic oligonucleotide
ucuagauuaucaauuuuga

SEQ ID NO: 671793 - RNA, 19 nt, Artificial Sequence
  Description of Artificial Sequence: Synthetic oligonucleotide
uaucuaucucccauaaucc

SEQ ID NO: 671794 - RNA, 19 nt, Artificial Sequence
  Description of Artificial Sequence: Synthetic oligonucleotide
auaaccuuucaucuuggcg

SEQ ID NO: 671795 - RNA, 19 nt, Artificial Sequence
  Description of Artificial Sequence: Synthetic oligonucleotide
aacuuguuauauaacauug

SEQ ID NO: 671796 - RNA, 19 nt, Artificial Sequence
  Description of Artificial Sequence: Synthetic oligonucleotide
uuuaguugaugccuguuga

SEQ ID NO: 671797 - RNA, 19 nt, Artificial Sequence
  Description of Artificial Sequence: Synthetic oligonucleotide
uuuccguuuagauucaacu

SEQ ID NO: 671798 - RNA, 19 nt, Artificial Sequence
  Description of Artificial Sequence: Synthetic oligonucleotide
uaguuaguuaucuaguggu

SEQ ID NO: 671799 - RNA, 19 nt, Artificial Sequence
  Description of Artificial Sequence: Synthetic oligonucleotide
uuuuccaugauaacuugac

SEQ ID NO: 671800 - RNA, 19 nt, Artificial Sequence
  Description of Artificial Sequence: Synthetic oligonucleotide
aagggauuuguucagcacu

SEQ ID NO: 671801 - RNA, 19 nt, Artificial Sequence
  Description of Artificial Sequence: Synthetic oligonucleotide
aucaauaaccaugucacuc

SEQ ID NO: 671802 - RNA, 19 nt, Artificial Sequence
  Description of Artificial Sequence: Synthetic oligonucleotide
uuaccugaagugaagcaag

SEQ ID NO: 671803 - RNA, 19 nt, Artificial Sequence
  Description of Artificial Sequence: Synthetic oligonucleotide
uuuggauuguuaucuaucu

SEQ ID NO: 671804 - RNA, 19 nt, Artificial Sequence
  Description of Artificial Sequence: Synthetic oligonucleotide
uuuuggagugguuauguca

SEQ ID NO: 671805 - RNA, 19 nt, Artificial Sequence
  Description of Artificial Sequence: Synthetic oligonucleotide
cuaguuaguuaucuagugg

SEQ ID NO: 671806 - RNA, 19 nt, Artificial Sequence
  Description of Artificial Sequence: Synthetic oligonucleotide
aacuacuuaaacaucaaaa

SEQ ID NO: 671807 - RNA, 19 nt, Artificial Sequence
  Description of Artificial Sequence: Synthetic oligonucleotide
ucaauaaccaugucacucu

SEQ ID NO: 671808 - RNA, 19 nt, Artificial Sequence
  Description of Artificial Sequence: Synthetic oligonucleotide
uccguuuagauucaacuuc

SEQ ID NO: 671809 - RNA, 19 nt, Artificial Sequence
  Description of Artificial Sequence: Synthetic oligonucleotide
uuugaaaucgcgagucaug

SEQ ID NO: 671810 - RNA, 19 nt, Artificial Sequence
  Description of Artificial Sequence: Synthetic oligonucleotide
ugaaucuccuucaccaacc

SEQ ID NO: 671811 - RNA, 19 nt, Artificial Sequence
  Description of Artificial Sequence: Synthetic oligonucleotide
uucaacaucagaugaugca

SEQ ID NO: 671812 - RNA, 19 nt, Artificial Sequence
  Description of Artificial Sequence: Synthetic oligonucleotide
uuuaccauacuucuccuua

SEQ ID NO: 671813 - RNA, 19 nt, Artificial Sequence
  Description of Artificial Sequence: Synthetic oligonucleotide
ucauguuggccuuucaaca

SEQ ID NO: 671814 - RNA, 19 nt, Artificial Sequence
  Description of Artificial Sequence: Synthetic oligonucleotide
auucuuuacaccccacauc

SEQ ID NO: 671815 - RNA, 19 nt, Artificial Sequence
  Description of Artificial Sequence: Synthetic oligonucleotide
ugauaaaaggagugagugc

SEQ ID NO: 671816 - RNA, 19 nt, Artificial Sequence
  Description of Artificial Sequence: Synthetic oligonucleotide
aggauaaccuuucaucuug

SEQ ID NO: 671817 - RNA, 19 nt, Artificial Sequence
  Description of Artificial Sequence: Synthetic oligonucleotide
uaucugguucuuuucuugg

SEQ ID NO: 671818 - RNA, 19 nt, Artificial Sequence
  Description of Artificial Sequence: Synthetic oligonucleotide
uggguaguuuguuuguggg

SEQ ID NO: 671819 - RNA, 19 nt, Artificial Sequence
  Description of Artificial Sequence: Synthetic oligonucleotide
ggaaucuugacuucaguag

SEQ ID NO: 671820 - RNA, 19 nt, Artificial Sequence
  Description of Artificial Sequence: Synthetic oligonucleotide
ucguuuauuugguuuacca

SEQ ID NO: 671821 - RNA, 19 nt, Artificial Sequence
  Description of Artificial Sequence: Synthetic oligonucleotide
ugcguuuccgcucugcagc

SEQ ID NO: 671822 - RNA, 19 nt, Artificial Sequence
  Description of Artificial Sequence: Synthetic oligonucleotide
agauaguucggccucucuc

SEQ ID NO: 671823 - RNA, 19 nt, Artificial Sequence
  Description of Artificial Sequence: Synthetic oligonucleotide
uuugaagucgagaauccau

SEQ ID NO: 671824 - RNA, 19 nt, Artificial Sequence
  Description of Artificial Sequence: Synthetic oligonucleotide
aagucgagaauccauugau

SEQ ID NO: 671825 - RNA, 19 nt, Artificial Sequence
  Description of Artificial Sequence: Synthetic oligonucleotide
auuguuaucuaucucccau

SEQ ID NO: 671826 - RNA, 19 nt, Artificial Sequence
  Description of Artificial Sequence: Synthetic oligonucleotide
uuaguuaucuaguggugac

SEQ ID NO: 671827 - RNA, 19 nt, Artificial Sequence
  Description of Artificial Sequence: Synthetic oligonucleotide
ugauuguuuaguugaugcc

SEQ ID NO: 671828 - RNA, 19 nt, Artificial Sequence
  Description of Artificial Sequence: Synthetic oligonucleotide
uaugucagcugcuuuaguc

SEQ ID NO: 671829 - RNA, 19 nt, Artificial Sequence
  Description of Artificial Sequence: Synthetic oligonucleotide
aucuagauuaucaauuuug

SEQ ID NO: 671830 - RNA, 19 nt, Artificial Sequence
  Description of Artificial Sequence: Synthetic oligonucleotide
uauucuuuacaccccacau

SEQ ID NO: 671831 - RNA, 19 nt, Artificial Sequence
  Description of Artificial Sequence: Synthetic oligonucleotide
uuaucugguucuuuucuug

SEQ ID NO: 671832 - RNA, 19 nt, Artificial Sequence
  Description of Artificial Sequence: Synthetic oligonucleotide
guuacugucaccauuaugu

SEQ ID NO: 671833 - RNA, 19 nt, Artificial Sequence
  Description of Artificial Sequence: Synthetic oligonucleotide
uuuaaggucuuugaaccug

SEQ ID NO: 671834 - RNA, 19 nt, Artificial Sequence
  Description of Artificial Sequence: Synthetic oligonucleotide
aguuaucuaguggugacuc

SEQ ID NO: 671835 - RNA, 19 nt, Artificial Sequence
  Description of Artificial Sequence: Synthetic oligonucleotide
aaauggguaguuuguuugu

SEQ ID NO: 671836 - RNA, 19 nt, Artificial Sequence
  Description of Artificial Sequence: Synthetic oligonucleotide
gauaaaaggagugagugcu

SEQ ID NO: 671837 - RNA, 19 nt, Artificial Sequence
  Description of Artificial Sequence: Synthetic oligonucleotide
uugacuaacuuugaaccgc

SEQ ID NO: 671838 - RNA, 19 nt, Artificial Sequence
  Description of Artificial Sequence: Synthetic oligonucleotide
uguuaucuaucucccauaa

SEQ ID NO: 671839 - RNA, 19 nt, Artificial Sequence
  Description of Artificial Sequence: Synthetic oligonucleotide
uuuacaccccacaucugcc

SEQ ID NO: 671840 - RNA, 19 nt, Artificial Sequence
  Description of Artificial Sequence: Synthetic oligonucleotide
cagucuggaaguuucuucc

SEQ ID NO: 671841 - RNA, 19 nt, Artificial Sequence
  Description of Artificial Sequence: Synthetic oligonucleotide
ugaagcaaguucauccagu

SEQ ID NO: 671842 - RNA, 19 nt, Artificial Sequence
  Description of Artificial Sequence: Synthetic oligonucleotide
ucgcgagucauguuugagg

SEQ ID NO: 671843 - RNA, 19 nt, Artificial Sequence
  Description of Artificial Sequence: Synthetic oligonucleotide
uguuugaggggcgacgccg

SEQ ID NO: 671844 - RNA, 19 nt, Artificial Sequence
  Description of Artificial Sequence: Synthetic oligonucleotide
cuuaggacuugcuuuuaag

SEQ ID NO: 671845 - RNA, 19 nt, Artificial Sequence
  Description of Artificial Sequence: Synthetic oligonucleotide
agguuugaaaucgcgaguc

SEQ ID NO: 671846 - RNA, 19 nt, Artificial Sequence
  Description of Artificial Sequence: Synthetic oligonucleotide
ucuggaaguuucuuccacc

SEQ ID NO: 671847 - RNA, 19 nt, Artificial Sequence
  Description of Artificial Sequence: Synthetic oligonucleotide
uucguuacugucaccauua

SEQ ID NO: 671848 - RNA, 19 nt, Artificial Sequence
  Description of Artificial Sequence: Synthetic oligonucleotide
ugacuaacuuugaaccgcc

SEQ ID NO: 671849 - RNA, 19 nt, Artificial Sequence
  Description of Artificial Sequence: Synthetic oligonucleotide
guuuaguugaugccuguug

SEQ ID NO: 671850 - RNA, 19 nt, Artificial Sequence
  Description of Artificial Sequence: Synthetic oligonucleotide
augacugaaucuccuucac

SEQ ID NO: 671851 - RNA, 19 nt, Artificial Sequence
  Description of Artificial Sequence: Synthetic oligonucleotide
uguuaccugaagugaagca

SEQ ID NO: 671852 - RNA, 19 nt, Artificial Sequence
  Description of Artificial Sequence: Synthetic oligonucleotide
ucgagcuggccaaugagga

SEQ ID NO: 671853 - RNA, 19 nt, Artificial Sequence
  Description of Artificial Sequence: Synthetic oligonucleotide
cacauauucuuuacacccc

SEQ ID NO: 671854 - RNA, 19 nt, Artificial Sequence
  Description of Artificial Sequence: Synthetic oligonucleotide
augccuguugacuugaaaa

SEQ ID NO: 671855 - RNA, 19 nt, Artificial Sequence
  Description of Artificial Sequence: Synthetic oligonucleotide
auauucuuuacaccccaca

SEQ ID NO: 671856 - RNA, 19 nt, Artificial Sequence
  Description of Artificial Sequence: Synthetic oligonucleotide
uccagguuugaaaucgcga

SEQ ID NO: 671857 - RNA, 19 nt, Artificial Sequence
  Description of Artificial Sequence: Synthetic oligonucleotide
ugaugcauuugauuguuua

SEQ ID NO: 671858 - RNA, 19 nt, Artificial Sequence
  Description of Artificial Sequence: Synthetic oligonucleotide
ucaacaucagaugaugcau

SEQ ID NO: 671859 - RNA, 19 nt, Artificial Sequence
  Description of Artificial Sequence: Synthetic oligonucleotide
uuaucuaguggugacuccu

SEQ ID NO: 671860 - RNA, 19 nt, Artificial Sequence
  Description of Artificial Sequence: Synthetic oligonucleotide
aaggagugagugcuuagaa

SEQ ID NO: 671861 - RNA, 19 nt, Artificial Sequence
  Description of Artificial Sequence: Synthetic oligonucleotide
uugauguaaccccugguuu

SEQ ID NO: 671862 - RNA, 19 nt, Artificial Sequence
  Description of Artificial Sequence: Synthetic oligonucleotide
ucaguaucuuccuuugaaa

SEQ ID NO: 671863 - RNA, 19 nt, Artificial Sequence
  Description of Artificial Sequence: Synthetic oligonucleotide
uugaaaucgcgagucaugu

SEQ ID NO: 671864 - RNA, 19 nt, Artificial Sequence
  Description of Artificial Sequence: Synthetic oligonucleotide
agaugaugcauuugauugu

SEQ ID NO: 671865 - RNA, 19 nt, Artificial Sequence
  Description of Artificial Sequence: Synthetic oligonucleotide
caaaugaagccauucacaa

SEQ ID NO: 671866 - RNA, 19 nt, Artificial Sequence
  Description of Artificial Sequence: Synthetic oligonucleotide
ucauguuugaggggcgacg

SEQ ID NO: 671867 - RNA, 19 nt, Artificial Sequence
  Description of Artificial Sequence: Synthetic oligonucleotide
ucuaucucccauaauccuu

SEQ ID NO: 671868 - RNA, 19 nt, Artificial Sequence
  Description of Artificial Sequence: Synthetic oligonucleotide
ucagaugaugcauuugauu

SEQ ID NO: 671869 - RNA, 19 nt, Artificial Sequence
  Description of Artificial Sequence: Synthetic oligonucleotide
cuaucucccauaauccuuc

SEQ ID NO: 671870 - RNA, 19 nt, Artificial Sequence
  Description of Artificial Sequence: Synthetic oligonucleotide
cucgagcuggccaaugagg

SEQ ID NO: 671871 - RNA, 19 nt, Artificial Sequence
  Description of Artificial Sequence: Synthetic oligonucleotide
acaucuagauuaucaauuu

SEQ ID NO: 671872 - RNA, 19 nt, Artificial Sequence
  Description of Artificial Sequence: Synthetic oligonucleotide
uugaagucgagaauccauu

SEQ ID NO: 671873 - RNA, 19 nt, Artificial Sequence
  Description of Artificial Sequence: Synthetic oligonucleotide
acugucuugagugucagau

SEQ ID NO: 671874 - RNA, 19 nt, Artificial Sequence
  Description of Artificial Sequence: Synthetic oligonucleotide
uuaguugaugccuguugac

SEQ ID NO: 671875 - RNA, 19 nt, Artificial Sequence
  Description of Artificial Sequence: Synthetic oligonucleotide
ucuaguggugacuccuuca

SEQ ID NO: 671876 - RNA, 19 nt, Artificial Sequence
  Description of Artificial Sequence: Synthetic oligonucleotide
gauaaccuuucaucuuggc

SEQ ID NO: 671877 - RNA, 19 nt, Artificial Sequence
  Description of Artificial Sequence: Synthetic oligonucleotide
augauaacuugacuaacuu

SEQ ID NO: 671878 - RNA, 19 nt, Artificial Sequence
  Description of Artificial Sequence: Synthetic oligonucleotide
uccauugauguuucucucu

SEQ ID NO: 671879 - RNA, 19 nt, Artificial Sequence
  Description of Artificial Sequence: Synthetic oligonucleotide
aucuaucucccauaauccu

SEQ ID NO: 671880 - RNA, 19 nt, Artificial Sequence
  Description of Artificial Sequence: Synthetic oligonucleotide
aaucuugacuucaguagcu

SEQ ID NO: 671881 - RNA, 19 nt, Artificial Sequence
  Description of Artificial Sequence: Synthetic oligonucleotide
ugcauuugauuguuuaguu

SEQ ID NO: 671882 - RNA, 19 nt, Artificial Sequence
  Description of Artificial Sequence: Synthetic oligonucleotide
ucuugcuugcguuuccgcu

SEQ ID NO: 671883 - RNA, 19 nt, Artificial Sequence
  Description of Artificial Sequence: Synthetic oligonucleotide
gacaggguuguuuuaccac

SEQ ID NO: 671884 - RNA, 19 nt, Artificial Sequence
  Description of Artificial Sequence: Synthetic oligonucleotide
agguugauguaaccccugg

SEQ ID NO: 671885 - RNA, 19 nt, Artificial Sequence
  Description of Artificial Sequence: Synthetic oligonucleotide
uguucagcaagggauuugu

SEQ ID NO: 671886 - RNA, 19 nt, Artificial Sequence
  Description of Artificial Sequence: Synthetic oligonucleotide
agcagcgaucgggagaugc

SEQ ID NO: 671887 - RNA, 19 nt, Artificial Sequence
  Description of Artificial Sequence: Synthetic oligonucleotide
gauuguuuaguugaugccu

SEQ ID NO: 671888 - RNA, 19 nt, Artificial Sequence
  Description of Artificial Sequence: Synthetic oligonucleotide
gaagucgagaauccauuga

SEQ ID NO: 671889 - RNA, 19 nt, Artificial Sequence
  Description of Artificial Sequence: Synthetic oligonucleotide
uuguuaccugaagugaagc

SEQ ID NO: 671890 - RNA, 19 nt, Artificial Sequence
  Description of Artificial Sequence: Synthetic oligonucleotide
uuuuaccacuuuaggucug

SEQ ID NO: 671891 - RNA, 19 nt, Artificial Sequence
  Description of Artificial Sequence: Synthetic oligonucleotide
auuguuuaguugaugccug

SEQ ID NO: 671892 - RNA, 19 nt, Artificial Sequence
  Description of Artificial Sequence: Synthetic oligonucleotide
uuguuuuggcccuuucuuc

SEQ ID NO: 671893 - RNA, 19 nt, Artificial Sequence
  Description of Artificial Sequence: Synthetic oligonucleotide
aaaucgcgagucauguuug

SEQ ID NO: 671894 - RNA, 19 nt, Artificial Sequence
  Description of Artificial Sequence: Synthetic oligonucleotide
uuccguuuagauucaacuu

SEQ ID NO: 671895 - RNA, 19 nt, Artificial Sequence
  Description of Artificial Sequence: Synthetic oligonucleotide
ugucagcugcuuuagucac

SEQ ID NO: 671896 - RNA, 19 nt, Artificial Sequence
  Description of Artificial Sequence: Synthetic oligonucleotide
gguaguuuguuugugggug

SEQ ID NO: 671897 - RNA, 19 nt, Artificial Sequence
  Description of Artificial Sequence: Synthetic oligonucleotide
augcauuugauuguuuagu

SEQ ID NO: 671898 - RNA, 19 nt, Artificial Sequence
  Description of Artificial Sequence: Synthetic oligonucleotide
aguugaugccuguugacuu

SEQ ID NO: 671899 - RNA, 19 nt, Artificial Sequence
  Description of Artificial Sequence: Synthetic oligonucleotide
aucuaguggugacuccuuc

SEQ ID NO: 671900 - RNA, 19 nt, Artificial Sequence
  Description of Artificial Sequence: Synthetic oligonucleotide
auuauguuguggaugacua

SEQ ID NO: 671901 - RNA, 19 nt, Artificial Sequence
  Description of Artificial Sequence: Synthetic oligonucleotide
gaaucagagguugauguaa

SEQ ID NO: 671902 - RNA, 19 nt, Artificial Sequence
  Description of Artificial Sequence: Synthetic oligonucleotide
cuugagugucagauccucc

SEQ ID NO: 671903 - RNA, 19 nt, Artificial Sequence
  Description of Artificial Sequence: Synthetic oligonucleotide
auuguuaccugaagugaag

SEQ ID NO: 671904 - RNA, 19 nt, Artificial Sequence
  Description of Artificial Sequence: Synthetic oligonucleotide
uuugaaccgccguauuuuc

SEQ ID NO: 671905 - RNA, 19 nt, Artificial Sequence
  Description of Artificial Sequence: Synthetic oligonucleotide
gauaguucggccucucucu

SEQ ID NO: 671906 - RNA, 19 nt, Artificial Sequence
  Description of Artificial Sequence: Synthetic oligonucleotide
guuaguuaucuagugguga

SEQ ID NO: 671907 - RNA, 19 nt, Artificial Sequence
  Description of Artificial Sequence: Synthetic oligonucleotide
gaaaucgcgagucauguuu

SEQ ID NO: 671908 - RNA, 19 nt, Artificial Sequence
  Description of Artificial Sequence: Synthetic oligonucleotide
guugaugccuguugacuug

SEQ ID NO: 671909 - RNA, 19 nt, Artificial Sequence
  Description of Artificial Sequence: Synthetic oligonucleotide
cuccagguuugaaaucgcg

SEQ ID NO: 671910 - RNA, 19 nt, Artificial Sequence
  Description of Artificial Sequence: Synthetic oligonucleotide
guuguggaugacuacuguc

SEQ ID NO: 671911 - RNA, 19 nt, Artificial Sequence
  Description of Artificial Sequence: Synthetic oligonucleotide
gauuaucaauuuugaggga

SEQ ID NO: 671912 - RNA, 19 nt, Artificial Sequence
  Description of Artificial Sequence: Synthetic oligonucleotide
uaguugaugccuguugacu

SEQ ID NO: 671913 - RNA, 19 nt, Artificial Sequence
  Description of Artificial Sequence: Synthetic oligonucleotide
cuggccaaugaggauaacc

SEQ ID NO: 671914 - RNA, 19 nt, Artificial Sequence
  Description of Artificial Sequence: Synthetic oligonucleotide
ugccaaccuaguuaguuau

SEQ ID NO: 671915 - RNA, 19 nt, Artificial Sequence
  Description of Artificial Sequence: Synthetic oligonucleotide
gucgagaauccauugaugu

SEQ ID NO: 671916 - RNA, 19 nt, Artificial Sequence
  Description of Artificial Sequence: Synthetic oligonucleotide
uuuaccacuuuaggucugc

SEQ ID NO: 671917 - RNA, 19 nt, Artificial Sequence
  Description of Artificial Sequence: Synthetic oligonucleotide
ucuuccacccuuucucuuc

SEQ ID NO: 671918 - RNA, 19 nt, Artificial Sequence
  Description of Artificial Sequence: Synthetic oligonucleotide
ccagguuugaaaucgcgag

SEQ ID NO: 671919 - RNA, 19 nt, Artificial Sequence
  Description of Artificial Sequence: Synthetic oligonucleotide
guuaucuaguggugacucc

SEQ ID NO: 671920 - RNA, 19 nt, Artificial Sequence
  Description of Artificial Sequence: Synthetic oligonucleotide
uuacugcuggccucguggc

SEQ ID NO: 671921 - RNA, 19 nt, Artificial Sequence
  Description of Artificial Sequence: Synthetic oligonucleotide
cugaaucagagguugaugu

SEQ ID NO: 671922 - RNA, 19 nt, Artificial Sequence
  Description of Artificial Sequence: Synthetic oligonucleotide
gaugccucggggugucccg

SEQ ID NO: 671923 - RNA, 19 nt, Artificial Sequence
  Description of Artificial Sequence: Synthetic oligonucleotide
ugaaucagagguugaugua

SEQ ID NO: 671924 - RNA, 19 nt, Artificial Sequence
  Description of Artificial Sequence: Synthetic oligonucleotide
uugcguuuccgcucugcag

SEQ ID NO: 671925 - RNA, 19 nt, Artificial Sequence
  Description of Artificial Sequence: Synthetic oligonucleotide
ugaaccgccguauuuucuu

SEQ ID NO: 671926 - RNA, 19 nt, Artificial Sequence
  Description of Artificial Sequence: Synthetic oligonucleotide
guuuuaccacuuuaggucu

SEQ ID NO: 671927 - RNA, 19 nt, Artificial Sequence
  Description of Artificial Sequence: Synthetic oligonucleotide
aaucgcgagucauguuuga

SEQ ID NO: 671928 - RNA, 19 nt, Artificial Sequence
  Description of Artificial Sequence: Synthetic oligonucleotide
uguggaugacuacugucuu

SEQ ID NO: 671929 - RNA, 19 nt, Artificial Sequence
  Description of Artificial Sequence: Synthetic oligonucleotide
uguauccuuugaagucgag

SEQ ID NO: 671930 - RNA, 19 nt, Artificial Sequence
  Description of Artificial Sequence: Synthetic oligonucleotide
uuguuaucuaucucccaua

SEQ ID NO: 671931 - RNA, 19 nt, Artificial Sequence
  Description of Artificial Sequence: Synthetic oligonucleotide
aauaaccaugucacucucu

SEQ ID NO: 671932 - RNA, 19 nt, Artificial Sequence
  Description of Artificial Sequence: Synthetic oligonucleotide
gaugcgagcgcggacacga

SEQ ID NO: 671933 - RNA, 19 nt, Artificial Sequence
  Description of Artificial Sequence: Synthetic oligonucleotide
uaaaaggagugagugcuua

SEQ ID NO: 671934 - RNA, 19 nt, Artificial Sequence
  Description of Artificial Sequence: Synthetic oligonucleotide
cauuguuaccugaagugaa

SEQ ID NO: 671935 - RNA, 19 nt, Artificial Sequence
  Description of Artificial Sequence: Synthetic oligonucleotide
uuauucugcugcucgguuu

SEQ ID NO: 671936 - RNA, 19 nt, Artificial Sequence
  Description of Artificial Sequence: Synthetic oligonucleotide
aaccgccguauuuucuuca

SEQ ID NO: 671937 - RNA, 19 nt, Artificial Sequence
  Description of Artificial Sequence: Synthetic oligonucleotide
aguuaguuaucuaguggug

SEQ ID NO: 671938 - RNA, 19 nt, Artificial Sequence
  Description of Artificial Sequence: Synthetic oligonucleotide
cauauucuuuacaccccac

SEQ ID NO: 671939 - RNA, 19 nt, Artificial Sequence
  Description of Artificial Sequence: Synthetic oligonucleotide
acuuaaacaucaaaaccua

SEQ ID NO: 671940 - RNA, 19 nt, Artificial Sequence
  Description of Artificial Sequence: Synthetic oligonucleotide
ucugccaaccuaguuaguu

SEQ ID NO: 671941 - RNA, 19 nt, Artificial Sequence
  Description of Artificial Sequence: Synthetic oligonucleotide
gaugacuacugucuugagu

SEQ ID NO: 671942 - RNA, 19 nt, Artificial Sequence
  Description of Artificial Sequence: Synthetic oligonucleotide
guuaccugaagugaagcaa

SEQ ID NO: 671943 - RNA, 19 nt, Artificial Sequence
  Description of Artificial Sequence: Synthetic oligonucleotide
aucgggagaugcgagcgcg

SEQ ID NO: 671944 - RNA, 19 nt, Artificial Sequence
  Description of Artificial Sequence: Synthetic oligonucleotide
uuucguuuauuugguuuac

SEQ ID NO: 671945 - RNA, 19 nt, Artificial Sequence
  Description of Artificial Sequence: Synthetic oligonucleotide
uaacuuugaaccgccguau

SEQ ID NO: 671946 - RNA, 19 nt, Artificial Sequence
  Description of Artificial Sequence: Synthetic oligonucleotide
uaccugaagugaagcaagu

SEQ ID NO: 671947 - RNA, 19 nt, Artificial Sequence
  Description of Artificial Sequence: Synthetic oligonucleotide
ugucccgacgcgccugccg

SEQ ID NO: 671948 - RNA, 19 nt, Artificial Sequence
  Description of Artificial Sequence: Synthetic oligonucleotide
cuuucaacaaguuccuccu

SEQ ID NO: 671949 - RNA, 19 nt, Artificial Sequence
  Description of Artificial Sequence: Synthetic oligonucleotide
uugaaccgccguauuuucu

SEQ ID NO: 671950 - RNA, 19 nt, Artificial Sequence
  Description of Artificial Sequence: Synthetic oligonucleotide
uagucacaucuucauugcu

SEQ ID NO: 671951 - RNA, 19 nt, Artificial Sequence
  Description of Artificial Sequence: Synthetic oligonucleotide
acuuugaaccgccguauuu

SEQ ID NO: 671952 - RNA, 19 nt, Artificial Sequence
  Description of Artificial Sequence: Synthetic oligonucleotide
uuaugucagcugcuuuagu

SEQ ID NO: 671953 - RNA, 19 nt, Artificial Sequence
  Description of Artificial Sequence: Synthetic oligonucleotide
uuguuuaguugaugccugu

SEQ ID NO: 671954 - RNA, 19 nt, Artificial Sequence
  Description of Artificial Sequence: Synthetic oligonucleotide
caugauaacuugacuaacu

SEQ ID NO: 671955 - RNA, 19 nt, Artificial Sequence
  Description of Artificial Sequence: Synthetic oligonucleotide
uaccacuuuaggucugccu

SEQ ID NO: 671956 - RNA, 19 nt, Artificial Sequence
  Description of Artificial Sequence: Synthetic oligonucleotide
cuaacuuugaaccgccgua

SEQ ID NO: 671957 - RNA, 19 nt, Artificial Sequence
  Description of Artificial Sequence: Synthetic oligonucleotide
uuugcuuccucgugcuguc

SEQ ID NO: 671958 - RNA, 19 nt, Artificial Sequence
  Description of Artificial Sequence: Synthetic oligonucleotide
auaacuugacuaacuuuga

SEQ ID NO: 671959 - RNA, 19 nt, Artificial Sequence
  Description of Artificial Sequence: Synthetic oligonucleotide
uuuucugaguaaggaaaua

SEQ ID NO: 671960 - RNA, 19 nt, Artificial Sequence
  Description of Artificial Sequence: Synthetic oligonucleotide
cuccauuuaaggucuuuga

SEQ ID NO: 671961 - RNA, 19 nt, Artificial Sequence
  Description of Artificial Sequence: Synthetic oligonucleotide
aacuuugaaccgccguauu

SEQ ID NO: 671962 - RNA, 19 nt, Artificial Sequence
  Description of Artificial Sequence: Synthetic oligonucleotide
cacgagcugggacugucgg

SEQ ID NO: 671963 - RNA, 19 nt, Artificial Sequence
  Description of Artificial Sequence: Synthetic oligonucleotide
ucgagaauccauugauguu

SEQ ID NO: 671964 - RNA, 19 nt, Artificial Sequence
  Description of Artificial Sequence: Synthetic oligonucleotide
cuuuuggagugguuauguc

SEQ ID NO: 671965 - RNA, 19 nt, Artificial Sequence
  Description of Artificial Sequence: Synthetic oligonucleotide
gucucaacggcuccgagcu

SEQ ID NO: 671966 - RNA, 19 nt, Artificial Sequence
  Description of Artificial Sequence: Synthetic oligonucleotide
accuaguuaguuaucuagu

SEQ ID NO: 671967 - RNA, 19 nt, Artificial Sequence
  Description of Artificial Sequence: Synthetic oligonucleotide
aggucguccucgcuuagga

SEQ ID NO: 671968 - RNA, 19 nt, Artificial Sequence
  Description of Artificial Sequence: Synthetic oligonucleotide
uaguuaucuaguggugacu

SEQ ID NO: 671969 - RNA, 19 nt, Artificial Sequence
  Description of Artificial Sequence: Synthetic oligonucleotide
caauaaccaugucacucuc

SEQ ID NO: 671970 - RNA, 19 nt, Artificial Sequence
  Description of Artificial Sequence: Synthetic oligonucleotide
accgccguauuuucuucag

SEQ ID NO: 671971 - RNA, 19 nt, Artificial Sequence
  Description of Artificial Sequence: Synthetic oligonucleotide
aucaauuuugagggaauuu

SEQ ID NO: 671972 - RNA, 19 nt, Artificial Sequence
  Description of Artificial Sequence: Synthetic oligonucleotide
ucgcuuaggacuugcuuuu

SEQ ID NO: 671973 - RNA, 19 nt, Artificial Sequence
  Description of Artificial Sequence: Synthetic oligonucleotide
gacuaacuuugaaccgccg

SEQ ID NO: 671974 - RNA, 19 nt, Artificial Sequence
  Description of Artificial Sequence: Synthetic oligonucleotide
gagucauguuugaggggcg

SEQ ID NO: 671975 - RNA, 19 nt, Artificial Sequence
  Description of Artificial Sequence: Synthetic oligonucleotide
agucgagaauccauugaug

SEQ ID NO: 671976 - RNA, 19 nt, Artificial Sequence
  Description of Artificial Sequence: Synthetic oligonucleotide
cacuuuuggauuguuaucu

SEQ ID NO: 671977 - RNA, 19 nt, Artificial Sequence
  Description of Artificial Sequence: Synthetic oligonucleotide
uuggagugguuaugucagc

SEQ ID NO: 671978 - RNA, 19 nt, Artificial Sequence
  Description of Artificial Sequence: Synthetic oligonucleotide
uuguucagcaagggauuug

SEQ ID NO: 671979 - RNA, 19 nt, Artificial Sequence
  Description of Artificial Sequence: Synthetic oligonucleotide
agaggcgucucaacggcuc

SEQ ID NO: 671980 - RNA, 19 nt, Artificial Sequence
  Description of Artificial Sequence: Synthetic oligonucleotide
cgcgagucauguuugaggg

SEQ ID NO: 671981 - RNA, 19 nt, Artificial Sequence
  Description of Artificial Sequence: Synthetic oligonucleotide
acuacugucuugaguguca

SEQ ID NO: 671982 - RNA, 19 nt, Artificial Sequence
  Description of Artificial Sequence: Synthetic oligonucleotide
cauguuggccuuucaacaa

SEQ ID NO: 671983 - RNA, 19 nt, Artificial Sequence
  Description of Artificial Sequence: Synthetic oligonucleotide
caucuguucacaucuagau

SEQ ID NO: 671984 - RNA, 19 nt, Artificial Sequence
  Description of Artificial Sequence: Synthetic oligonucleotide
gaucgggagaugcgagcgc

SEQ ID NO: 671985 - RNA, 19 nt, Artificial Sequence
  Description of Artificial Sequence: Synthetic oligonucleotide
ucgggagaugcgagcgcgg

SEQ ID NO: 671986 - RNA, 19 nt, Artificial Sequence
  Description of Artificial Sequence: Synthetic oligonucleotide
gcgaagaugaggucuccag

SEQ ID NO: 671987 - RNA, 19 nt, Artificial Sequence
  Description of Artificial Sequence: Synthetic oligonucleotide
acgccgggagucccaagac

SEQ ID NO: 671988 - RNA, 19 nt, Artificial Sequence
  Description of Artificial Sequence: Synthetic oligonucleotide
cucgugcugucuuuguuca

SEQ ID NO: 671989 - RNA, 19 nt, Artificial Sequence
  Description of Artificial Sequence: Synthetic oligonucleotide
acaucagaugaugcauuug

SEQ ID NO: 671990 - RNA, 19 nt, Artificial Sequence
  Description of Artificial Sequence: Synthetic oligonucleotide
gacgccgggagucccaaga

SEQ ID NO: 671991 - RNA, 19 nt, Artificial Sequence
  Description of Artificial Sequence: Synthetic oligonucleotide
cacaacagacuucacauau

SEQ ID NO: 671992 - RNA, 19 nt, Artificial Sequence
  Description of Artificial Sequence: Synthetic oligonucleotide
gucccgacgcgccugccgg

SEQ ID NO: 671993 - RNA, 19 nt, Artificial Sequence
  Description of Artificial Sequence: Synthetic oligonucleotide
guuugaggggcgacgccgg

SEQ ID NO: 671994 - RNA, 19 nt, Artificial Sequence
  Description of Artificial Sequence: Synthetic oligonucleotide
ucuucguuacugucaccau

SEQ ID NO: 671995 - RNA, 19 nt, Artificial Sequence
  Description of Artificial Sequence: Synthetic oligonucleotide
caaaaccuaugcuuauaaa

SEQ ID NO: 671996 - RNA, 19 nt, Artificial Sequence
  Description of Artificial Sequence: Synthetic oligonucleotide
gaugccuguugacuugaaa

SEQ ID NO: 671997 - RNA, 19 nt, Artificial Sequence
  Description of Artificial Sequence: Synthetic oligonucleotide
cugcccacguccacgccgg

SEQ ID NO: 671998 - RNA, 19 nt, Artificial Sequence
  Description of Artificial Sequence: Synthetic oligonucleotide
agagauaguucggccucuc

SEQ ID NO: 671999 - RNA, 19 nt, Artificial Sequence
  Description of Artificial Sequence: Synthetic oligonucleotide
ucguccucgcuuaggacuu

SEQ ID NO: 672000 - RNA, 19 nt, Artificial Sequence
  Description of Artificial Sequence: Synthetic oligonucleotide
cucgccuggcagcuuuugg

SEQ ID NO: 672001 - RNA, 19 nt, Artificial Sequence
  Description of Artificial Sequence: Synthetic oligonucleotide
ugcucgguuuccauuuguu

SEQ ID NO: 672002 - RNA, 19 nt, Artificial Sequence
  Description of Artificial Sequence: Synthetic oligonucleotide
ggauaaccuuucaucuugg

SEQ ID NO: 672003 - RNA, 19 nt, Artificial Sequence
  Description of Artificial Sequence: Synthetic oligonucleotide
ugcaggucguccucgcuua

SEQ ID NO: 672004 - RNA, 19 nt, Artificial Sequence
  Description of Artificial Sequence: Synthetic oligonucleotide
gaaccgccguauuuucuuc

SEQ ID NO: 672005 - RNA, 19 nt, Artificial Sequence
  Description of Artificial Sequence: Synthetic oligonucleotide
caccauucccgauucuuca

SEQ ID NO: 672006 - RNA, 19 nt, Artificial Sequence
  Description of Artificial Sequence: Synthetic oligonucleotide
agaauccauugauguuucu

SEQ ID NO: 672007 - RNA, 19 nt, Artificial Sequence
  Description of Artificial Sequence: Synthetic oligonucleotide
uguuuaguugaugccuguu

SEQ ID NO: 672008 - RNA, 19 nt, Artificial Sequence
  Description of Artificial Sequence: Synthetic oligonucleotide
aucgcgagucauguuugag

SEQ ID NO: 672009 - RNA, 19 nt, Artificial Sequence
  Description of Artificial Sequence: Synthetic oligonucleotide
aguucggccucucucucuu

SEQ ID NO: 672010 - RNA, 19 nt, Artificial Sequence
  Description of Artificial Sequence: Synthetic oligonucleotide
ugaaaucgcgagucauguu

SEQ ID NO: 672011 - RNA, 19 nt, Artificial Sequence
  Description of Artificial Sequence: Synthetic oligonucleotide
gagaugcgagcgcggacac

SEQ ID NO: 672012 - RNA, 19 nt, Artificial Sequence
  Description of Artificial Sequence: Synthetic oligonucleotide
ucaacggcuccgagcugca

SEQ ID NO: 672013 - RNA, 19 nt, Artificial Sequence
  Description of Artificial Sequence: Synthetic oligonucleotide
uuaccacuuuaggucugcc

SEQ ID NO: 672014 - RNA, 19 nt, Artificial Sequence
  Description of Artificial Sequence: Synthetic oligonucleotide
aucaaaaccuaugcuuaua

SEQ ID NO: 672015 - RNA, 19 nt, Artificial Sequence
  Description of Artificial Sequence: Synthetic oligonucleotide
gcagaggcgucucaacggc

SEQ ID NO: 672016 - RNA, 19 nt, Artificial Sequence
  Description of Artificial Sequence: Synthetic oligonucleotide
auucccgauucuucaguuu

SEQ ID NO: 672017 - RNA, 19 nt, Artificial Sequence
  Description of Artificial Sequence: Synthetic oligonucleotide
ccuggcagcuuuuggagug

SEQ ID NO: 672018 - RNA, 19 nt, Artificial Sequence
  Description of Artificial Sequence: Synthetic oligonucleotide
ucuuggcgaagaugagguc

SEQ ID NO: 672019 - RNA, 19 nt, Artificial Sequence
  Description of Artificial Sequence: Synthetic oligonucleotide
uuaacccuuucagcagccu

SEQ ID NO: 672020 - RNA, 19 nt, Artificial Sequence
  Description of Artificial Sequence: Synthetic oligonucleotide
ucguuacugucaccauuau

SEQ ID NO: 672021 - RNA, 19 nt, Artificial Sequence
  Description of Artificial Sequence: Synthetic oligonucleotide
cuuaaacaucaaaaccuau

SEQ ID NO: 672022 - RNA, 19 nt, Artificial Sequence
  Description of Artificial Sequence: Synthetic oligonucleotide
aggggcgacgccgggaguc

SEQ ID NO: 672023 - RNA, 19 nt, Artificial Sequence
  Description of Artificial Sequence: Synthetic oligonucleotide
gaugaugcauuugauuguu

SEQ ID NO: 672024 - RNA, 19 nt, Artificial Sequence
  Description of Artificial Sequence: Synthetic oligonucleotide
cuugcguuuccgcucugca

SEQ ID NO: 672025 - RNA, 19 nt, Artificial Sequence
  Description of Artificial Sequence: Synthetic oligonucleotide
cauuauguuguggaugacu

SEQ ID NO: 672026 - RNA, 19 nt, Artificial Sequence
  Description of Artificial Sequence: Synthetic oligonucleotide
aucagaugaugcauuugau

SEQ ID NO: 672027 - RNA, 19 nt, Artificial Sequence
  Description of Artificial Sequence: Synthetic oligonucleotide
cucgcuuaggacuugcuuu

SEQ ID NO: 672028 - RNA, 19 nt, Artificial Sequence
  Description of Artificial Sequence: Synthetic oligonucleotide
uccucgugcugucuuuguu

SEQ ID NO: 672029 - RNA, 19 nt, Artificial Sequence
  Description of Artificial Sequence: Synthetic oligonucleotide
cuuuuggauuguuaucuau

SEQ ID NO: 672030 - RNA, 19 nt, Artificial Sequence
  Description of Artificial Sequence: Synthetic oligonucleotide
gcaagggauuuguucagca

SEQ ID NO: 672031 - RNA, 19 nt, Artificial Sequence
  Description of Artificial Sequence: Synthetic oligonucleotide
uuccucgccuggcagcuuu

SEQ ID NO: 672032 - RNA, 19 nt, Artificial Sequence
  Description of Artificial Sequence: Synthetic oligonucleotide
caacuucuuucuuccccuc

SEQ ID NO: 672033 - RNA, 19 nt, Artificial Sequence
  Description of Artificial Sequence: Synthetic oligonucleotide
uccucgcuuaggacuugcu

SEQ ID NO: 672034 - RNA, 19 nt, Artificial Sequence
  Description of Artificial Sequence: Synthetic oligonucleotide
gaggauaaccuuucaucuu

SEQ ID NO: 672035 - RNA, 19 nt, Artificial Sequence
  Description of Artificial Sequence: Synthetic oligonucleotide
agggauuuguucagcacuu

SEQ ID NO: 672036 - RNA, 19 nt, Artificial Sequence
  Description of Artificial Sequence: Synthetic oligonucleotide
agcgaucgggagaugcgag

SEQ ID NO: 672037 - RNA, 19 nt, Artificial Sequence
  Description of Artificial Sequence: Synthetic oligonucleotide
agcagccuaaguauuucaa

SEQ ID NO: 672038 - RNA, 19 nt, Artificial Sequence
  Description of Artificial Sequence: Synthetic oligonucleotide
ggacaggguuguuuuacca

SEQ ID NO: 672039 - RNA, 19 nt, Artificial Sequence
  Description of Artificial Sequence: Synthetic oligonucleotide
ucucaacggcuccgagcug

SEQ ID NO: 672040 - RNA, 19 nt, Artificial Sequence
  Description of Artificial Sequence: Synthetic oligonucleotide
cucggggugucccgacgcg

SEQ ID NO: 672041 - RNA, 19 nt, Artificial Sequence
  Description of Artificial Sequence: Synthetic oligonucleotide
gguuugaaaucgcgaguca

SEQ ID NO: 672042 - RNA, 19 nt, Artificial Sequence
  Description of Artificial Sequence: Synthetic oligonucleotide
ggacugucgggcccgcggg

SEQ ID NO: 672043 - RNA, 19 nt, Artificial Sequence
  Description of Artificial Sequence: Synthetic oligonucleotide
gacacgagcugggacuguc

SEQ ID NO: 672044 - RNA, 19 nt, Artificial Sequence
  Description of Artificial Sequence: Synthetic oligonucleotide
gccgcgucugcccacgucc

SEQ ID NO: 672045 - RNA, 19 nt, Artificial Sequence
  Description of Artificial Sequence: Synthetic oligonucleotide
ggagaugcgagcgcggaca

SEQ ID NO: 672046 - RNA, 19 nt, Artificial Sequence
  Description of Artificial Sequence: Synthetic oligonucleotide
gcagccuaaguauuucaaa

SEQ ID NO: 672047 - RNA, 19 nt, Artificial Sequence
  Description of Artificial Sequence: Synthetic oligonucleotide
gcgagucauguuugagggg

SEQ ID NO: 672048 - RNA, 19 nt, Artificial Sequence
  Description of Artificial Sequence: Synthetic oligonucleotide
guuugaaaucgcgagucau

SEQ ID NO: 672049 - RNA, 19 nt, Artificial Sequence
  Description of Artificial Sequence: Synthetic oligonucleotide
ccucgugcugucuuuguuc

SEQ ID NO: 672050 - RNA, 19 nt, Artificial Sequence
  Description of Artificial Sequence: Synthetic oligonucleotide
agcgcggacacgagcuggg

SEQ ID NO: 672051 - RNA, 19 nt, Artificial Sequence
  Description of Artificial Sequence: Synthetic oligonucleotide
ccgcagaggcgucucaacg

SEQ ID NO: 672052 - RNA, 19 nt, Artificial Sequence
  Description of Artificial Sequence: Synthetic oligonucleotide
gucauguuugaggggcgac

SEQ ID NO: 672053 - RNA, 19 nt, Artificial Sequence
  Description of Artificial Sequence: Synthetic oligonucleotide
ccaugauaacuugacuaac

SEQ ID NO: 672054 - RNA, 19 nt, Artificial Sequence
  Description of Artificial Sequence: Synthetic oligonucleotide
cgcagaggcgucucaacgg

SEQ ID NO: 672055 - RNA, 19 nt, Artificial Sequence
  Description of Artificial Sequence: Synthetic oligonucleotide
auuucacuuuuggauuguu

SEQ ID NO: 672056 - RNA, 19 nt, Artificial Sequence
  Description of Artificial Sequence: Synthetic oligonucleotide
gcagcgaucgggagaugcg

SEQ ID NO: 672057 - RNA, 19 nt, Artificial Sequence
  Description of Artificial Sequence: Synthetic oligonucleotide
caaccuaguuaguuaucua

SEQ ID NO: 672058 - RNA, 19 nt, Artificial Sequence
  Description of Artificial Sequence: Synthetic oligonucleotide
gugaucaucucuguguguu

SEQ ID NO: 672059 - RNA, 19 nt, Artificial Sequence
  Description of Artificial Sequence: Synthetic oligonucleotide
agaugcgagcgcggacacg

SEQ ID NO: 672060 - RNA, 19 nt, Artificial Sequence
  Description of Artificial Sequence: Synthetic oligonucleotide
uugaggggcgacgccggga

SEQ ID NO: 672061 - RNA, 19 nt, Artificial Sequence
  Description of Artificial Sequence: Synthetic oligonucleotide
ucggggugucccgacgcgc

SEQ ID NO: 672062 - RNA, 19 nt, Artificial Sequence
  Description of Artificial Sequence: Synthetic oligonucleotide
gcagcuuuuggagugguua

SEQ ID NO: 672063 - RNA, 19 nt, Artificial Sequence
  Description of Artificial Sequence: Synthetic oligonucleotide
cuuugaaccgccguauuuu

SEQ ID NO: 672064 - RNA, 19 nt, Artificial Sequence
  Description of Artificial Sequence: Synthetic oligonucleotide
gagauaguucggccucucu

SEQ ID NO: 672065 - RNA, 19 nt, Artificial Sequence
  Description of Artificial Sequence: Synthetic oligonucleotide
ucccgacgcgccugccggg

SEQ ID NO: 672066 - RNA, 19 nt, Artificial Sequence
  Description of Artificial Sequence: Synthetic oligonucleotide
cuuuagucacaucuucauu

SEQ ID NO: 672067 - RNA, 19 nt, Artificial Sequence
  Description of Artificial Sequence: Synthetic oligonucleotide
cagguuugaaaucgcgagu

SEQ ID NO: 672068 - RNA, 19 nt, Artificial Sequence
  Description of Artificial Sequence: Synthetic oligonucleotide
gcuuagaaguaacauucau

SEQ ID NO: 672069 - RNA, 19 nt, Artificial Sequence
  Description of Artificial Sequence: Synthetic oligonucleotide
gcgaucgggagaugcgagc

SEQ ID NO: 672070 - RNA, 19 nt, Artificial Sequence
  Description of Artificial Sequence: Synthetic oligonucleotide
guuaucuaucucccauaau

SEQ ID NO: 672071 - RNA, 19 nt, Artificial Sequence
  Description of Artificial Sequence: Synthetic oligonucleotide
caucuagauuaucaauuuu

SEQ ID NO: 672072 - RNA, 19 nt, Artificial Sequence
  Description of Artificial Sequence: Synthetic oligonucleotide
agcuggccaaugaggauaa

SEQ ID NO: 672073 - RNA, 19 nt, Artificial Sequence
  Description of Artificial Sequence: Synthetic oligonucleotide
cgaucgggagaugcgagcg

SEQ ID NO: 672074 - RNA, 19 nt, Artificial Sequence
  Description of Artificial Sequence: Synthetic oligonucleotide
gcugggacugucgggcccg

SEQ ID NO: 672075 - RNA, 19 nt, Artificial Sequence
  Description of Artificial Sequence: Synthetic oligonucleotide
cugucgggcccgcgggcgg

SEQ ID NO: 672076 - RNA, 19 nt, Artificial Sequence
  Description of Artificial Sequence: Synthetic oligonucleotide
cuucguuacugucaccauu

SEQ ID NO: 672077 - RNA, 19 nt, Artificial Sequence
  Description of Artificial Sequence: Synthetic oligonucleotide
gccgggagucccaagacca

SEQ ID NO: 672078 - RNA, 19 nt, Artificial Sequence
  Description of Artificial Sequence: Synthetic oligonucleotide
auauguccuuugguccuaa

SEQ ID NO: 672079 - RNA, 19 nt, Artificial Sequence
  Description of Artificial Sequence: Synthetic oligonucleotide
cguuacugucaccauuaug

SEQ ID NO: 672080 - RNA, 19 nt, Artificial Sequence
  Description of Artificial Sequence: Synthetic oligonucleotide
cuggccgcgucugcccacg

SEQ ID NO: 672081 - RNA, 19 nt, Artificial Sequence
  Description of Artificial Sequence: Synthetic oligonucleotide
gcuuuuggagugguuaugu

SEQ ID NO: 672082 - RNA, 19 nt, Artificial Sequence
  Description of Artificial Sequence: Synthetic oligonucleotide
guccucgcuuaggacuugc

SEQ ID NO: 672083 - RNA, 19 nt, Artificial Sequence
  Description of Artificial Sequence: Synthetic oligonucleotide
ggucguccucgcuuaggac

SEQ ID NO: 672084 - RNA, 19 nt, Artificial Sequence
  Description of Artificial Sequence: Synthetic oligonucleotide
aggaugccucggggugucc

SEQ ID NO: 672085 - RNA, 19 nt, Artificial Sequence
  Description of Artificial Sequence: Synthetic oligonucleotide
gugaugacugaaucuccuu

SEQ ID NO: 672086 - RNA, 19 nt, Artificial Sequence
  Description of Artificial Sequence: Synthetic oligonucleotide
ccguuuagauucaacuucu

SEQ ID NO: 672087 - RNA, 19 nt, Artificial Sequence
  Description of Artificial Sequence: Synthetic oligonucleotide
ggugucccgacgcgccugc

SEQ ID NO: 672088 - RNA, 19 nt, Artificial Sequence
  Description of Artificial Sequence: Synthetic oligonucleotide
gcugcucgguuuccauuug

SEQ ID NO: 672089 - RNA, 19 nt, Artificial Sequence
  Description of Artificial Sequence: Synthetic oligonucleotide
ccgauucuucaguuuccac

SEQ ID NO: 672090 - RNA, 19 nt, Artificial Sequence
  Description of Artificial Sequence: Synthetic oligonucleotide
cauucccgauucuucaguu

SEQ ID NO: 672091 - RNA, 19 nt, Artificial Sequence
  Description of Artificial Sequence: Synthetic oligonucleotide
cagcgaucgggagaugcga

SEQ ID NO: 672092 - RNA, 19 nt, Artificial Sequence
  Description of Artificial Sequence: Synthetic oligonucleotide
cccugguuuagcuacauuu

SEQ ID NO: 672093 - RNA, 19 nt, Artificial Sequence
  Description of Artificial Sequence: Synthetic oligonucleotide
ggaugccucgggguguccc

SEQ ID NO: 672094 - RNA, 19 nt, Artificial Sequence
  Description of Artificial Sequence: Synthetic oligonucleotide
ugccucggggugucccgac

SEQ ID NO: 672095 - RNA, 19 nt, Artificial Sequence
  Description of Artificial Sequence: Synthetic oligonucleotide
caugaucaguaucuuccuu

SEQ ID NO: 672096 - RNA, 19 nt, Artificial Sequence
  Description of Artificial Sequence: Synthetic oligonucleotide
ccucggggugucccgacgc

SEQ ID NO: 672097 - RNA, 19 nt, Artificial Sequence
  Description of Artificial Sequence: Synthetic oligonucleotide
ccaaccuaguuaguuaucu

SEQ ID NO: 672098 - RNA, 19 nt, Artificial Sequence
  Description of Artificial Sequence: Synthetic oligonucleotide
cacuugggugaugacugaa

SEQ ID NO: 672099 - RNA, 19 nt, Artificial Sequence
  Description of Artificial Sequence: Synthetic oligonucleotide
cugccgggcggcgacgcug

SEQ ID NO: 672100 - RNA, 19 nt, Artificial Sequence
  Description of Artificial Sequence: Synthetic oligonucleotide
gccucggggugucccgacg

SEQ ID NO: 672101 - RNA, 19 nt, Artificial Sequence
  Description of Artificial Sequence: Synthetic oligonucleotide
guucggccucucucucuuc

SEQ ID NO: 672102 - RNA, 19 nt, Artificial Sequence
  Description of Artificial Sequence: Synthetic oligonucleotide
uccucgccuggcagcuuuu

SEQ ID NO: 672103 - RNA, 19 nt, Artificial Sequence
  Description of Artificial Sequence: Synthetic oligonucleotide
gacgcgccugccgggcggc

SEQ ID NO: 672104 - RNA, 19 nt, Artificial Sequence
  Description of Artificial Sequence: Synthetic oligonucleotide
gcgucucaacggcuccgag

SEQ ID NO: 672105 - RNA, 19 nt, Artificial Sequence
  Description of Artificial Sequence: Synthetic oligonucleotide
ccgggagucccaagaccag

SEQ ID NO: 672106 - RNA, 19 nt, Artificial Sequence
  Description of Artificial Sequence: Synthetic oligonucleotide
gcagcagcgaucgggagau

SEQ ID NO: 672107 - RNA, 19 nt, Artificial Sequence
  Description of Artificial Sequence: Synthetic oligonucleotide
ggugacuccuucagagaua

SEQ ID NO: 672108 - RNA, 19 nt, Artificial Sequence
  Description of Artificial Sequence: Synthetic oligonucleotide
cggggugucccgacgcgcc

SEQ ID NO: 672109 - RNA, 19 nt, Artificial Sequence
  Description of Artificial Sequence: Synthetic oligonucleotide
cagaggcgucucaacggcu

SEQ ID NO: 672110 - RNA, 19 nt, Artificial Sequence
  Description of Artificial Sequence: Synthetic oligonucleotide
ccauuauguuguggaugac

SEQ ID NO: 672111 - RNA, 19 nt, Artificial Sequence
  Description of Artificial Sequence: Synthetic oligonucleotide
uggccgcgucugcccacgu

SEQ ID NO: 672112 - RNA, 19 nt, Artificial Sequence
  Description of Artificial Sequence: Synthetic oligonucleotide
cgccgggagucccaagacc

SEQ ID NO: 672113 - RNA, 19 nt, Artificial Sequence
  Description of Artificial Sequence: Synthetic oligonucleotide
guggggcgcgcuggccgcg

SEQ ID NO: 672114 - RNA, 19 nt, Artificial Sequence
  Description of Artificial Sequence: Synthetic oligonucleotide
cugggacugucgggcccgc

SEQ ID NO: 672115 - RNA, 19 nt, Artificial Sequence
  Description of Artificial Sequence: Synthetic oligonucleotide
gccuguugacuugaaaauu

SEQ ID NO: 672116 - RNA, 19 nt, Artificial Sequence
  Description of Artificial Sequence: Synthetic oligonucleotide
ggcgucucaacggcuccga

SEQ ID NO: 672117 - RNA, 19 nt, Artificial Sequence
  Description of Artificial Sequence: Synthetic oligonucleotide
gggugucccgacgcgccug

SEQ ID NO: 672118 - RNA, 19 nt, Artificial Sequence
  Description of Artificial Sequence: Synthetic oligonucleotide
ggggcgacgccgggagucc

SEQ ID NO: 672119 - RNA, 19 nt, Artificial Sequence
  Description of Artificial Sequence: Synthetic oligonucleotide
ggaggaugccucggggugu

SEQ ID NO: 672120 - RNA, 19 nt, Artificial Sequence
  Description of Artificial Sequence: Synthetic oligonucleotide
uggggcgcgcuggccgcgu

SEQ ID NO: 672121 - RNA, 19 nt, Artificial Sequence
  Description of Artificial Sequence: Synthetic oligonucleotide
gcguuuccgcucugcagcu

SEQ ID NO: 672122 - RNA, 19 nt, Artificial Sequence
  Description of Artificial Sequence: Synthetic oligonucleotide
cacuuuaggucugccucuu

SEQ ID NO: 672123 - RNA, 19 nt, Artificial Sequence
  Description of Artificial Sequence: Synthetic oligonucleotide
gugucccgacgcgccugcc

SEQ ID NO: 672124 - RNA, 19 nt, Artificial Sequence
  Description of Artificial Sequence: Synthetic oligonucleotide
gccaccauucccgauucuu

SEQ ID NO: 672125 - RNA, 19 nt, Artificial Sequence
  Description of Artificial Sequence: Synthetic oligonucleotide
ggccgcgucugcccacguc

SEQ ID NO: 672126 - RNA, 19 nt, Artificial Sequence
  Description of Artificial Sequence: Synthetic oligonucleotide
acgcgccugccgggcggcg

SEQ ID NO: 672127 - RNA, 19 nt, Artificial Sequence
  Description of Artificial Sequence: Synthetic oligonucleotide
gcgccugccgggcggcgac

SEQ ID NO: 672128 - RNA, 19 nt, Artificial Sequence
  Description of Artificial Sequence: Synthetic oligonucleotide
ccucgccuggcagcuuuug

SEQ ID NO: 672129 - RNA, 19 nt, Artificial Sequence
  Description of Artificial Sequence: Synthetic oligonucleotide
cccgacgcgccugccgggc

SEQ ID NO: 672130 - RNA, 19 nt, Artificial Sequence
  Description of Artificial Sequence: Synthetic oligonucleotide
cagcagcgaucgggagaug

SEQ ID NO: 672131 - RNA, 19 nt, Artificial Sequence
  Description of Artificial Sequence: Synthetic oligonucleotide
ggcgacgccgggaguccca

SEQ ID NO: 672132 - RNA, 19 nt, Artificial Sequence
  Description of Artificial Sequence: Synthetic oligonucleotide
ccgcgucugcccacgucca

SEQ ID NO: 672133 - RNA, 19 nt, Artificial Sequence
  Description of Artificial Sequence: Synthetic oligonucleotide
caacggcuccgagcugcaa

SEQ ID NO: 672134 - RNA, 19 nt, Artificial Sequence
  Description of Artificial Sequence: Synthetic oligonucleotide
ggggugucccgacgcgccu

SEQ ID NO: 672135 - RNA, 19 nt, Artificial Sequence
  Description of Artificial Sequence: Synthetic oligonucleotide
cgggagaugcgagcgcgga

SEQ ID NO: 672136 - RNA, 19 nt, Artificial Sequence
  Description of Artificial Sequence: Synthetic oligonucleotide
ccgccguauuuucuucagu

SEQ ID NO: 672137 - RNA, 19 nt, Artificial Sequence
  Description of Artificial Sequence: Synthetic oligonucleotide
gcgacgccgggagucccaa

SEQ ID NO: 672138 - RNA, 19 nt, Artificial Sequence
  Description of Artificial Sequence: Synthetic oligonucleotide
cgacgccgggagucccaag

SEQ ID NO: 672139 - RNA, 19 nt, Artificial Sequence
  Description of Artificial Sequence: Synthetic oligonucleotide
ggcagcuuuuggagugguu

SEQ ID NO: 672140 - RNA, 19 nt, Artificial Sequence
  Description of Artificial Sequence: Synthetic oligonucleotide
cuuccucgccuggcagcuu

SEQ ID NO: 672141 - RNA, 19 nt, Artificial Sequence
  Description of Artificial Sequence: Synthetic oligonucleotide
cgccugccgggcggcgacg

SEQ ID NO: 672142 - RNA, 19 nt, Artificial Sequence
  Description of Artificial Sequence: Synthetic oligonucleotide
gaaguuuccgcuuauaucg

SEQ ID NO: 672143 - RNA, 19 nt, Artificial Sequence
  Description of Artificial Sequence: Synthetic oligonucleotide
aaaccaucuagguacauag

SEQ ID NO: 672144 - RNA, 19 nt, Artificial Sequence
  Description of Artificial Sequence: Synthetic oligonucleotide
uuacugaagaagcagcagg

SEQ ID NO: 672145 - RNA, 19 nt, Artificial Sequence
  Description of Artificial Sequence: Synthetic oligonucleotide
ucagcugauguacacacgg

SEQ ID NO: 672146 - RNA, 19 nt, Artificial Sequence
  Description of Artificial Sequence: Synthetic oligonucleotide
ucuuuagggguaaggaugg

SEQ ID NO: 672147 - RNA, 19 nt, Artificial Sequence
  Description of Artificial Sequence: Synthetic oligonucleotide
agacuugaggccaagaacc

SEQ ID NO: 672148 - RNA, 19 nt, Artificial Sequence
  Description of Artificial Sequence: Synthetic oligonucleotide
uguuauaaaccugggagag

SEQ ID NO: 672149 - RNA, 19 nt, Artificial Sequence
  Description of Artificial Sequence: Synthetic oligonucleotide
ucugcauaaaccuccaccu

SEQ ID NO: 672150 - RNA, 19 nt, Artificial Sequence
  Description of Artificial Sequence: Synthetic oligonucleotide
agaucugacauucaggaaa

SEQ ID NO: 672151 - RNA, 19 nt, Artificial Sequence
  Description of Artificial Sequence: Synthetic oligonucleotide
uauggauguucaaaguccc

SEQ ID NO: 672152 - RNA, 19 nt, Artificial Sequence
  Description of Artificial Sequence: Synthetic oligonucleotide
guuaauuccaccucuccug

SEQ ID NO: 672153 - RNA, 19 nt, Artificial Sequence
  Description of Artificial Sequence: Synthetic oligonucleotide
aagccgagucugcacaugc

SEQ ID NO: 672154 - RNA, 19 nt, Artificial Sequence
  Description of Artificial Sequence: Synthetic oligonucleotide
uuuuagcuggugauuauga

SEQ ID NO: 672155 - RNA, 19 nt, Artificial Sequence
  Description of Artificial Sequence: Synthetic oligonucleotide
cuuaguggcacccaauuug

SEQ ID NO: 672156 - RNA, 19 nt, Artificial Sequence
  Description of Artificial Sequence: Synthetic oligonucleotide
agcacugcguccuucuugc

SEQ ID NO: 672157 - RNA, 19 nt, Artificial Sequence
  Description of Artificial Sequence: Synthetic oligonucleotide
gauaggcccagccugcucg

SEQ ID NO: 672158 - RNA, 19 nt, Artificial Sequence
  Description of Artificial Sequence: Synthetic oligonucleotide
uuugcugucaggaguaccu

SEQ ID NO: 672159 - RNA, 19 nt, Artificial Sequence
  Description of Artificial Sequence: Synthetic oligonucleotide
gagauugaaacucucuuuc

SEQ ID NO: 672160 - RNA, 19 nt, Artificial Sequence
  Description of Artificial Sequence: Synthetic oligonucleotide
aucaugggcaccaaaggcc

SEQ ID NO: 672161 - RNA, 19 nt, Artificial Sequence
  Description of Artificial Sequence: Synthetic oligonucleotide
uuaauuccaccucuccugc

SEQ ID NO: 672162 - RNA, 19 nt, Artificial Sequence
  Description of Artificial Sequence: Synthetic oligonucleotide
uuaguggcacccaauuugc

SEQ ID NO: 672163 - RNA, 19 nt, Artificial Sequence
  Description of Artificial Sequence: Synthetic oligonucleotide
caugaguuuaaaguuggcg

SEQ ID NO: 672164 - RNA, 19 nt, Artificial Sequence
  Description of Artificial Sequence: Synthetic oligonucleotide
gaaauauccuccugagccc

SEQ ID NO: 672165 - RNA, 19 nt, Artificial Sequence
  Description of Artificial Sequence: Synthetic oligonucleotide
uaaaccuccaccuuccuuu

SEQ ID NO: 672166 - RNA, 19 nt, Artificial Sequence
  Description of Artificial Sequence: Synthetic oligonucleotide
uugcgaguguuacagcagg

SEQ ID NO: 672167 - RNA, 19 nt, Artificial Sequence
  Description of Artificial Sequence: Synthetic oligonucleotide
ugaguuuaaaguuggcguc

SEQ ID NO: 672168 - RNA, 19 nt, Artificial Sequence
  Description of Artificial Sequence: Synthetic oligonucleotide
ucuagguacauagggcugg

SEQ ID NO: 672169 - RNA, 19 nt, Artificial Sequence
  Description of Artificial Sequence: Synthetic oligonucleotide
cauagggcuggguucaugg

SEQ ID NO: 672170 - RNA, 19 nt, Artificial Sequence
  Description of Artificial Sequence: Synthetic oligonucleotide
cacggugaaaaucaugggc

SEQ ID NO: 672171 - RNA, 19 nt, Artificial Sequence
  Description of Artificial Sequence: Synthetic oligonucleotide
ugcauaaaccuccaccuuc

SEQ ID NO: 672172 - RNA, 19 nt, Artificial Sequence
  Description of Artificial Sequence: Synthetic oligonucleotide
auguuauaaaccugggaga

SEQ ID NO: 672173 - RNA, 19 nt, Artificial Sequence
  Description of Artificial Sequence: Synthetic oligonucleotide
guaaggauggaucugucuc

SEQ ID NO: 672174 - RNA, 19 nt, Artificial Sequence
  Description of Artificial Sequence: Synthetic oligonucleotide
uuuccgcuuauaucgcugg

SEQ ID NO: 672175 - RNA, 19 nt, Artificial Sequence
  Description of Artificial Sequence: Synthetic oligonucleotide
ucaaccgcgccuuauacuc

SEQ ID NO: 672176 - RNA, 19 nt, Artificial Sequence
  Description of Artificial Sequence: Synthetic oligonucleotide
caugacaucggagaagggc

SEQ ID NO: 672177 - RNA, 19 nt, Artificial Sequence
  Description of Artificial Sequence: Synthetic oligonucleotide
agaauuccucuuuaggggu

SEQ ID NO: 672178 - RNA, 19 nt, Artificial Sequence
  Description of Artificial Sequence: Synthetic oligonucleotide
acgguugauaggcccagcc

SEQ ID NO: 672179 - RNA, 19 nt, Artificial Sequence
  Description of Artificial Sequence: Synthetic oligonucleotide
aaacucucuuucucucggg

SEQ ID NO: 672180 - RNA, 19 nt, Artificial Sequence
  Description of Artificial Sequence: Synthetic oligonucleotide
uuaaaguuggcgucauccu

SEQ ID NO: 672181 - RNA, 19 nt, Artificial Sequence
  Description of Artificial Sequence: Synthetic oligonucleotide
acccaauuugcguugcagg

SEQ ID NO: 672182 - RNA, 19 nt, Artificial Sequence
  Description of Artificial Sequence: Synthetic oligonucleotide
ugccggauucgucucaggg

SEQ ID NO: 672183 - RNA, 19 nt, Artificial Sequence
  Description of Artificial Sequence: Synthetic oligonucleotide
gugguaagcccuuuccugg

SEQ ID NO: 672184 - RNA, 19 nt, Artificial Sequence
  Description of Artificial Sequence: Synthetic oligonucleotide
uauaucgcugggcaucccc

SEQ ID NO: 672185 - RNA, 19 nt, Artificial Sequence
  Description of Artificial Sequence: Synthetic oligonucleotide
uguacuucucgaaguuucc

SEQ ID NO: 672186 - RNA, 19 nt, Artificial Sequence
  Description of Artificial Sequence: Synthetic oligonucleotide
ucuggcgcucaugacaucg

SEQ ID NO: 672187 - RNA, 19 nt, Artificial Sequence
  Description of Artificial Sequence: Synthetic oligonucleotide
cuuucucucgggcagcccg

SEQ ID NO: 672188 - RNA, 19 nt, Artificial Sequence
  Description of Artificial Sequence: Synthetic oligonucleotide
acugcguccuucuugcgag

SEQ ID NO: 672189 - RNA, 19 nt, Artificial Sequence
  Description of Artificial Sequence: Synthetic oligonucleotide
ugcccuaggcugcagaucu

SEQ ID NO: 672190 - RNA, 19 nt, Artificial Sequence
  Description of Artificial Sequence: Synthetic oligonucleotide
aacuccuucuccacacccc

SEQ ID NO: 672191 - RNA, 19 nt, Artificial Sequence
  Description of Artificial Sequence: Synthetic oligonucleotide
uccaguuugcgccgcagcc

SEQ ID NO: 672192 - RNA, 19 nt, Artificial Sequence
  Description of Artificial Sequence: Synthetic oligonucleotide
uaaggauggaucugucucu

SEQ ID NO: 672193 - RNA, 19 nt, Artificial Sequence
  Description of Artificial Sequence: Synthetic oligonucleotide
ugguuaauuccaccucucc

SEQ ID NO: 672194 - RNA, 19 nt, Artificial Sequence
  Description of Artificial Sequence: Synthetic oligonucleotide
ucucgcuugggucuggccu

SEQ ID NO: 672195 - RNA, 19 nt, Artificial Sequence
  Description of Artificial Sequence: Synthetic oligonucleotide
aaggccgcguugcacuugg

SEQ ID NO: 672196 - RNA, 19 nt, Artificial Sequence
  Description of Artificial Sequence: Synthetic oligonucleotide
aaguuuccgcuuauaucgc

SEQ ID NO: 672197 - RNA, 19 nt, Artificial Sequence
  Description of Artificial Sequence: Synthetic oligonucleotide
ucgaaguuuccgcuuauau

SEQ ID NO: 672198 - RNA, 19 nt, Artificial Sequence
  Description of Artificial Sequence: Synthetic oligonucleotide
caccuuaucccgcuguucc

SEQ ID NO: 672199 - RNA, 19 nt, Artificial Sequence
  Description of Artificial Sequence: Synthetic oligonucleotide
guagccccaaaccaucuag

SEQ ID NO: 672200 - RNA, 19 nt, Artificial Sequence
  Description of Artificial Sequence: Synthetic oligonucleotide
cuugggugcagacuuguac

SEQ ID NO: 672201 - RNA, 19 nt, Artificial Sequence
  Description of Artificial Sequence: Synthetic oligonucleotide
aaggauggaucugucucuc

SEQ ID NO: 672202 - RNA, 19 nt, Artificial Sequence
  Description of Artificial Sequence: Synthetic oligonucleotide
gaucucucgaagccgaguc

SEQ ID NO: 672203 - RNA, 19 nt, Artificial Sequence
  Description of Artificial Sequence: Synthetic oligonucleotide
uuguuaagcuccagggccu

SEQ ID NO: 672204 - RNA, 19 nt, Artificial Sequence
  Description of Artificial Sequence: Synthetic oligonucleotide
ucucacgguugauaggccc

SEQ ID NO: 672205 - RNA, 19 nt, Artificial Sequence
  Description of Artificial Sequence: Synthetic oligonucleotide
uagccccaaaccaucuagg

SEQ ID NO: 672206 - RNA, 19 nt, Artificial Sequence
  Description of Artificial Sequence: Synthetic oligonucleotide
agggguuagggccagggca

SEQ ID NO: 672207 - RNA, 19 nt, Artificial Sequence
  Description of Artificial Sequence: Synthetic oligonucleotide
uaaaguuggcgucauccuu

SEQ ID NO: 672208 - RNA, 19 nt, Artificial Sequence
  Description of Artificial Sequence: Synthetic oligonucleotide
uucccguucccgaaguucu

SEQ ID NO: 672209 - RNA, 19 nt, Artificial Sequence
  Description of Artificial Sequence: Synthetic oligonucleotide
guaagcccuuuccuggugg

SEQ ID NO: 672210 - RNA, 19 nt, Artificial Sequence
  Description of Artificial Sequence: Synthetic oligonucleotide
ugcagcuaucuccuuuugc

SEQ ID NO: 672211 - RNA, 19 nt, Artificial Sequence
  Description of Artificial Sequence: Synthetic oligonucleotide
ugcgaguguuacagcaggg

SEQ ID NO: 672212 - RNA, 19 nt, Artificial Sequence
  Description of Artificial Sequence: Synthetic oligonucleotide
acacggugaaaaucauggg

SEQ ID NO: 672213 - RNA, 19 nt, Artificial Sequence
  Description of Artificial Sequence: Synthetic oligonucleotide
uggauguucaaaguccccu

SEQ ID NO: 672214 - RNA, 19 nt, Artificial Sequence
  Description of Artificial Sequence: Synthetic oligonucleotide
aguggcacccaauuugcgu

SEQ ID NO: 672215 - RNA, 19 nt, Artificial Sequence
  Description of Artificial Sequence: Synthetic oligonucleotide
acggugaaaaucaugggca

SEQ ID NO: 672216 - RNA, 19 nt, Artificial Sequence
  Description of Artificial Sequence: Synthetic oligonucleotide
ugucuucaaaagccuggcc

SEQ ID NO: 672217 - RNA, 19 nt, Artificial Sequence
  Description of Artificial Sequence: Synthetic oligonucleotide
gguugauaggcccagccug

SEQ ID NO: 672218 - RNA, 19 nt, Artificial Sequence
  Description of Artificial Sequence: Synthetic oligonucleotide
uccugagcccucuugagau

SEQ ID NO: 672219 - RNA, 19 nt, Artificial Sequence
  Description of Artificial Sequence: Synthetic oligonucleotide
cuugcgaguguuacagcag

SEQ ID NO: 672220 - RNA, 19 nt, Artificial Sequence
  Description of Artificial Sequence: Synthetic oligonucleotide
gaaaacguggaagcacuug

SEQ ID NO: 672221 - RNA, 19 nt, Artificial Sequence
  Description of Artificial Sequence: Synthetic oligonucleotide
uuucucucgggcagcccgg

SEQ ID NO: 672222 - RNA, 19 nt, Artificial Sequence
  Description of Artificial Sequence: Synthetic oligonucleotide
uuuagcuggugauuaugau

SEQ ID NO: 672223 - RNA, 19 nt, Artificial Sequence
  Description of Artificial Sequence: Synthetic oligonucleotide
gaucccacucacgagugag

SEQ ID NO: 672224 - RNA, 19 nt, Artificial Sequence
  Description of Artificial Sequence: Synthetic oligonucleotide
cuuauaucgcugggcaucc

SEQ ID NO: 672225 - RNA, 19 nt, Artificial Sequence
  Description of Artificial Sequence: Synthetic oligonucleotide
uucgaucucuuuccuccag

SEQ ID NO: 672226 - RNA, 19 nt, Artificial Sequence
  Description of Artificial Sequence: Synthetic oligonucleotide
uuugcguugcagguguucu

SEQ ID NO: 672227 - RNA, 19 nt, Artificial Sequence
  Description of Artificial Sequence: Synthetic oligonucleotide
cugacauucaggaaaagau

SEQ ID NO: 672228 - RNA, 19 nt, Artificial Sequence
  Description of Artificial Sequence: Synthetic oligonucleotide
aucggagaagggcuuccac

SEQ ID NO: 672229 - RNA, 19 nt, Artificial Sequence
  Description of Artificial Sequence: Synthetic oligonucleotide
aggauggaucugucucucc

SEQ ID NO: 672230 - RNA, 19 nt, Artificial Sequence
  Description of Artificial Sequence: Synthetic oligonucleotide
aaaguuggcgucauccuuu

SEQ ID NO: 672231 - RNA, 19 nt, Artificial Sequence
  Description of Artificial Sequence: Synthetic oligonucleotide
uaguggcacccaauuugcg

SEQ ID NO: 672232 - RNA, 19 nt, Artificial Sequence
  Description of Artificial Sequence: Synthetic oligonucleotide
aaagccuggccugucacau

SEQ ID NO: 672233 - RNA, 19 nt, Artificial Sequence
  Description of Artificial Sequence: Synthetic oligonucleotide
uuccgcuuauaucgcuggg

SEQ ID NO: 672234 - RNA, 19 nt, Artificial Sequence
  Description of Artificial Sequence: Synthetic oligonucleotide
aguccccugagguucaggu

SEQ ID NO: 672235 - RNA, 19 nt, Artificial Sequence
  Description of Artificial Sequence: Synthetic oligonucleotide
ugcuuaguggcacccaauu

SEQ ID NO: 672236 - RNA, 19 nt, Artificial Sequence
  Description of Artificial Sequence: Synthetic oligonucleotide
gaaguucucgcuugggucu

SEQ ID NO: 672237 - RNA, 19 nt, Artificial Sequence
  Description of Artificial Sequence: Synthetic oligonucleotide
gcccucuugagauugaaac

SEQ ID NO: 672238 - RNA, 19 nt, Artificial Sequence
  Description of Artificial Sequence: Synthetic oligonucleotide
acguggaagcacuugguaa

SEQ ID NO: 672239 - RNA, 19 nt, Artificial Sequence
  Description of Artificial Sequence: Synthetic oligonucleotide
uuaucccgcuguuccuugg

SEQ ID NO: 672240 - RNA, 19 nt, Artificial Sequence
  Description of Artificial Sequence: Synthetic oligonucleotide
ugguuuccagggguuaggg

SEQ ID NO: 672241 - RNA, 19 nt, Artificial Sequence
  Description of Artificial Sequence: Synthetic oligonucleotide
agguucucggccucgagaa

SEQ ID NO: 672242 - RNA, 19 nt, Artificial Sequence
  Description of Artificial Sequence: Synthetic oligonucleotide
uuccguucagcugccauca

SEQ ID NO: 672243 - RNA, 19 nt, Artificial Sequence
  Description of Artificial Sequence: Synthetic oligonucleotide
uuuugcugucaggaguacc

SEQ ID NO: 672244 - RNA, 19 nt, Artificial Sequence
  Description of Artificial Sequence: Synthetic oligonucleotide
cagccgggaaauauccucc

SEQ ID NO: 672245 - RNA, 19 nt, Artificial Sequence
  Description of Artificial Sequence: Synthetic oligonucleotide
ucaguucccgaggacagcu

SEQ ID NO: 672246 - RNA, 19 nt, Artificial Sequence
  Description of Artificial Sequence: Synthetic oligonucleotide
gggagagugcccuaggcug

SEQ ID NO: 672247 - RNA, 19 nt, Artificial Sequence
  Description of Artificial Sequence: Synthetic oligonucleotide
aaccgcgccuuauacuccu

SEQ ID NO: 672248 - RNA, 19 nt, Artificial Sequence
  Description of Artificial Sequence: Synthetic oligonucleotide
uugauccgcucugacauga

SEQ ID NO: 672249 - RNA, 19 nt, Artificial Sequence
  Description of Artificial Sequence: Synthetic oligonucleotide
acggcuggaucucucgaag

SEQ ID NO: 672250 - RNA, 19 nt, Artificial Sequence
  Description of Artificial Sequence: Synthetic oligonucleotide
ugcaugcaccaguagcccc

SEQ ID NO: 672251 - RNA, 19 nt, Artificial Sequence
  Description of Artificial Sequence: Synthetic oligonucleotide
caguuugcgccgcagccgg

SEQ ID NO: 672252 - RNA, 19 nt, Artificial Sequence
  Description of Artificial Sequence: Synthetic oligonucleotide
acaugaguuuaaaguuggc

SEQ ID NO: 672253 - RNA, 19 nt, Artificial Sequence
  Description of Artificial Sequence: Synthetic oligonucleotide
uccgcuuauaucgcugggc

SEQ ID NO: 672254 - RNA, 19 nt, Artificial Sequence
  Description of Artificial Sequence: Synthetic oligonucleotide
cagccgcccauuuugcucc

SEQ ID NO: 672255 - RNA, 19 nt, Artificial Sequence
  Description of Artificial Sequence: Synthetic oligonucleotide
agccuguacuucucgaagu

SEQ ID NO: 672256 - RNA, 19 nt, Artificial Sequence
  Description of Artificial Sequence: Synthetic oligonucleotide
cacaugcuccaacugcacc

SEQ ID NO: 672257 - RNA, 19 nt, Artificial Sequence
  Description of Artificial Sequence: Synthetic oligonucleotide
cuaggguauauggauguuc

SEQ ID NO: 672258 - RNA, 19 nt, Artificial Sequence
  Description of Artificial Sequence: Synthetic oligonucleotide
gguucauggagucuggaaa

SEQ ID NO: 672259 - RNA, 19 nt, Artificial Sequence
  Description of Artificial Sequence: Synthetic oligonucleotide
agaaccugcucgcccaacu

SEQ ID NO: 672260 - RNA, 19 nt, Artificial Sequence
  Description of Artificial Sequence: Synthetic oligonucleotide
uccccuuuuagcuggugau

SEQ ID NO: 672261 - RNA, 19 nt, Artificial Sequence
  Description of Artificial Sequence: Synthetic oligonucleotide
auuugcguugcagguguuc

SEQ ID NO: 672262 - RNA, 19 nt, Artificial Sequence
  Description of Artificial Sequence: Synthetic oligonucleotide
guugauaggcccagccugc

SEQ ID NO: 672263 - RNA, 19 nt, Artificial Sequence
  Description of Artificial Sequence: Synthetic oligonucleotide
cagccuguacuucucgaag

SEQ ID NO: 672264 - RNA, 19 nt, Artificial Sequence
  Description of Artificial Sequence: Synthetic oligonucleotide
aguuuccgcuuauaucgcu

SEQ ID NO: 672265 - RNA, 19 nt, Artificial Sequence
  Description of Artificial Sequence: Synthetic oligonucleotide
uccuucuugcgaguguuac

SEQ ID NO: 672266 - RNA, 19 nt, Artificial Sequence
  Description of Artificial Sequence: Synthetic oligonucleotide
agggcaagcccugguuucc

SEQ ID NO: 672267 - RNA, 19 nt, Artificial Sequence
  Description of Artificial Sequence: Synthetic oligonucleotide
auaaaccuccaccuuccuu

SEQ ID NO: 672268 - RNA, 19 nt, Artificial Sequence
  Description of Artificial Sequence: Synthetic oligonucleotide
aauauccuccugagcccuc

SEQ ID NO: 672269 - RNA, 19 nt, Artificial Sequence
  Description of Artificial Sequence: Synthetic oligonucleotide
ucggccucgagaagggcaa

SEQ ID NO: 672270 - RNA, 19 nt, Artificial Sequence
  Description of Artificial Sequence: Synthetic oligonucleotide
gauucgucucagggcaucc

SEQ ID NO: 672271 - RNA, 19 nt, Artificial Sequence
  Description of Artificial Sequence: Synthetic oligonucleotide
uggcacucagcuugguuaa

SEQ ID NO: 672272 - RNA, 19 nt, Artificial Sequence
  Description of Artificial Sequence: Synthetic oligonucleotide
gaugcagugggaagagcca

SEQ ID NO: 672273 - RNA, 19 nt, Artificial Sequence
  Description of Artificial Sequence: Synthetic oligonucleotide
guuuccgcuuauaucgcug

SEQ ID NO: 672274 - RNA, 19 nt, Artificial Sequence
  Description of Artificial Sequence: Synthetic oligonucleotide
cagcuugguuaauuccacc

SEQ ID NO: 672275 - RNA, 19 nt, Artificial Sequence
  Description of Artificial Sequence: Synthetic oligonucleotide
ucccgcuguuccuugggug

SEQ ID NO: 672276 - RNA, 19 nt, Artificial Sequence
  Description of Artificial Sequence: Synthetic oligonucleotide
uacacacggugaaaaucau

SEQ ID NO: 672277 - RNA, 19 nt, Artificial Sequence
  Description of Artificial Sequence: Synthetic oligonucleotide
gcaccaguagccccaaacc

SEQ ID NO: 672278 - RNA, 19 nt, Artificial Sequence
  Description of Artificial Sequence: Synthetic oligonucleotide
ugguaagcccuuuccuggu

SEQ ID NO: 672279 - RNA, 19 nt, Artificial Sequence
  Description of Artificial Sequence: Synthetic oligonucleotide
uggccugccucuuuccagu

SEQ ID NO: 672280 - RNA, 19 nt, Artificial Sequence
  Description of Artificial Sequence: Synthetic oligonucleotide
ccucuuguuaagcuccagg

SEQ ID NO: 672281 - RNA, 19 nt, Artificial Sequence
  Description of Artificial Sequence: Synthetic oligonucleotide
uucuuucccugggcuaggg

SEQ ID NO: 672282 - RNA, 19 nt, Artificial Sequence
  Description of Artificial Sequence: Synthetic oligonucleotide
agcccuuuccugguggaag

SEQ ID NO: 672283 - RNA, 19 nt, Artificial Sequence
  Description of Artificial Sequence: Synthetic oligonucleotide
cuggguucauggagucugg

SEQ ID NO: 672284 - RNA, 19 nt, Artificial Sequence
  Description of Artificial Sequence: Synthetic oligonucleotide
aaguuggcgucauccuuuu

SEQ ID NO: 672285 - RNA, 19 nt, Artificial Sequence
  Description of Artificial Sequence: Synthetic oligonucleotide
agcgguugacgaugaggag

SEQ ID NO: 672286 - RNA, 19 nt, Artificial Sequence
  Description of Artificial Sequence: Synthetic oligonucleotide
aucucucgaagccgagucu

SEQ ID NO: 672287 - RNA, 19 nt, Artificial Sequence
  Description of Artificial Sequence: Synthetic oligonucleotide
cucgaagccgagucugcac

SEQ ID NO: 672288 - RNA, 19 nt, Artificial Sequence
  Description of Artificial Sequence: Synthetic oligonucleotide
guacauagggcuggguuca

SEQ ID NO: 672289 - RNA, 19 nt, Artificial Sequence
  Description of Artificial Sequence: Synthetic oligonucleotide
ugcccuugagagagcugag

SEQ ID NO: 672290 - RNA, 19 nt, Artificial Sequence
  Description of Artificial Sequence: Synthetic oligonucleotide
aucucacgguugauaggcc

SEQ ID NO: 672291 - RNA, 19 nt, Artificial Sequence
  Description of Artificial Sequence: Synthetic oligonucleotide
gcuucuacagccuuccucu

SEQ ID NO: 672292 - RNA, 19 nt, Artificial Sequence
  Description of Artificial Sequence: Synthetic oligonucleotide
caccaguagccccaaacca

SEQ ID NO: 672293 - RNA, 19 nt, Artificial Sequence
  Description of Artificial Sequence: Synthetic oligonucleotide
gaaccugcucgcccaacuc

SEQ ID NO: 672294 - RNA, 19 nt, Artificial Sequence
  Description of Artificial Sequence: Synthetic oligonucleotide
aucuagguacauagggcug

SEQ ID NO: 672295 - RNA, 19 nt, Artificial Sequence
  Description of Artificial Sequence: Synthetic oligonucleotide
cuggcgcucaugacaucgg

SEQ ID NO: 672296 - RNA, 19 nt, Artificial Sequence
  Description of Artificial Sequence: Synthetic oligonucleotide
ugcguugcagguguucuau

SEQ ID NO: 672297 - RNA, 19 nt, Artificial Sequence
  Description of Artificial Sequence: Synthetic oligonucleotide
cacccaauuugcguugcag

SEQ ID NO: 672298 - RNA, 19 nt, Artificial Sequence
  Description of Artificial Sequence: Synthetic oligonucleotide
cugcucguuggccgcaggg

SEQ ID NO: 672299 - RNA, 19 nt, Artificial Sequence
  Description of Artificial Sequence: Synthetic oligonucleotide
acccacggugccucaguuc

SEQ ID NO: 672300 - RNA, 19 nt, Artificial Sequence
  Description of Artificial Sequence: Synthetic oligonucleotide
cucgcuugggucuggccuc

SEQ ID NO: 672301 - RNA, 19 nt, Artificial Sequence
  Description of Artificial Sequence: Synthetic oligonucleotide
gcuuauaucgcugggcauc

SEQ ID NO: 672302 - RNA, 19 nt, Artificial Sequence
  Description of Artificial Sequence: Synthetic oligonucleotide
caaccgcgccuuauacucc

SEQ ID NO: 672303 - RNA, 19 nt, Artificial Sequence
  Description of Artificial Sequence: Synthetic oligonucleotide
caaggcuggauguuauaaa

SEQ ID NO: 672304 - RNA, 19 nt, Artificial Sequence
  Description of Artificial Sequence: Synthetic oligonucleotide
cucacgguugauaggccca

SEQ ID NO: 672305 - RNA, 19 nt, Artificial Sequence
  Description of Artificial Sequence: Synthetic oligonucleotide
gccgcguugcacuuggggc

SEQ ID NO: 672306 - RNA, 19 nt, Artificial Sequence
  Description of Artificial Sequence: Synthetic oligonucleotide
aguuuaaaguuggcgucau

SEQ ID NO: 672307 - RNA, 19 nt, Artificial Sequence
  Description of Artificial Sequence: Synthetic oligonucleotide
gcgguugacgaugaggagc

SEQ ID NO: 672308 - RNA, 19 nt, Artificial Sequence
  Description of Artificial Sequence: Synthetic oligonucleotide
aaguccccugagguucagg

SEQ ID NO: 672309 - RNA, 19 nt, Artificial Sequence
  Description of Artificial Sequence: Synthetic oligonucleotide
ugggcccggaguuugccaa

SEQ ID NO: 672310 - RNA, 19 nt, Artificial Sequence
  Description of Artificial Sequence: Synthetic oligonucleotide
ccacucacgagugagcccc

SEQ ID NO: 672311 - RNA, 19 nt, Artificial Sequence
  Description of Artificial Sequence: Synthetic oligonucleotide
ugcaccuuaucccgcuguu

SEQ ID NO: 672312 - RNA, 19 nt, Artificial Sequence
  Description of Artificial Sequence: Synthetic oligonucleotide
accaguagccccaaaccau

SEQ ID NO: 672313 - RNA, 19 nt, Artificial Sequence
  Description of Artificial Sequence: Synthetic oligonucleotide
cuucccguucccgaaguuc

SEQ ID NO: 672314 - RNA, 19 nt, Artificial Sequence
  Description of Artificial Sequence: Synthetic oligonucleotide
ugccaaucucagccuguac

SEQ ID NO: 672315 - RNA, 19 nt, Artificial Sequence
  Description of Artificial Sequence: Synthetic oligonucleotide
accuuaucccgcuguuccu

SEQ ID NO: 672316 - RNA, 19 nt, Artificial Sequence
  Description of Artificial Sequence: Synthetic oligonucleotide
gguuaauuccaccucuccu

SEQ ID NO: 672317 - RNA, 19 nt, Artificial Sequence
  Description of Artificial Sequence: Synthetic oligonucleotide
agccgggaaauauccuccu

SEQ ID NO: 672318 - RNA, 19 nt, Artificial Sequence
  Description of Artificial Sequence: Synthetic oligonucleotide
cucggaugcggccccgaag

SEQ ID NO: 672319 - RNA, 19 nt, Artificial Sequence
  Description of Artificial Sequence: Synthetic oligonucleotide
gagugagccccguccuggc

SEQ ID NO: 672320 - RNA, 19 nt, Artificial Sequence
  Description of Artificial Sequence: Synthetic oligonucleotide
ggucaaccgcgccuuauac

SEQ ID NO: 672321 - RNA, 19 nt, Artificial Sequence
  Description of Artificial Sequence: Synthetic oligonucleotide
guuuaaaguuggcgucauc

SEQ ID NO: 672322 - RNA, 19 nt, Artificial Sequence
  Description of Artificial Sequence: Synthetic oligonucleotide
aggguauauggauguucaa

SEQ ID NO: 672323 - RNA, 19 nt, Artificial Sequence
  Description of Artificial Sequence: Synthetic oligonucleotide
gcagccgggaaauauccuc

SEQ ID NO: 672324 - RNA, 19 nt, Artificial Sequence
  Description of Artificial Sequence: Synthetic oligonucleotide
cucggccucgagaagggca

SEQ ID NO: 672325 - RNA, 19 nt, Artificial Sequence
  Description of Artificial Sequence: Synthetic oligonucleotide
cgaguguuacagcaggggc

SEQ ID NO: 672326 - RNA, 19 nt, Artificial Sequence
  Description of Artificial Sequence: Synthetic oligonucleotide
guuaagcuccagggccugg

SEQ ID NO: 672327 - RNA, 19 nt, Artificial Sequence
  Description of Artificial Sequence: Synthetic oligonucleotide
aguagccccaaaccaucua

SEQ ID NO: 672328 - RNA, 19 nt, Artificial Sequence
  Description of Artificial Sequence: Synthetic oligonucleotide
cucauagcggccccucaca

SEQ ID NO: 672329 - RNA, 19 nt, Artificial Sequence
  Description of Artificial Sequence: Synthetic oligonucleotide
gauuaugauucuggagacu

SEQ ID NO: 672330 - RNA, 19 nt, Artificial Sequence
  Description of Artificial Sequence: Synthetic oligonucleotide
caggaaaagauggcacuca

SEQ ID NO: 672331 - RNA, 19 nt, Artificial Sequence
  Description of Artificial Sequence: Synthetic oligonucleotide
gguaggggccccaggacag

SEQ ID NO: 672332 - RNA, 19 nt, Artificial Sequence
  Description of Artificial Sequence: Synthetic oligonucleotide
uuauaucgcugggcauccc

SEQ ID NO: 672333 - RNA, 19 nt, Artificial Sequence
  Description of Artificial Sequence: Synthetic oligonucleotide
cagcagccgcccauuuugc

SEQ ID NO: 672334 - RNA, 19 nt, Artificial Sequence
  Description of Artificial Sequence: Synthetic oligonucleotide
agcagccgcccauuuugcu

SEQ ID NO: 672335 - RNA, 19 nt, Artificial Sequence
  Description of Artificial Sequence: Synthetic oligonucleotide
ggcuagggcauugaggcca

SEQ ID NO: 672336 - RNA, 19 nt, Artificial Sequence
  Description of Artificial Sequence: Synthetic oligonucleotide
auauccuccugagcccucu

SEQ ID NO: 672337 - RNA, 19 nt, Artificial Sequence
  Description of Artificial Sequence: Synthetic oligonucleotide
cgaaguucucgcuuggguc

SEQ ID NO: 672338 - RNA, 19 nt, Artificial Sequence
  Description of Artificial Sequence: Synthetic oligonucleotide
gagcguggcgucgucggug

SEQ ID NO: 672339 - RNA, 19 nt, Artificial Sequence
  Description of Artificial Sequence: Synthetic oligonucleotide
ucuuucucucgggcagccc

SEQ ID NO: 672340 - RNA, 19 nt, Artificial Sequence
  Description of Artificial Sequence: Synthetic oligonucleotide
accugggagagugcccuag

SEQ ID NO: 672341 - RNA, 19 nt, Artificial Sequence
  Description of Artificial Sequence: Synthetic oligonucleotide
cuuuugcugucaggaguac

SEQ ID NO: 672342 - RNA, 19 nt, Artificial Sequence
  Description of Artificial Sequence: Synthetic oligonucleotide
aggucaaccgcgccuuaua

SEQ ID NO: 672343 - RNA, 19 nt, Artificial Sequence
  Description of Artificial Sequence: Synthetic oligonucleotide
gguaagcccuuuccuggug

SEQ ID NO: 672344 - RNA, 19 nt, Artificial Sequence
  Description of Artificial Sequence: Synthetic oligonucleotide
auaggcccagccugcucgu

SEQ ID NO: 672345 - RNA, 19 nt, Artificial Sequence
  Description of Artificial Sequence: Synthetic oligonucleotide
gaagggcaagcccugguuu

SEQ ID NO: 672346 - RNA, 19 nt, Artificial Sequence
  Description of Artificial Sequence: Synthetic oligonucleotide
cucaguucccgaggacagc

SEQ ID NO: 672347 - RNA, 19 nt, Artificial Sequence
  Description of Artificial Sequence: Synthetic oligonucleotide
uggguucauggagucugga

SEQ ID NO: 672348 - RNA, 19 nt, Artificial Sequence
  Description of Artificial Sequence: Synthetic oligonucleotide
gauccgcucugacaugagu

SEQ ID NO: 672349 - RNA, 19 nt, Artificial Sequence
  Description of Artificial Sequence: Synthetic oligonucleotide
ccaguagccccaaaccauc

SEQ ID NO: 672350 - RNA, 19 nt, Artificial Sequence
  Description of Artificial Sequence: Synthetic oligonucleotide
ucucggaugcggccccgaa

SEQ ID NO: 672351 - RNA, 19 nt, Artificial Sequence
  Description of Artificial Sequence: Synthetic oligonucleotide
cacugcguccuucuugcga

SEQ ID NO: 672352 - RNA, 19 nt, Artificial Sequence
  Description of Artificial Sequence: Synthetic oligonucleotide
uccuggcacccacggugcc

SEQ ID NO: 672353 - RNA, 19 nt, Artificial Sequence
  Description of Artificial Sequence: Synthetic oligonucleotide
ccggauucgucucagggca

SEQ ID NO: 672354 - RNA, 19 nt, Artificial Sequence
  Description of Artificial Sequence: Synthetic oligonucleotide
cagaucugacauucaggaa

SEQ ID NO: 672355 - RNA, 19 nt, Artificial Sequence
  Description of Artificial Sequence: Synthetic oligonucleotide
ggagagugcccuaggcugc

SEQ ID NO: 672356 - RNA, 19 nt, Artificial Sequence
  Description of Artificial Sequence: Synthetic oligonucleotide
ccaguagcgguugacgaug

SEQ ID NO: 672357 - RNA, 19 nt, Artificial Sequence
  Description of Artificial Sequence: Synthetic oligonucleotide
ccggaguuugccaaucuca

SEQ ID NO: 672358 - RNA, 19 nt, Artificial Sequence
  Description of Artificial Sequence: Synthetic oligonucleotide
ccucgagaagggcaagccc

SEQ ID NO: 672359 - RNA, 19 nt, Artificial Sequence
  Description of Artificial Sequence: Synthetic oligonucleotide
cacucacgagugagccccg

SEQ ID NO: 672360 - RNA, 19 nt, Artificial Sequence
  Description of Artificial Sequence: Synthetic oligonucleotide
gugccucaguucccgagga

SEQ ID NO: 672361 - RNA, 19 nt, Artificial Sequence
  Description of Artificial Sequence: Synthetic oligonucleotide
gucgucgguggccugccuc

SEQ ID NO: 672362 - RNA, 19 nt, Artificial Sequence
  Description of Artificial Sequence: Synthetic oligonucleotide
gcggccccgaagcucaucc

SEQ ID NO: 672363 - RNA, 19 nt, Artificial Sequence
  Description of Artificial Sequence: Synthetic oligonucleotide
gucaaccgcgccuuauacu

SEQ ID NO: 672364 - RNA, 19 nt, Artificial Sequence
  Description of Artificial Sequence: Synthetic oligonucleotide
ugaggagcguggcgucguc

SEQ ID NO: 672365 - RNA, 19 nt, Artificial Sequence
  Description of Artificial Sequence: Synthetic oligonucleotide
guccuggcacccacggugc

SEQ ID NO: 672366 - RNA, 19 nt, Artificial Sequence
  Description of Artificial Sequence: Synthetic oligonucleotide
augaggagcguggcgucgu

SEQ ID NO: 672367 - RNA, 19 nt, Artificial Sequence
  Description of Artificial Sequence: Synthetic oligonucleotide
cucacgagugagccccguc

SEQ ID NO: 672368 - RNA, 19 nt, Artificial Sequence
  Description of Artificial Sequence: Synthetic oligonucleotide
cugccggauucgucucagg

SEQ ID NO: 672369 - RNA, 19 nt, Artificial Sequence
  Description of Artificial Sequence: Synthetic oligonucleotide
guggcacccaauuugcguu

SEQ ID NO: 672370 - RNA, 19 nt, Artificial Sequence
  Description of Artificial Sequence: Synthetic oligonucleotide
ccaguuugcgccgcagccg

SEQ ID NO: 672371 - RNA, 19 nt, Artificial Sequence
  Description of Artificial Sequence: Synthetic oligonucleotide
cuccugcaugcaccaguag

SEQ ID NO: 672372 - RNA, 19 nt, Artificial Sequence
  Description of Artificial Sequence: Synthetic oligonucleotide
ucccguucccgaaguucuc

SEQ ID NO: 672373 - RNA, 19 nt, Artificial Sequence
  Description of Artificial Sequence: Synthetic oligonucleotide
aucgcugggcauccccuuu

SEQ ID NO: 672374 - RNA, 19 nt, Artificial Sequence
  Description of Artificial Sequence: Synthetic oligonucleotide
ggggaugcagugggaagag

SEQ ID NO: 672375 - RNA, 19 nt, Artificial Sequence
  Description of Artificial Sequence: Synthetic oligonucleotide
ccgggaaauauccuccuga

SEQ ID NO: 672376 - RNA, 19 nt, Artificial Sequence
  Description of Artificial Sequence: Synthetic oligonucleotide
uuccagggguuagggccag

SEQ ID NO: 672377 - RNA, 19 nt, Artificial Sequence
  Description of Artificial Sequence: Synthetic oligonucleotide
ggccccgaagcucauccac

SEQ ID NO: 672378 - RNA, 19 nt, Artificial Sequence
  Description of Artificial Sequence: Synthetic oligonucleotide
ccccuaggguauauggaug

SEQ ID NO: 672379 - RNA, 19 nt, Artificial Sequence
  Description of Artificial Sequence: Synthetic oligonucleotide
guaggggccccaggacagg

SEQ ID NO: 672380 - RNA, 19 nt, Artificial Sequence
  Description of Artificial Sequence: Synthetic oligonucleotide
ggguucauggagucuggaa

SEQ ID NO: 672381 - RNA, 19 nt, Artificial Sequence
  Description of Artificial Sequence: Synthetic oligonucleotide
ugccugccggauucgucuc

SEQ ID NO: 672382 - RNA, 19 nt, Artificial Sequence
  Description of Artificial Sequence: Synthetic oligonucleotide
cacggcuggaucucucgaa

SEQ ID NO: 672383 - RNA, 19 nt, Artificial Sequence
  Description of Artificial Sequence: Synthetic oligonucleotide
uugcgccgcagccgggaaa

SEQ ID NO: 672384 - RNA, 19 nt, Artificial Sequence
  Description of Artificial Sequence: Synthetic oligonucleotide
aaccugggagagugcccua

SEQ ID NO: 672385 - RNA, 19 nt, Artificial Sequence
  Description of Artificial Sequence: Synthetic oligonucleotide
ccgcuuauaucgcugggca

SEQ ID NO: 672386 - RNA, 19 nt, Artificial Sequence
  Description of Artificial Sequence: Synthetic oligonucleotide
gcccaguagcgguugacga

SEQ ID NO: 672387 - RNA, 19 nt, Artificial Sequence
  Description of Artificial Sequence: Synthetic oligonucleotide
gagagugcccuaggcugca

SEQ ID NO: 672388 - RNA, 19 nt, Artificial Sequence
  Description of Artificial Sequence: Synthetic oligonucleotide
uauccuccugagcccucuu

SEQ ID NO: 672389 - RNA, 19 nt, Artificial Sequence
  Description of Artificial Sequence: Synthetic oligonucleotide
caguucccgaggacagcuc

SEQ ID NO: 672390 - RNA, 19 nt, Artificial Sequence
  Description of Artificial Sequence: Synthetic oligonucleotide
gggaucccacucacgagug

SEQ ID NO: 672391 - RNA, 19 nt, Artificial Sequence
  Description of Artificial Sequence: Synthetic oligonucleotide
ccucauagcggccccucac

SEQ ID NO: 672392 - RNA, 19 nt, Artificial Sequence
  Description of Artificial Sequence: Synthetic oligonucleotide
guuugcgccgcagccggga

SEQ ID NO: 672393 - RNA, 19 nt, Artificial Sequence
  Description of Artificial Sequence: Synthetic oligonucleotide
ccugguuuccagggguuag

SEQ ID NO: 672394 - RNA, 19 nt, Artificial Sequence
  Description of Artificial Sequence: Synthetic oligonucleotide
guucucggaugcggccccg

SEQ ID NO: 672395 - RNA, 19 nt, Artificial Sequence
  Description of Artificial Sequence: Synthetic oligonucleotide
ucgcuugggucuggccuca

SEQ ID NO: 672396 - RNA, 19 nt, Artificial Sequence
  Description of Artificial Sequence: Synthetic oligonucleotide
cucaaggcuggauguuaua

SEQ ID NO: 672397 - RNA, 19 nt, Artificial Sequence
  Description of Artificial Sequence: Synthetic oligonucleotide
cacgguugauaggcccagc

SEQ ID NO: 672398 - RNA, 19 nt, Artificial Sequence
  Description of Artificial Sequence: Synthetic oligonucleotide
guguucuaucugcuccucu

SEQ ID NO: 672399 - RNA, 19 nt, Artificial Sequence
  Description of Artificial Sequence: Synthetic oligonucleotide
gccgggaaauauccuccug

SEQ ID NO: 672400 - RNA, 19 nt, Artificial Sequence
  Description of Artificial Sequence: Synthetic oligonucleotide
uucucggaugcggccccga

SEQ ID NO: 672401 - RNA, 19 nt, Artificial Sequence
  Description of Artificial Sequence: Synthetic oligonucleotide
ugggcaccaaaggccgcgu

SEQ ID NO: 672402 - RNA, 19 nt, Artificial Sequence
  Description of Artificial Sequence: Synthetic oligonucleotide
gguucagguucagcugaug

SEQ ID NO: 672403 - RNA, 19 nt, Artificial Sequence
  Description of Artificial Sequence: Synthetic oligonucleotide
cccaauuugcguugcaggu

SEQ ID NO: 672404 - RNA, 19 nt, Artificial Sequence
  Description of Artificial Sequence: Synthetic oligonucleotide
cccguucccgaaguucucg

SEQ ID NO: 672405 - RNA, 19 nt, Artificial Sequence
  Description of Artificial Sequence: Synthetic oligonucleotide
guuggccgcagggauccca

SEQ ID NO: 672406 - RNA, 19 nt, Artificial Sequence
  Description of Artificial Sequence: Synthetic oligonucleotide
gcaggugguaagcccuuuc

SEQ ID NO: 672407 - RNA, 19 nt, Artificial Sequence
  Description of Artificial Sequence: Synthetic oligonucleotide
cugagacuugaggccaaga

SEQ ID NO: 672408 - RNA, 19 nt, Artificial Sequence
  Description of Artificial Sequence: Synthetic oligonucleotide
cccacucacgagugagccc

SEQ ID NO: 672409 - RNA, 19 nt, Artificial Sequence
  Description of Artificial Sequence: Synthetic oligonucleotide
ccgaggacagcucccucug

SEQ ID NO: 672410 - RNA, 19 nt, Artificial Sequence
  Description of Artificial Sequence: Synthetic oligonucleotide
uacauagggcuggguucau

SEQ ID NO: 672411 - RNA, 19 nt, Artificial Sequence
  Description of Artificial Sequence: Synthetic oligonucleotide
ggauucgucucagggcauc

SEQ ID NO: 672412 - RNA, 19 nt, Artificial Sequence
  Description of Artificial Sequence: Synthetic oligonucleotide
ccuucuugcgaguguuaca

SEQ ID NO: 672413 - RNA, 19 nt, Artificial Sequence
  Description of Artificial Sequence: Synthetic oligonucleotide
ggccgcagggaucccacuc

SEQ ID NO: 672414 - RNA, 19 nt, Artificial Sequence
  Description of Artificial Sequence: Synthetic oligonucleotide
ggcacccaauuugcguugc

SEQ ID NO: 672415 - RNA, 19 nt, Artificial Sequence
  Description of Artificial Sequence: Synthetic oligonucleotide
gccgcagggaucccacuca

SEQ ID NO: 672416 - RNA, 19 nt, Artificial Sequence
  Description of Artificial Sequence: Synthetic oligonucleotide
gccccuaggguauauggau

SEQ ID NO: 672417 - RNA, 19 nt, Artificial Sequence
  Description of Artificial Sequence: Synthetic oligonucleotide
cguucagcugccaucagcu

SEQ ID NO: 672418 - RNA, 19 nt, Artificial Sequence
  Description of Artificial Sequence: Synthetic oligonucleotide
caucggagaagggcuucca

SEQ ID NO: 672419 - RNA, 19 nt, Artificial Sequence
  Description of Artificial Sequence: Synthetic oligonucleotide
acggugccucaguucccga

SEQ ID NO: 672420 - RNA, 19 nt, Artificial Sequence
  Description of Artificial Sequence: Synthetic oligonucleotide
ccgcccauuuugcuccugc

SEQ ID NO: 672421 - RNA, 19 nt, Artificial Sequence
  Description of Artificial Sequence: Synthetic oligonucleotide
ccgcguugcacuuggggca

SEQ ID NO: 672422 - RNA, 19 nt, Artificial Sequence
  Description of Artificial Sequence: Synthetic oligonucleotide
cauccccuuuuagcuggug

SEQ ID NO: 672423 - RNA, 19 nt, Artificial Sequence
  Description of Artificial Sequence: Synthetic oligonucleotide
cacgagugagccccguccu

SEQ ID NO: 672424 - RNA, 19 nt, Artificial Sequence
  Description of Artificial Sequence: Synthetic oligonucleotide
cccggaguuugccaaucuc

SEQ ID NO: 672425 - RNA, 19 nt, Artificial Sequence
  Description of Artificial Sequence: Synthetic oligonucleotide
acucacgagugagccccgu

SEQ ID NO: 672426 - RNA, 19 nt, Artificial Sequence
  Description of Artificial Sequence: Synthetic oligonucleotide
gcacugcguccuucuugcg

SEQ ID NO: 672427 - RNA, 19 nt, Artificial Sequence
  Description of Artificial Sequence: Synthetic oligonucleotide
cccuaggguauauggaugu

SEQ ID NO: 672428 - RNA, 19 nt, Artificial Sequence
  Description of Artificial Sequence: Synthetic oligonucleotide
ggccaagaaccugcucgcc

SEQ ID NO: 672429 - RNA, 19 nt, Artificial Sequence
  Description of Artificial Sequence: Synthetic oligonucleotide
cucagguucucggccucga

SEQ ID NO: 672430 - RNA, 19 nt, Artificial Sequence
  Description of Artificial Sequence: Synthetic oligonucleotide
cccgaaguucucgcuuggg

SEQ ID NO: 672431 - RNA, 19 nt, Artificial Sequence
  Description of Artificial Sequence: Synthetic oligonucleotide
agccgcccauuuugcuccu

SEQ ID NO: 672432 - RNA, 19 nt, Artificial Sequence
  Description of Artificial Sequence: Synthetic oligonucleotide
ccugcuuaguggcacccaa

SEQ ID NO: 672433 - RNA, 19 nt, Artificial Sequence
  Description of Artificial Sequence: Synthetic oligonucleotide
ggcgucgucgguggccugc

SEQ ID NO: 672434 - RNA, 19 nt, Artificial Sequence
  Description of Artificial Sequence: Synthetic oligonucleotide
cucgaaguuuccgcuuaua

SEQ ID NO: 672435 - RNA, 19 nt, Artificial Sequence
  Description of Artificial Sequence: Synthetic oligonucleotide
uggcacccacggugccuca

SEQ ID NO: 672436 - RNA, 19 nt, Artificial Sequence
  Description of Artificial Sequence: Synthetic oligonucleotide
accugagacuugaggccaa

SEQ ID NO: 672437 - RNA, 19 nt, Artificial Sequence
  Description of Artificial Sequence: Synthetic oligonucleotide
cugcauaaaccuccaccuu

SEQ ID NO: 672438 - RNA, 19 nt, Artificial Sequence
  Description of Artificial Sequence: Synthetic oligonucleotide
ggcuacagguaggggcccc

SEQ ID NO: 672439 - RNA, 19 nt, Artificial Sequence
  Description of Artificial Sequence: Synthetic oligonucleotide
gcuuaguggcacccaauuu

SEQ ID NO: 672440 - RNA, 19 nt, Artificial Sequence
  Description of Artificial Sequence: Synthetic oligonucleotide
gcaccuuaucccgcuguuc

SEQ ID NO: 672441 - RNA, 19 nt, Artificial Sequence
  Description of Artificial Sequence: Synthetic oligonucleotide
ggagaagggcuuccacagu

SEQ ID NO: 672442 - RNA, 19 nt, Artificial Sequence
  Description of Artificial Sequence: Synthetic oligonucleotide
cugcuuaguggcacccaau

SEQ ID NO: 672443 - RNA, 19 nt, Artificial Sequence
  Description of Artificial Sequence: Synthetic oligonucleotide
gcguugcagguguucuauc

SEQ ID NO: 672444 - RNA, 19 nt, Artificial Sequence
  Description of Artificial Sequence: Synthetic oligonucleotide
ccgcgccuuauacuccuug

SEQ ID NO: 672445 - RNA, 19 nt, Artificial Sequence
  Description of Artificial Sequence: Synthetic oligonucleotide
guuagggccagggcaucau

SEQ ID NO: 672446 - RNA, 19 nt, Artificial Sequence
  Description of Artificial Sequence: Synthetic oligonucleotide
ggguuaggccagcucucaa

SEQ ID NO: 672447 - RNA, 19 nt, Artificial Sequence
  Description of Artificial Sequence: Synthetic oligonucleotide
cguugcagguguucuaucu

SEQ ID NO: 672448 - RNA, 19 nt, Artificial Sequence
  Description of Artificial Sequence: Synthetic oligonucleotide
ccugcucguuggccgcagg

SEQ ID NO: 672449 - RNA, 19 nt, Artificial Sequence
  Description of Artificial Sequence: Synthetic oligonucleotide
ggcacccacggugccucag

SEQ ID NO: 672450 - RNA, 19 nt, Artificial Sequence
  Description of Artificial Sequence: Synthetic oligonucleotide
ggcccuucccguucccgaa

SEQ ID NO: 672451 - RNA, 19 nt, Artificial Sequence
  Description of Artificial Sequence: Synthetic oligonucleotide
gccuguacuucucgaaguu

SEQ ID NO: 672452 - RNA, 19 nt, Artificial Sequence
  Description of Artificial Sequence: Synthetic oligonucleotide
ccucuggcgcucaugacau

SEQ ID NO: 672453 - RNA, 19 nt, Artificial Sequence
  Description of Artificial Sequence: Synthetic oligonucleotide
gcacccaauuugcguugca

SEQ ID NO: 672454 - RNA, 19 nt, Artificial Sequence
  Description of Artificial Sequence: Synthetic oligonucleotide
ugcggccccgaagcucauc

SEQ ID NO: 672455 - RNA, 19 nt, Artificial Sequence
  Description of Artificial Sequence: Synthetic oligonucleotide
caaaggccgcguugcacuu

SEQ ID NO: 672456 - RNA, 19 nt, Artificial Sequence
  Description of Artificial Sequence: Synthetic oligonucleotide
cguggcgucgucgguggcc

SEQ ID NO: 672457 - RNA, 19 nt, Artificial Sequence
  Description of Artificial Sequence: Synthetic oligonucleotide
guccccugagguucagguu

SEQ ID NO: 672458 - RNA, 19 nt, Artificial Sequence
  Description of Artificial Sequence: Synthetic oligonucleotide
gggguuagggccagggcau

SEQ ID NO: 672459 - RNA, 19 nt, Artificial Sequence
  Description of Artificial Sequence: Synthetic oligonucleotide
gcgccuuauacuccuugau

SEQ ID NO: 672460 - RNA, 19 nt, Artificial Sequence
  Description of Artificial Sequence: Synthetic oligonucleotide
cccuaggcugcagaucuga

SEQ ID NO: 672461 - RNA, 19 nt, Artificial Sequence
  Description of Artificial Sequence: Synthetic oligonucleotide
aggccgcguugcacuuggg

SEQ ID NO: 672462 - RNA, 19 nt, Artificial Sequence
  Description of Artificial Sequence: Synthetic oligonucleotide
ccuuuuagcuggugauuau

SEQ ID NO: 672463 - RNA, 19 nt, Artificial Sequence
  Description of Artificial Sequence: Synthetic oligonucleotide
cccgaggacagcucccucu

SEQ ID NO: 672464 - RNA, 19 nt, Artificial Sequence
  Description of Artificial Sequence: Synthetic oligonucleotide
ggguuagggccagggcauc

SEQ ID NO: 672465 - RNA, 19 nt, Artificial Sequence
  Description of Artificial Sequence: Synthetic oligonucleotide
gcggccccucacacacucg

SEQ ID NO: 672466 - RNA, 19 nt, Artificial Sequence
  Description of Artificial Sequence: Synthetic oligonucleotide
cccaguagcgguugacgau

SEQ ID NO: 672467 - RNA, 19 nt, Artificial Sequence
  Description of Artificial Sequence: Synthetic oligonucleotide
cugcguccuucuugcgagu

SEQ ID NO: 672468 - RNA, 19 nt, Artificial Sequence
  Description of Artificial Sequence: Synthetic oligonucleotide
caggucaaccgcgccuuau

SEQ ID NO: 672469 - RNA, 19 nt, Artificial Sequence
  Description of Artificial Sequence: Synthetic oligonucleotide
cgcccaacucauccuucuc

SEQ ID NO: 672470 - RNA, 19 nt, Artificial Sequence
  Description of Artificial Sequence: Synthetic oligonucleotide
cacccacggugccucaguu

SEQ ID NO: 672471 - RNA, 19 nt, Artificial Sequence
  Description of Artificial Sequence: Synthetic oligonucleotide
cgguugauaggcccagccu

SEQ ID NO: 672472 - RNA, 19 nt, Artificial Sequence
  Description of Artificial Sequence: Synthetic oligonucleotide
accgcgccuuauacuccuu

SEQ ID NO: 672473 - RNA, 19 nt, Artificial Sequence
  Description of Artificial Sequence: Synthetic oligonucleotide
ccgcuguuccuugggugca

SEQ ID NO: 672474 - RNA, 19 nt, Artificial Sequence
  Description of Artificial Sequence: Synthetic oligonucleotide
gccgcccauuuugcuccug

SEQ ID NO: 672475 - RNA, 19 nt, Artificial Sequence
  Description of Artificial Sequence: Synthetic oligonucleotide
cugcagcagccgcccauuu

SEQ ID NO: 672476 - RNA, 19 nt, Artificial Sequence
  Description of Artificial Sequence: Synthetic oligonucleotide
cccuucccguucccgaagu

SEQ ID NO: 672477 - RNA, 19 nt, Artificial Sequence
  Description of Artificial Sequence: Synthetic oligonucleotide
cgcuuauaucgcugggcau

SEQ ID NO: 672478 - RNA, 19 nt, Artificial Sequence
  Description of Artificial Sequence: Synthetic oligonucleotide
gguugacgaugaggagcgu

SEQ ID NO: 672479 - RNA, 19 nt, Artificial Sequence
  Description of Artificial Sequence: Synthetic oligonucleotide
cccugguuuccagggguua

SEQ ID NO: 672480 - RNA, 19 nt, Artificial Sequence
  Description of Artificial Sequence: Synthetic oligonucleotide
gggcccggaguuugccaau

SEQ ID NO: 672481 - RNA, 19 nt, Artificial Sequence
  Description of Artificial Sequence: Synthetic oligonucleotide
ggcacucagcuugguuaau

SEQ ID NO: 672482 - RNA, 19 nt, Artificial Sequence
  Description of Artificial Sequence: Synthetic oligonucleotide
ccuaggguauauggauguu

SEQ ID NO: 672483 - RNA, 19 nt, Artificial Sequence
  Description of Artificial Sequence: Synthetic oligonucleotide
ccaaaccaucuagguacau

SEQ ID NO: 672484 - RNA, 19 nt, Artificial Sequence
  Description of Artificial Sequence: Synthetic oligonucleotide
cggccccgaagcucaucca

SEQ ID NO: 672485 - RNA, 19 nt, Artificial Sequence
  Description of Artificial Sequence: Synthetic oligonucleotide
cguuggccgcagggauccc

SEQ ID NO: 672486 - RNA, 19 nt, Artificial Sequence
  Description of Artificial Sequence: Synthetic oligonucleotide
ccguccuggcacccacggu

SEQ ID NO: 672487 - RNA, 19 nt, Artificial Sequence
  Description of Artificial Sequence: Synthetic oligonucleotide
cggauucgucucagggcau

SEQ ID NO: 672488 - RNA, 19 nt, Artificial Sequence
  Description of Artificial Sequence: Synthetic oligonucleotide
guaauaaucaggcaggucg

SEQ ID NO: 672489 - RNA, 19 nt, Artificial Sequence
  Description of Artificial Sequence: Synthetic oligonucleotide
ugcauuaucaaacaugagc

SEQ ID NO: 672490 - RNA, 19 nt, Artificial Sequence
  Description of Artificial Sequence: Synthetic oligonucleotide
aaaacgugaagacuaccac

SEQ ID NO: 672491 - RNA, 19 nt, Artificial Sequence
  Description of Artificial Sequence: Synthetic oligonucleotide
acaacuaccacccuucccg

SEQ ID NO: 672492 - RNA, 19 nt, Artificial Sequence
  Description of Artificial Sequence: Synthetic oligonucleotide
uuugaucugacauaucaag

SEQ ID NO: 672493 - RNA, 19 nt, Artificial Sequence
  Description of Artificial Sequence: Synthetic oligonucleotide
uuaaggaugggcaggaugc

SEQ ID NO: 672494 - RNA, 19 nt, Artificial Sequence
  Description of Artificial Sequence: Synthetic oligonucleotide
agcaaauaagaccuugacc

SEQ ID NO: 672495 - RNA, 19 nt, Artificial Sequence
  Description of Artificial Sequence: Synthetic oligonucleotide
aauaagaccuugaccagcc

SEQ ID NO: 672496 - RNA, 19 nt, Artificial Sequence
  Description of Artificial Sequence: Synthetic oligonucleotide
agcuguaauaaucaggcag

SEQ ID NO: 672497 - RNA, 19 nt, Artificial Sequence
  Description of Artificial Sequence: Synthetic oligonucleotide
uuguuacacaccuuuaucc

SEQ ID NO: 672498 - RNA, 19 nt, Artificial Sequence
  Description of Artificial Sequence: Synthetic oligonucleotide
uucgccacagcuuugacgc

SEQ ID NO: 672499 - RNA, 19 nt, Artificial Sequence
  Description of Artificial Sequence: Synthetic oligonucleotide
gauggaaacuccgagaagc

SEQ ID NO: 672500 - RNA, 19 nt, Artificial Sequence
  Description of Artificial Sequence: Synthetic oligonucleotide
ugaucugacauaucaagca

SEQ ID NO: 672501 - RNA, 19 nt, Artificial Sequence
  Description of Artificial Sequence: Synthetic oligonucleotide
auuguuacacaccuuuauc

SEQ ID NO: 672502 - RNA, 19 nt, Artificial Sequence
  Description of Artificial Sequence: Synthetic oligonucleotide
ugacauaucaagcacucgu

SEQ ID NO: 672503 - RNA, 19 nt, Artificial Sequence
  Description of Artificial Sequence: Synthetic oligonucleotide
aaccucaccaauccgcuuc

SEQ ID NO: 672504 - RNA, 19 nt, Artificial Sequence
  Description of Artificial Sequence: Synthetic oligonucleotide
caaacaugagcucagugag

SEQ ID NO: 672505 - RNA, 19 nt, Artificial Sequence
  Description of Artificial Sequence: Synthetic oligonucleotide
aguguuguaaacacucugc

SEQ ID NO: 672506 - RNA, 19 nt, Artificial Sequence
  Description of Artificial Sequence: Synthetic oligonucleotide
uugaucugacauaucaagc

SEQ ID NO: 672507 - RNA, 19 nt, Artificial Sequence
  Description of Artificial Sequence: Synthetic oligonucleotide
guaaacacucugcuggugg

SEQ ID NO: 672508 - RNA, 19 nt, Artificial Sequence
  Description of Artificial Sequence: Synthetic oligonucleotide
ugggcucucagacacaacc

SEQ ID NO: 672509 - RNA, 19 nt, Artificial Sequence
  Description of Artificial Sequence: Synthetic oligonucleotide
aacgugaagacuaccacag

SEQ ID NO: 672510 - RNA, 19 nt, Artificial Sequence
  Description of Artificial Sequence: Synthetic oligonucleotide
aagccugcucgucacagcg

SEQ ID NO: 672511 - RNA, 19 nt, Artificial Sequence
  Description of Artificial Sequence: Synthetic oligonucleotide
uccucaacgaucuucuccc

SEQ ID NO: 672512 - RNA, 19 nt, Artificial Sequence
  Description of Artificial Sequence: Synthetic oligonucleotide
ugacuggucggacagcagg

SEQ ID NO: 672513 - RNA, 19 nt, Artificial Sequence
  Description of Artificial Sequence: Synthetic oligonucleotide
acauaucaagcacucgugg

SEQ ID NO: 672514 - RNA, 19 nt, Artificial Sequence
  Description of Artificial Sequence: Synthetic oligonucleotide
ucugcauucgcucccgaag

SEQ ID NO: 672515 - RNA, 19 nt, Artificial Sequence
  Description of Artificial Sequence: Synthetic oligonucleotide
ucucccaccaaacgggcgg

SEQ ID NO: 672516 - RNA, 19 nt, Artificial Sequence
  Description of Artificial Sequence: Synthetic oligonucleotide
agucaaauaccacuguccu

SEQ ID NO: 672517 - RNA, 19 nt, Artificial Sequence
  Description of Artificial Sequence: Synthetic oligonucleotide
agcccacucguacacaacc

SEQ ID NO: 672518 - RNA, 19 nt, Artificial Sequence
  Description of Artificial Sequence: Synthetic oligonucleotide
uauuguuacacaccuuuau

SEQ ID NO: 672519 - RNA, 19 nt, Artificial Sequence
  Description of Artificial Sequence: Synthetic oligonucleotide
uaugugaggcggaacuggg

SEQ ID NO: 672520 - RNA, 19 nt, Artificial Sequence
  Description of Artificial Sequence: Synthetic oligonucleotide
aaagacaaugucccgccgu

SEQ ID NO: 672521 - RNA, 19 nt, Artificial Sequence
  Description of Artificial Sequence: Synthetic oligonucleotide
uguuguaaacacucugcug

SEQ ID NO: 672522 - RNA, 19 nt, Artificial Sequence
  Description of Artificial Sequence: Synthetic oligonucleotide
aaauucagcucucccacaa

SEQ ID NO: 672523 - RNA, 19 nt, Artificial Sequence
  Description of Artificial Sequence: Synthetic oligonucleotide
uguagcuuggccacagugu

SEQ ID NO: 672524 - RNA, 19 nt, Artificial Sequence
  Description of Artificial Sequence: Synthetic oligonucleotide
uucacaacuaccacccuuc

SEQ ID NO: 672525 - RNA, 19 nt, Artificial Sequence
  Description of Artificial Sequence: Synthetic oligonucleotide
cugaaccucaccaauccgc

SEQ ID NO: 672526 - RNA, 19 nt, Artificial Sequence
  Description of Artificial Sequence: Synthetic oligonucleotide
ucaagagaggugaggcccg

SEQ ID NO: 672527 - RNA, 19 nt, Artificial Sequence
  Description of Artificial Sequence: Synthetic oligonucleotide
aaugucccgccguagcaag

SEQ ID NO: 672528 - RNA, 19 nt, Artificial Sequence
  Description of Artificial Sequence: Synthetic oligonucleotide
accaguguuguaaacacuc

SEQ ID NO: 672529 - RNA, 19 nt, Artificial Sequence
  Description of Artificial Sequence: Synthetic oligonucleotide
uagcaaauaagaccuugac

SEQ ID NO: 672530 - RNA, 19 nt, Artificial Sequence
  Description of Artificial Sequence: Synthetic oligonucleotide
caguuggccagucacgucg

SEQ ID NO: 672531 - RNA, 19 nt, Artificial Sequence
  Description of Artificial Sequence: Synthetic oligonucleotide
uccaccagcccaaaauuca

SEQ ID NO: 672532 - RNA, 19 nt, Artificial Sequence
  Description of Artificial Sequence: Synthetic oligonucleotide
agcugggacgguuugaucu

SEQ ID NO: 672533 - RNA, 19 nt, Artificial Sequence
  Description of Artificial Sequence: Synthetic oligonucleotide
uuacacaccuuuaucccac

SEQ ID NO: 672534 - RNA, 19 nt, Artificial Sequence
  Description of Artificial Sequence: Synthetic oligonucleotide
ugcaaagacaaugucccgc

SEQ ID NO: 672535 - RNA, 19 nt, Artificial Sequence
  Description of Artificial Sequence: Synthetic oligonucleotide
ucaccaauccgcuucgcca

SEQ ID NO: 672536 - RNA, 19 nt, Artificial Sequence
  Description of Artificial Sequence: Synthetic oligonucleotide
gaaaacgugaagacuacca

SEQ ID NO: 672537 - RNA, 19 nt, Artificial Sequence
  Description of Artificial Sequence: Synthetic oligonucleotide
auaaucaggcaggucggcc

SEQ ID NO: 672538 - RNA, 19 nt, Artificial Sequence
  Description of Artificial Sequence: Synthetic oligonucleotide
cucauggcugcucauggcg

SEQ ID NO: 672539 - RNA, 19 nt, Artificial Sequence
  Description of Artificial Sequence: Synthetic oligonucleotide
uuaucccacacccuuuacu

SEQ ID NO: 672540 - RNA, 19 nt, Artificial Sequence
  Description of Artificial Sequence: Synthetic oligonucleotide
uggucggacagcaggaagc

SEQ ID NO: 672541 - RNA, 19 nt, Artificial Sequence
  Description of Artificial Sequence: Synthetic oligonucleotide
gguuugaucugacauauca

SEQ ID NO: 672542 - RNA, 19 nt, Artificial Sequence
  Description of Artificial Sequence: Synthetic oligonucleotide
gguggugaggucaagagag

SEQ ID NO: 672543 - RNA, 19 nt, Artificial Sequence
  Description of Artificial Sequence: Synthetic oligonucleotide
uugugaugcuccuuguucu

SEQ ID NO: 672544 - RNA, 19 nt, Artificial Sequence
  Description of Artificial Sequence: Synthetic oligonucleotide
aacucggagaagggcauac

SEQ ID NO: 672545 - RNA, 19 nt, Artificial Sequence
  Description of Artificial Sequence: Synthetic oligonucleotide
ugaaccucaccaauccgcu

SEQ ID NO: 672546 - RNA, 19 nt, Artificial Sequence
  Description of Artificial Sequence: Synthetic oligonucleotide
agcaacagugacuggucgg

SEQ ID NO: 672547 - RNA, 19 nt, Artificial Sequence
  Description of Artificial Sequence: Synthetic oligonucleotide
aagaccuugaccagcccuc

SEQ ID NO: 672548 - RNA, 19 nt, Artificial Sequence
  Description of Artificial Sequence: Synthetic oligonucleotide
ucggagaagggcauacccc

SEQ ID NO: 672549 - RNA, 19 nt, Artificial Sequence
  Description of Artificial Sequence: Synthetic oligonucleotide
uggacagggauuucagccc

SEQ ID NO: 672550 - RNA, 19 nt, Artificial Sequence
  Description of Artificial Sequence: Synthetic oligonucleotide
aacgaucuucuccccguuc

SEQ ID NO: 672551 - RNA, 19 nt, Artificial Sequence
  Description of Artificial Sequence: Synthetic oligonucleotide
agggauuucagcccauuca

SEQ ID NO: 672552 - RNA, 19 nt, Artificial Sequence
  Description of Artificial Sequence: Synthetic oligonucleotide
gaagggcauaccccgagcc

SEQ ID NO: 672553 - RNA, 19 nt, Artificial Sequence
  Description of Artificial Sequence: Synthetic oligonucleotide
aacagugacuggucggaca

SEQ ID NO: 672554 - RNA, 19 nt, Artificial Sequence
  Description of Artificial Sequence: Synthetic oligonucleotide
uguuugagggugcucggga

SEQ ID NO: 672555 - RNA, 19 nt, Artificial Sequence
  Description of Artificial Sequence: Synthetic oligonucleotide
uucuggaucugcauucgcu

SEQ ID NO: 672556 - RNA, 19 nt, Artificial Sequence
  Description of Artificial Sequence: Synthetic oligonucleotide
caccucuacacgcuggugg

SEQ ID NO: 672557 - RNA, 19 nt, Artificial Sequence
  Description of Artificial Sequence: Synthetic oligonucleotide
uuuacuggguguagaggcu

SEQ ID NO: 672558 - RNA, 19 nt, Artificial Sequence
  Description of Artificial Sequence: Synthetic oligonucleotide
aauccgcuucgccacagcu

SEQ ID NO: 672559 - RNA, 19 nt, Artificial Sequence
  Description of Artificial Sequence: Synthetic oligonucleotide
aggcucucccaccaaacgg

SEQ ID NO: 672560 - RNA, 19 nt, Artificial Sequence
  Description of Artificial Sequence: Synthetic oligonucleotide
cuucaggggucccugagag

SEQ ID NO: 672561 - RNA, 19 nt, Artificial Sequence
  Description of Artificial Sequence: Synthetic oligonucleotide
ugaacggcaguggucacag

SEQ ID NO: 672562 - RNA, 19 nt, Artificial Sequence
  Description of Artificial Sequence: Synthetic oligonucleotide
cuucgccacagcuuugacg

SEQ ID NO: 672563 - RNA, 19 nt, Artificial Sequence
  Description of Artificial Sequence: Synthetic oligonucleotide
uccgagaagcuccucuuca

SEQ ID NO: 672564 - RNA, 19 nt, Artificial Sequence
  Description of Artificial Sequence: Synthetic oligonucleotide
aagcgagcggcacaucuca

SEQ ID NO: 672565 - RNA, 19 nt, Artificial Sequence
  Description of Artificial Sequence: Synthetic oligonucleotide
gacauaucaagcacucgug

SEQ ID NO: 672566 - RNA, 19 nt, Artificial Sequence
  Description of Artificial Sequence: Synthetic oligonucleotide
uggaguuugaggagaccug

SEQ ID NO: 672567 - RNA, 19 nt, Artificial Sequence
  Description of Artificial Sequence: Synthetic oligonucleotide
cucggagaagggcauaccc

SEQ ID NO: 672568 - RNA, 19 nt, Artificial Sequence
  Description of Artificial Sequence: Synthetic oligonucleotide
ugucgcacaagaccagugu

SEQ ID NO: 672569 - RNA, 19 nt, Artificial Sequence
  Description of Artificial Sequence: Synthetic oligonucleotide
auaagaccuugaccagccc

SEQ ID NO: 672570 - RNA, 19 nt, Artificial Sequence
  Description of Artificial Sequence: Synthetic oligonucleotide
acgggcggcgccucgaagc

SEQ ID NO: 672571 - RNA, 19 nt, Artificial Sequence
  Description of Artificial Sequence: Synthetic oligonucleotide
uucacccggagcacuuugg

SEQ ID NO: 672572 - RNA, 19 nt, Artificial Sequence
  Description of Artificial Sequence: Synthetic oligonucleotide
cucgggaaaacgugaagac

SEQ ID NO: 672573 - RNA, 19 nt, Artificial Sequence
  Description of Artificial Sequence: Synthetic oligonucleotide
uuauuguuacacaccuuua

SEQ ID NO: 672574 - RNA, 19 nt, Artificial Sequence
  Description of Artificial Sequence: Synthetic oligonucleotide
ucggcugaacagcaucucc

SEQ ID NO: 672575 - RNA, 19 nt, Artificial Sequence
  Description of Artificial Sequence: Synthetic oligonucleotide
uguccuugcgggauggaaa

SEQ ID NO: 672576 - RNA, 19 nt, Artificial Sequence
  Description of Artificial Sequence: Synthetic oligonucleotide
ucaggggucccugagaguc

SEQ ID NO: 672577 - RNA, 19 nt, Artificial Sequence
  Description of Artificial Sequence: Synthetic oligonucleotide
aucaagcacucguggaguc

SEQ ID NO: 672578 - RNA, 19 nt, Artificial Sequence
  Description of Artificial Sequence: Synthetic oligonucleotide
ugguauucggggagcagca

SEQ ID NO: 672579 - RNA, 19 nt, Artificial Sequence
  Description of Artificial Sequence: Synthetic oligonucleotide
uugcgggauggaaacuccg

SEQ ID NO: 672580 - RNA, 19 nt, Artificial Sequence
  Description of Artificial Sequence: Synthetic oligonucleotide
agagaggugaggcccgaag

SEQ ID NO: 672581 - RNA, 19 nt, Artificial Sequence
  Description of Artificial Sequence: Synthetic oligonucleotide
cuggcaugcuugcucaucc

SEQ ID NO: 672582 - RNA, 19 nt, Artificial Sequence
  Description of Artificial Sequence: Synthetic oligonucleotide
ggaaacuccgagaagcucc

SEQ ID NO: 672583 - RNA, 19 nt, Artificial Sequence
  Description of Artificial Sequence: Synthetic oligonucleotide
aagacaaugucccgccgua

SEQ ID NO: 672584 - RNA, 19 nt, Artificial Sequence
  Description of Artificial Sequence: Synthetic oligonucleotide
ugaggaucaugguguaugu

SEQ ID NO: 672585 - RNA, 19 nt, Artificial Sequence
  Description of Artificial Sequence: Synthetic oligonucleotide
gagaagggcauaccccgag

SEQ ID NO: 672586 - RNA, 19 nt, Artificial Sequence
  Description of Artificial Sequence: Synthetic oligonucleotide
ugguggugaggucaagaga

SEQ ID NO: 672587 - RNA, 19 nt, Artificial Sequence
  Description of Artificial Sequence: Synthetic oligonucleotide
cucaacgaucuucuccccg

SEQ ID NO: 672588 - RNA, 19 nt, Artificial Sequence
  Description of Artificial Sequence: Synthetic oligonucleotide
cauaucaagcacucgugga

SEQ ID NO: 672589 - RNA, 19 nt, Artificial Sequence
  Description of Artificial Sequence: Synthetic oligonucleotide
caguguuguaaacacucug

SEQ ID NO: 672590 - RNA, 19 nt, Artificial Sequence
  Description of Artificial Sequence: Synthetic oligonucleotide
aucauguuccgcgucuccg

SEQ ID NO: 672591 - RNA, 19 nt, Artificial Sequence
  Description of Artificial Sequence: Synthetic oligonucleotide
uugucgcacaagaccagug

SEQ ID NO: 672592 - RNA, 19 nt, Artificial Sequence
  Description of Artificial Sequence: Synthetic oligonucleotide
uaucaagcacucguggagu

SEQ ID NO: 672593 - RNA, 19 nt, Artificial Sequence
  Description of Artificial Sequence: Synthetic oligonucleotide
cuccacgaucuccuuaagg

SEQ ID NO: 672594 - RNA, 19 nt, Artificial Sequence
  Description of Artificial Sequence: Synthetic oligonucleotide
cacgcuggugguauucggg

SEQ ID NO: 672595 - RNA, 19 nt, Artificial Sequence
  Description of Artificial Sequence: Synthetic oligonucleotide
uccgcuucgccacagcuuu

SEQ ID NO: 672596 - RNA, 19 nt, Artificial Sequence
  Description of Artificial Sequence: Synthetic oligonucleotide
aagcugggacgguuugauc

SEQ ID NO: 672597 - RNA, 19 nt, Artificial Sequence
  Description of Artificial Sequence: Synthetic oligonucleotide
uuuaucccacacccuuuac

SEQ ID NO: 672598 - RNA, 19 nt, Artificial Sequence
  Description of Artificial Sequence: Synthetic oligonucleotide
ucacaacuaccacccuucc

SEQ ID NO: 672599 - RNA, 19 nt, Artificial Sequence
  Description of Artificial Sequence: Synthetic oligonucleotide
cucguggagucaaauacca

SEQ ID NO: 672600 - RNA, 19 nt, Artificial Sequence
  Description of Artificial Sequence: Synthetic oligonucleotide
aacuuugguugcugccucu

SEQ ID NO: 672601 - RNA, 19 nt, Artificial Sequence
  Description of Artificial Sequence: Synthetic oligonucleotide
cuuugacgcgcucuacccc

SEQ ID NO: 672602 - RNA, 19 nt, Artificial Sequence
  Description of Artificial Sequence: Synthetic oligonucleotide
caccuucuaccacugacac

SEQ ID NO: 672603 - RNA, 19 nt, Artificial Sequence
  Description of Artificial Sequence: Synthetic oligonucleotide
gaguccugccaacucggag

SEQ ID NO: 672604 - RNA, 19 nt, Artificial Sequence
  Description of Artificial Sequence: Synthetic oligonucleotide
ugcgggauggaaacuccga

SEQ ID NO: 672605 - RNA, 19 nt, Artificial Sequence
  Description of Artificial Sequence: Synthetic oligonucleotide
cucagugaggagcagcuca

SEQ ID NO: 672606 - RNA, 19 nt, Artificial Sequence
  Description of Artificial Sequence: Synthetic oligonucleotide
ugcagcggaccaccaagcc

SEQ ID NO: 672607 - RNA, 19 nt, Artificial Sequence
  Description of Artificial Sequence: Synthetic oligonucleotide
uguaaacacucugcuggug

SEQ ID NO: 672608 - RNA, 19 nt, Artificial Sequence
  Description of Artificial Sequence: Synthetic oligonucleotide
uguaauaaucaggcagguc

SEQ ID NO: 672609 - RNA, 19 nt, Artificial Sequence
  Description of Artificial Sequence: Synthetic oligonucleotide
aacacucugcugguggagu

SEQ ID NO: 672610 - RNA, 19 nt, Artificial Sequence
  Description of Artificial Sequence: Synthetic oligonucleotide
ucauguuccgcgucuccgu

SEQ ID NO: 672611 - RNA, 19 nt, Artificial Sequence
  Description of Artificial Sequence: Synthetic oligonucleotide
ggcucucagacacaaccgg

SEQ ID NO: 672612 - RNA, 19 nt, Artificial Sequence
  Description of Artificial Sequence: Synthetic oligonucleotide
guauucggggagcagcaac

SEQ ID NO: 672613 - RNA, 19 nt, Artificial Sequence
  Description of Artificial Sequence: Synthetic oligonucleotide
ucgggaaaacgugaagacu

SEQ ID NO: 672614 - RNA, 19 nt, Artificial Sequence
  Description of Artificial Sequence: Synthetic oligonucleotide
cauggcgcaggccacucgc

SEQ ID NO: 672615 - RNA, 19 nt, Artificial Sequence
  Description of Artificial Sequence: Synthetic oligonucleotide
acaagaccaguguuguaaa

SEQ ID NO: 672616 - RNA, 19 nt, Artificial Sequence
  Description of Artificial Sequence: Synthetic oligonucleotide
aacuaccacccuucccgug

SEQ ID NO: 672617 - RNA, 19 nt, Artificial Sequence
  Description of Artificial Sequence: Synthetic oligonucleotide
acgguuugaucugacauau

SEQ ID NO: 672618 - RNA, 19 nt, Artificial Sequence
  Description of Artificial Sequence: Synthetic oligonucleotide
acgucgggcuccuccaagg

SEQ ID NO: 672619 - RNA, 19 nt, Artificial Sequence
  Description of Artificial Sequence: Synthetic oligonucleotide
uccuuccugaacuuugguu

SEQ ID NO: 672620 - RNA, 19 nt, Artificial Sequence
  Description of Artificial Sequence: Synthetic oligonucleotide
caccaauccgcuucgccac

SEQ ID NO: 672621 - RNA, 19 nt, Artificial Sequence
  Description of Artificial Sequence: Synthetic oligonucleotide
guccggagcaccucuacac

SEQ ID NO: 672622 - RNA, 19 nt, Artificial Sequence
  Description of Artificial Sequence: Synthetic oligonucleotide
acgugaagacuaccacagg

SEQ ID NO: 672623 - RNA, 19 nt, Artificial Sequence
  Description of Artificial Sequence: Synthetic oligonucleotide
gacgguuugaucugacaua

SEQ ID NO: 672624 - RNA, 19 nt, Artificial Sequence
  Description of Artificial Sequence: Synthetic oligonucleotide
guagcaaauaagaccuuga

SEQ ID NO: 672625 - RNA, 19 nt, Artificial Sequence
  Description of Artificial Sequence: Synthetic oligonucleotide
uggugcguggcuguuggcc

SEQ ID NO: 672626 - RNA, 19 nt, Artificial Sequence
  Description of Artificial Sequence: Synthetic oligonucleotide
accucuacacgcugguggu

SEQ ID NO: 672627 - RNA, 19 nt, Artificial Sequence
  Description of Artificial Sequence: Synthetic oligonucleotide
cacaagaccaguguuguaa

SEQ ID NO: 672628 - RNA, 19 nt, Artificial Sequence
  Description of Artificial Sequence: Synthetic oligonucleotide
caagaccaguguuguaaac

SEQ ID NO: 672629 - RNA, 19 nt, Artificial Sequence
  Description of Artificial Sequence: Synthetic oligonucleotide
acucggagaagggcauacc

SEQ ID NO: 672630 - RNA, 19 nt, Artificial Sequence
  Description of Artificial Sequence: Synthetic oligonucleotide
ucguggagucaaauaccac

SEQ ID NO: 672631 - RNA, 19 nt, Artificial Sequence
  Description of Artificial Sequence: Synthetic oligonucleotide
aggaacagcuugaagccca

SEQ ID NO: 672632 - RNA, 19 nt, Artificial Sequence
  Description of Artificial Sequence: Synthetic oligonucleotide
cucccacaaauucuuccac

SEQ ID NO: 672633 - RNA, 19 nt, Artificial Sequence
  Description of Artificial Sequence: Synthetic oligonucleotide
agcaccucuacacgcuggu

SEQ ID NO: 672634 - RNA, 19 nt, Artificial Sequence
  Description of Artificial Sequence: Synthetic oligonucleotide
aaggucucaguagcaaaua

SEQ ID NO: 672635 - RNA, 19 nt, Artificial Sequence
  Description of Artificial Sequence: Synthetic oligonucleotide
ggcucucccaccaaacggg

SEQ ID NO: 672636 - RNA, 19 nt, Artificial Sequence
  Description of Artificial Sequence: Synthetic oligonucleotide
cuggucggacagcaggaag

SEQ ID NO: 672637 - RNA, 19 nt, Artificial Sequence
  Description of Artificial Sequence: Synthetic oligonucleotide
ucaagcacucguggaguca

SEQ ID NO: 672638 - RNA, 19 nt, Artificial Sequence
  Description of Artificial Sequence: Synthetic oligonucleotide
ugcucgggagcugaucccc

SEQ ID NO: 672639 - RNA, 19 nt, Artificial Sequence
  Description of Artificial Sequence: Synthetic oligonucleotide
guguuguaaacacucugcu

SEQ ID NO: 672640 - RNA, 19 nt, Artificial Sequence
  Description of Artificial Sequence: Synthetic oligonucleotide
caccugaaccucaccaauc

SEQ ID NO: 672641 - RNA, 19 nt, Artificial Sequence
  Description of Artificial Sequence: Synthetic oligonucleotide
uuccgcgucuccgucagcu

SEQ ID NO: 672642 - RNA, 19 nt, Artificial Sequence
  Description of Artificial Sequence: Synthetic oligonucleotide
uccgagcugguggugaggu

SEQ ID NO: 672643 - RNA, 19 nt, Artificial Sequence
  Description of Artificial Sequence: Synthetic oligonucleotide
gaggaucaugguguaugug

SEQ ID NO: 672644 - RNA, 19 nt, Artificial Sequence
  Description of Artificial Sequence: Synthetic oligonucleotide
agggcauaccccgagccca

SEQ ID NO: 672645 - RNA, 19 nt, Artificial Sequence
  Description of Artificial Sequence: Synthetic oligonucleotide
acccuucccguggacaggg

SEQ ID NO: 672646 - RNA, 19 nt, Artificial Sequence
  Description of Artificial Sequence: Synthetic oligonucleotide
uacacaccuuuaucccaca

SEQ ID NO: 672647 - RNA, 19 nt, Artificial Sequence
  Description of Artificial Sequence: Synthetic oligonucleotide
guucacccggagcacuuug

SEQ ID NO: 672648 - RNA, 19 nt, Artificial Sequence
  Description of Artificial Sequence: Synthetic oligonucleotide
gcccgccucauccacauag

SEQ ID NO: 672649 - RNA, 19 nt, Artificial Sequence
  Description of Artificial Sequence: Synthetic oligonucleotide
uuggccagucacgucgggc

SEQ ID NO: 672650 - RNA, 19 nt, Artificial Sequence
  Description of Artificial Sequence: Synthetic oligonucleotide
ccacucguacacaaccucc

SEQ ID NO: 672651 - RNA, 19 nt, Artificial Sequence
  Description of Artificial Sequence: Synthetic oligonucleotide
cauggcgaaggucucagua

SEQ ID NO: 672652 - RNA, 19 nt, Artificial Sequence
  Description of Artificial Sequence: Synthetic oligonucleotide
cacugacuccaugaugcgc

SEQ ID NO: 672653 - RNA, 19 nt, Artificial Sequence
  Description of Artificial Sequence: Synthetic oligonucleotide
ugcaggucguugacagggu

SEQ ID NO: 672654 - RNA, 19 nt, Artificial Sequence
  Description of Artificial Sequence: Synthetic oligonucleotide
gccgcugucuccaucuugg

SEQ ID NO: 672655 - RNA, 19 nt, Artificial Sequence
  Description of Artificial Sequence: Synthetic oligonucleotide
ggucggacagcaggaagcg

SEQ ID NO: 672656 - RNA, 19 nt, Artificial Sequence
  Description of Artificial Sequence: Synthetic oligonucleotide
aguuggccagucacgucgg

SEQ ID NO: 672657 - RNA, 19 nt, Artificial Sequence
  Description of Artificial Sequence: Synthetic oligonucleotide
cuuuaucccacacccuuua

SEQ ID NO: 672658 - RNA, 19 nt, Artificial Sequence
  Description of Artificial Sequence: Synthetic oligonucleotide
ggcuugucgcacaagacca

SEQ ID NO: 672659 - RNA, 19 nt, Artificial Sequence
  Description of Artificial Sequence: Synthetic oligonucleotide
ggaaaacgugaagacuacc

SEQ ID NO: 672660 - RNA, 19 nt, Artificial Sequence
  Description of Artificial Sequence: Synthetic oligonucleotide
caggucguugacaggguca

SEQ ID NO: 672661 - RNA, 19 nt, Artificial Sequence
  Description of Artificial Sequence: Synthetic oligonucleotide
gaagcgagcggcacaucuc

SEQ ID NO: 672662 - RNA, 19 nt, Artificial Sequence
  Description of Artificial Sequence: Synthetic oligonucleotide
caaggacagguacacucca

SEQ ID NO: 672663 - RNA, 19 nt, Artificial Sequence
  Description of Artificial Sequence: Synthetic oligonucleotide
gaaggucucaguagcaaau

SEQ ID NO: 672664 - RNA, 19 nt, Artificial Sequence
  Description of Artificial Sequence: Synthetic oligonucleotide
uggcuggccccuugucccg

SEQ ID NO: 672665 - RNA, 19 nt, Artificial Sequence
  Description of Artificial Sequence: Synthetic oligonucleotide
agacaaugucccgccguag

SEQ ID NO: 672666 - RNA, 19 nt, Artificial Sequence
  Description of Artificial Sequence: Synthetic oligonucleotide
uucccguggacagggauuu

SEQ ID NO: 672667 - RNA, 19 nt, Artificial Sequence
  Description of Artificial Sequence: Synthetic oligonucleotide
gcgggauggaaacuccgag

SEQ ID NO: 672668 - RNA, 19 nt, Artificial Sequence
  Description of Artificial Sequence: Synthetic oligonucleotide
acacaaccggcuugucgca

SEQ ID NO: 672669 - RNA, 19 nt, Artificial Sequence
  Description of Artificial Sequence: Synthetic oligonucleotide
cauguuccgcgucuccguc

SEQ ID NO: 672670 - RNA, 19 nt, Artificial Sequence
  Description of Artificial Sequence: Synthetic oligonucleotide
cacccggagcacuuuggug

SEQ ID NO: 672671 - RNA, 19 nt, Artificial Sequence
  Description of Artificial Sequence: Synthetic oligonucleotide
ggagucgugcaaggcagcg

SEQ ID NO: 672672 - RNA, 19 nt, Artificial Sequence
  Description of Artificial Sequence: Synthetic oligonucleotide
gugcauuaucaaacaugag

SEQ ID NO: 672673 - RNA, 19 nt, Artificial Sequence
  Description of Artificial Sequence: Synthetic oligonucleotide
aucugcauucgcucccgaa

SEQ ID NO: 672674 - RNA, 19 nt, Artificial Sequence
  Description of Artificial Sequence: Synthetic oligonucleotide
ucgccacagcuuugacgcg

SEQ ID NO: 672675 - RNA, 19 nt, Artificial Sequence
  Description of Artificial Sequence: Synthetic oligonucleotide
acuccaugaugcgccacug

SEQ ID NO: 672676 - RNA, 19 nt, Artificial Sequence
  Description of Artificial Sequence: Synthetic oligonucleotide
auguuccgcgucuccguca

SEQ ID NO: 672677 - RNA, 19 nt, Artificial Sequence
  Description of Artificial Sequence: Synthetic oligonucleotide
gagucgugcaaggcagcgc

SEQ ID NO: 672678 - RNA, 19 nt, Artificial Sequence
  Description of Artificial Sequence: Synthetic oligonucleotide
cuggugguauucggggagc

SEQ ID NO: 672679 - RNA, 19 nt, Artificial Sequence
  Description of Artificial Sequence: Synthetic oligonucleotide
ccuuuacuggguguagagg

SEQ ID NO: 672680 - RNA, 19 nt, Artificial Sequence
  Description of Artificial Sequence: Synthetic oligonucleotide
gacuccaugaugcgccacu

SEQ ID NO: 672681 - RNA, 19 nt, Artificial Sequence
  Description of Artificial Sequence: Synthetic oligonucleotide
uccuccacccugagggcau

SEQ ID NO: 672682 - RNA, 19 nt, Artificial Sequence
  Description of Artificial Sequence: Synthetic oligonucleotide
caccaagccuucagggguc

SEQ ID NO: 672683 - RNA, 19 nt, Artificial Sequence
  Description of Artificial Sequence: Synthetic oligonucleotide
cugagcccgggcccggagg

SEQ ID NO: 672684 - RNA, 19 nt, Artificial Sequence
  Description of Artificial Sequence: Synthetic oligonucleotide
uggcaugcuugcucauccu

SEQ ID NO: 672685 - RNA, 19 nt, Artificial Sequence
  Description of Artificial Sequence: Synthetic oligonucleotide
ucggccaguuggccaguca

SEQ ID NO: 672686 - RNA, 19 nt, Artificial Sequence
  Description of Artificial Sequence: Synthetic oligonucleotide
uggugguauucggggagca

SEQ ID NO: 672687 - RNA, 19 nt, Artificial Sequence
  Description of Artificial Sequence: Synthetic oligonucleotide
agcucucccacaaauucuu

SEQ ID NO: 672688 - RNA, 19 nt, Artificial Sequence
  Description of Artificial Sequence: Synthetic oligonucleotide
cuccccguucacccggagc

SEQ ID NO: 672689 - RNA, 19 nt, Artificial Sequence
  Description of Artificial Sequence: Synthetic oligonucleotide
gcugggacgguuugaucug

SEQ ID NO: 672690 - RNA, 19 nt, Artificial Sequence
  Description of Artificial Sequence: Synthetic oligonucleotide
cuccgagaagcuccucuuc

SEQ ID NO: 672691 - RNA, 19 nt, Artificial Sequence
  Description of Artificial Sequence: Synthetic oligonucleotide
cuacacgcuggugguauuc

SEQ ID NO: 672692 - RNA, 19 nt, Artificial Sequence
  Description of Artificial Sequence: Synthetic oligonucleotide
aggucguugacagggucaa

SEQ ID NO: 672693 - RNA, 19 nt, Artificial Sequence
  Description of Artificial Sequence: Synthetic oligonucleotide
gaugcgccacuggaucaug

SEQ ID NO: 672694 - RNA, 19 nt, Artificial Sequence
  Description of Artificial Sequence: Synthetic oligonucleotide
ugaggcccgaagccugcuc

SEQ ID NO: 672695 - RNA, 19 nt, Artificial Sequence
  Description of Artificial Sequence: Synthetic oligonucleotide
cacgucgggcuccuccaag

SEQ ID NO: 672696 - RNA, 19 nt, Artificial Sequence
  Description of Artificial Sequence: Synthetic oligonucleotide
ugcgccacuggaucauguu

SEQ ID NO: 672697 - RNA, 19 nt, Artificial Sequence
  Description of Artificial Sequence: Synthetic oligonucleotide
accaauccgcuucgccaca

SEQ ID NO: 672698 - RNA, 19 nt, Artificial Sequence
  Description of Artificial Sequence: Synthetic oligonucleotide
uccugauggaugggccuga

SEQ ID NO: 672699 - RNA, 19 nt, Artificial Sequence
  Description of Artificial Sequence: Synthetic oligonucleotide
ccuguuugagggugcucgg

SEQ ID NO: 672700 - RNA, 19 nt, Artificial Sequence
  Description of Artificial Sequence: Synthetic oligonucleotide
gugcucgggagcugauccc

SEQ ID NO: 672701 - RNA, 19 nt, Artificial Sequence
  Description of Artificial Sequence: Synthetic oligonucleotide
gcggagucgugcaaggcag

SEQ ID NO: 672702 - RNA, 19 nt, Artificial Sequence
  Description of Artificial Sequence: Synthetic oligonucleotide
gccaacucggagaagggca

SEQ ID NO: 672703 - RNA, 19 nt, Artificial Sequence
  Description of Artificial Sequence: Synthetic oligonucleotide
gaaacuccgagaagcuccu

SEQ ID NO: 672704 - RNA, 19 nt, Artificial Sequence
  Description of Artificial Sequence: Synthetic oligonucleotide
ggacgguuugaucugacau

SEQ ID NO: 672705 - RNA, 19 nt, Artificial Sequence
  Description of Artificial Sequence: Synthetic oligonucleotide
acacccuuuacugggugua

SEQ ID NO: 672706 - RNA, 19 nt, Artificial Sequence
  Description of Artificial Sequence: Synthetic oligonucleotide
acccuuuacuggguguaga

SEQ ID NO: 672707 - RNA, 19 nt, Artificial Sequence
  Description of Artificial Sequence: Synthetic oligonucleotide
ggagcaccucuacacgcug

SEQ ID NO: 672708 - RNA, 19 nt, Artificial Sequence
  Description of Artificial Sequence: Synthetic oligonucleotide
gagcggcacaucucagcca

SEQ ID NO: 672709 - RNA, 19 nt, Artificial Sequence
  Description of Artificial Sequence: Synthetic oligonucleotide
ggcaugcuugcucauccuc

SEQ ID NO: 672710 - RNA, 19 nt, Artificial Sequence
  Description of Artificial Sequence: Synthetic oligonucleotide
ccacccuucccguggacag

SEQ ID NO: 672711 - RNA, 19 nt, Artificial Sequence
  Description of Artificial Sequence: Synthetic oligonucleotide
ucuacacgcuggugguauu

SEQ ID NO: 672712 - RNA, 19 nt, Artificial Sequence
  Description of Artificial Sequence: Synthetic oligonucleotide
gggaaaacgugaagacuac

SEQ ID NO: 672713 - RNA, 19 nt, Artificial Sequence
  Description of Artificial Sequence: Synthetic oligonucleotide
ucccaccaaacgggcggcg

SEQ ID NO: 672714 - RNA, 19 nt, Artificial Sequence
  Description of Artificial Sequence: Synthetic oligonucleotide
cacccuuuacuggguguag

SEQ ID NO: 672715 - RNA, 19 nt, Artificial Sequence
  Description of Artificial Sequence: Synthetic oligonucleotide
ucacgucgggcuccuccaa

SEQ ID NO: 672716 - RNA, 19 nt, Artificial Sequence
  Description of Artificial Sequence: Synthetic oligonucleotide
cagggcucuggcagaccag

SEQ ID NO: 672717 - RNA, 19 nt, Artificial Sequence
  Description of Artificial Sequence: Synthetic oligonucleotide
gagggugcucgggagcuga

SEQ ID NO: 672718 - RNA, 19 nt, Artificial Sequence
  Description of Artificial Sequence: Synthetic oligonucleotide
ugcucgucacagcggccuc

SEQ ID NO: 672719 - RNA, 19 nt, Artificial Sequence
  Description of Artificial Sequence: Synthetic oligonucleotide
cgggaaaacgugaagacua

SEQ ID NO: 672720 - RNA, 19 nt, Artificial Sequence
  Description of Artificial Sequence: Synthetic oligonucleotide
caagcacucguggagucaa

SEQ ID NO: 672721 - RNA, 19 nt, Artificial Sequence
  Description of Artificial Sequence: Synthetic oligonucleotide
agccgcggagucgugcaag

SEQ ID NO: 672722 - RNA, 19 nt, Artificial Sequence
  Description of Artificial Sequence: Synthetic oligonucleotide
uccucccuggugcguggcu

SEQ ID NO: 672723 - RNA, 19 nt, Artificial Sequence
  Description of Artificial Sequence: Synthetic oligonucleotide
agguccucccuggugcgug

SEQ ID NO: 672724 - RNA, 19 nt, Artificial Sequence
  Description of Artificial Sequence: Synthetic oligonucleotide
gccguagcaagguggccgc

SEQ ID NO: 672725 - RNA, 19 nt, Artificial Sequence
  Description of Artificial Sequence: Synthetic oligonucleotide
cugugcccgccucauccac

SEQ ID NO: 672726 - RNA, 19 nt, Artificial Sequence
  Description of Artificial Sequence: Synthetic oligonucleotide
gcgagcggcacaucucagc

SEQ ID NO: 672727 - RNA, 19 nt, Artificial Sequence
  Description of Artificial Sequence: Synthetic oligonucleotide
guagcaagguggccgcugu

SEQ ID NO: 672728 - RNA, 19 nt, Artificial Sequence
  Description of Artificial Sequence: Synthetic oligonucleotide
cuucacaacuaccacccuu

SEQ ID NO: 672729 - RNA, 19 nt, Artificial Sequence
  Description of Artificial Sequence: Synthetic oligonucleotide
augucccgccguagcaagg

SEQ ID NO: 672730 - RNA, 19 nt, Artificial Sequence
  Description of Artificial Sequence: Synthetic oligonucleotide
agccugcucgucacagcgg

SEQ ID NO: 672731 - RNA, 19 nt, Artificial Sequence
  Description of Artificial Sequence: Synthetic oligonucleotide
accaaacgggcggcgccuc

SEQ ID NO: 672732 - RNA, 19 nt, Artificial Sequence
  Description of Artificial Sequence: Synthetic oligonucleotide
aggggucccugagaguccu

SEQ ID NO: 672733 - RNA, 19 nt, Artificial Sequence
  Description of Artificial Sequence: Synthetic oligonucleotide
ccucgggaaaacgugaaga

SEQ ID NO: 672734 - RNA, 19 nt, Artificial Sequence
  Description of Artificial Sequence: Synthetic oligonucleotide
gaggugaggcccgaagccu

SEQ ID NO: 672735 - RNA, 19 nt, Artificial Sequence
  Description of Artificial Sequence: Synthetic oligonucleotide
cugacuccaugaugcgcca

SEQ ID NO: 672736 - RNA, 19 nt, Artificial Sequence
  Description of Artificial Sequence: Synthetic oligonucleotide
cagcggaccaccaagccuu

SEQ ID NO: 672737 - RNA, 19 nt, Artificial Sequence
  Description of Artificial Sequence: Synthetic oligonucleotide
ggaccugggguagcugccg

SEQ ID NO: 672738 - RNA, 19 nt, Artificial Sequence
  Description of Artificial Sequence: Synthetic oligonucleotide
cguggagucaaauaccacu

SEQ ID NO: 672739 - RNA, 19 nt, Artificial Sequence
  Description of Artificial Sequence: Synthetic oligonucleotide
uccgcgucuccgucagcuc

SEQ ID NO: 672740 - RNA, 19 nt, Artificial Sequence
  Description of Artificial Sequence: Synthetic oligonucleotide
cuccgagcugguggugagg

SEQ ID NO: 672741 - RNA, 19 nt, Artificial Sequence
  Description of Artificial Sequence: Synthetic oligonucleotide
gcgccacuggaucauguuc

SEQ ID NO: 672742 - RNA, 19 nt, Artificial Sequence
  Description of Artificial Sequence: Synthetic oligonucleotide
ggcccaaggucuggcaugc

SEQ ID NO: 672743 - RNA, 19 nt, Artificial Sequence
  Description of Artificial Sequence: Synthetic oligonucleotide
uaccccgagcccacucgua

SEQ ID NO: 672744 - RNA, 19 nt, Artificial Sequence
  Description of Artificial Sequence: Synthetic oligonucleotide
ccaccaaacgggcggcgcc

SEQ ID NO: 672745 - RNA, 19 nt, Artificial Sequence
  Description of Artificial Sequence: Synthetic oligonucleotide
caaugucccgccguagcaa

SEQ ID NO: 672746 - RNA, 19 nt, Artificial Sequence
  Description of Artificial Sequence: Synthetic oligonucleotide
gggacgguuugaucugaca

SEQ ID NO: 672747 - RNA, 19 nt, Artificial Sequence
  Description of Artificial Sequence: Synthetic oligonucleotide
cugaacggcaguggucaca

SEQ ID NO: 672748 - RNA, 19 nt, Artificial Sequence
  Description of Artificial Sequence: Synthetic oligonucleotide
ggagaccugcaggaucacc

SEQ ID NO: 672749 - RNA, 19 nt, Artificial Sequence
  Description of Artificial Sequence: Synthetic oligonucleotide
gucggacagcaggaagcgc

SEQ ID NO: 672750 - RNA, 19 nt, Artificial Sequence
  Description of Artificial Sequence: Synthetic oligonucleotide
gcuugucgcacaagaccag

SEQ ID NO: 672751 - RNA, 19 nt, Artificial Sequence
  Description of Artificial Sequence: Synthetic oligonucleotide
ggcuguuggcccaaggucu

SEQ ID NO: 672752 - RNA, 19 nt, Artificial Sequence
  Description of Artificial Sequence: Synthetic oligonucleotide
cucauggcgcaggccacuc

SEQ ID NO: 672753 - RNA, 19 nt, Artificial Sequence
  Description of Artificial Sequence: Synthetic oligonucleotide
cagugaggagcagcucaug

SEQ ID NO: 672754 - RNA, 19 nt, Artificial Sequence
  Description of Artificial Sequence: Synthetic oligonucleotide
agcccucggcugaacagca

SEQ ID NO: 672755 - RNA, 19 nt, Artificial Sequence
  Description of Artificial Sequence: Synthetic oligonucleotide
agaguccugccaacucgga

SEQ ID NO: 672756 - RNA, 19 nt, Artificial Sequence
  Description of Artificial Sequence: Synthetic oligonucleotide
ccgcgucuccgucagcucc

SEQ ID NO: 672757 - RNA, 19 nt, Artificial Sequence
  Description of Artificial Sequence: Synthetic oligonucleotide
ccuuccggcaggaacagcu

SEQ ID NO: 672758 - RNA, 19 nt, Artificial Sequence
  Description of Artificial Sequence: Synthetic oligonucleotide
cgccguagcaagguggccg

SEQ ID NO: 672759 - RNA, 19 nt, Artificial Sequence
  Description of Artificial Sequence: Synthetic oligonucleotide
gguccggagcaccucuaca

SEQ ID NO: 672760 - RNA, 19 nt, Artificial Sequence
  Description of Artificial Sequence: Synthetic oligonucleotide
cuaccacccuucccgugga

SEQ ID NO: 672761 - RNA, 19 nt, Artificial Sequence
  Description of Artificial Sequence: Synthetic oligonucleotide
agcgagcggcacaucucag

SEQ ID NO: 672762 - RNA, 19 nt, Artificial Sequence
  Description of Artificial Sequence: Synthetic oligonucleotide
ccucaacgaucuucucccc

SEQ ID NO: 672763 - RNA, 19 nt, Artificial Sequence
  Description of Artificial Sequence: Synthetic oligonucleotide
agccgcuuggugaguucag

SEQ ID NO: 672764 - RNA, 19 nt, Artificial Sequence
  Description of Artificial Sequence: Synthetic oligonucleotide
ggcaggucggccaguuggc

SEQ ID NO: 672765 - RNA, 19 nt, Artificial Sequence
  Description of Artificial Sequence: Synthetic oligonucleotide
cccgaagccugcucgucac

SEQ ID NO: 672766 - RNA, 19 nt, Artificial Sequence
  Description of Artificial Sequence: Synthetic oligonucleotide
agcggaccaccaagccuuc

SEQ ID NO: 672767 - RNA, 19 nt, Artificial Sequence
  Description of Artificial Sequence: Synthetic oligonucleotide
cugauccccagggucgcca

SEQ ID NO: 672768 - RNA, 19 nt, Artificial Sequence
  Description of Artificial Sequence: Synthetic oligonucleotide
cuucuccgagcugguggug

SEQ ID NO: 672769 - RNA, 19 nt, Artificial Sequence
  Description of Artificial Sequence: Synthetic oligonucleotide
cauugugaugcuccuuguu

SEQ ID NO: 672770 - RNA, 19 nt, Artificial Sequence
  Description of Artificial Sequence: Synthetic oligonucleotide
auccgcuucgccacagcuu

SEQ ID NO: 672771 - RNA, 19 nt, Artificial Sequence
  Description of Artificial Sequence: Synthetic oligonucleotide
cuucccguggacagggauu

SEQ ID NO: 672772 - RNA, 19 nt, Artificial Sequence
  Description of Artificial Sequence: Synthetic oligonucleotide
cacacccuuuacugggugu

SEQ ID NO: 672773 - RNA, 19 nt, Artificial Sequence
  Description of Artificial Sequence: Synthetic oligonucleotide
cggaccaccaagccuucag

SEQ ID NO: 672774 - RNA, 19 nt, Artificial Sequence
  Description of Artificial Sequence: Synthetic oligonucleotide
gcacucguggagucaaaua

SEQ ID NO: 672775 - RNA, 19 nt, Artificial Sequence
  Description of Artificial Sequence: Synthetic oligonucleotide
cccgagcccacucguacac

SEQ ID NO: 672776 - RNA, 19 nt, Artificial Sequence
  Description of Artificial Sequence: Synthetic oligonucleotide
guccuggcuggcauguuua

SEQ ID NO: 672777 - RNA, 19 nt, Artificial Sequence
  Description of Artificial Sequence: Synthetic oligonucleotide
caacuaccacccuucccgu

SEQ ID NO: 672778 - RNA, 19 nt, Artificial Sequence
  Description of Artificial Sequence: Synthetic oligonucleotide
gucgugcaaggcagcgcug

SEQ ID NO: 672779 - RNA, 19 nt, Artificial Sequence
  Description of Artificial Sequence: Synthetic oligonucleotide
ggguccggagcaccucuac

SEQ ID NO: 672780 - RNA, 19 nt, Artificial Sequence
  Description of Artificial Sequence: Synthetic oligonucleotide
cucuacacgcuggugguau

SEQ ID NO: 672781 - RNA, 19 nt, Artificial Sequence
  Description of Artificial Sequence: Synthetic oligonucleotide
cccggagcccaccuucuac

SEQ ID NO: 672782 - RNA, 19 nt, Artificial Sequence
  Description of Artificial Sequence: Synthetic oligonucleotide
cugggacgguuugaucuga

SEQ ID NO: 672783 - RNA, 19 nt, Artificial Sequence
  Description of Artificial Sequence: Synthetic oligonucleotide
gaaccucaccaauccgcuu

SEQ ID NO: 672784 - RNA, 19 nt, Artificial Sequence
  Description of Artificial Sequence: Synthetic oligonucleotide
cagcuucacugugcccgcc

SEQ ID NO: 672785 - RNA, 19 nt, Artificial Sequence
  Description of Artificial Sequence: Synthetic oligonucleotide
aggcggaacugggacugaa

SEQ ID NO: 672786 - RNA, 19 nt, Artificial Sequence
  Description of Artificial Sequence: Synthetic oligonucleotide
ugcguggcuguuggcccaa

SEQ ID NO: 672787 - RNA, 19 nt, Artificial Sequence
  Description of Artificial Sequence: Synthetic oligonucleotide
gcauaccccgagcccacuc

SEQ ID NO: 672788 - RNA, 19 nt, Artificial Sequence
  Description of Artificial Sequence: Synthetic oligonucleotide
ggcgaaggucucaguagca

SEQ ID NO: 672789 - RNA, 19 nt, Artificial Sequence
  Description of Artificial Sequence: Synthetic oligonucleotide
caagagaggugaggcccga

SEQ ID NO: 672790 - RNA, 19 nt, Artificial Sequence
  Description of Artificial Sequence: Synthetic oligonucleotide
gcaugcuugcucauccucu

SEQ ID NO: 672791 - RNA, 19 nt, Artificial Sequence
  Description of Artificial Sequence: Synthetic oligonucleotide
gcgaaggucucaguagcaa

SEQ ID NO: 672792 - RNA, 19 nt, Artificial Sequence
  Description of Artificial Sequence: Synthetic oligonucleotide
gcuucgccacagcuuugac

SEQ ID NO: 672793 - RNA, 19 nt, Artificial Sequence
  Description of Artificial Sequence: Synthetic oligonucleotide
cugcucgucacagcggccu

SEQ ID NO: 672794 - RNA, 19 nt, Artificial Sequence
  Description of Artificial Sequence: Synthetic oligonucleotide
ccugcucgucacagcggcc

SEQ ID NO: 672795 - RNA, 19 nt, Artificial Sequence
  Description of Artificial Sequence: Synthetic oligonucleotide
gcaggucggccaguuggcc

SEQ ID NO: 672796 - RNA, 19 nt, Artificial Sequence
  Description of Artificial Sequence: Synthetic oligonucleotide
cucgaagcgagcggcacau

SEQ ID NO: 672797 - RNA, 19 nt, Artificial Sequence
  Description of Artificial Sequence: Synthetic oligonucleotide
ccaauccgcuucgccacag

SEQ ID NO: 672798 - RNA, 19 nt, Artificial Sequence
  Description of Artificial Sequence: Synthetic oligonucleotide
ucgaagcgagcggcacauc

SEQ ID NO: 672799 - RNA, 19 nt, Artificial Sequence
  Description of Artificial Sequence: Synthetic oligonucleotide
guugaggaucaugguguau

SEQ ID NO: 672800 - RNA, 19 nt, Artificial Sequence
  Description of Artificial Sequence: Synthetic oligonucleotide
ccacuggaucauguuccgc

SEQ ID NO: 672801 - RNA, 19 nt, Artificial Sequence
  Description of Artificial Sequence: Synthetic oligonucleotide
ccaguguuguaaacacucu

SEQ ID NO: 672802 - RNA, 19 nt, Artificial Sequence
  Description of Artificial Sequence: Synthetic oligonucleotide
ggccagucacgucgggcuc

SEQ ID NO: 672803 - RNA, 19 nt, Artificial Sequence
  Description of Artificial Sequence: Synthetic oligonucleotide
acucgccccgccagcuuca

SEQ ID NO: 672804 - RNA, 19 nt, Artificial Sequence
  Description of Artificial Sequence: Synthetic oligonucleotide
cccaccaaacgggcggcgc

SEQ ID NO: 672805 - RNA, 19 nt, Artificial Sequence
  Description of Artificial Sequence: Synthetic oligonucleotide
gccaguuggccagucacgu

SEQ ID NO: 672806 - RNA, 19 nt, Artificial Sequence
  Description of Artificial Sequence: Synthetic oligonucleotide
agcccgggcccggagggaa

SEQ ID NO: 672807 - RNA, 19 nt, Artificial Sequence
  Description of Artificial Sequence: Synthetic oligonucleotide
ggucgccagggcucuggca

SEQ ID NO: 672808 - RNA, 19 nt, Artificial Sequence
  Description of Artificial Sequence: Synthetic oligonucleotide
ccugggguagcugccgguc

SEQ ID NO: 672809 - RNA, 19 nt, Artificial Sequence
  Description of Artificial Sequence: Synthetic oligonucleotide
ggccacucgccccgccagc

SEQ ID NO: 672810 - RNA, 19 nt, Artificial Sequence
  Description of Artificial Sequence: Synthetic oligonucleotide
gguauucggggagcagcaa

SEQ ID NO: 672811 - RNA, 19 nt, Artificial Sequence
  Description of Artificial Sequence: Synthetic oligonucleotide
gcaccucuacacgcuggug

SEQ ID NO: 672812 - RNA, 19 nt, Artificial Sequence
  Description of Artificial Sequence: Synthetic oligonucleotide
cgucgggcuccuccaaggc

SEQ ID NO: 672813 - RNA, 19 nt, Artificial Sequence
  Description of Artificial Sequence: Synthetic oligonucleotide
ccucccuggugcguggcug

SEQ ID NO: 672814 - RNA, 19 nt, Artificial Sequence
  Description of Artificial Sequence: Synthetic oligonucleotide
cccguggacagggauuuca

SEQ ID NO: 672815 - RNA, 19 nt, Artificial Sequence
  Description of Artificial Sequence: Synthetic oligonucleotide
cgggcggcgccucgaagcg

SEQ ID NO: 672816 - RNA, 19 nt, Artificial Sequence
  Description of Artificial Sequence: Synthetic oligonucleotide
ccggcggaggagcucugac

SEQ ID NO: 672817 - RNA, 19 nt, Artificial Sequence
  Description of Artificial Sequence: Synthetic oligonucleotide
cguagcaagguggccgcug

SEQ ID NO: 672818 - RNA, 19 nt, Artificial Sequence
  Description of Artificial Sequence: Synthetic oligonucleotide
cggagucgugcaaggcagc

SEQ ID NO: 672819 - RNA, 19 nt, Artificial Sequence
  Description of Artificial Sequence: Synthetic oligonucleotide
ccuugcuguccuugcggga

SEQ ID NO: 672820 - RNA, 19 nt, Artificial Sequence
  Description of Artificial Sequence: Synthetic oligonucleotide
gggcauaccccgagcccac

SEQ ID NO: 672821 - RNA, 19 nt, Artificial Sequence
  Description of Artificial Sequence: Synthetic oligonucleotide
ccucgaagcgagcggcaca

SEQ ID NO: 672822 - RNA, 19 nt, Artificial Sequence
  Description of Artificial Sequence: Synthetic oligonucleotide
ggccucgggaaaacgugaa

SEQ ID NO: 672823 - RNA, 19 nt, Artificial Sequence
  Description of Artificial Sequence: Synthetic oligonucleotide
cccggagcacuuuggugga

SEQ ID NO: 672824 - RNA, 19 nt, Artificial Sequence
  Description of Artificial Sequence: Synthetic oligonucleotide
gacagggauuucagcccau

SEQ ID NO: 672825 - RNA, 19 nt, Artificial Sequence
  Description of Artificial Sequence: Synthetic oligonucleotide
caacucggagaagggcaua

SEQ ID NO: 672826 - RNA, 19 nt, Artificial Sequence
  Description of Artificial Sequence: Synthetic oligonucleotide
cgagcccacucguacacaa

SEQ ID NO: 672827 - RNA, 19 nt, Artificial Sequence
  Description of Artificial Sequence: Synthetic oligonucleotide
gcacaagaccaguguugua

SEQ ID NO: 672828 - RNA, 19 nt, Artificial Sequence
  Description of Artificial Sequence: Synthetic oligonucleotide
cucgggucgcagggugcuc

SEQ ID NO: 672829 - RNA, 19 nt, Artificial Sequence
  Description of Artificial Sequence: Synthetic oligonucleotide
cgaagcgagcggcacaucu

SEQ ID NO: 672830 - RNA, 19 nt, Artificial Sequence
  Description of Artificial Sequence: Synthetic oligonucleotide
cucgccccgccagcuucac

SEQ ID NO: 672831 - RNA, 19 nt, Artificial Sequence
  Description of Artificial Sequence: Synthetic oligonucleotide
gucggccaguuggccaguc

SEQ ID NO: 672832 - RNA, 19 nt, Artificial Sequence
  Description of Artificial Sequence: Synthetic oligonucleotide
ccaacucggagaagggcau

SEQ ID NO: 672833 - RNA, 19 nt, Artificial Sequence
  Description of Artificial Sequence: Synthetic oligonucleotide
caccaaacgggcggcgccu

SEQ ID NO: 672834 - RNA, 19 nt, Artificial Sequence
  Description of Artificial Sequence: Synthetic oligonucleotide
caacgaucuucuccccguu

SEQ ID NO: 672835 - RNA, 19 nt, Artificial Sequence
  Description of Artificial Sequence: Synthetic oligonucleotide
aggguccggagcaccucua

SEQ ID NO: 672836 - RNA, 19 nt, Artificial Sequence
  Description of Artificial Sequence: Synthetic oligonucleotide
ccucaccaauccgcuucgc

SEQ ID NO: 672837 - RNA, 19 nt, Artificial Sequence
  Description of Artificial Sequence: Synthetic oligonucleotide
cgaucuccuuaaggauggg

SEQ ID NO: 672838 - RNA, 19 nt, Artificial Sequence
  Description of Artificial Sequence: Synthetic oligonucleotide
cggcgccucgaagcgagcg

SEQ ID NO: 672839 - RNA, 19 nt, Artificial Sequence
  Description of Artificial Sequence: Synthetic oligonucleotide
agggugcucgggagcugau

SEQ ID NO: 672840 - RNA, 19 nt, Artificial Sequence
  Description of Artificial Sequence: Synthetic oligonucleotide
cguugacagggucaagggu

SEQ ID NO: 672841 - RNA, 19 nt, Artificial Sequence
  Description of Artificial Sequence: Synthetic oligonucleotide
ccccgagcccacucguaca

SEQ ID NO: 672842 - RNA, 19 nt, Artificial Sequence
  Description of Artificial Sequence: Synthetic oligonucleotide
ccgagcugguggugagguc

SEQ ID NO: 672843 - RNA, 19 nt, Artificial Sequence
  Description of Artificial Sequence: Synthetic oligonucleotide
ccgcggagucgugcaaggc

SEQ ID NO: 672844 - RNA, 19 nt, Artificial Sequence
  Description of Artificial Sequence: Synthetic oligonucleotide
cggcggaggagcucugaca

SEQ ID NO: 672845 - RNA, 19 nt, Artificial Sequence
  Description of Artificial Sequence: Synthetic oligonucleotide
cccgggcccggagggaagc

SEQ ID NO: 672846 - RNA, 19 nt, Artificial Sequence
  Description of Artificial Sequence: Synthetic oligonucleotide
ccgagaagcuccucuucau

SEQ ID NO: 672847 - RNA, 19 nt, Artificial Sequence
  Description of Artificial Sequence: Synthetic oligonucleotide
ccgcuucgccacagcuuug

SEQ ID NO: 672848 - RNA, 19 nt, Artificial Sequence
  Description of Artificial Sequence: Synthetic oligonucleotide
ccggagcacuuugguggag

SEQ ID NO: 672849 - RNA, 19 nt, Artificial Sequence
  Description of Artificial Sequence: Synthetic oligonucleotide
ccccguucacccggagcac

SEQ ID NO: 672850 - RNA, 19 nt, Artificial Sequence
  Description of Artificial Sequence: Synthetic oligonucleotide
cgcuucgccacagcuuuga

SEQ ID NO: 672851 - RNA, 19 nt, Artificial Sequence
  Description of Artificial Sequence: Synthetic oligonucleotide
ccgaagccugcucgucaca

SEQ ID NO: 672852 - RNA, 19 nt, Artificial Sequence
  Description of Artificial Sequence: Synthetic oligonucleotide
cccacacccuuuacugggu

SEQ ID NO: 672853 - RNA, 19 nt, Artificial Sequence
  Description of Artificial Sequence: Synthetic oligonucleotide
cggagcaccucuacacgcu

SEQ ID NO: 672854 - RNA, 19 nt, Artificial Sequence
  Description of Artificial Sequence: Synthetic oligonucleotide
ccccauggcgaaggucuca

SEQ ID NO: 672855 - RNA, 19 nt, Artificial Sequence
  Description of Artificial Sequence: Synthetic oligonucleotide
ccccuguuugagggugcuc

SEQ ID NO: 672856 - RNA, 19 nt, Artificial Sequence
  Description of Artificial Sequence: Synthetic oligonucleotide
gccccggcggaggagcucu

SEQ ID NO: 672857 - RNA, 19 nt, Artificial Sequence
  Description of Artificial Sequence: Synthetic oligonucleotide
ccgggcccggagggaagcc

SEQ ID NO: 672858 - RNA, 19 nt, Artificial Sequence
  Description of Artificial Sequence: Synthetic oligonucleotide
gcgucuccgucagcuccuc

SEQ ID NO: 672859 - RNA, 19 nt, Artificial Sequence
  Description of Artificial Sequence: Synthetic oligonucleotide
ccgagcccacucguacaca

SEQ ID NO: 672860 - RNA, 19 nt, Artificial Sequence
  Description of Artificial Sequence: Synthetic oligonucleotide
ggcauaccccgagcccacu

SEQ ID NO: 672861 - RNA, 19 nt, Artificial Sequence
  Description of Artificial Sequence: Synthetic oligonucleotide
ccucuacacgcugguggua

SEQ ID NO: 672862 - RNA, 19 nt, Artificial Sequence
  Description of Artificial Sequence: Synthetic oligonucleotide
cgccucgaagcgagcggca

SEQ ID NO: 672863 - RNA, 19 nt, Artificial Sequence
  Description of Artificial Sequence: Synthetic oligonucleotide
cccuucccguggacaggga

SEQ ID NO: 672864 - RNA, 19 nt, Artificial Sequence
  Description of Artificial Sequence: Synthetic oligonucleotide
cccguucacccggagcacu

SEQ ID NO: 672865 - RNA, 19 nt, Artificial Sequence
  Description of Artificial Sequence: Synthetic oligonucleotide
ccucgggucgcagggugcu

SEQ ID NO: 672866 - RNA, 19 nt, Artificial Sequence
  Description of Artificial Sequence: Synthetic oligonucleotide
ccguucacccggagcacuu

SEQ ID NO: 672867 - RNA, 19 nt, Artificial Sequence
  Description of Artificial Sequence: Synthetic oligonucleotide
cgcgucuccgucagcuccu

SEQ ID NO: 672868 - RNA, 19 nt, Artificial Sequence
  Description of Artificial Sequence: Synthetic oligonucleotide
ccccggcggaggagcucug

SEQ ID NO: 672869 - RNA, 19 nt, Artificial Sequence
  Description of Artificial Sequence: Synthetic oligonucleotide
cccggcggaggagcucuga

SEQ ID NO: 672870 - RNA, 19 nt, Artificial Sequence
  Description of Artificial Sequence: Synthetic oligonucleotide
ccagucacgucgggcuccu

SEQ ID NO: 672871 - RNA, 19 nt, Artificial Sequence
  Description of Artificial Sequence: Synthetic oligonucleotide
ggucggccaguuggccagu

SEQ ID NO: 672872 - RNA, 19 nt, Artificial Sequence
  Description of Artificial Sequence: Synthetic oligonucleotide
cgcaggccacucgccccgc

SEQ ID NO: 672873 - RNA, 19 nt, Artificial Sequence
  Description of Artificial Sequence: Synthetic oligonucleotide
cgggcccggagggaagcca

SEQ ID NO: 672874 - RNA, 19 nt, Artificial Sequence
  Description of Artificial Sequence: Synthetic oligonucleotide
gcccucggcugaacagcau

SEQ ID NO: 672875 - RNA, 19 nt, Artificial Sequence
  Description of Artificial Sequence: Synthetic oligonucleotide
ccguagcaagguggccgcu

SEQ ID NO: 672876 - RNA, 19 nt, Artificial Sequence
  Description of Artificial Sequence: Synthetic oligonucleotide
cguucacccggagcacuuu

SEQ ID NO: 672877 - RNA, 19 nt, Artificial Sequence
  Description of Artificial Sequence: Synthetic oligonucleotide
uuaauuugcauuuccaugg

SEQ ID NO: 672878 - RNA, 19 nt, Artificial Sequence
  Description of Artificial Sequence: Synthetic oligonucleotide
aauuuaaucucaucuauag

SEQ ID NO: 672879 - RNA, 19 nt, Artificial Sequence
  Description of Artificial Sequence: Synthetic oligonucleotide
auuuauacucuguucauac

SEQ ID NO: 672880 - RNA, 19 nt, Artificial Sequence
  Description of Artificial Sequence: Synthetic oligonucleotide
uccuguaucaugaugagcu

SEQ ID NO: 672881 - RNA, 19 nt, Artificial Sequence
  Description of Artificial Sequence: Synthetic oligonucleotide
ugccguguaaccaaagacg

SEQ ID NO: 672882 - RNA, 19 nt, Artificial Sequence
  Description of Artificial Sequence: Synthetic oligonucleotide
aauaaggacccgugguggc

SEQ ID NO: 672883 - RNA, 19 nt, Artificial Sequence
  Description of Artificial Sequence: Synthetic oligonucleotide
uucugacucucuaagaaag

SEQ ID NO: 672884 - RNA, 19 nt, Artificial Sequence
  Description of Artificial Sequence: Synthetic oligonucleotide
uguaucaugaugagcucgg

SEQ ID NO: 672885 - RNA, 19 nt, Artificial Sequence
  Description of Artificial Sequence: Synthetic oligonucleotide
uguaugaggucaauaagga

SEQ ID NO: 672886 - RNA, 19 nt, Artificial Sequence
  Description of Artificial Sequence: Synthetic oligonucleotide
agcaguaaucaacaaaauc

SEQ ID NO: 672887 - RNA, 19 nt, Artificial Sequence
  Description of Artificial Sequence: Synthetic oligonucleotide
ugugcaagcaguaaucaac

SEQ ID NO: 672888 - RNA, 19 nt, Artificial Sequence
  Description of Artificial Sequence: Synthetic oligonucleotide
auuugaucguggcaaagcg

SEQ ID NO: 672889 - RNA, 19 nt, Artificial Sequence
  Description of Artificial Sequence: Synthetic oligonucleotide
ucucuuuaugcuuugauau

SEQ ID NO: 672890 - RNA, 19 nt, Artificial Sequence
  Description of Artificial Sequence: Synthetic oligonucleotide
aauaguuccacugcggcug

SEQ ID NO: 672891 - RNA, 19 nt, Artificial Sequence
  Description of Artificial Sequence: Synthetic oligonucleotide
ucuaagaaaguugucaagu

SEQ ID NO: 672892 - RNA, 19 nt, Artificial Sequence
  Description of Artificial Sequence: Synthetic oligonucleotide
uauacucuguucauacugc

SEQ ID NO: 672893 - RNA, 19 nt, Artificial Sequence
  Description of Artificial Sequence: Synthetic oligonucleotide
ucaauaaggacccguggug

SEQ ID NO: 672894 - RNA, 19 nt, Artificial Sequence
  Description of Artificial Sequence: Synthetic oligonucleotide
aucuugauucucucgcugc

SEQ ID NO: 672895 - RNA, 19 nt, Artificial Sequence
  Description of Artificial Sequence: Synthetic oligonucleotide
uggagugacuuccaacugg

SEQ ID NO: 672896 - RNA, 19 nt, Artificial Sequence
  Description of Artificial Sequence: Synthetic oligonucleotide
cuugagacggugcucaucc

SEQ ID NO: 672897 - RNA, 19 nt, Artificial Sequence
  Description of Artificial Sequence: Synthetic oligonucleotide
gaacugacuggguaggccg

SEQ ID NO: 672898 - RNA, 19 nt, Artificial Sequence
  Description of Artificial Sequence: Synthetic oligonucleotide
uuauuuuccgcuugaagaa

SEQ ID NO: 672899 - RNA, 19 nt, Artificial Sequence
  Description of Artificial Sequence: Synthetic oligonucleotide
ucaagaugcgcucugcgca

SEQ ID NO: 672900 - RNA, 19 nt, Artificial Sequence
  Description of Artificial Sequence: Synthetic oligonucleotide
uccgcuuauaaccugacau

SEQ ID NO: 672901 - RNA, 19 nt, Artificial Sequence
  Description of Artificial Sequence: Synthetic oligonucleotide
uugaucguggcaaagcgcu

SEQ ID NO: 672902 - RNA, 19 nt, Artificial Sequence
  Description of Artificial Sequence: Synthetic oligonucleotide
ucuugauucucucgcugcg

SEQ ID NO: 672903 - RNA, 19 nt, Artificial Sequence
  Description of Artificial Sequence: Synthetic oligonucleotide
uguacucuagcucucgggu

SEQ ID NO: 672904 - RNA, 19 nt, Artificial Sequence
  Description of Artificial Sequence: Synthetic oligonucleotide
ucgauggacgaguuguugg

SEQ ID NO: 672905 - RNA, 19 nt, Artificial Sequence
  Description of Artificial Sequence: Synthetic oligonucleotide
ugaagucaugcuguaauag

SEQ ID NO: 672906 - RNA, 19 nt, Artificial Sequence
  Description of Artificial Sequence: Synthetic oligonucleotide
guaauaguuccacugcggc

SEQ ID NO: 672907 - RNA, 19 nt, Artificial Sequence
  Description of Artificial Sequence: Synthetic oligonucleotide
ucugucguaguacagucuc

SEQ ID NO: 672908 - RNA, 19 nt, Artificial Sequence
  Description of Artificial Sequence: Synthetic oligonucleotide
ugccugaucagcauggcgu

SEQ ID NO: 672909 - RNA, 19 nt, Artificial Sequence
  Description of Artificial Sequence: Synthetic oligonucleotide
agguauuuugugcaagcag

SEQ ID NO: 672910 - RNA, 19 nt, Artificial Sequence
  Description of Artificial Sequence: Synthetic oligonucleotide
uaaccaaagacgcggauuu

SEQ ID NO: 672911 - RNA, 19 nt, Artificial Sequence
  Description of Artificial Sequence: Synthetic oligonucleotide
cuguaauaguuccacugcg

SEQ ID NO: 672912 - RNA, 19 nt, Artificial Sequence
  Description of Artificial Sequence: Synthetic oligonucleotide
uauaguccuccuuaggaaa

SEQ ID NO: 672913 - RNA, 19 nt, Artificial Sequence
  Description of Artificial Sequence: Synthetic oligonucleotide
uccguuccgagucuccugg

SEQ ID NO: 672914 - RNA, 19 nt, Artificial Sequence
  Description of Artificial Sequence: Synthetic oligonucleotide
cuaagaaaguugucaaguc

SEQ ID NO: 672915 - RNA, 19 nt, Artificial Sequence
  Description of Artificial Sequence: Synthetic oligonucleotide
ucugaacugacuggguagg

SEQ ID NO: 672916 - RNA, 19 nt, Artificial Sequence
  Description of Artificial Sequence: Synthetic oligonucleotide
uaaccugacaucuguuccc

SEQ ID NO: 672917 - RNA, 19 nt, Artificial Sequence
  Description of Artificial Sequence: Synthetic oligonucleotide
acaugauccuucuugugca

SEQ ID NO: 672918 - RNA, 19 nt, Artificial Sequence
  Description of Artificial Sequence: Synthetic oligonucleotide
ucaaugguagccacuugcu

SEQ ID NO: 672919 - RNA, 19 nt, Artificial Sequence
  Description of Artificial Sequence: Synthetic oligonucleotide
uguuuggucuguacuuugc

SEQ ID NO: 672920 - RNA, 19 nt, Artificial Sequence
  Description of Artificial Sequence: Synthetic oligonucleotide
ucgugccugaucagcaugg

SEQ ID NO: 672921 - RNA, 19 nt, Artificial Sequence
  Description of Artificial Sequence: Synthetic oligonucleotide
ccuuacgaauacaugaucc

SEQ ID NO: 672922 - RNA, 19 nt, Artificial Sequence
  Description of Artificial Sequence: Synthetic oligonucleotide
ucuguacucuagcucucgg

SEQ ID NO: 672923 - RNA, 19 nt, Artificial Sequence
  Description of Artificial Sequence: Synthetic oligonucleotide
gauggaguggaugcuaccc

SEQ ID NO: 672924 - RNA, 19 nt, Artificial Sequence
  Description of Artificial Sequence: Synthetic oligonucleotide
uuucugucguaguacaguc

SEQ ID NO: 672925 - RNA, 19 nt, Artificial Sequence
  Description of Artificial Sequence: Synthetic oligonucleotide
ugccgaagcuccaugacgu

SEQ ID NO: 672926 - RNA, 19 nt, Artificial Sequence
  Description of Artificial Sequence: Synthetic oligonucleotide
uucucuuuaugcuuugaua

SEQ ID NO: 672927 - RNA, 19 nt, Artificial Sequence
  Description of Artificial Sequence: Synthetic oligonucleotide
uucuugugacucauucaag

SEQ ID NO: 672928 - RNA, 19 nt, Artificial Sequence
  Description of Artificial Sequence: Synthetic oligonucleotide
caauaaggacccguggugg

SEQ ID NO: 672929 - RNA, 19 nt, Artificial Sequence
  Description of Artificial Sequence: Synthetic oligonucleotide
ucucgguuccgauagugga

SEQ ID NO: 672930 - RNA, 19 nt, Artificial Sequence
  Description of Artificial Sequence: Synthetic oligonucleotide
uggcgcuugaucauuauuu

SEQ ID NO: 672931 - RNA, 19 nt, Artificial Sequence
  Description of Artificial Sequence: Synthetic oligonucleotide
ucgucuagccguaacgccu

SEQ ID NO: 672932 - RNA, 19 nt, Artificial Sequence
  Description of Artificial Sequence: Synthetic oligonucleotide
uauuuuccgcuugaagaag

SEQ ID NO: 672933 - RNA, 19 nt, Artificial Sequence
  Description of Artificial Sequence: Synthetic oligonucleotide
ucugccguguaaccaaaga

SEQ ID NO: 672934 - RNA, 19 nt, Artificial Sequence
  Description of Artificial Sequence: Synthetic oligonucleotide
uaauaguuccacugcggcu

SEQ ID NO: 672935 - RNA, 19 nt, Artificial Sequence
  Description of Artificial Sequence: Synthetic oligonucleotide
cuugcaaaucuuguacugc

SEQ ID NO: 672936 - RNA, 19 nt, Artificial Sequence
  Description of Artificial Sequence: Synthetic oligonucleotide
uguacuguuuggucuguac

SEQ ID NO: 672937 - RNA, 19 nt, Artificial Sequence
  Description of Artificial Sequence: Synthetic oligonucleotide
ucggacagcaucuuuuguc

SEQ ID NO: 672938 - RNA, 19 nt, Artificial Sequence
  Description of Artificial Sequence: Synthetic oligonucleotide
cucaagaugcgcucugcgc

SEQ ID NO: 672939 - RNA, 19 nt, Artificial Sequence
  Description of Artificial Sequence: Synthetic oligonucleotide
gacucgucgugccugauca

SEQ ID NO: 672940 - RNA, 19 nt, Artificial Sequence
  Description of Artificial Sequence: Synthetic oligonucleotide
ucgguuccgauaguggagg

SEQ ID NO: 672941 - RNA, 19 nt, Artificial Sequence
  Description of Artificial Sequence: Synthetic oligonucleotide
cuguacuuugcaagugucc

SEQ ID NO: 672942 - RNA, 19 nt, Artificial Sequence
  Description of Artificial Sequence: Synthetic oligonucleotide
uccuugcaaaucuuguacu

SEQ ID NO: 672943 - RNA, 19 nt, Artificial Sequence
  Description of Artificial Sequence: Synthetic oligonucleotide
gcaguaaucaacaaaaucu

SEQ ID NO: 672944 - RNA, 19 nt, Artificial Sequence
  Description of Artificial Sequence: Synthetic oligonucleotide
cuguaucaugaugagcucg

SEQ ID NO: 672945 - RNA, 19 nt, Artificial Sequence
  Description of Artificial Sequence: Synthetic oligonucleotide
uuuaugcuuugauauccuc

SEQ ID NO: 672946 - RNA, 19 nt, Artificial Sequence
  Description of Artificial Sequence: Synthetic oligonucleotide
aguacagucucuguugagu

SEQ ID NO: 672947 - RNA, 19 nt, Artificial Sequence
  Description of Artificial Sequence: Synthetic oligonucleotide
guuccgauaguggagggcc

SEQ ID NO: 672948 - RNA, 19 nt, Artificial Sequence
  Description of Artificial Sequence: Synthetic oligonucleotide
auaaggacccgugguggcc

SEQ ID NO: 672949 - RNA, 19 nt, Artificial Sequence
  Description of Artificial Sequence: Synthetic oligonucleotide
auucugaggcucuccaugu

SEQ ID NO: 672950 - RNA, 19 nt, Artificial Sequence
  Description of Artificial Sequence: Synthetic oligonucleotide
uuggcaugcgucuccaccu

SEQ ID NO: 672951 - RNA, 19 nt, Artificial Sequence
  Description of Artificial Sequence: Synthetic oligonucleotide
ugucguaguacagucucug

SEQ ID NO: 672952 - RNA, 19 nt, Artificial Sequence
  Description of Artificial Sequence: Synthetic oligonucleotide
uacuguuuggucuguacuu

SEQ ID NO: 672953 - RNA, 19 nt, Artificial Sequence
  Description of Artificial Sequence: Synthetic oligonucleotide
ucccuuacgaauacaugau

SEQ ID NO: 672954 - RNA, 19 nt, Artificial Sequence
  Description of Artificial Sequence: Synthetic oligonucleotide
aacugacuggguaggccgc

SEQ ID NO: 672955 - RNA, 19 nt, Artificial Sequence
  Description of Artificial Sequence: Synthetic oligonucleotide
ugaacugacuggguaggcc

SEQ ID NO: 672956 - RNA, 19 nt, Artificial Sequence
  Description of Artificial Sequence: Synthetic oligonucleotide
uguucagguugcuuccaug

SEQ ID NO: 672957 - RNA, 19 nt, Artificial Sequence
  Description of Artificial Sequence: Synthetic oligonucleotide
ugauauccucuccugcuuc

SEQ ID NO: 672958 - RNA, 19 nt, Artificial Sequence
  Description of Artificial Sequence: Synthetic oligonucleotide
cucacugacacgcugggga

SEQ ID NO: 672959 - RNA, 19 nt, Artificial Sequence
  Description of Artificial Sequence: Synthetic oligonucleotide
agcucgauggacgaguugu

SEQ ID NO: 672960 - RNA, 19 nt, Artificial Sequence
  Description of Artificial Sequence: Synthetic oligonucleotide
gagucgguccaaucccugg

SEQ ID NO: 672961 - RNA, 19 nt, Artificial Sequence
  Description of Artificial Sequence: Synthetic oligonucleotide
ucguaguacagucucuguu

SEQ ID NO: 672962 - RNA, 19 nt, Artificial Sequence
  Description of Artificial Sequence: Synthetic oligonucleotide
auccgcugaggcuaccuuc

SEQ ID NO: 672963 - RNA, 19 nt, Artificial Sequence
  Description of Artificial Sequence: Synthetic oligonucleotide
uccaugacgugcuuccggu

SEQ ID NO: 672964 - RNA, 19 nt, Artificial Sequence
  Description of Artificial Sequence: Synthetic oligonucleotide
accaaauucccaaauccca

SEQ ID NO: 672965 - RNA, 19 nt, Artificial Sequence
  Description of Artificial Sequence: Synthetic oligonucleotide
guaugaggucaauaaggac

SEQ ID NO: 672966 - RNA, 19 nt, Artificial Sequence
  Description of Artificial Sequence: Synthetic oligonucleotide
ugucaccaaauucccaaau

SEQ ID NO: 672967 - RNA, 19 nt, Artificial Sequence
  Description of Artificial Sequence: Synthetic oligonucleotide
acgcggauuugaucguggc

SEQ ID NO: 672968 - RNA, 19 nt, Artificial Sequence
  Description of Artificial Sequence: Synthetic oligonucleotide
uaggcguugagcagcucca

SEQ ID NO: 672969 - RNA, 19 nt, Artificial Sequence
  Description of Artificial Sequence: Synthetic oligonucleotide
uaaggacccgugguggccg

SEQ ID NO: 672970 - RNA, 19 nt, Artificial Sequence
  Description of Artificial Sequence: Synthetic oligonucleotide
caaugugugcagcugucug

SEQ ID NO: 672971 - RNA, 19 nt, Artificial Sequence
  Description of Artificial Sequence: Synthetic oligonucleotide
uuauaaccugacaucuguu

SEQ ID NO: 672972 - RNA, 19 nt, Artificial Sequence
  Description of Artificial Sequence: Synthetic oligonucleotide
cucgucuagccguaacgcc

SEQ ID NO: 672973 - RNA, 19 nt, Artificial Sequence
  Description of Artificial Sequence: Synthetic oligonucleotide
cuucgccuccuuuucaaug

SEQ ID NO: 672974 - RNA, 19 nt, Artificial Sequence
  Description of Artificial Sequence: Synthetic oligonucleotide
cucgguuccgauaguggag

SEQ ID NO: 672975 - RNA, 19 nt, Artificial Sequence
  Description of Artificial Sequence: Synthetic oligonucleotide
caaggguccguuccgaguc

SEQ ID NO: 672976 - RNA, 19 nt, Artificial Sequence
  Description of Artificial Sequence: Synthetic oligonucleotide
ggucaauaaggacccgugg

SEQ ID NO: 672977 - RNA, 19 nt, Artificial Sequence
  Description of Artificial Sequence: Synthetic oligonucleotide
ugcccgugcucacugacac

SEQ ID NO: 672978 - RNA, 19 nt, Artificial Sequence
  Description of Artificial Sequence: Synthetic oligonucleotide
cugcguaugcugcagguuc

SEQ ID NO: 672979 - RNA, 19 nt, Artificial Sequence
  Description of Artificial Sequence: Synthetic oligonucleotide
uucaaggguccguuccgag

SEQ ID NO: 672980 - RNA, 19 nt, Artificial Sequence
  Description of Artificial Sequence: Synthetic oligonucleotide
caucccuuacgaauacaug

SEQ ID NO: 672981 - RNA, 19 nt, Artificial Sequence
  Description of Artificial Sequence: Synthetic oligonucleotide
uguaaccaaagacgcggau

SEQ ID NO: 672982 - RNA, 19 nt, Artificial Sequence
  Description of Artificial Sequence: Synthetic oligonucleotide
uuacgaauacaugauccuu

SEQ ID NO: 672983 - RNA, 19 nt, Artificial Sequence
  Description of Artificial Sequence: Synthetic oligonucleotide
uugauauccucuccugcuu

SEQ ID NO: 672984 - RNA, 19 nt, Artificial Sequence
  Description of Artificial Sequence: Synthetic oligonucleotide
ucaaggguccguuccgagu

SEQ ID NO: 672985 - RNA, 19 nt, Artificial Sequence
  Description of Artificial Sequence: Synthetic oligonucleotide
aacgccugagaagccauca

SEQ ID NO: 672986 - RNA, 19 nt, Artificial Sequence
  Description of Artificial Sequence: Synthetic oligonucleotide
uucugucguaguacagucu

SEQ ID NO: 672987 - RNA, 19 nt, Artificial Sequence
  Description of Artificial Sequence: Synthetic oligonucleotide
uuauucaguuccucccgaa

SEQ ID NO: 672988 - RNA, 19 nt, Artificial Sequence
  Description of Artificial Sequence: Synthetic oligonucleotide
cucgcugcguuccuucugc

SEQ ID NO: 672989 - RNA, 19 nt, Artificial Sequence
  Description of Artificial Sequence: Synthetic oligonucleotide
caugaccuccuguaugcug

SEQ ID NO: 672990 - RNA, 19 nt, Artificial Sequence
  Description of Artificial Sequence: Synthetic oligonucleotide
gacucucuaagaaaguugu

SEQ ID NO: 672991 - RNA, 19 nt, Artificial Sequence
  Description of Artificial Sequence: Synthetic oligonucleotide
aagacgcggauuugaucgu

SEQ ID NO: 672992 - RNA, 19 nt, Artificial Sequence
  Description of Artificial Sequence: Synthetic oligonucleotide
cuagcucucggguggacuc

SEQ ID NO: 672993 - RNA, 19 nt, Artificial Sequence
  Description of Artificial Sequence: Synthetic oligonucleotide
ugcuaugguccucauucau

SEQ ID NO: 672994 - RNA, 19 nt, Artificial Sequence
  Description of Artificial Sequence: Synthetic oligonucleotide
cugguaggcguugagcagc

SEQ ID NO: 672995 - RNA, 19 nt, Artificial Sequence
  Description of Artificial Sequence: Synthetic oligonucleotide
guacuuugcaaguguccug

SEQ ID NO: 672996 - RNA, 19 nt, Artificial Sequence
  Description of Artificial Sequence: Synthetic oligonucleotide
aaggacccgugguggccgc

SEQ ID NO: 672997 - RNA, 19 nt, Artificial Sequence
  Description of Artificial Sequence: Synthetic oligonucleotide
ugcguaugcugcagguucu

SEQ ID NO: 672998 - RNA, 19 nt, Artificial Sequence
  Description of Artificial Sequence: Synthetic oligonucleotide
uugggugugcuaugguccu

SEQ ID NO: 672999 - RNA, 19 nt, Artificial Sequence
  Description of Artificial Sequence: Synthetic oligonucleotide
uguagccggaucagaucca

SEQ ID NO: 673000 - RNA, 19 nt, Artificial Sequence
  Description of Artificial Sequence: Synthetic oligonucleotide
cuguuuggucuguacuuug

SEQ ID NO: 673001 - RNA, 19 nt, Artificial Sequence
  Description of Artificial Sequence: Synthetic oligonucleotide
gugccugaucagcauggcg

SEQ ID NO: 673002 - RNA, 19 nt, Artificial Sequence
  Description of Artificial Sequence: Synthetic oligonucleotide
gccguaacgccugagaagc

SEQ ID NO: 673003 - RNA, 19 nt, Artificial Sequence
  Description of Artificial Sequence: Synthetic oligonucleotide
cucucggguggacucgucg

SEQ ID NO: 673004 - RNA, 19 nt, Artificial Sequence
  Description of Artificial Sequence: Synthetic oligonucleotide
gcaaaucuuguacugcuuc

SEQ ID NO: 673005 - RNA, 19 nt, Artificial Sequence
  Description of Artificial Sequence: Synthetic oligonucleotide
ucucggguggacucgucgu

SEQ ID NO: 673006 - RNA, 19 nt, Artificial Sequence
  Description of Artificial Sequence: Synthetic oligonucleotide
ugcggcuggucuuuccuga

SEQ ID NO: 673007 - RNA, 19 nt, Artificial Sequence
  Description of Artificial Sequence: Synthetic oligonucleotide
cuuacgaauacaugauccu

SEQ ID NO: 673008 - RNA, 19 nt, Artificial Sequence
  Description of Artificial Sequence: Synthetic oligonucleotide
gacgcggauuugaucgugg

SEQ ID NO: 673009 - RNA, 19 nt, Artificial Sequence
  Description of Artificial Sequence: Synthetic oligonucleotide
ugcaaaucuuguacugcuu

SEQ ID NO: 673010 - RNA, 19 nt, Artificial Sequence
  Description of Artificial Sequence: Synthetic oligonucleotide
agucgguccaaucccugga

SEQ ID NO: 673011 - RNA, 19 nt, Artificial Sequence
  Description of Artificial Sequence: Synthetic oligonucleotide
ucgguccaaucccuggacu

SEQ ID NO: 673012 - RNA, 19 nt, Artificial Sequence
  Description of Artificial Sequence: Synthetic oligonucleotide
cugagguauuuugugcaag

SEQ ID NO: 673013 - RNA, 19 nt, Artificial Sequence
  Description of Artificial Sequence: Synthetic oligonucleotide
gagcuugagacggugcuca

SEQ ID NO: 673014 - RNA, 19 nt, Artificial Sequence
  Description of Artificial Sequence: Synthetic oligonucleotide
cugcucgucuuucaguguc

SEQ ID NO: 673015 - RNA, 19 nt, Artificial Sequence
  Description of Artificial Sequence: Synthetic oligonucleotide
aucguggcaaagcgcucuc

SEQ ID NO: 673016 - RNA, 19 nt, Artificial Sequence
  Description of Artificial Sequence: Synthetic oligonucleotide
auggacgaguuguuggcau

SEQ ID NO: 673017 - RNA, 19 nt, Artificial Sequence
  Description of Artificial Sequence: Synthetic oligonucleotide
caugauccuucuugugcac

SEQ ID NO: 673018 - RNA, 19 nt, Artificial Sequence
  Description of Artificial Sequence: Synthetic oligonucleotide
aggucaauaaggacccgug

SEQ ID NO: 673019 - RNA, 19 nt, Artificial Sequence
  Description of Artificial Sequence: Synthetic oligonucleotide
acuggguaggccgcggcuc

SEQ ID NO: 673020 - RNA, 19 nt, Artificial Sequence
  Description of Artificial Sequence: Synthetic oligonucleotide
cguaguacagucucuguug

SEQ ID NO: 673021 - RNA, 19 nt, Artificial Sequence
  Description of Artificial Sequence: Synthetic oligonucleotide
gguauuuugugcaagcagu

SEQ ID NO: 673022 - RNA, 19 nt, Artificial Sequence
  Description of Artificial Sequence: Synthetic oligonucleotide
gacgaguuguuggcaugcg

SEQ ID NO: 673023 - RNA, 19 nt, Artificial Sequence
  Description of Artificial Sequence: Synthetic oligonucleotide
ucguggaucugccguguaa

SEQ ID NO: 673024 - RNA, 19 nt, Artificial Sequence
  Description of Artificial Sequence: Synthetic oligonucleotide
ucuagcucucggguggacu

SEQ ID NO: 673025 - RNA, 19 nt, Artificial Sequence
  Description of Artificial Sequence: Synthetic oligonucleotide
ucugcucgucuuucagugu

SEQ ID NO: 673026 - RNA, 19 nt, Artificial Sequence
  Description of Artificial Sequence: Synthetic oligonucleotide
acgaguuguuggcaugcgu

SEQ ID NO: 673027 - RNA, 19 nt, Artificial Sequence
  Description of Artificial Sequence: Synthetic oligonucleotide
gucgugccugaucagcaug

SEQ ID NO: 673028 - RNA, 19 nt, Artificial Sequence
  Description of Artificial Sequence: Synthetic oligonucleotide
aaggguccguuccgagucu

SEQ ID NO: 673029 - RNA, 19 nt, Artificial Sequence
  Description of Artificial Sequence: Synthetic oligonucleotide
guacuguuuggucuguacu

SEQ ID NO: 673030 - RNA, 19 nt, Artificial Sequence
  Description of Artificial Sequence: Synthetic oligonucleotide
cucauucaaggguccguuc

SEQ ID NO: 673031 - RNA, 19 nt, Artificial Sequence
  Description of Artificial Sequence: Synthetic oligonucleotide
ucauggcgcuugaucauua

SEQ ID NO: 673032 - RNA, 19 nt, Artificial Sequence
  Description of Artificial Sequence: Synthetic oligonucleotide
augacgugcuuccggugca

SEQ ID NO: 673033 - RNA, 19 nt, Artificial Sequence
  Description of Artificial Sequence: Synthetic oligonucleotide
ugguaggcguugagcagcu

SEQ ID NO: 673034 - RNA, 19 nt, Artificial Sequence
  Description of Artificial Sequence: Synthetic oligonucleotide
gccucgucuagccguaacg

SEQ ID NO: 673035 - RNA, 19 nt, Artificial Sequence
  Description of Artificial Sequence: Synthetic oligonucleotide
cuccuguaucaugaugagc

SEQ ID NO: 673036 - RNA, 19 nt, Artificial Sequence
  Description of Artificial Sequence: Synthetic oligonucleotide
gugguggccgcucccuccg

SEQ ID NO: 673037 - RNA, 19 nt, Artificial Sequence
  Description of Artificial Sequence: Synthetic oligonucleotide
caugaugagcucggggcug

SEQ ID NO: 673038 - RNA, 19 nt, Artificial Sequence
  Description of Artificial Sequence: Synthetic oligonucleotide
uggucuuuccugagguauu

SEQ ID NO: 673039 - RNA, 19 nt, Artificial Sequence
  Description of Artificial Sequence: Synthetic oligonucleotide
ucuguucccgcaacucguu

SEQ ID NO: 673040 - RNA, 19 nt, Artificial Sequence
  Description of Artificial Sequence: Synthetic oligonucleotide
cugggaucgccguggcccg

SEQ ID NO: 673041 - RNA, 19 nt, Artificial Sequence
  Description of Artificial Sequence: Synthetic oligonucleotide
gauggacgaguuguuggca

SEQ ID NO: 673042 - RNA, 19 nt, Artificial Sequence
  Description of Artificial Sequence: Synthetic oligonucleotide
agccugcguaugcugcagg

SEQ ID NO: 673043 - RNA, 19 nt, Artificial Sequence
  Description of Artificial Sequence: Synthetic oligonucleotide
uccgauaguggagggccug

SEQ ID NO: 673044 - RNA, 19 nt, Artificial Sequence
  Description of Artificial Sequence: Synthetic oligonucleotide
ccggaucagauccauucgg

SEQ ID NO: 673045 - RNA, 19 nt, Artificial Sequence
  Description of Artificial Sequence: Synthetic oligonucleotide
uuccgauaguggagggccu

SEQ ID NO: 673046 - RNA, 19 nt, Artificial Sequence
  Description of Artificial Sequence: Synthetic oligonucleotide
ugaucguggcaaagcgcuc

SEQ ID NO: 673047 - RNA, 19 nt, Artificial Sequence
  Description of Artificial Sequence: Synthetic oligonucleotide
ucuagccguaacgccugag

SEQ ID NO: 673048 - RNA, 19 nt, Artificial Sequence
  Description of Artificial Sequence: Synthetic oligonucleotide
ucggguggacucgucgugc

SEQ ID NO: 673049 - RNA, 19 nt, Artificial Sequence
  Description of Artificial Sequence: Synthetic oligonucleotide
ucucauccgcugaggcuac

SEQ ID NO: 673050 - RNA, 19 nt, Artificial Sequence
  Description of Artificial Sequence: Synthetic oligonucleotide
ucccgccucuuauuguacu

SEQ ID NO: 673051 - RNA, 19 nt, Artificial Sequence
  Description of Artificial Sequence: Synthetic oligonucleotide
ccuccgaaugaagucaugc

SEQ ID NO: 673052 - RNA, 19 nt, Artificial Sequence
  Description of Artificial Sequence: Synthetic oligonucleotide
agagacacccucugcucua

SEQ ID NO: 673053 - RNA, 19 nt, Artificial Sequence
  Description of Artificial Sequence: Synthetic oligonucleotide
ucgccuccuuuucaauggu

SEQ ID NO: 673054 - RNA, 19 nt, Artificial Sequence
  Description of Artificial Sequence: Synthetic oligonucleotide
uggaguugacagugacuuc

SEQ ID NO: 673055 - RNA, 19 nt, Artificial Sequence
  Description of Artificial Sequence: Synthetic oligonucleotide
ugaucagcauggcgugcuc

SEQ ID NO: 673056 - RNA, 19 nt, Artificial Sequence
  Description of Artificial Sequence: Synthetic oligonucleotide
ucguggcaaagcgcucucg

SEQ ID NO: 673057 - RNA, 19 nt, Artificial Sequence
  Description of Artificial Sequence: Synthetic oligonucleotide
ggcaaagcgcucucgguuc

SEQ ID NO: 673058 - RNA, 19 nt, Artificial Sequence
  Description of Artificial Sequence: Synthetic oligonucleotide
gcgcucucgguuccgauag

SEQ ID NO: 673059 - RNA, 19 nt, Artificial Sequence
  Description of Artificial Sequence: Synthetic oligonucleotide
uaacgccugagaagccauc

SEQ ID NO: 673060 - RNA, 19 nt, Artificial Sequence
  Description of Artificial Sequence: Synthetic oligonucleotide
guucccgcaacucguucuc

SEQ ID NO: 673061 - RNA, 19 nt, Artificial Sequence
  Description of Artificial Sequence: Synthetic oligonucleotide
ucauccgcugaggcuaccu

SEQ ID NO: 673062 - RNA, 19 nt, Artificial Sequence
  Description of Artificial Sequence: Synthetic oligonucleotide
auggcgcuugaucauuauu

SEQ ID NO: 673063 - RNA, 19 nt, Artificial Sequence
  Description of Artificial Sequence: Synthetic oligonucleotide
cucggguggacucgucgug

SEQ ID NO: 673064 - RNA, 19 nt, Artificial Sequence
  Description of Artificial Sequence: Synthetic oligonucleotide
cucccuccgaaugaaguca

SEQ ID NO: 673065 - RNA, 19 nt, Artificial Sequence
  Description of Artificial Sequence: Synthetic oligonucleotide
ccgcuuauaaccugacauc

SEQ ID NO: 673066 - RNA, 19 nt, Artificial Sequence
  Description of Artificial Sequence: Synthetic oligonucleotide
cgaguuguuggcaugcguc

SEQ ID NO: 673067 - RNA, 19 nt, Artificial Sequence
  Description of Artificial Sequence: Synthetic oligonucleotide
cugcucaagaugcgcucug

SEQ ID NO: 673068 - RNA, 19 nt, Artificial Sequence
  Description of Artificial Sequence: Synthetic oligonucleotide
ucccgaauguucugcuguu

SEQ ID NO: 673069 - RNA, 19 nt, Artificial Sequence
  Description of Artificial Sequence: Synthetic oligonucleotide
gaucguggcaaagcgcucu

SEQ ID NO: 673070 - RNA, 19 nt, Artificial Sequence
  Description of Artificial Sequence: Synthetic oligonucleotide
gaugcuacccaggcugucu

SEQ ID NO: 673071 - RNA, 19 nt, Artificial Sequence
  Description of Artificial Sequence: Synthetic oligonucleotide
ccguguaaccaaagacgcg

SEQ ID NO: 673072 - RNA, 19 nt, Artificial Sequence
  Description of Artificial Sequence: Synthetic oligonucleotide
agacgcggauuugaucgug

SEQ ID NO: 673073 - RNA, 19 nt, Artificial Sequence
  Description of Artificial Sequence: Synthetic oligonucleotide
cgauggacgaguuguuggc

SEQ ID NO: 673074 - RNA, 19 nt, Artificial Sequence
  Description of Artificial Sequence: Synthetic oligonucleotide
guaguuuugcagggucuga

SEQ ID NO: 673075 - RNA, 19 nt, Artificial Sequence
  Description of Artificial Sequence: Synthetic oligonucleotide
guaggccgcggcucaggcc

SEQ ID NO: 673076 - RNA, 19 nt, Artificial Sequence
  Description of Artificial Sequence: Synthetic oligonucleotide
uguuggcaugcgucuccac

SEQ ID NO: 673077 - RNA, 19 nt, Artificial Sequence
  Description of Artificial Sequence: Synthetic oligonucleotide
ccuccuguaucaugaugag

SEQ ID NO: 673078 - RNA, 19 nt, Artificial Sequence
  Description of Artificial Sequence: Synthetic oligonucleotide
auucucucgcugcguuccu

SEQ ID NO: 673079 - RNA, 19 nt, Artificial Sequence
  Description of Artificial Sequence: Synthetic oligonucleotide
cagcucgcgcucgugcugg

SEQ ID NO: 673080 - RNA, 19 nt, Artificial Sequence
  Description of Artificial Sequence: Synthetic oligonucleotide
gccugaucagcauggcgug

SEQ ID NO: 673081 - RNA, 19 nt, Artificial Sequence
  Description of Artificial Sequence: Synthetic oligonucleotide
gguggacucgucgugccug

SEQ ID NO: 673082 - RNA, 19 nt, Artificial Sequence
  Description of Artificial Sequence: Synthetic oligonucleotide
augcuacccaggcugucua

SEQ ID NO: 673083 - RNA, 19 nt, Artificial Sequence
  Description of Artificial Sequence: Synthetic oligonucleotide
ggugcuggcgccgcauccg

SEQ ID NO: 673084 - RNA, 19 nt, Artificial Sequence
  Description of Artificial Sequence: Synthetic oligonucleotide
uucccgcaacucguucucc

SEQ ID NO: 673085 - RNA, 19 nt, Artificial Sequence
  Description of Artificial Sequence: Synthetic oligonucleotide
cucccgaauguucugcugu

SEQ ID NO: 673086 - RNA, 19 nt, Artificial Sequence
  Description of Artificial Sequence: Synthetic oligonucleotide
gcgcuugaucauuauuuuc

SEQ ID NO: 673087 - RNA, 19 nt, Artificial Sequence
  Description of Artificial Sequence: Synthetic oligonucleotide
cacugcggcuggucuuucc

SEQ ID NO: 673088 - RNA, 19 nt, Artificial Sequence
  Description of Artificial Sequence: Synthetic oligonucleotide
guaaccaaagacgcggauu

SEQ ID NO: 673089 - RNA, 19 nt, Artificial Sequence
  Description of Artificial Sequence: Synthetic oligonucleotide
gacccgugguggccgcucc

SEQ ID NO: 673090 - RNA, 19 nt, Artificial Sequence
  Description of Artificial Sequence: Synthetic oligonucleotide
gcaaagcgcucucgguucc

SEQ ID NO: 673091 - RNA, 19 nt, Artificial Sequence
  Description of Artificial Sequence: Synthetic oligonucleotide
gacgugcuuccggugcagc

SEQ ID NO: 673092 - RNA, 19 nt, Artificial Sequence
  Description of Artificial Sequence: Synthetic oligonucleotide
guguaaccaaagacgcgga

SEQ ID NO: 673093 - RNA, 19 nt, Artificial Sequence
  Description of Artificial Sequence: Synthetic oligonucleotide
aggagucgguccaaucccu

SEQ ID NO: 673094 - RNA, 19 nt, Artificial Sequence
  Description of Artificial Sequence: Synthetic oligonucleotide
aggguccguuccgagucuc

SEQ ID NO: 673095 - RNA, 19 nt, Artificial Sequence
  Description of Artificial Sequence: Synthetic oligonucleotide
acgccugagaagccaucau

SEQ ID NO: 673096 - RNA, 19 nt, Artificial Sequence
  Description of Artificial Sequence: Synthetic oligonucleotide
ccgaaugaagucaugcugu

SEQ ID NO: 673097 - RNA, 19 nt, Artificial Sequence
  Description of Artificial Sequence: Synthetic oligonucleotide
gcucugguaggcguugagc

SEQ ID NO: 673098 - RNA, 19 nt, Artificial Sequence
  Description of Artificial Sequence: Synthetic oligonucleotide
aucugccguguaaccaaag

SEQ ID NO: 673099 - RNA, 19 nt, Artificial Sequence
  Description of Artificial Sequence: Synthetic oligonucleotide
cccuuacgaauacaugauc

SEQ ID NO: 673100 - RNA, 19 nt, Artificial Sequence
  Description of Artificial Sequence: Synthetic oligonucleotide
ccuguaucaugaugagcuc

SEQ ID NO: 673101 - RNA, 19 nt, Artificial Sequence
  Description of Artificial Sequence: Synthetic oligonucleotide
gaucugccguguaaccaaa

SEQ ID NO: 673102 - RNA, 19 nt, Artificial Sequence
  Description of Artificial Sequence: Synthetic oligonucleotide
ucgcugcguuccuucugca

SEQ ID NO: 673103 - RNA, 19 nt, Artificial Sequence
  Description of Artificial Sequence: Synthetic oligonucleotide
cauucggagcuucugcaau

SEQ ID NO: 673104 - RNA, 19 nt, Artificial Sequence
  Description of Artificial Sequence: Synthetic oligonucleotide
gcucucgguuccgauagug

SEQ ID NO: 673105 - RNA, 19 nt, Artificial Sequence
  Description of Artificial Sequence: Synthetic oligonucleotide
gcgcucugcgcagagacac

SEQ ID NO: 673106 - RNA, 19 nt, Artificial Sequence
  Description of Artificial Sequence: Synthetic oligonucleotide
cagcucgauggacgaguug

SEQ ID NO: 673107 - RNA, 19 nt, Artificial Sequence
  Description of Artificial Sequence: Synthetic oligonucleotide
cugcccgugcucacugaca

SEQ ID NO: 673108 - RNA, 19 nt, Artificial Sequence
  Description of Artificial Sequence: Synthetic oligonucleotide
ccgccucuuauuguacucc

SEQ ID NO: 673109 - RNA, 19 nt, Artificial Sequence
  Description of Artificial Sequence: Synthetic oligonucleotide
cugaucagcauggcgugcu

SEQ ID NO: 673110 - RNA, 19 nt, Artificial Sequence
  Description of Artificial Sequence: Synthetic oligonucleotide
gcugcccgugcucacugac

SEQ ID NO: 673111 - RNA, 19 nt, Artificial Sequence
  Description of Artificial Sequence: Synthetic oligonucleotide
ggacucgucgugccugauc

SEQ ID NO: 673112 - RNA, 19 nt, Artificial Sequence
  Description of Artificial Sequence: Synthetic oligonucleotide
cuugauucucucgcugcgu

SEQ ID NO: 673113 - RNA, 19 nt, Artificial Sequence
  Description of Artificial Sequence: Synthetic oligonucleotide
gcggcuggucuuuccugag

SEQ ID NO: 673114 - RNA, 19 nt, Artificial Sequence
  Description of Artificial Sequence: Synthetic oligonucleotide
cgucuagccguaacgccug

SEQ ID NO: 673115 - RNA, 19 nt, Artificial Sequence
  Description of Artificial Sequence: Synthetic oligonucleotide
cugucguaguacagucucu

SEQ ID NO: 673116 - RNA, 19 nt, Artificial Sequence
  Description of Artificial Sequence: Synthetic oligonucleotide
caaugguagccacuugcuu

SEQ ID NO: 673117 - RNA, 19 nt, Artificial Sequence
  Description of Artificial Sequence: Synthetic oligonucleotide
cgugcucacugacacgcug

SEQ ID NO: 673118 - RNA, 19 nt, Artificial Sequence
  Description of Artificial Sequence: Synthetic oligonucleotide
guaacgccugagaagccau

SEQ ID NO: 673119 - RNA, 19 nt, Artificial Sequence
  Description of Artificial Sequence: Synthetic oligonucleotide
cccgccucuuauuguacuc

SEQ ID NO: 673120 - RNA, 19 nt, Artificial Sequence
  Description of Artificial Sequence: Synthetic oligonucleotide
gacuuccaacuggugauuu

SEQ ID NO: 673121 - RNA, 19 nt, Artificial Sequence
  Description of Artificial Sequence: Synthetic oligonucleotide
gaucgccguggcccgccuc

SEQ ID NO: 673122 - RNA, 19 nt, Artificial Sequence
  Description of Artificial Sequence: Synthetic oligonucleotide
cauccaugaccuccuguau

SEQ ID NO: 673123 - RNA, 19 nt, Artificial Sequence
  Description of Artificial Sequence: Synthetic oligonucleotide
ccugagguauuuugugcaa

SEQ ID NO: 673124 - RNA, 19 nt, Artificial Sequence
  Description of Artificial Sequence: Synthetic oligonucleotide
ggcgcuugaucauuauuuu

SEQ ID NO: 673125 - RNA, 19 nt, Artificial Sequence
  Description of Artificial Sequence: Synthetic oligonucleotide
cccgcaacucguucuccug

SEQ ID NO: 673126 - RNA, 19 nt, Artificial Sequence
  Description of Artificial Sequence: Synthetic oligonucleotide
gcccgugcucacugacacg

SEQ ID NO: 673127 - RNA, 19 nt, Artificial Sequence
  Description of Artificial Sequence: Synthetic oligonucleotide
uggcgccgcauccgcuuau

SEQ ID NO: 673128 - RNA, 19 nt, Artificial Sequence
  Description of Artificial Sequence: Synthetic oligonucleotide
ccaugacgugcuuccggug

SEQ ID NO: 673129 - RNA, 19 nt, Artificial Sequence
  Description of Artificial Sequence: Synthetic oligonucleotide
gucuagccguaacgccuga

SEQ ID NO: 673130 - RNA, 19 nt, Artificial Sequence
  Description of Artificial Sequence: Synthetic oligonucleotide
ccugaucagcauggcgugc

SEQ ID NO: 673131 - RNA, 19 nt, Artificial Sequence
  Description of Artificial Sequence: Synthetic oligonucleotide
cucauccgcugaggcuacc

SEQ ID NO: 673132 - RNA, 19 nt, Artificial Sequence
  Description of Artificial Sequence: Synthetic oligonucleotide
ccguaacgccugagaagcc

SEQ ID NO: 673133 - RNA, 19 nt, Artificial Sequence
  Description of Artificial Sequence: Synthetic oligonucleotide
cgccgcauccgcuuauaac

SEQ ID NO: 673134 - RNA, 19 nt, Artificial Sequence
  Description of Artificial Sequence: Synthetic oligonucleotide
gaagcuccaugacgugcuu

SEQ ID NO: 673135 - RNA, 19 nt, Artificial Sequence
  Description of Artificial Sequence: Synthetic oligonucleotide
guagccggaucagauccau

SEQ ID NO: 673136 - RNA, 19 nt, Artificial Sequence
  Description of Artificial Sequence: Synthetic oligonucleotide
cauggcgcuugaucauuau

SEQ ID NO: 673137 - RNA, 19 nt, Artificial Sequence
  Description of Artificial Sequence: Synthetic oligonucleotide
cgcuuauaaccugacaucu

SEQ ID NO: 673138 - RNA, 19 nt, Artificial Sequence
  Description of Artificial Sequence: Synthetic oligonucleotide
gucuggugcuguagccgga

SEQ ID NO: 673139 - RNA, 19 nt, Artificial Sequence
  Description of Artificial Sequence: Synthetic oligonucleotide
cguaacgccugagaagcca

SEQ ID NO: 673140 - RNA, 19 nt, Artificial Sequence
  Description of Artificial Sequence: Synthetic oligonucleotide
cuugucuuuccaggagaau

SEQ ID NO: 673141 - RNA, 19 nt, Artificial Sequence
  Description of Artificial Sequence: Synthetic oligonucleotide
cauccuccuguaucaugau

SEQ ID NO: 673142 - RNA, 19 nt, Artificial Sequence
  Description of Artificial Sequence: Synthetic oligonucleotide
gcuggaguugacagugacu

SEQ ID NO: 673143 - RNA, 19 nt, Artificial Sequence
  Description of Artificial Sequence: Synthetic oligonucleotide
ccaaagacgcggauuugau

SEQ ID NO: 673144 - RNA, 19 nt, Artificial Sequence
  Description of Artificial Sequence: Synthetic oligonucleotide
ggguccguuccgagucucc

SEQ ID NO: 673145 - RNA, 19 nt, Artificial Sequence
  Description of Artificial Sequence: Synthetic oligonucleotide
ccgucucucgcucuugucu

SEQ ID NO: 673146 - RNA, 19 nt, Artificial Sequence
  Description of Artificial Sequence: Synthetic oligonucleotide
cgauaguggagggccuggc

SEQ ID NO: 673147 - RNA, 19 nt, Artificial Sequence
  Description of Artificial Sequence: Synthetic oligonucleotide
cccgaauguucugcuguuc

SEQ ID NO: 673148 - RNA, 19 nt, Artificial Sequence
  Description of Artificial Sequence: Synthetic oligonucleotide
cucguggaucugccgugua

SEQ ID NO: 673149 - RNA, 19 nt, Artificial Sequence
  Description of Artificial Sequence: Synthetic oligonucleotide
gucuccgucucucgcucuu

SEQ ID NO: 673150 - RNA, 19 nt, Artificial Sequence
  Description of Artificial Sequence: Synthetic oligonucleotide
cgcucugcgcagagacacc

SEQ ID NO: 673151 - RNA, 19 nt, Artificial Sequence
  Description of Artificial Sequence: Synthetic oligonucleotide
gguccguuccgagucuccu

SEQ ID NO: 673152 - RNA, 19 nt, Artificial Sequence
  Description of Artificial Sequence: Synthetic oligonucleotide
cauccgcugaggcuaccuu

SEQ ID NO: 673153 - RNA, 19 nt, Artificial Sequence
  Description of Artificial Sequence: Synthetic oligonucleotide
ccgcucccuccgaaugaag

SEQ ID NO: 673154 - RNA, 19 nt, Artificial Sequence
  Description of Artificial Sequence: Synthetic oligonucleotide
gcguaugcugcagguucuc

SEQ ID NO: 673155 - RNA, 19 nt, Artificial Sequence
  Description of Artificial Sequence: Synthetic oligonucleotide
cuggcgccgcauccgcuua

SEQ ID NO: 673156 - RNA, 19 nt, Artificial Sequence
  Description of Artificial Sequence: Synthetic oligonucleotide
ucgccguggcccgccucau

SEQ ID NO: 673157 - RNA, 19 nt, Artificial Sequence
  Description of Artificial Sequence: Synthetic oligonucleotide
ggcugcccgugcucacuga

SEQ ID NO: 673158 - RNA, 19 nt, Artificial Sequence
  Description of Artificial Sequence: Synthetic oligonucleotide
cgccucaucccuuacgaau

SEQ ID NO: 673159 - RNA, 19 nt, Artificial Sequence
  Description of Artificial Sequence: Synthetic oligonucleotide
ggacccgugguggccgcuc

SEQ ID NO: 673160 - RNA, 19 nt, Artificial Sequence
  Description of Artificial Sequence: Synthetic oligonucleotide
gguugcuuccaugcucauu

SEQ ID NO: 673161 - RNA, 19 nt, Artificial Sequence
  Description of Artificial Sequence: Synthetic oligonucleotide
ccucauggcgcuugaucau

SEQ ID NO: 673162 - RNA, 19 nt, Artificial Sequence
  Description of Artificial Sequence: Synthetic oligonucleotide
cgcucccuccgaaugaagu

SEQ ID NO: 673163 - RNA, 19 nt, Artificial Sequence
  Description of Artificial Sequence: Synthetic oligonucleotide
gcgccgcauccgcuuauaa

SEQ ID NO: 673164 - RNA, 19 nt, Artificial Sequence
  Description of Artificial Sequence: Synthetic oligonucleotide
gcuggcgccgcauccgcuu

SEQ ID NO: 673165 - RNA, 19 nt, Artificial Sequence
  Description of Artificial Sequence: Synthetic oligonucleotide
cgccucgucuagccguaac

SEQ ID NO: 673166 - RNA, 19 nt, Artificial Sequence
  Description of Artificial Sequence: Synthetic oligonucleotide
gguaggcguugagcagcuc

SEQ ID NO: 673167 - RNA, 19 nt, Artificial Sequence
  Description of Artificial Sequence: Synthetic oligonucleotide
ggcugucuaccucccuguu

SEQ ID NO: 673168 - RNA, 19 nt, Artificial Sequence
  Description of Artificial Sequence: Synthetic oligonucleotide
ccguuccgagucuccugga

SEQ ID NO: 673169 - RNA, 19 nt, Artificial Sequence
  Description of Artificial Sequence: Synthetic oligonucleotide
cgucucucgcucuugucuu

SEQ ID NO: 673170 - RNA, 19 nt, Artificial Sequence
  Description of Artificial Sequence: Synthetic oligonucleotide
gcucgauggacgaguuguu

SEQ ID NO: 673171 - RNA, 19 nt, Artificial Sequence
  Description of Artificial Sequence: Synthetic oligonucleotide
guggcccgccucaucccuu

SEQ ID NO: 673172 - RNA, 19 nt, Artificial Sequence
  Description of Artificial Sequence: Synthetic oligonucleotide
cgucgugccugaucagcau

SEQ ID NO: 673173 - RNA, 19 nt, Artificial Sequence
  Description of Artificial Sequence: Synthetic oligonucleotide
ccgugcucacugacacgcu

SEQ ID NO: 673174 - RNA, 19 nt, Artificial Sequence
  Description of Artificial Sequence: Synthetic oligonucleotide
gcgccucgucuagccguaa

SEQ ID NO: 673175 - RNA, 19 nt, Artificial Sequence
  Description of Artificial Sequence: Synthetic oligonucleotide
cgcucucgguuccgauagu

SEQ ID NO: 673176 - RNA, 19 nt, Artificial Sequence
  Description of Artificial Sequence: Synthetic oligonucleotide
uuuauaauaucucaaaucc

SEQ ID NO: 673177 - RNA, 19 nt, Artificial Sequence
  Description of Artificial Sequence: Synthetic oligonucleotide
aauaauuagacaaggaagg

SEQ ID NO: 673178 - RNA, 19 nt, Artificial Sequence
  Description of Artificial Sequence: Synthetic oligonucleotide
aucauuagaacauagacca

SEQ ID NO: 673179 - RNA, 19 nt, Artificial Sequence
  Description of Artificial Sequence: Synthetic oligonucleotide
uguacauaauauaaggucc

SEQ ID NO: 673180 - RNA, 19 nt, Artificial Sequence
  Description of Artificial Sequence: Synthetic oligonucleotide
auaaauuuccuccuaauag

SEQ ID NO: 673181 - RNA, 19 nt, Artificial Sequence
  Description of Artificial Sequence: Synthetic oligonucleotide
aaucauuagaacauagacc

SEQ ID NO: 673182 - RNA, 19 nt, Artificial Sequence
  Description of Artificial Sequence: Synthetic oligonucleotide
uuuccuaauaauuagacaa

SEQ ID NO: 673183 - RNA, 19 nt, Artificial Sequence
  Description of Artificial Sequence: Synthetic oligonucleotide
uuagauuuaggccugcuag

SEQ ID NO: 673184 - RNA, 19 nt, Artificial Sequence
  Description of Artificial Sequence: Synthetic oligonucleotide
aauuagaucaccauugaag

SEQ ID NO: 673185 - RNA, 19 nt, Artificial Sequence
  Description of Artificial Sequence: Synthetic oligonucleotide
cauaauauaagguccaggc

SEQ ID NO: 673186 - RNA, 19 nt, Artificial Sequence
  Description of Artificial Sequence: Synthetic oligonucleotide
uacauuguaagguaauugg

SEQ ID NO: 673187 - RNA, 19 nt, Artificial Sequence
  Description of Artificial Sequence: Synthetic oligonucleotide
uccaucauaaucaccaggg

SEQ ID NO: 673188 - RNA, 19 nt, Artificial Sequence
  Description of Artificial Sequence: Synthetic oligonucleotide
aacauagaccacuaagaac

SEQ ID NO: 673189 - RNA, 19 nt, Artificial Sequence
  Description of Artificial Sequence: Synthetic oligonucleotide
uuguguacauaauauaagg

SEQ ID NO: 673190 - RNA, 19 nt, Artificial Sequence
  Description of Artificial Sequence: Synthetic oligonucleotide
uuacuuuuagugcucaagg

SEQ ID NO: 673191 - RNA, 19 nt, Artificial Sequence
  Description of Artificial Sequence: Synthetic oligonucleotide
aucaaaaugaaaccgaugu

SEQ ID NO: 673192 - RNA, 19 nt, Artificial Sequence
  Description of Artificial Sequence: Synthetic oligonucleotide
uuuaguauuuuccuaauaa

SEQ ID NO: 673193 - RNA, 19 nt, Artificial Sequence
  Description of Artificial Sequence: Synthetic oligonucleotide
ugaggaauaaaucugcugu

SEQ ID NO: 673194 - RNA, 19 nt, Artificial Sequence
  Description of Artificial Sequence: Synthetic oligonucleotide
uuggguuuaaaauagggug

SEQ ID NO: 673195 - RNA, 19 nt, Artificial Sequence
  Description of Artificial Sequence: Synthetic oligonucleotide
agucuuuaucuucacagcc

SEQ ID NO: 673196 - RNA, 19 nt, Artificial Sequence
  Description of Artificial Sequence: Synthetic oligonucleotide
auaagguccaggcugauuc

SEQ ID NO: 673197 - RNA, 19 nt, Artificial Sequence
  Description of Artificial Sequence: Synthetic oligonucleotide
auuaagucauuucuuuccc

SEQ ID NO: 673198 - RNA, 19 nt, Artificial Sequence
  Description of Artificial Sequence: Synthetic oligonucleotide
uauggcaagagcaucuggg

SEQ ID NO: 673199 - RNA, 19 nt, Artificial Sequence
  Description of Artificial Sequence: Synthetic oligonucleotide
auuauguacgacuuaagca

SEQ ID NO: 673200 - RNA, 19 nt, Artificial Sequence
  Description of Artificial Sequence: Synthetic oligonucleotide
aaaauaugugagcaggaca

SEQ ID NO: 673201 - RNA, 19 nt, Artificial Sequence
  Description of Artificial Sequence: Synthetic oligonucleotide
uguugugaggaauaaaucu

SEQ ID NO: 673202 - RNA, 19 nt, Artificial Sequence
  Description of Artificial Sequence: Synthetic oligonucleotide
ugggaauuuggaaugauug

SEQ ID NO: 673203 - RNA, 19 nt, Artificial Sequence
  Description of Artificial Sequence: Synthetic oligonucleotide
uuuacuuaugaguugagau

SEQ ID NO: 673204 - RNA, 19 nt, Artificial Sequence
  Description of Artificial Sequence: Synthetic oligonucleotide
auuagaucaccauugaagu

SEQ ID NO: 673205 - RNA, 19 nt, Artificial Sequence
  Description of Artificial Sequence: Synthetic oligonucleotide
aagacaauguuacuuggug

SEQ ID NO: 673206 - RNA, 19 nt, Artificial Sequence
  Description of Artificial Sequence: Synthetic oligonucleotide
aacccaaguacauuguaag

SEQ ID NO: 673207 - RNA, 19 nt, Artificial Sequence
  Description of Artificial Sequence: Synthetic oligonucleotide
aggaaauuggcacuucggc

SEQ ID NO: 673208 - RNA, 19 nt, Artificial Sequence
  Description of Artificial Sequence: Synthetic oligonucleotide
aagacgauuaagucauuuc

SEQ ID NO: 673209 - RNA, 19 nt, Artificial Sequence
  Description of Artificial Sequence: Synthetic oligonucleotide
aaggguguuaucuuacgag

SEQ ID NO: 673210 - RNA, 19 nt, Artificial Sequence
  Description of Artificial Sequence: Synthetic oligonucleotide
caaaaugaaaccgaugugc

SEQ ID NO: 673211 - RNA, 19 nt, Artificial Sequence
  Description of Artificial Sequence: Synthetic oligonucleotide
cuugaaaaguccuauugag

SEQ ID NO: 673212 - RNA, 19 nt, Artificial Sequence
  Description of Artificial Sequence: Synthetic oligonucleotide
caaucauuagaacauagac

SEQ ID NO: 673213 - RNA, 19 nt, Artificial Sequence
  Description of Artificial Sequence: Synthetic oligonucleotide
auagggugcacucugaucu

SEQ ID NO: 673214 - RNA, 19 nt, Artificial Sequence
  Description of Artificial Sequence: Synthetic oligonucleotide
uaucuuacgaggacaauca

SEQ ID NO: 673215 - RNA, 19 nt, Artificial Sequence
  Description of Artificial Sequence: Synthetic oligonucleotide
uuagaggcagacaauguug

SEQ ID NO: 673216 - RNA, 19 nt, Artificial Sequence
  Description of Artificial Sequence: Synthetic oligonucleotide
aauguugugaggaauaaau

SEQ ID NO: 673217 - RNA, 19 nt, Artificial Sequence
  Description of Artificial Sequence: Synthetic oligonucleotide
ugauaccaaauacaucagg

SEQ ID NO: 673218 - RNA, 19 nt, Artificial Sequence
  Description of Artificial Sequence: Synthetic oligonucleotide
ucuugaaaaguccuauuga

SEQ ID NO: 673219 - RNA, 19 nt, Artificial Sequence
  Description of Artificial Sequence: Synthetic oligonucleotide
uugugaaucuccaucauaa

SEQ ID NO: 673220 - RNA, 19 nt, Artificial Sequence
  Description of Artificial Sequence: Synthetic oligonucleotide
uggguuuaaaauagggugc

SEQ ID NO: 673221 - RNA, 19 nt, Artificial Sequence
  Description of Artificial Sequence: Synthetic oligonucleotide
uuauaauaucucaaaucca

SEQ ID NO: 673222 - RNA, 19 nt, Artificial Sequence
  Description of Artificial Sequence: Synthetic oligonucleotide
cucauuaaguauauggcac

SEQ ID NO: 673223 - RNA, 19 nt, Artificial Sequence
  Description of Artificial Sequence: Synthetic oligonucleotide
uuuggaaugauugcugucc

SEQ ID NO: 673224 - RNA, 19 nt, Artificial Sequence
  Description of Artificial Sequence: Synthetic oligonucleotide
acugaguacuauaaugucc

SEQ ID NO: 673225 - RNA, 19 nt, Artificial Sequence
  Description of Artificial Sequence: Synthetic oligonucleotide
auaauuagacaaggaaggc

SEQ ID NO: 673226 - RNA, 19 nt, Artificial Sequence
  Description of Artificial Sequence: Synthetic oligonucleotide
ugauucacuccaaagggug

SEQ ID NO: 673227 - RNA, 19 nt, Artificial Sequence
  Description of Artificial Sequence: Synthetic oligonucleotide
aauuggagagcuaagugug

SEQ ID NO: 673228 - RNA, 19 nt, Artificial Sequence
  Description of Artificial Sequence: Synthetic oligonucleotide
uuugaguguaugaauggca

SEQ ID NO: 673229 - RNA, 19 nt, Artificial Sequence
  Description of Artificial Sequence: Synthetic oligonucleotide
gugaguuccauuauguacg

SEQ ID NO: 673230 - RNA, 19 nt, Artificial Sequence
  Description of Artificial Sequence: Synthetic oligonucleotide
ugguguauccuuuacugag

SEQ ID NO: 673231 - RNA, 19 nt, Artificial Sequence
  Description of Artificial Sequence: Synthetic oligonucleotide
uccuaauaauuagacaagg

SEQ ID NO: 673232 - RNA, 19 nt, Artificial Sequence
  Description of Artificial Sequence: Synthetic oligonucleotide
cuugguguauccuuuacug

SEQ ID NO: 673233 - RNA, 19 nt, Artificial Sequence
  Description of Artificial Sequence: Synthetic oligonucleotide
auuauugcauggaacauuc

SEQ ID NO: 673234 - RNA, 19 nt, Artificial Sequence
  Description of Artificial Sequence: Synthetic oligonucleotide
aguaccuuggguuuaaaau

SEQ ID NO: 673235 - RNA, 19 nt, Artificial Sequence
  Description of Artificial Sequence: Synthetic oligonucleotide
aaaaguccuauugaguaug

SEQ ID NO: 673236 - RNA, 19 nt, Artificial Sequence
  Description of Artificial Sequence: Synthetic oligonucleotide
auaugugagcaggacaucc

SEQ ID NO: 673237 - RNA, 19 nt, Artificial Sequence
  Description of Artificial Sequence: Synthetic oligonucleotide
gaggacaaucauuagaaca

SEQ ID NO: 673238 - RNA, 19 nt, Artificial Sequence
  Description of Artificial Sequence: Synthetic oligonucleotide
uucagucagaucaauaaau

SEQ ID NO: 673239 - RNA, 19 nt, Artificial Sequence
  Description of Artificial Sequence: Synthetic oligonucleotide
aagauaacagcuccuaauu

SEQ ID NO: 673240 - RNA, 19 nt, Artificial Sequence
  Description of Artificial Sequence: Synthetic oligonucleotide
acuuuuagugcucaaggca

SEQ ID NO: 673241 - RNA, 19 nt, Artificial Sequence
  Description of Artificial Sequence: Synthetic oligonucleotide
agacgauuaagucauuucu

SEQ ID NO: 673242 - RNA, 19 nt, Artificial Sequence
  Description of Artificial Sequence: Synthetic oligonucleotide
guguacauaauauaagguc

SEQ ID NO: 673243 - RNA, 19 nt, Artificial Sequence
  Description of Artificial Sequence: Synthetic oligonucleotide
uguuugucggaguugaggu

SEQ ID NO: 673244 - RNA, 19 nt, Artificial Sequence
  Description of Artificial Sequence: Synthetic oligonucleotide
aauguuacuugguguaaga

SEQ ID NO: 673245 - RNA, 19 nt, Artificial Sequence
  Description of Artificial Sequence: Synthetic oligonucleotide
aggguguuaucuuacgagg

SEQ ID NO: 673246 - RNA, 19 nt, Artificial Sequence
  Description of Artificial Sequence: Synthetic oligonucleotide
uuuuccuaauaauuagaca

SEQ ID NO: 673247 - RNA, 19 nt, Artificial Sequence
  Description of Artificial Sequence: Synthetic oligonucleotide
acacuuguuauuaaugcac

SEQ ID NO: 673248 - RNA, 19 nt, Artificial Sequence
  Description of Artificial Sequence: Synthetic oligonucleotide
auaucucaaauccauauuu

SEQ ID NO: 673249 - RNA, 19 nt, Artificial Sequence
  Description of Artificial Sequence: Synthetic oligonucleotide
gauauggaaugacaaucag

SEQ ID NO: 673250 - RNA, 19 nt, Artificial Sequence
  Description of Artificial Sequence: Synthetic oligonucleotide
agauaacagcuccuaauuc

SEQ ID NO: 673251 - RNA, 19 nt, Artificial Sequence
  Description of Artificial Sequence: Synthetic oligonucleotide
uuaaguauauggcacuuuu

SEQ ID NO: 673252 - RNA, 19 nt, Artificial Sequence
  Description of Artificial Sequence: Synthetic oligonucleotide
uagauuuaggccugcuagg

SEQ ID NO: 673253 - RNA, 19 nt, Artificial Sequence
  Description of Artificial Sequence: Synthetic oligonucleotide
aauaucucaaauccauauu

SEQ ID NO: 673254 - RNA, 19 nt, Artificial Sequence
  Description of Artificial Sequence: Synthetic oligonucleotide
uguuauuaaugcacuguga

SEQ ID NO: 673255 - RNA, 19 nt, Artificial Sequence
  Description of Artificial Sequence: Synthetic oligonucleotide
gucaguaagacaauguuac

SEQ ID NO: 673256 - RNA, 19 nt, Artificial Sequence
  Description of Artificial Sequence: Synthetic oligonucleotide
agguauuagaggcagacaa

SEQ ID NO: 673257 - RNA, 19 nt, Artificial Sequence
  Description of Artificial Sequence: Synthetic oligonucleotide
uacgaggacaaucauuaga

SEQ ID NO: 673258 - RNA, 19 nt, Artificial Sequence
  Description of Artificial Sequence: Synthetic oligonucleotide
gauaccaaauacaucagga

SEQ ID NO: 673259 - RNA, 19 nt, Artificial Sequence
  Description of Artificial Sequence: Synthetic oligonucleotide
acgacuuaagcaaagucac

SEQ ID NO: 673260 - RNA, 19 nt, Artificial Sequence
  Description of Artificial Sequence: Synthetic oligonucleotide
ugguauugaaguugguugc

SEQ ID NO: 673261 - RNA, 19 nt, Artificial Sequence
  Description of Artificial Sequence: Synthetic oligonucleotide
guaauuggagagcuaagug

SEQ ID NO: 673262 - RNA, 19 nt, Artificial Sequence
  Description of Artificial Sequence: Synthetic oligonucleotide
aaaaugaaaccgaugugcu

SEQ ID NO: 673263 - RNA, 19 nt, Artificial Sequence
  Description of Artificial Sequence: Synthetic oligonucleotide
guauauggcacuuuucuga

SEQ ID NO: 673264 - RNA, 19 nt, Artificial Sequence
  Description of Artificial Sequence: Synthetic oligonucleotide
aaaggguguuaucuuacga

SEQ ID NO: 673265 - RNA, 19 nt, Artificial Sequence
  Description of Artificial Sequence: Synthetic oligonucleotide
aaugauugcuguccacucu

SEQ ID NO: 673266 - RNA, 19 nt, Artificial Sequence
  Description of Artificial Sequence: Synthetic oligonucleotide
uacacuuguuauuaaugca

SEQ ID NO: 673267 - RNA, 19 nt, Artificial Sequence
  Description of Artificial Sequence: Synthetic oligonucleotide
auaauauaagguccaggcu

SEQ ID NO: 673268 - RNA, 19 nt, Artificial Sequence
  Description of Artificial Sequence: Synthetic oligonucleotide
agugguucgucuugaaaag

SEQ ID NO: 673269 - RNA, 19 nt, Artificial Sequence
  Description of Artificial Sequence: Synthetic oligonucleotide
uacuuuuagugcucaaggc

SEQ ID NO: 673270 - RNA, 19 nt, Artificial Sequence
  Description of Artificial Sequence: Synthetic oligonucleotide
guagccauccauguuauag

SEQ ID NO: 673271 - RNA, 19 nt, Artificial Sequence
  Description of Artificial Sequence: Synthetic oligonucleotide
cagucagaucaauaaaugc

SEQ ID NO: 673272 - RNA, 19 nt, Artificial Sequence
  Description of Artificial Sequence: Synthetic oligonucleotide
ucauuaaguauauggcacu

SEQ ID NO: 673273 - RNA, 19 nt, Artificial Sequence
  Description of Artificial Sequence: Synthetic oligonucleotide
uugauuagauuuaggccug

SEQ ID NO: 673274 - RNA, 19 nt, Artificial Sequence
  Description of Artificial Sequence: Synthetic oligonucleotide
cuuacgaggacaaucauua

SEQ ID NO: 673275 - RNA, 19 nt, Artificial Sequence
  Description of Artificial Sequence: Synthetic oligonucleotide
aacuguuguguacauaaua

SEQ ID NO: 673276 - RNA, 19 nt, Artificial Sequence
  Description of Artificial Sequence: Synthetic oligonucleotide
acgcucagcaccgugagcc

SEQ ID NO: 673277 - RNA, 19 nt, Artificial Sequence
  Description of Artificial Sequence: Synthetic oligonucleotide
ucagaucaauaaaugcaug

SEQ ID NO: 673278 - RNA, 19 nt, Artificial Sequence
  Description of Artificial Sequence: Synthetic oligonucleotide
agucagaucaauaaaugca

SEQ ID NO: 673279 - RNA, 19 nt, Artificial Sequence
  Description of Artificial Sequence: Synthetic oligonucleotide
aggaauuagaucaccauug

SEQ ID NO: 673280 - RNA, 19 nt, Artificial Sequence
  Description of Artificial Sequence: Synthetic oligonucleotide
gaacccacuguccuguucc

SEQ ID NO: 673281 - RNA, 19 nt, Artificial Sequence
  Description of Artificial Sequence: Synthetic oligonucleotide
ccucauuuuacuuuuagug

SEQ ID NO: 673282 - RNA, 19 nt, Artificial Sequence
  Description of Artificial Sequence: Synthetic oligonucleotide
uuuugaguguaugaauggc

SEQ ID NO: 673283 - RNA, 19 nt, Artificial Sequence
  Description of Artificial Sequence: Synthetic oligonucleotide
uaaucagugguucgucuug

SEQ ID NO: 673284 - RNA, 19 nt, Artificial Sequence
  Description of Artificial Sequence: Synthetic oligonucleotide
ugagauuugguauuucauu

SEQ ID NO: 673285 - RNA, 19 nt, Artificial Sequence
  Description of Artificial Sequence: Synthetic oligonucleotide
guuguguacauaauauaag

SEQ ID NO: 673286 - RNA, 19 nt, Artificial Sequence
  Description of Artificial Sequence: Synthetic oligonucleotide
cuaauaguaucuguggcug

SEQ ID NO: 673287 - RNA, 19 nt, Artificial Sequence
  Description of Artificial Sequence: Synthetic oligonucleotide
uuuccacccaaauuuuccc

SEQ ID NO: 673288 - RNA, 19 nt, Artificial Sequence
  Description of Artificial Sequence: Synthetic oligonucleotide
aaagagcucggccgugacg

SEQ ID NO: 673289 - RNA, 19 nt, Artificial Sequence
  Description of Artificial Sequence: Synthetic oligonucleotide
agaacauagaccacuaaga

SEQ ID NO: 673290 - RNA, 19 nt, Artificial Sequence
  Description of Artificial Sequence: Synthetic oligonucleotide
augaaaccgaugugcuucc

SEQ ID NO: 673291 - RNA, 19 nt, Artificial Sequence
  Description of Artificial Sequence: Synthetic oligonucleotide
uggcacuucggccuaaccc

SEQ ID NO: 673292 - RNA, 19 nt, Artificial Sequence
  Description of Artificial Sequence: Synthetic oligonucleotide
uguuacuugguguaagaua

SEQ ID NO: 673293 - RNA, 19 nt, Artificial Sequence
  Description of Artificial Sequence: Synthetic oligonucleotide
uaauaguaucuguggcugg

SEQ ID NO: 673294 - RNA, 19 nt, Artificial Sequence
  Description of Artificial Sequence: Synthetic oligonucleotide
cuuuaaacauccgaugcac

SEQ ID NO: 673295 - RNA, 19 nt, Artificial Sequence
  Description of Artificial Sequence: Synthetic oligonucleotide
uuaugaguugagauuuggu

SEQ ID NO: 673296 - RNA, 19 nt, Artificial Sequence
  Description of Artificial Sequence: Synthetic oligonucleotide
ugcugcuaaaauccugaag

SEQ ID NO: 673297 - RNA, 19 nt, Artificial Sequence
  Description of Artificial Sequence: Synthetic oligonucleotide
cuucaaggauaccaguacc

SEQ ID NO: 673298 - RNA, 19 nt, Artificial Sequence
  Description of Artificial Sequence: Synthetic oligonucleotide
caauaugaagggugagugg

SEQ ID NO: 673299 - RNA, 19 nt, Artificial Sequence
  Description of Artificial Sequence: Synthetic oligonucleotide
aaaugcaugcgaaugugga

SEQ ID NO: 673300 - RNA, 19 nt, Artificial Sequence
  Description of Artificial Sequence: Synthetic oligonucleotide
uuuaucuucacagccuggu

SEQ ID NO: 673301 - RNA, 19 nt, Artificial Sequence
  Description of Artificial Sequence: Synthetic oligonucleotide
uucggccuaacccaaguac

SEQ ID NO: 673302 - RNA, 19 nt, Artificial Sequence
  Description of Artificial Sequence: Synthetic oligonucleotide
uuuuacuuaugaguugaga

SEQ ID NO: 673303 - RNA, 19 nt, Artificial Sequence
  Description of Artificial Sequence: Synthetic oligonucleotide
uugagauuugguauuucau

SEQ ID NO: 673304 - RNA, 19 nt, Artificial Sequence
  Description of Artificial Sequence: Synthetic oligonucleotide
uccauuauguacgacuuaa

SEQ ID NO: 673305 - RNA, 19 nt, Artificial Sequence
  Description of Artificial Sequence: Synthetic oligonucleotide
aagagcucggccgugacgu

SEQ ID NO: 673306 - RNA, 19 nt, Artificial Sequence
  Description of Artificial Sequence: Synthetic oligonucleotide
aaugcaugcgaauguggau

SEQ ID NO: 673307 - RNA, 19 nt, Artificial Sequence
  Description of Artificial Sequence: Synthetic oligonucleotide
aacgcugacuguccaacca

SEQ ID NO: 673308 - RNA, 19 nt, Artificial Sequence
  Description of Artificial Sequence: Synthetic oligonucleotide
agacaauguuacuuggugu

SEQ ID NO: 673309 - RNA, 19 nt, Artificial Sequence
  Description of Artificial Sequence: Synthetic oligonucleotide
acccaaguacauuguaagg

SEQ ID NO: 673310 - RNA, 19 nt, Artificial Sequence
  Description of Artificial Sequence: Synthetic oligonucleotide
ugugaggaauaaaucugcu

SEQ ID NO: 673311 - RNA, 19 nt, Artificial Sequence
  Description of Artificial Sequence: Synthetic oligonucleotide
ugccaauguaaaauggcaa

SEQ ID NO: 673312 - RNA, 19 nt, Artificial Sequence
  Description of Artificial Sequence: Synthetic oligonucleotide
auugaguauggucauguuu

SEQ ID NO: 673313 - RNA, 19 nt, Artificial Sequence
  Description of Artificial Sequence: Synthetic oligonucleotide
aauauggcaagagcaucug

SEQ ID NO: 673314 - RNA, 19 nt, Artificial Sequence
  Description of Artificial Sequence: Synthetic oligonucleotide
auaccaaauacaucaggaa

SEQ ID NO: 673315 - RNA, 19 nt, Artificial Sequence
  Description of Artificial Sequence: Synthetic oligonucleotide
auaaucaccagggacuaca

SEQ ID NO: 673316 - RNA, 19 nt, Artificial Sequence
  Description of Artificial Sequence: Synthetic oligonucleotide
guugagauuugguauuuca

SEQ ID NO: 673317 - RNA, 19 nt, Artificial Sequence
  Description of Artificial Sequence: Synthetic oligonucleotide
guacauuguaagguaauug

SEQ ID NO: 673318 - RNA, 19 nt, Artificial Sequence
  Description of Artificial Sequence: Synthetic oligonucleotide
uaaguauauggcacuuuuc

SEQ ID NO: 673319 - RNA, 19 nt, Artificial Sequence
  Description of Artificial Sequence: Synthetic oligonucleotide
uauguacgacuuaagcaaa

SEQ ID NO: 673320 - RNA, 19 nt, Artificial Sequence
  Description of Artificial Sequence: Synthetic oligonucleotide
ggaaauuggcacuucggcc

SEQ ID NO: 673321 - RNA, 19 nt, Artificial Sequence
  Description of Artificial Sequence: Synthetic oligonucleotide
ugacguugugcagagcccg

SEQ ID NO: 673322 - RNA, 19 nt, Artificial Sequence
  Description of Artificial Sequence: Synthetic oligonucleotide
ucggccuaacccaaguaca

SEQ ID NO: 673323 - RNA, 19 nt, Artificial Sequence
  Description of Artificial Sequence: Synthetic oligonucleotide
guagcuuuaaagaacccuc

SEQ ID NO: 673324 - RNA, 19 nt, Artificial Sequence
  Description of Artificial Sequence: Synthetic oligonucleotide
uccuaauucauuguuggua

SEQ ID NO: 673325 - RNA, 19 nt, Artificial Sequence
  Description of Artificial Sequence: Synthetic oligonucleotide
aaaguccuauugaguaugg

SEQ ID NO: 673326 - RNA, 19 nt, Artificial Sequence
  Description of Artificial Sequence: Synthetic oligonucleotide
cuacugagagagaaguuuc

SEQ ID NO: 673327 - RNA, 19 nt, Artificial Sequence
  Description of Artificial Sequence: Synthetic oligonucleotide
gaguacuauaauguccaag

SEQ ID NO: 673328 - RNA, 19 nt, Artificial Sequence
  Description of Artificial Sequence: Synthetic oligonucleotide
ucuuacgaggacaaucauu

SEQ ID NO: 673329 - RNA, 19 nt, Artificial Sequence
  Description of Artificial Sequence: Synthetic oligonucleotide
agugggauugguauugaag

SEQ ID NO: 673330 - RNA, 19 nt, Artificial Sequence
  Description of Artificial Sequence: Synthetic oligonucleotide
caaacuggaagguauuaga

SEQ ID NO: 673331 - RNA, 19 nt, Artificial Sequence
  Description of Artificial Sequence: Synthetic oligonucleotide
ugguucgucuugaaaaguc

SEQ ID NO: 673332 - RNA, 19 nt, Artificial Sequence
  Description of Artificial Sequence: Synthetic oligonucleotide
caucaaaaugaaaccgaug

SEQ ID NO: 673333 - RNA, 19 nt, Artificial Sequence
  Description of Artificial Sequence: Synthetic oligonucleotide
agauaaauuuccuccuaau

SEQ ID NO: 673334 - RNA, 19 nt, Artificial Sequence
  Description of Artificial Sequence: Synthetic oligonucleotide
acgauuaagucauuucuuu

SEQ ID NO: 673335 - RNA, 19 nt, Artificial Sequence
  Description of Artificial Sequence: Synthetic oligonucleotide
acuguuguguacauaauau

SEQ ID NO: 673336 - RNA, 19 nt, Artificial Sequence
  Description of Artificial Sequence: Synthetic oligonucleotide
ggcaagagcaucuggguag

SEQ ID NO: 673337 - RNA, 19 nt, Artificial Sequence
  Description of Artificial Sequence: Synthetic oligonucleotide
gaaugauugcuguccacuc

SEQ ID NO: 673338 - RNA, 19 nt, Artificial Sequence
  Description of Artificial Sequence: Synthetic oligonucleotide
ucgcauuauugcauggaac

SEQ ID NO: 673339 - RNA, 19 nt, Artificial Sequence
  Description of Artificial Sequence: Synthetic oligonucleotide
uacugaguacuauaauguc

SEQ ID NO: 673340 - RNA, 19 nt, Artificial Sequence
  Description of Artificial Sequence: Synthetic oligonucleotide
ucggccgugacguugugca

SEQ ID NO: 673341 - RNA, 19 nt, Artificial Sequence
  Description of Artificial Sequence: Synthetic oligonucleotide
uuagaucaccauugaaguc

SEQ ID NO: 673342 - RNA, 19 nt, Artificial Sequence
  Description of Artificial Sequence: Synthetic oligonucleotide
aggacaaucauuagaacau

SEQ ID NO: 673343 - RNA, 19 nt, Artificial Sequence
  Description of Artificial Sequence: Synthetic oligonucleotide
cuguccaaccaccacuagg

SEQ ID NO: 673344 - RNA, 19 nt, Artificial Sequence
  Description of Artificial Sequence: Synthetic oligonucleotide
guccuauugaguaugguca

SEQ ID NO: 673345 - RNA, 19 nt, Artificial Sequence
  Description of Artificial Sequence: Synthetic oligonucleotide
ucuaucgucugcuuucuuu

SEQ ID NO: 673346 - RNA, 19 nt, Artificial Sequence
  Description of Artificial Sequence: Synthetic oligonucleotide
acacuacugagagagaagu

SEQ ID NO: 673347 - RNA, 19 nt, Artificial Sequence
  Description of Artificial Sequence: Synthetic oligonucleotide
uugguguauccuuuacuga

SEQ ID NO: 673348 - RNA, 19 nt, Artificial Sequence
  Description of Artificial Sequence: Synthetic oligonucleotide
acuacugagagagaaguuu

SEQ ID NO: 673349 - RNA, 19 nt, Artificial Sequence
  Description of Artificial Sequence: Synthetic oligonucleotide
ugcgaauguggauuccuca

SEQ ID NO: 673350 - RNA, 19 nt, Artificial Sequence
  Description of Artificial Sequence: Synthetic oligonucleotide
guguaagauacaauuuggc

SEQ ID NO: 673351 - RNA, 19 nt, Artificial Sequence
  Description of Artificial Sequence: Synthetic oligonucleotide
cuugguguaagauacaauu

SEQ ID NO: 673352 - RNA, 19 nt, Artificial Sequence
  Description of Artificial Sequence: Synthetic oligonucleotide
gaccacuaagaacaaugac

SEQ ID NO: 673353 - RNA, 19 nt, Artificial Sequence
  Description of Artificial Sequence: Synthetic oligonucleotide
gaagauaacagcuccuaau

SEQ ID NO: 673354 - RNA, 19 nt, Artificial Sequence
  Description of Artificial Sequence: Synthetic oligonucleotide
uccauaaucagugguucgu

SEQ ID NO: 673355 - RNA, 19 nt, Artificial Sequence
  Description of Artificial Sequence: Synthetic oligonucleotide
aaagacgauuaagucauuu

SEQ ID NO: 673356 - RNA, 19 nt, Artificial Sequence
  Description of Artificial Sequence: Synthetic oligonucleotide
aagguccaggcugauucac

SEQ ID NO: 673357 - RNA, 19 nt, Artificial Sequence
  Description of Artificial Sequence: Synthetic oligonucleotide
gaaaccgaugugcuuccug

SEQ ID NO: 673358 - RNA, 19 nt, Artificial Sequence
  Description of Artificial Sequence: Synthetic oligonucleotide
ccauaucucaaacuggaag

SEQ ID NO: 673359 - RNA, 19 nt, Artificial Sequence
  Description of Artificial Sequence: Synthetic oligonucleotide
uuagaacauagaccacuaa

SEQ ID NO: 673360 - RNA, 19 nt, Artificial Sequence
  Description of Artificial Sequence: Synthetic oligonucleotide
auuagauuuaggccugcua

SEQ ID NO: 673361 - RNA, 19 nt, Artificial Sequence
  Description of Artificial Sequence: Synthetic oligonucleotide
gggaauuuggaaugauugc

SEQ ID NO: 673362 - RNA, 19 nt, Artificial Sequence
  Description of Artificial Sequence: Synthetic oligonucleotide
acgaggacaaucauuagaa

SEQ ID NO: 673363 - RNA, 19 nt, Artificial Sequence
  Description of Artificial Sequence: Synthetic oligonucleotide
aagugaguuccauuaugua

SEQ ID NO: 673364 - RNA, 19 nt, Artificial Sequence
  Description of Artificial Sequence: Synthetic oligonucleotide
uauccuuuacugaguacua

SEQ ID NO: 673365 - RNA, 19 nt, Artificial Sequence
  Description of Artificial Sequence: Synthetic oligonucleotide
gaauuagaucaccauugaa

SEQ ID NO: 673366 - RNA, 19 nt, Artificial Sequence
  Description of Artificial Sequence: Synthetic oligonucleotide
ugaguuccauuauguacga

SEQ ID NO: 673367 - RNA, 19 nt, Artificial Sequence
  Description of Artificial Sequence: Synthetic oligonucleotide
agcaagugauccauguguc

SEQ ID NO: 673368 - RNA, 19 nt, Artificial Sequence
  Description of Artificial Sequence: Synthetic oligonucleotide
ucauuagaacauagaccac

SEQ ID NO: 673369 - RNA, 19 nt, Artificial Sequence
  Description of Artificial Sequence: Synthetic oligonucleotide
uguacgacuuaagcaaagu

SEQ ID NO: 673370 - RNA, 19 nt, Artificial Sequence
  Description of Artificial Sequence: Synthetic oligonucleotide
acaaucauuagaacauaga

SEQ ID NO: 673371 - RNA, 19 nt, Artificial Sequence
  Description of Artificial Sequence: Synthetic oligonucleotide
cagugguucgucuugaaaa

SEQ ID NO: 673372 - RNA, 19 nt, Artificial Sequence
  Description of Artificial Sequence: Synthetic oligonucleotide
auaaucagugguucgucuu

SEQ ID NO: 673373 - RNA, 19 nt, Artificial Sequence
  Description of Artificial Sequence: Synthetic oligonucleotide
ugccaagauaaauuuccuc

SEQ ID NO: 673374 - RNA, 19 nt, Artificial Sequence
  Description of Artificial Sequence: Synthetic oligonucleotide
uaaucaagugaguuccauu

SEQ ID NO: 673375 - RNA, 19 nt, Artificial Sequence
  Description of Artificial Sequence: Synthetic oligonucleotide
uucgagggacauugugagg

SEQ ID NO: 673376 - RNA, 19 nt, Artificial Sequence
  Description of Artificial Sequence: Synthetic oligonucleotide
ugugaggauauggaaugac

SEQ ID NO: 673377 - RNA, 19 nt, Artificial Sequence
  Description of Artificial Sequence: Synthetic oligonucleotide
uuacgaggacaaucauuag

SEQ ID NO: 673378 - RNA, 19 nt, Artificial Sequence
  Description of Artificial Sequence: Synthetic oligonucleotide
ucagugguucgucuugaaa

SEQ ID NO: 673379 - RNA, 19 nt, Artificial Sequence
  Description of Artificial Sequence: Synthetic oligonucleotide
uaaucaccagggacuacac

SEQ ID NO: 673380 - RNA, 19 nt, Artificial Sequence
  Description of Artificial Sequence: Synthetic oligonucleotide
uuccacccaaauuuuccca

SEQ ID NO: 673381 - RNA, 19 nt, Artificial Sequence
  Description of Artificial Sequence: Synthetic oligonucleotide
uccuccuaauaguaucugu

SEQ ID NO: 673382 - RNA, 19 nt, Artificial Sequence
  Description of Artificial Sequence: Synthetic oligonucleotide
guacgacuuaagcaaaguc

SEQ ID NO: 673383 - RNA, 19 nt, Artificial Sequence
  Description of Artificial Sequence: Synthetic oligonucleotide
acccaaauuuucccauauc

SEQ ID NO: 673384 - RNA, 19 nt, Artificial Sequence
  Description of Artificial Sequence: Synthetic oligonucleotide
agauuuaggccugcuaggu

SEQ ID NO: 673385 - RNA, 19 nt, Artificial Sequence
  Description of Artificial Sequence: Synthetic oligonucleotide
ucuuucccgcagcacgaag

SEQ ID NO: 673386 - RNA, 19 nt, Artificial Sequence
  Description of Artificial Sequence: Synthetic oligonucleotide
uugguaugauuuuggggaa

SEQ ID NO: 673387 - RNA, 19 nt, Artificial Sequence
  Description of Artificial Sequence: Synthetic oligonucleotide
uguauccuuuacugaguac

SEQ ID NO: 673388 - RNA, 19 nt, Artificial Sequence
  Description of Artificial Sequence: Synthetic oligonucleotide
ugcaaacgcugacugucca

SEQ ID NO: 673389 - RNA, 19 nt, Artificial Sequence
  Description of Artificial Sequence: Synthetic oligonucleotide
aaauccugaagcacaggaa

SEQ ID NO: 673390 - RNA, 19 nt, Artificial Sequence
  Description of Artificial Sequence: Synthetic oligonucleotide
aagguauuagaggcagaca

SEQ ID NO: 673391 - RNA, 19 nt, Artificial Sequence
  Description of Artificial Sequence: Synthetic oligonucleotide
aaguacauuguaagguaau

SEQ ID NO: 673392 - RNA, 19 nt, Artificial Sequence
  Description of Artificial Sequence: Synthetic oligonucleotide
guauccuuuacugaguacu

SEQ ID NO: 673393 - RNA, 19 nt, Artificial Sequence
  Description of Artificial Sequence: Synthetic oligonucleotide
gauuuaggccugcuagguc

SEQ ID NO: 673394 - RNA, 19 nt, Artificial Sequence
  Description of Artificial Sequence: Synthetic oligonucleotide
accgugagccccaagagca

SEQ ID NO: 673395 - RNA, 19 nt, Artificial Sequence
  Description of Artificial Sequence: Synthetic oligonucleotide
acggggaauaccaacaaaa

SEQ ID NO: 673396 - RNA, 19 nt, Artificial Sequence
  Description of Artificial Sequence: Synthetic oligonucleotide
aucucaaacuggaagguau

SEQ ID NO: 673397 - RNA, 19 nt, Artificial Sequence
  Description of Artificial Sequence: Synthetic oligonucleotide
cuuggguuuaaaauagggu

SEQ ID NO: 673398 - RNA, 19 nt, Artificial Sequence
  Description of Artificial Sequence: Synthetic oligonucleotide
ccugccaauguaaaauggc

SEQ ID NO: 673399 - RNA, 19 nt, Artificial Sequence
  Description of Artificial Sequence: Synthetic oligonucleotide
agcucgcauuauugcaugg

SEQ ID NO: 673400 - RNA, 19 nt, Artificial Sequence
  Description of Artificial Sequence: Synthetic oligonucleotide
gaggaauaaaucugcugua

SEQ ID NO: 673401 - RNA, 19 nt, Artificial Sequence
  Description of Artificial Sequence: Synthetic oligonucleotide
uaagguccaggcugauuca

SEQ ID NO: 673402 - RNA, 19 nt, Artificial Sequence
  Description of Artificial Sequence: Synthetic oligonucleotide
ugacuggcugagcugucca

SEQ ID NO: 673403 - RNA, 19 nt, Artificial Sequence
  Description of Artificial Sequence: Synthetic oligonucleotide
gguguuaucuuacgaggac

SEQ ID NO: 673404 - RNA, 19 nt, Artificial Sequence
  Description of Artificial Sequence: Synthetic oligonucleotide
ccaauaugaagggugagug

SEQ ID NO: 673405 - RNA, 19 nt, Artificial Sequence
  Description of Artificial Sequence: Synthetic oligonucleotide
aaauuggcacuucggccua

SEQ ID NO: 673406 - RNA, 19 nt, Artificial Sequence
  Description of Artificial Sequence: Synthetic oligonucleotide
auccauguuauagucucca

SEQ ID NO: 673407 - RNA, 19 nt, Artificial Sequence
  Description of Artificial Sequence: Synthetic oligonucleotide
aggaauaaaucugcuguaa

SEQ ID NO: 673408 - RNA, 19 nt, Artificial Sequence
  Description of Artificial Sequence: Synthetic oligonucleotide
uggcaauuauugccaagau

SEQ ID NO: 673409 - RNA, 19 nt, Artificial Sequence
  Description of Artificial Sequence: Synthetic oligonucleotide
aguugagauuugguauuuc

SEQ ID NO: 673410 - RNA, 19 nt, Artificial Sequence
  Description of Artificial Sequence: Synthetic oligonucleotide
ugggauugguauugaaguu

SEQ ID NO: 673411 - RNA, 19 nt, Artificial Sequence
  Description of Artificial Sequence: Synthetic oligonucleotide
acuucggccuaacccaagu

SEQ ID NO: 673412 - RNA, 19 nt, Artificial Sequence
  Description of Artificial Sequence: Synthetic oligonucleotide
agaguguacccuugcugcu

SEQ ID NO: 673413 - RNA, 19 nt, Artificial Sequence
  Description of Artificial Sequence: Synthetic oligonucleotide
aguacauuguaagguaauu

SEQ ID NO: 673414 - RNA, 19 nt, Artificial Sequence
  Description of Artificial Sequence: Synthetic oligonucleotide
gagagaaguuuccacccaa

SEQ ID NO: 673415 - RNA, 19 nt, Artificial Sequence
  Description of Artificial Sequence: Synthetic oligonucleotide
caagugauccaugugucca

SEQ ID NO: 673416 - RNA, 19 nt, Artificial Sequence
  Description of Artificial Sequence: Synthetic oligonucleotide
agucaguaagacaauguua

SEQ ID NO: 673417 - RNA, 19 nt, Artificial Sequence
  Description of Artificial Sequence: Synthetic oligonucleotide
agaccacuaagaacaauga

SEQ ID NO: 673418 - RNA, 19 nt, Artificial Sequence
  Description of Artificial Sequence: Synthetic oligonucleotide
guugugcagagcccgcgcc

SEQ ID NO: 673419 - RNA, 19 nt, Artificial Sequence
  Description of Artificial Sequence: Synthetic oligonucleotide
uccauuugugaaucuccau

SEQ ID NO: 673420 - RNA, 19 nt, Artificial Sequence
  Description of Artificial Sequence: Synthetic oligonucleotide
caagugaguuccauuaugu

SEQ ID NO: 673421 - RNA, 19 nt, Artificial Sequence
  Description of Artificial Sequence: Synthetic oligonucleotide
ggcacuucggccuaaccca

SEQ ID NO: 673422 - RNA, 19 nt, Artificial Sequence
  Description of Artificial Sequence: Synthetic oligonucleotide
cuuucccgcagcacgaaga

SEQ ID NO: 673423 - RNA, 19 nt, Artificial Sequence
  Description of Artificial Sequence: Synthetic oligonucleotide
uggcuggauucauuuguga

SEQ ID NO: 673424 - RNA, 19 nt, Artificial Sequence
  Description of Artificial Sequence: Synthetic oligonucleotide
cauuagaacauagaccacu

SEQ ID NO: 673425 - RNA, 19 nt, Artificial Sequence
  Description of Artificial Sequence: Synthetic oligonucleotide
agcaggacauccauuugug

SEQ ID NO: 673426 - RNA, 19 nt, Artificial Sequence
  Description of Artificial Sequence: Synthetic oligonucleotide
guaagguaauuggagagcu

SEQ ID NO: 673427 - RNA, 19 nt, Artificial Sequence
  Description of Artificial Sequence: Synthetic oligonucleotide
augugagcaggacauccau

SEQ ID NO: 673428 - RNA, 19 nt, Artificial Sequence
  Description of Artificial Sequence: Synthetic oligonucleotide
gagguccgucuguuugucg

SEQ ID NO: 673429 - RNA, 19 nt, Artificial Sequence
  Description of Artificial Sequence: Synthetic oligonucleotide
ugugagcaggacauccauu

SEQ ID NO: 673430 - RNA, 19 nt, Artificial Sequence
  Description of Artificial Sequence: Synthetic oligonucleotide
uuccauuauguacgacuua

SEQ ID NO: 673431 - RNA, 19 nt, Artificial Sequence
  Description of Artificial Sequence: Synthetic oligonucleotide
uaucgucugcuuucuuuuc

SEQ ID NO: 673432 - RNA, 19 nt, Artificial Sequence
  Description of Artificial Sequence: Synthetic oligonucleotide
uuggcacuucggccuaacc

SEQ ID NO: 673433 - RNA, 19 nt, Artificial Sequence
  Description of Artificial Sequence: Synthetic oligonucleotide
gugaggauauggaaugaca

SEQ ID NO: 673434 - RNA, 19 nt, Artificial Sequence
  Description of Artificial Sequence: Synthetic oligonucleotide
gguucgucuugaaaagucc

SEQ ID NO: 673435 - RNA, 19 nt, Artificial Sequence
  Description of Artificial Sequence: Synthetic oligonucleotide
agggacuacacuuguuauu

SEQ ID NO: 673436 - RNA, 19 nt, Artificial Sequence
  Description of Artificial Sequence: Synthetic oligonucleotide
uuccuccuaauaguaucug

SEQ ID NO: 673437 - RNA, 19 nt, Artificial Sequence
  Description of Artificial Sequence: Synthetic oligonucleotide
ugauuagauuuaggccugc

SEQ ID NO: 673438 - RNA, 19 nt, Artificial Sequence
  Description of Artificial Sequence: Synthetic oligonucleotide
uugucggaguugagguccc

SEQ ID NO: 673439 - RNA, 19 nt, Artificial Sequence
  Description of Artificial Sequence: Synthetic oligonucleotide
uauugaguauggucauguu

SEQ ID NO: 673440 - RNA, 19 nt, Artificial Sequence
  Description of Artificial Sequence: Synthetic oligonucleotide
auguacgacuuaagcaaag

SEQ ID NO: 673441 - RNA, 19 nt, Artificial Sequence
  Description of Artificial Sequence: Synthetic oligonucleotide
aaguccuauugaguauggu

SEQ ID NO: 673442 - RNA, 19 nt, Artificial Sequence
  Description of Artificial Sequence: Synthetic oligonucleotide
ugaguacuauaauguccaa

SEQ ID NO: 673443 - RNA, 19 nt, Artificial Sequence
  Description of Artificial Sequence: Synthetic oligonucleotide
acgccucggccccaaagag

SEQ ID NO: 673444 - RNA, 19 nt, Artificial Sequence
  Description of Artificial Sequence: Synthetic oligonucleotide
aguguacccuugcugcuaa

SEQ ID NO: 673445 - RNA, 19 nt, Artificial Sequence
  Description of Artificial Sequence: Synthetic oligonucleotide
ucucuaucgucugcuuucu

SEQ ID NO: 673446 - RNA, 19 nt, Artificial Sequence
  Description of Artificial Sequence: Synthetic oligonucleotide
ccagcuucgagggacauug

SEQ ID NO: 673447 - RNA, 19 nt, Artificial Sequence
  Description of Artificial Sequence: Synthetic oligonucleotide
auuaaguauauggcacuuu

SEQ ID NO: 673448 - RNA, 19 nt, Artificial Sequence
  Description of Artificial Sequence: Synthetic oligonucleotide
agacaauguugugaggaau

SEQ ID NO: 673449 - RNA, 19 nt, Artificial Sequence
  Description of Artificial Sequence: Synthetic oligonucleotide
guuugucggaguugagguc

SEQ ID NO: 673450 - RNA, 19 nt, Artificial Sequence
  Description of Artificial Sequence: Synthetic oligonucleotide
cuguuguguacauaauaua

SEQ ID NO: 673451 - RNA, 19 nt, Artificial Sequence
  Description of Artificial Sequence: Synthetic oligonucleotide
gucagaucaauaaaugcau

SEQ ID NO: 673452 - RNA, 19 nt, Artificial Sequence
  Description of Artificial Sequence: Synthetic oligonucleotide
cagcucgcauuauugcaug

SEQ ID NO: 673453 - RNA, 19 nt, Artificial Sequence
  Description of Artificial Sequence: Synthetic oligonucleotide
gcaagugauccaugugucc

SEQ ID NO: 673454 - RNA, 19 nt, Artificial Sequence
  Description of Artificial Sequence: Synthetic oligonucleotide
auguuacuugguguaagau

SEQ ID NO: 673455 - RNA, 19 nt, Artificial Sequence
  Description of Artificial Sequence: Synthetic oligonucleotide
caauuauugccaagaugaa

SEQ ID NO: 673456 - RNA, 19 nt, Artificial Sequence
  Description of Artificial Sequence: Synthetic oligonucleotide
cagauggacggggaauacc

SEQ ID NO: 673457 - RNA, 19 nt, Artificial Sequence
  Description of Artificial Sequence: Synthetic oligonucleotide
augcgaauguggauuccuc

SEQ ID NO: 673458 - RNA, 19 nt, Artificial Sequence
  Description of Artificial Sequence: Synthetic oligonucleotide
agggacauugugaggauau

SEQ ID NO: 673459 - RNA, 19 nt, Artificial Sequence
  Description of Artificial Sequence: Synthetic oligonucleotide
agguaauuggagagcuaag

SEQ ID NO: 673460 - RNA, 19 nt, Artificial Sequence
  Description of Artificial Sequence: Synthetic oligonucleotide
auuaaucaagugaguucca

SEQ ID NO: 673461 - RNA, 19 nt, Artificial Sequence
  Description of Artificial Sequence: Synthetic oligonucleotide
cucgcauuauugcauggaa

SEQ ID NO: 673462 - RNA, 19 nt, Artificial Sequence
  Description of Artificial Sequence: Synthetic oligonucleotide
aucuuacgaggacaaucau

SEQ ID NO: 673463 - RNA, 19 nt, Artificial Sequence
  Description of Artificial Sequence: Synthetic oligonucleotide
gcuaagugugcugacuggc

SEQ ID NO: 673464 - RNA, 19 nt, Artificial Sequence
  Description of Artificial Sequence: Synthetic oligonucleotide
cuauugaguauggucaugu

SEQ ID NO: 673465 - RNA, 19 nt, Artificial Sequence
  Description of Artificial Sequence: Synthetic oligonucleotide
acagcucgcauuauugcau

SEQ ID NO: 673466 - RNA, 19 nt, Artificial Sequence
  Description of Artificial Sequence: Synthetic oligonucleotide
cacuuguuauuaaugcacu

SEQ ID NO: 673467 - RNA, 19 nt, Artificial Sequence
  Description of Artificial Sequence: Synthetic oligonucleotide
ucggccccaaagagcucgg

SEQ ID NO: 673468 - RNA, 19 nt, Artificial Sequence
  Description of Artificial Sequence: Synthetic oligonucleotide
uuuggcacuccagcuucga

SEQ ID NO: 673469 - RNA, 19 nt, Artificial Sequence
  Description of Artificial Sequence: Synthetic oligonucleotide
ugagugggauugguauuga

SEQ ID NO: 673470 - RNA, 19 nt, Artificial Sequence
  Description of Artificial Sequence: Synthetic oligonucleotide
auaugaagggugaguggga

SEQ ID NO: 673471 - RNA, 19 nt, Artificial Sequence
  Description of Artificial Sequence: Synthetic oligonucleotide
gacggggaauaccaacaaa

SEQ ID NO: 673472 - RNA, 19 nt, Artificial Sequence
  Description of Artificial Sequence: Synthetic oligonucleotide
auuuggcacuccagcuucg

SEQ ID NO: 673473 - RNA, 19 nt, Artificial Sequence
  Description of Artificial Sequence: Synthetic oligonucleotide
augcacuuccucacagcuc

SEQ ID NO: 673474 - RNA, 19 nt, Artificial Sequence
  Description of Artificial Sequence: Synthetic oligonucleotide
ugguaugauuuuggggaaa

SEQ ID NO: 673475 - RNA, 19 nt, Artificial Sequence
  Description of Artificial Sequence: Synthetic oligonucleotide
acguugugcagagcccgcg

SEQ ID NO: 673476 - RNA, 19 nt, Artificial Sequence
  Description of Artificial Sequence: Synthetic oligonucleotide
gugacguugugcagagccc

SEQ ID NO: 673477 - RNA, 19 nt, Artificial Sequence
  Description of Artificial Sequence: Synthetic oligonucleotide
ggguuuaaaauagggugca

SEQ ID NO: 673478 - RNA, 19 nt, Artificial Sequence
  Description of Artificial Sequence: Synthetic oligonucleotide
gguaauuggagagcuaagu

SEQ ID NO: 673479 - RNA, 19 nt, Artificial Sequence
  Description of Artificial Sequence: Synthetic oligonucleotide
gggacuacacuuguuauua

SEQ ID NO: 673480 - RNA, 19 nt, Artificial Sequence
  Description of Artificial Sequence: Synthetic oligonucleotide
gguccaggcugauucacuc

SEQ ID NO: 673481 - RNA, 19 nt, Artificial Sequence
  Description of Artificial Sequence: Synthetic oligonucleotide
guaucuguggcuggcugga

SEQ ID NO: 673482 - RNA, 19 nt, Artificial Sequence
  Description of Artificial Sequence: Synthetic oligonucleotide
ggagagcuaagugugcuga

SEQ ID NO: 673483 - RNA, 19 nt, Artificial Sequence
  Description of Artificial Sequence: Synthetic oligonucleotide
gacgauuaagucauuucuu

SEQ ID NO: 673484 - RNA, 19 nt, Artificial Sequence
  Description of Artificial Sequence: Synthetic oligonucleotide
ccuuuacugaguacuauaa

SEQ ID NO: 673485 - RNA, 19 nt, Artificial Sequence
  Description of Artificial Sequence: Synthetic oligonucleotide
gcuacugcagucaguaaga

SEQ ID NO: 673486 - RNA, 19 nt, Artificial Sequence
  Description of Artificial Sequence: Synthetic oligonucleotide
cccaaauuuucccauaucu

SEQ ID NO: 673487 - RNA, 19 nt, Artificial Sequence
  Description of Artificial Sequence: Synthetic oligonucleotide
aagacacuacugagagaga

SEQ ID NO: 673488 - RNA, 19 nt, Artificial Sequence
  Description of Artificial Sequence: Synthetic oligonucleotide
cugcuaggucccaguagac

SEQ ID NO: 673489 - RNA, 19 nt, Artificial Sequence
  Description of Artificial Sequence: Synthetic oligonucleotide
aagccccagaguguacccu

SEQ ID NO: 673490 - RNA, 19 nt, Artificial Sequence
  Description of Artificial Sequence: Synthetic oligonucleotide
cauagaccacuaagaacaa

SEQ ID NO: 673491 - RNA, 19 nt, Artificial Sequence
  Description of Artificial Sequence: Synthetic oligonucleotide
auagaccacuaagaacaau

SEQ ID NO: 673492 - RNA, 19 nt, Artificial Sequence
  Description of Artificial Sequence: Synthetic oligonucleotide
gacguugugcagagcccgc

SEQ ID NO: 673493 - RNA, 19 nt, Artificial Sequence
  Description of Artificial Sequence: Synthetic oligonucleotide
gauucacuccaaagggugu

SEQ ID NO: 673494 - RNA, 19 nt, Artificial Sequence
  Description of Artificial Sequence: Synthetic oligonucleotide
gcuucgagggacauuguga

SEQ ID NO: 673495 - RNA, 19 nt, Artificial Sequence
  Description of Artificial Sequence: Synthetic oligonucleotide
caggaauuagaucaccauu

SEQ ID NO: 673496 - RNA, 19 nt, Artificial Sequence
  Description of Artificial Sequence: Synthetic oligonucleotide
gcauggaacauucuccagu

SEQ ID NO: 673497 - RNA, 19 nt, Artificial Sequence
  Description of Artificial Sequence: Synthetic oligonucleotide
cuuuacugaguacuauaau

SEQ ID NO: 673498 - RNA, 19 nt, Artificial Sequence
  Description of Artificial Sequence: Synthetic oligonucleotide
cuaucgucugcuuucuuuu

SEQ ID NO: 673499 - RNA, 19 nt, Artificial Sequence
  Description of Artificial Sequence: Synthetic oligonucleotide
agacaccaaugagggcuac

SEQ ID NO: 673500 - RNA, 19 nt, Artificial Sequence
  Description of Artificial Sequence: Synthetic oligonucleotide
gagugggauugguauugaa

SEQ ID NO: 673501 - RNA, 19 nt, Artificial Sequence
  Description of Artificial Sequence: Synthetic oligonucleotide
cacuucggccuaacccaag

SEQ ID NO: 673502 - RNA, 19 nt, Artificial Sequence
  Description of Artificial Sequence: Synthetic oligonucleotide
cacgccucggccccaaaga

SEQ ID NO: 673503 - RNA, 19 nt, Artificial Sequence
  Description of Artificial Sequence: Synthetic oligonucleotide
ccuaauucauuguugguau

SEQ ID NO: 673504 - RNA, 19 nt, Artificial Sequence
  Description of Artificial Sequence: Synthetic oligonucleotide
gccaauguaaaauggcaau

SEQ ID NO: 673505 - RNA, 19 nt, Artificial Sequence
  Description of Artificial Sequence: Synthetic oligonucleotide
cagucaguaagacaauguu

SEQ ID NO: 673506 - RNA, 19 nt, Artificial Sequence
  Description of Artificial Sequence: Synthetic oligonucleotide
gauuagauuuaggccugcu

SEQ ID NO: 673507 - RNA, 19 nt, Artificial Sequence
  Description of Artificial Sequence: Synthetic oligonucleotide
gaaugacaaucagcuggga

SEQ ID NO: 673508 - RNA, 19 nt, Artificial Sequence
  Description of Artificial Sequence: Synthetic oligonucleotide
gccgugacguugugcagag

SEQ ID NO: 673509 - RNA, 19 nt, Artificial Sequence
  Description of Artificial Sequence: Synthetic oligonucleotide
ggguguuaucuuacgagga

SEQ ID NO: 673510 - RNA, 19 nt, Artificial Sequence
  Description of Artificial Sequence: Synthetic oligonucleotide
aaaagacgauuaagucauu

SEQ ID NO: 673511 - RNA, 19 nt, Artificial Sequence
  Description of Artificial Sequence: Synthetic oligonucleotide
gguuuaaaauagggugcac

SEQ ID NO: 673512 - RNA, 19 nt, Artificial Sequence
  Description of Artificial Sequence: Synthetic oligonucleotide
ugaaaccgaugugcuuccu

SEQ ID NO: 673513 - RNA, 19 nt, Artificial Sequence
  Description of Artificial Sequence: Synthetic oligonucleotide
cauuauugcauggaacauu

SEQ ID NO: 673514 - RNA, 19 nt, Artificial Sequence
  Description of Artificial Sequence: Synthetic oligonucleotide
aauuggcacuucggccuaa

SEQ ID NO: 673515 - RNA, 19 nt, Artificial Sequence
  Description of Artificial Sequence: Synthetic oligonucleotide
acgaagagguccgucuguu

SEQ ID NO: 673516 - RNA, 19 nt, Artificial Sequence
  Description of Artificial Sequence: Synthetic oligonucleotide
gugcucaaggcaggaugcc

SEQ ID NO: 673517 - RNA, 19 nt, Artificial Sequence
  Description of Artificial Sequence: Synthetic oligonucleotide
ccgaugcacuuccucacag

SEQ ID NO: 673518 - RNA, 19 nt, Artificial Sequence
  Description of Artificial Sequence: Synthetic oligonucleotide
ggugcacucugaucugcca

SEQ ID NO: 673519 - RNA, 19 nt, Artificial Sequence
  Description of Artificial Sequence: Synthetic oligonucleotide
gaguguacccuugcugcua

SEQ ID NO: 673520 - RNA, 19 nt, Artificial Sequence
  Description of Artificial Sequence: Synthetic oligonucleotide
agguccaggcugauucacu

SEQ ID NO: 673521 - RNA, 19 nt, Artificial Sequence
  Description of Artificial Sequence: Synthetic oligonucleotide
auauaagguccaggcugau

SEQ ID NO: 673522 - RNA, 19 nt, Artificial Sequence
  Description of Artificial Sequence: Synthetic oligonucleotide
cucggccgugacguugugc

SEQ ID NO: 673523 - RNA, 19 nt, Artificial Sequence
  Description of Artificial Sequence: Synthetic oligonucleotide
ccuguuccggaucucauua

SEQ ID NO: 673524 - RNA, 19 nt, Artificial Sequence
  Description of Artificial Sequence: Synthetic oligonucleotide
cauuaaguauauggcacuu

SEQ ID NO: 673525 - RNA, 19 nt, Artificial Sequence
  Description of Artificial Sequence: Synthetic oligonucleotide
cgaggacaaucauuagaac

SEQ ID NO: 673526 - RNA, 19 nt, Artificial Sequence
  Description of Artificial Sequence: Synthetic oligonucleotide
ccaacgcucagcaccguga

SEQ ID NO: 673527 - RNA, 19 nt, Artificial Sequence
  Description of Artificial Sequence: Synthetic oligonucleotide
agcucggccgugacguugu

SEQ ID NO: 673528 - RNA, 19 nt, Artificial Sequence
  Description of Artificial Sequence: Synthetic oligonucleotide
ccuauugaguauggucaug

SEQ ID NO: 673529 - RNA, 19 nt, Artificial Sequence
  Description of Artificial Sequence: Synthetic oligonucleotide
cuucggccuaacccaagua

SEQ ID NO: 673530 - RNA, 19 nt, Artificial Sequence
  Description of Artificial Sequence: Synthetic oligonucleotide
gcagucaguaagacaaugu

SEQ ID NO: 673531 - RNA, 19 nt, Artificial Sequence
  Description of Artificial Sequence: Synthetic oligonucleotide
gcucgcauuauugcaugga

SEQ ID NO: 673532 - RNA, 19 nt, Artificial Sequence
  Description of Artificial Sequence: Synthetic oligonucleotide
gguccgucuguuugucgga

SEQ ID NO: 673533 - RNA, 19 nt, Artificial Sequence
  Description of Artificial Sequence: Synthetic oligonucleotide
gguguauccuuuacugagu

SEQ ID NO: 673534 - RNA, 19 nt, Artificial Sequence
  Description of Artificial Sequence: Synthetic oligonucleotide
gguauuagaggcagacaau

SEQ ID NO: 673535 - RNA, 19 nt, Artificial Sequence
  Description of Artificial Sequence: Synthetic oligonucleotide
cacuuccucacagcucgca

SEQ ID NO: 673536 - RNA, 19 nt, Artificial Sequence
  Description of Artificial Sequence: Synthetic oligonucleotide
gcgaauguggauuccucau

SEQ ID NO: 673537 - RNA, 19 nt, Artificial Sequence
  Description of Artificial Sequence: Synthetic oligonucleotide
gugguucgucuugaaaagu

SEQ ID NO: 673538 - RNA, 19 nt, Artificial Sequence
  Description of Artificial Sequence: Synthetic oligonucleotide
caacuguuguguacauaau

SEQ ID NO: 673539 - RNA, 19 nt, Artificial Sequence
  Description of Artificial Sequence: Synthetic oligonucleotide
caaccauggcaucuuugau

SEQ ID NO: 673540 - RNA, 19 nt, Artificial Sequence
  Description of Artificial Sequence: Synthetic oligonucleotide
ggccgugacguugugcaga

SEQ ID NO: 673541 - RNA, 19 nt, Artificial Sequence
  Description of Artificial Sequence: Synthetic oligonucleotide
gcaugcgaauguggauucc

SEQ ID NO: 673542 - RNA, 19 nt, Artificial Sequence
  Description of Artificial Sequence: Synthetic oligonucleotide
gccccaagagcagcggcgc

SEQ ID NO: 673543 - RNA, 19 nt, Artificial Sequence
  Description of Artificial Sequence: Synthetic oligonucleotide
cacuacugagagagaaguu

SEQ ID NO: 673544 - RNA, 19 nt, Artificial Sequence
  Description of Artificial Sequence: Synthetic oligonucleotide
cagcuccuaauucauuguu

SEQ ID NO: 673545 - RNA, 19 nt, Artificial Sequence
  Description of Artificial Sequence: Synthetic oligonucleotide
agagcucggccgugacguu

SEQ ID NO: 673546 - RNA, 19 nt, Artificial Sequence
  Description of Artificial Sequence: Synthetic oligonucleotide
gagcccgcgccggggcagg

SEQ ID NO: 673547 - RNA, 19 nt, Artificial Sequence
  Description of Artificial Sequence: Synthetic oligonucleotide
cccaacgcucagcaccgug

SEQ ID NO: 673548 - RNA, 19 nt, Artificial Sequence
  Description of Artificial Sequence: Synthetic oligonucleotide
ccagauggacggggaauac

SEQ ID NO: 673549 - RNA, 19 nt, Artificial Sequence
  Description of Artificial Sequence: Synthetic oligonucleotide
ccacgccucggccccaaag

SEQ ID NO: 673550 - RNA, 19 nt, Artificial Sequence
  Description of Artificial Sequence: Synthetic oligonucleotide
gcauuauugcauggaacau

SEQ ID NO: 673551 - RNA, 19 nt, Artificial Sequence
  Description of Artificial Sequence: Synthetic oligonucleotide
ccgugagccccaagagcag

SEQ ID NO: 673552 - RNA, 19 nt, Artificial Sequence
  Description of Artificial Sequence: Synthetic oligonucleotide
caccagggacuacacuugu

SEQ ID NO: 673553 - RNA, 19 nt, Artificial Sequence
  Description of Artificial Sequence: Synthetic oligonucleotide
cuguccuguuccggaucuc

SEQ ID NO: 673554 - RNA, 19 nt, Artificial Sequence
  Description of Artificial Sequence: Synthetic oligonucleotide
ccaauguaaaauggcaauu

SEQ ID NO: 673555 - RNA, 19 nt, Artificial Sequence
  Description of Artificial Sequence: Synthetic oligonucleotide
guggcaaccauggcaucuu

SEQ ID NO: 673556 - RNA, 19 nt, Artificial Sequence
  Description of Artificial Sequence: Synthetic oligonucleotide
cggggcaggcccaacgcuc

SEQ ID NO: 673557 - RNA, 19 nt, Artificial Sequence
  Description of Artificial Sequence: Synthetic oligonucleotide
cgucuguuugucggaguug

SEQ ID NO: 673558 - RNA, 19 nt, Artificial Sequence
  Description of Artificial Sequence: Synthetic oligonucleotide
cgcucagcaccgugagccc

SEQ ID NO: 673559 - RNA, 19 nt, Artificial Sequence
  Description of Artificial Sequence: Synthetic oligonucleotide
cgccggggcaggcccaacg

SEQ ID NO: 673560 - RNA, 19 nt, Artificial Sequence
  Description of Artificial Sequence: Synthetic oligonucleotide
cagcuucgagggacauugu

SEQ ID NO: 673561 - RNA, 19 nt, Artificial Sequence
  Description of Artificial Sequence: Synthetic oligonucleotide
cggaucucauuaaguauau

SEQ ID NO: 673562 - RNA, 19 nt, Artificial Sequence
  Description of Artificial Sequence: Synthetic oligonucleotide
cucuaucgucugcuuucuu

SEQ ID NO: 673563 - RNA, 19 nt, Artificial Sequence
  Description of Artificial Sequence: Synthetic oligonucleotide
ggccuaacccaaguacauu

SEQ ID NO: 673564 - RNA, 19 nt, Artificial Sequence
  Description of Artificial Sequence: Synthetic oligonucleotide
cggccuaacccaaguacau

SEQ ID NO: 673565 - RNA, 19 nt, Artificial Sequence
  Description of Artificial Sequence: Synthetic oligonucleotide
ccgugacguugugcagagc

SEQ ID NO: 673566 - RNA, 19 nt, Artificial Sequence
  Description of Artificial Sequence: Synthetic oligonucleotide
gcgccggggcaggcccaac

SEQ ID NO: 673567 - RNA, 19 nt, Artificial Sequence
  Description of Artificial Sequence: Synthetic oligonucleotide
aaugguauaggguaggcag

SEQ ID NO: 673568 - RNA, 19 nt, Artificial Sequence
  Description of Artificial Sequence: Synthetic oligonucleotide
uucauguacauuuuggugg

SEQ ID NO: 673569 - RNA, 19 nt, Artificial Sequence
  Description of Artificial Sequence: Synthetic oligonucleotide
aacgucagugugcauagcc

SEQ ID NO: 673570 - RNA, 19 nt, Artificial Sequence
  Description of Artificial Sequence: Synthetic oligonucleotide
auuugucucaccaucaccc

SEQ ID NO: 673571 - RNA, 19 nt, Artificial Sequence
  Description of Artificial Sequence: Synthetic oligonucleotide
cuugaaugaaaccagcuug

SEQ ID NO: 673572 - RNA, 19 nt, Artificial Sequence
  Description of Artificial Sequence: Synthetic oligonucleotide
auuagcauggcaaaacugg

SEQ ID NO: 673573 - RNA, 19 nt, Artificial Sequence
  Description of Artificial Sequence: Synthetic oligonucleotide
  modified_base (17)..(17): a, c, u, g, unknown or other
ucugaauugagccaagnua

SEQ ID NO: 673574 - RNA, 19 nt, Artificial Sequence
  Description of Artificial Sequence: Synthetic oligonucleotide
ugugcauagccuuugggag

SEQ ID NO: 673575 - RNA, 19 nt, Artificial Sequence
  Description of Artificial Sequence: Synthetic oligonucleotide
auuuccacgguggagacac

SEQ ID NO: 673576 - RNA, 19 nt, Artificial Sequence
  Description of Artificial Sequence: Synthetic oligonucleotide
agugcuagcaucuuggcau

SEQ ID NO: 673577 - RNA, 19 nt, Artificial Sequence
  Description of Artificial Sequence: Synthetic oligonucleotide
agcgggagcacguaaaggg

SEQ ID NO: 673578 - RNA, 19 nt, Artificial Sequence
  Description of Artificial Sequence: Synthetic oligonucleotide
aaaacuggggugagcagcc

SEQ ID NO: 673579 - RNA, 19 nt, Artificial Sequence
  Description of Artificial Sequence: Synthetic oligonucleotide
uguaucgcaguccauuagc

SEQ ID NO: 673580 - RNA, 19 nt, Artificial Sequence
  Description of Artificial Sequence: Synthetic oligonucleotide
  modified_base (16)..(16): a, c, u, g, unknown or other
cugaauugagccaagnuaa

SEQ ID NO: 673581 - RNA, 19 nt, Artificial Sequence
  Description of Artificial Sequence: Synthetic oligonucleotide
uacucgguagaacacacug

SEQ ID NO: 673582 - RNA, 19 nt, Artificial Sequence
  Description of Artificial Sequence: Synthetic oligonucleotide
acugcauugacugcggugg

SEQ ID NO: 673583 - RNA, 19 nt, Artificial Sequence
  Description of Artificial Sequence: Synthetic oligonucleotide
ucugcgagugaucucuggg

SEQ ID NO: 673584 - RNA, 19 nt, Artificial Sequence
  Description of Artificial Sequence: Synthetic oligonucleotide
ucacacggucguaauagcg

SEQ ID NO: 673585 - RNA, 19 nt, Artificial Sequence
  Description of Artificial Sequence: Synthetic oligonucleotide
gugcaaaguacuuguagcg

SEQ ID NO: 673586 - RNA, 19 nt, Artificial Sequence
  Description of Artificial Sequence: Synthetic oligonucleotide
ugucacacggucguaauag

SEQ ID NO: 673587 - RNA, 19 nt, Artificial Sequence
  Description of Artificial Sequence: Synthetic oligonucleotide
aaggagcucacgaacaguc

SEQ ID NO: 673588 - RNA, 19 nt, Artificial Sequence
  Description of Artificial Sequence: Synthetic oligonucleotide
cuagcauggccuuguaucg

SEQ ID NO: 673589 - RNA, 19 nt, Artificial Sequence
  Description of Artificial Sequence: Synthetic oligonucleotide
aaccgugcaaaguacuugu

SEQ ID NO: 673590 - RNA, 19 nt, Artificial Sequence
  Description of Artificial Sequence: Synthetic oligonucleotide
caagcuucagagaugcccc

SEQ ID NO: 673591 - RNA, 19 nt, Artificial Sequence
  Description of Artificial Sequence: Synthetic oligonucleotide
cucgguagaacacacuggc

SEQ ID NO: 673592 - RNA, 19 nt, Artificial Sequence
  Description of Artificial Sequence: Synthetic oligonucleotide
uccucaaaggagcucacga

SEQ ID NO: 673593 - RNA, 19 nt, Artificial Sequence
  Description of Artificial Sequence: Synthetic oligonucleotide
ugugguuccuaguaacagc

SEQ ID NO: 673594 - RNA, 19 nt, Artificial Sequence
  Description of Artificial Sequence: Synthetic oligonucleotide
guggccacgacgcauagcc

SEQ ID NO: 673595 - RNA, 19 nt, Artificial Sequence
  Description of Artificial Sequence: Synthetic oligonucleotide
aauaggcucuccguccugg

SEQ ID NO: 673596 - RNA, 19 nt, Artificial Sequence
  Description of Artificial Sequence: Synthetic oligonucleotide
acgacgcauagccuugucc

SEQ ID NO: 673597 - RNA, 19 nt, Artificial Sequence
  Description of Artificial Sequence: Synthetic oligonucleotide
ucauguacauuuugguggu

SEQ ID NO: 673598 - RNA, 19 nt, Artificial Sequence
  Description of Artificial Sequence: Synthetic oligonucleotide
uggauuuccacgguggaga

SEQ ID NO: 673599 - RNA, 19 nt, Artificial Sequence
  Description of Artificial Sequence: Synthetic oligonucleotide
uccuccacuggucugcgag

SEQ ID NO: 673600 - RNA, 19 nt, Artificial Sequence
  Description of Artificial Sequence: Synthetic oligonucleotide
cauuugcaggaucaagucc

SEQ ID NO: 673601 - RNA, 19 nt, Artificial Sequence
  Description of Artificial Sequence: Synthetic oligonucleotide
cucaaaggagcucacgaac

SEQ ID NO: 673602 - RNA, 19 nt, Artificial Sequence
  Description of Artificial Sequence: Synthetic oligonucleotide
ugcacgaccugcccgcugg

SEQ ID NO: 673603 - RNA, 19 nt, Artificial Sequence
  Description of Artificial Sequence: Synthetic oligonucleotide
cacguaaaggggcagggag

SEQ ID NO: 673604 - RNA, 19 nt, Artificial Sequence
  Description of Artificial Sequence: Synthetic oligonucleotide
aggaucaaguccuccacug

SEQ ID NO: 673605 - RNA, 19 nt, Artificial Sequence
  Description of Artificial Sequence: Synthetic oligonucleotide
ccuaguaacagccuaggag

SEQ ID NO: 673606 - RNA, 19 nt, Artificial Sequence
  Description of Artificial Sequence: Synthetic oligonucleotide
aaaccgugcaaaguacuug

SEQ ID NO: 673607 - RNA, 19 nt, Artificial Sequence
  Description of Artificial Sequence: Synthetic oligonucleotide
agugugcauagccuuuggg

SEQ ID NO: 673608 - RNA, 19 nt, Artificial Sequence
  Description of Artificial Sequence: Synthetic oligonucleotide
aacgagggccuccacugag

SEQ ID NO: 673609 - RNA, 19 nt, Artificial Sequence
  Description of Artificial Sequence: Synthetic oligonucleotide
uuguaucgcaguccauuag

SEQ ID NO: 673610 - RNA, 19 nt, Artificial Sequence
  Description of Artificial Sequence: Synthetic oligonucleotide
aauugcucaaaguccccaa

SEQ ID NO: 673611 - RNA, 19 nt, Artificial Sequence
  Description of Artificial Sequence: Synthetic oligonucleotide
cacagcacccaguagcacc

SEQ ID NO: 673612 - RNA, 19 nt, Artificial Sequence
  Description of Artificial Sequence: Synthetic oligonucleotide
ucauuugucucaccaucac

SEQ ID NO: 673613 - RNA, 19 nt, Artificial Sequence
  Description of Artificial Sequence: Synthetic oligonucleotide
caucgaacuggcaauagga

SEQ ID NO: 673614 - RNA, 19 nt, Artificial Sequence
  Description of Artificial Sequence: Synthetic oligonucleotide
uccauuagcauggcaaaac

SEQ ID NO: 673615 - RNA, 19 nt, Artificial Sequence
  Description of Artificial Sequence: Synthetic oligonucleotide
uuuccgaggugcuugcaga

SEQ ID NO: 673616 - RNA, 19 nt, Artificial Sequence
  Description of Artificial Sequence: Synthetic oligonucleotide
gguagaacacacuggcccg

SEQ ID NO: 673617 - RNA, 19 nt, Artificial Sequence
  Description of Artificial Sequence: Synthetic oligonucleotide
cauuugucucaccaucacc

SEQ ID NO: 673618 - RNA, 19 nt, Artificial Sequence
  Description of Artificial Sequence: Synthetic oligonucleotide
ugcaagcuccgcuucacug

SEQ ID NO: 673619 - RNA, 19 nt, Artificial Sequence
  Description of Artificial Sequence: Synthetic oligonucleotide
agguggacauaguccgucc

SEQ ID NO: 673620 - RNA, 19 nt, Artificial Sequence
  Description of Artificial Sequence: Synthetic oligonucleotide
aaaccagcuugcagaagac

SEQ ID NO: 673621 - RNA, 19 nt, Artificial Sequence
  Description of Artificial Sequence: Synthetic oligonucleotide
auaaccuucucgauguuga

SEQ ID NO: 673622 - RNA, 19 nt, Artificial Sequence
  Description of Artificial Sequence: Synthetic oligonucleotide
uuccuaguaacagccuagg

SEQ ID NO: 673623 - RNA, 19 nt, Artificial Sequence
  Description of Artificial Sequence: Synthetic oligonucleotide
auagcggggugccacgggg

SEQ ID NO: 673624 - RNA, 19 nt, Artificial Sequence
  Description of Artificial Sequence: Synthetic oligonucleotide
cuccucagcggcaacgagg

SEQ ID NO: 673625 - RNA, 19 nt, Artificial Sequence
  Description of Artificial Sequence: Synthetic oligonucleotide
ucgacggcccuucagcucu

SEQ ID NO: 673626 - RNA, 19 nt, Artificial Sequence
  Description of Artificial Sequence: Synthetic oligonucleotide
uacagccuauagcaguggc

SEQ ID NO: 673627 - RNA, 19 nt, Artificial Sequence
  Description of Artificial Sequence: Synthetic oligonucleotide
uggcaaugguauaggguag

SEQ ID NO: 673628 - RNA, 19 nt, Artificial Sequence
  Description of Artificial Sequence: Synthetic oligonucleotide
  modified_base (15)..(15): a, c, u, g, unknown or other
ugaauugagccaagnuaaa

SEQ ID NO: 673629 - RNA, 19 nt, Artificial Sequence
  Description of Artificial Sequence: Synthetic oligonucleotide
  modified_base (14)..(14): a, c, u, g, unknown or other
gaauugagccaagnuaaaa

SEQ ID NO: 673630 - RNA, 19 nt, Artificial Sequence
  Description of Artificial Sequence: Synthetic oligonucleotide
ggagacaccuuucauguac

SEQ ID NO: 673631 - RNA, 19 nt, Artificial Sequence
  Description of Artificial Sequence: Synthetic oligonucleotide
acagccuauagcaguggcc

SEQ ID NO: 673632 - RNA, 19 nt, Artificial Sequence
  Description of Artificial Sequence: Synthetic oligonucleotide
gugugcauagccuuuggga

SEQ ID NO: 673633 - RNA, 19 nt, Artificial Sequence
  Description of Artificial Sequence: Synthetic oligonucleotide
ggaguggccagccuacucg

SEQ ID NO: 673634 - RNA, 19 nt, Artificial Sequence
  Description of Artificial Sequence: Synthetic oligonucleotide
cucagcggcaacgagggcc

SEQ ID NO: 673635 - RNA, 19 nt, Artificial Sequence
  Description of Artificial Sequence: Synthetic oligonucleotide
ugacacggaaggaggacac

SEQ ID NO: 673636 - RNA, 19 nt, Artificial Sequence
  Description of Artificial Sequence: Synthetic oligonucleotide
uggucugcgagugaucucu

SEQ ID NO: 673637 - RNA, 19 nt, Artificial Sequence
  Description of Artificial Sequence: Synthetic oligonucleotide
ugagggcuuucauuugcag

SEQ ID NO: 673638 - RNA, 19 nt, Artificial Sequence
  Description of Artificial Sequence: Synthetic oligonucleotide
uguacauuuugguggucuc

SEQ ID NO: 673639 - RNA, 19 nt, Artificial Sequence
  Description of Artificial Sequence: Synthetic oligonucleotide
gaagaccugucccuccagc

SEQ ID NO: 673640 - RNA, 19 nt, Artificial Sequence
  Description of Artificial Sequence: Synthetic oligonucleotide
gcuuucaauaggcucuccg

SEQ ID NO: 673641 - RNA, 19 nt, Artificial Sequence
  Description of Artificial Sequence: Synthetic oligonucleotide
gaggcgucggaucucuagc
